United States Patent Application Publication US 2018/0305689 A1 - sequence listing, part 12

SEQ ID NO: 113005 - RNA, 19 nt, Artificial Sequence
  Description of Artificial Sequence: Synthetic oligonucleotide
  Antisense strand to SEQ ID NO: 113004
uuuccaaccacuuauuggu

SEQ ID NO: 113006 - RNA, 19 nt, Artificial Sequence
  Description of Artificial Sequence: Synthetic oligonucleotide
  Sense strand starting at position 242 of SEQ ID NO: 1439
ccaauaagugguuggaaau

SEQ ID NO: 113007 - RNA, 19 nt, Artificial Sequence
  Description of Artificial Sequence: Synthetic oligonucleotide
  Antisense strand to SEQ ID NO: 113006
auuuccaaccacuuauugg

SEQ ID NO: 113008 - RNA, 19 nt, Artificial Sequence
  Description of Artificial Sequence: Synthetic oligonucleotide
  Sense strand starting at position 243 of SEQ ID NO: 1439
caauaagugguuggaaaug

SEQ ID NO: 113009 - RNA, 19 nt, Artificial Sequence
  Description of Artificial Sequence: Synthetic oligonucleotide
  Antisense strand to SEQ ID NO: 113008
cauuuccaaccacuuauug

SEQ ID NO: 113010 - RNA, 19 nt, Artificial Sequence
  Description of Artificial Sequence: Synthetic oligonucleotide
  Sense strand starting at position 248 of SEQ ID NO: 1439
agugguuggaaaugcuaaa

SEQ ID NO: 113011 - RNA, 19 nt, Artificial Sequence
  Description of Artificial Sequence: Synthetic oligonucleotide
  Antisense strand to SEQ ID NO: 113010
uuuagcauuuccaaccacu

SEQ ID NO: 113012 - RNA, 19 nt, Artificial Sequence
  Description of Artificial Sequence: Synthetic oligonucleotide
  Sense strand starting at position 317 of SEQ ID NO: 1439
cgcucuuugauggaacaga

SEQ ID NO: 113013 - RNA, 19 nt, Artificial Sequence
  Description of Artificial Sequence: Synthetic oligonucleotide
  Antisense strand to SEQ ID NO: 113012
ucuguuccaucaaagagcg

SEQ ID NO: 113014 - RNA, 19 nt, Artificial Sequence
  Description of Artificial Sequence: Synthetic oligonucleotide
  Sense strand starting at position 353 of SEQ ID NO: 1439
uucugagcuuugcuuuaaa

SEQ ID NO: 113015 - RNA, 19 nt, Artificial Sequence
  Description of Artificial Sequence: Synthetic oligonucleotide
  Antisense strand to SEQ ID NO: 113014
uuuaaagcaaagcucagaa

SEQ ID NO: 113016 - RNA, 19 nt, Artificial Sequence
  Description of Artificial Sequence: Synthetic oligonucleotide
  Sense strand starting at position 422 of SEQ ID NO: 1439
aauacauuagagugaguug

SEQ ID NO: 113017 - RNA, 19 nt, Artificial Sequence
  Description of Artificial Sequence: Synthetic oligonucleotide
  Antisense strand to SEQ ID NO: 113016
caacucacucuaauguauu

SEQ ID NO: 113018 - RNA, 19 nt, Artificial Sequence
  Description of Artificial Sequence: Synthetic oligonucleotide
  Sense strand starting at position 427 of SEQ ID NO: 1439
auuagagugaguuggguuu

SEQ ID NO: 113019 - RNA, 19 nt, Artificial Sequence
  Description of Artificial Sequence: Synthetic oligonucleotide
  Antisense strand to SEQ ID NO: 113018
aaacccaacucacucuaau

SEQ ID NO: 113020 - RNA, 19 nt, Artificial Sequence
  Description of Artificial Sequence: Synthetic oligonucleotide
  Sense strand starting at position 501 of SEQ ID NO: 1439
ggauucacaugugugcaga

SEQ ID NO: 113021 - RNA, 19 nt, Artificial Sequence
  Description of Artificial Sequence: Synthetic oligonucleotide
  Antisense strand to SEQ ID NO: 113020
ucugcacacaugugaaucc

SEQ ID NO: 113022 - RNA, 19 nt, Artificial Sequence
  Description of Artificial Sequence: Synthetic oligonucleotide
  Sense strand starting at position 514 of SEQ ID NO: 1439
ugcagacucccugaaacau

SEQ ID NO: 113023 - RNA, 19 nt, Artificial Sequence
  Description of Artificial Sequence: Synthetic oligonucleotide
  Antisense strand to SEQ ID NO: 113022
auguuucagggagucugca

SEQ ID NO: 113024 - RNA, 19 nt, Artificial Sequence
  Description of Artificial Sequence: Synthetic oligonucleotide
  Sense strand starting at position 579 of SEQ ID NO: 1439
gguccagacuccuuaacau

SEQ ID NO: 113025 - RNA, 19 nt, Artificial Sequence
  Description of Artificial Sequence: Synthetic oligonucleotide
  Antisense strand to SEQ ID NO: 113024
auguuaaggagucuggacc

SEQ ID NO: 113026 - RNA, 19 nt, Artificial Sequence
  Description of Artificial Sequence: Synthetic oligonucleotide
  Sense strand starting at position 704 of SEQ ID NO: 1439
gagacaucugcaugacuuu

SEQ ID NO: 113027 - RNA, 19 nt, Artificial Sequence
  Description of Artificial Sequence: Synthetic oligonucleotide
  Antisense strand to SEQ ID NO: 113026
aaagucaugcagaugucuc

SEQ ID NO: 113028 - RNA, 19 nt, Artificial Sequence
  Description of Artificial Sequence: Synthetic oligonucleotide
  Sense strand starting at position 768 of SEQ ID NO: 1439
cuuuaagaucaggauacgu

SEQ ID NO: 113029 - RNA, 19 nt, Artificial Sequence
  Description of Artificial Sequence: Synthetic oligonucleotide
  Antisense strand to SEQ ID NO: 113028
acguauccugaucuuaaag

SEQ ID NO: 113030 - RNA, 19 nt, Artificial Sequence
  Description of Artificial Sequence: Synthetic oligonucleotide
  Sense strand starting at position 811 of SEQ ID NO: 1439
gugugaugucacuacucua

SEQ ID NO: 113031 - RNA, 19 nt, Artificial Sequence
  Description of Artificial Sequence: Synthetic oligonucleotide
  Antisense strand to SEQ ID NO: 113030
uagaguagugacaucacac

SEQ ID NO: 113032 - RNA, 19 nt, Artificial Sequence
  Description of Artificial Sequence: Synthetic oligonucleotide
  Sense strand starting at position 940 of SEQ ID NO: 1439
agagcuuggaggugcuaau

SEQ ID NO: 113033 - RNA, 19 nt, Artificial Sequence
  Description of Artificial Sequence: Synthetic oligonucleotide
  Antisense strand to SEQ ID NO: 113032
auuagcaccuccaagcucu

SEQ ID NO: 113034 - RNA, 19 nt, Artificial Sequence
  Description of Artificial Sequence: Synthetic oligonucleotide
  Sense strand starting at position 947 of SEQ ID NO: 1439
ggaggugcuaauugaauga

SEQ ID NO: 113035 - RNA, 19 nt, Artificial Sequence
  Description of Artificial Sequence: Synthetic oligonucleotide
  Antisense strand to SEQ ID NO: 113034
ucauucaauuagcaccucc

SEQ ID NO: 113036 - RNA, 19 nt, Artificial Sequence
  Description of Artificial Sequence: Synthetic oligonucleotide
  Sense strand starting at position 954 of SEQ ID NO: 1439
cuaauugaaugauugcuga

SEQ ID NO: 113037 - RNA, 19 nt, Artificial Sequence
  Description of Artificial Sequence: Synthetic oligonucleotide
  Antisense strand to SEQ ID NO: 113036
ucagcaaucauucaauuag

SEQ ID NO: 113038 - RNA, 19 nt, Artificial Sequence
  Description of Artificial Sequence: Synthetic oligonucleotide
  Sense strand starting at position 1010 of SEQ ID NO: 1439
gcagcaaauugcuuuaaga

SEQ ID NO: 113039 - RNA, 19 nt, Artificial Sequence
  Description of Artificial Sequence: Synthetic oligonucleotide
  Antisense strand to SEQ ID NO: 113038
ucuuaaagcaauuugcugc

SEQ ID NO: 113040 - RNA, 19 nt, Artificial Sequence
  Description of Artificial Sequence: Synthetic oligonucleotide
  Sense strand starting at position 1012 of SEQ ID NO: 1439
agcaaauugcuuuaagauc

SEQ ID NO: 113041 - RNA, 19 nt, Artificial Sequence
  Description of Artificial Sequence: Synthetic oligonucleotide
  Antisense strand to SEQ ID NO: 113040
gaucuuaaagcaauuugcu

SEQ ID NO: 113042 - RNA, 19 nt, Artificial Sequence
  Description of Artificial Sequence: Synthetic oligonucleotide
  Sense strand starting at position 1033 of SEQ ID NO: 1439
gcuggagcucuuuggagga

SEQ ID NO: 113043 - RNA, 19 nt, Artificial Sequence
  Description of Artificial Sequence: Synthetic oligonucleotide
  Antisense strand to SEQ ID NO: 113042
uccuccaaagagcuccagc

SEQ ID NO: 113044 - RNA, 19 nt, Artificial Sequence
  Description of Artificial Sequence: Synthetic oligonucleotide
  Sense strand starting at position 1092 of SEQ ID NO: 1439
cucugagaucugggaaguu

SEQ ID NO: 113045 - RNA, 19 nt, Artificial Sequence
  Description of Artificial Sequence: Synthetic oligonucleotide
  Antisense strand to SEQ ID NO: 113044
aacuucccagaucucagag

SEQ ID NO: 113046 - RNA, 19 nt, Artificial Sequence
  Description of Artificial Sequence: Synthetic oligonucleotide
  Sense strand starting at position 1786 of SEQ ID NO: 1439
gucccuucccaagagacuu

SEQ ID NO: 113047 - RNA, 19 nt, Artificial Sequence
  Description of Artificial Sequence: Synthetic oligonucleotide
  Antisense strand to SEQ ID NO: 113046
aagucucuugggaagggac

SEQ ID NO: 113048 - RNA, 19 nt, Artificial Sequence
  Description of Artificial Sequence: Synthetic oligonucleotide
  Sense strand starting at position 1887 of SEQ ID NO: 1439
cgcgagguugucguagaaa

SEQ ID NO: 113049 - RNA, 19 nt, Artificial Sequence
  Description of Artificial Sequence: Synthetic oligonucleotide
  Antisense strand to SEQ ID NO: 113048
uuucuacgacaaccucgcg

SEQ ID NO: 113050 - RNA, 19 nt, Artificial Sequence
  Description of Artificial Sequence: Synthetic oligonucleotide
  Sense strand starting at position 2475 of SEQ ID NO: 1439
gcccaucuuuccuuuagga

SEQ ID NO: 113051 - RNA, 19 nt, Artificial Sequence
  Description of Artificial Sequence: Synthetic oligonucleotide
  Antisense strand to SEQ ID NO: 113050
uccuaaaggaaagaugggc

SEQ ID NO: 113052 - RNA, 19 nt, Artificial Sequence
  Description of Artificial Sequence: Synthetic oligonucleotide
  Sense strand starting at position 2904 of SEQ ID NO: 1439
ccuggaauuccaggguguu

SEQ ID NO: 113053 - RNA, 19 nt, Artificial Sequence
  Description of Artificial Sequence: Synthetic oligonucleotide
  Antisense strand to SEQ ID NO: 113052
aacacccuggaauuccagg

SEQ ID NO: 113054 - RNA, 19 nt, Artificial Sequence
  Description of Artificial Sequence: Synthetic oligonucleotide
  Sense strand starting at position 2932 of SEQ ID NO: 1439
gaugcagagcucuguacua

SEQ ID NO: 113055 - RNA, 19 nt, Artificial Sequence
  Description of Artificial Sequence: Synthetic oligonucleotide
  Antisense strand to SEQ ID NO: 113054
uaguacagagcucugcauc

SEQ ID NO: 113056 - RNA, 19 nt, Artificial Sequence
  Description of Artificial Sequence: Synthetic oligonucleotide
  Sense strand starting at position 3221 of SEQ ID NO: 1439
uuacuucuagaagauuguu

SEQ ID NO: 113057 - RNA, 19 nt, Artificial Sequence
  Description of Artificial Sequence: Synthetic oligonucleotide
  Antisense strand to SEQ ID NO: 113056
aacaaucuucuagaaguaa

SEQ ID NO: 113058 - RNA, 19 nt, Artificial Sequence
  Description of Artificial Sequence: Synthetic oligonucleotide
  Sense strand starting at position 3227 of SEQ ID NO: 1439
cuagaagauuguuuccaga

SEQ ID NO: 113059 - RNA, 19 nt, Artificial Sequence
  Description of Artificial Sequence: Synthetic oligonucleotide
  Antisense strand to SEQ ID NO: 113058
ucuggaaacaaucuucuag

SEQ ID NO: 113060 - RNA, 19 nt, Artificial Sequence
  Description of Artificial Sequence: Synthetic oligonucleotide
  Sense strand starting at position 3270 of SEQ ID NO: 1439
cugccuguccuuuggaaau

SEQ ID NO: 113061 - RNA, 19 nt, Artificial Sequence
  Description of Artificial Sequence: Synthetic oligonucleotide
  Antisense strand to SEQ ID NO: 113060
auuuccaaaggacaggcag

SEQ ID NO: 113062 - RNA, 19 nt, Artificial Sequence
  Description of Artificial Sequence: Synthetic oligonucleotide
  Sense strand starting at position 3276 of SEQ ID NO: 1439
guccuuuggaaaugugacu

SEQ ID NO: 113063 - RNA, 19 nt, Artificial Sequence
  Description of Artificial Sequence: Synthetic oligonucleotide
  Antisense strand to SEQ ID NO: 113062
agucacauuuccaaaggac

SEQ ID NO: 113064 - RNA, 19 nt, Artificial Sequence
  Description of Artificial Sequence: Synthetic oligonucleotide
  Sense strand starting at position 3444 of SEQ ID NO: 1439
gccagcuacuauguaaaua

SEQ ID NO: 113065 - RNA, 19 nt, Artificial Sequence
  Description of Artificial Sequence: Synthetic oligonucleotide
  Antisense strand to SEQ ID NO: 113064
uauuuacauaguagcuggc

SEQ ID NO: 113066 - RNA, 19 nt, Artificial Sequence
  Description of Artificial Sequence: Synthetic oligonucleotide
  Sense strand starting at position 3455 of SEQ ID NO: 1439
uguaaauaagucuggacua

SEQ ID NO: 113067 - RNA, 19 nt, Artificial Sequence
  Description of Artificial Sequence: Synthetic oligonucleotide
  Antisense strand to SEQ ID NO: 113066
uaguccagacuuauuuaca

SEQ ID NO: 113068 - RNA, 19 nt, Artificial Sequence
  Description of Artificial Sequence: Synthetic oligonucleotide
  Sense strand starting at position 3540 of SEQ ID NO: 1439
ggugacuauaggcacaauu

SEQ ID NO: 113069 - RNA, 19 nt, Artificial Sequence
  Description of Artificial Sequence: Synthetic oligonucleotide
  Antisense strand to SEQ ID NO: 113068
aauugugccuauagucacc

SEQ ID NO: 113070 - RNA, 19 nt, Artificial Sequence
  Description of Artificial Sequence: Synthetic oligonucleotide
  Sense strand starting at position 3785 of SEQ ID NO: 1439
ggucaauuauucucaggug

SEQ ID NO: 113071 - RNA, 19 nt, Artificial Sequence
  Description of Artificial Sequence: Synthetic oligonucleotide
  Antisense strand to SEQ ID NO: 113070
caccugagaauaauugacc

SEQ ID NO: 113072 - RNA, 19 nt, Artificial Sequence
  Description of Artificial Sequence: Synthetic oligonucleotide
  Sense strand starting at position 3921 of SEQ ID NO: 1439
cugugugauuggcuugaaa

SEQ ID NO: 113073 - RNA, 19 nt, Artificial Sequence
  Description of Artificial Sequence: Synthetic oligonucleotide
  Antisense strand to SEQ ID NO: 113072
uuucaagccaaucacacag

SEQ ID NO: 113074 - RNA, 19 nt, Artificial Sequence
  Description of Artificial Sequence: Synthetic oligonucleotide
  Sense strand starting at position 3956 of SEQ ID NO: 1439
gcagauuugucuuucucag

SEQ ID NO: 113075 - RNA, 19 nt, Artificial Sequence
  Description of Artificial Sequence: Synthetic oligonucleotide
  Antisense strand to SEQ ID NO: 113074
cugagaaagacaaaucugc

SEQ ID NO: 113076 - RNA, 19 nt, Artificial Sequence
  Description of Artificial Sequence: Synthetic oligonucleotide
  Sense strand starting at position 3720 of SEQ ID NO: 1441
gcagaagcucagugaauca

SEQ ID NO: 113077 - RNA, 19 nt, Artificial Sequence
  Description of Artificial Sequence: Synthetic oligonucleotide
  Antisense strand to SEQ ID NO: 113076
ugauucacugagcuucugc

SEQ ID NO: 113078 - RNA, 19 nt, Artificial Sequence
  Description of Artificial Sequence: Synthetic oligonucleotide
  Sense strand starting at position 3719 of SEQ ID NO: 1441
ugcagaagcucagugaauc

SEQ ID NO: 113079 - RNA, 19 nt, Artificial Sequence
  Description of Artificial Sequence: Synthetic oligonucleotide
  Antisense strand to SEQ ID NO: 113078
gauucacugagcuucugca

SEQ ID NO: 113080 - RNA, 19 nt, Artificial Sequence
  Description of Artificial Sequence: Synthetic oligonucleotide
  Sense strand starting at position 3625 of SEQ ID NO: 1441
augggaaccucuccaguua

SEQ ID NO: 113081 - RNA, 19 nt, Artificial Sequence
  Description of Artificial Sequence: Synthetic oligonucleotide
  Antisense strand to SEQ ID NO: 113080
uaacuggagagguucccau

SEQ ID NO: 113082 - RNA, 19 nt, Artificial Sequence
  Description of Artificial Sequence: Synthetic oligonucleotide
  Sense strand starting at position 3614 of SEQ ID NO: 1441
gugauauguaaaugggaac

SEQ ID NO: 113083 - RNA, 19 nt, Artificial Sequence
  Description of Artificial Sequence: Synthetic oligonucleotide
  Antisense strand to SEQ ID NO: 113082
guucccauuuacauaucac

SEQ ID NO: 113084 - RNA, 19 nt, Artificial Sequence
  Description of Artificial Sequence: Synthetic oligonucleotide
  Sense strand starting at position 3608 of SEQ ID NO: 1441
guaagugugauauguaaau

SEQ ID NO: 113085 - RNA, 19 nt, Artificial Sequence
  Description of Artificial Sequence: Synthetic oligonucleotide
  Antisense strand to SEQ ID NO: 113084
auuuacauaucacacuuac

SEQ ID NO: 113086 - RNA, 19 nt, Artificial Sequence
  Description of Artificial Sequence: Synthetic oligonucleotide
  Sense strand starting at position 3582 of SEQ ID NO: 1441
uuccuuugacuaugaggca

SEQ ID NO: 113087 - RNA, 19 nt, Artificial Sequence
  Description of Artificial Sequence: Synthetic oligonucleotide
  Antisense strand to SEQ ID NO: 113086
ugccucauagucaaaggaa

SEQ ID NO: 113088 - RNA, 19 nt, Artificial Sequence
  Description of Artificial Sequence: Synthetic oligonucleotide
  Sense strand starting at position 3576 of SEQ ID NO: 1441
ccaggauuccuuugacuau

SEQ ID NO: 113089 - RNA, 19 nt, Artificial Sequence
  Description of Artificial Sequence: Synthetic oligonucleotide
  Antisense strand to SEQ ID NO: 113088
auagucaaaggaauccugg

SEQ ID NO: 113090 - RNA, 19 nt, Artificial Sequence
  Description of Artificial Sequence: Synthetic oligonucleotide
  Sense strand starting at position 3466 of SEQ ID NO: 1441
auaccaagaucuuugugau

SEQ ID NO: 113091 - RNA, 19 nt, Artificial Sequence
  Description of Artificial Sequence: Synthetic oligonucleotide
  Antisense strand to SEQ ID NO: 113090
aucacaaagaucuugguau

SEQ ID NO: 113092 - RNA, 19 nt, Artificial Sequence
  Description of Artificial Sequence: Synthetic oligonucleotide
  Sense strand starting at position 3402 of SEQ ID NO: 1441
aaggcccuucuguaguaaa

SEQ ID NO: 113093 - RNA, 19 nt, Artificial Sequence
  Description of Artificial Sequence: Synthetic oligonucleotide
  Antisense strand to SEQ ID NO: 113092
uuuacuacagaagggccuu

SEQ ID NO: 113094 - RNA, 19 nt, Artificial Sequence
  Description of Artificial Sequence: Synthetic oligonucleotide
  Sense strand starting at position 3384 of SEQ ID NO: 1441
ugcuuuaucuggucauuua

SEQ ID NO: 113095 - RNA, 19 nt, Artificial Sequence
  Description of Artificial Sequence: Synthetic oligonucleotide
  Antisense strand to SEQ ID NO: 113094
uaaaugaccagauaaagca

SEQ ID NO: 113096 - RNA, 19 nt, Artificial Sequence
  Description of Artificial Sequence: Synthetic oligonucleotide
  Sense strand starting at position 3225 of SEQ ID NO: 1441
agcccuuugcaauaggaua

SEQ ID NO: 113097 - RNA, 19 nt, Artificial Sequence
  Description of Artificial Sequence: Synthetic oligonucleotide
  Antisense strand to SEQ ID NO: 113096
uauccuauugcaaagggcu

SEQ ID NO: 113098 - RNA, 19 nt, Artificial Sequence
  Description of Artificial Sequence: Synthetic oligonucleotide
  Sense strand starting at position 3220 of SEQ ID NO: 1441
augggagcccuuugcaaua

SEQ ID NO: 113099 - RNA, 19 nt, Artificial Sequence
  Description of Artificial Sequence: Synthetic oligonucleotide
  Antisense strand to SEQ ID NO: 113098
uauugcaaagggcucccau

SEQ ID NO: 113100 - RNA, 19 nt, Artificial Sequence
  Description of Artificial Sequence: Synthetic oligonucleotide
  Sense strand starting at position 3164 of SEQ ID NO: 1441
agauguuacucaccaccua

SEQ ID NO: 113101 - RNA, 19 nt, Artificial Sequence
  Description of Artificial Sequence: Synthetic oligonucleotide
  Antisense strand to SEQ ID NO: 113100
uagguggugaguaacaucu

SEQ ID NO: 113102 - RNA, 19 nt, Artificial Sequence
  Description of Artificial Sequence: Synthetic oligonucleotide
  Sense strand starting at position 3074 of SEQ ID NO: 1441
uaccaaggguucuuagaca

SEQ ID NO: 113103 - RNA, 19 nt, Artificial Sequence
  Description of Artificial Sequence: Synthetic oligonucleotide
  Antisense strand to SEQ ID NO: 113102
ugucuaagaacccuuggua

SEQ ID NO: 113104 - RNA, 19 nt, Artificial Sequence
  Description of Artificial Sequence: Synthetic oligonucleotide
  Sense strand starting at position 2977 of SEQ ID NO: 1441
agugcaggaaucugggauu

SEQ ID NO: 113105 - RNA, 19 nt, Artificial Sequence
  Description of Artificial Sequence: Synthetic oligonucleotide
  Antisense strand to SEQ ID NO: 113104
aaucccagauuccugcacu

SEQ ID NO: 113106 - RNA, 19 nt, Artificial Sequence
  Description of Artificial Sequence: Synthetic oligonucleotide
  Sense strand starting at position 2967 of SEQ ID NO: 1441
ggaaucucugagugcagga

SEQ ID NO: 113107 - RNA, 19 nt, Artificial Sequence
  Description of Artificial Sequence: Synthetic oligonucleotide
  Antisense strand to SEQ ID NO: 113106
uccugcacucagagauucc

SEQ ID NO: 113108 - RNA, 19 nt, Artificial Sequence
  Description of Artificial Sequence: Synthetic oligonucleotide
  Sense strand starting at position 2838 of SEQ ID NO: 1441
gggagaaguuuguugaguu

SEQ ID NO: 113109 - RNA, 19 nt, Artificial Sequence
  Description of Artificial Sequence: Synthetic oligonucleotide
  Antisense strand to SEQ ID NO: 113108
aacucaacaaacuucuccc

SEQ ID NO: 113110 - RNA, 19 nt, Artificial Sequence
  Description of Artificial Sequence: Synthetic oligonucleotide
  Sense strand starting at position 2770 of SEQ ID NO: 1441
gcaggaggcugaguaauug

SEQ ID NO: 113111 - RNA, 19 nt, Artificial Sequence
  Description of Artificial Sequence: Synthetic oligonucleotide
  Antisense strand to SEQ ID NO: 113110
caauuacucagccuccugc

SEQ ID NO: 113112 - RNA, 19 nt, Artificial Sequence
  Description of Artificial Sequence: Synthetic oligonucleotide
  Sense strand starting at position 2750 of SEQ ID NO: 1441
cuaugugucccacaauuaa

SEQ ID NO: 113113 - RNA, 19 nt, Artificial Sequence
  Description of Artificial Sequence: Synthetic oligonucleotide
  Antisense strand to SEQ ID NO: 113112
uuaauugugggacacauag

SEQ ID NO: 113114 - RNA, 19 nt, Artificial Sequence
  Description of Artificial Sequence: Synthetic oligonucleotide
  Sense strand starting at position 2739 of SEQ ID NO: 1441
acacuuagucacuaugugu

SEQ ID NO: 113115 - RNA, 19 nt, Artificial Sequence
  Description of Artificial Sequence: Synthetic oligonucleotide
  Antisense strand to SEQ ID NO: 113114
acacauagugacuaagugu

SEQ ID NO: 113116 - RNA, 19 nt, Artificial Sequence
  Description of Artificial Sequence: Synthetic oligonucleotide
  Sense strand starting at position 2735 of SEQ ID NO: 1441
gugaacacuuagucacuau

SEQ ID NO: 113117 - RNA, 19 nt, Artificial Sequence
  Description of Artificial Sequence: Synthetic oligonucleotide
  Antisense strand to SEQ ID NO: 113116
auagugacuaaguguucac

SEQ ID NO: 113118 - RNA, 19 nt, Artificial Sequence
  Description of Artificial Sequence: Synthetic oligonucleotide
  Sense strand starting at position 2734 of SEQ ID NO: 1441
ugugaacacuuagucacua

SEQ ID NO: 113119 - RNA, 19 nt, Artificial Sequence
  Description of Artificial Sequence: Synthetic oligonucleotide
  Antisense strand to SEQ ID NO: 113118
uagugacuaaguguucaca

SEQ ID NO: 113120 - RNA, 19 nt, Artificial Sequence
  Description of Artificial Sequence: Synthetic oligonucleotide
  Sense strand starting at position 2680 of SEQ ID NO: 1441
auguuuggucaaggcaaag

SEQ ID NO: 113121 - RNA, 19 nt, Artificial Sequence
  Description of Artificial Sequence: Synthetic oligonucleotide
  Antisense strand to SEQ ID NO: 113120
cuuugccuugaccaaacau

SEQ ID NO: 113122 - RNA, 19 nt, Artificial Sequence
  Description of Artificial Sequence: Synthetic oligonucleotide
  Sense strand starting at position 2673 of SEQ ID NO: 1441
cugacucauguuuggucaa

SEQ ID NO: 113123 - RNA, 19 nt, Artificial Sequence
  Description of Artificial Sequence: Synthetic oligonucleotide
  Antisense strand to SEQ ID NO: 113122
uugaccaaacaugagucag

SEQ ID NO: 113124 - RNA, 19 nt, Artificial Sequence
  Description of Artificial Sequence: Synthetic oligonucleotide
  Sense strand starting at position 2665 of SEQ ID NO: 1441
agagaagccugacucaugu

SEQ ID NO: 113125 - RNA, 19 nt, Artificial Sequence
  Description of Artificial Sequence: Synthetic oligonucleotide
  Antisense strand to SEQ ID NO: 113124
acaugagucaggcuucucu

SEQ ID NO: 113126 - RNA, 19 nt, Artificial Sequence
  Description of Artificial Sequence: Synthetic oligonucleotide
  Sense strand starting at position 2567 of SEQ ID NO: 1441
guccaagaauuuggaagau

SEQ ID NO: 113127 - RNA, 19 nt, Artificial Sequence
  Description of Artificial Sequence: Synthetic oligonucleotide
  Antisense strand to SEQ ID NO: 113126
aucuuccaaauucuuggac

SEQ ID NO: 113128 - RNA, 19 nt, Artificial Sequence
  Description of Artificial Sequence: Synthetic oligonucleotide
  Sense strand starting at position 2558 of SEQ ID NO: 1441
gucucugugguccaagaau

SEQ ID NO: 113129 - RNA, 19 nt, Artificial Sequence
  Description of Artificial Sequence: Synthetic oligonucleotide
  Antisense strand to SEQ ID NO: 113128
auucuuggaccacagagac

SEQ ID NO: 113130 - RNA, 19 nt, Artificial Sequence
  Description of Artificial Sequence: Synthetic oligonucleotide
  Sense strand starting at position 2548 of SEQ ID NO: 1441
caagaaaugugucucugug

SEQ ID NO: 113131 - RNA, 19 nt, Artificial Sequence
  Description of Artificial Sequence: Synthetic oligonucleotide
  Antisense strand to SEQ ID NO: 113130
cacagagacacauuucuug

SEQ ID NO: 113132 - RNA, 19 nt, Artificial Sequence
  Description of Artificial Sequence: Synthetic oligonucleotide
  Sense strand starting at position 2532 of SEQ ID NO: 1441
gacccucuugguugaacaa

SEQ ID NO: 113133 - RNA, 19 nt, Artificial Sequence
  Description of Artificial Sequence: Synthetic oligonucleotide
  Antisense strand to SEQ ID NO: 113132
uuguucaaccaagaggguc

SEQ ID NO: 113134 - RNA, 19 nt, Artificial Sequence
  Description of Artificial Sequence: Synthetic oligonucleotide
  Sense strand starting at position 2366 of SEQ ID NO: 1441
agacuuccauuagaaagaa

SEQ ID NO: 113135 - RNA, 19 nt, Artificial Sequence
  Description of Artificial Sequence: Synthetic oligonucleotide
  Antisense strand to SEQ ID NO: 113134
uucuuucuaauggaagucu

SEQ ID NO: 113136 - RNA, 19 nt, Artificial Sequence
  Description of Artificial Sequence: Synthetic oligonucleotide
  Sense strand starting at position 2335 of SEQ ID NO: 1441
agaaacaaauccgaauuua

SEQ ID NO: 113137 - RNA, 19 nt, Artificial Sequence
  Description of Artificial Sequence: Synthetic oligonucleotide
  Antisense strand to SEQ ID NO: 113136
uaaauucggauuuguuucu

SEQ ID NO: 113138 - RNA, 19 nt, Artificial Sequence
  Description of Artificial Sequence: Synthetic oligonucleotide
  Sense strand starting at position 2199 of SEQ ID NO: 1441
gggagagcugcgcauuuca

SEQ ID NO: 113139 - RNA, 19 nt, Artificial Sequence
  Description of Artificial Sequence: Synthetic oligonucleotide
  Antisense strand to SEQ ID NO: 113138
ugaaaugcgcagcucuccc

SEQ ID NO: 113140 - RNA, 19 nt, Artificial Sequence
  Description of Artificial Sequence: Synthetic oligonucleotide
  Sense strand starting at position 2083 of SEQ ID NO: 1441
aagugaucacaauguuguu

SEQ ID NO: 113141 - RNA, 19 nt, Artificial Sequence
  Description of Artificial Sequence: Synthetic oligonucleotide
  Antisense strand to SEQ ID NO: 113140
aacaacauugugaucacuu

SEQ ID NO: 113142 - RNA, 19 nt, Artificial Sequence
  Description of Artificial Sequence: Synthetic oligonucleotide
  Sense strand starting at position 1797 of SEQ ID NO: 1441
accuuauacuaccucgaga

SEQ ID NO: 113143 - RNA, 19 nt, Artificial Sequence
  Description of Artificial Sequence: Synthetic oligonucleotide
  Antisense strand to SEQ ID NO: 113142
ucucgagguaguauaaggu

SEQ ID NO: 113144 - RNA, 19 nt, Artificial Sequence
  Description of Artificial Sequence: Synthetic oligonucleotide
  Sense strand starting at position 1342 of SEQ ID NO: 1441
gaugaagacguugagcuua

SEQ ID NO: 113145 - RNA, 19 nt, Artificial Sequence
  Description of Artificial Sequence: Synthetic oligonucleotide
  Antisense strand to SEQ ID NO: 113144
uaagcucaacgucuucauc

SEQ ID NO: 113146 - RNA, 19 nt, Artificial Sequence
  Description of Artificial Sequence: Synthetic oligonucleotide
  Sense strand starting at position 1341 of SEQ ID NO: 1441
agaugaagacguugagcuu

SEQ ID NO: 113147 - RNA, 19 nt, Artificial Sequence
  Description of Artificial Sequence: Synthetic oligonucleotide
  Antisense strand to SEQ ID NO: 113146
aagcucaacgucuucaucu

SEQ ID NO: 113148 - RNA, 19 nt, Artificial Sequence
  Description of Artificial Sequence: Synthetic oligonucleotide
  Sense strand starting at position 1304 of SEQ ID NO: 1441
gguucuaugccgcuuggca

SEQ ID NO: 113149 - RNA, 19 nt, Artificial Sequence
  Description of Artificial Sequence: Synthetic oligonucleotide
  Antisense strand to SEQ ID NO: 113148
ugccaagcggcauagaacc

SEQ ID NO: 113150 - RNA, 19 nt, Artificial Sequence
  Description of Artificial Sequence: Synthetic oligonucleotide
  Sense strand starting at position 979 of SEQ ID NO: 1441
gugacuuugacagguagau

SEQ ID NO: 113151 - RNA, 19 nt, Artificial Sequence
  Description of Artificial Sequence: Synthetic oligonucleotide
  Antisense strand to SEQ ID NO: 113150
aucuaccugucaaagucac

SEQ ID NO: 113152 - RNA, 19 nt, Artificial Sequence
  Description of Artificial Sequence: Synthetic oligonucleotide
  Sense strand starting at position 933 of SEQ ID NO: 1441
gggaauuccuucccguuga

SEQ ID NO: 113153 - RNA, 19 nt, Artificial Sequence
  Description of Artificial Sequence: Synthetic oligonucleotide
  Antisense strand to SEQ ID NO: 113152
ucaacgggaaggaauuccc

SEQ ID NO: 113154 - RNA, 19 nt, Artificial Sequence
  Description of Artificial Sequence: Synthetic oligonucleotide
  Sense strand starting at position 135 of SEQ ID NO: 1441
caaauauaauuggcgaaag

SEQ ID NO: 113155 - RNA, 19 nt, Artificial Sequence
  Description of Artificial Sequence: Synthetic oligonucleotide
  Antisense strand to SEQ ID NO: 113154
cuuucgccaauuauauuug

SEQ ID NO: 113156 - RNA, 19 nt, Artificial Sequence
  Description of Artificial Sequence: Synthetic oligonucleotide
  Sense strand starting at position 3836 of SEQ ID NO: 1440
gcagaagcucagugaauca

SEQ ID NO: 113157 - RNA, 19 nt, Artificial Sequence
  Description of Artificial Sequence: Synthetic oligonucleotide
  Antisense strand to SEQ ID NO: 113156
ugauucacugagcuucugc

SEQ ID NO: 113158 - RNA, 19 nt, Artificial Sequence
  Description of Artificial Sequence: Synthetic oligonucleotide
  Sense strand starting at position 3741 of SEQ ID NO: 1440
augggaaccucuccaguua

SEQ ID NO: 113159 - RNA, 19 nt, Artificial Sequence
  Description of Artificial Sequence: Synthetic oligonucleotide
  Antisense strand to SEQ ID NO: 113158
uaacuggagagguucccau

SEQ ID NO: 113160 - RNA, 19 nt, Artificial Sequence
  Description of Artificial Sequence: Synthetic oligonucleotide
  Sense strand starting at position 3730 of SEQ ID NO: 1440
gugauauguaaaugggaac

SEQ ID NO: 113161 - RNA, 19 nt, Artificial Sequence
  Description of Artificial Sequence: Synthetic oligonucleotide
  Antisense strand to SEQ ID NO: 113160
guucccauuuacauaucac

SEQ ID NO: 113162 - RNA, 19 nt, Artificial Sequence
  Description of Artificial Sequence: Synthetic oligonucleotide
  Sense strand starting at position 3724 of SEQ ID NO: 1440
guaagugugauauguaaau

SEQ ID NO: 113163 - RNA, 19 nt, Artificial Sequence
  Description of Artificial Sequence: Synthetic oligonucleotide
  Antisense strand to SEQ ID NO: 113162
auuuacauaucacacuuac

SEQ ID NO: 113164 - RNA, 19 nt, Artificial Sequence
  Description of Artificial Sequence: Synthetic oligonucleotide
  Sense strand starting at position 3698 of SEQ ID NO: 1440
uuccuuugacuaugaggca

SEQ ID NO: 113165 - RNA, 19 nt, Artificial Sequence
  Description of Artificial Sequence: Synthetic oligonucleotide
  Antisense strand to SEQ ID NO: 113164
ugccucauagucaaaggaa

SEQ ID NO: 113166 - RNA, 19 nt, Artificial Sequence
  Description of Artificial Sequence: Synthetic oligonucleotide
  Sense strand starting at position 3692 of SEQ ID NO: 1440
ccaggauuccuuugacuau

SEQ ID NO: 113167 - RNA, 19 nt, Artificial Sequence
  Description of Artificial Sequence: Synthetic oligonucleotide
  Antisense strand to SEQ ID NO: 113166
auagucaaaggaauccugg

SEQ ID NO: 113168 - RNA, 19 nt, Artificial Sequence
  Description of Artificial Sequence: Synthetic oligonucleotide
  Sense strand starting at position 3582 of SEQ ID NO: 1440
auaccaagaucuuugugau

SEQ ID NO: 113169 - RNA, 19 nt, Artificial Sequence
  Description of Artificial Sequence: Synthetic oligonucleotide
  Antisense strand to SEQ ID NO: 113168
aucacaaagaucuugguau

SEQ ID NO: 113170 - RNA, 19 nt, Artificial Sequence
  Description of Artificial Sequence: Synthetic oligonucleotide
  Sense strand starting at position 3518 of SEQ ID NO: 1440
aaggcccuucuguaguaaa

SEQ ID NO: 113171 - RNA, 19 nt, Artificial Sequence
  Description of Artificial Sequence: Synthetic oligonucleotide
  Antisense strand to SEQ ID NO: 113170
uuuacuacagaagggccuu

SEQ ID NO: 113172 - RNA, 19 nt, Artificial Sequence
  Description of Artificial Sequence: Synthetic oligonucleotide
  Sense strand starting at position 3500 of SEQ ID NO: 1440
ugcuuuaucuggucauuua

SEQ ID NO: 113173 - RNA, 19 nt, Artificial Sequence
  Description of Artificial Sequence: Synthetic oligonucleotide
  Antisense strand to SEQ ID NO: 113172
uaaaugaccagauaaagca

SEQ ID NO: 113174 - RNA, 19 nt, Artificial Sequence
  Description of Artificial Sequence: Synthetic oligonucleotide
  Sense strand starting at position 3341 of SEQ ID NO: 1440
agcccuuugcaauaggaua

SEQ ID NO: 113175 - RNA, 19 nt, Artificial Sequence
  Description of Artificial Sequence: Synthetic oligonucleotide
  Antisense strand to SEQ ID NO: 113174
uauccuauugcaaagggcu

SEQ ID NO: 113176 - RNA, 19 nt, Artificial Sequence
  Description of Artificial Sequence: Synthetic oligonucleotide
  Sense strand starting at position 3336 of SEQ ID NO: 1440
augggagcccuuugcaaua

SEQ ID NO: 113177 - RNA, 19 nt, Artificial Sequence
  Description of Artificial Sequence: Synthetic oligonucleotide
  Antisense strand to SEQ ID NO: 113176
uauugcaaagggcucccau

SEQ ID NO: 113178 - RNA, 19 nt, Artificial Sequence
  Description of Artificial Sequence: Synthetic oligonucleotide
  Sense strand starting at position 3280 of SEQ ID NO: 1440
agauguuacucaccaccua

SEQ ID NO: 113179 - RNA, 19 nt, Artificial Sequence
  Description of Artificial Sequence: Synthetic oligonucleotide
  Antisense strand to SEQ ID NO: 113178
uagguggugaguaacaucu

SEQ ID NO: 113180 - RNA, 19 nt, Artificial Sequence
  Description of Artificial Sequence: Synthetic oligonucleotide
  Sense strand starting at position 3190 of SEQ ID NO: 1440
uaccaaggguucuuagaca

SEQ ID NO: 113181 - RNA, 19 nt, Artificial Sequence
  Description of Artificial Sequence: Synthetic oligonucleotide
  Antisense strand to SEQ ID NO: 113180
ugucuaagaacccuuggua

SEQ ID NO: 113182 - RNA, 19 nt, Artificial Sequence
  Description of Artificial Sequence: Synthetic oligonucleotide
  Sense strand starting at position 3093 of SEQ ID NO: 1440
agugcaggaaucugggauu

SEQ ID NO: 113183 - RNA, 19 nt, Artificial Sequence
  Description of Artificial Sequence: Synthetic oligonucleotide
  Antisense strand to SEQ ID NO: 113182
aaucccagauuccugcacu

SEQ ID NO: 113184 - RNA, 19 nt, Artificial Sequence
  Description of Artificial Sequence: Synthetic oligonucleotide
  Sense strand starting at position 3083 of SEQ ID NO: 1440
ggaaucucugagugcagga

SEQ ID NO: 113185 - RNA, 19 nt, Artificial Sequence
  Description of Artificial Sequence: Synthetic oligonucleotide
  Antisense strand to SEQ ID NO: 113184
uccugcacucagagauucc

SEQ ID NO: 113186 - RNA, 19 nt, Artificial Sequence
  Description of Artificial Sequence: Synthetic oligonucleotide
  Sense strand starting at position 2954 of SEQ ID NO: 1440
gggagaaguuuguugaguu

SEQ ID NO: 113187 - RNA, 19 nt, Artificial Sequence
  Description of Artificial Sequence: Synthetic oligonucleotide
  Antisense strand to SEQ ID NO: 113186
aacucaacaaacuucuccc

SEQ ID NO: 113188 - RNA, 19 nt, Artificial Sequence
  Description of Artificial Sequence: Synthetic oligonucleotide
  Sense strand starting at position 2886 of SEQ ID NO: 1440
gcaggaggcugaguaauug

SEQ ID NO: 113189 - RNA, 19 nt, Artificial Sequence
  Description of Artificial Sequence: Synthetic oligonucleotide
  Antisense strand to SEQ ID NO: 113188
caauuacucagccuccugc

SEQ ID NO: 113190 - RNA, 19 nt, Artificial Sequence
  Description of Artificial Sequence: Synthetic oligonucleotide
  Sense strand starting at position 2866 of SEQ ID NO: 1440
cuaugugucccacaauuaa

SEQ ID NO: 113191 - RNA, 19 nt, Artificial Sequence
  Description of Artificial Sequence: Synthetic oligonucleotide
  Antisense strand to SEQ ID NO: 113190
uuaauugugggacacauag

SEQ ID NO: 113192 - RNA, 19 nt, Artificial Sequence
  Description of Artificial Sequence: Synthetic oligonucleotide
  Sense strand starting at position 2855 of SEQ ID NO: 1440
acacuuagucacuaugugu

SEQ ID NO: 113193 - RNA, 19 nt, Artificial Sequence
  Description of Artificial Sequence: Synthetic oligonucleotide
  Antisense strand to SEQ ID NO: 113192
acacauagugacuaagugu

SEQ ID NO: 113194 - RNA, 19 nt, Artificial Sequence
  Description of Artificial Sequence: Synthetic oligonucleotide
  Sense strand starting at position 2851 of SEQ ID NO: 1440
gugaacacuuagucacuau

SEQ ID NO: 113195 - RNA, 19 nt, Artificial Sequence
  Description of Artificial Sequence: Synthetic oligonucleotide
  Antisense strand to SEQ ID NO: 113194
auagugacuaaguguucac

SEQ ID NO: 113196 - RNA, 19 nt, Artificial Sequence
  Description of Artificial Sequence: Synthetic oligonucleotide
  Sense strand starting at position 2850 of SEQ ID NO: 1440
ugugaacacuuagucacua

SEQ ID NO: 113197 - RNA, 19 nt, Artificial Sequence
  Description of Artificial Sequence: Synthetic oligonucleotide
  Antisense strand to SEQ ID NO: 113196
uagugacuaaguguucaca

SEQ ID NO: 113198 - RNA, 19 nt, Artificial Sequence
  Description of Artificial Sequence: Synthetic oligonucleotide
  Sense strand starting at position 2796 of SEQ ID NO: 1440
auguuuggucaaggcaaag

SEQ ID NO: 113199 - RNA, 19 nt, Artificial Sequence
  Description of Artificial Sequence: Synthetic oligonucleotide
  Antisense strand to SEQ ID NO: 113198
cuuugccuugaccaaacau

SEQ ID NO: 113200 - RNA, 19 nt, Artificial Sequence
  Description of Artificial Sequence: Synthetic oligonucleotide
  Sense strand starting at position 2789 of SEQ ID NO: 1440
cugacucauguuuggucaa

SEQ ID NO: 113201 - RNA, 19 nt, Artificial Sequence
  Description of Artificial Sequence: Synthetic oligonucleotide
  Antisense strand to SEQ ID NO: 113200
uugaccaaacaugagucag

SEQ ID NO: 113202 - RNA, 19 nt, Artificial Sequence
  Description of Artificial Sequence: Synthetic oligonucleotide
  Sense strand starting at position 2781 of SEQ ID NO: 1440
agagaagccugacucaugu

SEQ ID NO: 113203 - RNA, 19 nt, Artificial Sequence
  Description of Artificial Sequence: Synthetic oligonucleotide
  Antisense strand to SEQ ID NO: 113202
acaugagucaggcuucucu

SEQ ID NO: 113204 - RNA, 19 nt, Artificial Sequence
  Description of Artificial Sequence: Synthetic oligonucleotide
  Sense strand starting at position 2683 of SEQ ID NO: 1440
guccaagaauuuggaagau

SEQ ID NO: 113205 - RNA, 19 nt, Artificial Sequence
  Description of Artificial Sequence: Synthetic oligonucleotide
  Antisense strand to SEQ ID NO: 113204
aucuuccaaauucuuggac

SEQ ID NO: 113206 - RNA, 19 nt, Artificial Sequence
  Description of Artificial Sequence: Synthetic oligonucleotide
  Sense strand starting at position 2674 of SEQ ID NO: 1440
gucucugugguccaagaau

SEQ ID NO: 113207 - RNA, 19 nt, Artificial Sequence
  Description of Artificial Sequence: Synthetic oligonucleotide
  Antisense strand to SEQ ID NO: 113206
auucuuggaccacagagac

SEQ ID NO: 113208 - RNA, 19 nt, Artificial Sequence
  Description of Artificial Sequence: Synthetic oligonucleotide
  Sense strand starting at position 2664 of SEQ ID NO: 1440
caagaaaugugucucugug

SEQ ID NO: 113209 - RNA, 19 nt, Artificial Sequence
  Description of Artificial Sequence: Synthetic oligonucleotide
  Antisense strand to SEQ ID NO: 113208
cacagagacacauuucuug

SEQ ID NO: 113210 - RNA, 19 nt, Artificial Sequence
  Description of Artificial Sequence: Synthetic oligonucleotide
  Sense strand starting at position 2648 of SEQ ID NO: 1440
gacccucuugguugaacaa

SEQ ID NO: 113211 - RNA, 19 nt, Artificial Sequence
  Description of Artificial Sequence: Synthetic oligonucleotide
  Antisense strand to SEQ ID NO: 113210
uuguucaaccaagaggguc

SEQ ID NO: 113212 - RNA, 19 nt, Artificial Sequence
  Description of Artificial Sequence: Synthetic oligonucleotide
  Sense strand starting at position 2482 of SEQ ID NO: 1440
agacuuccauuagaaagaa

SEQ ID NO: 113213 - RNA, 19 nt, Artificial Sequence
  Description of Artificial Sequence: Synthetic oligonucleotide
  Antisense strand to SEQ ID NO: 113212
uucuuucuaauggaagucu

SEQ ID NO: 113214 - RNA, 19 nt, Artificial Sequence
  Description of Artificial Sequence: Synthetic oligonucleotide
  Sense strand starting at position 2451 of SEQ ID NO: 1440
agaaacaaauccgaauuua

SEQ ID NO: 113215 - RNA, 19 nt, Artificial Sequence
  Description of Artificial Sequence: Synthetic oligonucleotide
  Antisense strand to SEQ ID NO: 113214
uaaauucggauuuguuucu

SEQ ID NO: 113216 - RNA, 19 nt, Artificial Sequence
  Description of Artificial Sequence: Synthetic oligonucleotide
  Sense strand starting at position 2315 of SEQ ID NO: 1440
gggagagcugcgcauuuca

SEQ ID NO: 113217 - RNA, 19 nt, Artificial Sequence
  Description of Artificial Sequence: Synthetic oligonucleotide
  Antisense strand to SEQ ID NO: 113216
ugaaaugcgcagcucuccc

SEQ ID NO: 113218 - RNA, 19 nt, Artificial Sequence
  Description of Artificial Sequence: Synthetic oligonucleotide
  Sense strand starting at position 2199 of SEQ ID NO: 1440
aagugaucacaauguuguu

SEQ ID NO: 113219 - RNA, 19 nt, Artificial Sequence
  Description of Artificial Sequence: Synthetic oligonucleotide
  Antisense strand to SEQ ID NO: 113218
aacaacauugugaucacuu

SEQ ID NO: 113220 - RNA, 19 nt, Artificial Sequence
  Description of Artificial Sequence: Synthetic oligonucleotide
  Sense strand starting at position 1913 of SEQ ID NO: 1440
accuuauacuaccucgaga

SEQ ID NO: 113221 - RNA, 19 nt, Artificial Sequence
  Description of Artificial Sequence: Synthetic oligonucleotide
  Antisense strand to SEQ ID NO: 113220
ucucgagguaguauaaggu

SEQ ID NO: 113222 - RNA, 19 nt, Artificial Sequence
  Description of Artificial Sequence: Synthetic oligonucleotide
  Sense strand starting at position 1458 of SEQ ID NO: 1440
gaugaagacguugagcuua

SEQ ID NO: 113223 - RNA, 19 nt, Artificial Sequence
  Description of Artificial Sequence: Synthetic oligonucleotide
  Antisense strand to SEQ ID NO: 113222
uaagcucaacgucuucauc

SEQ ID NO: 113224 - RNA, 19 nt, Artificial Sequence
  Description of Artificial Sequence: Synthetic oligonucleotide
  Sense strand starting at position 1457 of SEQ ID NO: 1440
agaugaagacguugagcuu

SEQ ID NO: 113225 - RNA, 19 nt, Artificial Sequence
  Description of Artificial Sequence: Synthetic oligonucleotide
  Antisense strand to SEQ ID NO: 113224
aagcucaacgucuucaucu

SEQ ID NO: 113226 - RNA, 19 nt, Artificial Sequence
  Description of Artificial Sequence: Synthetic oligonucleotide
  Sense strand starting at position 1420 of SEQ ID NO: 1440
gguucuaugccgcuuggca

SEQ ID NO: 113227 - RNA, 19 nt, Artificial Sequence
  Description of Artificial Sequence: Synthetic oligonucleotide
  Antisense strand to SEQ ID NO: 113226
ugccaagcggcauagaacc

SEQ ID NO: 113228 - RNA, 19 nt, Artificial Sequence
  Description of Artificial Sequence: Synthetic oligonucleotide
  Sense strand starting at position 1095 of SEQ ID NO: 1440
gugacuuugacagguagau

SEQ ID NO: 113229 - RNA, 19 nt, Artificial Sequence
  Description of Artificial Sequence: Synthetic oligonucleotide
  Antisense strand to SEQ ID NO: 113228
aucuaccugucaaagucac

SEQ ID NO: 113230 - RNA, 19 nt, Artificial Sequence
  Description of Artificial Sequence: Synthetic oligonucleotide
  Sense strand starting at position 1049 of SEQ ID NO: 1440
gggaauuccuucccguuga

SEQ ID NO: 113231 - RNA, 19 nt, Artificial Sequence
  Description of Artificial Sequence: Synthetic oligonucleotide
  Antisense strand to SEQ ID NO: 113230
ucaacgggaaggaauuccc

SEQ ID NO: 113232 - RNA, 19 nt, Artificial Sequence
  Description of Artificial Sequence: Synthetic oligonucleotide
  Sense strand starting at position 251 of SEQ ID NO: 1440
caaauauaauuggcgaaag

SEQ ID NO: 113233 - RNA, 19 nt, Artificial Sequence
  Description of Artificial Sequence: Synthetic oligonucleotide
  Antisense strand to SEQ ID NO: 113232
cuuucgccaauuauauuug

SEQ ID NO: 113234 - RNA, 19 nt, Artificial Sequence
  Description of Artificial Sequence: Synthetic oligonucleotide
  Sense strand starting at position 23 of SEQ ID NO: 1440
aguaaagaauaugagagaa

SEQ ID NO: 113235 - RNA, 19 nt, Artificial Sequence
  Description of Artificial Sequence: Synthetic oligonucleotide
  Antisense strand to SEQ ID NO: 113234
uucucucauauucuuuacu

SEQ ID NO: 113236 - RNA, 19 nt, Artificial Sequence
  Description of Artificial Sequence: Synthetic oligonucleotide
  Sense strand starting at position 3910 of SEQ ID NO: 1442
auguguuauuagguaacaa

SEQ ID NO: 113237 - RNA, 19 nt, Artificial Sequence
  Description of Artificial Sequence: Synthetic oligonucleotide
  Antisense strand to SEQ ID NO: 113236
uuguuaccuaauaacacau

SEQ ID NO: 113238 - RNA, 19 nt, Artificial Sequence
  Description of Artificial Sequence: Synthetic oligonucleotide
  Sense strand starting at position 3841 of SEQ ID NO: 1442
gguaguuccacggauaucu

SEQ ID NO: 113239 - RNA, 19 nt, Artificial Sequence
  Description of Artificial Sequence: Synthetic oligonucleotide
  Antisense strand to SEQ ID NO: 113238
agauauccguggaacuacc

SEQ ID NO: 113240 - RNA, 19 nt, Artificial Sequence
  Description of Artificial Sequence: Synthetic oligonucleotide
  Sense strand starting at position 3826 of SEQ ID NO: 1442
augaauuauuuggauggua

SEQ ID NO: 113241 - RNA, 19 nt, Artificial Sequence
  Description of Artificial Sequence: Synthetic oligonucleotide
  Antisense strand to SEQ ID NO: 113240
uaccauccaaauaauucau

SEQ ID NO: 113242 - RNA, 19 nt, Artificial Sequence
  Description of Artificial Sequence: Synthetic oligonucleotide
  Sense strand starting at position 3795 of SEQ ID NO: 1442
uccauaguugaauguacuu

SEQ ID NO: 113243 - RNA, 19 nt, Artificial Sequence
  Description of Artificial Sequence: Synthetic oligonucleotide
  Antisense strand to SEQ ID NO: 113242
aaguacauucaacuaugga

SEQ ID NO: 113244 - RNA, 19 nt, Artificial Sequence
  Description of Artificial Sequence: Synthetic oligonucleotide
  Sense strand starting at position 3792 of SEQ ID NO: 1442
gacuccauaguugaaugua

SEQ ID NO: 113245 - RNA, 19 nt, Artificial Sequence
  Description of Artificial Sequence: Synthetic oligonucleotide
  Antisense strand to SEQ ID NO: 113244
uacauucaacuauggaguc

SEQ ID NO: 113246 - RNA, 19 nt, Artificial Sequence
  Description of Artificial Sequence: Synthetic oligonucleotide
  Sense strand starting at position 3724 of SEQ ID NO: 1442
guuuaaguagcucaaagau

SEQ ID NO: 113247 - RNA, 19 nt, Artificial Sequence
  Description of Artificial Sequence: Synthetic oligonucleotide
  Antisense strand to SEQ ID NO: 113246
aucuuugagcuacuuaaac

SEQ ID NO: 113248 - RNA, 19 nt, Artificial Sequence
  Description of Artificial Sequence: Synthetic oligonucleotide
  Sense strand starting at position 3710 of SEQ ID NO: 1442
gaauucuggcaucaguuua

SEQ ID NO: 113249 - RNA, 19 nt, Artificial Sequence
  Description of Artificial Sequence: Synthetic oligonucleotide
  Antisense strand to SEQ ID NO: 113248
uaaacugaugccagaauuc

SEQ ID NO: 113250 - RNA, 19 nt, Artificial Sequence
  Description of Artificial Sequence: Synthetic oligonucleotide
  Sense strand starting at position 3387 of SEQ ID NO: 1442
agcugucaucaccaucauu

SEQ ID NO: 113251 - RNA, 19 nt, Artificial Sequence
  Description of Artificial Sequence: Synthetic oligonucleotide
  Antisense strand to SEQ ID NO: 113250
aaugauggugaugacagcu

SEQ ID NO: 113252 - RNA, 19 nt, Artificial Sequence
  Description of Artificial Sequence: Synthetic oligonucleotide
  Sense strand starting at position 3337 of SEQ ID NO: 1442
augccaguccaaugauuau

SEQ ID NO: 113253 - RNA, 19 nt, Artificial Sequence
  Description of Artificial Sequence: Synthetic oligonucleotide
  Antisense strand to SEQ ID NO: 113252
auaaucauuggacuggcau

SEQ ID NO: 113254 - RNA, 19 nt, Artificial Sequence
  Description of Artificial Sequence: Synthetic oligonucleotide
  Sense strand starting at position 3318 of SEQ ID NO: 1442
ucccuuuagccugagacau

SEQ ID NO: 113255 - RNA, 19 nt, Artificial Sequence
  Description of Artificial Sequence: Synthetic oligonucleotide
  Antisense strand to SEQ ID NO: 113254
augucucaggcuaaaggga

SEQ ID NO: 113256 - RNA, 19 nt, Artificial Sequence
  Description of Artificial Sequence: Synthetic oligonucleotide
  Sense strand starting at position 3317 of SEQ ID NO: 1442
uucccuuuagccugagaca

SEQ ID NO: 113257 - RNA, 19 nt, Artificial Sequence
  Description of Artificial Sequence: Synthetic oligonucleotide
  Antisense strand to SEQ ID NO: 113256
ugucucaggcuaaagggaa

SEQ ID NO: 113258 - RNA, 19 nt, Artificial Sequence
  Description of Artificial Sequence: Synthetic oligonucleotide
  Sense strand starting at position 3080 of SEQ ID NO: 1442
guauaaagaucuccucuug

SEQ ID NO: 113259 - RNA, 19 nt, Artificial Sequence
  Description of Artificial Sequence: Synthetic oligonucleotide
  Antisense strand to SEQ ID NO: 113258
caagaggagaucuuuauac

SEQ ID NO: 113260 - RNA, 19 nt, Artificial Sequence
  Description of Artificial Sequence: Synthetic oligonucleotide
  Sense strand starting at position 2959 of SEQ ID NO: 1442
uucuaaacuccaggaaguu

SEQ ID NO: 113261 - RNA, 19 nt, Artificial Sequence
  Description of Artificial Sequence: Synthetic oligonucleotide
  Antisense strand to SEQ ID NO: 113260
aacuuccuggaguuuagaa

SEQ ID NO: 113262 - RNA, 19 nt, Artificial Sequence
  Description of Artificial Sequence: Synthetic oligonucleotide
  Sense strand starting at position 2907 of SEQ ID NO: 1442
augaguaauuggucuugag

SEQ ID NO: 113263 - RNA, 19 nt, Artificial Sequence
  Description of Artificial Sequence: Synthetic oligonucleotide
  Antisense strand to SEQ ID NO: 113262
cucaagaccaauuacucau

SEQ ID NO: 113264 - RNA, 19 nt, Artificial Sequence
  Description of Artificial Sequence: Synthetic oligonucleotide
  Sense strand starting at position 2899 of SEQ ID NO: 1442
uguuuaacaugaguaauug

SEQ ID NO: 113265 - RNA, 19 nt, Artificial Sequence
  Description of Artificial Sequence: Synthetic oligonucleotide
  Antisense strand to SEQ ID NO: 113264
caauuacucauguuaaaca

SEQ ID NO: 113266 - RNA, 19 nt, Artificial Sequence
  Description of Artificial Sequence: Synthetic oligonucleotide
  Sense strand starting at position 2897 of SEQ ID NO: 1442
cuuguuuaacaugaguaau

SEQ ID NO: 113267 - RNA, 19 nt, Artificial Sequence
  Description of Artificial Sequence: Synthetic oligonucleotide
  Antisense strand to SEQ ID NO: 113266
auuacucauguuaaacaag

SEQ ID NO: 113268 - RNA, 19 nt, Artificial Sequence
  Description of Artificial Sequence: Synthetic oligonucleotide
  Sense strand starting at position 2714 of SEQ ID NO: 1442
auuggacuucguuauugua

SEQ ID NO: 113269 - RNA, 19 nt, Artificial Sequence
  Description of Artificial Sequence: Synthetic oligonucleotide
  Antisense strand to SEQ ID NO: 113268
uacaauaacgaaguccaau

SEQ ID NO: 113270 - RNA, 19 nt, Artificial Sequence
  Description of Artificial Sequence: Synthetic oligonucleotide
  Sense strand starting at position 2610 of SEQ ID NO: 1442
caaugaguugugcagagga

SEQ ID NO: 113271 - RNA, 19 nt, Artificial Sequence
  Description of Artificial Sequence: Synthetic oligonucleotide
  Antisense strand to SEQ ID NO: 113270
uccucugcacaacucauug

SEQ ID NO: 113272 - RNA, 19 nt, Artificial Sequence
  Description of Artificial Sequence: Synthetic oligonucleotide
  Sense strand starting at position 2596 of SEQ ID NO: 1442
caaauagaguguuccaaug

SEQ ID NO: 113273 - RNA, 19 nt, Artificial Sequence
  Description of Artificial Sequence: Synthetic oligonucleotide
  Antisense strand to SEQ ID NO: 113272
cauuggaacacucuauuug

SEQ ID NO: 113274 - RNA, 19 nt, Artificial Sequence
  Description of Artificial Sequence: Synthetic oligonucleotide
  Sense strand starting at position 2495 of SEQ ID NO: 1442
aguaauagggagugucaga

SEQ ID NO: 113275 - RNA, 19 nt, Artificial Sequence
  Description of Artificial Sequence: Synthetic oligonucleotide
  Antisense strand to SEQ ID NO: 113274
ucugacacucccuauuacu

SEQ ID NO: 113276 - RNA, 19 nt, Artificial Sequence
  Description of Artificial Sequence: Synthetic oligonucleotide
  Sense strand starting at position 2364 of SEQ ID NO: 1442
guuugugaccuggaagcau

SEQ ID NO: 113277 - RNA, 19 nt, Artificial Sequence
  Description of Artificial Sequence: Synthetic oligonucleotide
  Antisense strand to SEQ ID NO: 113276
augcuuccaggucacaaac

SEQ ID NO: 113278 - RNA, 19 nt, Artificial Sequence
  Description of Artificial Sequence: Synthetic oligonucleotide
  Sense strand starting at position 2360 of SEQ ID NO: 1442
gaagguuugugaccuggaa

SEQ ID NO: 113279 - RNA, 19 nt, Artificial Sequence
  Description of Artificial Sequence: Synthetic oligonucleotide
  Antisense strand to SEQ ID NO: 113278
uuccaggucacaaaccuuc

SEQ ID NO: 113280 - RNA, 19 nt, Artificial Sequence
  Description of Artificial Sequence: Synthetic oligonucleotide
  Sense strand starting at position 2311 of SEQ ID NO: 1442
ggaccuaggagcugaaauu

SEQ ID NO: 113281 - RNA, 19 nt, Artificial Sequence
  Description of Artificial Sequence: Synthetic oligonucleotide
  Antisense strand to SEQ ID NO: 113280
aauuucagcuccuaggucc

SEQ ID NO: 113282 - RNA, 19 nt, Artificial Sequence
  Description of Artificial Sequence: Synthetic oligonucleotide
  Sense strand starting at position 2243 of SEQ ID NO: 1442
gaacgucaguuauuaaacu

SEQ ID NO: 113283 - RNA, 19 nt, Artificial Sequence
  Description of Artificial Sequence: Synthetic oligonucleotide
  Antisense strand to SEQ ID NO: 113282
aguuuaauaacugacguuc

SEQ ID NO: 113284 - RNA, 19 nt, Artificial Sequence
  Description of Artificial Sequence: Synthetic oligonucleotide
  Sense strand starting at position 2228 of SEQ ID NO: 1442
gagauaagugcgugagaac

SEQ ID NO: 113285 - RNA, 19 nt, Artificial Sequence
  Description of Artificial Sequence: Synthetic oligonucleotide
  Antisense strand to SEQ ID NO: 113284
guucucacgcacuuaucuc

SEQ ID NO: 113286 - RNA, 19 nt, Artificial Sequence
  Description of Artificial Sequence: Synthetic oligonucleotide
  Sense strand starting at position 2227 of SEQ ID NO: 1442
agagauaagugcgugagaa

SEQ ID NO: 113287 - RNA, 19 nt, Artificial Sequence
  Description of Artificial Sequence: Synthetic oligonucleotide
  Antisense strand to SEQ ID NO: 113286
uucucacgcacuuaucucu

SEQ ID NO: 113288 - RNA, 19 nt, Artificial Sequence
  Description of Artificial Sequence: Synthetic oligonucleotide
  Sense strand starting at position 2226 of SEQ ID NO: 1442
cagagauaagugcgugaga

SEQ ID NO: 113289 - RNA, 19 nt, Artificial Sequence
  Description of Artificial Sequence: Synthetic oligonucleotide
  Antisense strand to SEQ ID NO: 113288
ucucacgcacuuaucucug

SEQ ID NO: 113290 - RNA, 19 nt, Artificial Sequence
  Description of Artificial Sequence: Synthetic oligonucleotide
  Sense strand starting at position 2169 of SEQ ID NO: 1442
cggguuguacggucucuua

SEQ ID NO: 113291 - RNA, 19 nt, Artificial Sequence
  Description of Artificial Sequence: Synthetic oligonucleotide
  Antisense strand to SEQ ID NO: 113290
uaagagaccguacaacccg

SEQ ID NO: 113292 - RNA, 19 nt, Artificial Sequence
  Description of Artificial Sequence: Synthetic oligonucleotide
  Sense strand starting at position 1542 of SEQ ID NO: 1442
cgcagaucucuugaaauac

SEQ ID NO: 113293 - RNA, 19 nt, Artificial Sequence
  Description of Artificial Sequence: Synthetic oligonucleotide
  Antisense strand to SEQ ID NO: 113292
guauuucaagagaucugcg

SEQ ID NO: 113294 - RNA, 19 nt, Artificial Sequence
  Description of Artificial Sequence: Synthetic oligonucleotide
  Sense strand starting at position 1484 of SEQ ID NO: 1442
aggaaauaccugugacuau

SEQ ID NO: 113295 - RNA, 19 nt, Artificial Sequence
  Description of Artificial Sequence: Synthetic oligonucleotide
  Antisense strand to SEQ ID NO: 113294
auagucacagguauuuccu

SEQ ID NO: 113296 - RNA, 19 nt, Artificial Sequence
  Description of Artificial Sequence: Synthetic oligonucleotide
  Sense strand starting at position 1454 of SEQ ID NO: 1442
gcacgaucaauguagcaaa

SEQ ID NO: 113297 - RNA, 19 nt, Artificial Sequence
  Description of Artificial Sequence: Synthetic oligonucleotide
  Antisense strand to SEQ ID NO: 113296
uuugcuacauugaucgugc

SEQ ID NO: 113298 - RNA, 19 nt, Artificial Sequence
  Description of Artificial Sequence: Synthetic oligonucleotide
  Sense strand starting at position 1381 of SEQ ID NO: 1442
gaacuuagaugggaaagaa

SEQ ID NO: 113299 - RNA, 19 nt, Artificial Sequence
  Description of Artificial Sequence: Synthetic oligonucleotide
  Antisense strand to SEQ ID NO: 113298
uucuuucccaucuaaguuc

SEQ ID NO: 113300 - RNA, 19 nt, Artificial Sequence
  Description of Artificial Sequence: Synthetic oligonucleotide
  Sense strand starting at position 1271 of SEQ ID NO: 1442
aagcaagagugucugagaa

SEQ ID NO: 113301 - RNA, 19 nt, Artificial Sequence
  Description of Artificial Sequence: Synthetic oligonucleotide
  Antisense strand to SEQ ID NO: 113300
uucucagacacucuugcuu

SEQ ID NO: 113302 - RNA, 19 nt, Artificial Sequence
  Description of Artificial Sequence: Synthetic oligonucleotide
  Sense strand starting at position 1194 of SEQ ID NO: 1442
ugcuucucagaugagaacu

SEQ ID NO: 113303 - RNA, 19 nt, Artificial Sequence
  Description of Artificial Sequence: Synthetic oligonucleotide
  Antisense strand to SEQ ID NO: 113302
aguucucaucugagaagca

SEQ ID NO: 113304 - RNA, 19 nt, Artificial Sequence
  Description of Artificial Sequence: Synthetic oligonucleotide
  Sense strand starting at position 1113 of SEQ ID NO: 1442
uuaguaaugcuugauacau

SEQ ID NO: 113305 - RNA, 19 nt, Artificial Sequence
  Description of Artificial Sequence: Synthetic oligonucleotide
  Antisense strand to SEQ ID NO: 113304
auguaucaagcauuacuaa

SEQ ID NO: 113306 - RNA, 19 nt, Artificial Sequence
  Description of Artificial Sequence: Synthetic oligonucleotide
  Sense strand starting at position 1112 of SEQ ID NO: 1442
uuuaguaaugcuugauaca

SEQ ID NO: 113307 - RNA, 19 nt, Artificial Sequence
  Description of Artificial Sequence: Synthetic oligonucleotide
  Antisense strand to SEQ ID NO: 113306
uguaucaagcauuacuaaa

SEQ ID NO: 113308 - RNA, 19 nt, Artificial Sequence
  Description of Artificial Sequence: Synthetic oligonucleotide
  Sense strand starting at position 787 of SEQ ID NO: 1442
aauacuuaggagugacuuu

SEQ ID NO: 113309 - RNA, 19 nt, Artificial Sequence
  Description of Artificial Sequence: Synthetic oligonucleotide
  Antisense strand to SEQ ID NO: 113308
aaagucacuccuaaguauu

SEQ ID NO: 113310 - RNA, 19 nt, Artificial Sequence
  Description of Artificial Sequence: Synthetic oligonucleotide
  Sense strand starting at position 708 of SEQ ID NO: 1442
cagccugcugaguaucaaa

SEQ ID NO: 113311 - RNA, 19 nt, Artificial Sequence
  Description of Artificial Sequence: Synthetic oligonucleotide
  Antisense strand to SEQ ID NO: 113310
uuugauacucagcaggcug

SEQ ID NO: 113312 - RNA, 19 nt, Artificial Sequence
  Description of Artificial Sequence: Synthetic oligonucleotide
  Sense strand starting at position 570 of SEQ ID NO: 1442
agagcuacacuguagaauu

SEQ ID NO: 113313 - RNA, 19 nt, Artificial Sequence
  Description of Artificial Sequence: Synthetic oligonucleotide
  Antisense strand to SEQ ID NO: 113312
aauucuacaguguagcucu

SEQ ID NO: 113314 - RNA, 19 nt, Artificial Sequence
  Description of Artificial Sequence: Synthetic oligonucleotide
  Sense strand starting at position 565 of SEQ ID NO: 1442
uuaagagagcuacacugua

SEQ ID NO: 113315 - RNA, 19 nt, Artificial Sequence
  Description of Artificial Sequence: Synthetic oligonucleotide
  Antisense strand to SEQ ID NO: 113314
uacaguguagcucucuuaa

SEQ ID NO: 113316 - RNA, 19 nt, Artificial Sequence
  Description of Artificial Sequence: Synthetic oligonucleotide
  Sense strand starting at position 3703 of SEQ ID NO: 1443
gagauagucugaucccuaa

SEQ ID NO: 113317 - RNA, 19 nt, Artificial Sequence
  Description of Artificial Sequence: Synthetic oligonucleotide
  Antisense strand to SEQ ID NO: 113316
uuagggaucagacuaucuc

SEQ ID NO: 113318 - RNA, 19 nt, Artificial Sequence
  Description of Artificial Sequence: Synthetic oligonucleotide
  Sense strand starting at position 3701 of SEQ ID NO: 1443
gggagauagucugaucccu

SEQ ID NO: 113319 - RNA, 19 nt, Artificial Sequence
  Description of Artificial Sequence: Synthetic oligonucleotide
  Antisense strand to SEQ ID NO: 113318
agggaucagacuaucuccc

SEQ ID NO: 113320 - RNA, 19 nt, Artificial Sequence
  Description of Artificial Sequence: Synthetic oligonucleotide
  Sense strand starting at position 2711 of SEQ ID NO: 1443
ggaggugagucauggagga

SEQ ID NO: 113321 - RNA, 19 nt, Artificial Sequence
  Description of Artificial Sequence: Synthetic oligonucleotide
  Antisense strand to SEQ ID NO: 113320
uccuccaugacucaccucc

SEQ ID NO: 113322 - RNA, 19 nt, Artificial Sequence
  Description of Artificial Sequence: Synthetic oligonucleotide
  Sense strand starting at position 2392 of SEQ ID NO: 1443
ggacuuucugggcaauugu

SEQ ID NO: 113323 - RNA, 19 nt, Artificial Sequence
  Description of Artificial Sequence: Synthetic oligonucleotide
  Antisense strand to SEQ ID NO: 113322
acaauugcccagaaagucc

SEQ ID NO: 113324 - RNA, 19 nt, Artificial Sequence
  Description of Artificial Sequence: Synthetic oligonucleotide
  Sense strand starting at position 2390 of SEQ ID NO: 1443
aaggacuuucugggcaauu

SEQ ID NO: 113325 - RNA, 19 nt, Artificial Sequence
  Description of Artificial Sequence: Synthetic oligonucleotide
  Antisense strand to SEQ ID NO: 113324
aauugcccagaaaguccuu

SEQ ID NO: 113326 - RNA, 19 nt, Artificial Sequence
  Description of Artificial Sequence: Synthetic oligonucleotide
  Sense strand starting at position 2369 of SEQ ID NO: 1443
ggauuuaaguuagacuuua

SEQ ID NO: 113327 - RNA, 19 nt, Artificial Sequence
  Description of Artificial Sequence: Synthetic oligonucleotide
  Antisense strand to SEQ ID NO: 113326
uaaagucuaacuuaaaucc

SEQ ID NO: 113328 - RNA, 19 nt, Artificial Sequence
  Description of Artificial Sequence: Synthetic oligonucleotide
  Sense strand starting at position 2281 of SEQ ID NO: 1443
cucacugcugcuggauuaa

SEQ ID NO: 113329 - RNA, 19 nt, Artificial Sequence
  Description of Artificial Sequence: Synthetic oligonucleotide
  Antisense strand to SEQ ID NO: 113328
uuaauccagcagcagugag

SEQ ID NO: 113330 - RNA, 19 nt, Artificial Sequence
  Description of Artificial Sequence: Synthetic oligonucleotide
  Sense strand starting at position 2213 of SEQ ID NO: 1443
gggaaugacucuguccauc

SEQ ID NO: 113331 - RNA, 19 nt, Artificial Sequence
  Description of Artificial Sequence: Synthetic oligonucleotide
  Antisense strand to SEQ ID NO: 113330
gauggacagagucauuccc

SEQ ID NO: 113332 - RNA, 19 nt, Artificial Sequence
  Description of Artificial Sequence: Synthetic oligonucleotide
  Sense strand starting at position 2212 of SEQ ID NO: 1443
agggaaugacucuguccau

SEQ ID NO: 113333 - RNA, 19 nt, Artificial Sequence
  Description of Artificial Sequence: Synthetic oligonucleotide
  Antisense strand to SEQ ID NO: 113332
auggacagagucauucccu

SEQ ID NO: 113334 - RNA, 19 nt, Artificial Sequence
  Description of Artificial Sequence: Synthetic oligonucleotide
  Sense strand starting at position 2174 of SEQ ID NO: 1443
ggugacuuccugcaucaug

SEQ ID NO: 113335 - RNA, 19 nt, Artificial Sequence
  Description of Artificial Sequence: Synthetic oligonucleotide
  Antisense strand to SEQ ID NO: 113334
caugaugcaggaagucacc

SEQ ID NO: 113336 - RNA, 19 nt, Artificial Sequence
  Description of Artificial Sequence: Synthetic oligonucleotide
  Sense strand starting at position 2123 of SEQ ID NO: 1443
aggucagucccucauauua

SEQ ID NO: 113337 - RNA, 19 nt, Artificial Sequence
  Description of Artificial Sequence: Synthetic oligonucleotide
  Antisense strand to SEQ ID NO: 113336
uaauaugagggacugaccu

SEQ ID NO: 113338 - RNA, 19 nt, Artificial Sequence
  Description of Artificial Sequence: Synthetic oligonucleotide
  Sense strand starting at position 2121 of SEQ ID NO: 1443
cuaggucagucccucauau

SEQ ID NO: 113339 - RNA, 19 nt, Artificial Sequence
  Description of Artificial Sequence: Synthetic oligonucleotide
  Antisense strand to SEQ ID NO: 113338
auaugagggacugaccuag

SEQ ID NO: 113340 - RNA, 19 nt, Artificial Sequence
  Description of Artificial Sequence: Synthetic oligonucleotide
  Sense strand starting at position 2034 of SEQ ID NO: 1443
cucugugucagugaccauu

SEQ ID NO: 113341 - RNA, 19 nt, Artificial Sequence
  Description of Artificial Sequence: Synthetic oligonucleotide
  Antisense strand to SEQ ID NO: 113340
aauggucacugacacagag

SEQ ID NO: 113342 - RNA, 19 nt, Artificial Sequence
  Description of Artificial Sequence: Synthetic oligonucleotide
  Sense strand starting at position 1848 of SEQ ID NO: 1443
gcaggaaugauccgggucu

SEQ ID NO: 113343 - RNA, 19 nt, Artificial Sequence
  Description of Artificial Sequence: Synthetic oligonucleotide
  Antisense strand to SEQ ID NO: 113342
agacccggaucauuccugc

SEQ ID NO: 113344 - RNA, 19 nt, Artificial Sequence
  Description of Artificial Sequence: Synthetic oligonucleotide
  Sense strand starting at position 1611 of SEQ ID NO: 1443
auaguuccucucugagaaa

SEQ ID NO: 113345 - RNA, 19 nt, Artificial Sequence
  Description of Artificial Sequence: Synthetic oligonucleotide
  Antisense strand to SEQ ID NO: 113344
uuucucagagaggaacuau

SEQ ID NO: 113346 - RNA, 19 nt, Artificial Sequence
  Description of Artificial Sequence: Synthetic oligonucleotide
  Sense strand starting at position 1607 of SEQ ID NO: 1443
agacauaguuccucucuga

SEQ ID NO: 113347 - RNA, 19 nt, Artificial Sequence
  Description of Artificial Sequence: Synthetic oligonucleotide
  Antisense strand to SEQ ID NO: 113346
ucagagaggaacuaugucu

SEQ ID NO: 113348 - RNA, 19 nt, Artificial Sequence
  Description of Artificial Sequence: Synthetic oligonucleotide
  Sense strand starting at position 1493 of SEQ ID NO: 1443
uuaaccucaugccugagaa

SEQ ID NO: 113349 - RNA, 19 nt, Artificial Sequence
  Description of Artificial Sequence: Synthetic oligonucleotide
  Antisense strand to SEQ ID NO: 113348
uucucaggcaugagguuaa

SEQ ID NO: 113350 - RNA, 19 nt, Artificial Sequence
  Description of Artificial Sequence: Synthetic oligonucleotide
  Sense strand starting at position 1248 of SEQ ID NO: 1443
acucaucccugaggauaaa

SEQ ID NO: 113351 - RNA, 19 nt, Artificial Sequence
  Description of Artificial Sequence: Synthetic oligonucleotide
  Antisense strand to SEQ ID NO: 113350
uuuauccucagggaugagu

SEQ ID NO: 113352 - RNA, 19 nt, Artificial Sequence
  Description of Artificial Sequence: Synthetic oligonucleotide
  Sense strand starting at position 1245 of SEQ ID NO: 1443
cccacucaucccugaggau

SEQ ID NO: 113353 - RNA, 19 nt, Artificial Sequence
  Description of Artificial Sequence: Synthetic oligonucleotide
  Antisense strand to SEQ ID NO: 113352
auccucagggaugaguggg

SEQ ID NO: 113354 - RNA, 19 nt, Artificial Sequence
  Description of Artificial Sequence: Synthetic oligonucleotide
  Sense strand starting at position 1082 of SEQ ID NO: 1443
ugugaaguugaaggauaug

SEQ ID NO: 113355 - RNA, 19 nt, Artificial Sequence
  Description of Artificial Sequence: Synthetic oligonucleotide
  Antisense strand to SEQ ID NO: 113354
cauauccuucaacuucaca

SEQ ID NO: 113356 - RNA, 19 nt, Artificial Sequence
  Description of Artificial Sequence: Synthetic oligonucleotide
  Sense strand starting at position 904 of SEQ ID NO: 1443
gaacuaaggcuguggguaa

SEQ ID NO: 113357 - RNA, 19 nt, Artificial Sequence
  Description of Artificial Sequence: Synthetic oligonucleotide
  Antisense strand to SEQ ID NO: 113356
uuacccacagccuuaguuc

SEQ ID NO: 113358 - RNA, 19 nt, Artificial Sequence
  Description of Artificial Sequence: Synthetic oligonucleotide
  Sense strand starting at position 892 of SEQ ID NO: 1443
gaguccucgccagaacuaa

SEQ ID NO: 113359 - RNA, 19 nt, Artificial Sequence
  Description of Artificial Sequence: Synthetic oligonucleotide
  Antisense strand to SEQ ID NO: 113358
uuaguucuggcgaggacuc

SEQ ID NO: 113360 - RNA, 19 nt, Artificial Sequence
  Description of Artificial Sequence: Synthetic oligonucleotide
  Sense strand starting at position 890 of SEQ ID NO: 1443
gugaguccucgccagaacu

SEQ ID NO: 113361 - RNA, 19 nt, Artificial Sequence
  Description of Artificial Sequence: Synthetic oligonucleotide
  Antisense strand to SEQ ID NO: 113360
aguucuggcgaggacucac

SEQ ID NO: 113362 - RNA, 19 nt, Artificial Sequence
  Description of Artificial Sequence: Synthetic oligonucleotide
  Sense strand starting at position 875 of SEQ ID NO: 1443
aaggcuuuccaugacguga

SEQ ID NO: 113363 - RNA, 19 nt, Artificial Sequence
  Description of Artificial Sequence: Synthetic oligonucleotide
  Antisense strand to SEQ ID NO: 113362
ucacgucauggaaagccuu

SEQ ID NO: 113364 - RNA, 19 nt, Artificial Sequence
  Description of Artificial Sequence: Synthetic oligonucleotide
  Sense strand starting at position 859 of SEQ ID NO: 1443
gugggacaaucgucuuaag

SEQ ID NO: 113365 - RNA, 19 nt, Artificial Sequence
  Description of Artificial Sequence: Synthetic oligonucleotide
  Antisense strand to SEQ ID NO: 113364
cuuaagacgauugucccac

SEQ ID NO: 113366 - RNA, 19 nt, Artificial Sequence
  Description of Artificial Sequence: Synthetic oligonucleotide
  Sense strand starting at position 571 of SEQ ID NO: 1443
guggcuuauccuugagguu

SEQ ID NO: 113367 - RNA, 19 nt, Artificial Sequence
  Description of Artificial Sequence: Synthetic oligonucleotide
  Antisense strand to SEQ ID NO: 113366
aaccucaaggauaagccac

SEQ ID NO: 113368 - RNA, 19 nt, Artificial Sequence
  Description of Artificial Sequence: Synthetic oligonucleotide
  Sense strand starting at position 570 of SEQ ID NO: 1443
uguggcuuauccuugaggu

SEQ ID NO: 113369 - RNA, 19 nt, Artificial Sequence
  Description of Artificial Sequence: Synthetic oligonucleotide
  Antisense strand to SEQ ID NO: 113368
accucaaggauaagccaca

SEQ ID NO: 113370 - RNA, 19 nt, Artificial Sequence
  Description of Artificial Sequence: Synthetic oligonucleotide
  Sense strand starting at position 567 of SEQ ID NO: 1443
uuguguggcuuauccuuga

SEQ ID NO: 113371 - RNA, 19 nt, Artificial Sequence
  Description of Artificial Sequence: Synthetic oligonucleotide
  Antisense strand to SEQ ID NO: 113370
ucaaggauaagccacacaa

SEQ ID NO: 113372 - RNA, 19 nt, Artificial Sequence
  Description of Artificial Sequence: Synthetic oligonucleotide
  Sense strand starting at position 483 of SEQ ID NO: 1443
ccagaagucugacccacau

SEQ ID NO: 113373 - RNA, 19 nt, Artificial Sequence
  Description of Artificial Sequence: Synthetic oligonucleotide
  Antisense strand to SEQ ID NO: 113372
augugggucagacuucugg

SEQ ID NO: 113374 - RNA, 19 nt, Artificial Sequence
  Description of Artificial Sequence: Synthetic oligonucleotide
  Sense strand starting at position 442 of SEQ ID NO: 1443
ugcccagacucauagauuu

SEQ ID NO: 113375 - RNA, 19 nt, Artificial Sequence
  Description of Artificial Sequence: Synthetic oligonucleotide
  Antisense strand to SEQ ID NO: 113374
aaaucuaugagucugggca

SEQ ID NO: 113376 - RNA, 19 nt, Artificial Sequence
  Description of Artificial Sequence: Synthetic oligonucleotide
  Sense strand starting at position 337 of SEQ ID NO: 1443
augggcucucacuauguua

SEQ ID NO: 113377 - RNA, 19 nt, Artificial Sequence
  Description of Artificial Sequence: Synthetic oligonucleotide
  Antisense strand to SEQ ID NO: 113376
uaacauagugagagcccau

SEQ ID NO: 113378 - RNA, 19 nt, Artificial Sequence
  Description of Artificial Sequence: Synthetic oligonucleotide
  Sense strand starting at position 231 of SEQ ID NO: 1443
ccauuaucugcugaaugau

SEQ ID NO: 113379 - RNA, 19 nt, Artificial Sequence
  Description of Artificial Sequence: Synthetic oligonucleotide
  Antisense strand to SEQ ID NO: 113378
aucauucagcagauaaugg

SEQ ID NO: 113380 - RNA, 19 nt, Artificial Sequence
  Description of Artificial Sequence: Synthetic oligonucleotide
  Sense strand starting at position 228 of SEQ ID NO: 1443
gcuccauuaucugcugaau

SEQ ID NO: 113381 - RNA, 19 nt, Artificial Sequence
  Description of Artificial Sequence: Synthetic oligonucleotide
  Antisense strand to SEQ ID NO: 113380
auucagcagauaauggagc

SEQ ID NO: 113382 - RNA, 19 nt, Artificial Sequence
  Description of Artificial Sequence: Synthetic oligonucleotide
  Sense strand starting at position 197 of SEQ ID NO: 1443
cuccaauauugccugguuu

SEQ ID NO: 113383 - RNA, 19 nt, Artificial Sequence
  Description of Artificial Sequence: Synthetic oligonucleotide
  Antisense strand to SEQ ID NO: 113382
aaaccaggcaauauuggag

SEQ ID NO: 113384 - RNA, 19 nt, Artificial Sequence
  Description of Artificial Sequence: Synthetic oligonucleotide
  Sense strand starting at position 166 of SEQ ID NO: 1443
ccugcuuagcuggaggaau

SEQ ID NO: 113385 - RNA, 19 nt, Artificial Sequence
  Description of Artificial Sequence: Synthetic oligonucleotide
  Antisense strand to SEQ ID NO: 113384
auuccuccagcuaagcagg

SEQ ID NO: 113386 - RNA, 19 nt, Artificial Sequence
  Description of Artificial Sequence: Synthetic oligonucleotide
  Sense strand starting at position 148 of SEQ ID NO: 1443
uguugauacuaaugaugac

SEQ ID NO: 113387 - RNA, 19 nt, Artificial Sequence
  Description of Artificial Sequence: Synthetic oligonucleotide
  Antisense strand to SEQ ID NO: 113386
gucaucauuaguaucaaca

SEQ ID NO: 113388 - RNA, 19 nt, Artificial Sequence
  Description of Artificial Sequence: Synthetic oligonucleotide
  Sense strand starting at position 145 of SEQ ID NO: 1443
uaguguugauacuaaugau

SEQ ID NO: 113389 - RNA, 19 nt, Artificial Sequence
  Description of Artificial Sequence: Synthetic oligonucleotide
  Antisense strand to SEQ ID NO: 113388
aucauuaguaucaacacua

SEQ ID NO: 113390 - RNA, 19 nt, Artificial Sequence
  Description of Artificial Sequence: Synthetic oligonucleotide
  Sense strand starting at position 140 of SEQ ID NO: 1443
gcugauaguguugauacua

SEQ ID NO: 113391 - RNA, 19 nt, Artificial Sequence
  Description of Artificial Sequence: Synthetic oligonucleotide
  Antisense strand to SEQ ID NO: 113390
uaguaucaacacuaucagc

SEQ ID NO: 113392 - RNA, 19 nt, Artificial Sequence
  Description of Artificial Sequence: Synthetic oligonucleotide
  Sense strand starting at position 120 of SEQ ID NO: 1443
ugauguuauuaaugacaac

SEQ ID NO: 113393 - RNA, 19 nt, Artificial Sequence
  Description of Artificial Sequence: Synthetic oligonucleotide
  Antisense strand to SEQ ID NO: 113392
guugucauuaauaacauca

SEQ ID NO: 113394 - RNA, 19 nt, Artificial Sequence
  Description of Artificial Sequence: Synthetic oligonucleotide
  Sense strand starting at position 108 of SEQ ID NO: 1443
agaugucaacacugauguu

SEQ ID NO: 113395 - RNA, 19 nt, Artificial Sequence
  Description of Artificial Sequence: Synthetic oligonucleotide
  Antisense strand to SEQ ID NO: 113394
aacaucaguguugacaucu

SEQ ID NO: 113396 - RNA, 19 nt, Artificial Sequence
  Description of Artificial Sequence: Synthetic oligonucleotide
  Sense strand starting at position 3978 of SEQ ID NO: 1444
cgagacucucccugucacu

SEQ ID NO: 113397 - RNA, 19 nt, Artificial Sequence
  Description of Artificial Sequence: Synthetic oligonucleotide
  Antisense strand to SEQ ID NO: 113396
agugacagggagagucucg

SEQ ID NO: 113398 - RNA, 19 nt, Artificial Sequence
  Description of Artificial Sequence: Synthetic oligonucleotide
  Sense strand starting at position 3942 of SEQ ID NO: 1444
cucagaacccugugucauu

SEQ ID NO: 113399 - RNA, 19 nt, Artificial Sequence
  Description of Artificial Sequence: Synthetic oligonucleotide
  Antisense strand to SEQ ID NO: 113398
aaugacacaggguucugag

SEQ ID NO: 113400 - RNA, 19 nt, Artificial Sequence
  Description of Artificial Sequence: Synthetic oligonucleotide
  Sense strand starting at position 3681 of SEQ ID NO: 1444
cggaaaggucccugcgaac

SEQ ID NO: 113401 - RNA, 19 nt, Artificial Sequence
  Description of Artificial Sequence: Synthetic oligonucleotide
  Antisense strand to SEQ ID NO: 113400
guucgcagggaccuuuccg

SEQ ID NO: 113402 - RNA, 19 nt, Artificial Sequence
  Description of Artificial Sequence: Synthetic oligonucleotide
  Sense strand starting at position 3680 of SEQ ID NO: 1444
acggaaaggucccugcgaa

SEQ ID NO: 113403 - RNA, 19 nt, Artificial Sequence
  Description of Artificial Sequence: Synthetic oligonucleotide
  Antisense strand to SEQ ID NO: 113402
uucgcagggaccuuuccgu

SEQ ID NO: 113404 - RNA, 19 nt, Artificial Sequence
  Description of Artificial Sequence: Synthetic oligonucleotide
  Sense strand starting at position 3250 of SEQ ID NO: 1444
ggaucuuggucagaaccaa

SEQ ID NO: 113405 - RNA, 19 nt, Artificial Sequence
  Description of Artificial Sequence: Synthetic oligonucleotide
  Antisense strand to SEQ ID NO: 113404
uugguucugaccaagaucc

SEQ ID NO: 113406 - RNA, 19 nt, Artificial Sequence
  Description of Artificial Sequence: Synthetic oligonucleotide
  Sense strand starting at position 3247 of SEQ ID NO: 1444
ucgggaucuuggucagaac

SEQ ID NO: 113407 - RNA, 19 nt, Artificial Sequence
  Description of Artificial Sequence: Synthetic oligonucleotide
  Antisense strand to SEQ ID NO: 113406
guucugaccaagaucccga

SEQ ID NO: 113408 - RNA, 19 nt, Artificial Sequence
  Description of Artificial Sequence: Synthetic oligonucleotide
  Sense strand starting at position 2813 of SEQ ID NO: 1444
ucgauuuauucgugaagaa

SEQ ID NO: 113409 - RNA, 19 nt, Artificial Sequence
  Description of Artificial Sequence: Synthetic oligonucleotide
  Antisense strand to SEQ ID NO: 113408
uucuucacgaauaaaucga

SEQ ID NO: 113410 - RNA, 19 nt, Artificial Sequence
  Description of Artificial Sequence: Synthetic oligonucleotide
  Sense strand starting at position 2495 of SEQ ID NO: 1444
ggaucaaucgcagaaccug

SEQ ID NO: 113411 - RNA, 19 nt, Artificial Sequence
  Description of Artificial Sequence: Synthetic oligonucleotide
  Antisense strand to SEQ ID NO: 113410
cagguucugcgauugaucc

SEQ ID NO: 113412 - RNA, 19 nt, Artificial Sequence
  Description of Artificial Sequence: Synthetic oligonucleotide
  Sense strand starting at position 2458 of SEQ ID NO: 1444
uccgaacucuaggaagaaa

SEQ ID NO: 113413 - RNA, 19 nt, Artificial Sequence
  Description of Artificial Sequence: Synthetic oligonucleotide
  Antisense strand to SEQ ID NO: 113412
uuucuuccuagaguucgga

SEQ ID NO: 113414 - RNA, 19 nt, Artificial Sequence
  Description of Artificial Sequence: Synthetic oligonucleotide
  Sense strand starting at position 2457 of SEQ ID NO: 1444
cuccgaacucuaggaagaa

SEQ ID NO: 113415 - RNA, 19 nt, Artificial Sequence
  Description of Artificial Sequence: Synthetic oligonucleotide
  Antisense strand to SEQ ID NO: 113414
uucuuccuagaguucggag

SEQ ID NO: 113416 - RNA, 19 nt, Artificial Sequence
  Description of Artificial Sequence: Synthetic oligonucleotide
  Sense strand starting at position 2449 of SEQ ID NO: 1444
agaacauucuccgaacucu

SEQ ID NO: 113417 - RNA, 19 nt, Artificial Sequence
  Description of Artificial Sequence: Synthetic oligonucleotide
  Antisense strand to SEQ ID NO: 113416
agaguucggagaauguucu

SEQ ID NO: 113418 - RNA, 19 nt, Artificial Sequence
  Description of Artificial Sequence: Synthetic oligonucleotide
  Sense strand starting at position 2447 of SEQ ID NO: 1444
guagaacauucuccgaacu

SEQ ID NO: 113419 - RNA, 19 nt, Artificial Sequence
  Description of Artificial Sequence: Synthetic oligonucleotide
  Antisense strand to SEQ ID NO: 113418
aguucggagaauguucuac

SEQ ID NO: 113420 - RNA, 19 nt, Artificial Sequence
  Description of Artificial Sequence: Synthetic oligonucleotide
  Sense strand starting at position 2446 of SEQ ID NO: 1444
gguagaacauucuccgaac

SEQ ID NO: 113421 - RNA, 19 nt, Artificial Sequence
  Description of Artificial Sequence: Synthetic oligonucleotide
  Antisense strand to SEQ ID NO: 113420
guucggagaauguucuacc

SEQ ID NO: 113422 - RNA, 19 nt, Artificial Sequence
  Description of Artificial Sequence: Synthetic oligonucleotide
  Sense strand starting at position 2438 of SEQ ID NO: 1444
guaaguuagguagaacauu

SEQ ID NO: 113423 - RNA, 19 nt, Artificial Sequence
  Description of Artificial Sequence: Synthetic oligonucleotide
  Antisense strand to SEQ ID NO: 113422
aauguucuaccuaacuuac

SEQ ID NO: 113424 - RNA, 19 nt, Artificial Sequence
  Description of Artificial Sequence: Synthetic oligonucleotide
  Sense strand starting at position 2435 of SEQ ID NO: 1444
ggaguaaguuagguagaac

SEQ ID NO: 113425 - RNA, 19 nt, Artificial Sequence
  Description of Artificial Sequence: Synthetic oligonucleotide
  Antisense strand to SEQ ID NO: 113424
guucuaccuaacuuacucc

SEQ ID NO: 113426 - RNA, 19 nt, Artificial Sequence
  Description of Artificial Sequence: Synthetic oligonucleotide
  Sense strand starting at position 2427 of SEQ ID NO: 1444
ugucacuuggaguaaguua

SEQ ID NO: 113427 - RNA, 19 nt, Artificial Sequence
  Description of Artificial Sequence: Synthetic oligonucleotide
  Antisense strand to SEQ ID NO: 113426
uaacuuacuccaagugaca

SEQ ID NO: 113428 - RNA, 19 nt, Artificial Sequence
  Description of Artificial Sequence: Synthetic oligonucleotide
  Sense strand starting at position 2422 of SEQ ID NO: 1444
gagcaugucacuuggagua

SEQ ID NO: 113429 - RNA, 19 nt, Artificial Sequence
  Description of Artificial Sequence: Synthetic oligonucleotide
  Antisense strand to SEQ ID NO: 113428
uacuccaagugacaugcuc

SEQ ID NO: 113430 - RNA, 19 nt, Artificial Sequence
  Description of Artificial Sequence: Synthetic oligonucleotide
  Sense strand starting at position 2329 of SEQ ID NO: 1444
gaugacugcguugaggaaa

SEQ ID NO: 113431 - RNA, 19 nt, Artificial Sequence
  Description of Artificial Sequence: Synthetic oligonucleotide
  Antisense strand to SEQ ID NO: 113430
uuuccucaacgcagucauc

SEQ ID NO: 113432 - RNA, 19 nt, Artificial Sequence
  Description of Artificial Sequence: Synthetic oligonucleotide
  Sense strand starting at position 2328 of SEQ ID NO: 1444
agaugacugcguugaggaa

SEQ ID NO: 113433 - RNA, 19 nt, Artificial Sequence
  Description of Artificial Sequence: Synthetic oligonucleotide
  Antisense strand to SEQ ID NO: 113432
uuccucaacgcagucaucu

SEQ ID NO: 113434 - RNA, 19 nt, Artificial Sequence
  Description of Artificial Sequence: Synthetic oligonucleotide
  Sense strand starting at position 2268 of SEQ ID NO: 1444
gcugauacguuauuucucu

SEQ ID NO: 113435 - RNA, 19 nt, Artificial Sequence
  Description of Artificial Sequence: Synthetic oligonucleotide
  Antisense strand to SEQ ID NO: 113434
agagaaauaacguaucagc

SEQ ID NO: 113436 - RNA, 19 nt, Artificial Sequence
  Description of Artificial Sequence: Synthetic oligonucleotide
  Sense strand starting at position 1461 of SEQ ID NO: 1444
agaccugguccacggagau

SEQ ID NO: 113437 - RNA, 19 nt, Artificial Sequence
  Description of Artificial Sequence: Synthetic oligonucleotide
  Antisense strand to SEQ ID NO: 113436
aucuccguggaccaggucu

SEQ ID NO: 113438 - RNA, 19 nt, Artificial Sequence
  Description of Artificial Sequence: Synthetic oligonucleotide
  Sense strand starting at position 1282 of SEQ ID NO: 1444
aggguugccuccucauaac

SEQ ID NO: 113439 - RNA, 19 nt, Artificial Sequence
  Description of Artificial Sequence: Synthetic oligonucleotide
  Antisense strand to SEQ ID NO: 113438
guuaugaggaggcaacccu

SEQ ID NO: 113440 - RNA, 19 nt, Artificial Sequence
  Description of Artificial Sequence: Synthetic oligonucleotide
  Sense strand starting at position 1024 of SEQ ID NO: 1444
cccagcuucguguaccaaa

SEQ ID NO: 113441 - RNA, 19 nt, Artificial Sequence
  Description of Artificial Sequence: Synthetic oligonucleotide
  Antisense strand to SEQ ID NO: 113440
uuugguacacgaagcuggg

SEQ ID NO: 113442 - RNA, 19 nt, Artificial Sequence
  Description of Artificial Sequence: Synthetic oligonucleotide
  Sense strand starting at position 993 of SEQ ID NO: 1444
gucagaguccugcagaaug

SEQ ID NO: 113443 - RNA, 19 nt, Artificial Sequence
  Description of Artificial Sequence: Synthetic oligonucleotide
  Antisense strand to SEQ ID NO: 113442
cauucugcaggacucugac

SEQ ID NO: 113444 - RNA, 19 nt, Artificial Sequence
  Description of Artificial Sequence: Synthetic oligonucleotide
  Sense strand starting at position 923 of SEQ ID NO: 1444
cgcauacucccauagguuu

SEQ ID NO: 113445 - RNA, 19 nt, Artificial Sequence
  Description of Artificial Sequence: Synthetic oligonucleotide
  Antisense strand to SEQ ID NO: 113444
aaaccuaugggaguaugcg

SEQ ID NO: 113446 - RNA, 19 nt, Artificial Sequence
  Description of Artificial Sequence: Synthetic oligonucleotide
  Sense strand starting at position 886 of SEQ ID NO: 1444
ccauaugaugccugaguac

SEQ ID NO: 113447 - RNA, 19 nt, Artificial Sequence
  Description of Artificial Sequence: Synthetic oligonucleotide
  Antisense strand to SEQ ID NO: 113446
guacucaggcaucauaugg

SEQ ID NO: 113448 - RNA, 19 nt, Artificial Sequence
  Description of Artificial Sequence: Synthetic oligonucleotide
  Sense strand starting at position 885 of SEQ ID NO: 1444
accauaugaugccugagua

SEQ ID NO: 113449 - RNA, 19 nt, Artificial Sequence
  Description of Artificial Sequence: Synthetic oligonucleotide
  Antisense strand to SEQ ID NO: 113448
uacucaggcaucauauggu

SEQ ID NO: 113450 - RNA, 19 nt, Artificial Sequence
  Description of Artificial Sequence: Synthetic oligonucleotide
  Sense strand starting at position 843 of SEQ ID NO: 1444
ccaugauagccauauguaa

SEQ ID NO: 113451 - RNA, 19 nt, Artificial Sequence
  Description of Artificial Sequence: Synthetic oligonucleotide
  Antisense strand to SEQ ID NO: 113450
uuacauauggcuaucaugg

SEQ ID NO: 113452 - RNA, 19 nt, Artificial Sequence
  Description of Artificial Sequence: Synthetic oligonucleotide
  Sense strand starting at position 841 of SEQ ID NO: 1444
ggccaugauagccauaugu

SEQ ID NO: 113453 - RNA, 19 nt, Artificial Sequence
  Description of Artificial Sequence: Synthetic oligonucleotide
  Antisense strand to SEQ ID NO: 113452
acauauggcuaucauggcc

SEQ ID NO: 113454 - RNA, 19 nt, Artificial Sequence
  Description of Artificial Sequence: Synthetic oligonucleotide
  Sense strand starting at position 832 of SEQ ID NO: 1444
ugucuugcuggccaugaua

SEQ ID NO: 113455 - RNA, 19 nt, Artificial Sequence
  Description of Artificial Sequence: Synthetic oligonucleotide
  Antisense strand to SEQ ID NO: 113454
uaucauggccagcaagaca

SEQ ID NO: 113456 - RNA, 19 nt, Artificial Sequence
  Description of Artificial Sequence: Synthetic oligonucleotide
  Sense strand starting at position 831 of SEQ ID NO: 1444
augucuugcuggccaugau

SEQ ID NO: 113457 - RNA, 19 nt, Artificial Sequence
  Description of Artificial Sequence: Synthetic oligonucleotide
  Antisense strand to SEQ ID NO: 113456
aucauggccagcaagacau

SEQ ID NO: 113458 - RNA, 19 nt, Artificial Sequence
  Description of Artificial Sequence: Synthetic oligonucleotide
  Sense strand starting at position 699 of SEQ ID NO: 1444
acuuccagacagugaugau

SEQ ID NO: 113459 - RNA, 19 nt, Artificial Sequence
  Description of Artificial Sequence: Synthetic oligonucleotide
  Antisense strand to SEQ ID NO: 113458
aucaucacugucuggaagu

SEQ ID NO: 113460 - RNA, 19 nt, Artificial Sequence
  Description of Artificial Sequence: Synthetic oligonucleotide
  Sense strand starting at position 681 of SEQ ID NO: 1444
cugcaagcugcucaaguaa

SEQ ID NO: 113461 - RNA, 19 nt, Artificial Sequence
  Description of Artificial Sequence: Synthetic oligonucleotide
  Antisense strand to SEQ ID NO: 113460
uuacuugagcagcuugcag

SEQ ID NO: 113462 - RNA, 19 nt, Artificial Sequence
  Description of Artificial Sequence: Synthetic oligonucleotide
  Sense strand starting at position 639 of SEQ ID NO: 1444
cguuaauuaccaugagaua

SEQ ID NO: 113463 - RNA, 19 nt, Artificial Sequence
  Description of Artificial Sequence: Synthetic oligonucleotide
  Antisense strand to SEQ ID NO: 113462
uaucucaugguaauuaacg

SEQ ID NO: 113464 - RNA, 19 nt, Artificial Sequence
  Description of Artificial Sequence: Synthetic oligonucleotide
  Sense strand starting at position 630 of SEQ ID NO: 1444
gugccuucccguuaauuac

SEQ ID NO: 113465 - RNA, 19 nt, Artificial Sequence
  Description of Artificial Sequence: Synthetic oligonucleotide
  Antisense strand to SEQ ID NO: 113464
guaauuaacgggaaggcac

SEQ ID NO: 113466 - RNA, 19 nt, Artificial Sequence
  Description of Artificial Sequence: Synthetic oligonucleotide
  Sense strand starting at position 626 of SEQ ID NO: 1444
uugagugccuucccguuaa

SEQ ID NO: 113467 - RNA, 19 nt, Artificial Sequence
  Description of Artificial Sequence: Synthetic oligonucleotide
  Antisense strand to SEQ ID NO: 113466
uuaacgggaaggcacucaa

SEQ ID NO: 113468 - RNA, 19 nt, Artificial Sequence
  Description of Artificial Sequence: Synthetic oligonucleotide
  Sense strand starting at position 595 of SEQ ID NO: 1444
cuggucucccuagagcuau

SEQ ID NO: 113469 - RNA, 19 nt, Artificial Sequence
  Description of Artificial Sequence: Synthetic oligonucleotide
  Antisense strand to SEQ ID NO: 113468
auagcucuagggagaccag

SEQ ID NO: 113470 - RNA, 19 nt, Artificial Sequence
  Description of Artificial Sequence: Synthetic oligonucleotide
  Sense strand starting at position 222 of SEQ ID NO: 1444
uccauuaucuccucguuag

SEQ ID NO: 113471 - RNA, 19 nt, Artificial Sequence
  Description of Artificial Sequence: Synthetic oligonucleotide
  Antisense strand to SEQ ID NO: 113470
cuaacgaggagauaaugga

SEQ ID NO: 113472 - RNA, 19 nt, Artificial Sequence
  Description of Artificial Sequence: Synthetic oligonucleotide
  Sense strand starting at position 181 of SEQ ID NO: 1444
gccucauucguuuggauuc

SEQ ID NO: 113473 - RNA, 19 nt, Artificial Sequence
  Description of Artificial Sequence: Synthetic oligonucleotide
  Antisense strand to SEQ ID NO: 113472
gaauccaaacgaaugaggc

SEQ ID NO: 113474 - RNA, 19 nt, Artificial Sequence
  Description of Artificial Sequence: Synthetic oligonucleotide
  Sense strand starting at position 179 of SEQ ID NO: 1444
cugccucauucguuuggau

SEQ ID NO: 113475 - RNA, 19 nt, Artificial Sequence
  Description of Artificial Sequence: Synthetic oligonucleotide
  Antisense strand to SEQ ID NO: 113474
auccaaacgaaugaggcag

SEQ ID NO: 113476 - RNA, 19 nt, Artificial Sequence
  Description of Artificial Sequence: Synthetic oligonucleotide
  Sense strand starting at position 308 of SEQ ID NO: 1445
agaauaaauuacucugggu

SEQ ID NO: 113477 - RNA, 19 nt, Artificial Sequence
  Description of Artificial Sequence: Synthetic oligonucleotide
  Antisense strand to SEQ ID NO: 113476
acccagaguaauuuauucu

SEQ ID NO: 113478 - RNA, 19 nt, Artificial Sequence
  Description of Artificial Sequence: Synthetic oligonucleotide
  Sense strand starting at position 310 of SEQ ID NO: 1445
aauaaauuacucugggugu

SEQ ID NO: 113479 - RNA, 19 nt, Artificial Sequence
  Description of Artificial Sequence: Synthetic oligonucleotide
  Antisense strand to SEQ ID NO: 113478
acacccagaguaauuuauu

SEQ ID NO: 113480 - RNA, 19 nt, Artificial Sequence
  Description of Artificial Sequence: Synthetic oligonucleotide
  Sense strand starting at position 313 of SEQ ID NO: 1445
aaauuacucugggugugga

SEQ ID NO: 113481 - RNA, 19 nt, Artificial Sequence
  Description of Artificial Sequence: Synthetic oligonucleotide
  Antisense strand to SEQ ID NO: 113480
uccacacccagaguaauuu

SEQ ID NO: 113482 - RNA, 19 nt, Artificial Sequence
  Description of Artificial Sequence: Synthetic oligonucleotide
  Sense strand starting at position 314 of SEQ ID NO: 1445
aauuacucuggguguggaa

SEQ ID NO: 113483 - RNA, 19 nt, Artificial Sequence
  Description of Artificial Sequence: Synthetic oligonucleotide
  Antisense strand to SEQ ID NO: 113482
uuccacacccagaguaauu

SEQ ID NO: 113484 - RNA, 19 nt, Artificial Sequence
  Description of Artificial Sequence: Synthetic oligonucleotide
  Sense strand starting at position 364 of SEQ ID NO: 1445
ccaggugauccuuacguac

SEQ ID NO: 113485 - RNA, 19 nt, Artificial Sequence
  Description of Artificial Sequence: Synthetic oligonucleotide
  Antisense strand to SEQ ID NO: 113484
guacguaaggaucaccugg

SEQ ID NO: 113486 - RNA, 19 nt, Artificial Sequence
  Description of Artificial Sequence: Synthetic oligonucleotide
  Sense strand starting at position 465 of SEQ ID NO: 1445
agaaauucucacugcaagu

SEQ ID NO: 113487 - RNA, 19 nt, Artificial Sequence
  Description of Artificial Sequence: Synthetic oligonucleotide
  Antisense strand to SEQ ID NO: 113486
acuugcagugagaauuucu

SEQ ID NO: 113488 - RNA, 19 nt, Artificial Sequence
  Description of Artificial Sequence: Synthetic oligonucleotide
  Sense strand starting at position 815 of SEQ ID NO: 1445
ccgcaaguucuauguguua

SEQ ID NO: 113489 - RNA, 19 nt, Artificial Sequence
  Description of Artificial Sequence: Synthetic oligonucleotide
  Antisense strand to SEQ ID NO: 113488
uaacacauagaacuugcgg

SEQ ID NO: 113490 - RNA, 19 nt, Artificial Sequence
  Description of Artificial Sequence: Synthetic oligonucleotide
  Sense strand starting at position 817 of SEQ ID NO: 1445
gcaaguucuauguguuagg

SEQ ID NO: 113491 - RNA, 19 nt, Artificial Sequence
  Description of Artificial Sequence: Synthetic oligonucleotide
  Antisense strand to SEQ ID NO: 113490
ccuaacacauagaacuugc

SEQ ID NO: 113492 - RNA, 19 nt, Artificial Sequence
  Description of Artificial Sequence: Synthetic oligonucleotide
  Sense strand starting at position 818 of SEQ ID NO: 1445
caaguucuauguguuagga

SEQ ID NO: 113493 - RNA, 19 nt, Artificial Sequence
  Description of Artificial Sequence: Synthetic oligonucleotide
  Antisense strand to SEQ ID NO: 113492
uccuaacacauagaacuug

SEQ ID NO: 113494 - RNA, 19 nt, Artificial Sequence
  Description of Artificial Sequence: Synthetic oligonucleotide
  Sense strand starting at position 826 of SEQ ID NO: 1445
auguguuaggagcaauaua

SEQ ID NO: 113495 - RNA, 19 nt, Artificial Sequence
  Description of Artificial Sequence: Synthetic oligonucleotide
  Antisense strand to SEQ ID NO: 113494
uauauugcuccuaacacau

SEQ ID NO: 113496 - RNA, 19 nt, Artificial Sequence
  Description of Artificial Sequence: Synthetic oligonucleotide
  Sense strand starting at position 1440 of SEQ ID NO: 1445
gcaaguuugcgaccacugu

SEQ ID NO: 113497 - RNA, 19 nt, Artificial Sequence
  Description of Artificial Sequence: Synthetic oligonucleotide
  Antisense strand to SEQ ID NO: 113496
acaguggucgcaaacuugc

SEQ ID NO: 113498 - RNA, 19 nt, Artificial Sequence
  Description of Artificial Sequence: Synthetic oligonucleotide
  Sense strand starting at position 1449 of SEQ ID NO: 1445
cgaccacugucccugcaau

SEQ ID NO: 113499 - RNA, 19 nt, Artificial Sequence
  Description of Artificial Sequence: Synthetic oligonucleotide
  Antisense strand to SEQ ID NO: 113498
auugcagggacaguggucg

SEQ ID NO: 113500 - RNA, 19 nt, Artificial Sequence
  Description of Artificial Sequence: Synthetic oligonucleotide
  Sense strand starting at position 2004 of SEQ ID NO: 1445
auuccaaguuguuauaaac

SEQ ID NO: 113501 - RNA, 19 nt, Artificial Sequence
  Description of Artificial Sequence: Synthetic oligonucleotide
  Antisense strand to SEQ ID NO: 113500
guuuauaacaacuuggaau

SEQ ID NO: 113502 - RNA, 19 nt, Artificial Sequence
  Description of Artificial Sequence: Synthetic oligonucleotide
  Sense strand starting at position 2151 of SEQ ID NO: 1445
cgggaaaggugucaaugga

SEQ ID NO: 113503 - RNA, 19 nt, Artificial Sequence
  Description of Artificial Sequence: Synthetic oligonucleotide
  Antisense strand to SEQ ID NO: 113502
uccauugacaccuuucccg

SEQ ID NO: 113504 - RNA, 19 nt, Artificial Sequence
  Description of Artificial Sequence: Synthetic oligonucleotide
  Sense strand starting at position 2271 of SEQ ID NO: 1445
gcgcuugguccugcuuaau

SEQ ID NO: 113505 - RNA, 19 nt, Artificial Sequence
  Description of Artificial Sequence: Synthetic oligonucleotide
  Antisense strand to SEQ ID NO: 113504
auuaagcaggaccaagcgc

SEQ ID NO: 113506 - RNA, 19 nt, Artificial Sequence
  Description of Artificial Sequence: Synthetic oligonucleotide
  Sense strand starting at position 2283 of SEQ ID NO: 1445
gcuuaaugcccuguuguuu

SEQ ID NO: 113507 - RNA, 19 nt, Artificial Sequence
  Description of Artificial Sequence: Synthetic oligonucleotide
  Antisense strand to SEQ ID NO: 113506
aaacaacagggcauuaagc

SEQ ID NO: 113508 - RNA, 19 nt, Artificial Sequence
  Description of Artificial Sequence: Synthetic oligonucleotide
  Sense strand starting at position 2331 of SEQ ID NO: 1445
gcgaucugagggcacuaaa

SEQ ID NO: 113509 - RNA, 19 nt, Artificial Sequence
  Description of Artificial Sequence: Synthetic oligonucleotide
  Antisense strand to SEQ ID NO: 113508
uuuagugcccucagaucgc

SEQ ID NO: 113510 - RNA, 19 nt, Artificial Sequence
  Description of Artificial Sequence: Synthetic oligonucleotide
  Sense strand starting at position 2375 of SEQ ID NO: 1445
gaguaauuugcuuguccca

SEQ ID NO: 113511 - RNA, 19 nt, Artificial Sequence
  Description of Artificial Sequence: Synthetic oligonucleotide
  Antisense strand to SEQ ID NO: 113510
ugggacaagcaaauuacuc

SEQ ID NO: 113512 - RNA, 19 nt, Artificial Sequence
  Description of Artificial Sequence: Synthetic oligonucleotide
  Sense strand starting at position 2377 of SEQ ID NO: 1445
guaauuugcuugucccaag

SEQ ID NO: 113513 - RNA, 19 nt, Artificial Sequence
  Description of Artificial Sequence: Synthetic oligonucleotide
  Antisense strand to SEQ ID NO: 113512
cuugggacaagcaaauuac

SEQ ID NO: 113514 - RNA, 19 nt, Artificial Sequence
  Description of Artificial Sequence: Synthetic oligonucleotide
  Sense strand starting at position 2851 of SEQ ID NO: 1445
gcuucuaagguuuaguaga

SEQ ID NO: 113515 - RNA, 19 nt, Artificial Sequence
  Description of Artificial Sequence: Synthetic oligonucleotide
  Antisense strand to SEQ ID NO: 113514
ucuacuaaaccuuagaagc

SEQ ID NO: 113516 - RNA, 19 nt, Artificial Sequence
  Description of Artificial Sequence: Synthetic oligonucleotide
  Sense strand starting at position 2853 of SEQ ID NO: 1445
uucuaagguuuaguagauu

SEQ ID NO: 113517 - RNA, 19 nt, Artificial Sequence
  Description of Artificial Sequence: Synthetic oligonucleotide
  Antisense strand to SEQ ID NO: 113516
aaucuacuaaaccuuagaa

SEQ ID NO: 113518 - RNA, 19 nt, Artificial Sequence
  Description of Artificial Sequence: Synthetic oligonucleotide
  Sense strand starting at position 2957 of SEQ ID NO: 1445
uuacaugccgacuaucuaa

SEQ ID NO: 113519 - RNA, 19 nt, Artificial Sequence
  Description of Artificial Sequence: Synthetic oligonucleotide
  Antisense strand to SEQ ID NO: 113518
uuagauagucggcauguaa

SEQ ID NO: 113520 - RNA, 19 nt, Artificial Sequence
  Description of Artificial Sequence: Synthetic oligonucleotide
  Sense strand starting at position 3053 of SEQ ID NO: 1445
gguuaugagguuugacuug

SEQ ID NO: 113521 - RNA, 19 nt, Artificial Sequence
  Description of Artificial Sequence: Synthetic oligonucleotide
  Antisense strand to SEQ ID NO: 113520
caagucaaaccucauaacc

SEQ ID NO: 113522 - RNA, 19 nt, Artificial Sequence
  Description of Artificial Sequence: Synthetic oligonucleotide
  Sense strand starting at position 3060 of SEQ ID NO: 1445
agguuugacuugagacgga

SEQ ID NO: 113523 - RNA, 19 nt, Artificial Sequence
  Description of Artificial Sequence: Synthetic oligonucleotide
  Antisense strand to SEQ ID NO: 113522
uccgucucaagucaaaccu

SEQ ID NO: 113524 - RNA, 19 nt, Artificial Sequence
  Description of Artificial Sequence: Synthetic oligonucleotide
  Sense strand starting at position 3360 of SEQ ID NO: 1445
uggaguugcuagguccaga

SEQ ID NO: 113525 - RNA, 19 nt, Artificial Sequence
  Description of Artificial Sequence: Synthetic oligonucleotide
  Antisense strand to SEQ ID NO: 113524
ucuggaccuagcaacucca

SEQ ID NO: 113526 - RNA, 19 nt, Artificial Sequence
  Description of Artificial Sequence: Synthetic oligonucleotide
  Sense strand starting at position 3405 of SEQ ID NO: 1445
gugaaaugagaauggccau

SEQ ID NO: 113527 - RNA, 19 nt, Artificial Sequence
  Description of Artificial Sequence: Synthetic oligonucleotide
  Antisense strand to SEQ ID NO: 113526
auggccauucucauuucac

SEQ ID NO: 113528 - RNA, 19 nt, Artificial Sequence
  Description of Artificial Sequence: Synthetic oligonucleotide
  Sense strand starting at position 3411 of SEQ ID NO: 1445
ugagaauggccauagguuu

SEQ ID NO: 113529 - RNA, 19 nt, Artificial Sequence
  Description of Artificial Sequence: Synthetic oligonucleotide
  Antisense strand to SEQ ID NO: 113528
aaaccuauggccauucuca

SEQ ID NO: 113530 - RNA, 19 nt, Artificial Sequence
  Description of Artificial Sequence: Synthetic oligonucleotide
  Sense strand starting at position 3485 of SEQ ID NO: 1445
accuaauccugugaaauga

SEQ ID NO: 113531 - RNA, 19 nt, Artificial Sequence
  Description of Artificial Sequence: Synthetic oligonucleotide
  Antisense strand to SEQ ID NO: 113530
ucauuucacaggauuaggu

SEQ ID NO: 113532 - RNA, 19 nt, Artificial Sequence
  Description of Artificial Sequence: Synthetic oligonucleotide
  Sense strand starting at position 3502 of SEQ ID NO: 1445
gaguauuauucuguccaag

SEQ ID NO: 113533 - RNA, 19 nt, Artificial Sequence
  Description of Artificial Sequence: Synthetic oligonucleotide
  Antisense strand to SEQ ID NO: 113532
cuuggacagaauaauacuc

SEQ ID NO: 113534 - RNA, 19 nt, Artificial Sequence
  Description of Artificial Sequence: Synthetic oligonucleotide
  Sense strand starting at position 3504 of SEQ ID NO: 1445
guauuauucuguccaaggc

SEQ ID NO: 113535 - RNA, 19 nt, Artificial Sequence
  Description of Artificial Sequence: Synthetic oligonucleotide
  Antisense strand to SEQ ID NO: 113534
gccuuggacagaauaauac

SEQ ID NO: 113536 - RNA, 19 nt, Artificial Sequence
  Description of Artificial Sequence: Synthetic oligonucleotide
  Sense strand starting at position 3595 of SEQ ID NO: 1445
gauccucuucccugaggga

SEQ ID NO: 113537 - RNA, 19 nt, Artificial Sequence
  Description of Artificial Sequence: Synthetic oligonucleotide
  Antisense strand to SEQ ID NO: 113536
ucccucagggaagaggauc

SEQ ID NO: 113538 - RNA, 19 nt, Artificial Sequence
  Description of Artificial Sequence: Synthetic oligonucleotide
  Sense strand starting at position 3642 of SEQ ID NO: 1445
cuggauggauucuagcuau

SEQ ID NO: 113539 - RNA, 19 nt, Artificial Sequence
  Description of Artificial Sequence: Synthetic oligonucleotide
  Antisense strand to SEQ ID NO: 113538
auagcuagaauccauccag

SEQ ID NO: 113540 - RNA, 19 nt, Artificial Sequence
  Description of Artificial Sequence: Synthetic oligonucleotide
  Sense strand starting at position 3645 of SEQ ID NO: 1445
gauggauucuagcuaugcu

SEQ ID NO: 113541 - RNA, 19 nt, Artificial Sequence
  Description of Artificial Sequence: Synthetic oligonucleotide
  Antisense strand to SEQ ID NO: 113540
agcauagcuagaauccauc

SEQ ID NO: 113542 - RNA, 19 nt, Artificial Sequence
  Description of Artificial Sequence: Synthetic oligonucleotide
  Sense strand starting at position 3648 of SEQ ID NO: 1445
ggauucuagcuaugcugga

SEQ ID NO: 113543 - RNA, 19 nt, Artificial Sequence
  Description of Artificial Sequence: Synthetic oligonucleotide
  Antisense strand to SEQ ID NO: 113542
uccagcauagcuagaaucc

SEQ ID NO: 113544 - RNA, 19 nt, Artificial Sequence
  Description of Artificial Sequence: Synthetic oligonucleotide
  Sense strand starting at position 3799 of SEQ ID NO: 1445
ucuagugugaguuacagau

SEQ ID NO: 113545 - RNA, 19 nt, Artificial Sequence
  Description of Artificial Sequence: Synthetic oligonucleotide
  Antisense strand to SEQ ID NO: 113544
aucuguaacucacacuaga

SEQ ID NO: 113546 - RNA, 19 nt, Artificial Sequence
  Description of Artificial Sequence: Synthetic oligonucleotide
  Sense strand starting at position 3803 of SEQ ID NO: 1445
gugugaguuacagaugucu

SEQ ID NO: 113547 - RNA, 19 nt, Artificial Sequence
  Description of Artificial Sequence: Synthetic oligonucleotide
  Antisense strand to SEQ ID NO: 113546
agacaucuguaacucacac

SEQ ID NO: 113548 - RNA, 19 nt, Artificial Sequence
  Description of Artificial Sequence: Synthetic oligonucleotide
  Sense strand starting at position 3838 of SEQ ID NO: 1445
cucuuuaucuccuuuguga

SEQ ID NO: 113549 - RNA, 19 nt, Artificial Sequence
  Description of Artificial Sequence: Synthetic oligonucleotide
  Antisense strand to SEQ ID NO: 113548
ucacaaaggagauaaagag

SEQ ID NO: 113550 - RNA, 19 nt, Artificial Sequence
  Description of Artificial Sequence: Synthetic oligonucleotide
  Sense strand starting at position 3840 of SEQ ID NO: 1445
cuuuaucuccuuugugacu

SEQ ID NO: 113551 - RNA, 19 nt, Artificial Sequence
  Description of Artificial Sequence: Synthetic oligonucleotide
  Antisense strand to SEQ ID NO: 113550
agucacaaaggagauaaag

SEQ ID NO: 113552 - RNA, 19 nt, Artificial Sequence
  Description of Artificial Sequence: Synthetic oligonucleotide
  Sense strand starting at position 3845 of SEQ ID NO: 1445
ucuccuuugugacuggaga

SEQ ID NO: 113553 - RNA, 19 nt, Artificial Sequence
  Description of Artificial Sequence: Synthetic oligonucleotide
  Antisense strand to SEQ ID NO: 113552
ucuccagucacaaaggaga

SEQ ID NO: 113554 - RNA, 19 nt, Artificial Sequence
  Description of Artificial Sequence: Synthetic oligonucleotide
  Sense strand starting at position 3888 of SEQ ID NO: 1445
auguaucgcucccaaauuu

SEQ ID NO: 113555 - RNA, 19 nt, Artificial Sequence
  Description of Artificial Sequence: Synthetic oligonucleotide
  Antisense strand to SEQ ID NO: 113554
aaauuugggagcgauacau

SEQ ID NO: 113556 - RNA, 19 nt, Artificial Sequence
  Description of Artificial Sequence: Synthetic oligonucleotide
  Sense strand starting at position 191 of SEQ ID NO: 1446
aauauucuacgugaguuga

SEQ ID NO: 113557 - RNA, 19 nt, Artificial Sequence
  Description of Artificial Sequence: Synthetic oligonucleotide
  Antisense strand to SEQ ID NO: 113556
ucaacucacguagaauauu

SEQ ID NO: 113558 - RNA, 19 nt, Artificial Sequence
  Description of Artificial Sequence: Synthetic oligonucleotide
  Sense strand starting at position 199 of SEQ ID NO: 1446
acgugaguugauggauaca

SEQ ID NO: 113559 - RNA, 19 nt, Artificial Sequence
  Description of Artificial Sequence: Synthetic oligonucleotide
  Antisense strand to SEQ ID NO: 113558
uguauccaucaacucacgu

SEQ ID NO: 113560 - RNA, 19 nt, Artificial Sequence
  Description of Artificial Sequence: Synthetic oligonucleotide
  Sense strand starting at position 209 of SEQ ID NO: 1446
auggauacauuggucaagu

SEQ ID NO: 113561 - RNA, 19 nt, Artificial Sequence
  Description of Artificial Sequence: Synthetic oligonucleotide
  Antisense strand to SEQ ID NO: 113560
acuugaccaauguauccau

SEQ ID NO: 113562 - RNA, 19 nt, Artificial Sequence
  Description of Artificial Sequence: Synthetic oligonucleotide
  Sense strand starting at position 210 of SEQ ID NO: 1446
uggauacauuggucaaguu

SEQ ID NO: 113563 - RNA, 19 nt, Artificial Sequence
  Description of Artificial Sequence: Synthetic oligonucleotide
  Antisense strand to SEQ ID NO: 113562
aacuugaccaauguaucca

SEQ ID NO: 113564 - RNA, 19 nt, Artificial Sequence
  Description of Artificial Sequence: Synthetic oligonucleotide
  Sense strand starting at position 211 of SEQ ID NO: 1446
ggauacauuggucaaguuu

SEQ ID NO: 113565 - RNA, 19 nt, Artificial Sequence
  Description of Artificial Sequence: Synthetic oligonucleotide
  Antisense strand to SEQ ID NO: 113564
aaacuugaccaauguaucc

SEQ ID NO: 113566 - RNA, 19 nt, Artificial Sequence
  Description of Artificial Sequence: Synthetic oligonucleotide
  Sense strand starting at position 246 of SEQ ID NO: 1446
cgcaaacuauacucugaaa

SEQ ID NO: 113567 - RNA, 19 nt, Artificial Sequence
  Description of Artificial Sequence: Synthetic oligonucleotide
  Antisense strand to SEQ ID NO: 113566
uuucagaguauaguuugcg

SEQ ID NO: 113568 - RNA, 19 nt, Artificial Sequence
  Description of Artificial Sequence: Synthetic oligonucleotide
  Sense strand starting at position 305 of SEQ ID NO: 1446
cagaguagagaucgugagu

SEQ ID NO: 113569 - RNA, 19 nt, Artificial Sequence
  Description of Artificial Sequence: Synthetic oligonucleotide
  Antisense strand to SEQ ID NO: 113568
acucacgaucucuacucug

SEQ ID NO: 113570 - RNA, 19 nt, Artificial Sequence
  Description of Artificial Sequence: Synthetic oligonucleotide
  Sense strand starting at position 308 of SEQ ID NO: 1446
aguagagaucgugaguuac

SEQ ID NO: 113571 - RNA, 19 nt, Artificial Sequence
  Description of Artificial Sequence: Synthetic oligonucleotide
  Antisense strand to SEQ ID NO: 113570
guaacucacgaucucuacu

SEQ ID NO: 113572 - RNA, 19 nt, Artificial Sequence
  Description of Artificial Sequence: Synthetic oligonucleotide
  Sense strand starting at position 310 of SEQ ID NO: 1446
uagagaucgugaguuacca

SEQ ID NO: 113573 - RNA, 19 nt, Artificial Sequence
  Description of Artificial Sequence: Synthetic oligonucleotide
  Antisense strand to SEQ ID NO: 113572
ugguaacucacgaucucua

SEQ ID NO: 113574 - RNA, 19 nt, Artificial Sequence
  Description of Artificial Sequence: Synthetic oligonucleotide
  Sense strand starting at position 312 of SEQ ID NO: 1446
gagaucgugaguuaccaca

SEQ ID NO: 113575 - RNA, 19 nt, Artificial Sequence
  Description of Artificial Sequence: Synthetic oligonucleotide
  Antisense strand to SEQ ID NO: 113574
ugugguaacucacgaucuc

SEQ ID NO: 113576 - RNA, 19 nt, Artificial Sequence
  Description of Artificial Sequence: Synthetic oligonucleotide
  Sense strand starting at position 314 of SEQ ID NO: 1446
gaucgugaguuaccacaga

SEQ ID NO: 113577 - RNA, 19 nt, Artificial Sequence
  Description of Artificial Sequence: Synthetic oligonucleotide
  Antisense strand to SEQ ID NO: 113576
ucugugguaacucacgauc

SEQ ID NO: 113578 - RNA, 19 nt, Artificial Sequence
  Description of Artificial Sequence: Synthetic oligonucleotide
  Sense strand starting at position 328 of SEQ ID NO: 1446
acagaugcugauugaaaca

SEQ ID NO: 113579 - RNA, 19 nt, Artificial Sequence
  Description of Artificial Sequence: Synthetic oligonucleotide
  Antisense strand to SEQ ID NO: 113578
uguuucaaucagcaucugu

SEQ ID NO: 113580 - RNA, 19 nt, Artificial Sequence
  Description of Artificial Sequence: Synthetic oligonucleotide
  Sense strand starting at position 412 of SEQ ID NO: 1446
ccaguuggaggaugaucua

SEQ ID NO: 113581 - RNA, 19 nt, Artificial Sequence
  Description of Artificial Sequence: Synthetic oligonucleotide
  Antisense strand to SEQ ID NO: 113580
uagaucauccuccaacugg

SEQ ID NO: 113582 - RNA, 19 nt, Artificial Sequence
  Description of Artificial Sequence: Synthetic oligonucleotide
  Sense strand starting at position 538 of SEQ ID NO: 1446
ggaagcaacgacuguuaaa

SEQ ID NO: 113583 - RNA, 19 nt, Artificial Sequence
  Description of Artificial Sequence: Synthetic oligonucleotide
  Antisense strand to SEQ ID NO: 113582
uuuaacagucguugcuucc

SEQ ID NO: 113584 - RNA, 19 nt, Artificial Sequence
  Description of Artificial Sequence: Synthetic oligonucleotide
  Sense strand starting at position 663 of SEQ ID NO: 1446
gccucaacagauuggacua

SEQ ID NO: 113585 - RNA, 19 nt, Artificial Sequence
  Description of Artificial Sequence: Synthetic oligonucleotide
  Antisense strand to SEQ ID NO: 113584
uaguccaaucuguugaggc

SEQ ID NO: 113586 - RNA, 19 nt, Artificial Sequence
  Description of Artificial Sequence: Synthetic oligonucleotide
  Sense strand starting at position 712 of SEQ ID NO: 1446
auacaauagccuggagaau

SEQ ID NO: 113587 - RNA, 19 nt, Artificial Sequence
  Description of Artificial Sequence: Synthetic oligonucleotide
  Antisense strand to SEQ ID NO: 113586
auucuccaggcuauuguau

SEQ ID NO: 113588 - RNA, 19 nt, Artificial Sequence
  Description of Artificial Sequence: Synthetic oligonucleotide
  Sense strand starting at position 763 of SEQ ID NO: 1446
auagcaaacuuguugaaau

SEQ ID NO: 113589 - RNA, 19 nt, Artificial Sequence
  Description of Artificial Sequence: Synthetic oligonucleotide
  Antisense strand to SEQ ID NO: 113588
auuucaacaaguuugcuau

SEQ ID NO: 113590 - RNA, 19 nt, Artificial Sequence
  Description of Artificial Sequence: Synthetic oligonucleotide
  Sense strand starting at position 785 of SEQ ID NO: 1446
gagaaugaagucugauggu

SEQ ID NO: 113591 - RNA, 19 nt, Artificial Sequence
  Description of Artificial Sequence: Synthetic oligonucleotide
  Antisense strand to SEQ ID NO: 113590
accaucagacuucauucuc

SEQ ID NO: 113592 - RNA, 19 nt, Artificial Sequence
  Description of Artificial Sequence: Synthetic oligonucleotide
  Sense strand starting at position 969 of SEQ ID NO: 1446
cauuucuagucggagagaa

SEQ ID NO: 113593 - RNA, 19 nt, Artificial Sequence
  Description of Artificial Sequence: Synthetic oligonucleotide
  Antisense strand to SEQ ID NO: 113592
uucucuccgacuagaaaug

SEQ ID NO: 113594 - RNA, 19 nt, Artificial Sequence
  Description of Artificial Sequence: Synthetic oligonucleotide
  Sense strand starting at position 2127 of SEQ ID NO: 1446
gguccuguuagucaagaug

SEQ ID NO: 113595 - RNA, 19 nt, Artificial Sequence
  Description of Artificial Sequence: Synthetic oligonucleotide
  Antisense strand to SEQ ID NO: 113594
caucuugacuaacaggacc

SEQ ID NO: 113596 - RNA, 19 nt, Artificial Sequence
  Description of Artificial Sequence: Synthetic oligonucleotide
  Sense strand starting at position 2135 of SEQ ID NO: 1446
uagucaagaugcucugaga

SEQ ID NO: 113597 - RNA, 19 nt, Artificial Sequence
  Description of Artificial Sequence: Synthetic oligonucleotide
  Antisense strand to SEQ ID NO: 113596
ucucagagcaucuugacua

SEQ ID NO: 113598 - RNA, 19 nt, Artificial Sequence
  Description of Artificial Sequence: Synthetic oligonucleotide
  Sense strand starting at position 2199 of SEQ ID NO: 1446
ugguuuccacuccagaguu

SEQ ID NO: 113599 - RNA, 19 nt, Artificial Sequence
  Description of Artificial Sequence: Synthetic oligonucleotide
  Antisense strand to SEQ ID NO: 113598
aacucuggaguggaaacca

SEQ ID NO: 113600 - RNA, 19 nt, Artificial Sequence
  Description of Artificial Sequence: Synthetic oligonucleotide
  Sense strand starting at position 2279 of SEQ ID NO: 1446
cguugcucaguguuaguuu

SEQ ID NO: 113601 - RNA, 19 nt, Artificial Sequence
  Description of Artificial Sequence: Synthetic oligonucleotide
  Antisense strand to SEQ ID NO: 113600
aaacuaacacugagcaacg

SEQ ID NO: 113602 - RNA, 19 nt, Artificial Sequence
  Description of Artificial Sequence: Synthetic oligonucleotide
  Sense strand starting at position 2316 of SEQ ID NO: 1446
cugccuugaucaccuugaa

SEQ ID NO: 113603 - RNA, 19 nt, Artificial Sequence
  Description of Artificial Sequence: Synthetic oligonucleotide
  Antisense strand to SEQ ID NO: 113602
uucaaggugaucaaggcag

SEQ ID NO: 113604 - RNA, 19 nt, Artificial Sequence
  Description of Artificial Sequence: Synthetic oligonucleotide
  Sense strand starting at position 2402 of SEQ ID NO: 1446
gagggaaauuccuuagguu

SEQ ID NO: 113605 - RNA, 19 nt, Artificial Sequence
  Description of Artificial Sequence: Synthetic oligonucleotide
  Antisense strand to SEQ ID NO: 113604
aaccuaaggaauuucccuc

SEQ ID NO: 113606 - RNA, 19 nt, Artificial Sequence
  Description of Artificial Sequence: Synthetic oligonucleotide
  Sense strand starting at position 2555 of SEQ ID NO: 1446
cauucuggaccuugagauc

SEQ ID NO: 113607 - RNA, 19 nt, Artificial Sequence
  Description of Artificial Sequence: Synthetic oligonucleotide
  Antisense strand to SEQ ID NO: 113606
gaucucaagguccagaaug

SEQ ID NO: 113608 - RNA, 19 nt, Artificial Sequence
  Description of Artificial Sequence: Synthetic oligonucleotide
  Sense strand starting at position 2697 of SEQ ID NO: 1446
cuacuuaauggugguauaa

SEQ ID NO: 113609 - RNA, 19 nt, Artificial Sequence
  Description of Artificial Sequence: Synthetic oligonucleotide
  Antisense strand to SEQ ID NO: 113608
uuauaccaccauuaaguag

SEQ ID NO: 113610 - RNA, 19 nt, Artificial Sequence
  Description of Artificial Sequence: Synthetic oligonucleotide
  Sense strand starting at position 2773 of SEQ ID NO: 1446
acugcauaggcuuauuagu

SEQ ID NO: 113611 - RNA, 19 nt, Artificial Sequence
  Description of Artificial Sequence: Synthetic oligonucleotide
  Antisense strand to SEQ ID NO: 113610
acuaauaagccuaugcagu

SEQ ID NO: 113612 - RNA, 19 nt, Artificial Sequence
  Description of Artificial Sequence: Synthetic oligonucleotide
  Sense strand starting at position 2998 of SEQ ID NO: 1446
gaaaguaacgcacaucauu

SEQ ID NO: 113613 - RNA, 19 nt, Artificial Sequence
  Description of Artificial Sequence: Synthetic oligonucleotide
  Antisense strand to SEQ ID NO: 113612
aaugaugugcguuacuuuc

SEQ ID NO: 113614 - RNA, 19 nt, Artificial Sequence
  Description of Artificial Sequence: Synthetic oligonucleotide
  Sense strand starting at position 3019 of SEQ ID NO: 1446
acuuaaauccgugagcauu

SEQ ID NO: 113615 - RNA, 19 nt, Artificial Sequence
  Description of Artificial Sequence: Synthetic oligonucleotide
  Antisense strand to SEQ ID NO: 113614
aaugcucacggauuuaagu

SEQ ID NO: 113616 - RNA, 19 nt, Artificial Sequence
  Description of Artificial Sequence: Synthetic oligonucleotide
  Sense strand starting at position 3027 of SEQ ID NO: 1446
ccgugagcauuuguuggau

SEQ ID NO: 113617 - RNA, 19 nt, Artificial Sequence
  Description of Artificial Sequence: Synthetic oligonucleotide
  Antisense strand to SEQ ID NO: 113616
auccaacaaaugcucacgg

SEQ ID NO: 113618 - RNA, 19 nt, Artificial Sequence
  Description of Artificial Sequence: Synthetic oligonucleotide
  Sense strand starting at position 3033 of SEQ ID NO: 1446
gcauuuguuggaugccuaa

SEQ ID NO: 113619 - RNA, 19 nt, Artificial Sequence
  Description of Artificial Sequence: Synthetic oligonucleotide
  Antisense strand to SEQ ID NO: 113618
uuaggcauccaacaaaugc

SEQ ID NO: 113620 - RNA, 19 nt, Artificial Sequence
  Description of Artificial Sequence: Synthetic oligonucleotide
  Sense strand starting at position 3070 of SEQ ID NO: 1446
ucaggauuccuaugugaau

SEQ ID NO: 113621 - RNA, 19 nt, Artificial Sequence
  Description of Artificial Sequence: Synthetic oligonucleotide
  Antisense strand to SEQ ID NO: 113620
auucacauaggaauccuga

SEQ ID NO: 113622 - RNA, 19 nt, Artificial Sequence
  Description of Artificial Sequence: Synthetic oligonucleotide
  Sense strand starting at position 3071 of SEQ ID NO: 1446
caggauuccuaugugaaug

SEQ ID NO: 113623 - RNA, 19 nt, Artificial Sequence
  Description of Artificial Sequence: Synthetic oligonucleotide
  Antisense strand to SEQ ID NO: 113622
cauucacauaggaauccug

SEQ ID NO: 113624 - RNA, 19 nt, Artificial Sequence
  Description of Artificial Sequence: Synthetic oligonucleotide
  Sense strand starting at position 3076 of SEQ ID NO: 1446
uuccuaugugaauggcuaa

SEQ ID NO: 113625 - RNA, 19 nt, Artificial Sequence
  Description of Artificial Sequence: Synthetic oligonucleotide
  Antisense strand to SEQ ID NO: 113624
uuagccauucacauaggaa

SEQ ID NO: 113626 - RNA, 19 nt, Artificial Sequence
  Description of Artificial Sequence: Synthetic oligonucleotide
  Sense strand starting at position 3160 of SEQ ID NO: 1446
guggcugugcgcucucaga

SEQ ID NO: 113627 - RNA, 19 nt, Artificial Sequence
  Description of Artificial Sequence: Synthetic oligonucleotide
  Antisense strand to SEQ ID NO: 113626
ucugagagcgcacagccac

SEQ ID NO: 113628 - RNA, 19 nt, Artificial Sequence
  Description of Artificial Sequence: Synthetic oligonucleotide
  Sense strand starting at position 3238 of SEQ ID NO: 1446
ccuggaagacgugaugauu

SEQ ID NO: 113629 - RNA, 19 nt, Artificial Sequence
  Description of Artificial Sequence: Synthetic oligonucleotide
  Antisense strand to SEQ ID NO: 113628
aaucaucacgucuuccagg

SEQ ID NO: 113630 - RNA, 19 nt, Artificial Sequence
  Description of Artificial Sequence: Synthetic oligonucleotide
  Sense strand starting at position 3529 of SEQ ID NO: 1446
gacggagucucacucacua

SEQ ID NO: 113631 - RNA, 19 nt, Artificial Sequence
  Description of Artificial Sequence: Synthetic oligonucleotide
  Antisense strand to SEQ ID NO: 113630
uagugagugagacuccguc

SEQ ID NO: 113632 - RNA, 19 nt, Artificial Sequence
  Description of Artificial Sequence: Synthetic oligonucleotide
  Sense strand starting at position 3870 of SEQ ID NO: 1446
uuuaacugucucuaagugu

SEQ ID NO: 113633 - RNA, 19 nt, Artificial Sequence
  Description of Artificial Sequence: Synthetic oligonucleotide
  Antisense strand to SEQ ID NO: 113632
acacuuagagacaguuaaa

SEQ ID NO: 113634 - RNA, 19 nt, Artificial Sequence
  Description of Artificial Sequence: Synthetic oligonucleotide
  Sense strand starting at position 3878 of SEQ ID NO: 1446
ucucuaaguguacaguuaa

SEQ ID NO: 113635 - RNA, 19 nt, Artificial Sequence
  Description of Artificial Sequence: Synthetic oligonucleotide
  Antisense strand to SEQ ID NO: 113634
uuaacuguacacuuagaga

SEQ ID NO: 113636 - RNA, 19 nt, Artificial Sequence
  Description of Artificial Sequence: Synthetic oligonucleotide
  Sense strand starting at position 3950 of SEQ ID NO: 1447
ugauaucagagaugccaug

SEQ ID NO: 113637 - RNA, 19 nt, Artificial Sequence
  Description of Artificial Sequence: Synthetic oligonucleotide
  Antisense strand to SEQ ID NO: 113636
cauggcaucucugauauca

SEQ ID NO: 113638 - RNA, 19 nt, Artificial Sequence
  Description of Artificial Sequence: Synthetic oligonucleotide
  Sense strand starting at position 3899 of SEQ ID NO: 1447
gguuaagacuacuauuucu

SEQ ID NO: 113639 - RNA, 19 nt, Artificial Sequence
  Description of Artificial Sequence: Synthetic oligonucleotide
  Antisense strand to SEQ ID NO: 113638
agaaauaguagucuuaacc

SEQ ID NO: 113640 - RNA, 19 nt, Artificial Sequence
  Description of Artificial Sequence: Synthetic oligonucleotide
  Sense strand starting at position 3698 of SEQ ID NO: 1447
agagacuucucccuuuaga

SEQ ID NO: 113641 - RNA, 19 nt, Artificial Sequence
  Description of Artificial Sequence: Synthetic oligonucleotide
  Antisense strand to SEQ ID NO: 113640
ucuaaagggagaagucucu

SEQ ID NO: 113642 - RNA, 19 nt, Artificial Sequence
  Description of Artificial Sequence: Synthetic oligonucleotide
  Sense strand starting at position 3511 of SEQ ID NO: 1447
cggccuguucuagucuauu

SEQ ID NO: 113643 - RNA, 19 nt, Artificial Sequence
  Description of Artificial Sequence: Synthetic oligonucleotide
  Antisense strand to SEQ ID NO: 113642
aauagacuagaacaggccg

SEQ ID NO: 113644 - RNA, 19 nt, Artificial Sequence
  Description of Artificial Sequence: Synthetic oligonucleotide
  Sense strand starting at position 3207 of SEQ ID NO: 1447
aguauauucuagucuaucu

SEQ ID NO: 113645 - RNA, 19 nt, Artificial Sequence
  Description of Artificial Sequence: Synthetic oligonucleotide
  Antisense strand to SEQ ID NO: 113644
agauagacuagaauauacu

SEQ ID NO: 113646 - RNA, 19 nt, Artificial Sequence
  Description of Artificial Sequence: Synthetic oligonucleotide
  Sense strand starting at position 2675 of SEQ ID NO: 1447
ggaacucuaucccuguuaa

SEQ ID NO: 113647 - RNA, 19 nt, Artificial Sequence
  Description of Artificial Sequence: Synthetic oligonucleotide
  Antisense strand to SEQ ID NO: 113646
uuaacagggauagaguucc

SEQ ID NO: 113648 - RNA, 19 nt, Artificial Sequence
  Description of Artificial Sequence: Synthetic oligonucleotide
  Sense strand starting at position 2637 of SEQ ID NO: 1447
ccacuugugcaaugaaucu

SEQ ID NO: 113649 - RNA, 19 nt, Artificial Sequence
  Description of Artificial Sequence: Synthetic oligonucleotide
  Antisense strand to SEQ ID NO: 113648
agauucauugcacaagugg

SEQ ID NO: 113650 - RNA, 19 nt, Artificial Sequence
  Description of Artificial Sequence: Synthetic oligonucleotide
  Sense strand starting at position 2634 of SEQ ID NO: 1447
ccuccacuugugcaaugaa

SEQ ID NO: 113651 - RNA, 19 nt, Artificial Sequence
  Description of Artificial Sequence: Synthetic oligonucleotide
  Antisense strand to SEQ ID NO: 113650
uucauugcacaaguggagg

SEQ ID NO: 113652 - RNA, 19 nt, Artificial Sequence
  Description of Artificial Sequence: Synthetic oligonucleotide
  Sense strand starting at position 2488 of SEQ ID NO: 1447
uguuauagucuugaaauuc

SEQ ID NO: 113653 - RNA, 19 nt, Artificial Sequence
  Description of Artificial Sequence: Synthetic oligonucleotide
  Antisense strand to SEQ ID NO: 113652
gaauuucaagacuauaaca

SEQ ID NO: 113654 - RNA, 19 nt, Artificial Sequence
  Description of Artificial Sequence: Synthetic oligonucleotide
  Sense strand starting at position 2306 of SEQ ID NO: 1447
agcagugaagcugaaagua

SEQ ID NO: 113655 - RNA, 19 nt, Artificial Sequence
  Description of Artificial Sequence: Synthetic oligonucleotide
  Antisense strand to SEQ ID NO: 113654
uacuuucagcuucacugcu

SEQ ID NO: 113656 - RNA, 19 nt, Artificial Sequence
  Description of Artificial Sequence: Synthetic oligonucleotide
  Sense strand starting at position 2165 of SEQ ID NO: 1447
gagaguuuggcaugaguug

SEQ ID NO: 113657 - RNA, 19 nt, Artificial Sequence
  Description of Artificial Sequence: Synthetic oligonucleotide
  Antisense strand to SEQ ID NO: 113656
caacucaugccaaacucuc

SEQ ID NO: 113658 - RNA, 19 nt, Artificial Sequence
  Description of Artificial Sequence: Synthetic oligonucleotide
  Sense strand starting at position 1568 of SEQ ID NO: 1447
augcgauaauuugcuacua

SEQ ID NO: 113659 - RNA, 19 nt, Artificial Sequence
  Description of Artificial Sequence: Synthetic oligonucleotide
  Antisense strand to SEQ ID NO: 113658
uaguagcaaauuaucgcau

SEQ ID NO: 113660 - RNA, 19 nt, Artificial Sequence
  Description of Artificial Sequence: Synthetic oligonucleotide
  Sense strand starting at position 1559 of SEQ ID NO: 1447
agcucagggaugcgauaau

SEQ ID NO: 113661 - RNA, 19 nt, Artificial Sequence
  Description of Artificial Sequence: Synthetic oligonucleotide
  Antisense strand to SEQ ID NO: 113660
auuaucgcaucccugagcu

SEQ ID NO: 113662 - RNA, 19 nt, Artificial Sequence
  Description of Artificial Sequence: Synthetic oligonucleotide
  Sense strand starting at position 1483 of SEQ ID NO: 1447
aagggaugcuccuuggaag

SEQ ID NO: 113663 - RNA, 19 nt, Artificial Sequence
  Description of Artificial Sequence: Synthetic oligonucleotide
  Antisense strand to SEQ ID NO: 113662
cuuccaaggagcaucccuu

SEQ ID NO: 113664 - RNA, 19 nt, Artificial Sequence
  Description of Artificial Sequence: Synthetic oligonucleotide
  Sense strand starting at position 1461 of SEQ ID NO: 1447
gauauuugcgacgguucuu

SEQ ID NO: 113665 - RNA, 19 nt, Artificial Sequence
  Description of Artificial Sequence: Synthetic oligonucleotide
  Antisense strand to SEQ ID NO: 113664
aagaaccgucgcaaauauc

SEQ ID NO: 113666 - RNA, 19 nt, Artificial Sequence
  Description of Artificial Sequence: Synthetic oligonucleotide
  Sense strand starting at position 1328 of SEQ ID NO: 1447
guggaaacuaaucgugaac

SEQ ID NO: 113667 - RNA, 19 nt, Artificial Sequence
  Description of Artificial Sequence: Synthetic oligonucleotide
  Antisense strand to SEQ ID NO: 113666
guucacgauuaguuuccac

SEQ ID NO: 113668 - RNA, 19 nt, Artificial Sequence
  Description of Artificial Sequence: Synthetic oligonucleotide
  Sense strand starting at position 1327 of SEQ ID NO: 1447
gguggaaacuaaucgugaa

SEQ ID NO: 113669 - RNA, 19 nt, Artificial Sequence
  Description of Artificial Sequence: Synthetic oligonucleotide
  Antisense strand to SEQ ID NO: 113668
uucacgauuaguuuccacc

SEQ ID NO: 113670 - RNA, 19 nt, Artificial Sequence
  Description of Artificial Sequence: Synthetic oligonucleotide
  Sense strand starting at position 1297 of SEQ ID NO: 1447
gagagauguaaagguucca

SEQ ID NO: 113671 - RNA, 19 nt, Artificial Sequence
  Description of Artificial Sequence: Synthetic oligonucleotide
  Antisense strand to SEQ ID NO: 113670
uggaaccuuuacaucucuc

SEQ ID NO: 113672 - RNA, 19 nt, Artificial Sequence
  Description of Artificial Sequence: Synthetic oligonucleotide
  Sense strand starting at position 1053 of SEQ ID NO: 1447
ggcucugagaaugagaguu

SEQ ID NO: 113673 - RNA, 19 nt, Artificial Sequence
  Description of Artificial Sequence: Synthetic oligonucleotide
  Antisense strand to SEQ ID NO: 113672
aacucucauucucagagcc

SEQ ID NO: 113674 - RNA, 19 nt, Artificial Sequence
  Description of Artificial Sequence: Synthetic oligonucleotide
  Sense strand starting at position 1052 of SEQ ID NO: 1447
uggcucugagaaugagagu

SEQ ID NO: 113675 - RNA, 19 nt, Artificial Sequence
  Description of Artificial Sequence: Synthetic oligonucleotide
  Antisense strand to SEQ ID NO: 113674
acucucauucucagagcca

SEQ ID NO: 113676 - RNA, 19 nt, Artificial Sequence
  Description of Artificial Sequence: Synthetic oligonucleotide
  Sense strand starting at position 1046 of SEQ ID NO: 1447
cuucucuggcucugagaau

SEQ ID NO: 113677 - RNA, 19 nt, Artificial Sequence
  Description of Artificial Sequence: Synthetic oligonucleotide
  Antisense strand to SEQ ID NO: 113676
auucucagagccagagaag

SEQ ID NO: 113678 - RNA, 19 nt, Artificial Sequence
  Description of Artificial Sequence: Synthetic oligonucleotide
  Sense strand starting at position 1017 of SEQ ID NO: 1447
uguugcaugaucuaggcaa

SEQ ID NO: 113679 - RNA, 19 nt, Artificial Sequence
  Description of Artificial Sequence: Synthetic oligonucleotide
  Antisense strand to SEQ ID NO: 113678
uugccuagaucaugcaaca

SEQ ID NO: 113680 - RNA, 19 nt, Artificial Sequence
  Description of Artificial Sequence: Synthetic oligonucleotide
  Sense strand starting at position 1005 of SEQ ID NO: 1447
aggugagaaccauguugca

SEQ ID NO: 113681 - RNA, 19 nt, Artificial Sequence
  Description of Artificial Sequence: Synthetic oligonucleotide
  Antisense strand to SEQ ID NO: 113680
ugcaacaugguucucaccu

SEQ ID NO: 113682 - RNA, 19 nt, Artificial Sequence
  Description of Artificial Sequence: Synthetic oligonucleotide
  Sense strand starting at position 995 of SEQ ID NO: 1447
ugaccugucuaggugagaa

SEQ ID NO: 113683 - RNA, 19 nt, Artificial Sequence
  Description of Artificial Sequence: Synthetic oligonucleotide
  Antisense strand to SEQ ID NO: 113682
uucucaccuagacagguca

SEQ ID NO: 113684 - RNA, 19 nt, Artificial Sequence
  Description of Artificial Sequence: Synthetic oligonucleotide
  Sense strand starting at position 994 of SEQ ID NO: 1447
cugaccugucuaggugaga

SEQ ID NO: 113685 - RNA, 19 nt, Artificial Sequence
  Description of Artificial Sequence: Synthetic oligonucleotide
  Antisense strand to SEQ ID NO: 113684
ucucaccuagacaggucag

SEQ ID NO: 113686 - RNA, 19 nt, Artificial Sequence
  Description of Artificial Sequence: Synthetic oligonucleotide
  Sense strand starting at position 894 of SEQ ID NO: 1447
aguccuuggucaccagaca

SEQ ID NO: 113687 - RNA, 19 nt, Artificial Sequence
  Description of Artificial Sequence: Synthetic oligonucleotide
  Antisense strand to SEQ ID NO: 113686
ugucuggugaccaaggacu

SEQ ID NO: 113688 - RNA, 19 nt, Artificial Sequence
  Description of Artificial Sequence: Synthetic oligonucleotide
  Sense strand starting at position 888 of SEQ ID NO: 1447
cuuagaaguccuuggucac

SEQ ID NO: 113689 - RNA, 19 nt, Artificial Sequence
  Description of Artificial Sequence: Synthetic oligonucleotide
  Antisense strand to SEQ ID NO: 113688
gugaccaaggacuucuaag

SEQ ID NO: 113690 - RNA, 19 nt, Artificial Sequence
  Description of Artificial Sequence: Synthetic oligonucleotide
  Sense strand starting at position 809 of SEQ ID NO: 1447
gugcgaacaguuuagagga

SEQ ID NO: 113691 - RNA, 19 nt, Artificial Sequence
  Description of Artificial Sequence: Synthetic oligonucleotide
  Antisense strand to SEQ ID NO: 113690
uccucuaaacuguucgcac

SEQ ID NO: 113692 - RNA, 19 nt, Artificial Sequence
  Description of Artificial Sequence: Synthetic oligonucleotide
  Sense strand starting at position 721 of SEQ ID NO: 1447
gcuagaacauaucucaaug

SEQ ID NO: 113693 - RNA, 19 nt, Artificial Sequence
  Description of Artificial Sequence: Synthetic oligonucleotide
  Antisense strand to SEQ ID NO: 113692
cauugagauauguucuagc

SEQ ID NO: 113694 - RNA, 19 nt, Artificial Sequence
  Description of Artificial Sequence: Synthetic oligonucleotide
  Sense strand starting at position 686 of SEQ ID NO: 1447
gcccaagagugggucuaaa

SEQ ID NO: 113695 - RNA, 19 nt, Artificial Sequence
  Description of Artificial Sequence: Synthetic oligonucleotide
  Antisense strand to SEQ ID NO: 113694
uuuagacccacucuugggc

SEQ ID NO: 113696 - RNA, 19 nt, Artificial Sequence
  Description of Artificial Sequence: Synthetic oligonucleotide
  Sense strand starting at position 641 of SEQ ID NO: 1447
caaucuaguggugacucaa

SEQ ID NO: 113697 - RNA, 19 nt, Artificial Sequence
  Description of Artificial Sequence: Synthetic oligonucleotide
  Antisense strand to SEQ ID NO: 113696
uugagucaccacuagauug

SEQ ID NO: 113698 - RNA, 19 nt, Artificial Sequence
  Description of Artificial Sequence: Synthetic oligonucleotide
  Sense strand starting at position 624 of SEQ ID NO: 1447
auucuugcugaaugaaaca

SEQ ID NO: 113699 - RNA, 19 nt, Artificial Sequence
  Description of Artificial Sequence: Synthetic oligonucleotide
  Antisense strand to SEQ ID NO: 113698
uguuucauucagcaagaau

SEQ ID NO: 113700 - RNA, 19 nt, Artificial Sequence
  Description of Artificial Sequence: Synthetic oligonucleotide
  Sense strand starting at position 472 of SEQ ID NO: 1447
aggugaggccuuuagcaau

SEQ ID NO: 113701 - RNA, 19 nt, Artificial Sequence
  Description of Artificial Sequence: Synthetic oligonucleotide
  Antisense strand to SEQ ID NO: 113700
auugcuaaaggccucaccu

SEQ ID NO: 113702 - RNA, 19 nt, Artificial Sequence
  Description of Artificial Sequence: Synthetic oligonucleotide
  Sense strand starting at position 396 of SEQ ID NO: 1447
guuucuuaacucuguacaa

SEQ ID NO: 113703 - RNA, 19 nt, Artificial Sequence
  Description of Artificial Sequence: Synthetic oligonucleotide
  Antisense strand to SEQ ID NO: 113702
uuguacagaguuaagaaac

SEQ ID NO: 113704 - RNA, 19 nt, Artificial Sequence
  Description of Artificial Sequence: Synthetic oligonucleotide
  Sense strand starting at position 389 of SEQ ID NO: 1447
ugcagaaguuucuuaacuc

SEQ ID NO: 113705 - RNA, 19 nt, Artificial Sequence
  Description of Artificial Sequence: Synthetic oligonucleotide
  Antisense strand to SEQ ID NO: 113704
gaguuaagaaacuucugca

SEQ ID NO: 113706 - RNA, 19 nt, Artificial Sequence
  Description of Artificial Sequence: Synthetic oligonucleotide
  Sense strand starting at position 353 of SEQ ID NO: 1447
uugaguaucagauggacau

SEQ ID NO: 113707 - RNA, 19 nt, Artificial Sequence
  Description of Artificial Sequence: Synthetic oligonucleotide
  Antisense strand to SEQ ID NO: 113706
auguccaucugauacucaa

SEQ ID NO: 113708 - RNA, 19 nt, Artificial Sequence
  Description of Artificial Sequence: Synthetic oligonucleotide
  Sense strand starting at position 317 of SEQ ID NO: 1447
auuaauucuggcuggagua

SEQ ID NO: 113709 - RNA, 19 nt, Artificial Sequence
  Description of Artificial Sequence: Synthetic oligonucleotide
  Antisense strand to SEQ ID NO: 113708
uacuccagccagaauuaau

SEQ ID NO: 113710 - RNA, 19 nt, Artificial Sequence
  Description of Artificial Sequence: Synthetic oligonucleotide
  Sense strand starting at position 316 of SEQ ID NO: 1447
gauuaauucuggcuggagu

SEQ ID NO: 113711 - RNA, 19 nt, Artificial Sequence
  Description of Artificial Sequence: Synthetic oligonucleotide
  Antisense strand to SEQ ID NO: 113710
acuccagccagaauuaauc

SEQ ID NO: 113712 - RNA, 19 nt, Artificial Sequence
  Description of Artificial Sequence: Synthetic oligonucleotide
  Sense strand starting at position 215 of SEQ ID NO: 1447
agagacucuugucuaaaca

SEQ ID NO: 113713 - RNA, 19 nt, Artificial Sequence
  Description of Artificial Sequence: Synthetic oligonucleotide
  Antisense strand to SEQ ID NO: 113712
uguuuagacaagagucucu

SEQ ID NO: 113714 - RNA, 19 nt, Artificial Sequence
  Description of Artificial Sequence: Synthetic oligonucleotide
  Sense strand starting at position 214 of SEQ ID NO: 1447
gagagacucuugucuaaac

SEQ ID NO: 113715 - RNA, 19 nt, Artificial Sequence
  Description of Artificial Sequence: Synthetic oligonucleotide
  Antisense strand to SEQ ID NO: 113714
guuuagacaagagucucuc

SEQ ID NO: 113716 - RNA, 19 nt, Artificial Sequence
  Description of Artificial Sequence: Synthetic oligonucleotide
  Sense strand starting at position 3955 of SEQ ID NO: 1448
aguguuuacucuucuacug

SEQ ID NO: 113717 - RNA, 19 nt, Artificial Sequence
  Description of Artificial Sequence: Synthetic oligonucleotide
  Antisense strand to SEQ ID NO: 113716
caguagaagaguaaacacu

SEQ ID NO: 113718 - RNA, 19 nt, Artificial Sequence
  Description of Artificial Sequence: Synthetic oligonucleotide
  Sense strand starting at position 3949 of SEQ ID NO: 1448
guacauaguguuuacucuu

SEQ ID NO: 113719 - RNA, 19 nt, Artificial Sequence
  Description of Artificial Sequence: Synthetic oligonucleotide
  Antisense strand to SEQ ID NO: 113718
aagaguaaacacuauguac

SEQ ID NO: 113720 - RNA, 19 nt, Artificial Sequence
  Description of Artificial Sequence: Synthetic oligonucleotide
  Sense strand starting at position 3844 of SEQ ID NO: 1448
uuguuaagauaguuugcaa

SEQ ID NO: 113721 - RNA, 19 nt, Artificial Sequence
  Description of Artificial Sequence: Synthetic oligonucleotide
  Antisense strand to SEQ ID NO: 113720
uugcaaacuaucuuaacaa

SEQ ID NO: 113722 - RNA, 19 nt, Artificial Sequence
  Description of Artificial Sequence: Synthetic oligonucleotide
  Sense strand starting at position 3835 of SEQ ID NO: 1448
acgaaucccuuguuaagau

SEQ ID NO: 113723 - RNA, 19 nt, Artificial Sequence
  Description of Artificial Sequence: Synthetic oligonucleotide
  Antisense strand to SEQ ID NO: 113722
aucuuaacaagggauucgu

SEQ ID NO: 113724 - RNA, 19 nt, Artificial Sequence
  Description of Artificial Sequence: Synthetic oligonucleotide
  Sense strand starting at position 3833 of SEQ ID NO: 1448
uuacgaaucccuuguuaag

SEQ ID NO: 113725 - RNA, 19 nt, Artificial Sequence
  Description of Artificial Sequence: Synthetic oligonucleotide
  Antisense strand to SEQ ID NO: 113724
cuuaacaagggauucguaa

SEQ ID NO: 113726 - RNA, 19 nt, Artificial Sequence
  Description of Artificial Sequence: Synthetic oligonucleotide
  Sense strand starting at position 3831 of SEQ ID NO: 1448
gguuacgaaucccuuguua

SEQ ID NO: 113727 - RNA, 19 nt, Artificial Sequence
  Description of Artificial Sequence: Synthetic oligonucleotide
  Antisense strand to SEQ ID NO: 113726
uaacaagggauucguaacc

SEQ ID NO: 113728 - RNA, 19 nt, Artificial Sequence
  Description of Artificial Sequence: Synthetic oligonucleotide
  Sense strand starting at position 3822 of SEQ ID NO: 1448
auauauucugguuacgaau

SEQ ID NO: 113729 - RNA, 19 nt, Artificial Sequence
  Description of Artificial Sequence: Synthetic oligonucleotide
  Antisense strand to SEQ ID NO: 113728
auucguaaccagaauauau

SEQ ID NO: 113730 - RNA, 19 nt, Artificial Sequence
  Description of Artificial Sequence: Synthetic oligonucleotide
  Sense strand starting at position 3821 of SEQ ID NO: 1448
uauauauucugguuacgaa

SEQ ID NO: 113731 - RNA, 19 nt, Artificial Sequence
  Description of Artificial Sequence: Synthetic oligonucleotide
  Antisense strand to SEQ ID NO: 113730
uucguaaccagaauauaua

SEQ ID NO: 113732 - RNA, 19 nt, Artificial Sequence
  Description of Artificial Sequence: Synthetic oligonucleotide
  Sense strand starting at position 3735 of SEQ ID NO: 1448
uguguaucuucuuucgaaa

SEQ ID NO: 113733 - RNA, 19 nt, Artificial Sequence
  Description of Artificial Sequence: Synthetic oligonucleotide
  Antisense strand to SEQ ID NO: 113732
uuucgaaagaagauacaca

SEQ ID NO: 113734 - RNA, 19 nt, Artificial Sequence
  Description of Artificial Sequence: Synthetic oligonucleotide
  Sense strand starting at position 3680 of SEQ ID NO: 1448
uuccauuucucugauuagu

SEQ ID NO: 113735 - RNA, 19 nt, Artificial Sequence
  Description of Artificial Sequence: Synthetic oligonucleotide
  Antisense strand to SEQ ID NO: 113734
acuaaucagagaaauggaa

SEQ ID NO: 113736 - RNA, 19 nt, Artificial Sequence
  Description of Artificial Sequence: Synthetic oligonucleotide
  Sense strand starting at position 3522 of SEQ ID NO: 1448
gaggaaccucuguagucuu

SEQ ID NO: 113737 - RNA, 19 nt, Artificial Sequence
  Description of Artificial Sequence: Synthetic oligonucleotide
  Antisense strand to SEQ ID NO: 113736
aagacuacagagguuccuc

SEQ ID NO: 113738 - RNA, 19 nt, Artificial Sequence
  Description of Artificial Sequence: Synthetic oligonucleotide
  Sense strand starting at position 3521 of SEQ ID NO: 1448
ugaggaaccucuguagucu

SEQ ID NO: 113739 - RNA, 19 nt, Artificial Sequence
  Description of Artificial Sequence: Synthetic oligonucleotide
  Antisense strand to SEQ ID NO: 113738
agacuacagagguuccuca

SEQ ID NO: 113740 - RNA, 19 nt, Artificial Sequence
  Description of Artificial Sequence: Synthetic oligonucleotide
  Sense strand starting at position 3386 of SEQ ID NO: 1448
uuuggcuaucgugaauacu

SEQ ID NO: 113741 - RNA, 19 nt, Artificial Sequence
  Description of Artificial Sequence: Synthetic oligonucleotide
  Antisense strand to SEQ ID NO: 113740
aguauucacgauagccaaa

SEQ ID NO: 113742 - RNA, 19 nt, Artificial Sequence
  Description of Artificial Sequence: Synthetic oligonucleotide
  Sense strand starting at position 3315 of SEQ ID NO: 1448
auucuuauggcugaauaau

SEQ ID NO: 113743 - RNA, 19 nt, Artificial Sequence
  Description of Artificial Sequence: Synthetic oligonucleotide
  Antisense strand to SEQ ID NO: 113742
auuauucagccauaagaau

SEQ ID NO: 113744 - RNA, 19 nt, Artificial Sequence
  Description of Artificial Sequence: Synthetic oligonucleotide
  Sense strand starting at position 3313 of SEQ ID NO: 1448
ucauucuuauggcugaaua

SEQ ID NO: 113745 - RNA, 19 nt, Artificial Sequence
  Description of Artificial Sequence: Synthetic oligonucleotide
  Antisense strand to SEQ ID NO: 113744
uauucagccauaagaauga

SEQ ID NO: 113746 - RNA, 19 nt, Artificial Sequence
  Description of Artificial Sequence: Synthetic oligonucleotide
  Sense strand starting at position 3224 of SEQ ID NO: 1448
augcaauauuuguuucugu

SEQ ID NO: 113747 - RNA, 19 nt, Artificial Sequence
  Description of Artificial Sequence: Synthetic oligonucleotide
  Antisense strand to SEQ ID NO: 113746
acagaaacaaauauugcau

SEQ ID NO: 113748 - RNA, 19 nt, Artificial Sequence
  Description of Artificial Sequence: Synthetic oligonucleotide
  Sense strand starting at position 3097 of SEQ ID NO: 1448
acuguauuaucugugccca

SEQ ID NO: 113749 - RNA, 19 nt, Artificial Sequence
  Description of Artificial Sequence: Synthetic oligonucleotide
  Antisense strand to SEQ ID NO: 113748
ugggcacagauaauacagu

SEQ ID NO: 113750 - RNA, 19 nt, Artificial Sequence
  Description of Artificial Sequence: Synthetic oligonucleotide
  Sense strand starting at position 2690 of SEQ ID NO: 1448
gaaguaguagcugggauua

SEQ ID NO: 113751 - RNA, 19 nt, Artificial Sequence
  Description of Artificial Sequence: Synthetic oligonucleotide
  Antisense strand to SEQ ID NO: 113750
uaaucccagcuacuacuuc

SEQ ID NO: 113752 - RNA, 19 nt, Artificial Sequence
  Description of Artificial Sequence: Synthetic oligonucleotide
  Sense strand starting at position 2689 of SEQ ID NO: 1448
cgaaguaguagcugggauu

SEQ ID NO: 113753 - RNA, 19 nt, Artificial Sequence
  Description of Artificial Sequence: Synthetic oligonucleotide
  Antisense strand to SEQ ID NO: 113752
aaucccagcuacuacuucg

SEQ ID NO: 113754 - RNA, 19 nt, Artificial Sequence
  Description of Artificial Sequence: Synthetic oligonucleotide
  Sense strand starting at position 2676 of SEQ ID NO: 1448
gugcuuuagcuuccgaagu

SEQ ID NO: 113755 - RNA, 19 nt, Artificial Sequence
  Description of Artificial Sequence: Synthetic oligonucleotide
  Antisense strand to SEQ ID NO: 113754
acuucggaagcuaaagcac

SEQ ID NO: 113756 - RNA, 19 nt, Artificial Sequence
  Description of Artificial Sequence: Synthetic oligonucleotide
  Sense strand starting at position 2674 of SEQ ID NO: 1448
ucgugcuuuagcuuccgaa

SEQ ID NO: 113757 - RNA, 19 nt, Artificial Sequence
  Description of Artificial Sequence: Synthetic oligonucleotide
  Antisense strand to SEQ ID NO: 113756
uucggaagcuaaagcacga

SEQ ID NO: 113758 - RNA, 19 nt, Artificial Sequence
  Description of Artificial Sequence: Synthetic oligonucleotide
  Sense strand starting at position 2586 of SEQ ID NO: 1448
uugagagucucacucuaca

SEQ ID NO: 113759 - RNA, 19 nt, Artificial Sequence
  Description of Artificial Sequence: Synthetic oligonucleotide
  Antisense strand to SEQ ID NO: 113758
uguagagugagacucucaa

SEQ ID NO: 113760 - RNA, 19 nt, Artificial Sequence
  Description of Artificial Sequence: Synthetic oligonucleotide
  Sense strand starting at position 2504 of SEQ ID NO: 1448
ccugaaauauuauugcaag

SEQ ID NO: 113761 - RNA, 19 nt, Artificial Sequence
  Description of Artificial Sequence: Synthetic oligonucleotide
  Antisense strand to SEQ ID NO: 113760
cuugcaauaauauuucagg

SEQ ID NO: 113762 - RNA, 19 nt, Artificial Sequence
  Description of Artificial Sequence: Synthetic oligonucleotide
  Sense strand starting at position 2483 of SEQ ID NO: 1448
uuaagccuuccucguauuu

SEQ ID NO: 113763 - RNA, 19 nt, Artificial Sequence
  Description of Artificial Sequence: Synthetic oligonucleotide
  Antisense strand to SEQ ID NO: 113762
aaauacgaggaaggcuuaa

SEQ ID NO: 113764 - RNA, 19 nt, Artificial Sequence
  Description of Artificial Sequence: Synthetic oligonucleotide
  Sense strand starting at position 2416 of SEQ ID NO: 1448
ugcagaugcuaucuccuua

SEQ ID NO: 113765 - RNA, 19 nt, Artificial Sequence
  Description of Artificial Sequence: Synthetic oligonucleotide
  Antisense strand to SEQ ID NO: 113764
uaaggagauagcaucugca

SEQ ID NO: 113766 - RNA, 19 nt, Artificial Sequence
  Description of Artificial Sequence: Synthetic oligonucleotide
  Sense strand starting at position 2333 of SEQ ID NO: 1448
auuaauuaucuccaagcga

SEQ ID NO: 113767 - RNA, 19 nt, Artificial Sequence
  Description of Artificial Sequence: Synthetic oligonucleotide
  Antisense strand to SEQ ID NO: 113766
ucgcuuggagauaauuaau

SEQ ID NO: 113768 - RNA, 19 nt, Artificial Sequence
  Description of Artificial Sequence: Synthetic oligonucleotide
  Sense strand starting at position 2330 of SEQ ID NO: 1448
cgaauuaauuaucuccaag

SEQ ID NO: 113769 - RNA, 19 nt, Artificial Sequence
  Description of Artificial Sequence: Synthetic oligonucleotide
  Antisense strand to SEQ ID NO: 113768
cuuggagauaauuaauucg

SEQ ID NO: 113770 - RNA, 19 nt, Artificial Sequence
  Description of Artificial Sequence: Synthetic oligonucleotide
  Sense strand starting at position 2280 of SEQ ID NO: 1448
guaagcauccucuacagca

SEQ ID NO: 113771 - RNA, 19 nt, Artificial Sequence
  Description of Artificial Sequence: Synthetic oligonucleotide
  Antisense strand to SEQ ID NO: 113770
ugcuguagaggaugcuuac

SEQ ID NO: 113772 - RNA, 19 nt, Artificial Sequence
  Description of Artificial Sequence: Synthetic oligonucleotide
  Sense strand starting at position 2127 of SEQ ID NO: 1448
gaugacccauggguauaau

SEQ ID NO: 113773 - RNA, 19 nt, Artificial Sequence
  Description of Artificial Sequence: Synthetic oligonucleotide
  Antisense strand to SEQ ID NO: 113772
auuauacccaugggucauc

SEQ ID NO: 113774 - RNA, 19 nt, Artificial Sequence
  Description of Artificial Sequence: Synthetic oligonucleotide
  Sense strand starting at position 2124 of SEQ ID NO: 1448
gaggaugacccauggguau

SEQ ID NO: 113775 - RNA, 19 nt, Artificial Sequence
  Description of Artificial Sequence: Synthetic oligonucleotide
  Antisense strand to SEQ ID NO: 113774
auacccaugggucauccuc

SEQ ID NO: 113776 - RNA, 19 nt, Artificial Sequence
  Description of Artificial Sequence: Synthetic oligonucleotide
  Sense strand starting at position 1390 of SEQ ID NO: 1448
gggcaaauuucuucucugu

SEQ ID NO: 113777 - RNA, 19 nt, Artificial Sequence
  Description of Artificial Sequence: Synthetic oligonucleotide
  Antisense strand to SEQ ID NO: 113776
acagagaagaaauuugccc

SEQ ID NO: 113778 - RNA, 19 nt, Artificial Sequence
  Description of Artificial Sequence: Synthetic oligonucleotide
  Sense strand starting at position 1309 of SEQ ID NO: 1448
gucccuugugacuaugaac

SEQ ID NO: 113779 - RNA, 19 nt, Artificial Sequence
  Description of Artificial Sequence: Synthetic oligonucleotide
  Antisense strand to SEQ ID NO: 113778
guucauagucacaagggac

SEQ ID NO: 113780 - RNA, 19 nt, Artificial Sequence
  Description of Artificial Sequence: Synthetic oligonucleotide
  Sense strand starting at position 1156 of SEQ ID NO: 1448
uggaucagcugacugguua

SEQ ID NO: 113781 - RNA, 19 nt, Artificial Sequence
  Description of Artificial Sequence: Synthetic oligonucleotide
  Antisense strand to SEQ ID NO: 113780
uaaccagucagcugaucca

SEQ ID NO: 113782 - RNA, 19 nt, Artificial Sequence
  Description of Artificial Sequence: Synthetic oligonucleotide
  Sense strand starting at position 849 of SEQ ID NO: 1448
gggauuccagcccacuuau

SEQ ID NO: 113783 - RNA, 19 nt, Artificial Sequence
  Description of Artificial Sequence: Synthetic oligonucleotide
  Antisense strand to SEQ ID NO: 113782
auaagugggcuggaauccc

SEQ ID NO: 113784 - RNA, 19 nt, Artificial Sequence
  Description of Artificial Sequence: Synthetic oligonucleotide
  Sense strand starting at position 829 of SEQ ID NO: 1448
gggugaggguuauggauuu

SEQ ID NO: 113785 - RNA, 19 nt, Artificial Sequence
  Description of Artificial Sequence: Synthetic oligonucleotide
  Antisense strand to SEQ ID NO: 113784
aaauccauaacccucaccc

SEQ ID NO: 113786 - RNA, 19 nt, Artificial Sequence
  Description of Artificial Sequence: Synthetic oligonucleotide
  Sense strand starting at position 755 of SEQ ID NO: 1448
acagcuuuagggugaaaca

SEQ ID NO: 113787 - RNA, 19 nt, Artificial Sequence
  Description of Artificial Sequence: Synthetic oligonucleotide
  Antisense strand to SEQ ID NO: 113786
uguuucacccuaaagcugu

SEQ ID NO: 113788 - RNA, 19 nt, Artificial Sequence
  Description of Artificial Sequence: Synthetic oligonucleotide
  Sense strand starting at position 408 of SEQ ID NO: 1448
ugagaacuuuccgucacuu

SEQ ID NO: 113789 - RNA, 19 nt, Artificial Sequence
  Description of Artificial Sequence: Synthetic oligonucleotide
  Antisense strand to SEQ ID NO: 113788
aagugacggaaaguucuca

SEQ ID NO: 113790 - RNA, 19 nt, Artificial Sequence
  Description of Artificial Sequence: Synthetic oligonucleotide
  Sense strand starting at position 174 of SEQ ID NO: 1448
cuucguuaucucugacuac

SEQ ID NO: 113791 - RNA, 19 nt, Artificial Sequence
  Description of Artificial Sequence: Synthetic oligonucleotide
  Antisense strand to SEQ ID NO: 113790
guagucagagauaacgaag

SEQ ID NO: 113792 - RNA, 19 nt, Artificial Sequence
  Description of Artificial Sequence: Synthetic oligonucleotide
  Sense strand starting at position 154 of SEQ ID NO: 1448
gggaaagggcauugcauau

SEQ ID NO: 113793 - RNA, 19 nt, Artificial Sequence
  Description of Artificial Sequence: Synthetic oligonucleotide
  Antisense strand to SEQ ID NO: 113792
auaugcaaugcccuuuccc

SEQ ID NO: 113794 - RNA, 19 nt, Artificial Sequence
  Description of Artificial Sequence: Synthetic oligonucleotide
  Sense strand starting at position 97 of SEQ ID NO: 1448
cugccuguucgugaucaaa

SEQ ID NO: 113795 - RNA, 19 nt, Artificial Sequence
  Description of Artificial Sequence: Synthetic oligonucleotide
  Antisense strand to SEQ ID NO: 113794
uuugaucacgaacaggcag

SEQ ID NO: 113796 - RNA, 19 nt, Artificial Sequence
  Description of Artificial Sequence: Synthetic oligonucleotide
  Sense strand starting at position 3880 of SEQ ID NO: 1449
ggguuaauauuacuauuga

SEQ ID NO: 113797 - RNA, 19 nt, Artificial Sequence
  Description of Artificial Sequence: Synthetic oligonucleotide
  Antisense strand to SEQ ID NO: 113796
ucaauaguaauauuaaccc

SEQ ID NO: 113798 - RNA, 19 nt, Artificial Sequence
  Description of Artificial Sequence: Synthetic oligonucleotide
  Sense strand starting at position 3728 of SEQ ID NO: 1449
uaaauugucguugagaauc

SEQ ID NO: 113799 - RNA, 19 nt, Artificial Sequence
  Description of Artificial Sequence: Synthetic oligonucleotide
  Antisense strand to SEQ ID NO: 113798
gauucucaacgacaauuua

SEQ ID NO: 113800 - RNA, 19 nt, Artificial Sequence
  Description of Artificial Sequence: Synthetic oligonucleotide
  Sense strand starting at position 3727 of SEQ ID NO: 1449
cuaaauugucguugagaau

SEQ ID NO: 113801 - RNA, 19 nt, Artificial Sequence
  Description of Artificial Sequence: Synthetic oligonucleotide
  Antisense strand to SEQ ID NO: 113800
auucucaacgacaauuuag

SEQ ID NO: 113802 - RNA, 19 nt, Artificial Sequence
  Description of Artificial Sequence: Synthetic oligonucleotide
  Sense strand starting at position 3726 of SEQ ID NO: 1449
ucuaaauugucguugagaa

SEQ ID NO: 113803 - RNA, 19 nt, Artificial Sequence
  Description of Artificial Sequence: Synthetic oligonucleotide
  Antisense strand to SEQ ID NO: 113802
uucucaacgacaauuuaga

SEQ ID NO: 113804 - RNA, 19 nt, Artificial Sequence
  Description of Artificial Sequence: Synthetic oligonucleotide
  Sense strand starting at position 3705 of SEQ ID NO: 1449
guggcaagugcucaacaaa

SEQ ID NO: 113805 - RNA, 19 nt, Artificial Sequence
  Description of Artificial Sequence: Synthetic oligonucleotide
  Antisense strand to SEQ ID NO: 113804
uuuguugagcacuugccac

SEQ ID NO: 113806 - RNA, 19 nt, Artificial Sequence
  Description of Artificial Sequence: Synthetic oligonucleotide
  Sense strand starting at position 3674 of SEQ ID NO: 1449
uauacauggucccuaggaa

SEQ ID NO: 113807 - RNA, 19 nt, Artificial Sequence
  Description of Artificial Sequence: Synthetic oligonucleotide
  Antisense strand to SEQ ID NO: 113806
uuccuagggaccauguaua

SEQ ID NO: 113808 - RNA, 19 nt, Artificial Sequence
  Description of Artificial Sequence: Synthetic oligonucleotide
  Sense strand starting at position 3583 of SEQ ID NO: 1449
gugaauuaguuccuguaga

SEQ ID NO: 113809 - RNA, 19 nt, Artificial Sequence
  Description of Artificial Sequence: Synthetic oligonucleotide
  Antisense strand to SEQ ID NO: 113808
ucuacaggaacuaauucac

SEQ ID NO: 113810 - RNA, 19 nt, Artificial Sequence
  Description of Artificial Sequence: Synthetic oligonucleotide
  Sense strand starting at position 3556 of SEQ ID NO: 1449
ugcuuuauacgguaucaug

SEQ ID NO: 113811 - RNA, 19 nt, Artificial Sequence
  Description of Artificial Sequence: Synthetic oligonucleotide
  Antisense strand to SEQ ID NO: 113810
caugauaccguauaaagca

SEQ ID NO: 113812 - RNA, 19 nt, Artificial Sequence
  Description of Artificial Sequence: Synthetic oligonucleotide
  Sense strand starting at position 3371 of SEQ ID NO: 1449
aauuauauguccuuagagg

SEQ ID NO: 113813 - RNA, 19 nt, Artificial Sequence
  Description of Artificial Sequence: Synthetic oligonucleotide
  Antisense strand to SEQ ID NO: 113812
ccucuaaggacauauaauu

SEQ ID NO: 113814 - RNA, 19 nt, Artificial Sequence
  Description of Artificial Sequence: Synthetic oligonucleotide
  Sense strand starting at position 3308 of SEQ ID NO: 1449
agaccugucucauugacac

SEQ ID NO: 113815 - RNA, 19 nt, Artificial Sequence
  Description of Artificial Sequence: Synthetic oligonucleotide
  Antisense strand to SEQ ID NO: 113814
gugucaaugagacaggucu

SEQ ID NO: 113816 - RNA, 19 nt, Artificial Sequence
  Description of Artificial Sequence: Synthetic oligonucleotide
  Sense strand starting at position 3276 of SEQ ID NO: 1449
auauuagagucagugagga

SEQ ID NO: 113817 - RNA, 19 nt, Artificial Sequence
  Description of Artificial Sequence: Synthetic oligonucleotide
  Antisense strand to SEQ ID NO: 113816
uccucacugacucuaauau

SEQ ID NO: 113818 - RNA, 19 nt, Artificial Sequence
  Description of Artificial Sequence: Synthetic oligonucleotide
  Sense strand starting at position 3057 of SEQ ID NO: 1449
gguuguauugaauguagac

SEQ ID NO: 113819 - RNA, 19 nt, Artificial Sequence
  Description of Artificial Sequence: Synthetic oligonucleotide
  Antisense strand to SEQ ID NO: 113818
gucuacauucaauacaacc

SEQ ID NO: 113820 - RNA, 19 nt, Artificial Sequence
  Description of Artificial Sequence: Synthetic oligonucleotide
  Sense strand starting at position 3045 of SEQ ID NO: 1449
aagugcuagaaagguugua

SEQ ID NO: 113821 - RNA, 19 nt, Artificial Sequence
  Description of Artificial Sequence: Synthetic oligonucleotide
  Antisense strand to SEQ ID NO: 113820
uacaaccuuucuagcacuu

SEQ ID NO: 113822 - RNA, 19 nt, Artificial Sequence
  Description of Artificial Sequence: Synthetic oligonucleotide
  Sense strand starting at position 2963 of SEQ ID NO: 1449
acuuguaucuggucacaga

SEQ ID NO: 113823 - RNA, 19 nt, Artificial Sequence
  Description of Artificial Sequence: Synthetic oligonucleotide
  Antisense strand to SEQ ID NO: 113822
ucugugaccagauacaagu

SEQ ID NO: 113824 - RNA, 19 nt, Artificial Sequence
  Description of Artificial Sequence: Synthetic oligonucleotide
  Sense strand starting at position 2954 of SEQ ID NO: 1449
cguaauaggacuuguaucu

SEQ ID NO: 113825 - RNA, 19 nt, Artificial Sequence
  Description of Artificial Sequence: Synthetic oligonucleotide
  Antisense strand to SEQ ID NO: 113824
agauacaaguccuauuacg

SEQ ID NO: 113826 - RNA, 19 nt, Artificial Sequence
  Description of Artificial Sequence: Synthetic oligonucleotide
  Sense strand starting at position 2927 of SEQ ID NO: 1449
uuuauugagguuugggaca

SEQ ID NO: 113827 - RNA, 19 nt, Artificial Sequence
  Description of Artificial Sequence: Synthetic oligonucleotide
  Antisense strand to SEQ ID NO: 113826
ugucccaaaccucaauaaa

SEQ ID NO: 113828 - RNA, 19 nt, Artificial Sequence
  Description of Artificial Sequence: Synthetic oligonucleotide
  Sense strand starting at position 2764 of SEQ ID NO: 1449
cacauuccugagugaguug

SEQ ID NO: 113829 - RNA, 19 nt, Artificial Sequence
  Description of Artificial Sequence: Synthetic oligonucleotide
  Antisense strand to SEQ ID NO: 113828
caacucacucaggaaugug

SEQ ID NO: 113830 - RNA, 19 nt, Artificial Sequence
  Description of Artificial Sequence: Synthetic oligonucleotide
  Sense strand starting at position 2689 of SEQ ID NO: 1449
gaaaccaggucuccugauu

SEQ ID NO: 113831 - RNA, 19 nt, Artificial Sequence
  Description of Artificial Sequence: Synthetic oligonucleotide
  Antisense strand to SEQ ID NO: 113830
aaucaggagaccugguuuc

SEQ ID NO: 113832 - RNA, 19 nt, Artificial Sequence
  Description of Artificial Sequence: Synthetic oligonucleotide
  Sense strand starting at position 2509 of SEQ ID NO: 1449
guagcauagcugggauaug

SEQ ID NO: 113833 - RNA, 19 nt, Artificial Sequence
  Description of Artificial Sequence: Synthetic oligonucleotide
  Antisense strand to SEQ ID NO: 113832
cauaucccagcuaugcuac

SEQ ID NO: 113834 - RNA, 19 nt, Artificial Sequence
  Description of Artificial Sequence: Synthetic oligonucleotide
  Sense strand starting at position 2508 of SEQ ID NO: 1449
aguagcauagcugggauau

SEQ ID NO: 113835 - RNA, 19 nt, Artificial Sequence
  Description of Artificial Sequence: Synthetic oligonucleotide
  Antisense strand to SEQ ID NO: 113834
auaucccagcuaugcuacu

SEQ ID NO: 113836 - RNA, 19 nt, Artificial Sequence
  Description of Artificial Sequence: Synthetic oligonucleotide
  Sense strand starting at position 2456 of SEQ ID NO: 1449
aggugagggcucugaauca

SEQ ID NO: 113837 - RNA, 19 nt, Artificial Sequence
  Description of Artificial Sequence: Synthetic oligonucleotide
  Antisense strand to SEQ ID NO: 113836
ugauucagagcccucaccu

SEQ ID NO: 113838 - RNA, 19 nt, Artificial Sequence
  Description of Artificial Sequence: Synthetic oligonucleotide
  Sense strand starting at position 2372 of SEQ ID NO: 1449
uuguuagaugcuuauaagc

SEQ ID NO: 113839 - RNA, 19 nt, Artificial Sequence
  Description of Artificial Sequence: Synthetic oligonucleotide
  Antisense strand to SEQ ID NO: 113838
gcuuauaagcaucuaacaa

SEQ ID NO: 113840 - RNA, 19 nt, Artificial Sequence
  Description of Artificial Sequence: Synthetic oligonucleotide
  Sense strand starting at position 2371 of SEQ ID NO: 1449
uuuguuagaugcuuauaag

SEQ ID NO: 113841 - RNA, 19 nt, Artificial Sequence
  Description of Artificial Sequence: Synthetic oligonucleotide
  Antisense strand to SEQ ID NO: 113840
cuuauaagcaucuaacaaa

SEQ ID NO: 113842 - RNA, 19 nt, Artificial Sequence
  Description of Artificial Sequence: Synthetic oligonucleotide
  Sense strand starting at position 2343 of SEQ ID NO: 1449
cuuguugaacauugauuau

SEQ ID NO: 113843 - RNA, 19 nt, Artificial Sequence
  Description of Artificial Sequence: Synthetic oligonucleotide
  Antisense strand to SEQ ID NO: 113842
auaaucaauguucaacaag

SEQ ID NO: 113844 - RNA, 19 nt, Artificial Sequence
  Description of Artificial Sequence: Synthetic oligonucleotide
  Sense strand starting at position 2240 of SEQ ID NO: 1449
guccgaguugaagagcaaa

SEQ ID NO: 113845 - RNA, 19 nt, Artificial Sequence
  Description of Artificial Sequence: Synthetic oligonucleotide
  Antisense strand to SEQ ID NO: 113844
uuugcucuucaacucggac

SEQ ID NO: 113846 - RNA, 19 nt, Artificial Sequence
  Description of Artificial Sequence: Synthetic oligonucleotide
  Sense strand starting at position 2028 of SEQ ID NO: 1449
gccgguugggcucaagaga

SEQ ID NO: 113847 - RNA, 19 nt, Artificial Sequence
  Description of Artificial Sequence: Synthetic oligonucleotide
  Antisense strand to SEQ ID NO: 113846
ucucuugagcccaaccggc

SEQ ID NO: 113848 - RNA, 19 nt, Artificial Sequence
  Description of Artificial Sequence: Synthetic oligonucleotide
  Sense strand starting at position 1487 of SEQ ID NO: 1449
uggcaacggagauguguaa

SEQ ID NO: 113849 - RNA, 19 nt, Artificial Sequence
  Description of Artificial Sequence: Synthetic oligonucleotide
  Antisense strand to SEQ ID NO: 113848
uuacacaucuccguugcca

SEQ ID NO: 113850 - RNA, 19 nt, Artificial Sequence
  Description of Artificial Sequence: Synthetic oligonucleotide
  Sense strand starting at position 1475 of SEQ ID NO: 1449
uuaagaaacguuuggcaac

SEQ ID NO: 113851 - RNA, 19 nt, Artificial Sequence
  Description of Artificial Sequence: Synthetic oligonucleotide
  Antisense strand to SEQ ID NO: 113850
guugccaaacguuucuuaa

SEQ ID NO: 113852 - RNA, 19 nt, Artificial Sequence
  Description of Artificial Sequence: Synthetic oligonucleotide
  Sense strand starting at position 1467 of SEQ ID NO: 1449
ggauuugguuaagaaacgu

SEQ ID NO: 113853 - RNA, 19 nt, Artificial Sequence
  Description of Artificial Sequence: Synthetic oligonucleotide
  Antisense strand to SEQ ID NO: 113852
acguuucuuaaccaaaucc

SEQ ID NO: 113854 - RNA, 19 nt, Artificial Sequence
  Description of Artificial Sequence: Synthetic oligonucleotide
  Sense strand starting at position 1426 of SEQ ID NO: 1449
uggauuaggugugauauuu

SEQ ID NO: 113855 - RNA, 19 nt, Artificial Sequence
  Description of Artificial Sequence: Synthetic oligonucleotide
  Antisense strand to SEQ ID NO: 113854
aaauaucacaccuaaucca

SEQ ID NO: 113856 - RNA, 19 nt, Artificial Sequence
  Description of Artificial Sequence: Synthetic oligonucleotide
  Sense strand starting at position 1425 of SEQ ID NO: 1449
uuggauuaggugugauauu

SEQ ID NO: 113857 - RNA, 19 nt, Artificial Sequence
  Description of Artificial Sequence: Synthetic oligonucleotide
  Antisense strand to SEQ ID NO: 113856
aauaucacaccuaauccaa

SEQ ID NO: 113858 - RNA, 19 nt, Artificial Sequence
  Description of Artificial Sequence: Synthetic oligonucleotide
  Sense strand starting at position 1382 of SEQ ID NO: 1449
gcaugcguagugcuauaua

SEQ ID NO: 113859 - RNA, 19 nt, Artificial Sequence
  Description of Artificial Sequence: Synthetic oligonucleotide
  Antisense strand to SEQ ID NO: 113858
uauauagcacuacgcaugc

SEQ ID NO: 113860 - RNA, 19 nt, Artificial Sequence
  Description of Artificial Sequence: Synthetic oligonucleotide
  Sense strand starting at position 1252 of SEQ ID NO: 1449
auaaacuauuuguggacau

SEQ ID NO: 113861 - RNA, 19 nt, Artificial Sequence
  Description of Artificial Sequence: Synthetic oligonucleotide
  Antisense strand to SEQ ID NO: 113860
auguccacaaauaguuuau

SEQ ID NO: 113862 - RNA, 19 nt, Artificial Sequence
  Description of Artificial Sequence: Synthetic oligonucleotide
  Sense strand starting at position 1149 of SEQ ID NO: 1449
uuacucaucugguuucuca

SEQ ID NO: 113863 - RNA, 19 nt, Artificial Sequence
  Description of Artificial Sequence: Synthetic oligonucleotide
  Antisense strand to SEQ ID NO: 113862
ugagaaaccagaugaguaa

SEQ ID NO: 113864 - RNA, 19 nt, Artificial Sequence
  Description of Artificial Sequence: Synthetic oligonucleotide
  Sense strand starting at position 1117 of SEQ ID NO: 1449
cugucuaacgaguagcaaa

SEQ ID NO: 113865 - RNA, 19 nt, Artificial Sequence
  Description of Artificial Sequence: Synthetic oligonucleotide
  Antisense strand to SEQ ID NO: 113864
uuugcuacucguuagacag

SEQ ID NO: 113866 - RNA, 19 nt, Artificial Sequence
  Description of Artificial Sequence: Synthetic oligonucleotide
  Sense strand starting at position 1109 of SEQ ID NO: 1449
guaauacucugucuaacga

SEQ ID NO: 113867 - RNA, 19 nt, Artificial Sequence
  Description of Artificial Sequence: Synthetic oligonucleotide
  Antisense strand to SEQ ID NO: 113866
ucguuagacagaguauuac

SEQ ID NO: 113868 - RNA, 19 nt, Artificial Sequence
  Description of Artificial Sequence: Synthetic oligonucleotide
  Sense strand starting at position 1061 of SEQ ID NO: 1449
ugagcuccuaggugggaua

SEQ ID NO: 113869 - RNA, 19 nt, Artificial Sequence
  Description of Artificial Sequence: Synthetic oligonucleotide
  Antisense strand to SEQ ID NO: 113868
uaucccaccuaggagcuca

SEQ ID NO: 113870 - RNA, 19 nt, Artificial Sequence
  Description of Artificial Sequence: Synthetic oligonucleotide
  Sense strand starting at position 980 of SEQ ID NO: 1449
uucuaucauucuuucgaag

SEQ ID NO: 113871 - RNA, 19 nt, Artificial Sequence
  Description of Artificial Sequence: Synthetic oligonucleotide
  Antisense strand to SEQ ID NO: 113870
cuucgaaagaaugauagaa

SEQ ID NO: 113872 - RNA, 19 nt, Artificial Sequence
  Description of Artificial Sequence: Synthetic oligonucleotide
  Sense strand starting at position 913 of SEQ ID NO: 1449
ccaaguuagucuccuaacu

SEQ ID NO: 113873 - RNA, 19 nt, Artificial Sequence
  Description of Artificial Sequence: Synthetic oligonucleotide
  Antisense strand to SEQ ID NO: 113872
aguuaggagacuaacuugg

SEQ ID NO: 113874 - RNA, 19 nt, Artificial Sequence
  Description of Artificial Sequence: Synthetic oligonucleotide
  Sense strand starting at position 92 of SEQ ID NO: 1449
guucuuguuguauaaauug

SEQ ID NO: 113875 - RNA, 19 nt, Artificial Sequence
  Description of Artificial Sequence: Synthetic oligonucleotide
  Antisense strand to SEQ ID NO: 113874
caauuuauacaacaagaac

SEQ ID NO: 113876 - RNA, 19 nt, Artificial Sequence
  Description of Artificial Sequence: Synthetic oligonucleotide
  Sense strand starting at position 11 of SEQ ID NO: 1450
ucccauagacucuaguauu

SEQ ID NO: 113877 - RNA, 19 nt, Artificial Sequence
  Description of Artificial Sequence: Synthetic oligonucleotide
  Antisense strand to SEQ ID NO: 113876
aauacuagagucuauggga

SEQ ID NO: 113878 - RNA, 19 nt, Artificial Sequence
  Description of Artificial Sequence: Synthetic oligonucleotide
  Sense strand starting at position 195 of SEQ ID NO: 1450
auauguuguggucaaauac

SEQ ID NO: 113879 - RNA, 19 nt, Artificial Sequence
  Description of Artificial Sequence: Synthetic oligonucleotide
  Antisense strand to SEQ ID NO: 113878
guauuugaccacaacauau

SEQ ID NO: 113880 - RNA, 19 nt, Artificial Sequence
  Description of Artificial Sequence: Synthetic oligonucleotide
  Sense strand starting at position 227 of SEQ ID NO: 1450
uggcuuagaugagauuuaa

SEQ ID NO: 113881 - RNA, 19 nt, Artificial Sequence
  Description of Artificial Sequence: Synthetic oligonucleotide
  Antisense strand to SEQ ID NO: 113880
uuaaaucucaucuaagcca

SEQ ID NO: 113882 - RNA, 19 nt, Artificial Sequence
  Description of Artificial Sequence: Synthetic oligonucleotide
  Sense strand starting at position 263 of SEQ ID NO: 1450
ugcuuaagaguccaccaga

SEQ ID NO: 113883 - RNA, 19 nt, Artificial Sequence
  Description of Artificial Sequence: Synthetic oligonucleotide
  Antisense strand to SEQ ID NO: 113882
ucugguggacucuuaagca

SEQ ID NO: 113884 - RNA, 19 nt, Artificial Sequence
  Description of Artificial Sequence: Synthetic oligonucleotide
  Sense strand starting at position 553 of SEQ ID NO: 1450
guuacaugguccucaacag

SEQ ID NO: 113885 - RNA, 19 nt, Artificial Sequence
  Description of Artificial Sequence: Synthetic oligonucleotide
  Antisense strand to SEQ ID NO: 113884
cuguugaggaccauguaac

SEQ ID NO: 113886 - RNA, 19 nt, Artificial Sequence
  Description of Artificial Sequence: Synthetic oligonucleotide
  Sense strand starting at position 560 of SEQ ID NO: 1450
gguccucaacagcagauau

SEQ ID NO: 113887 - RNA, 19 nt, Artificial Sequence
  Description of Artificial Sequence: Synthetic oligonucleotide
  Antisense strand to SEQ ID NO: 113886
auaucugcuguugaggacc

SEQ ID NO: 113888 - RNA, 19 nt, Artificial Sequence
  Description of Artificial Sequence: Synthetic oligonucleotide
  Sense strand starting at position 625 of SEQ ID NO: 1450
auuguaaagucaccagaau

SEQ ID NO: 113889 - RNA, 19 nt, Artificial Sequence
  Description of Artificial Sequence: Synthetic oligonucleotide
  Antisense strand to SEQ ID NO: 113888
auucuggugacuuuacaau

SEQ ID NO: 113890 - RNA, 19 nt, Artificial Sequence
  Description of Artificial Sequence: Synthetic oligonucleotide
  Sense strand starting at position 645 of SEQ ID NO: 1450
aaagguagucuaugucuua

SEQ ID NO: 113891 - RNA, 19 nt, Artificial Sequence
  Description of Artificial Sequence: Synthetic oligonucleotide
  Antisense strand to SEQ ID NO: 113890
uaagacauagacuaccuuu

SEQ ID NO: 113892 - RNA, 19 nt, Artificial Sequence
  Description of Artificial Sequence: Synthetic oligonucleotide
  Sense strand starting at position 656 of SEQ ID NO: 1450
augucuuaucacgagaauu

SEQ ID NO: 113893 - RNA, 19 nt, Artificial Sequence
  Description of Artificial Sequence: Synthetic oligonucleotide
  Antisense strand to SEQ ID NO: 113892
aauucucgugauaagacau

SEQ ID NO: 113894 - RNA, 19 nt, Artificial Sequence
  Description of Artificial Sequence: Synthetic oligonucleotide
  Sense strand starting at position 658 of SEQ ID NO: 1450
gucuuaucacgagaauuaa

SEQ ID NO: 113895 - RNA, 19 nt, Artificial Sequence
  Description of Artificial Sequence: Synthetic oligonucleotide
  Antisense strand to SEQ ID NO: 113894
uuaauucucgugauaagac

SEQ ID NO: 113896 - RNA, 19 nt, Artificial Sequence
  Description of Artificial Sequence: Synthetic oligonucleotide
  Sense strand starting at position 986 of SEQ ID NO: 1450
uuguguuuccugcagggaa

SEQ ID NO: 113897 - RNA, 19 nt, Artificial Sequence
  Description of Artificial Sequence: Synthetic oligonucleotide
  Antisense strand to SEQ ID NO: 113896
uucccugcaggaaacacaa

SEQ ID NO: 113898 - RNA, 19 nt, Artificial Sequence
  Description of Artificial Sequence: Synthetic oligonucleotide
  Sense strand starting at position 1166 of SEQ ID NO: 1450
guacucuuagcucacuuau

SEQ ID NO: 113899 - RNA, 19 nt, Artificial Sequence
  Description of Artificial Sequence: Synthetic oligonucleotide
  Antisense strand to SEQ ID NO: 113898
auaagugagcuaagaguac

SEQ ID NO: 113900 - RNA, 19 nt, Artificial Sequence
  Description of Artificial Sequence: Synthetic oligonucleotide
  Sense strand starting at position 1219 of SEQ ID NO: 1450
uaaauuccguagcuagaaa

SEQ ID NO: 113901 - RNA, 19 nt, Artificial Sequence
  Description of Artificial Sequence: Synthetic oligonucleotide
  Antisense strand to SEQ ID NO: 113900
uuucuagcuacggaauuua

SEQ ID NO: 113902 - RNA, 19 nt, Artificial Sequence
  Description of Artificial Sequence: Synthetic oligonucleotide
  Sense strand starting at position 1260 of SEQ ID NO: 1450
auauuaaugucaguuggua

SEQ ID NO: 113903 - RNA, 19 nt, Artificial Sequence
  Description of Artificial Sequence: Synthetic oligonucleotide
  Antisense strand to SEQ ID NO: 113902
uaccaacugacauuaauau

SEQ ID NO: 113904 - RNA, 19 nt, Artificial Sequence
  Description of Artificial Sequence: Synthetic oligonucleotide
  Sense strand starting at position 1274 of SEQ ID NO: 1450
ugguauguuaggcauuaaa

SEQ ID NO: 113905 - RNA, 19 nt, Artificial Sequence
  Description of Artificial Sequence: Synthetic oligonucleotide
  Antisense strand to SEQ ID NO: 113904
uuuaaugccuaacauacca

SEQ ID NO: 113906 - RNA, 19 nt, Artificial Sequence
  Description of Artificial Sequence: Synthetic oligonucleotide
  Sense strand starting at position 1284 of SEQ ID NO: 1450
ggcauuaaacaaugaucuu

SEQ ID NO: 113907 - RNA, 19 nt, Artificial Sequence
  Description of Artificial Sequence: Synthetic oligonucleotide
  Antisense strand to SEQ ID NO: 113906
aagaucauuguuuaaugcc

SEQ ID NO: 113908 - RNA, 19 nt, Artificial Sequence
  Description of Artificial Sequence: Synthetic oligonucleotide
  Sense strand starting at position 1370 of SEQ ID NO: 1450
ucuggcucaggugagauau

SEQ ID NO: 113909 - RNA, 19 nt, Artificial Sequence
  Description of Artificial Sequence: Synthetic oligonucleotide
  Antisense strand to SEQ ID NO: 113908
auaucucaccugagccaga

SEQ ID NO: 113910 - RNA, 19 nt, Artificial Sequence
  Description of Artificial Sequence: Synthetic oligonucleotide
  Sense strand starting at position 1381 of SEQ ID NO: 1450
ugagauauauuaucgccau

SEQ ID NO: 113911 - RNA, 19 nt, Artificial Sequence
  Description of Artificial Sequence: Synthetic oligonucleotide
  Antisense strand to SEQ ID NO: 113910
auggcgauaauauaucuca

SEQ ID NO: 113912 - RNA, 19 nt, Artificial Sequence
  Description of Artificial Sequence: Synthetic oligonucleotide
  Sense strand starting at position 1433 of SEQ ID NO: 1450
ccagaucacacggguagua

SEQ ID NO: 113913 - RNA, 19 nt, Artificial Sequence
  Description of Artificial Sequence: Synthetic oligonucleotide
  Antisense strand to SEQ ID NO: 113912
uacuacccgugugaucugg

SEQ ID NO: 113914 - RNA, 19 nt, Artificial Sequence
  Description of Artificial Sequence: Synthetic oligonucleotide
  Sense strand starting at position 1460 of SEQ ID NO: 1450
guagguaaacacugaugca

SEQ ID NO: 113915 - RNA, 19 nt, Artificial Sequence
  Description of Artificial Sequence: Synthetic oligonucleotide
  Antisense strand to SEQ ID NO: 113914
ugcaucaguguuuaccuac

SEQ ID NO: 113916 - RNA, 19 nt, Artificial Sequence
  Description of Artificial Sequence: Synthetic oligonucleotide
  Sense strand starting at position 1502 of SEQ ID NO: 1450
gcacaaagguauccaugaa

SEQ ID NO: 113917 - RNA, 19 nt, Artificial Sequence
  Description of Artificial Sequence: Synthetic oligonucleotide
  Antisense strand to SEQ ID NO: 113916
uucauggauaccuuugugc

SEQ ID NO: 113918 - RNA, 19 nt, Artificial Sequence
  Description of Artificial Sequence: Synthetic oligonucleotide
  Sense strand starting at position 2511 of SEQ ID NO: 1450
cugcgaacuccucacaauc

SEQ ID NO: 113919 - RNA, 19 nt, Artificial Sequence
  Description of Artificial Sequence: Synthetic oligonucleotide
  Antisense strand to SEQ ID NO: 113918
gauugugaggaguucgcag

SEQ ID NO: 113920 - RNA, 19 nt, Artificial Sequence
  Description of Artificial Sequence: Synthetic oligonucleotide
  Sense strand starting at position 2669 of SEQ ID NO: 1450
cccuaagaucaugguauac

SEQ ID NO: 113921 - RNA, 19 nt, Artificial Sequence
  Description of Artificial Sequence: Synthetic oligonucleotide
  Antisense strand to SEQ ID NO: 113920
guauaccaugaucuuaggg

SEQ ID NO: 113922 - RNA, 19 nt, Artificial Sequence
  Description of Artificial Sequence: Synthetic oligonucleotide
  Sense strand starting at position 2703 of SEQ ID NO: 1450
gugucuguacuagaucaca

SEQ ID NO: 113923 - RNA, 19 nt, Artificial Sequence
  Description of Artificial Sequence: Synthetic oligonucleotide
  Antisense strand to SEQ ID NO: 113922
ugugaucuaguacagacac

SEQ ID NO: 113924 - RNA, 19 nt, Artificial Sequence
  Description of Artificial Sequence: Synthetic oligonucleotide
  Sense strand starting at position 2708 of SEQ ID NO: 1450
uguacuagaucacacauuu

SEQ ID NO: 113925 - RNA, 19 nt, Artificial Sequence
  Description of Artificial Sequence: Synthetic oligonucleotide
  Antisense strand to SEQ ID NO: 113924
aaaugugugaucuaguaca

SEQ ID NO: 113926 - RNA, 19 nt, Artificial Sequence
  Description of Artificial Sequence: Synthetic oligonucleotide
  Sense strand starting at position 2929 of SEQ ID NO: 1450
gaccauugccaguagguua

SEQ ID NO: 113927 - RNA, 19 nt, Artificial Sequence
  Description of Artificial Sequence: Synthetic oligonucleotide
  Antisense strand to SEQ ID NO: 113926
uaaccuacuggcaaugguc

SEQ ID NO: 113928 - RNA, 19 nt, Artificial Sequence
  Description of Artificial Sequence: Synthetic oligonucleotide
  Sense strand starting at position 2936 of SEQ ID NO: 1450
gccaguagguuauuugcua

SEQ ID NO: 113929 - RNA, 19 nt, Artificial Sequence
  Description of Artificial Sequence: Synthetic oligonucleotide
  Antisense strand to SEQ ID NO: 113928
uagcaaauaaccuacuggc

SEQ ID NO: 113930 - RNA, 19 nt, Artificial Sequence
  Description of Artificial Sequence: Synthetic oligonucleotide
  Sense strand starting at position 2937 of SEQ ID NO: 1450
ccaguagguuauuugcuaa

SEQ ID NO: 113931 - RNA, 19 nt, Artificial Sequence
  Description of Artificial Sequence: Synthetic oligonucleotide
  Antisense strand to SEQ ID NO: 113930
uuagcaaauaaccuacugg

SEQ ID NO: 113932 - RNA, 19 nt, Artificial Sequence
  Description of Artificial Sequence: Synthetic oligonucleotide
  Sense strand starting at position 2940 of SEQ ID NO: 1450
guagguuauuugcuaagcu

SEQ ID NO: 113933 - RNA, 19 nt, Artificial Sequence
  Description of Artificial Sequence: Synthetic oligonucleotide
  Antisense strand to SEQ ID NO: 113932
agcuuagcaaauaaccuac

SEQ ID NO: 113934 - RNA, 19 nt, Artificial Sequence
  Description of Artificial Sequence: Synthetic oligonucleotide
  Sense strand starting at position 3004 of SEQ ID NO: 1450
ccguguuguacuuccagca

SEQ ID NO: 113935 - RNA, 19 nt, Artificial Sequence
  Description of Artificial Sequence: Synthetic oligonucleotide
  Antisense strand to SEQ ID NO: 113934
ugcuggaaguacaacacgg

SEQ ID NO: 113936 - RNA, 19 nt, Artificial Sequence
  Description of Artificial Sequence: Synthetic oligonucleotide
  Sense strand starting at position 3088 of SEQ ID NO: 1450
auguuucucucaccuggaa

SEQ ID NO: 113937 - RNA, 19 nt, Artificial Sequence
  Description of Artificial Sequence: Synthetic oligonucleotide
  Antisense strand to SEQ ID NO: 113936
uuccaggugagagaaacau

SEQ ID NO: 113938 - RNA, 19 nt, Artificial Sequence
  Description of Artificial Sequence: Synthetic oligonucleotide
  Sense strand starting at position 3229 of SEQ ID NO: 1450
cuguguguagacuguauuu

SEQ ID NO: 113939 - RNA, 19 nt, Artificial Sequence
  Description of Artificial Sequence: Synthetic oligonucleotide
  Antisense strand to SEQ ID NO: 113938
aaauacagucuacacacag

SEQ ID NO: 113940 - RNA, 19 nt, Artificial Sequence
  Description of Artificial Sequence: Synthetic oligonucleotide
  Sense strand starting at position 3297 of SEQ ID NO: 1450
uuuaaaugucuugacagca

SEQ ID NO: 113941 - RNA, 19 nt, Artificial Sequence
  Description of Artificial Sequence: Synthetic oligonucleotide
  Antisense strand to SEQ ID NO: 113940
ugcugucaagacauuuaaa

SEQ ID NO: 113942 - RNA, 19 nt, Artificial Sequence
  Description of Artificial Sequence: Synthetic oligonucleotide
  Sense strand starting at position 3402 of SEQ ID NO: 1450
uuaaguaaacauugacgua

SEQ ID NO: 113943 - RNA, 19 nt, Artificial Sequence
  Description of Artificial Sequence: Synthetic oligonucleotide
  Antisense strand to SEQ ID NO: 113942
uacgucaauguuuacuuaa

SEQ ID NO: 113944 - RNA, 19 nt, Artificial Sequence
  Description of Artificial Sequence: Synthetic oligonucleotide
  Sense strand starting at position 3469 of SEQ ID NO: 1450
ugggaagccagucaucuau

SEQ ID NO: 113945 - RNA, 19 nt, Artificial Sequence
  Description of Artificial Sequence: Synthetic oligonucleotide
  Antisense strand to SEQ ID NO: 113944
auagaugacuggcuuccca

SEQ ID NO: 113946 - RNA, 19 nt, Artificial Sequence
  Description of Artificial Sequence: Synthetic oligonucleotide
  Sense strand starting at position 3471 of SEQ ID NO: 1450
ggaagccagucaucuaucu

SEQ ID NO: 113947 - RNA, 19 nt, Artificial Sequence
  Description of Artificial Sequence: Synthetic oligonucleotide
  Antisense strand to SEQ ID NO: 113946
agauagaugacuggcuucc

SEQ ID NO: 113948 - RNA, 19 nt, Artificial Sequence
  Description of Artificial Sequence: Synthetic oligonucleotide
  Sense strand starting at position 3605 of SEQ ID NO: 1450
cugagagcccagugcauuu

SEQ ID NO: 113949 - RNA, 19 nt, Artificial Sequence
  Description of Artificial Sequence: Synthetic oligonucleotide
  Antisense strand to SEQ ID NO: 113948
aaaugcacugggcucucag

SEQ ID NO: 113950 - RNA, 19 nt, Artificial Sequence
  Description of Artificial Sequence: Synthetic oligonucleotide
  Sense strand starting at position 3650 of SEQ ID NO: 1450
gggugugaaauaggcaaua

SEQ ID NO: 113951 - RNA, 19 nt, Artificial Sequence
  Description of Artificial Sequence: Synthetic oligonucleotide
  Antisense strand to SEQ ID NO: 113950
uauugccuauuucacaccc

SEQ ID NO: 113952 - RNA, 19 nt, Artificial Sequence
  Description of Artificial Sequence: Synthetic oligonucleotide
  Sense strand starting at position 3678 of SEQ ID NO: 1450
aauaguugugucugagagg

SEQ ID NO: 113953 - RNA, 19 nt, Artificial Sequence
  Description of Artificial Sequence: Synthetic oligonucleotide
  Antisense strand to SEQ ID NO: 113952
ccucucagacacaacuauu

SEQ ID NO: 113954 - RNA, 19 nt, Artificial Sequence
  Description of Artificial Sequence: Synthetic oligonucleotide
  Sense strand starting at position 3933 of SEQ ID NO: 1450
auugcuaaggcuuauaacu

SEQ ID NO: 113955 - RNA, 19 nt, Artificial Sequence
  Description of Artificial Sequence: Synthetic oligonucleotide
  Antisense strand to SEQ ID NO: 113954
aguuauaagccuuagcaau

SEQ ID NO: 113956 - RNA, 19 nt, Artificial Sequence
  Description of Artificial Sequence: Synthetic oligonucleotide
  Sense strand starting at position 20 of SEQ ID NO: 1451
cagaaauacgacugaugug

SEQ ID NO: 113957 - RNA, 19 nt, Artificial Sequence
  Description of Artificial Sequence: Synthetic oligonucleotide
  Antisense strand to SEQ ID NO: 113956
cacaucagucguauuucug

SEQ ID NO: 113958 - RNA, 19 nt, Artificial Sequence
  Description of Artificial Sequence: Synthetic oligonucleotide
  Sense strand starting at position 21 of SEQ ID NO: 1451
agaaauacgacugaugugu

SEQ ID NO: 113959 - RNA, 19 nt, Artificial Sequence
  Description of Artificial Sequence: Synthetic oligonucleotide
  Antisense strand to SEQ ID NO: 113958
acacaucagucguauuucu

SEQ ID NO: 113960 - RNA, 19 nt, Artificial Sequence
  Description of Artificial Sequence: Synthetic oligonucleotide
  Sense strand starting at position 30 of SEQ ID NO: 1451
acugauguguuucuaguaa

SEQ ID NO: 113961 - RNA, 19 nt, Artificial Sequence
  Description of Artificial Sequence: Synthetic oligonucleotide
  Antisense strand to SEQ ID NO: 113960
uuacuagaaacacaucagu

SEQ ID NO: 113962 - RNA, 19 nt, Artificial Sequence
  Description of Artificial Sequence: Synthetic oligonucleotide
  Sense strand starting at position 60 of SEQ ID NO: 1451
uuucucauacucugaggaa

SEQ ID NO: 113963 - RNA, 19 nt, Artificial Sequence
  Description of Artificial Sequence: Synthetic oligonucleotide
  Antisense strand to SEQ ID NO: 113962
uuccucagaguaugagaaa

SEQ ID NO: 113964 - RNA, 19 nt, Artificial Sequence
  Description of Artificial Sequence: Synthetic oligonucleotide
  Sense strand starting at position 103 of SEQ ID NO: 1451
ggcuucugauaucuaggau

SEQ ID NO: 113965 - RNA, 19 nt, Artificial Sequence
  Description of Artificial Sequence: Synthetic oligonucleotide
  Antisense strand to SEQ ID NO: 113964
auccuagauaucagaagcc

SEQ ID NO: 113966 - RNA, 19 nt, Artificial Sequence
  Description of Artificial Sequence: Synthetic oligonucleotide
  Sense strand starting at position 104 of SEQ ID NO: 1451
gcuucugauaucuaggaug

SEQ ID NO: 113967 - RNA, 19 nt, Artificial Sequence
  Description of Artificial Sequence: Synthetic oligonucleotide
  Antisense strand to SEQ ID NO: 113966
cauccuagauaucagaagc

SEQ ID NO: 113968 - RNA, 19 nt, Artificial Sequence
  Description of Artificial Sequence: Synthetic oligonucleotide
  Sense strand starting at position 134 of SEQ ID NO: 1451
uaaauuaugaggugugagu

SEQ ID NO: 113969 - RNA, 19 nt, Artificial Sequence
  Description of Artificial Sequence: Synthetic oligonucleotide
  Antisense strand to SEQ ID NO: 113968
acucacaccucauaauuua

SEQ ID NO: 113970 - RNA, 19 nt, Artificial Sequence
  Description of Artificial Sequence: Synthetic oligonucleotide
  Sense strand starting at position 672 of SEQ ID NO: 1451
cuggaaagaugccuugcau

SEQ ID NO: 113971 - RNA, 19 nt, Artificial Sequence
  Description of Artificial Sequence: Synthetic oligonucleotide
  Antisense strand to SEQ ID NO: 113970
augcaaggcaucuuuccag

SEQ ID NO: 113972 - RNA, 19 nt, Artificial Sequence
  Description of Artificial Sequence: Synthetic oligonucleotide
  Sense strand starting at position 717 of SEQ ID NO: 1451
gucacacuggaucaucuua

SEQ ID NO: 113973 - RNA, 19 nt, Artificial Sequence
  Description of Artificial Sequence: Synthetic oligonucleotide
  Antisense strand to SEQ ID NO: 113972
uaagaugauccagugugac

SEQ ID NO: 113974 - RNA, 19 nt, Artificial Sequence
  Description of Artificial Sequence: Synthetic oligonucleotide
  Sense strand starting at position 797 of SEQ ID NO: 1451
cucauugcuucuccuagga

SEQ ID NO: 113975 - RNA, 19 nt, Artificial Sequence
  Description of Artificial Sequence: Synthetic oligonucleotide
  Antisense strand to SEQ ID NO: 113974
uccuaggagaagcaaugag

SEQ ID NO: 113976 - RNA, 19 nt, Artificial Sequence
  Description of Artificial Sequence: Synthetic oligonucleotide
  Sense strand starting at position 801 of SEQ ID NO: 1451
uugcuucuccuaggagaug

SEQ ID NO: 113977 - RNA, 19 nt, Artificial Sequence
  Description of Artificial Sequence: Synthetic oligonucleotide
  Antisense strand to SEQ ID NO: 113976
caucuccuaggagaagcaa

SEQ ID NO: 113978 - RNA, 19 nt, Artificial Sequence
  Description of Artificial Sequence: Synthetic oligonucleotide
  Sense strand starting at position 844 of SEQ ID NO: 1451
ggaugaaugcacuggcauc

SEQ ID NO: 113979 - RNA, 19 nt, Artificial Sequence
  Description of Artificial Sequence: Synthetic oligonucleotide
  Antisense strand to SEQ ID NO: 113978
gaugccagugcauucaucc

SEQ ID NO: 113980 - RNA, 19 nt, Artificial Sequence
  Description of Artificial Sequence: Synthetic oligonucleotide
  Sense strand starting at position 915 of SEQ ID NO: 1451
aucauuggguccucucaca

SEQ ID NO: 113981 - RNA, 19 nt, Artificial Sequence
  Description of Artificial Sequence: Synthetic oligonucleotide
  Antisense strand to SEQ ID NO: 113980
ugugagaggacccaaugau

SEQ ID NO: 113982 - RNA, 19 nt, Artificial Sequence
  Description of Artificial Sequence: Synthetic oligonucleotide
  Sense strand starting at position 968 of SEQ ID NO: 1451
agucauuaucccggaguug

SEQ ID NO: 113983 - RNA, 19 nt, Artificial Sequence
  Description of Artificial Sequence: Synthetic oligonucleotide
  Antisense strand to SEQ ID NO: 113982
caacuccgggauaaugacu

SEQ ID NO: 113984 - RNA, 19 nt, Artificial Sequence
  Description of Artificial Sequence: Synthetic oligonucleotide
  Sense strand starting at position 969 of SEQ ID NO: 1451
gucauuaucccggaguugu

SEQ ID NO: 113985 - RNA, 19 nt, Artificial Sequence
  Description of Artificial Sequence: Synthetic oligonucleotide
  Antisense strand to SEQ ID NO: 113984
acaacuccgggauaaugac

SEQ ID NO: 113986 - RNA, 19 nt, Artificial Sequence
  Description of Artificial Sequence: Synthetic oligonucleotide
  Sense strand starting at position 1137 of SEQ ID NO: 1451
gucugugaaaugggaguaa

SEQ ID NO: 113987 - RNA, 19 nt, Artificial Sequence
  Description of Artificial Sequence: Synthetic oligonucleotide
  Antisense strand to SEQ ID NO: 113986
uuacucccauuucacagac

SEQ ID NO: 113988 - RNA, 19 nt, Artificial Sequence
  Description of Artificial Sequence: Synthetic oligonucleotide
  Sense strand starting at position 1200 of SEQ ID NO: 1451
auguaaagugcuuaguuaa

SEQ ID NO: 113989 - RNA, 19 nt, Artificial Sequence
  Description of Artificial Sequence: Synthetic oligonucleotide
  Antisense strand to SEQ ID NO: 113988
uuaacuaagcacuuuacau

SEQ ID NO: 113990 - RNA, 19 nt, Artificial Sequence
  Description of Artificial Sequence: Synthetic oligonucleotide
  Sense strand starting at position 1259 of SEQ ID NO: 1451
uugaauagcucaucuauag

SEQ ID NO: 113991 - RNA, 19 nt, Artificial Sequence
  Description of Artificial Sequence: Synthetic oligonucleotide
  Antisense strand to SEQ ID NO: 113990
cuauagaugagcuauucaa

SEQ ID NO: 113992 - RNA, 19 nt, Artificial Sequence
  Description of Artificial Sequence: Synthetic oligonucleotide
  Sense strand starting at position 1349 of SEQ ID NO: 1451
uuacucuaguuguuuacau

SEQ ID NO: 113993 - RNA, 19 nt, Artificial Sequence
  Description of Artificial Sequence: Synthetic oligonucleotide
  Antisense strand to SEQ ID NO: 113992
auguaaacaacuagaguaa

SEQ ID NO: 113994 - RNA, 19 nt, Artificial Sequence
  Description of Artificial Sequence: Synthetic oligonucleotide
  Sense strand starting at position 1356 of SEQ ID NO: 1451
aguuguuuacauuggaagu

SEQ ID NO: 113995 - RNA, 19 nt, Artificial Sequence
  Description of Artificial Sequence: Synthetic oligonucleotide
  Antisense strand to SEQ ID NO: 113994
acuuccaauguaaacaacu

SEQ ID NO: 113996 - RNA, 19 nt, Artificial Sequence
  Description of Artificial Sequence: Synthetic oligonucleotide
  Sense strand starting at position 1470 of SEQ ID NO: 1451
gucccacaucccgagaauu

SEQ ID NO: 113997 - RNA, 19 nt, Artificial Sequence
  Description of Artificial Sequence: Synthetic oligonucleotide
  Antisense strand to SEQ ID NO: 113996
aauucucgggaugugggac

SEQ ID NO: 113998 - RNA, 19 nt, Artificial Sequence
  Description of Artificial Sequence: Synthetic oligonucleotide
  Sense strand starting at position 1480 of SEQ ID NO: 1451
ccgagaauuccucacacgu

SEQ ID NO: 113999 - RNA, 19 nt, Artificial Sequence
  Description of Artificial Sequence: Synthetic oligonucleotide
  Antisense strand to SEQ ID NO: 113998
acgugugaggaauucucgg

SEQ ID NO: 114000 - RNA, 19 nt, Artificial Sequence
  Description of Artificial Sequence: Synthetic oligonucleotide
  Sense strand starting at position 1488 of SEQ ID NO: 1451
uccucacacgucuggaaga

SEQ ID NO: 114001 - RNA, 19 nt, Artificial Sequence
  Description of Artificial Sequence: Synthetic oligonucleotide
  Antisense strand to SEQ ID NO: 114000
ucuuccagacgugugagga

SEQ ID NO: 114002 - RNA, 19 nt, Artificial Sequence
  Description of Artificial Sequence: Synthetic oligonucleotide
  Sense strand starting at position 1490 of SEQ ID NO: 1451
cucacacgucuggaagauu

SEQ ID NO: 114003 - RNA, 19 nt, Artificial Sequence
  Description of Artificial Sequence: Synthetic oligonucleotide
  Antisense strand to SEQ ID NO: 114002
aaucuuccagacgugugag

SEQ ID NO: 114004 - RNA, 19 nt, Artificial Sequence
  Description of Artificial Sequence: Synthetic oligonucleotide
  Sense strand starting at position 1498 of SEQ ID NO: 1451
ucuggaagauugucacaca

SEQ ID NO: 114005 - RNA, 19 nt, Artificial Sequence
  Description of Artificial Sequence: Synthetic oligonucleotide
  Antisense strand to SEQ ID NO: 114004
ugugugacaaucuuccaga

SEQ ID NO: 114006 - RNA, 19 nt, Artificial Sequence
  Description of Artificial Sequence: Synthetic oligonucleotide
  Sense strand starting at position 1633 of SEQ ID NO: 1451
acgguauuccugugggauc

SEQ ID NO: 114007 - RNA, 19 nt, Artificial Sequence
  Description of Artificial Sequence: Synthetic oligonucleotide
  Antisense strand to SEQ ID NO: 114006
gaucccacaggaauaccgu

SEQ ID NO: 114008 - RNA, 19 nt, Artificial Sequence
  Description of Artificial Sequence: Synthetic oligonucleotide
  Sense strand starting at position 1635 of SEQ ID NO: 1451
gguauuccugugggaucuu

SEQ ID NO: 114009 - RNA, 19 nt, Artificial Sequence
  Description of Artificial Sequence: Synthetic oligonucleotide
  Antisense strand to SEQ ID NO: 114008
aagaucccacaggaauacc

SEQ ID NO: 114010 - RNA, 19 nt, Artificial Sequence
  Description of Artificial Sequence: Synthetic oligonucleotide
  Sense strand starting at position 1644 of SEQ ID NO: 1451
gugggaucuuacagaggga

SEQ ID NO: 114011 - RNA, 19 nt, Artificial Sequence
  Description of Artificial Sequence: Synthetic oligonucleotide
  Antisense strand to SEQ ID NO: 114010
ucccucuguaagaucccac

SEQ ID NO: 114012 - RNA, 19 nt, Artificial Sequence
  Description of Artificial Sequence: Synthetic oligonucleotide
  Sense strand starting at position 1696 of SEQ ID NO: 1451
ugcauauccuugucaccca

SEQ ID NO: 114013 - RNA, 19 nt, Artificial Sequence
  Description of Artificial Sequence: Synthetic oligonucleotide
  Antisense strand to SEQ ID NO: 114012
ugggugacaaggauaugca

SEQ ID NO: 114014 - RNA, 19 nt, Artificial Sequence
  Description of Artificial Sequence: Synthetic oligonucleotide
  Sense strand starting at position 2142 of SEQ ID NO: 1451
cuaaauacuggauggcaga

SEQ ID NO: 114015 - RNA, 19 nt, Artificial Sequence
  Description of Artificial Sequence: Synthetic oligonucleotide
  Antisense strand to SEQ ID NO: 114014
ucugccauccaguauuuag

SEQ ID NO: 114016 - RNA, 19 nt, Artificial Sequence
  Description of Artificial Sequence: Synthetic oligonucleotide
  Sense strand starting at position 2348 of SEQ ID NO: 1451
ggauaaacagcucgacuuu

SEQ ID NO: 114017 - RNA, 19 nt, Artificial Sequence
  Description of Artificial Sequence: Synthetic oligonucleotide
  Antisense strand to SEQ ID NO: 114016
aaagucgagcuguuuaucc

SEQ ID NO: 114018 - RNA, 19 nt, Artificial Sequence
  Description of Artificial Sequence: Synthetic oligonucleotide
  Sense strand starting at position 2595 of SEQ ID NO: 1451
uauaguagugaucagcauu

SEQ ID NO: 114019 - RNA, 19 nt, Artificial Sequence
  Description of Artificial Sequence: Synthetic oligonucleotide
  Antisense strand to SEQ ID NO: 114018
aaugcugaucacuacuaua

SEQ ID NO: 114020 - RNA, 19 nt, Artificial Sequence
  Description of Artificial Sequence: Synthetic oligonucleotide
  Sense strand starting at position 2598 of SEQ ID NO: 1451
aguagugaucagcauuaua

SEQ ID NO: 114021 - RNA, 19 nt, Artificial Sequence
  Description of Artificial Sequence: Synthetic oligonucleotide
  Antisense strand to SEQ ID NO: 114020
uauaaugcugaucacuacu

SEQ ID NO: 114022 - RNA, 19 nt, Artificial Sequence
  Description of Artificial Sequence: Synthetic oligonucleotide
  Sense strand starting at position 2601 of SEQ ID NO: 1451
agugaucagcauuauauau

SEQ ID NO: 114023 - RNA, 19 nt, Artificial Sequence
  Description of Artificial Sequence: Synthetic oligonucleotide
  Antisense strand to SEQ ID NO: 114022
auauauaaugcugaucacu

SEQ ID NO: 114024 - RNA, 19 nt, Artificial Sequence
  Description of Artificial Sequence: Synthetic oligonucleotide
  Sense strand starting at position 2644 of SEQ ID NO: 1451
guuuauaaggauugauaug

SEQ ID NO: 114025 - RNA, 19 nt, Artificial Sequence
  Description of Artificial Sequence: Synthetic oligonucleotide
  Antisense strand to SEQ ID NO: 114024
cauaucaauccuuauaaac

SEQ ID NO: 114026 - RNA, 19 nt, Artificial Sequence
  Description of Artificial Sequence: Synthetic oligonucleotide
  Sense strand starting at position 2649 of SEQ ID NO: 1451
uaaggauugauaugguugu

SEQ ID NO: 114027 - RNA, 19 nt, Artificial Sequence
  Description of Artificial Sequence: Synthetic oligonucleotide
  Antisense strand to SEQ ID NO: 114026
acaaccauaucaauccuua

SEQ ID NO: 114028 - RNA, 19 nt, Artificial Sequence
  Description of Artificial Sequence: Synthetic oligonucleotide
  Sense strand starting at position 2653 of SEQ ID NO: 1451
gauugauaugguugugaag

SEQ ID NO: 114029 - RNA, 19 nt, Artificial Sequence
  Description of Artificial Sequence: Synthetic oligonucleotide
  Antisense strand to SEQ ID NO: 114028
cuucacaaccauaucaauc

SEQ ID NO: 114030 - RNA, 19 nt, Artificial Sequence
  Description of Artificial Sequence: Synthetic oligonucleotide
  Sense strand starting at position 2692 of SEQ ID NO: 1451
cugagaugucaguguuaac

SEQ ID NO: 114031 - RNA, 19 nt, Artificial Sequence
  Description of Artificial Sequence: Synthetic oligonucleotide
  Antisense strand to SEQ ID NO: 114030
guuaacacugacaucucag

SEQ ID NO: 114032 - RNA, 19 nt, Artificial Sequence
  Description of Artificial Sequence: Synthetic oligonucleotide
  Sense strand starting at position 3184 of SEQ ID NO: 1451
cucauagcuucuguggaga

SEQ ID NO: 114033 - RNA, 19 nt, Artificial Sequence
  Description of Artificial Sequence: Synthetic oligonucleotide
  Antisense strand to SEQ ID NO: 114032
ucuccacagaagcuaugag

SEQ ID NO: 114034 - RNA, 19 nt, Artificial Sequence
  Description of Artificial Sequence: Synthetic oligonucleotide
  Sense strand starting at position 3230 of SEQ ID NO: 1451
gucaaauaggucugagggu

SEQ ID NO: 114035 - RNA, 19 nt, Artificial Sequence
  Description of Artificial Sequence: Synthetic oligonucleotide
  Antisense strand to SEQ ID NO: 114034
acccucagaccuauuugac

SEQ ID NO: 114036 - RNA, 19 nt, Artificial Sequence
  Description of Artificial Sequence: Synthetic oligonucleotide
  Sense strand starting at position 338 of SEQ ID NO: 1452
aaagcagaaucagagagau

SEQ ID NO: 114037 - RNA, 19 nt, Artificial Sequence
  Description of Artificial Sequence: Synthetic oligonucleotide
  Antisense strand to SEQ ID NO: 114036
aucucucugauucugcuuu

SEQ ID NO: 114038 - RNA, 19 nt, Artificial Sequence
  Description of Artificial Sequence: Synthetic oligonucleotide
  Sense strand starting at position 429 of SEQ ID NO: 1452
guaagaaguacuuggaaua

SEQ ID NO: 114039 - RNA, 19 nt, Artificial Sequence
  Description of Artificial Sequence: Synthetic oligonucleotide
  Antisense strand to SEQ ID NO: 114038
uauuccaaguacuucuuac

SEQ ID NO: 114040 - RNA, 19 nt, Artificial Sequence
  Description of Artificial Sequence: Synthetic oligonucleotide
  Sense strand starting at position 472 of SEQ ID NO: 1452
gcuguugacagaugguaua

SEQ ID NO: 114041 - RNA, 19 nt, Artificial Sequence
  Description of Artificial Sequence: Synthetic oligonucleotide
  Antisense strand to SEQ ID NO: 114040
uauaccaucugucaacagc

SEQ ID NO: 114042 - RNA, 19 nt, Artificial Sequence
  Description of Artificial Sequence: Synthetic oligonucleotide
  Sense strand starting at position 497 of SEQ ID NO: 1452
augaaagacucagaaugau

SEQ ID NO: 114043 - RNA, 19 nt, Artificial Sequence
  Description of Artificial Sequence: Synthetic oligonucleotide
  Antisense strand to SEQ ID NO: 114042
aucauucugagucuuucau

SEQ ID NO: 114044 - RNA, 19 nt, Artificial Sequence
  Description of Artificial Sequence: Synthetic oligonucleotide
  Sense strand starting at position 506 of SEQ ID NO: 1452
ucagaaugauccuuaaggu

SEQ ID NO: 114045 - RNA, 19 nt, Artificial Sequence
  Description of Artificial Sequence: Synthetic oligonucleotide
  Antisense strand to SEQ ID NO: 114044
accuuaaggaucauucuga

SEQ ID NO: 114046 - RNA, 19 nt, Artificial Sequence
  Description of Artificial Sequence: Synthetic oligonucleotide
  Sense strand starting at position 553 of SEQ ID NO: 1452
aguaucauuuacugagaua

SEQ ID NO: 114047 - RNA, 19 nt, Artificial Sequence
  Description of Artificial Sequence: Synthetic oligonucleotide
  Antisense strand to SEQ ID NO: 114046
uaucucaguaaaugauacu

SEQ ID NO: 114048 - RNA, 19 nt, Artificial Sequence
  Description of Artificial Sequence: Synthetic oligonucleotide
  Sense strand starting at position 556 of SEQ ID NO: 1452
aucauuuacugagauacag

SEQ ID NO: 114049 - RNA, 19 nt, Artificial Sequence
  Description of Artificial Sequence: Synthetic oligonucleotide
  Antisense strand to SEQ ID NO: 114048
cuguaucucaguaaaugau

SEQ ID NO: 114050 - RNA, 19 nt, Artificial Sequence
  Description of Artificial Sequence: Synthetic oligonucleotide
  Sense strand starting at position 642 of SEQ ID NO: 1452
gagauaugcugacuaggca

SEQ ID NO: 114051 - RNA, 19 nt, Artificial Sequence
  Description of Artificial Sequence: Synthetic oligonucleotide
  Antisense strand to SEQ ID NO: 114050
ugccuagucagcauaucuc

SEQ ID NO: 114052 - RNA, 19 nt, Artificial Sequence
  Description of Artificial Sequence: Synthetic oligonucleotide
  Sense strand starting at position 651 of SEQ ID NO: 1452
ugacuaggcagcuggauau

SEQ ID NO: 114053 - RNA, 19 nt, Artificial Sequence
  Description of Artificial Sequence: Synthetic oligonucleotide
  Antisense strand to SEQ ID NO: 114052
auauccagcugccuaguca

SEQ ID NO: 114054 - RNA, 19 nt, Artificial Sequence
  Description of Artificial Sequence: Synthetic oligonucleotide
  Sense strand starting at position 657 of SEQ ID NO: 1452
ggcagcuggauauaucaau

SEQ ID NO: 114055 - RNA, 19 nt, Artificial Sequence
  Description of Artificial Sequence: Synthetic oligonucleotide
  Antisense strand to SEQ ID NO: 114054
auugauauauccagcugcc

SEQ ID NO: 114056 - RNA, 19 nt, Artificial Sequence
  Description of Artificial Sequence: Synthetic oligonucleotide
  Sense strand starting at position 705 of SEQ ID NO: 1452
gauauaaaguuagcaguca

SEQ ID NO: 114057 - RNA, 19 nt, Artificial Sequence
  Description of Artificial Sequence: Synthetic oligonucleotide
  Antisense strand to SEQ ID NO: 114056
ugacugcuaacuuuauauc

SEQ ID NO: 114058 - RNA, 19 nt, Artificial Sequence
  Description of Artificial Sequence: Synthetic oligonucleotide
  Sense strand starting at position 967 of SEQ ID NO: 1452
aguuaugauugugcccaua

SEQ ID NO: 114059 - RNA, 19 nt, Artificial Sequence
  Description of Artificial Sequence: Synthetic oligonucleotide
  Antisense strand to SEQ ID NO: 114058
uaugggcacaaucauaacu

SEQ ID NO: 114060 - RNA, 19 nt, Artificial Sequence
  Description of Artificial Sequence: Synthetic oligonucleotide
  Sense strand starting at position 969 of SEQ ID NO: 1452
uuaugauugugcccauaaa

SEQ ID NO: 114061 - RNA, 19 nt, Artificial Sequence
  Description of Artificial Sequence: Synthetic oligonucleotide
  Antisense strand to SEQ ID NO: 114060
uuuaugggcacaaucauaa

SEQ ID NO: 114062 - RNA, 19 nt, Artificial Sequence
  Description of Artificial Sequence: Synthetic oligonucleotide
  Sense strand starting at position 1066 of SEQ ID NO: 1452
gauaauagaguauguagau

SEQ ID NO: 114063 - RNA, 19 nt, Artificial Sequence
  Description of Artificial Sequence: Synthetic oligonucleotide
  Antisense strand to SEQ ID NO: 114062
aucuacauacucuauuauc

SEQ ID NO: 114064 - RNA, 19 nt, Artificial Sequence
  Description of Artificial Sequence: Synthetic oligonucleotide
  Sense strand starting at position 1280 of SEQ ID NO: 1452
gagaauguguagcucacaa

SEQ ID NO: 114065 - RNA, 19 nt, Artificial Sequence
  Description of Artificial Sequence: Synthetic oligonucleotide
  Antisense strand to SEQ ID NO: 114064
uugugagcuacacauucuc

SEQ ID NO: 114066 - RNA, 19 nt, Artificial Sequence
  Description of Artificial Sequence: Synthetic oligonucleotide
  Sense strand starting at position 1282 of SEQ ID NO: 1452
gaauguguagcucacaaau

SEQ ID NO: 114067 - RNA, 19 nt, Artificial Sequence
  Description of Artificial Sequence: Synthetic oligonucleotide
  Antisense strand to SEQ ID NO: 114066
auuugugagcuacacauuc

SEQ ID NO: 114068 - RNA, 19 nt, Artificial Sequence
  Description of Artificial Sequence: Synthetic oligonucleotide
  Sense strand starting at position 1433 of SEQ ID NO: 1452
uugccagacccauguuauc

SEQ ID NO: 114069 - RNA, 19 nt, Artificial Sequence
  Description of Artificial Sequence: Synthetic oligonucleotide
  Antisense strand to SEQ ID NO: 114068
gauaacaugggucuggcaa

SEQ ID NO: 114070 - RNA, 19 nt, Artificial Sequence
  Description of Artificial Sequence: Synthetic oligonucleotide
  Sense strand starting at position 1461 of SEQ ID NO: 1452
uguguaaguuccuugagaa

SEQ ID NO: 114071 - RNA, 19 nt, Artificial Sequence
  Description of Artificial Sequence: Synthetic oligonucleotide
  Antisense strand to SEQ ID NO: 114070
uucucaaggaacuuacaca

SEQ ID NO: 114072 - RNA, 19 nt, Artificial Sequence
  Description of Artificial Sequence: Synthetic oligonucleotide
  Sense strand starting at position 1462 of SEQ ID NO: 1452
guguaaguuccuugagaac

SEQ ID NO: 114073 - RNA, 19 nt, Artificial Sequence
  Description of Artificial Sequence: Synthetic oligonucleotide
  Antisense strand to SEQ ID NO: 114072
guucucaaggaacuuacac

SEQ ID NO: 114074 - RNA, 19 nt, Artificial Sequence
  Description of Artificial Sequence: Synthetic oligonucleotide
  Sense strand starting at position 1468 of SEQ ID NO: 1452
guuccuugagaacggaaau

SEQ ID NO: 114075 - RNA, 19 nt, Artificial Sequence
  Description of Artificial Sequence: Synthetic oligonucleotide
  Antisense strand to SEQ ID NO: 114074
auuuccguucucaaggaac

SEQ ID NO: 114076 - RNA, 19 nt, Artificial Sequence
  Description of Artificial Sequence: Synthetic oligonucleotide
  Sense strand starting at position 1543 of SEQ ID NO: 1452
agaccauuccugugcuaac

SEQ ID NO: 114077 - RNA, 19 nt, Artificial Sequence
  Description of Artificial Sequence: Synthetic oligonucleotide
  Antisense strand to SEQ ID NO: 114076
guuagcacaggaauggucu

SEQ ID NO: 114078 - RNA, 19 nt, Artificial Sequence
  Description of Artificial Sequence: Synthetic oligonucleotide
  Sense strand starting at position 1606 of SEQ ID NO: 1452
acugaaugaucugcgcuga

SEQ ID NO: 114079 - RNA, 19 nt, Artificial Sequence
  Description of Artificial Sequence: Synthetic oligonucleotide
  Antisense strand to SEQ ID NO: 114078
ucagcgcagaucauucagu

SEQ ID NO: 114080 - RNA, 19 nt, Artificial Sequence
  Description of Artificial Sequence: Synthetic oligonucleotide
  Sense strand starting at position 1610 of SEQ ID NO: 1452
aaugaucugcgcugaagac

SEQ ID NO: 114081 - RNA, 19 nt, Artificial Sequence
  Description of Artificial Sequence: Synthetic oligonucleotide
  Antisense strand to SEQ ID NO: 114080
gucuucagcgcagaucauu

SEQ ID NO: 114082 - RNA, 19 nt, Artificial Sequence
  Description of Artificial Sequence: Synthetic oligonucleotide
  Sense strand starting at position 1774 of SEQ ID NO: 1452
aaagaagacuaguugaguu

SEQ ID NO: 114083 - RNA, 19 nt, Artificial Sequence
  Description of Artificial Sequence: Synthetic oligonucleotide
  Antisense strand to SEQ ID NO: 114082
aacucaacuagucuucuuu

SEQ ID NO: 114084 - RNA, 19 nt, Artificial Sequence
  Description of Artificial Sequence: Synthetic oligonucleotide
  Sense strand starting at position 1892 of SEQ ID NO: 1452
cgcugcuugaguuuauuau

SEQ ID NO: 114085 - RNA, 19 nt, Artificial Sequence
  Description of Artificial Sequence: Synthetic oligonucleotide
  Antisense strand to SEQ ID NO: 114084
auaauaaacucaagcagcg

SEQ ID NO: 114086 - RNA, 19 nt, Artificial Sequence
  Description of Artificial Sequence: Synthetic oligonucleotide
  Sense strand starting at position 1898 of SEQ ID NO: 1452
uugaguuuauuauccacga

SEQ ID NO: 114087 - RNA, 19 nt, Artificial Sequence
  Description of Artificial Sequence: Synthetic oligonucleotide
  Antisense strand to SEQ ID NO: 114086
ucguggauaauaaacucaa

SEQ ID NO: 114088 - RNA, 19 nt, Artificial Sequence
  Description of Artificial Sequence: Synthetic oligonucleotide
  Sense strand starting at position 1899 of SEQ ID NO: 1452
ugaguuuauuauccacgaa

SEQ ID NO: 114089 - RNA, 19 nt, Artificial Sequence
  Description of Artificial Sequence: Synthetic oligonucleotide
  Antisense strand to SEQ ID NO: 114088
uucguggauaauaaacuca

SEQ ID NO: 114090 - RNA, 19 nt, Artificial Sequence
  Description of Artificial Sequence: Synthetic oligonucleotide
  Sense strand starting at position 2549 of SEQ ID NO: 1452
uuagaacucguuugacuua

SEQ ID NO: 114091 - RNA, 19 nt, Artificial Sequence
  Description of Artificial Sequence: Synthetic oligonucleotide
  Antisense strand to SEQ ID NO: 114090
uaagucaaacgaguucuaa

SEQ ID NO: 114092 - RNA, 19 nt, Artificial Sequence
  Description of Artificial Sequence: Synthetic oligonucleotide
  Sense strand starting at position 2571 of SEQ ID NO: 1452
uguuaucaucggcagguaa

SEQ ID NO: 114093 - RNA, 19 nt, Artificial Sequence
  Description of Artificial Sequence: Synthetic oligonucleotide
  Antisense strand to SEQ ID NO: 114092
uuaccugccgaugauaaca

SEQ ID NO: 114094 - RNA, 19 nt, Artificial Sequence
  Description of Artificial Sequence: Synthetic oligonucleotide
  Sense strand starting at position 2573 of SEQ ID NO: 1452
uuaucaucggcagguaauu

SEQ ID NO: 114095 - RNA, 19 nt, Artificial Sequence
  Description of Artificial Sequence: Synthetic oligonucleotide
  Antisense strand to SEQ ID NO: 114094
aauuaccugccgaugauaa

SEQ ID NO: 114096 - RNA, 19 nt, Artificial Sequence
  Description of Artificial Sequence: Synthetic oligonucleotide
  Sense strand starting at position 2596 of SEQ ID NO: 1452
gaauauauccagugcagga

SEQ ID NO: 114097 - RNA, 19 nt, Artificial Sequence
  Description of Artificial Sequence: Synthetic oligonucleotide
  Antisense strand to SEQ ID NO: 114096
uccugcacuggauauauuc

SEQ ID NO: 114098 - RNA, 19 nt, Artificial Sequence
  Description of Artificial Sequence: Synthetic oligonucleotide
  Sense strand starting at position 2654 of SEQ ID NO: 1452
ccaagaaguuuauccugca

SEQ ID NO: 114099 - RNA, 19 nt, Artificial Sequence
  Description of Artificial Sequence: Synthetic oligonucleotide
  Antisense strand to SEQ ID NO: 114098
ugcaggauaaacuucuugg

SEQ ID NO: 114100 - RNA, 19 nt, Artificial Sequence
  Description of Artificial Sequence: Synthetic oligonucleotide
  Sense strand starting at position 2732 of SEQ ID NO: 1452
ucugucuucuuguuuauuu

SEQ ID NO: 114101 - RNA, 19 nt, Artificial Sequence
  Description of Artificial Sequence: Synthetic oligonucleotide
  Antisense strand to SEQ ID NO: 114100
aaauaaacaagaagacaga

SEQ ID NO: 114102 - RNA, 19 nt, Artificial Sequence
  Description of Artificial Sequence: Synthetic oligonucleotide
  Sense strand starting at position 2781 of SEQ ID NO: 1452
uccuccuuggcuuaugaca

SEQ ID NO: 114103 - RNA, 19 nt, Artificial Sequence
  Description of Artificial Sequence: Synthetic oligonucleotide
  Antisense strand to SEQ ID NO: 114102
ugucauaagccaaggagga

SEQ ID NO: 114104 - RNA, 19 nt, Artificial Sequence
  Description of Artificial Sequence: Synthetic oligonucleotide
  Sense strand starting at position 2789 of SEQ ID NO: 1452
ggcuuaugacaagguuaag

SEQ ID NO: 114105 - RNA, 19 nt, Artificial Sequence
  Description of Artificial Sequence: Synthetic oligonucleotide
  Antisense strand to SEQ ID NO: 114104
cuuaaccuugucauaagcc

SEQ ID NO: 114106 - RNA, 19 nt, Artificial Sequence
  Description of Artificial Sequence: Synthetic oligonucleotide
  Sense strand starting at position 3030 of SEQ ID NO: 1452
aaauauugauccguuuggu

SEQ ID NO: 114107 - RNA, 19 nt, Artificial Sequence
  Description of Artificial Sequence: Synthetic oligonucleotide
  Antisense strand to SEQ ID NO: 114106
accaaacggaucaauauuu

SEQ ID NO: 114108 - RNA, 19 nt, Artificial Sequence
  Description of Artificial Sequence: Synthetic oligonucleotide
  Sense strand starting at position 3144 of SEQ ID NO: 1452
aagugugcaguuuagugau

SEQ ID NO: 114109 - RNA, 19 nt, Artificial Sequence
  Description of Artificial Sequence: Synthetic oligonucleotide
  Antisense strand to SEQ ID NO: 114108
aucacuaaacugcacacuu

SEQ ID NO: 114110 - RNA, 19 nt, Artificial Sequence
  Description of Artificial Sequence: Synthetic oligonucleotide
  Sense strand starting at position 3389 of SEQ ID NO: 1452
gcuuaaugcccucauauag

SEQ ID NO: 114111 - RNA, 19 nt, Artificial Sequence
  Description of Artificial Sequence: Synthetic oligonucleotide
  Antisense strand to SEQ ID NO: 114110
cuauaugagggcauuaagc

SEQ ID NO: 114112 - RNA, 19 nt, Artificial Sequence
  Description of Artificial Sequence: Synthetic oligonucleotide
  Sense strand starting at position 3401 of SEQ ID NO: 1452
cauauagcauguguuagaa

SEQ ID NO: 114113 - RNA, 19 nt, Artificial Sequence
  Description of Artificial Sequence: Synthetic oligonucleotide
  Antisense strand to SEQ ID NO: 114112
uucuaacacaugcuauaug

SEQ ID NO: 114114 - RNA, 19 nt, Artificial Sequence
  Description of Artificial Sequence: Synthetic oligonucleotide
  Sense strand starting at position 3948 of SEQ ID NO: 1452
guggaagaauuauaacuaa

SEQ ID NO: 114115 - RNA, 19 nt, Artificial Sequence
  Description of Artificial Sequence: Synthetic oligonucleotide
  Antisense strand to SEQ ID NO: 114114
uuaguuauaauucuuccac

SEQ ID NO: 114116 - RNA, 19 nt, Artificial Sequence
  Description of Artificial Sequence: Synthetic oligonucleotide
  Sense strand starting at position 3785 of SEQ ID NO: 1455
acuggagaauuguuacuuu

SEQ ID NO: 114117 - RNA, 19 nt, Artificial Sequence
  Description of Artificial Sequence: Synthetic oligonucleotide
  Antisense strand to SEQ ID NO: 114116
aaaguaacaauucuccagu

SEQ ID NO: 114118 - RNA, 19 nt, Artificial Sequence
  Description of Artificial Sequence: Synthetic oligonucleotide
  Sense strand starting at position 3776 of SEQ ID NO: 1455
uugugacucacuggagaau

SEQ ID NO: 114119 - RNA, 19 nt, Artificial Sequence
  Description of Artificial Sequence: Synthetic oligonucleotide
  Antisense strand to SEQ ID NO: 114118
auucuccagugagucacaa

SEQ ID NO: 114120 - RNA, 19 nt, Artificial Sequence
  Description of Artificial Sequence: Synthetic oligonucleotide
  Sense strand starting at position 3748 of SEQ ID NO: 1455
ccugucuaccuagggaaau

SEQ ID NO: 114121 - RNA, 19 nt, Artificial Sequence
  Description of Artificial Sequence: Synthetic oligonucleotide
  Antisense strand to SEQ ID NO: 114120
auuucccuagguagacagg

SEQ ID NO: 114122 - RNA, 19 nt, Artificial Sequence
  Description of Artificial Sequence: Synthetic oligonucleotide
  Sense strand starting at position 3649 of SEQ ID NO: 1455
guuaguuugcaggaauaug

SEQ ID NO: 114123 - RNA, 19 nt, Artificial Sequence
  Description of Artificial Sequence: Synthetic oligonucleotide
  Antisense strand to SEQ ID NO: 114122
cauauuccugcaaacuaac

SEQ ID NO: 114124 - RNA, 19 nt, Artificial Sequence
  Description of Artificial Sequence: Synthetic oligonucleotide
  Sense strand starting at position 3634 of SEQ ID NO: 1455
aggaaaguauucuugguua

SEQ ID NO: 114125 - RNA, 19 nt, Artificial Sequence
  Description of Artificial Sequence: Synthetic oligonucleotide
  Antisense strand to SEQ ID NO: 114124
uaaccaagaauacuuuccu

SEQ ID NO: 114126 - RNA, 19 nt, Artificial Sequence
  Description of Artificial Sequence: Synthetic oligonucleotide
  Sense strand starting at position 3632 of SEQ ID NO: 1455
uaaggaaaguauucuuggu

SEQ ID NO: 114127 - RNA, 19 nt, Artificial Sequence
  Description of Artificial Sequence: Synthetic oligonucleotide
  Antisense strand to SEQ ID NO: 114126
accaagaauacuuuccuua

SEQ ID NO: 114128 - RNA, 19 nt, Artificial Sequence
  Description of Artificial Sequence: Synthetic oligonucleotide
  Sense strand starting at position 3624 of SEQ ID NO: 1455
guuguaguuaaggaaagua

SEQ ID NO: 114129 - RNA, 19 nt, Artificial Sequence
  Description of Artificial Sequence: Synthetic oligonucleotide
  Antisense strand to SEQ ID NO: 114128
uacuuuccuuaacuacaac

SEQ ID NO: 114130 - RNA, 19 nt, Artificial Sequence
  Description of Artificial Sequence: Synthetic oligonucleotide
  Sense strand starting at position 3620 of SEQ ID NO: 1455
uccaguuguaguuaaggaa

SEQ ID NO: 114131 - RNA, 19 nt, Artificial Sequence
  Description of Artificial Sequence: Synthetic oligonucleotide
  Antisense strand to SEQ ID NO: 114130
uuccuuaacuacaacugga

SEQ ID NO: 114132 - RNA, 19 nt, Artificial Sequence
  Description of Artificial Sequence: Synthetic oligonucleotide
  Sense strand starting at position 3589 of SEQ ID NO: 1455
uugaucccuuuguuaggaa

SEQ ID NO: 114133 - RNA, 19 nt, Artificial Sequence
  Description of Artificial Sequence: Synthetic oligonucleotide
  Antisense strand to SEQ ID NO: 114132
uuccuaacaaagggaucaa

SEQ ID NO: 114134 - RNA, 19 nt, Artificial Sequence
  Description of Artificial Sequence: Synthetic oligonucleotide
  Sense strand starting at position 3514 of SEQ ID NO: 1455
aagaaugugagugaguguu

SEQ ID NO: 114135 - RNA, 19 nt, Artificial Sequence
  Description of Artificial Sequence: Synthetic oligonucleotide
  Antisense strand to SEQ ID NO: 114134
aacacucacucacauucuu

SEQ ID NO: 114136 - RNA, 19 nt, Artificial Sequence
  Description of Artificial Sequence: Synthetic oligonucleotide
  Sense strand starting at position 3509 of SEQ ID NO: 1455
ucuuuaagaaugugaguga

SEQ ID NO: 114137 - RNA, 19 nt, Artificial Sequence
  Description of Artificial Sequence: Synthetic oligonucleotide
  Antisense strand to SEQ ID NO: 114136
ucacucacauucuuaaaga

SEQ ID NO: 114138 - RNA, 19 nt, Artificial Sequence
  Description of Artificial Sequence: Synthetic oligonucleotide
  Sense strand starting at position 3477 of SEQ ID NO: 1455
ggagcugaacccugaaaua

SEQ ID NO: 114139 - RNA, 19 nt, Artificial Sequence
  Description of Artificial Sequence: Synthetic oligonucleotide
  Antisense strand to SEQ ID NO: 114138
uauuucaggguucagcucc

SEQ ID NO: 114140 - RNA, 19 nt, Artificial Sequence
  Description of Artificial Sequence: Synthetic oligonucleotide
  Sense strand starting at position 3071 of SEQ ID NO: 1455
ggucccaaucugggaauca

SEQ ID NO: 114141 - RNA, 19 nt, Artificial Sequence
  Description of Artificial Sequence: Synthetic oligonucleotide
  Antisense strand to SEQ ID NO: 114140
ugauucccagauugggacc

SEQ ID NO: 114142 - RNA, 19 nt, Artificial Sequence
  Description of Artificial Sequence: Synthetic oligonucleotide
  Sense strand starting at position 3022 of SEQ ID NO: 1455
uugggagaucccugaugug

SEQ ID NO: 114143 - RNA, 19 nt, Artificial Sequence
  Description of Artificial Sequence: Synthetic oligonucleotide
  Antisense strand to SEQ ID NO: 114142
cacaucagggaucucccaa

SEQ ID NO: 114144 - RNA, 19 nt, Artificial Sequence
  Description of Artificial Sequence: Synthetic oligonucleotide
  Sense strand starting at position 2739 of SEQ ID NO: 1455
auaggaauaguuugaugcu

SEQ ID NO: 114145 - RNA, 19 nt, Artificial Sequence
  Description of Artificial Sequence: Synthetic oligonucleotide
  Antisense strand to SEQ ID NO: 114144
agcaucaaacuauuccuau

SEQ ID NO: 114146 - RNA, 19 nt, Artificial Sequence
  Description of Artificial Sequence: Synthetic oligonucleotide
  Sense strand starting at position 2587 of SEQ ID NO: 1455
agaaauuggugagcucaaa

SEQ ID NO: 114147 - RNA, 19 nt, Artificial Sequence
  Description of Artificial Sequence: Synthetic oligonucleotide
  Antisense strand to SEQ ID NO: 114146
uuugagcucaccaauuucu

SEQ ID NO: 114148 - RNA, 19 nt, Artificial Sequence
  Description of Artificial Sequence: Synthetic oligonucleotide
  Sense strand starting at position 2507 of SEQ ID NO: 1455
aucuuuaggccggaaucga

SEQ ID NO: 114149 - RNA, 19 nt, Artificial Sequence
  Description of Artificial Sequence: Synthetic oligonucleotide
  Antisense strand to SEQ ID NO: 114148
ucgauuccggccuaaagau

SEQ ID NO: 114150 - RNA, 19 nt, Artificial Sequence
  Description of Artificial Sequence: Synthetic oligonucleotide
  Sense strand starting at position 2503 of SEQ ID NO: 1455
agaaaucuuuaggccggaa

SEQ ID NO: 114151 - RNA, 19 nt, Artificial Sequence
  Description of Artificial Sequence: Synthetic oligonucleotide
  Antisense strand to SEQ ID NO: 114150
uuccggccuaaagauuucu

SEQ ID NO: 114152 - RNA, 19 nt, Artificial Sequence
  Description of Artificial Sequence: Synthetic oligonucleotide
  Sense strand starting at position 2459 of SEQ ID NO: 1455
cuaauugacagauguugga

SEQ ID NO: 114153 - RNA, 19 nt, Artificial Sequence
  Description of Artificial Sequence: Synthetic oligonucleotide
  Antisense strand to SEQ ID NO: 114152
uccaacaucugucaauuag

SEQ ID NO: 114154 - RNA, 19 nt, Artificial Sequence
  Description of Artificial Sequence: Synthetic oligonucleotide
  Sense strand starting at position 2425 of SEQ ID NO: 1455
acuccuagaugguucuaau

SEQ ID NO: 114155 - RNA, 19 nt, Artificial Sequence
  Description of Artificial Sequence: Synthetic oligonucleotide
  Antisense strand to SEQ ID NO: 114154
auuagaaccaucuaggagu

SEQ ID NO: 114156 - RNA, 19 nt, Artificial Sequence
  Description of Artificial Sequence: Synthetic oligonucleotide
  Sense strand starting at position 2330 of SEQ ID NO: 1455
guuccuagugaauaugaau

SEQ ID NO: 114157 - RNA, 19 nt, Artificial Sequence
  Description of Artificial Sequence: Synthetic oligonucleotide
  Antisense strand to SEQ ID NO: 114156
auucauauucacuaggaac

SEQ ID NO: 114158 - RNA, 19 nt, Artificial Sequence
  Description of Artificial Sequence: Synthetic oligonucleotide
  Sense strand starting at position 2123 of SEQ ID NO: 1455
aacuauugugauugugaca

SEQ ID NO: 114159 - RNA, 19 nt, Artificial Sequence
  Description of Artificial Sequence: Synthetic oligonucleotide
  Antisense strand to SEQ ID NO: 114158
ugucacaaucacaauaguu

SEQ ID NO: 114160 - RNA, 19 nt, Artificial Sequence
  Description of Artificial Sequence: Synthetic oligonucleotide
  Sense strand starting at position 2122 of SEQ ID NO: 1455
aaacuauugugauugugac

SEQ ID NO: 114161 - RNA, 19 nt, Artificial Sequence
  Description of Artificial Sequence: Synthetic oligonucleotide
  Antisense strand to SEQ ID NO: 114160
gucacaaucacaauaguuu

SEQ ID NO: 114162 - RNA, 19 nt, Artificial Sequence
  Description of Artificial Sequence: Synthetic oligonucleotide
  Sense strand starting at position 2090 of SEQ ID NO: 1455
ccaacucuauaugugagaa

SEQ ID NO: 114163 - RNA, 19 nt, Artificial Sequence
  Description of Artificial Sequence: Synthetic oligonucleotide
  Antisense strand to SEQ ID NO: 114162
uucucacauauagaguugg

SEQ ID NO: 114164 - RNA, 19 nt, Artificial Sequence
  Description of Artificial Sequence: Synthetic oligonucleotide
  Sense strand starting at position 1293 of SEQ ID NO: 1455
auuaucagucaguaauucu

SEQ ID NO: 114165 - RNA, 19 nt, Artificial Sequence
  Description of Artificial Sequence: Synthetic oligonucleotide
  Antisense strand to SEQ ID NO: 114164
agaauuacugacugauaau

SEQ ID NO: 114166 - RNA, 19 nt, Artificial Sequence
  Description of Artificial Sequence: Synthetic oligonucleotide
  Sense strand starting at position 1171 of SEQ ID NO: 1455
guauccagucaucacagaa

SEQ ID NO: 114167 - RNA, 19 nt, Artificial Sequence
  Description of Artificial Sequence: Synthetic oligonucleotide
  Antisense strand to SEQ ID NO: 114166
uucugugaugacuggauac

SEQ ID NO: 114168 - RNA, 19 nt, Artificial Sequence
  Description of Artificial Sequence: Synthetic oligonucleotide
  Sense strand starting at position 1170 of SEQ ID NO: 1455
aguauccagucaucacaga

SEQ ID NO: 114169 - RNA, 19 nt, Artificial Sequence
  Description of Artificial Sequence: Synthetic oligonucleotide
  Antisense strand to SEQ ID NO: 114168
ucugugaugacuggauacu

SEQ ID NO: 114170 - RNA, 19 nt, Artificial Sequence
  Description of Artificial Sequence: Synthetic oligonucleotide
  Sense strand starting at position 845 of SEQ ID NO: 1455
aggacuggucaguauguuu

SEQ ID NO: 114171 - RNA, 19 nt, Artificial Sequence
  Description of Artificial Sequence: Synthetic oligonucleotide
  Antisense strand to SEQ ID NO: 114170
aaacauacugaccaguccu

SEQ ID NO: 114172 - RNA, 19 nt, Artificial Sequence
  Description of Artificial Sequence: Synthetic oligonucleotide
  Sense strand starting at position 695 of SEQ ID NO: 1455
gaucaacagugaguguaua

SEQ ID NO: 114173 - RNA, 19 nt, Artificial Sequence
  Description of Artificial Sequence: Synthetic oligonucleotide
  Antisense strand to SEQ ID NO: 114172
uauacacucacuguugauc

SEQ ID NO: 114174 - RNA, 19 nt, Artificial Sequence
  Description of Artificial Sequence: Synthetic oligonucleotide
  Sense strand starting at position 693 of SEQ ID NO: 1455
gagaucaacagugagugua

SEQ ID NO: 114175 - RNA, 19 nt, Artificial Sequence
  Description of Artificial Sequence: Synthetic oligonucleotide
  Antisense strand to SEQ ID NO: 114174
uacacucacuguugaucuc

SEQ ID NO: 114176 - RNA, 19 nt, Artificial Sequence
  Description of Artificial Sequence: Synthetic oligonucleotide
  Sense strand starting at position 649 of SEQ ID NO: 1455
gagucauuggcuuauaaau

SEQ ID NO: 114177 - RNA, 19 nt, Artificial Sequence
  Description of Artificial Sequence: Synthetic oligonucleotide
  Antisense strand to SEQ ID NO: 114176
auuuauaagccaaugacuc

SEQ ID NO: 114178 - RNA, 19 nt, Artificial Sequence
  Description of Artificial Sequence: Synthetic oligonucleotide
  Sense strand starting at position 647 of SEQ ID NO: 1455
gggagucauuggcuuauaa

SEQ ID NO: 114179 - RNA, 19 nt, Artificial Sequence
  Description of Artificial Sequence: Synthetic oligonucleotide
  Antisense strand to SEQ ID NO: 114178
uuauaagccaaugacuccc

SEQ ID NO: 114180 - RNA, 19 nt, Artificial Sequence
  Description of Artificial Sequence: Synthetic oligonucleotide
  Sense strand starting at position 637 of SEQ ID NO: 1455
cuagaaauuugggagucau

SEQ ID NO: 114181 - RNA, 19 nt, Artificial Sequence
  Description of Artificial Sequence: Synthetic oligonucleotide
  Antisense strand to SEQ ID NO: 114180
augacucccaaauuucuag

SEQ ID NO: 114182 - RNA, 19 nt, Artificial Sequence
  Description of Artificial Sequence: Synthetic oligonucleotide
  Sense strand starting at position 611 of SEQ ID NO: 1455
gaguuugggagaugucuag

SEQ ID NO: 114183 - RNA, 19 nt, Artificial Sequence
  Description of Artificial Sequence: Synthetic oligonucleotide
  Antisense strand to SEQ ID NO: 114182
cuagacaucucccaaacuc

SEQ ID NO: 114184 - RNA, 19 nt, Artificial Sequence
  Description of Artificial Sequence: Synthetic oligonucleotide
  Sense strand starting at position 609 of SEQ ID NO: 1455
acgaguuugggagaugucu

SEQ ID NO: 114185 - RNA, 19 nt, Artificial Sequence
  Description of Artificial Sequence: Synthetic oligonucleotide
  Antisense strand to SEQ ID NO: 114184
agacaucucccaaacucgu

SEQ ID NO: 114186 - RNA, 19 nt, Artificial Sequence
  Description of Artificial Sequence: Synthetic oligonucleotide
  Sense strand starting at position 539 of SEQ ID NO: 1455
gacaguuaacuuugaggug

SEQ ID NO: 114187 - RNA, 19 nt, Artificial Sequence
  Description of Artificial Sequence: Synthetic oligonucleotide
  Antisense strand to SEQ ID NO: 114186
caccucaaaguuaacuguc

SEQ ID NO: 114188 - RNA, 19 nt, Artificial Sequence
  Description of Artificial Sequence: Synthetic oligonucleotide
  Sense strand starting at position 226 of SEQ ID NO: 1455
ucagacaacuuauccgaca

SEQ ID NO: 114189 - RNA, 19 nt, Artificial Sequence
  Description of Artificial Sequence: Synthetic oligonucleotide
  Antisense strand to SEQ ID NO: 114188
ugucggauaaguugucuga

SEQ ID NO: 114190 - RNA, 19 nt, Artificial Sequence
  Description of Artificial Sequence: Synthetic oligonucleotide
  Sense strand starting at position 142 of SEQ ID NO: 1455
guauguugaaaguaucaua

SEQ ID NO: 114191 - RNA, 19 nt, Artificial Sequence
  Description of Artificial Sequence: Synthetic oligonucleotide
  Antisense strand to SEQ ID NO: 114190
uaugauacuuucaacauac

SEQ ID NO: 114192 - RNA, 19 nt, Artificial Sequence
  Description of Artificial Sequence: Synthetic oligonucleotide
  Sense strand starting at position 38 of SEQ ID NO: 1455
gucuuauuccaagguagag

SEQ ID NO: 114193 - RNA, 19 nt, Artificial Sequence
  Description of Artificial Sequence: Synthetic oligonucleotide
  Antisense strand to SEQ ID NO: 114192
cucuaccuuggaauaagac

SEQ ID NO: 114194 - RNA, 19 nt, Artificial Sequence
  Description of Artificial Sequence: Synthetic oligonucleotide
  Sense strand starting at position 14 of SEQ ID NO: 1455
ugcaguaauccaggagaaa

SEQ ID NO: 114195 - RNA, 19 nt, Artificial Sequence
  Description of Artificial Sequence: Synthetic oligonucleotide
  Antisense strand to SEQ ID NO: 114194
uuucuccuggauuacugca

SEQ ID NO: 114196 - RNA, 19 nt, Artificial Sequence
  Description of Artificial Sequence: Synthetic oligonucleotide
  Sense strand starting at position 3582 of SEQ ID NO: 1453
ggucccaaucugggaauca

SEQ ID NO: 114197 - RNA, 19 nt, Artificial Sequence
  Description of Artificial Sequence: Synthetic oligonucleotide
  Antisense strand to SEQ ID NO: 114196
ugauucccagauugggacc

SEQ ID NO: 114198 - RNA, 19 nt, Artificial Sequence
  Description of Artificial Sequence: Synthetic oligonucleotide
  Sense strand starting at position 3555 of SEQ ID NO: 1453
ggugaagugccuuaaagua

SEQ ID NO: 114199 - RNA, 19 nt, Artificial Sequence
  Description of Artificial Sequence: Synthetic oligonucleotide
  Antisense strand to SEQ ID NO: 114198
uacuuuaaggcacuucacc

SEQ ID NO: 114200 - RNA, 19 nt, Artificial Sequence
  Description of Artificial Sequence: Synthetic oligonucleotide
  Sense strand starting at position 3533 of SEQ ID NO: 1453
uugggagaucccugaugug

SEQ ID NO: 114201 - RNA, 19 nt, Artificial Sequence
  Description of Artificial Sequence: Synthetic oligonucleotide
  Antisense strand to SEQ ID NO: 114200
cacaucagggaucucccaa

SEQ ID NO: 114202 - RNA, 19 nt, Artificial Sequence
  Description of Artificial Sequence: Synthetic oligonucleotide
  Sense strand starting at position 3430 of SEQ ID NO: 1453
cugagagucucccugauuc

SEQ ID NO: 114203 - RNA, 19 nt, Artificial Sequence
  Description of Artificial Sequence: Synthetic oligonucleotide
  Antisense strand to SEQ ID NO: 114202
gaaucagggagacucucag

SEQ ID NO: 114204 - RNA, 19 nt, Artificial Sequence
  Description of Artificial Sequence: Synthetic oligonucleotide
  Sense strand starting at position 3428 of SEQ ID NO: 1453
cccugagagucucccugau

SEQ ID NO: 114205 - RNA, 19 nt, Artificial Sequence
  Description of Artificial Sequence: Synthetic oligonucleotide
  Antisense strand to SEQ ID NO: 114204
aucagggagacucucaggg

SEQ ID NO: 114206 - RNA, 19 nt, Artificial Sequence
  Description of Artificial Sequence: Synthetic oligonucleotide
  Sense strand starting at position 3250 of SEQ ID NO: 1453
auaggaauaguuugaugcu

SEQ ID NO: 114207 - RNA, 19 nt, Artificial Sequence
  Description of Artificial Sequence: Synthetic oligonucleotide
  Antisense strand to SEQ ID NO: 114206
agcaucaaacuauuccuau

SEQ ID NO: 114208 - RNA, 19 nt, Artificial Sequence
  Description of Artificial Sequence: Synthetic oligonucleotide
  Sense strand starting at position 3098 of SEQ ID NO: 1453
agaaauuggugagcucaaa

SEQ ID NO: 114209 - RNA, 19 nt, Artificial Sequence
  Description of Artificial Sequence: Synthetic oligonucleotide
  Antisense strand to SEQ ID NO: 114208
uuugagcucaccaauuucu

SEQ ID NO: 114210 - RNA, 19 nt, Artificial Sequence
  Description of Artificial Sequence: Synthetic oligonucleotide
  Sense strand starting at position 3018 of SEQ ID NO: 1453
aucuuuaggccggaaucga

SEQ ID NO: 114211 - RNA, 19 nt, Artificial Sequence
  Description of Artificial Sequence: Synthetic oligonucleotide
  Antisense strand to SEQ ID NO: 114210
ucgauuccggccuaaagau

SEQ ID NO: 114212 - RNA, 19 nt, Artificial Sequence
  Description of Artificial Sequence: Synthetic oligonucleotide
  Sense strand starting at position 3014 of SEQ ID NO: 1453
agaaaucuuuaggccggaa

SEQ ID NO: 114213 - RNA, 19 nt, Artificial Sequence
  Description of Artificial Sequence: Synthetic oligonucleotide
  Antisense strand to SEQ ID NO: 114212
uuccggccuaaagauuucu

SEQ ID NO: 114214 - RNA, 19 nt, Artificial Sequence
  Description of Artificial Sequence: Synthetic oligonucleotide
  Sense strand starting at position 2970 of SEQ ID NO: 1453
cuaauugacagauguugga

SEQ ID NO: 114215 - RNA, 19 nt, Artificial Sequence
  Description of Artificial Sequence: Synthetic oligonucleotide
  Antisense strand to SEQ ID NO: 114214
uccaacaucugucaauuag

SEQ ID NO: 114216 - RNA, 19 nt, Artificial Sequence
  Description of Artificial Sequence: Synthetic oligonucleotide
  Sense strand starting at position 2936 of SEQ ID NO: 1453
acuccuagaugguucuaau

SEQ ID NO: 114217 - RNA, 19 nt, Artificial Sequence
  Description of Artificial Sequence: Synthetic oligonucleotide
  Antisense strand to SEQ ID NO: 114216
auuagaaccaucuaggagu

SEQ ID NO: 114218 - RNA, 19 nt, Artificial Sequence
  Description of Artificial Sequence: Synthetic oligonucleotide
  Sense strand starting at position 2841 of SEQ ID NO: 1453
guuccuagugaauaugaau

SEQ ID NO: 114219 - RNA, 19 nt, Artificial Sequence
  Description of Artificial Sequence: Synthetic oligonucleotide
  Antisense strand to SEQ ID NO: 114218
auucauauucacuaggaac

SEQ ID NO: 114220 - RNA, 19 nt, Artificial Sequence
  Description of Artificial Sequence: Synthetic oligonucleotide
  Sense strand starting at position 2634 of SEQ ID NO: 1453
aacuauugugauugugaca

SEQ ID NO: 114221 - RNA, 19 nt, Artificial Sequence
  Description of Artificial Sequence: Synthetic oligonucleotide
  Antisense strand to SEQ ID NO: 114220
ugucacaaucacaauaguu

SEQ ID NO: 114222 - RNA, 19 nt, Artificial Sequence
  Description of Artificial Sequence: Synthetic oligonucleotide
  Sense strand starting at position 2633 of SEQ ID NO: 1453
aaacuauugugauugugac

SEQ ID NO: 114223 - RNA, 19 nt, Artificial Sequence
  Description of Artificial Sequence: Synthetic oligonucleotide
  Antisense strand to SEQ ID NO: 114222
gucacaaucacaauaguuu

SEQ ID NO: 114224 - RNA, 19 nt, Artificial Sequence
  Description of Artificial Sequence: Synthetic oligonucleotide
  Sense strand starting at position 2601 of SEQ ID NO: 1453
ccaacucuauaugugagaa

SEQ ID NO: 114225 - RNA, 19 nt, Artificial Sequence
  Description of Artificial Sequence: Synthetic oligonucleotide
  Antisense strand to SEQ ID NO: 114224
uucucacauauagaguugg

SEQ ID NO: 114226 - RNA, 19 nt, Artificial Sequence
  Description of Artificial Sequence: Synthetic oligonucleotide
  Sense strand starting at position 1804 of SEQ ID NO: 1453
auuaucagucaguaauucu

SEQ ID NO: 114227 - RNA, 19 nt, Artificial Sequence
  Description of Artificial Sequence: Synthetic oligonucleotide
  Antisense strand to SEQ ID NO: 114226
agaauuacugacugauaau

SEQ ID NO: 114228 - RNA, 19 nt, Artificial Sequence
  Description of Artificial Sequence: Synthetic oligonucleotide
  Sense strand starting at position 1682 of SEQ ID NO: 1453
guauccagucaucacagaa

SEQ ID NO: 114229 - RNA, 19 nt, Artificial Sequence
  Description of Artificial Sequence: Synthetic oligonucleotide
  Antisense strand to SEQ ID NO: 114228
uucugugaugacuggauac

SEQ ID NO: 114230 - RNA, 19 nt, Artificial Sequence
  Description of Artificial Sequence: Synthetic oligonucleotide
  Sense strand starting at position 1681 of SEQ ID NO: 1453
aguauccagucaucacaga

SEQ ID NO: 114231 - RNA, 19 nt, Artificial Sequence
  Description of Artificial Sequence: Synthetic oligonucleotide
  Antisense strand to SEQ ID NO: 114230
ucugugaugacuggauacu

SEQ ID NO: 114232 - RNA, 19 nt, Artificial Sequence
  Description of Artificial Sequence: Synthetic oligonucleotide
  Sense strand starting at position 1630 of SEQ ID NO: 1453
uuagguagauuugaaguaa

SEQ ID NO: 114233 - RNA, 19 nt, Artificial Sequence
  Description of Artificial Sequence: Synthetic oligonucleotide
  Antisense strand to SEQ ID NO: 114232
uuacuucaaaucuaccuaa

SEQ ID NO: 114234 - RNA, 19 nt, Artificial Sequence
  Description of Artificial Sequence: Synthetic oligonucleotide
  Sense strand starting at position 1544 of SEQ ID NO: 1453
gcuuaaauacugcaguaua

SEQ ID NO: 114235 - RNA, 19 nt, Artificial Sequence
  Description of Artificial Sequence: Synthetic oligonucleotide
  Antisense strand to SEQ ID NO: 114234
uauacugcaguauuuaagc

SEQ ID NO: 114236 - RNA, 19 nt, Artificial Sequence
  Description of Artificial Sequence: Synthetic oligonucleotide
  Sense strand starting at position 1356 of SEQ ID NO: 1453
aggacuggucaguauguuu

SEQ ID NO: 114237 - RNA, 19 nt, Artificial Sequence
  Description of Artificial Sequence: Synthetic oligonucleotide
  Antisense strand to SEQ ID NO: 114236
aaacauacugaccaguccu

SEQ ID NO: 114238 - RNA, 19 nt, Artificial Sequence
  Description of Artificial Sequence: Synthetic oligonucleotide
  Sense strand starting at position 1206 of SEQ ID NO: 1453
gaucaacagugaguguaua

SEQ ID NO: 114239 - RNA, 19 nt, Artificial Sequence
  Description of Artificial Sequence: Synthetic oligonucleotide
  Antisense strand to SEQ ID NO: 114238
uauacacucacuguugauc

SEQ ID NO: 114240 - RNA, 19 nt, Artificial Sequence
  Description of Artificial Sequence: Synthetic oligonucleotide
  Sense strand starting at position 1204 of SEQ ID NO: 1453
gagaucaacagugagugua

SEQ ID NO: 114241 - RNA, 19 nt, Artificial Sequence
  Description of Artificial Sequence: Synthetic oligonucleotide
  Antisense strand to SEQ ID NO: 114240
uacacucacuguugaucuc

SEQ ID NO: 114242 - RNA, 19 nt, Artificial Sequence
  Description of Artificial Sequence: Synthetic oligonucleotide
  Sense strand starting at position 1179 of SEQ ID NO: 1453
gguauuguaagccacgaga

SEQ ID NO: 114243 - RNA, 19 nt, Artificial Sequence
  Description of Artificial Sequence: Synthetic oligonucleotide
  Antisense strand to SEQ ID NO: 114242
ucucguggcuuacaauacc

SEQ ID NO: 114244 - RNA, 19 nt, Artificial Sequence
  Description of Artificial Sequence: Synthetic oligonucleotide
  Sense strand starting at position 1160 of SEQ ID NO: 1453
gagucauuggcuuauaaau

SEQ ID NO: 114245 - RNA, 19 nt, Artificial Sequence
  Description of Artificial Sequence: Synthetic oligonucleotide
  Antisense strand to SEQ ID NO: 114244
auuuauaagccaaugacuc

SEQ ID NO: 114246 - RNA, 19 nt, Artificial Sequence
  Description of Artificial Sequence: Synthetic oligonucleotide
  Sense strand starting at position 1158 of SEQ ID NO: 1453
gggagucauuggcuuauaa

SEQ ID NO: 114247 - RNA, 19 nt, Artificial Sequence
  Description of Artificial Sequence: Synthetic oligonucleotide
  Antisense strand to SEQ ID NO: 114246
uuauaagccaaugacuccc

SEQ ID NO: 114248 - RNA, 19 nt, Artificial Sequence
  Description of Artificial Sequence: Synthetic oligonucleotide
  Sense strand starting at position 1148 of SEQ ID NO: 1453
cuagaaauuugggagucau

SEQ ID NO: 114249 - RNA, 19 nt, Artificial Sequence
  Description of Artificial Sequence: Synthetic oligonucleotide
  Antisense strand to SEQ ID NO: 114248
augacucccaaauuucuag

SEQ ID NO: 114250 - RNA, 19 nt, Artificial Sequence
  Description of Artificial Sequence: Synthetic oligonucleotide
  Sense strand starting at position 1122 of SEQ ID NO: 1453
gaguuugggagaugucuag

SEQ ID NO: 114251 - RNA, 19 nt, Artificial Sequence
  Description of Artificial Sequence: Synthetic oligonucleotide
  Antisense strand to SEQ ID NO: 114250
cuagacaucucccaaacuc

SEQ ID NO: 114252 - RNA, 19 nt, Artificial Sequence
  Description of Artificial Sequence: Synthetic oligonucleotide
  Sense strand starting at position 1120 of SEQ ID NO: 1453
acgaguuugggagaugucu

SEQ ID NO: 114253 - RNA, 19 nt, Artificial Sequence
  Description of Artificial Sequence: Synthetic oligonucleotide
  Antisense strand to SEQ ID NO: 114252
agacaucucccaaacucgu

SEQ ID NO: 114254 - RNA, 19 nt, Artificial Sequence
  Description of Artificial Sequence: Synthetic oligonucleotide
  Sense strand starting at position 1105 of SEQ ID NO: 1453
aguugaauauuugagacga

SEQ ID NO: 114255 - RNA, 19 nt, Artificial Sequence
  Description of Artificial Sequence: Synthetic oligonucleotide
  Antisense strand to SEQ ID NO: 114254
ucgucucaaauauucaacu

SEQ ID NO: 114256 - RNA, 19 nt, Artificial Sequence
  Description of Artificial Sequence: Synthetic oligonucleotide
  Sense strand starting at position 1050 of SEQ ID NO: 1453
gacaguuaacuuugaggug

SEQ ID NO: 114257 - RNA, 19 nt, Artificial Sequence
  Description of Artificial Sequence: Synthetic oligonucleotide
  Antisense strand to SEQ ID NO: 114256
caccucaaaguuaacuguc

SEQ ID NO: 114258 - RNA, 19 nt, Artificial Sequence
  Description of Artificial Sequence: Synthetic oligonucleotide
  Sense strand starting at position 966 of SEQ ID NO: 1453
aauggaguuucugucaacu

SEQ ID NO: 114259 - RNA, 19 nt, Artificial Sequence
  Description of Artificial Sequence: Synthetic oligonucleotide
  Antisense strand to SEQ ID NO: 114258
aguugacagaaacuccauu

SEQ ID NO: 114260 - RNA, 19 nt, Artificial Sequence
  Description of Artificial Sequence: Synthetic oligonucleotide
  Sense strand starting at position 737 of SEQ ID NO: 1453
ucagacaacuuauccgaca

SEQ ID NO: 114261 - RNA, 19 nt, Artificial Sequence
  Description of Artificial Sequence: Synthetic oligonucleotide
  Antisense strand to SEQ ID NO: 114260
ugucggauaaguugucuga

SEQ ID NO: 114262 - RNA, 19 nt, Artificial Sequence
  Description of Artificial Sequence: Synthetic oligonucleotide
  Sense strand starting at position 653 of SEQ ID NO: 1453
guauguugaaaguaucaua

SEQ ID NO: 114263 - RNA, 19 nt, Artificial Sequence
  Description of Artificial Sequence: Synthetic oligonucleotide
  Antisense strand to SEQ ID NO: 114262
uaugauacuuucaacauac

SEQ ID NO: 114264 - RNA, 19 nt, Artificial Sequence
  Description of Artificial Sequence: Synthetic oligonucleotide
  Sense strand starting at position 549 of SEQ ID NO: 1453
gucuuauuccaagguagag

SEQ ID NO: 114265 - RNA, 19 nt, Artificial Sequence
  Description of Artificial Sequence: Synthetic oligonucleotide
  Antisense strand to SEQ ID NO: 114264
cucuaccuuggaauaagac

SEQ ID NO: 114266 - RNA, 19 nt, Artificial Sequence
  Description of Artificial Sequence: Synthetic oligonucleotide
  Sense strand starting at position 525 of SEQ ID NO: 1453
ugcaguaauccaggagaaa

SEQ ID NO: 114267 - RNA, 19 nt, Artificial Sequence
  Description of Artificial Sequence: Synthetic oligonucleotide
  Antisense strand to SEQ ID NO: 114266
uuucuccuggauuacugca

SEQ ID NO: 114268 - RNA, 19 nt, Artificial Sequence
  Description of Artificial Sequence: Synthetic oligonucleotide
  Sense strand starting at position 301 of SEQ ID NO: 1453
guaaauuagagaggagcua

SEQ ID NO: 114269 - RNA, 19 nt, Artificial Sequence
  Description of Artificial Sequence: Synthetic oligonucleotide
  Antisense strand to SEQ ID NO: 114268
uagcuccucucuaauuuac

SEQ ID NO: 114270 - RNA, 19 nt, Artificial Sequence
  Description of Artificial Sequence: Synthetic oligonucleotide
  Sense strand starting at position 290 of SEQ ID NO: 1453
gguggagcaguguaaauua

SEQ ID NO: 114271 - RNA, 19 nt, Artificial Sequence
  Description of Artificial Sequence: Synthetic oligonucleotide
  Antisense strand to SEQ ID NO: 114270
uaauuuacacugcuccacc

SEQ ID NO: 114272 - RNA, 19 nt, Artificial Sequence
  Description of Artificial Sequence: Synthetic oligonucleotide
  Sense strand starting at position 113 of SEQ ID NO: 1453
gaaauagggugaucucuca

SEQ ID NO: 114273 - RNA, 19 nt, Artificial Sequence
  Description of Artificial Sequence: Synthetic oligonucleotide
  Antisense strand to SEQ ID NO: 114272
ugagagaucacccuauuuc

SEQ ID NO: 114274 - RNA, 19 nt, Artificial Sequence
  Description of Artificial Sequence: Synthetic oligonucleotide
  Sense strand starting at position 90 of SEQ ID NO: 1453
gggaugggucaggguuaca

SEQ ID NO: 114275 - RNA, 19 nt, Artificial Sequence
  Description of Artificial Sequence: Synthetic oligonucleotide
  Antisense strand to SEQ ID NO: 114274
uguaacccugacccauccc

SEQ ID NO: 114276 - RNA, 19 nt, Artificial Sequence
  Description of Artificial Sequence: Synthetic oligonucleotide
  Sense strand starting at position 3912 of SEQ ID NO: 1454
ucagacaacuuauccgaca

SEQ ID NO: 114277 - RNA, 19 nt, Artificial Sequence
  Description of Artificial Sequence: Synthetic oligonucleotide
  Antisense strand to SEQ ID NO: 114276
ugucggauaaguugucuga

SEQ ID NO: 114278 - RNA, 19 nt, Artificial Sequence
  Description of Artificial Sequence: Synthetic oligonucleotide
  Sense strand starting at position 3828 of SEQ ID NO: 1454
guauguugaaaguaucaua

SEQ ID NO: 114279 - RNA, 19 nt, Artificial Sequence
  Description of Artificial Sequence: Synthetic oligonucleotide
  Antisense strand to SEQ ID NO: 114278
uaugauacuuucaacauac

SEQ ID NO: 114280 - RNA, 19 nt, Artificial Sequence
  Description of Artificial Sequence: Synthetic oligonucleotide
  Sense strand starting at position 3724 of SEQ ID NO: 1454
gucuuauuccaagguagag

SEQ ID NO: 114281 - RNA, 19 nt, Artificial Sequence
  Description of Artificial Sequence: Synthetic oligonucleotide
  Antisense strand to SEQ ID NO: 114280
cucuaccuuggaauaagac

SEQ ID NO: 114282 - RNA, 19 nt, Artificial Sequence
  Description of Artificial Sequence: Synthetic oligonucleotide
  Sense strand starting at position 3700 of SEQ ID NO: 1454
ugcaguaauccaggagaaa

SEQ ID NO: 114283 - RNA, 19 nt, Artificial Sequence
  Description of Artificial Sequence: Synthetic oligonucleotide
  Antisense strand to SEQ ID NO: 114282
uuucuccuggauuacugca

SEQ ID NO: 114284 - RNA, 19 nt, Artificial Sequence
  Description of Artificial Sequence: Synthetic oligonucleotide
  Sense strand starting at position 3476 of SEQ ID NO: 1454
guaaauuagagaggagcua

SEQ ID NO: 114285 - RNA, 19 nt, Artificial Sequence
  Description of Artificial Sequence: Synthetic oligonucleotide
  Antisense strand to SEQ ID NO: 114284
uagcuccucucuaauuuac

SEQ ID NO: 114286 - RNA, 19 nt, Artificial Sequence
  Description of Artificial Sequence: Synthetic oligonucleotide
  Sense strand starting at position 3465 of SEQ ID NO: 1454
gguggagcaguguaaauua

SEQ ID NO: 114287 - RNA, 19 nt, Artificial Sequence
  Description of Artificial Sequence: Synthetic oligonucleotide
  Antisense strand to SEQ ID NO: 114286
uaauuuacacugcuccacc

SEQ ID NO: 114288 - RNA, 19 nt, Artificial Sequence
  Description of Artificial Sequence: Synthetic oligonucleotide
  Sense strand starting at position 3288 of SEQ ID NO: 1454
gaaauagggugaucucuca

SEQ ID NO: 114289 - RNA, 19 nt, Artificial Sequence
  Description of Artificial Sequence: Synthetic oligonucleotide
  Antisense strand to SEQ ID NO: 114288
ugagagaucacccuauuuc

SEQ ID NO: 114290 - RNA, 19 nt, Artificial Sequence
  Description of Artificial Sequence: Synthetic oligonucleotide
  Sense strand starting at position 3265 of SEQ ID NO: 1454
gggaugggucaggguuaca

SEQ ID NO: 114291 - RNA, 19 nt, Artificial Sequence
  Description of Artificial Sequence: Synthetic oligonucleotide
  Antisense strand to SEQ ID NO: 114290
uguaacccugacccauccc

SEQ ID NO: 114292 - RNA, 19 nt, Artificial Sequence
  Description of Artificial Sequence: Synthetic oligonucleotide
  Sense strand starting at position 3132 of SEQ ID NO: 1454
uauggaacguaucuucuaa

SEQ ID NO: 114293 - RNA, 19 nt, Artificial Sequence
  Description of Artificial Sequence: Synthetic oligonucleotide
  Antisense strand to SEQ ID NO: 114292
uuagaagauacguuccaua

SEQ ID NO: 114294 - RNA, 19 nt, Artificial Sequence
  Description of Artificial Sequence: Synthetic oligonucleotide
  Sense strand starting at position 3088 of SEQ ID NO: 1454
ggugcuugagaugauacau

SEQ ID NO: 114295 - RNA, 19 nt, Artificial Sequence
  Description of Artificial Sequence: Synthetic oligonucleotide
  Antisense strand to SEQ ID NO: 114294
auguaucaucucaagcacc

SEQ ID NO: 114296 - RNA, 19 nt, Artificial Sequence
  Description of Artificial Sequence: Synthetic oligonucleotide
  Sense strand starting at position 3087 of SEQ ID NO: 1454
aggugcuugagaugauaca

SEQ ID NO: 114297 - RNA, 19 nt, Artificial Sequence
  Description of Artificial Sequence: Synthetic oligonucleotide
  Antisense strand to SEQ ID NO: 114296
uguaucaucucaagcaccu

SEQ ID NO: 114298 - RNA, 19 nt, Artificial Sequence
  Description of Artificial Sequence: Synthetic oligonucleotide
  Sense strand starting at position 2500 of SEQ ID NO: 1454
acguuaucuaaaggaaguc

SEQ ID NO: 114299 - RNA, 19 nt, Artificial Sequence
  Description of Artificial Sequence: Synthetic oligonucleotide
  Antisense strand to SEQ ID NO: 114298
gacuuccuuuagauaacgu

SEQ ID NO: 114300 - RNA, 19 nt, Artificial Sequence
  Description of Artificial Sequence: Synthetic oligonucleotide
  Sense strand starting at position 2385 of SEQ ID NO: 1454
auccuuguaggguaggaau

SEQ ID NO: 114301 - RNA, 19 nt, Artificial Sequence
  Description of Artificial Sequence: Synthetic oligonucleotide
  Antisense strand to SEQ ID NO: 114300
auuccuacccuacaaggau

SEQ ID NO: 114302 - RNA, 19 nt, Artificial Sequence
  Description of Artificial Sequence: Synthetic oligonucleotide
  Sense strand starting at position 2271 of SEQ ID NO: 1454
agaguugguaucugacucu

SEQ ID NO: 114303 - RNA, 19 nt, Artificial Sequence
  Description of Artificial Sequence: Synthetic oligonucleotide
  Antisense strand to SEQ ID NO: 114302
agagucagauaccaacucu

SEQ ID NO: 114304 - RNA, 19 nt, Artificial Sequence
  Description of Artificial Sequence: Synthetic oligonucleotide
  Sense strand starting at position 2265 of SEQ ID NO: 1454
aaguaaagaguugguaucu

SEQ ID NO: 114305 - RNA, 19 nt, Artificial Sequence
  Description of Artificial Sequence: Synthetic oligonucleotide
  Antisense strand to SEQ ID NO: 114304
agauaccaacucuuuacuu

SEQ ID NO: 114306 - RNA, 19 nt, Artificial Sequence
  Description of Artificial Sequence: Synthetic oligonucleotide
  Sense strand starting at position 2167 of SEQ ID NO: 1454
ugaagacuucuguacuggu

SEQ ID NO: 114307 - RNA, 19 nt, Artificial Sequence
  Description of Artificial Sequence: Synthetic oligonucleotide
  Antisense strand to SEQ ID NO: 114306
accaguacagaagucuuca

SEQ ID NO: 114308 - RNA, 19 nt, Artificial Sequence
  Description of Artificial Sequence: Synthetic oligonucleotide
  Sense strand starting at position 2131 of SEQ ID NO: 1454
auguuauggcuguaugaau

SEQ ID NO: 114309 - RNA, 19 nt, Artificial Sequence
  Description of Artificial Sequence: Synthetic oligonucleotide
  Antisense strand to SEQ ID NO: 114308
auucauacagccauaacau

SEQ ID NO: 114310 - RNA, 19 nt, Artificial Sequence
  Description of Artificial Sequence: Synthetic oligonucleotide
  Sense strand starting at position 2111 of SEQ ID NO: 1454
cucauauucgacuaguaug

SEQ ID NO: 114311 - RNA, 19 nt, Artificial Sequence
  Description of Artificial Sequence: Synthetic oligonucleotide
  Antisense strand to SEQ ID NO: 114310
cauacuagucgaauaugag

SEQ ID NO: 114312 - RNA, 19 nt, Artificial Sequence
  Description of Artificial Sequence: Synthetic oligonucleotide
  Sense strand starting at position 2025 of SEQ ID NO: 1454
gcacuaugacauggauaag

SEQ ID NO: 114313 - RNA, 19 nt, Artificial Sequence
  Description of Artificial Sequence: Synthetic oligonucleotide
  Antisense strand to SEQ ID NO: 114312
cuuauccaugucauagugc

SEQ ID NO: 114314 - RNA, 19 nt, Artificial Sequence
  Description of Artificial Sequence: Synthetic oligonucleotide
  Sense strand starting at position 2024 of SEQ ID NO: 1454
ggcacuaugacauggauaa

SEQ ID NO: 114315 - RNA, 19 nt, Artificial Sequence
  Description of Artificial Sequence: Synthetic oligonucleotide
  Antisense strand to SEQ ID NO: 114314
uuauccaugucauagugcc

SEQ ID NO: 114316 - RNA, 19 nt, Artificial Sequence
  Description of Artificial Sequence: Synthetic oligonucleotide
  Sense strand starting at position 1670 of SEQ ID NO: 1454
uguuguuauuucuugccau

SEQ ID NO: 114317 - RNA, 19 nt, Artificial Sequence
  Description of Artificial Sequence: Synthetic oligonucleotide
  Antisense strand to SEQ ID NO: 114316
auggcaagaaauaacaaca

SEQ ID NO: 114318 - RNA, 19 nt, Artificial Sequence
  Description of Artificial Sequence: Synthetic oligonucleotide
  Sense strand starting at position 1516 of SEQ ID NO: 1454
uuaguuuaucuuggaaucu

SEQ ID NO: 114319 - RNA, 19 nt, Artificial Sequence
  Description of Artificial Sequence: Synthetic oligonucleotide
  Antisense strand to SEQ ID NO: 114318
agauuccaagauaaacuaa

SEQ ID NO: 114320 - RNA, 19 nt, Artificial Sequence
  Description of Artificial Sequence: Synthetic oligonucleotide
  Sense strand starting at position 1487 of SEQ ID NO: 1454
agugaugcugguugggaaa

SEQ ID NO: 114321 - RNA, 19 nt, Artificial Sequence
  Description of Artificial Sequence: Synthetic oligonucleotide
  Antisense strand to SEQ ID NO: 114320
uuucccaaccagcaucacu

SEQ ID NO: 114322 - RNA, 19 nt, Artificial Sequence
  Description of Artificial Sequence: Synthetic oligonucleotide
  Sense strand starting at position 1486 of SEQ ID NO: 1454
aagugaugcugguugggaa

SEQ ID NO: 114323 - RNA, 19 nt, Artificial Sequence
  Description of Artificial Sequence: Synthetic oligonucleotide
  Antisense strand to SEQ ID NO: 114322
uucccaaccagcaucacuu

SEQ ID NO: 114324 - RNA, 19 nt, Artificial Sequence
  Description of Artificial Sequence: Synthetic oligonucleotide
  Sense strand starting at position 1349 of SEQ ID NO: 1454
ccacuuaccgaauacaguu

SEQ ID NO: 114325 - RNA, 19 nt, Artificial Sequence
  Description of Artificial Sequence: Synthetic oligonucleotide
  Antisense strand to SEQ ID NO: 114324
aacuguauucgguaagugg

SEQ ID NO: 114326 - RNA, 19 nt, Artificial Sequence
  Description of Artificial Sequence: Synthetic oligonucleotide
  Sense strand starting at position 1298 of SEQ ID NO: 1454
cugcaagguaugcaagaaa

SEQ ID NO: 114327 - RNA, 19 nt, Artificial Sequence
  Description of Artificial Sequence: Synthetic oligonucleotide
  Antisense strand to SEQ ID NO: 114326
uuucuugcauaccuugcag

SEQ ID NO: 114328 - RNA, 19 nt, Artificial Sequence
  Description of Artificial Sequence: Synthetic oligonucleotide
  Sense strand starting at position 1166 of SEQ ID NO: 1454
ccaucuguaugaccuugau

SEQ ID NO: 114329 - RNA, 19 nt, Artificial Sequence
  Description of Artificial Sequence: Synthetic oligonucleotide
  Antisense strand to SEQ ID NO: 114328
aucaaggucauacagaugg

SEQ ID NO: 114330 - RNA, 19 nt, Artificial Sequence
  Description of Artificial Sequence: Synthetic oligonucleotide
  Sense strand starting at position 1097 of SEQ ID NO: 1454
ccagaaguccuacagaguu

SEQ ID NO: 114331 - RNA, 19 nt, Artificial Sequence
  Description of Artificial Sequence: Synthetic oligonucleotide
  Antisense strand to SEQ ID NO: 114330
aacucuguaggacuucugg

SEQ ID NO: 114332 - RNA, 19 nt, Artificial Sequence
  Description of Artificial Sequence: Synthetic oligonucleotide
  Sense strand starting at position 1084 of SEQ ID NO: 1454
acagcuuuaugucccagaa

SEQ ID NO: 114333 - RNA, 19 nt, Artificial Sequence
  Description of Artificial Sequence: Synthetic oligonucleotide
  Antisense strand to SEQ ID NO: 114332
uucugggacauaaagcugu

SEQ ID NO: 114334 - RNA, 19 nt, Artificial Sequence
  Description of Artificial Sequence: Synthetic oligonucleotide
  Sense strand starting at position 1027 of SEQ ID NO: 1454
gggcaaguucuggauucca

SEQ ID NO: 114335 - RNA, 19 nt, Artificial Sequence
  Description of Artificial Sequence: Synthetic oligonucleotide
  Antisense strand to SEQ ID NO: 114334
uggaauccagaacuugccc

SEQ ID NO: 114336 - RNA, 19 nt, Artificial Sequence
  Description of Artificial Sequence: Synthetic oligonucleotide
  Sense strand starting at position 879 of SEQ ID NO: 1454
cagagagcuuaggauuuaa

SEQ ID NO: 114337 - RNA, 19 nt, Artificial Sequence
  Description of Artificial Sequence: Synthetic oligonucleotide
  Antisense strand to SEQ ID NO: 114336
uuaaauccuaagcucucug

SEQ ID NO: 114338 - RNA, 19 nt, Artificial Sequence
  Description of Artificial Sequence: Synthetic oligonucleotide
  Sense strand starting at position 775 of SEQ ID NO: 1454
ggaguucuccuuuauauca

SEQ ID NO: 114339 - RNA, 19 nt, Artificial Sequence
  Description of Artificial Sequence: Synthetic oligonucleotide
  Antisense strand to SEQ ID NO: 114338
ugauauaaaggagaacucc

SEQ ID NO: 114340 - RNA, 19 nt, Artificial Sequence
  Description of Artificial Sequence: Synthetic oligonucleotide
  Sense strand starting at position 738 of SEQ ID NO: 1454
cccuuagucccaggaacua

SEQ ID NO: 114341 - RNA, 19 nt, Artificial Sequence
  Description of Artificial Sequence: Synthetic oligonucleotide
  Antisense strand to SEQ ID NO: 114340
uaguuccugggacuaaggg

SEQ ID NO: 114342 - RNA, 19 nt, Artificial Sequence
  Description of Artificial Sequence: Synthetic oligonucleotide
  Sense strand starting at position 345 of SEQ ID NO: 1454
ccuuauguacuaugacaug

SEQ ID NO: 114343 - RNA, 19 nt, Artificial Sequence
  Description of Artificial Sequence: Synthetic oligonucleotide
  Antisense strand to SEQ ID NO: 114342
caugucauaguacauaagg

SEQ ID NO: 114344 - RNA, 19 nt, Artificial Sequence
  Description of Artificial Sequence: Synthetic oligonucleotide
  Sense strand starting at position 310 of SEQ ID NO: 1454
gugaauggauugcuuauau

SEQ ID NO: 114345 - RNA, 19 nt, Artificial Sequence
  Description of Artificial Sequence: Synthetic oligonucleotide
  Antisense strand to SEQ ID NO: 114344
auauaagcaauccauucac

SEQ ID NO: 114346 - RNA, 19 nt, Artificial Sequence
  Description of Artificial Sequence: Synthetic oligonucleotide
  Sense strand starting at position 308 of SEQ ID NO: 1454
aggugaauggauugcuuau

SEQ ID NO: 114347 - RNA, 19 nt, Artificial Sequence
  Description of Artificial Sequence: Synthetic oligonucleotide
  Antisense strand to SEQ ID NO: 114346
auaagcaauccauucaccu

SEQ ID NO: 114348 - RNA, 19 nt, Artificial Sequence
  Description of Artificial Sequence: Synthetic oligonucleotide
  Sense strand starting at position 250 of SEQ ID NO: 1454
ggacucuuaucccuugaac

SEQ ID NO: 114349 - RNA, 19 nt, Artificial Sequence
  Description of Artificial Sequence: Synthetic oligonucleotide
  Antisense strand to SEQ ID NO: 114348
guucaagggauaagagucc

SEQ ID NO: 114350 - RNA, 19 nt, Artificial Sequence
  Description of Artificial Sequence: Synthetic oligonucleotide
  Sense strand starting at position 132 of SEQ ID NO: 1454
ugcacaucacuggauguaa

SEQ ID NO: 114351 - RNA, 19 nt, Artificial Sequence
  Description of Artificial Sequence: Synthetic oligonucleotide
  Antisense strand to SEQ ID NO: 114350
uuacauccagugaugugca

SEQ ID NO: 114352 - RNA, 19 nt, Artificial Sequence
  Description of Artificial Sequence: Synthetic oligonucleotide
  Sense strand starting at position 77 of SEQ ID NO: 1454
ggaaaugaaaguugcuaaa

SEQ ID NO: 114353 - RNA, 19 nt, Artificial Sequence
  Description of Artificial Sequence: Synthetic oligonucleotide
  Antisense strand to SEQ ID NO: 114352
uuuagcaacuuucauuucc

SEQ ID NO: 114354 - RNA, 19 nt, Artificial Sequence
  Description of Artificial Sequence: Synthetic oligonucleotide
  Sense strand starting at position 17 of SEQ ID NO: 1454
accuacuuggagcaguaaa

SEQ ID NO: 114355 - RNA, 19 nt, Artificial Sequence
  Description of Artificial Sequence: Synthetic oligonucleotide
  Antisense strand to SEQ ID NO: 114354
uuuacugcuccaaguaggu

SEQ ID NO: 114356 - RNA, 19 nt, Artificial Sequence
  Description of Artificial Sequence: Synthetic oligonucleotide
  Sense strand starting at position 3704 of SEQ ID NO: 1456
ugugaaucuccgggacaca

SEQ ID NO: 114357 - RNA, 19 nt, Artificial Sequence
  Description of Artificial Sequence: Synthetic oligonucleotide
  Antisense strand to SEQ ID NO: 114356
ugugucccggagauucaca

SEQ ID NO: 114358 - RNA, 19 nt, Artificial Sequence
  Description of Artificial Sequence: Synthetic oligonucleotide
  Sense strand starting at position 3703 of SEQ ID NO: 1456
gugugaaucuccgggacac

SEQ ID NO: 114359 - RNA, 19 nt, Artificial Sequence
  Description of Artificial Sequence: Synthetic oligonucleotide
  Antisense strand to SEQ ID NO: 114358
gugucccggagauucacac

SEQ ID NO: 114360 - RNA, 19 nt, Artificial Sequence
  Description of Artificial Sequence: Synthetic oligonucleotide
  Sense strand starting at position 3690 of SEQ ID NO: 1456
ugagcauuucaacguguga

SEQ ID NO: 114361 - RNA, 19 nt, Artificial Sequence
  Description of Artificial Sequence: Synthetic oligonucleotide
  Antisense strand to SEQ ID NO: 114360
ucacacguugaaaugcuca

SEQ ID NO: 114362 - RNA, 19 nt, Artificial Sequence
  Description of Artificial Sequence: Synthetic oligonucleotide
  Sense strand starting at position 3630 of SEQ ID NO: 1456
gccuuaucucaugacugau

SEQ ID NO: 114363 - RNA, 19 nt, Artificial Sequence
  Description of Artificial Sequence: Synthetic oligonucleotide
  Antisense strand to SEQ ID NO: 114362
aucagucaugagauaaggc

SEQ ID NO: 114364 - RNA, 19 nt, Artificial Sequence
  Description of Artificial Sequence: Synthetic oligonucleotide
  Sense strand starting at position 3629 of SEQ ID NO: 1456
agccuuaucucaugacuga

SEQ ID NO: 114365 - RNA, 19 nt, Artificial Sequence
  Description of Artificial Sequence: Synthetic oligonucleotide
  Antisense strand to SEQ ID NO: 114364
ucagucaugagauaaggcu

SEQ ID NO: 114366 - RNA, 19 nt, Artificial Sequence
  Description of Artificial Sequence: Synthetic oligonucleotide
  Sense strand starting at position 3627 of SEQ ID NO: 1456
gcagccuuaucucaugacu

SEQ ID NO: 114367 - RNA, 19 nt, Artificial Sequence
  Description of Artificial Sequence: Synthetic oligonucleotide
  Antisense strand to SEQ ID NO: 114366
agucaugagauaaggcugc

SEQ ID NO: 114368 - RNA, 19 nt, Artificial Sequence
  Description of Artificial Sequence: Synthetic oligonucleotide
  Sense strand starting at position 3606 of SEQ ID NO: 1456
gaguaacgguuaugccauu

SEQ ID NO: 114369 - RNA, 19 nt, Artificial Sequence
  Description of Artificial Sequence: Synthetic oligonucleotide
  Antisense strand to SEQ ID NO: 114368
aauggcauaaccguuacuc

SEQ ID NO: 114370 - RNA, 19 nt, Artificial Sequence
  Description of Artificial Sequence: Synthetic oligonucleotide
  Sense strand starting at position 3604 of SEQ ID NO: 1456
uggaguaacgguuaugcca

SEQ ID NO: 114371 - RNA, 19 nt, Artificial Sequence
  Description of Artificial Sequence: Synthetic oligonucleotide
  Antisense strand to SEQ ID NO: 114370
uggcauaaccguuacucca

SEQ ID NO: 114372 - RNA, 19 nt, Artificial Sequence
  Description of Artificial Sequence: Synthetic oligonucleotide
  Sense strand starting at position 3565 of SEQ ID NO: 1456
ucucauguguccucaauca

SEQ ID NO: 114373 - RNA, 19 nt, Artificial Sequence
  Description of Artificial Sequence: Synthetic oligonucleotide
  Antisense strand to SEQ ID NO: 114372
ugauugaggacacaugaga

SEQ ID NO: 114374 - RNA, 19 nt, Artificial Sequence
  Description of Artificial Sequence: Synthetic oligonucleotide
  Sense strand starting at position 3563 of SEQ ID NO: 1456
ucucucauguguccucaau

SEQ ID NO: 114375 - RNA, 19 nt, Artificial Sequence
  Description of Artificial Sequence: Synthetic oligonucleotide
  Antisense strand to SEQ ID NO: 114374
auugaggacacaugagaga

SEQ ID NO: 114376 - RNA, 19 nt, Artificial Sequence
  Description of Artificial Sequence: Synthetic oligonucleotide
  Sense strand starting at position 3556 of SEQ ID NO: 1456
gccaacaucucucaugugu

SEQ ID NO: 114377 - RNA, 19 nt, Artificial Sequence
  Description of Artificial Sequence: Synthetic oligonucleotide
  Antisense strand to SEQ ID NO: 114376
acacaugagagauguuggc

SEQ ID NO: 114378 - RNA, 19 nt, Artificial Sequence
  Description of Artificial Sequence: Synthetic oligonucleotide
  Sense strand starting at position 3510 of SEQ ID NO: 1456
gccucuauguguccucaca

SEQ ID NO: 114379 - RNA, 19 nt, Artificial Sequence
  Description of Artificial Sequence: Synthetic oligonucleotide
  Antisense strand to SEQ ID NO: 114378
ugugaggacacauagaggc

SEQ ID NO: 114380 - RNA, 19 nt, Artificial Sequence
  Description of Artificial Sequence: Synthetic oligonucleotide
  Sense strand starting at position 2988 of SEQ ID NO: 1456
aggaguguccugugagaac

SEQ ID NO: 114381 - RNA, 19 nt, Artificial Sequence
  Description of Artificial Sequence: Synthetic oligonucleotide
  Antisense strand to SEQ ID NO: 114380
guucucacaggacacuccu

SEQ ID NO: 114382 - RNA, 19 nt, Artificial Sequence
  Description of Artificial Sequence: Synthetic oligonucleotide
  Sense strand starting at position 2986 of SEQ ID NO: 1456
acaggaguguccugugaga

SEQ ID NO: 114383 - RNA, 19 nt, Artificial Sequence
  Description of Artificial Sequence: Synthetic oligonucleotide
  Antisense strand to SEQ ID NO: 114382
ucucacaggacacuccugu

SEQ ID NO: 114384 - RNA, 19 nt, Artificial Sequence
  Description of Artificial Sequence: Synthetic oligonucleotide
  Sense strand starting at position 2965 of SEQ ID NO: 1456
gagucauccuuacauggga

SEQ ID NO: 114385 - RNA, 19 nt, Artificial Sequence
  Description of Artificial Sequence: Synthetic oligonucleotide
  Antisense strand to SEQ ID NO: 114384
ucccauguaaggaugacuc

SEQ ID NO: 114386 - RNA, 19 nt, Artificial Sequence
  Description of Artificial Sequence: Synthetic oligonucleotide
  Sense strand starting at position 2959 of SEQ ID NO: 1456
gucucagagucauccuuac

SEQ ID NO: 114387 - RNA, 19 nt, Artificial Sequence
  Description of Artificial Sequence: Synthetic oligonucleotide
  Antisense strand to SEQ ID NO: 114386
guaaggaugacucugagac

SEQ ID NO: 114388 - RNA, 19 nt, Artificial Sequence
  Description of Artificial Sequence: Synthetic oligonucleotide
  Sense strand starting at position 2654 of SEQ ID NO: 1456
ccauguccuuagcagugau

SEQ ID NO: 114389 - RNA, 19 nt, Artificial Sequence
  Description of Artificial Sequence: Synthetic oligonucleotide
  Antisense strand to SEQ ID NO: 114388
aucacugcuaaggacaugg

SEQ ID NO: 114390 - RNA, 19 nt, Artificial Sequence
  Description of Artificial Sequence: Synthetic oligonucleotide
  Sense strand starting at position 2600 of SEQ ID NO: 1456
ccuuguccuuagcagugau

SEQ ID NO: 114391 - RNA, 19 nt, Artificial Sequence
  Description of Artificial Sequence: Synthetic oligonucleotide
  Antisense strand to SEQ ID NO: 114390
aucacugcuaaggacaagg

SEQ ID NO: 114392 - RNA, 19 nt, Artificial Sequence
  Description of Artificial Sequence: Synthetic oligonucleotide
  Sense strand starting at position 2597 of SEQ ID NO: 1456
gacccuuguccuuagcagu

SEQ ID NO: 114393 - RNA, 19 nt, Artificial Sequence
  Description of Artificial Sequence: Synthetic oligonucleotide
  Antisense strand to SEQ ID NO: 114392
acugcuaaggacaaggguc

SEQ ID NO: 114394 - RNA, 19 nt, Artificial Sequence
  Description of Artificial Sequence: Synthetic oligonucleotide
  Sense strand starting at position 2591 of SEQ ID NO: 1456
ccgagagacccuuguccuu

SEQ ID NO: 114395 - RNA, 19 nt, Artificial Sequence
  Description of Artificial Sequence: Synthetic oligonucleotide
  Antisense strand to SEQ ID NO: 114394
aaggacaagggucucucgg

SEQ ID NO: 114396 - RNA, 19 nt, Artificial Sequence
  Description of Artificial Sequence: Synthetic oligonucleotide
  Sense strand starting at position 2550 of SEQ ID NO: 1456
uguucucagcagugaugca

SEQ ID NO: 114397 - RNA, 19 nt, Artificial Sequence
  Description of Artificial Sequence: Synthetic oligonucleotide
  Antisense strand to SEQ ID NO: 114396
ugcaucacugcugagaaca

SEQ ID NO: 114398 - RNA, 19 nt, Artificial Sequence
  Description of Artificial Sequence: Synthetic oligonucleotide
  Sense strand starting at position 2547 of SEQ ID NO: 1456
cuguguucucagcagugau

SEQ ID NO: 114399 - RNA, 19 nt, Artificial Sequence
  Description of Artificial Sequence: Synthetic oligonucleotide
  Antisense strand to SEQ ID NO: 114398
aucacugcugagaacacag

SEQ ID NO: 114400 - RNA, 19 nt, Artificial Sequence
  Description of Artificial Sequence: Synthetic oligonucleotide
  Sense strand starting at position 2516 of SEQ ID NO: 1456
uguccucagcagugaugga

SEQ ID NO: 114401 - RNA, 19 nt, Artificial Sequence
  Description of Artificial Sequence: Synthetic oligonucleotide
  Antisense strand to SEQ ID NO: 114400
uccaucacugcugaggaca

SEQ ID NO: 114402 - RNA, 19 nt, Artificial Sequence
  Description of Artificial Sequence: Synthetic oligonucleotide
  Sense strand starting at position 2408 of SEQ ID NO: 1456
uguccucagcagugaugaa

SEQ ID NO: 114403 - RNA, 19 nt, Artificial Sequence
  Description of Artificial Sequence: Synthetic oligonucleotide
  Antisense strand to SEQ ID NO: 114402
uucaucacugcugaggaca

SEQ ID NO: 114404 - RNA, 19 nt, Artificial Sequence
  Description of Artificial Sequence: Synthetic oligonucleotide
  Sense strand starting at position 2346 of SEQ ID NO: 1456
cuguguccucagcagugau

SEQ ID NO: 114405 - RNA, 19 nt, Artificial Sequence
  Description of Artificial Sequence: Synthetic oligonucleotide
  Antisense strand to SEQ ID NO: 114404
aucacugcugaggacacag

SEQ ID NO: 114406 - RNA, 19 nt, Artificial Sequence
  Description of Artificial Sequence: Synthetic oligonucleotide
  Sense strand starting at position 2296 of SEQ ID NO: 1456
uguccuuagcaaugaugga

SEQ ID NO: 114407 - RNA, 19 nt, Artificial Sequence
  Description of Artificial Sequence: Synthetic oligonucleotide
  Antisense strand to SEQ ID NO: 114406
uccaucauugcuaaggaca

SEQ ID NO: 114408 - RNA, 19 nt, Artificial Sequence
  Description of Artificial Sequence: Synthetic oligonucleotide
  Sense strand starting at position 2293 of SEQ ID NO: 1456
cuguguccuuagcaaugau

SEQ ID NO: 114409 - RNA, 19 nt, Artificial Sequence
  Description of Artificial Sequence: Synthetic oligonucleotide
  Antisense strand to SEQ ID NO: 114408
aucauugcuaaggacacag

SEQ ID NO: 114410 - RNA, 19 nt, Artificial Sequence
  Description of Artificial Sequence: Synthetic oligonucleotide
  Sense strand starting at position 2289 of SEQ ID NO: 1456
augccuguguccuuagcaa

SEQ ID NO: 114411 - RNA, 19 nt, Artificial Sequence
  Description of Artificial Sequence: Synthetic oligonucleotide
  Antisense strand to SEQ ID NO: 114410
uugcuaaggacacaggcau

SEQ ID NO: 114412 - RNA, 19 nt, Artificial Sequence
  Description of Artificial Sequence: Synthetic oligonucleotide
  Sense strand starting at position 2285 of SEQ ID NO: 1456
acaaaugccuguguccuua

SEQ ID NO: 114413 - RNA, 19 nt, Artificial Sequence
  Description of Artificial Sequence: Synthetic oligonucleotide
  Antisense strand to SEQ ID NO: 114412
uaaggacacaggcauuugu

SEQ ID NO: 114414 - RNA, 19 nt, Artificial Sequence
  Description of Artificial Sequence: Synthetic oligonucleotide
  Sense strand starting at position 2284 of SEQ ID NO: 1456
gacaaaugccuguguccuu

SEQ ID NO: 114415 - RNA, 19 nt, Artificial Sequence
  Description of Artificial Sequence: Synthetic oligonucleotide
  Antisense strand to SEQ ID NO: 114414
aaggacacaggcauuuguc

SEQ ID NO: 114416 - RNA, 19 nt, Artificial Sequence
  Description of Artificial Sequence: Synthetic oligonucleotide
  Sense strand starting at position 1614 of SEQ ID NO: 1456
gggcaucuaucucagcagu

SEQ ID NO: 114417 - RNA, 19 nt, Artificial Sequence
  Description of Artificial Sequence: Synthetic oligonucleotide
  Antisense strand to SEQ ID NO: 114416
acugcugagauagaugccc

SEQ ID NO: 114418 - RNA, 19 nt, Artificial Sequence
  Description of Artificial Sequence: Synthetic oligonucleotide
  Sense strand starting at position 1289 of SEQ ID NO: 1456
cugacuguugcagaacuuu

SEQ ID NO: 114419 - RNA, 19 nt, Artificial Sequence
  Description of Artificial Sequence: Synthetic oligonucleotide
  Antisense strand to SEQ ID NO: 114418
aaaguucugcaacagucag

SEQ ID NO: 114420 - RNA, 19 nt, Artificial Sequence
  Description of Artificial Sequence: Synthetic oligonucleotide
  Sense strand starting at position 1287 of SEQ ID NO: 1456
cccugacuguugcagaacu

SEQ ID NO: 114421 - RNA, 19 nt, Artificial Sequence
  Description of Artificial Sequence: Synthetic oligonucleotide
  Antisense strand to SEQ ID NO: 114420
aguucugcaacagucaggg

SEQ ID NO: 114422 - RNA, 19 nt, Artificial Sequence
  Description of Artificial Sequence: Synthetic oligonucleotide
  Sense strand starting at position 1285 of SEQ ID NO: 1456
cacccugacuguugcagaa

SEQ ID NO: 114423 - RNA, 19 nt, Artificial Sequence
  Description of Artificial Sequence: Synthetic oligonucleotide
  Antisense strand to SEQ ID NO: 114422
uucugcaacagucagggug

SEQ ID NO: 114424 - RNA, 19 nt, Artificial Sequence
  Description of Artificial Sequence: Synthetic oligonucleotide
  Sense strand starting at position 957 of SEQ ID NO: 1456
ccguaucacagaugaagaa

SEQ ID NO: 114425 - RNA, 19 nt, Artificial Sequence
  Description of Artificial Sequence: Synthetic oligonucleotide
  Antisense strand to SEQ ID NO: 114424
uucuucaucugugauacgg

SEQ ID NO: 114426 - RNA, 19 nt, Artificial Sequence
  Description of Artificial Sequence: Synthetic oligonucleotide
  Sense strand starting at position 948 of SEQ ID NO: 1456
ccugacaacccguaucaca

SEQ ID NO: 114427 - RNA, 19 nt, Artificial Sequence
  Description of Artificial Sequence: Synthetic oligonucleotide
  Antisense strand to SEQ ID NO: 114426
ugugauacggguugucagg

SEQ ID NO: 114428 - RNA, 19 nt, Artificial Sequence
  Description of Artificial Sequence: Synthetic oligonucleotide
  Sense strand starting at position 720 of SEQ ID NO: 1456
ugaccuuggccugggaaga

SEQ ID NO: 114429 - RNA, 19 nt, Artificial Sequence
  Description of Artificial Sequence: Synthetic oligonucleotide
  Antisense strand to SEQ ID NO: 114428
ucuucccaggccaagguca

SEQ ID NO: 114430 - RNA, 19 nt, Artificial Sequence
  Description of Artificial Sequence: Synthetic oligonucleotide
  Sense strand starting at position 134 of SEQ ID NO: 1456
gggcuacuuugacaucaac

SEQ ID NO: 114431 - RNA, 19 nt, Artificial Sequence
  Description of Artificial Sequence: Synthetic oligonucleotide
  Antisense strand to SEQ ID NO: 114430
guugaugucaaaguagccc

SEQ ID NO: 114432 - RNA, 19 nt, Artificial Sequence
  Description of Artificial Sequence: Synthetic oligonucleotide
  Sense strand starting at position 3901 of SEQ ID NO: 1457
guggaacacuuacuaaacu

SEQ ID NO: 114433 - RNA, 19 nt, Artificial Sequence
  Description of Artificial Sequence: Synthetic oligonucleotide
  Antisense strand to SEQ ID NO: 114432
aguuuaguaaguguuccac

SEQ ID NO: 114434 - RNA, 19 nt, Artificial Sequence
  Description of Artificial Sequence: Synthetic oligonucleotide
  Sense strand starting at position 3890 of SEQ ID NO: 1457
uauguauaacaguggaaca

SEQ ID NO: 114435 - RNA, 19 nt, Artificial Sequence
  Description of Artificial Sequence: Synthetic oligonucleotide
  Antisense strand to SEQ ID NO: 114434
uguuccacuguuauacaua

SEQ ID NO: 114436 - RNA, 19 nt, Artificial Sequence
  Description of Artificial Sequence: Synthetic oligonucleotide
  Sense strand starting at position 3863 of SEQ ID NO: 1457
auugcaguguuccaaauua

SEQ ID NO: 114437 - RNA, 19 nt, Artificial Sequence
  Description of Artificial Sequence: Synthetic oligonucleotide
  Antisense strand to SEQ ID NO: 114436
uaauuuggaacacugcaau

SEQ ID NO: 114438 - RNA, 19 nt, Artificial Sequence
  Description of Artificial Sequence: Synthetic oligonucleotide
  Sense strand starting at position 3477 of SEQ ID NO: 1457
auuacuauaucaguugaag

SEQ ID NO: 114439 - RNA, 19 nt, Artificial Sequence
  Description of Artificial Sequence: Synthetic oligonucleotide
  Antisense strand to SEQ ID NO: 114438
cuucaacugauauaguaau

SEQ ID NO: 114440 - RNA, 19 nt, Artificial Sequence
  Description of Artificial Sequence: Synthetic oligonucleotide
  Sense strand starting at position 3449 of SEQ ID NO: 1457
ugacguaucugcuauaucu

SEQ ID NO: 114441 - RNA, 19 nt, Artificial Sequence
  Description of Artificial Sequence: Synthetic oligonucleotide
  Antisense strand to SEQ ID NO: 114440
agauauagcagauacguca

SEQ ID NO: 114442 - RNA, 19 nt, Artificial Sequence
  Description of Artificial Sequence: Synthetic oligonucleotide
  Sense strand starting at position 3447 of SEQ ID NO: 1457
gaugacguaucugcuauau

SEQ ID NO: 114443 - RNA, 19 nt, Artificial Sequence
  Description of Artificial Sequence: Synthetic oligonucleotide
  Antisense strand to SEQ ID NO: 114442
auauagcagauacgucauc

SEQ ID NO: 114444 - RNA, 19 nt, Artificial Sequence
  Description of Artificial Sequence: Synthetic oligonucleotide
  Sense strand starting at position 3427 of SEQ ID NO: 1457
auagauagguagcuauaaa

SEQ ID NO: 114445 - RNA, 19 nt, Artificial Sequence
  Description of Artificial Sequence: Synthetic oligonucleotide
  Antisense strand to SEQ ID NO: 114444
uuuauagcuaccuaucuau

SEQ ID NO: 114446 - RNA, 19 nt, Artificial Sequence
  Description of Artificial Sequence: Synthetic oligonucleotide
  Sense strand starting at position 3289 of SEQ ID NO: 1457
gcaggugagccaugacugu

SEQ ID NO: 114447 - RNA, 19 nt, Artificial Sequence
  Description of Artificial Sequence: Synthetic oligonucleotide
  Antisense strand to SEQ ID NO: 114446
acagucauggcucaccugc

SEQ ID NO: 114448 - RNA, 19 nt, Artificial Sequence
  Description of Artificial Sequence: Synthetic oligonucleotide
  Sense strand starting at position 3116 of SEQ ID NO: 1457
gacaguggaucacuugagu

SEQ ID NO: 114449 - RNA, 19 nt, Artificial Sequence
  Description of Artificial Sequence: Synthetic oligonucleotide
  Antisense strand to SEQ ID NO: 114448
acucaagugauccacuguc

SEQ ID NO: 114450 - RNA, 19 nt, Artificial Sequence
  Description of Artificial Sequence: Synthetic oligonucleotide
  Sense strand starting at position 3029 of SEQ ID NO: 1457
ugcuaaauuugauaguguu

SEQ ID NO: 114451 - RNA, 19 nt, Artificial Sequence
  Description of Artificial Sequence: Synthetic oligonucleotide
  Antisense strand to SEQ ID NO: 114450
aacacuaucaaauuuagca

SEQ ID NO: 114452 - RNA, 19 nt, Artificial Sequence
  Description of Artificial Sequence: Synthetic oligonucleotide
  Sense strand starting at position 2952 of SEQ ID NO: 1457
ucauucuggcaggagaagu

SEQ ID NO: 114453 - RNA, 19 nt, Artificial Sequence
  Description of Artificial Sequence: Synthetic oligonucleotide
  Antisense strand to SEQ ID NO: 114452
acuucuccugccagaauga

SEQ ID NO: 114454 - RNA, 19 nt, Artificial Sequence
  Description of Artificial Sequence: Synthetic oligonucleotide
  Sense strand starting at position 2949 of SEQ ID NO: 1457
uacucauucuggcaggaga

SEQ ID NO: 114455 - RNA, 19 nt, Artificial Sequence
  Description of Artificial Sequence: Synthetic oligonucleotide
  Antisense strand to SEQ ID NO: 114454
ucuccugccagaaugagua

SEQ ID NO: 114456 - RNA, 19 nt, Artificial Sequence
  Description of Artificial Sequence: Synthetic oligonucleotide
  Sense strand starting at position 2775 of SEQ ID NO: 1457
cuguuagaguaauagcuga

SEQ ID NO: 114457 - RNA, 19 nt, Artificial Sequence
  Description of Artificial Sequence: Synthetic oligonucleotide
  Antisense strand to SEQ ID NO: 114456
ucagcuauuacucuaacag

SEQ ID NO: 114458 - RNA, 19 nt, Artificial Sequence
  Description of Artificial Sequence: Synthetic oligonucleotide
  Sense strand starting at position 2769 of SEQ ID NO: 1457
ugaagucuguuagaguaau

SEQ ID NO: 114459 - RNA, 19 nt, Artificial Sequence
  Description of Artificial Sequence: Synthetic oligonucleotide
  Antisense strand to SEQ ID NO: 114458
auuacucuaacagacuuca

SEQ ID NO: 114460 - RNA, 19 nt, Artificial Sequence
  Description of Artificial Sequence: Synthetic oligonucleotide
  Sense strand starting at position 2767 of SEQ ID NO: 1457
aaugaagucuguuagagua

SEQ ID NO: 114461 - RNA, 19 nt, Artificial Sequence
  Description of Artificial Sequence: Synthetic oligonucleotide
  Antisense strand to SEQ ID NO: 114460
uacucuaacagacuucauu

SEQ ID NO: 114462 - RNA, 19 nt, Artificial Sequence
  Description of Artificial Sequence: Synthetic oligonucleotide
  Sense strand starting at position 2764 of SEQ ID NO: 1457
cguaaugaagucuguuaga

SEQ ID NO: 114463 - RNA, 19 nt, Artificial Sequence
  Description of Artificial Sequence: Synthetic oligonucleotide
  Antisense strand to SEQ ID NO: 114462
ucuaacagacuucauuacg

SEQ ID NO: 114464 - RNA, 19 nt, Artificial Sequence
  Description of Artificial Sequence: Synthetic oligonucleotide
  Sense strand starting at position 2731 of SEQ ID NO: 1457
uggguaagauacuguaacu

SEQ ID NO: 114465 - RNA, 19 nt, Artificial Sequence
  Description of Artificial Sequence: Synthetic oligonucleotide
  Antisense strand to SEQ ID NO: 114464
aguuacaguaucuuaccca

SEQ ID NO: 114466 - RNA, 19 nt, Artificial Sequence
  Description of Artificial Sequence: Synthetic oligonucleotide
  Sense strand starting at position 2722 of SEQ ID NO: 1457
cguuauuaauggguaagau

SEQ ID NO: 114467 - RNA, 19 nt, Artificial Sequence
  Description of Artificial Sequence: Synthetic oligonucleotide
  Antisense strand to SEQ ID NO: 114466
aucuuacccauuaauaacg

SEQ ID NO: 114468 - RNA, 19 nt, Artificial Sequence
  Description of Artificial Sequence: Synthetic oligonucleotide
  Sense strand starting at position 2721 of SEQ ID NO: 1457
ucguuauuaauggguaaga

SEQ ID NO: 114469 - RNA, 19 nt, Artificial Sequence
  Description of Artificial Sequence: Synthetic oligonucleotide
  Antisense strand to SEQ ID NO: 114468
ucuuacccauuaauaacga

SEQ ID NO: 114470 - RNA, 19 nt, Artificial Sequence
  Description of Artificial Sequence: Synthetic oligonucleotide
  Sense strand starting at position 2719 of SEQ ID NO: 1457
aaucguuauuaauggguaa

SEQ ID NO: 114471 - RNA, 19 nt, Artificial Sequence
  Description of Artificial Sequence: Synthetic oligonucleotide
  Antisense strand to SEQ ID NO: 114470
uuacccauuaauaacgauu

SEQ ID NO: 114472 - RNA, 19 nt, Artificial Sequence
  Description of Artificial Sequence: Synthetic oligonucleotide
  Sense strand starting at position 2713 of SEQ ID NO: 1457
agcugcaaucguuauuaau

SEQ ID NO: 114473 - RNA, 19 nt, Artificial Sequence
  Description of Artificial Sequence: Synthetic oligonucleotide
  Antisense strand to SEQ ID NO: 114472
auuaauaacgauugcagcu

SEQ ID NO: 114474 - RNA, 19 nt, Artificial Sequence
  Description of Artificial Sequence: Synthetic oligonucleotide
  Sense strand starting at position 2676 of SEQ ID NO: 1457
gauuacugcgaugguauaa

SEQ ID NO: 114475 - RNA, 19 nt, Artificial Sequence
  Description of Artificial Sequence: Synthetic oligonucleotide
  Antisense strand to SEQ ID NO: 114474
uuauaccaucgcaguaauc

SEQ ID NO: 114476 - RNA, 19 nt, Artificial Sequence
  Description of Artificial Sequence: Synthetic oligonucleotide
  Sense strand starting at position 2675 of SEQ ID NO: 1457
agauuacugcgaugguaua

SEQ ID NO: 114477 - RNA, 19 nt, Artificial Sequence
  Description of Artificial Sequence: Synthetic oligonucleotide
  Antisense strand to SEQ ID NO: 114476
uauaccaucgcaguaaucu

SEQ ID NO: 114478 - RNA, 19 nt, Artificial Sequence
  Description of Artificial Sequence: Synthetic oligonucleotide
  Sense strand starting at position 2673 of SEQ ID NO: 1457
acagauuacugcgauggua

SEQ ID NO: 114479 - RNA, 19 nt, Artificial Sequence
  Description of Artificial Sequence: Synthetic oligonucleotide
  Antisense strand to SEQ ID NO: 114478
uaccaucgcaguaaucugu

SEQ ID NO: 114480 - RNA, 19 nt, Artificial Sequence
  Description of Artificial Sequence: Synthetic oligonucleotide
  Sense strand starting at position 2672 of SEQ ID NO: 1457
uacagauuacugcgauggu

SEQ ID NO: 114481 - RNA, 19 nt, Artificial Sequence
  Description of Artificial Sequence: Synthetic oligonucleotide
  Antisense strand to SEQ ID NO: 114480
accaucgcaguaaucugua

SEQ ID NO: 114482 - RNA, 19 nt, Artificial Sequence
  Description of Artificial Sequence: Synthetic oligonucleotide
  Sense strand starting at position 2197 of SEQ ID NO: 1457
acccgaagcuaauaugaau

SEQ ID NO: 114483 - RNA, 19 nt, Artificial Sequence
  Description of Artificial Sequence: Synthetic oligonucleotide
  Antisense strand to SEQ ID NO: 114482
auucauauuagcuucgggu

SEQ ID NO: 114484 - RNA, 19 nt, Artificial Sequence
  Description of Artificial Sequence: Synthetic oligonucleotide
  Sense strand starting at position 1112 of SEQ ID NO: 1457
ggacgaugccuauaaaguc

SEQ ID NO: 114485 - RNA, 19 nt, Artificial Sequence
  Description of Artificial Sequence: Synthetic oligonucleotide
  Antisense strand to SEQ ID NO: 114484
gacuuuauaggcaucgucc

SEQ ID NO: 114486 - RNA, 19 nt, Artificial Sequence
  Description of Artificial Sequence: Synthetic oligonucleotide
  Sense strand starting at position 1109 of SEQ ID NO: 1457
gacggacgaugccuauaaa

SEQ ID NO: 114487 - RNA, 19 nt, Artificial Sequence
  Description of Artificial Sequence: Synthetic oligonucleotide
  Antisense strand to SEQ ID NO: 114486
uuuauaggcaucguccguc

SEQ ID NO: 114488 - RNA, 19 nt, Artificial Sequence
  Description of Artificial Sequence: Synthetic oligonucleotide
  Sense strand starting at position 555 of SEQ ID NO: 1457
acgauugaaucaguaauga

SEQ ID NO: 114489 - RNA, 19 nt, Artificial Sequence
  Description of Artificial Sequence: Synthetic oligonucleotide
  Antisense strand to SEQ ID NO: 114488
ucauuacugauucaaucgu

SEQ ID NO: 114490 - RNA, 19 nt, Artificial Sequence
  Description of Artificial Sequence: Synthetic oligonucleotide
  Sense strand starting at position 455 of SEQ ID NO: 1457
cuugucuucguagaaagaa

SEQ ID NO: 114491 - RNA, 19 nt, Artificial Sequence
  Description of Artificial Sequence: Synthetic oligonucleotide
  Antisense strand to SEQ ID NO: 114490
uucuuucuacgaagacaag

SEQ ID NO: 114492 - RNA, 19 nt, Artificial Sequence
  Description of Artificial Sequence: Synthetic oligonucleotide
  Sense strand starting at position 452 of SEQ ID NO: 1457
gaacuugucuucguagaaa

SEQ ID NO: 114493 - RNA, 19 nt, Artificial Sequence
  Description of Artificial Sequence: Synthetic oligonucleotide
  Antisense strand to SEQ ID NO: 114492
uuucuacgaagacaaguuc

SEQ ID NO: 114494 - RNA, 19 nt, Artificial Sequence
  Description of Artificial Sequence: Synthetic oligonucleotide
  Sense strand starting at position 451 of SEQ ID NO: 1457
agaacuugucuucguagaa

SEQ ID NO: 114495 - RNA, 19 nt, Artificial Sequence
  Description of Artificial Sequence: Synthetic oligonucleotide
  Antisense strand to SEQ ID NO: 114494
uucuacgaagacaaguucu

SEQ ID NO: 114496 - RNA, 19 nt, Artificial Sequence
  Description of Artificial Sequence: Synthetic oligonucleotide
  Sense strand starting at position 450 of SEQ ID NO: 1457
gagaacuugucuucguaga

SEQ ID NO: 114497 - RNA, 19 nt, Artificial Sequence
  Description of Artificial Sequence: Synthetic oligonucleotide
  Antisense strand to SEQ ID NO: 114496
ucuacgaagacaaguucuc

SEQ ID NO: 114498 - RNA, 19 nt, Artificial Sequence
  Description of Artificial Sequence: Synthetic oligonucleotide
  Sense strand starting at position 448 of SEQ ID NO: 1457
cagagaacuugucuucgua

SEQ ID NO: 114499 - RNA, 19 nt, Artificial Sequence
  Description of Artificial Sequence: Synthetic oligonucleotide
  Antisense strand to SEQ ID NO: 114498
uacgaagacaaguucucug

SEQ ID NO: 114500 - RNA, 19 nt, Artificial Sequence
  Description of Artificial Sequence: Synthetic oligonucleotide
  Sense strand starting at position 411 of SEQ ID NO: 1457
ugagguuacucugcuagca

SEQ ID NO: 114501 - RNA, 19 nt, Artificial Sequence
  Description of Artificial Sequence: Synthetic oligonucleotide
  Antisense strand to SEQ ID NO: 114500
ugcuagcagaguaaccuca

SEQ ID NO: 114502 - RNA, 19 nt, Artificial Sequence
  Description of Artificial Sequence: Synthetic oligonucleotide
  Sense strand starting at position 408 of SEQ ID NO: 1457
gucugagguuacucugcua

SEQ ID NO: 114503 - RNA, 19 nt, Artificial Sequence
  Description of Artificial Sequence: Synthetic oligonucleotide
  Antisense strand to SEQ ID NO: 114502
uagcagaguaaccucagac

SEQ ID NO: 114504 - RNA, 19 nt, Artificial Sequence
  Description of Artificial Sequence: Synthetic oligonucleotide
  Sense strand starting at position 402 of SEQ ID NO: 1457
uuauuugucugagguuacu

SEQ ID NO: 114505 - RNA, 19 nt, Artificial Sequence
  Description of Artificial Sequence: Synthetic oligonucleotide
  Antisense strand to SEQ ID NO: 114504
aguaaccucagacaaauaa

SEQ ID NO: 114506 - RNA, 19 nt, Artificial Sequence
  Description of Artificial Sequence: Synthetic oligonucleotide
  Sense strand starting at position 400 of SEQ ID NO: 1457
aguuauuugucugagguua

SEQ ID NO: 114507 - RNA, 19 nt, Artificial Sequence
  Description of Artificial Sequence: Synthetic oligonucleotide
  Antisense strand to SEQ ID NO: 114506
uaaccucagacaaauaacu

SEQ ID NO: 114508 - RNA, 19 nt, Artificial Sequence
  Description of Artificial Sequence: Synthetic oligonucleotide
  Sense strand starting at position 399 of SEQ ID NO: 1457
aaguuauuugucugagguu

SEQ ID NO: 114509 - RNA, 19 nt, Artificial Sequence
  Description of Artificial Sequence: Synthetic oligonucleotide
  Antisense strand to SEQ ID NO: 114508
aaccucagacaaauaacuu

SEQ ID NO: 114510 - RNA, 19 nt, Artificial Sequence
  Description of Artificial Sequence: Synthetic oligonucleotide
  Sense strand starting at position 385 of SEQ ID NO: 1457
auaggaugccuauaaaguu

SEQ ID NO: 114511 - RNA, 19 nt, Artificial Sequence
  Description of Artificial Sequence: Synthetic oligonucleotide
  Antisense strand to SEQ ID NO: 114510
aacuuuauaggcauccuau

SEQ ID NO: 114512 - RNA, 19 nt, Artificial Sequence
  Description of Artificial Sequence: Synthetic oligonucleotide
  Sense strand starting at position 221 of SEQ ID NO: 1458
augagugaugaaugagcua

SEQ ID NO: 114513 - RNA, 19 nt, Artificial Sequence
  Description of Artificial Sequence: Synthetic oligonucleotide
  Antisense strand to SEQ ID NO: 114512
uagcucauucaucacucau

SEQ ID NO: 114514 - RNA, 19 nt, Artificial Sequence
  Description of Artificial Sequence: Synthetic oligonucleotide
  Sense strand starting at position 282 of SEQ ID NO: 1458
gcgaccagaucacuaaauu

SEQ ID NO: 114515 - RNA, 19 nt, Artificial Sequence
  Description of Artificial Sequence: Synthetic oligonucleotide
  Antisense strand to SEQ ID NO: 114514
aauuuagugaucuggucgc

SEQ ID NO: 114516 - RNA, 19 nt, Artificial Sequence
  Description of Artificial Sequence: Synthetic oligonucleotide
  Sense strand starting at position 307 of SEQ ID NO: 1458
uucuaaaguuugucacaag

SEQ ID NO: 114517 - RNA, 19 nt, Artificial Sequence
  Description of Artificial Sequence: Synthetic oligonucleotide
  Antisense strand to SEQ ID NO: 114516
cuugugacaaacuuuagaa

SEQ ID NO: 114518 - RNA, 19 nt, Artificial Sequence
  Description of Artificial Sequence: Synthetic oligonucleotide
  Sense strand starting at position 877 of SEQ ID NO: 1458
guacuaugcguugcgugau

SEQ ID NO: 114519 - RNA, 19 nt, Artificial Sequence
  Description of Artificial Sequence: Synthetic oligonucleotide
  Antisense strand to SEQ ID NO: 114518
aucacgcaacgcauaguac

SEQ ID NO: 114520 - RNA, 19 nt, Artificial Sequence
  Description of Artificial Sequence: Synthetic oligonucleotide
  Sense strand starting at position 895 of SEQ ID NO: 1458
ugaggaaacugucuucgaa

SEQ ID NO: 114521 - RNA, 19 nt, Artificial Sequence
  Description of Artificial Sequence: Synthetic oligonucleotide
  Antisense strand to SEQ ID NO: 114520
uucgaagacaguuuccuca

SEQ ID NO: 114522 - RNA, 19 nt, Artificial Sequence
  Description of Artificial Sequence: Synthetic oligonucleotide
  Sense strand starting at position 897 of SEQ ID NO: 1458
aggaaacugucuucgaaau

SEQ ID NO: 114523 - RNA, 19 nt, Artificial Sequence
  Description of Artificial Sequence: Synthetic oligonucleotide
  Antisense strand to SEQ ID NO: 114522
auuucgaagacaguuuccu

SEQ ID NO: 114524 - RNA, 19 nt, Artificial Sequence
  Description of Artificial Sequence: Synthetic oligonucleotide
  Sense strand starting at position 898 of SEQ ID NO: 1458
ggaaacugucuucgaaaua

SEQ ID NO: 114525 - RNA, 19 nt, Artificial Sequence
  Description of Artificial Sequence: Synthetic oligonucleotide
  Antisense strand to SEQ ID NO: 114524
uauuucgaagacaguuucc

SEQ ID NO: 114526 - RNA, 19 nt, Artificial Sequence
  Description of Artificial Sequence: Synthetic oligonucleotide
  Sense strand starting at position 945 of SEQ ID NO: 1458
ugguuauucucaguaaaca

SEQ ID NO: 114527 - RNA, 19 nt, Artificial Sequence
  Description of Artificial Sequence: Synthetic oligonucleotide
  Antisense strand to SEQ ID NO: 114526
uguuuacugagaauaacca

SEQ ID NO: 114528 - RNA, 19 nt, Artificial Sequence
  Description of Artificial Sequence: Synthetic oligonucleotide
  Sense strand starting at position 946 of SEQ ID NO: 1458
gguuauucucaguaaacaa

SEQ ID NO: 114529 - RNA, 19 nt, Artificial Sequence
  Description of Artificial Sequence: Synthetic oligonucleotide
  Antisense strand to SEQ ID NO: 114528
uuguuuacugagaauaacc

SEQ ID NO: 114530 - RNA, 19 nt, Artificial Sequence
  Description of Artificial Sequence: Synthetic oligonucleotide
  Sense strand starting at position 1048 of SEQ ID NO: 1458
caaagugaugauuacuguu

SEQ ID NO: 114531 - RNA, 19 nt, Artificial Sequence
  Description of Artificial Sequence: Synthetic oligonucleotide
  Antisense strand to SEQ ID NO: 114530
aacaguaaucaucacuuug

SEQ ID NO: 114532 - RNA, 19 nt, Artificial Sequence
  Description of Artificial Sequence: Synthetic oligonucleotide
  Sense strand starting at position 1245 of SEQ ID NO: 1458
ggaauuauuuccugaggau

SEQ ID NO: 114533 - RNA, 19 nt, Artificial Sequence
  Description of Artificial Sequence: Synthetic oligonucleotide
  Antisense strand to SEQ ID NO: 114532
auccucaggaaauaauucc

SEQ ID NO: 114534 - RNA, 19 nt, Artificial Sequence
  Description of Artificial Sequence: Synthetic oligonucleotide
  Sense strand starting at position 1254 of SEQ ID NO: 1458
uccugaggauuccuguaau

SEQ ID NO: 114535 - RNA, 19 nt, Artificial Sequence
  Description of Artificial Sequence: Synthetic oligonucleotide
  Antisense strand to SEQ ID NO: 114534
auuacaggaauccucagga

SEQ ID NO: 114536 - RNA, 19 nt, Artificial Sequence
  Description of Artificial Sequence: Synthetic oligonucleotide
  Sense strand starting at position 1318 of SEQ ID NO: 1458
ucacaugaugggcgauuaa

SEQ ID NO: 114537 - RNA, 19 nt, Artificial Sequence
  Description of Artificial Sequence: Synthetic oligonucleotide
  Antisense strand to SEQ ID NO: 114536
uuaaucgcccaucauguga

SEQ ID NO: 114538 - RNA, 19 nt, Artificial Sequence
  Description of Artificial Sequence: Synthetic oligonucleotide
  Sense strand starting at position 1359 of SEQ ID NO: 1458
gucacuauuucugaaagaa

SEQ ID NO: 114539 - RNA, 19 nt, Artificial Sequence
  Description of Artificial Sequence: Synthetic oligonucleotide
  Antisense strand to SEQ ID NO: 114538
uucuuucagaaauagugac

SEQ ID NO: 114540 - RNA, 19 nt, Artificial Sequence
  Description of Artificial Sequence: Synthetic oligonucleotide
  Sense strand starting at position 2117 of SEQ ID NO: 1458
uuguuucucggguaaacau

SEQ ID NO: 114541 - RNA, 19 nt, Artificial Sequence
  Description of Artificial Sequence: Synthetic oligonucleotide
  Antisense strand to SEQ ID NO: 114540
auguuuacccgagaaacaa

SEQ ID NO: 114542 - RNA, 19 nt, Artificial Sequence
  Description of Artificial Sequence: Synthetic oligonucleotide
  Sense strand starting at position 2165 of SEQ ID NO: 1458
gacagcauuuguguacguu

SEQ ID NO: 114543 - RNA, 19 nt, Artificial Sequence
  Description of Artificial Sequence: Synthetic oligonucleotide
  Antisense strand to SEQ ID NO: 114542
aacguacacaaaugcuguc

SEQ ID NO: 114544 - RNA, 19 nt, Artificial Sequence
  Description of Artificial Sequence: Synthetic oligonucleotide
  Sense strand starting at position 2166 of SEQ ID NO: 1458
acagcauuuguguacguua

SEQ ID NO: 114545 - RNA, 19 nt, Artificial Sequence
  Description of Artificial Sequence: Synthetic oligonucleotide
  Antisense strand to SEQ ID NO: 114544
uaacguacacaaaugcugu

SEQ ID NO: 114546 - RNA, 19 nt, Artificial Sequence
  Description of Artificial Sequence: Synthetic oligonucleotide
  Sense strand starting at position 2171 of SEQ ID NO: 1458
auuuguguacguuaccgaa

SEQ ID NO: 114547 - RNA, 19 nt, Artificial Sequence
  Description of Artificial Sequence: Synthetic oligonucleotide
  Antisense strand to SEQ ID NO: 114546
uucgguaacguacacaaau

SEQ ID NO: 114548 - RNA, 19 nt, Artificial Sequence
  Description of Artificial Sequence: Synthetic oligonucleotide
  Sense strand starting at position 2469 of SEQ ID NO: 1458
gcuggucugguuuauaaag

SEQ ID NO: 114549 - RNA, 19 nt, Artificial Sequence
  Description of Artificial Sequence: Synthetic oligonucleotide
  Antisense strand to SEQ ID NO: 114548
cuuuauaaaccagaccagc

SEQ ID NO: 114550 - RNA, 19 nt, Artificial Sequence
  Description of Artificial Sequence: Synthetic oligonucleotide
  Sense strand starting at position 2589 of SEQ ID NO: 1458
caaguagaguaacugucaa

SEQ ID NO: 114551 - RNA, 19 nt, Artificial Sequence
  Description of Artificial Sequence: Synthetic oligonucleotide
  Antisense strand to SEQ ID NO: 114550
uugacaguuacucuacuug

SEQ ID NO: 114552 - RNA, 19 nt, Artificial Sequence
  Description of Artificial Sequence: Synthetic oligonucleotide
  Sense strand starting at position 2677 of SEQ ID NO: 1458
ccaccaguacuguaauugu

SEQ ID NO: 114553 - RNA, 19 nt, Artificial Sequence
  Description of Artificial Sequence: Synthetic oligonucleotide
  Antisense strand to SEQ ID NO: 114552
acaauuacaguacuggugg

SEQ ID NO: 114554 - RNA, 19 nt, Artificial Sequence
  Description of Artificial Sequence: Synthetic oligonucleotide
  Sense strand starting at position 2738 of SEQ ID NO: 1458
uuaguaaagggccagugau

SEQ ID NO: 114555 - RNA, 19 nt, Artificial Sequence
  Description of Artificial Sequence: Synthetic oligonucleotide
  Antisense strand to SEQ ID NO: 114554
aucacuggcccuuuacuaa

SEQ ID NO: 114556 - RNA, 19 nt, Artificial Sequence
  Description of Artificial Sequence: Synthetic oligonucleotide
  Sense strand starting at position 2994 of SEQ ID NO: 1458
ggcacuucuccuuaacgaa

SEQ ID NO: 114557 - RNA, 19 nt, Artificial Sequence
  Description of Artificial Sequence: Synthetic oligonucleotide
  Antisense strand to SEQ ID NO: 114556
uucguuaaggagaagugcc

SEQ ID NO: 114558 - RNA, 19 nt, Artificial Sequence
  Description of Artificial Sequence: Synthetic oligonucleotide
  Sense strand starting at position 3233 of SEQ ID NO: 1458
gccauugucuuaccaagaa

SEQ ID NO: 114559 - RNA, 19 nt, Artificial Sequence
  Description of Artificial Sequence: Synthetic oligonucleotide
  Antisense strand to SEQ ID NO: 114558
uucuugguaagacaauggc

SEQ ID NO: 114560 - RNA, 19 nt, Artificial Sequence
  Description of Artificial Sequence: Synthetic oligonucleotide
  Sense strand starting at position 3280 of SEQ ID NO: 1458
auaugagcucacuaaagua

SEQ ID NO: 114561 - RNA, 19 nt, Artificial Sequence
  Description of Artificial Sequence: Synthetic oligonucleotide
  Antisense strand to SEQ ID NO: 114560
uacuuuagugagcucauau

SEQ ID NO: 114562 - RNA, 19 nt, Artificial Sequence
  Description of Artificial Sequence: Synthetic oligonucleotide
  Sense strand starting at position 3322 of SEQ ID NO: 1458
uacaguguuggguagaaau

SEQ ID NO: 114563 - RNA, 19 nt, Artificial Sequence
  Description of Artificial Sequence: Synthetic oligonucleotide
  Antisense strand to SEQ ID NO: 114562
auuucuacccaacacugua

SEQ ID NO: 114564 - RNA, 19 nt, Artificial Sequence
  Description of Artificial Sequence: Synthetic oligonucleotide
  Sense strand starting at position 3324 of SEQ ID NO: 1458
caguguuggguagaaauug

SEQ ID NO: 114565 - RNA, 19 nt, Artificial Sequence
  Description of Artificial Sequence: Synthetic oligonucleotide
  Antisense strand to SEQ ID NO: 114564
caauuucuacccaacacug

SEQ ID NO: 114566 - RNA, 19 nt, Artificial Sequence
  Description of Artificial Sequence: Synthetic oligonucleotide
  Sense strand starting at position 3329 of SEQ ID NO: 1458
uuggguagaaauugugauu

SEQ ID NO: 114567 - RNA, 19 nt, Artificial Sequence
  Description of Artificial Sequence: Synthetic oligonucleotide
  Antisense strand to SEQ ID NO: 114566
aaucacaauuucuacccaa

SEQ ID NO: 114568 - RNA, 19 nt, Artificial Sequence
  Description of Artificial Sequence: Synthetic oligonucleotide
  Sense strand starting at position 3457 of SEQ ID NO: 1458
uagauaaccuguuugcaga

SEQ ID NO: 114569 - RNA, 19 nt, Artificial Sequence
  Description of Artificial Sequence: Synthetic oligonucleotide
  Antisense strand to SEQ ID NO: 114568
ucugcaaacagguuaucua

SEQ ID NO: 114570 - RNA, 19 nt, Artificial Sequence
  Description of Artificial Sequence: Synthetic oligonucleotide
  Sense strand starting at position 3464 of SEQ ID NO: 1458
ccuguuugcagaggacaaa

SEQ ID NO: 114571 - RNA, 19 nt, Artificial Sequence
  Description of Artificial Sequence: Synthetic oligonucleotide
  Antisense strand to SEQ ID NO: 114570
uuuguccucugcaaacagg

SEQ ID NO: 114572 - RNA, 19 nt, Artificial Sequence
  Description of Artificial Sequence: Synthetic oligonucleotide
  Sense strand starting at position 3489 of SEQ ID NO: 1458
guuaaaugaaagugugaug

SEQ ID NO: 114573 - RNA, 19 nt, Artificial Sequence
  Description of Artificial Sequence: Synthetic oligonucleotide
  Antisense strand to SEQ ID NO: 114572
caucacacuuucauuuaac

SEQ ID NO: 114574 - RNA, 19 nt, Artificial Sequence
  Description of Artificial Sequence: Synthetic oligonucleotide
  Sense strand starting at position 3546 of SEQ ID NO: 1458
ugccacuaaucacuggaau

SEQ ID NO: 114575 - RNA, 19 nt, Artificial Sequence
  Description of Artificial Sequence: Synthetic oligonucleotide
  Antisense strand to SEQ ID NO: 114574
auuccagugauuaguggca

SEQ ID NO: 114576 - RNA, 19 nt, Artificial Sequence
  Description of Artificial Sequence: Synthetic oligonucleotide
  Sense strand starting at position 3547 of SEQ ID NO: 1458
gccacuaaucacuggaauu

SEQ ID NO: 114577 - RNA, 19 nt, Artificial Sequence
  Description of Artificial Sequence: Synthetic oligonucleotide
  Antisense strand to SEQ ID NO: 114576
aauuccagugauuaguggc

SEQ ID NO: 114578 - RNA, 19 nt, Artificial Sequence
  Description of Artificial Sequence: Synthetic oligonucleotide
  Sense strand starting at position 3647 of SEQ ID NO: 1458
uuauaauagccaugaguca

SEQ ID NO: 114579 - RNA, 19 nt, Artificial Sequence
  Description of Artificial Sequence: Synthetic oligonucleotide
  Antisense strand to SEQ ID NO: 114578
ugacucauggcuauuauaa

SEQ ID NO: 114580 - RNA, 19 nt, Artificial Sequence
  Description of Artificial Sequence: Synthetic oligonucleotide
  Sense strand starting at position 3685 of SEQ ID NO: 1458
cuguaaaucuccuuuaagg

SEQ ID NO: 114581 - RNA, 19 nt, Artificial Sequence
  Description of Artificial Sequence: Synthetic oligonucleotide
  Antisense strand to SEQ ID NO: 114580
ccuuaaaggagauuuacag

SEQ ID NO: 114582 - RNA, 19 nt, Artificial Sequence
  Description of Artificial Sequence: Synthetic oligonucleotide
  Sense strand starting at position 3687 of SEQ ID NO: 1458
guaaaucuccuuuaagguu

SEQ ID NO: 114583 - RNA, 19 nt, Artificial Sequence
  Description of Artificial Sequence: Synthetic oligonucleotide
  Antisense strand to SEQ ID NO: 114582
aaccuuaaaggagauuuac

SEQ ID NO: 114584 - RNA, 19 nt, Artificial Sequence
  Description of Artificial Sequence: Synthetic oligonucleotide
  Sense strand starting at position 3693 of SEQ ID NO: 1458
cuccuuuaagguuaugaca

SEQ ID NO: 114585 - RNA, 19 nt, Artificial Sequence
  Description of Artificial Sequence: Synthetic oligonucleotide
  Antisense strand to SEQ ID NO: 114584
ugucauaaccuuaaaggag

SEQ ID NO: 114586 - RNA, 19 nt, Artificial Sequence
  Description of Artificial Sequence: Synthetic oligonucleotide
  Sense strand starting at position 3759 of SEQ ID NO: 1458
aguagaaucuuagcagacu

SEQ ID NO: 114587 - RNA, 19 nt, Artificial Sequence
  Description of Artificial Sequence: Synthetic oligonucleotide
  Antisense strand to SEQ ID NO: 114586
agucugcuaagauucuacu

SEQ ID NO: 114588 - RNA, 19 nt, Artificial Sequence
  Description of Artificial Sequence: Synthetic oligonucleotide
  Sense strand starting at position 3796 of SEQ ID NO: 1458
ggcagugauuaauuaucaa

SEQ ID NO: 114589 - RNA, 19 nt, Artificial Sequence
  Description of Artificial Sequence: Synthetic oligonucleotide
  Antisense strand to SEQ ID NO: 114588
uugauaauuaaucacugcc

SEQ ID NO: 114590 - RNA, 19 nt, Artificial Sequence
  Description of Artificial Sequence: Synthetic oligonucleotide
  Sense strand starting at position 3914 of SEQ ID NO: 1458
ccucuaucacuuugggauc

SEQ ID NO: 114591 - RNA, 19 nt, Artificial Sequence
  Description of Artificial Sequence: Synthetic oligonucleotide
  Antisense strand to SEQ ID NO: 114590
gaucccaaagugauagagg

SEQ ID NO: 114592 - RNA, 19 nt, Artificial Sequence
  Description of Artificial Sequence: Synthetic oligonucleotide
  Sense strand starting at position 363 of SEQ ID NO: 1459
aggugcaaaguuugaaaua

SEQ ID NO: 114593 - RNA, 19 nt, Artificial Sequence
  Description of Artificial Sequence: Synthetic oligonucleotide
  Antisense strand to SEQ ID NO: 114592
uauuucaaacuuugcaccu

SEQ ID NO: 114594 - RNA, 19 nt, Artificial Sequence
  Description of Artificial Sequence: Synthetic oligonucleotide
  Sense strand starting at position 390 of SEQ ID NO: 1459
ucauuaguaccucaguuua

SEQ ID NO: 114595 - RNA, 19 nt, Artificial Sequence
  Description of Artificial Sequence: Synthetic oligonucleotide
  Antisense strand to SEQ ID NO: 114594
uaaacugagguacuaauga

SEQ ID NO: 114596 - RNA, 19 nt, Artificial Sequence
  Description of Artificial Sequence: Synthetic oligonucleotide
  Sense strand starting at position 414 of SEQ ID NO: 1459
auuauccugcaagaguuaa

SEQ ID NO: 114597 - RNA, 19 nt, Artificial Sequence
  Description of Artificial Sequence: Synthetic oligonucleotide
  Antisense strand to SEQ ID NO: 114596
uuaacucuugcaggauaau

SEQ ID NO: 114598 - RNA, 19 nt, Artificial Sequence
  Description of Artificial Sequence: Synthetic oligonucleotide
  Sense strand starting at position 439 of SEQ ID NO: 1459
aaugauguuguugaaaucu

SEQ ID NO: 114599 - RNA, 19 nt, Artificial Sequence
  Description of Artificial Sequence: Synthetic oligonucleotide
  Antisense strand to SEQ ID NO: 114598
agauuucaacaacaucauu

SEQ ID NO: 114600 - RNA, 19 nt, Artificial Sequence
  Description of Artificial Sequence: Synthetic oligonucleotide
  Sense strand starting at position 451 of SEQ ID NO: 1459
gaaaucugguacuuggaca

SEQ ID NO: 114601 - RNA, 19 nt, Artificial Sequence
  Description of Artificial Sequence: Synthetic oligonucleotide
  Antisense strand to SEQ ID NO: 114600
uguccaaguaccagauuuc

SEQ ID NO: 114602 - RNA, 19 nt, Artificial Sequence
  Description of Artificial Sequence: Synthetic oligonucleotide
  Sense strand starting at position 714 of SEQ ID NO: 1459
gccuuaagcacugggagaa

SEQ ID NO: 114603 - RNA, 19 nt, Artificial Sequence
  Description of Artificial Sequence: Synthetic oligonucleotide
  Antisense strand to SEQ ID NO: 114602
uucucccagugcuuaaggc

SEQ ID NO: 114604 - RNA, 19 nt, Artificial Sequence
  Description of Artificial Sequence: Synthetic oligonucleotide
  Sense strand starting at position 715 of SEQ ID NO: 1459
ccuuaagcacugggagaau

SEQ ID NO: 114605 - RNA, 19 nt, Artificial Sequence
  Description of Artificial Sequence: Synthetic oligonucleotide
  Antisense strand to SEQ ID NO: 114604
auucucccagugcuuaagg

SEQ ID NO: 114606 - RNA, 19 nt, Artificial Sequence
  Description of Artificial Sequence: Synthetic oligonucleotide
  Sense strand starting at position 760 of SEQ ID NO: 1459
agacuauacucaguugauu

SEQ ID NO: 114607 - RNA, 19 nt, Artificial Sequence
  Description of Artificial Sequence: Synthetic oligonucleotide
  Antisense strand to SEQ ID NO: 114606
aaucaacugaguauagucu

SEQ ID NO: 114608 - RNA, 19 nt, Artificial Sequence
  Description of Artificial Sequence: Synthetic oligonucleotide
  Sense strand starting at position 772 of SEQ ID NO: 1459
guugauuaacauugguuga

SEQ ID NO: 114609 - RNA, 19 nt, Artificial Sequence
  Description of Artificial Sequence: Synthetic oligonucleotide
  Antisense strand to SEQ ID NO: 114608
ucaaccaauguuaaucaac

SEQ ID NO: 114610 - RNA, 19 nt, Artificial Sequence
  Description of Artificial Sequence: Synthetic oligonucleotide
  Sense strand starting at position 774 of SEQ ID NO: 1459
ugauuaacauugguugaua

SEQ ID NO: 114611 - RNA, 19 nt, Artificial Sequence
  Description of Artificial Sequence: Synthetic oligonucleotide
  Antisense strand to SEQ ID NO: 114610
uaucaaccaauguuaauca

SEQ ID NO: 114612 - RNA, 19 nt, Artificial Sequence
  Description of Artificial Sequence: Synthetic oligonucleotide
  Sense strand starting at position 775 of SEQ ID NO: 1459
gauuaacauugguugauag

SEQ ID NO: 114613 - RNA, 19 nt, Artificial Sequence
  Description of Artificial Sequence: Synthetic oligonucleotide
  Antisense strand to SEQ ID NO: 114612
cuaucaaccaauguuaauc

SEQ ID NO: 114614 - RNA, 19 nt, Artificial Sequence
  Description of Artificial Sequence: Synthetic oligonucleotide
  Sense strand starting at position 776 of SEQ ID NO: 1459
auuaacauugguugauaga

SEQ ID NO: 114615 - RNA, 19 nt, Artificial Sequence
  Description of Artificial Sequence: Synthetic oligonucleotide
  Antisense strand to SEQ ID NO: 114614
ucuaucaaccaauguuaau

SEQ ID NO: 114616 - RNA, 19 nt, Artificial Sequence
  Description of Artificial Sequence: Synthetic oligonucleotide
  Sense strand starting at position 1059 of SEQ ID NO: 1459
caggaaauacuuuguuaga

SEQ ID NO: 114617 - RNA, 19 nt, Artificial Sequence
  Description of Artificial Sequence: Synthetic oligonucleotide
  Antisense strand to SEQ ID NO: 114616
ucuaacaaaguauuuccug

SEQ ID NO: 114618 - RNA, 19 nt, Artificial Sequence
  Description of Artificial Sequence: Synthetic oligonucleotide
  Sense strand starting at position 1330 of SEQ ID NO: 1459
auugcauuccaaggaagaa

SEQ ID NO: 114619 - RNA, 19 nt, Artificial Sequence
  Description of Artificial Sequence: Synthetic oligonucleotide
  Antisense strand to SEQ ID NO: 114618
uucuuccuuggaaugcaau

SEQ ID NO: 114620 - RNA, 19 nt, Artificial Sequence
  Description of Artificial Sequence: Synthetic oligonucleotide
  Sense strand starting at position 1344 of SEQ ID NO: 1459
aagaaucugcuguagcaga

SEQ ID NO: 114621 - RNA, 19 nt, Artificial Sequence
  Description of Artificial Sequence: Synthetic oligonucleotide
  Antisense strand to SEQ ID NO: 114620
ucugcuacagcagauucuu

SEQ ID NO: 114622 - RNA, 19 nt, Artificial Sequence
  Description of Artificial Sequence: Synthetic oligonucleotide
  Sense strand starting at position 1372 of SEQ ID NO: 1459
gacagaauauacuuuguag

SEQ ID NO: 114623 - RNA, 19 nt, Artificial Sequence
  Description of Artificial Sequence: Synthetic oligonucleotide
  Antisense strand to SEQ ID NO: 114622
cuacaaaguauauucuguc

SEQ ID NO: 114624 - RNA, 19 nt, Artificial Sequence
  Description of Artificial Sequence: Synthetic oligonucleotide
  Sense strand starting at position 1479 of SEQ ID NO: 1459
uuaagaauugcccaagcuu

SEQ ID NO: 114625 - RNA, 19 nt, Artificial Sequence
  Description of Artificial Sequence: Synthetic oligonucleotide
  Antisense strand to SEQ ID NO: 114624
aagcuugggcaauucuuaa

SEQ ID NO: 114626 - RNA, 19 nt, Artificial Sequence
  Description of Artificial Sequence: Synthetic oligonucleotide
  Sense strand starting at position 1825 of SEQ ID NO: 1459
ggacauccaguuugagauc

SEQ ID NO: 114627 - RNA, 19 nt, Artificial Sequence
  Description of Artificial Sequence: Synthetic oligonucleotide
  Antisense strand to SEQ ID NO: 114626
gaucucaaacuggaugucc

SEQ ID NO: 114628 - RNA, 19 nt, Artificial Sequence
  Description of Artificial Sequence: Synthetic oligonucleotide
  Sense strand starting at position 1916 of SEQ ID NO: 1459
cauagugacugauuaagau

SEQ ID NO: 114629 - RNA, 19 nt, Artificial Sequence
  Description of Artificial Sequence: Synthetic oligonucleotide
  Antisense strand to SEQ ID NO: 114628
aucuuaaucagucacuaug

SEQ ID NO: 114630 - RNA, 19 nt, Artificial Sequence
  Description of Artificial Sequence: Synthetic oligonucleotide
  Sense strand starting at position 2101 of SEQ ID NO: 1459
uuugcuggaucaucaaaca

SEQ ID NO: 114631 - RNA, 19 nt, Artificial Sequence
  Description of Artificial Sequence: Synthetic oligonucleotide
  Antisense strand to SEQ ID NO: 114630
uguuugaugauccagcaaa

SEQ ID NO: 114632 - RNA, 19 nt, Artificial Sequence
  Description of Artificial Sequence: Synthetic oligonucleotide
  Sense strand starting at position 2137 of SEQ ID NO: 1459
uugguugguaauuaucaga

SEQ ID NO: 114633 - RNA, 19 nt, Artificial Sequence
  Description of Artificial Sequence: Synthetic oligonucleotide
  Antisense strand to SEQ ID NO: 114632
ucugauaauuaccaaccaa

SEQ ID NO: 114634 - RNA, 19 nt, Artificial Sequence
  Description of Artificial Sequence: Synthetic oligonucleotide
  Sense strand starting at position 2207 of SEQ ID NO: 1459
guuaguuaccaucaacaga

SEQ ID NO: 114635 - RNA, 19 nt, Artificial Sequence
  Description of Artificial Sequence: Synthetic oligonucleotide
  Antisense strand to SEQ ID NO: 114634
ucuguugaugguaacuaac

SEQ ID NO: 114636 - RNA, 19 nt, Artificial Sequence
  Description of Artificial Sequence: Synthetic oligonucleotide
  Sense strand starting at position 2702 of SEQ ID NO: 1459
ucaguuugugaggaaugac

SEQ ID NO: 114637 - RNA, 19 nt, Artificial Sequence
  Description of Artificial Sequence: Synthetic oligonucleotide
  Antisense strand to SEQ ID NO: 114636
gucauuccucacaaacuga

SEQ ID NO: 114638 - RNA, 19 nt, Artificial Sequence
  Description of Artificial Sequence: Synthetic oligonucleotide
  Sense strand starting at position 2705 of SEQ ID NO: 1459
guuugugaggaaugacgga

SEQ ID NO: 114639 - RNA, 19 nt, Artificial Sequence
  Description of Artificial Sequence: Synthetic oligonucleotide
  Antisense strand to SEQ ID NO: 114638
uccgucauuccucacaaac

SEQ ID NO: 114640 - RNA, 19 nt, Artificial Sequence
  Description of Artificial Sequence: Synthetic oligonucleotide
  Sense strand starting at position 2728 of SEQ ID NO: 1459
uauggaaagucuguaucuu

SEQ ID NO: 114641 - RNA, 19 nt, Artificial Sequence
  Description of Artificial Sequence: Synthetic oligonucleotide
  Antisense strand to SEQ ID NO: 114640
aagauacagacuuuccaua

SEQ ID NO: 114642 - RNA, 19 nt, Artificial Sequence
  Description of Artificial Sequence: Synthetic oligonucleotide
  Sense strand starting at position 2729 of SEQ ID NO: 1459
auggaaagucuguaucuug

SEQ ID NO: 114643 - RNA, 19 nt, Artificial Sequence
  Description of Artificial Sequence: Synthetic oligonucleotide
  Antisense strand to SEQ ID NO: 114642
caagauacagacuuuccau

SEQ ID NO: 114644 - RNA, 19 nt, Artificial Sequence
  Description of Artificial Sequence: Synthetic oligonucleotide
  Sense strand starting at position 2732 of SEQ ID NO: 1459
gaaagucuguaucuugaga

SEQ ID NO: 114645 - RNA, 19 nt, Artificial Sequence
  Description of Artificial Sequence: Synthetic oligonucleotide
  Antisense strand to SEQ ID NO: 114644
ucucaagauacagacuuuc

SEQ ID NO: 114646 - RNA, 19 nt, Artificial Sequence
  Description of Artificial Sequence: Synthetic oligonucleotide
  Sense strand starting at position 2747 of SEQ ID NO: 1459
gagagaacaugugauuuag

SEQ ID NO: 114647 - RNA, 19 nt, Artificial Sequence
  Description of Artificial Sequence: Synthetic oligonucleotide
  Antisense strand to SEQ ID NO: 114646
cuaaaucacauguucucuc

SEQ ID NO: 114648 - RNA, 19 nt, Artificial Sequence
  Description of Artificial Sequence: Synthetic oligonucleotide
  Sense strand starting at position 2821 of SEQ ID NO: 1459
ucuaguuagccauaugacu

SEQ ID NO: 114649 - RNA, 19 nt, Artificial Sequence
  Description of Artificial Sequence: Synthetic oligonucleotide
  Antisense strand to SEQ ID NO: 114648
agucauauggcuaacuaga

SEQ ID NO: 114650 - RNA, 19 nt, Artificial Sequence
  Description of Artificial Sequence: Synthetic oligonucleotide
  Sense strand starting at position 2959 of SEQ ID NO: 1459
gcaagugugguauauagaa

SEQ ID NO: 114651 - RNA, 19 nt, Artificial Sequence
  Description of Artificial Sequence: Synthetic oligonucleotide
  Antisense strand to SEQ ID NO: 114650
uucuauauaccacacuugc

SEQ ID NO: 114652 - RNA, 19 nt, Artificial Sequence
  Description of Artificial Sequence: Synthetic oligonucleotide
  Sense strand starting at position 2971 of SEQ ID NO: 1459
uauagaauccaggguuuau

SEQ ID NO: 114653 - RNA, 19 nt, Artificial Sequence
  Description of Artificial Sequence: Synthetic oligonucleotide
  Antisense strand to SEQ ID NO: 114652
auaaacccuggauucuaua

SEQ ID NO: 114654 - RNA, 19 nt, Artificial Sequence
  Description of Artificial Sequence: Synthetic oligonucleotide
  Sense strand starting at position 2980 of SEQ ID NO: 1459
caggguuuauggguaacuu

SEQ ID NO: 114655 - RNA, 19 nt, Artificial Sequence
  Description of Artificial Sequence: Synthetic oligonucleotide
  Antisense strand to SEQ ID NO: 114654
aaguuacccauaaacccug

SEQ ID NO: 114656 - RNA, 19 nt, Artificial Sequence
  Description of Artificial Sequence: Synthetic oligonucleotide
  Sense strand starting at position 2981 of SEQ ID NO: 1459
aggguuuauggguaacuuu

SEQ ID NO: 114657 - RNA, 19 nt, Artificial Sequence
  Description of Artificial Sequence: Synthetic oligonucleotide
  Antisense strand to SEQ ID NO: 114656
aaaguuacccauaaacccu

SEQ ID NO: 114658 - RNA, 19 nt, Artificial Sequence
  Description of Artificial Sequence: Synthetic oligonucleotide
  Sense strand starting at position 3077 of SEQ ID NO: 1459
ugucuuauccaauauaugu

SEQ ID NO: 114659 - RNA, 19 nt, Artificial Sequence
  Description of Artificial Sequence: Synthetic oligonucleotide
  Antisense strand to SEQ ID NO: 114658
acauauauuggauaagaca

SEQ ID NO: 114660 - RNA, 19 nt, Artificial Sequence
  Description of Artificial Sequence: Synthetic oligonucleotide
  Sense strand starting at position 3194 of SEQ ID NO: 1459
uugauuucuuaggagaauu

SEQ ID NO: 114661 - RNA, 19 nt, Artificial Sequence
  Description of Artificial Sequence: Synthetic oligonucleotide
  Antisense strand to SEQ ID NO: 114660
aauucuccuaagaaaucaa

SEQ ID NO: 114662 - RNA, 19 nt, Artificial Sequence
  Description of Artificial Sequence: Synthetic oligonucleotide
  Sense strand starting at position 3212 of SEQ ID NO: 1459
ucuggacuuguuuguauuu

SEQ ID NO: 114663 - RNA, 19 nt, Artificial Sequence
  Description of Artificial Sequence: Synthetic oligonucleotide
  Antisense strand to SEQ ID NO: 114662
aaauacaaacaaguccaga

SEQ ID NO: 114664 - RNA, 19 nt, Artificial Sequence
  Description of Artificial Sequence: Synthetic oligonucleotide
  Sense strand starting at position 3572 of SEQ ID NO: 1459
guauuaaacuuagcagaaa

SEQ ID NO: 114665 - RNA, 19 nt, Artificial Sequence
  Description of Artificial Sequence: Synthetic oligonucleotide
  Antisense strand to SEQ ID NO: 114664
uuucugcuaaguuuaauac

SEQ ID NO: 114666 - RNA, 19 nt, Artificial Sequence
  Description of Artificial Sequence: Synthetic oligonucleotide
  Sense strand starting at position 3585 of SEQ ID NO: 1459
cagaaagcccugugaaauu

SEQ ID NO: 114667 - RNA, 19 nt, Artificial Sequence
  Description of Artificial Sequence: Synthetic oligonucleotide
  Antisense strand to SEQ ID NO: 114666
aauuucacagggcuuucug

SEQ ID NO: 114668 - RNA, 19 nt, Artificial Sequence
  Description of Artificial Sequence: Synthetic oligonucleotide
  Sense strand starting at position 3787 of SEQ ID NO: 1459
ggcagaugguaauuauacu

SEQ ID NO: 114669 - RNA, 19 nt, Artificial Sequence
  Description of Artificial Sequence: Synthetic oligonucleotide
  Antisense strand to SEQ ID NO: 114668
aguauaauuaccaucugcc

SEQ ID NO: 114670 - RNA, 19 nt, Artificial Sequence
  Description of Artificial Sequence: Synthetic oligonucleotide
  Sense strand starting at position 3879 of SEQ ID NO: 1459
gugcucugauuugcaaauu

SEQ ID NO: 114671 - RNA, 19 nt, Artificial Sequence
  Description of Artificial Sequence: Synthetic oligonucleotide
  Antisense strand to SEQ ID NO: 114670
aauuugcaaaucagagcac

SEQ ID NO: 114672 - RNA, 19 nt, Artificial Sequence
  Description of Artificial Sequence: Synthetic oligonucleotide
  Sense strand starting at position 72 of SEQ ID NO: 1460
uggauagaaugugucacua

SEQ ID NO: 114673 - RNA, 19 nt, Artificial Sequence
  Description of Artificial Sequence: Synthetic oligonucleotide
  Antisense strand to SEQ ID NO: 114672
uagugacacauucuaucca

SEQ ID NO: 114674 - RNA, 19 nt, Artificial Sequence
  Description of Artificial Sequence: Synthetic oligonucleotide
  Sense strand starting at position 170 of SEQ ID NO: 1460
agcuacaccuuaguauaua

SEQ ID NO: 114675 - RNA, 19 nt, Artificial Sequence
  Description of Artificial Sequence: Synthetic oligonucleotide
  Antisense strand to SEQ ID NO: 114674
uauauacuaagguguagcu

SEQ ID NO: 114676 - RNA, 19 nt, Artificial Sequence
  Description of Artificial Sequence: Synthetic oligonucleotide
  Sense strand starting at position 194 of SEQ ID NO: 1460
ugccuuuaagauuauuaag

SEQ ID NO: 114677 - RNA, 19 nt, Artificial Sequence
  Description of Artificial Sequence: Synthetic oligonucleotide
  Antisense strand to SEQ ID NO: 114676
cuuaauaaucuuaaaggca

SEQ ID NO: 114678 - RNA, 19 nt, Artificial Sequence
  Description of Artificial Sequence: Synthetic oligonucleotide
  Sense strand starting at position 227 of SEQ ID NO: 1460
gagugaagcguuuacauca

SEQ ID NO: 114679 - RNA, 19 nt, Artificial Sequence
  Description of Artificial Sequence: Synthetic oligonucleotide
  Antisense strand to SEQ ID NO: 114678
ugauguaaacgcuucacuc

SEQ ID NO: 114680 - RNA, 19 nt, Artificial Sequence
  Description of Artificial Sequence: Synthetic oligonucleotide
  Sense strand starting at position 645 of SEQ ID NO: 1460
auucccugucauuaugauu

SEQ ID NO: 114681 - RNA, 19 nt, Artificial Sequence
  Description of Artificial Sequence: Synthetic oligonucleotide
  Antisense strand to SEQ ID NO: 114680
aaucauaaugacagggaau

SEQ ID NO: 114682 - RNA, 19 nt, Artificial Sequence
  Description of Artificial Sequence: Synthetic oligonucleotide
  Sense strand starting at position 788 of SEQ ID NO: 1460
uugccaguacuagauaauu

SEQ ID NO: 114683 - RNA, 19 nt, Artificial Sequence
  Description of Artificial Sequence: Synthetic oligonucleotide
  Antisense strand to SEQ ID NO: 114682
aauuaucuaguacuggcaa

SEQ ID NO: 114684 - RNA, 19 nt, Artificial Sequence
  Description of Artificial Sequence: Synthetic oligonucleotide
  Sense strand starting at position 978 of SEQ ID NO: 1460
agccauggcagagaguaua

SEQ ID NO: 114685 - RNA, 19 nt, Artificial Sequence
  Description of Artificial Sequence: Synthetic oligonucleotide
  Antisense strand to SEQ ID NO: 114684
uauacucucugccauggcu

SEQ ID NO: 114686 - RNA, 19 nt, Artificial Sequence
  Description of Artificial Sequence: Synthetic oligonucleotide
  Sense strand starting at position 1065 of SEQ ID NO: 1460
cugcgaugggaguauuauu

SEQ ID NO: 114687 - RNA, 19 nt, Artificial Sequence
  Description of Artificial Sequence: Synthetic oligonucleotide
  Antisense strand to SEQ ID NO: 114686
aauaauacucccaucgcag

SEQ ID NO: 114688 - RNA, 19 nt, Artificial Sequence
  Description of Artificial Sequence: Synthetic oligonucleotide
  Sense strand starting at position 1070 of SEQ ID NO: 1460
augggaguauuauugacca

SEQ ID NO: 114689 - RNA, 19 nt, Artificial Sequence
  Description of Artificial Sequence: Synthetic oligonucleotide
  Antisense strand to SEQ ID NO: 114688
uggucaauaauacucccau

SEQ ID NO: 114690 - RNA, 19 nt, Artificial Sequence
  Description of Artificial Sequence: Synthetic oligonucleotide
  Sense strand starting at position 1074 of SEQ ID NO: 1460
gaguauuauugaccaggau

SEQ ID NO: 114691 - RNA, 19 nt, Artificial Sequence
  Description of Artificial Sequence: Synthetic oligonucleotide
  Antisense strand to SEQ ID NO: 114690
auccuggucaauaauacuc

SEQ ID NO: 114692 - RNA, 19 nt, Artificial Sequence
  Description of Artificial Sequence: Synthetic oligonucleotide
  Sense strand starting at position 1222 of SEQ ID NO: 1460
agcaguuggacacggaaua

SEQ ID NO: 114693 - RNA, 19 nt, Artificial Sequence
  Description of Artificial Sequence: Synthetic oligonucleotide
  Antisense strand to SEQ ID NO: 114692
uauuccguguccaacugcu

SEQ ID NO: 114694 - RNA, 19 nt, Artificial Sequence
  Description of Artificial Sequence: Synthetic oligonucleotide
  Sense strand starting at position 1223 of SEQ ID NO: 1460
gcaguuggacacggaauaa

SEQ ID NO: 114695 - RNA, 19 nt, Artificial Sequence
  Description of Artificial Sequence: Synthetic oligonucleotide
  Antisense strand to SEQ ID NO: 114694
uuauuccguguccaacugc

SEQ ID NO: 114696 - RNA, 19 nt, Artificial Sequence
  Description of Artificial Sequence: Synthetic oligonucleotide
  Sense strand starting at position 1394 of SEQ ID NO: 1460
ccauaagguagcugaaaga

SEQ ID NO: 114697 - RNA, 19 nt, Artificial Sequence
  Description of Artificial Sequence: Synthetic oligonucleotide
  Antisense strand to SEQ ID NO: 114696
ucuuucagcuaccuuaugg

SEQ ID NO: 114698 - RNA, 19 nt, Artificial Sequence
  Description of Artificial Sequence: Synthetic oligonucleotide
  Sense strand starting at position 2090 of SEQ ID NO: 1460
caacuugagcugcagagaa

SEQ ID NO: 114699 - RNA, 19 nt, Artificial Sequence
  Description of Artificial Sequence: Synthetic oligonucleotide
  Antisense strand to SEQ ID NO: 114698
uucucugcagcucaaguug

SEQ ID NO: 114700 - RNA, 19 nt, Artificial Sequence
  Description of Artificial Sequence: Synthetic oligonucleotide
  Sense strand starting at position 2092 of SEQ ID NO: 1460
acuugagcugcagagaagu

SEQ ID NO: 114701 - RNA, 19 nt, Artificial Sequence
  Description of Artificial Sequence: Synthetic oligonucleotide
  Antisense strand to SEQ ID NO: 114700
acuucucugcagcucaagu

SEQ ID NO: 114702 - RNA, 19 nt, Artificial Sequence
  Description of Artificial Sequence: Synthetic oligonucleotide
  Sense strand starting at position 2108 of SEQ ID NO: 1460
aguaaagagucagcuaaau

SEQ ID NO: 114703 - RNA, 19 nt, Artificial Sequence
  Description of Artificial Sequence: Synthetic oligonucleotide
  Antisense strand to SEQ ID NO: 114702
auuuagcugacucuuuacu

SEQ ID NO: 114704 - RNA, 19 nt, Artificial Sequence
  Description of Artificial Sequence: Synthetic oligonucleotide
  Sense strand starting at position 2190 of SEQ ID NO: 1460
uguauuuagugcuuuaaac

SEQ ID NO: 114705 - RNA, 19 nt, Artificial Sequence
  Description of Artificial Sequence: Synthetic oligonucleotide
  Antisense strand to SEQ ID NO: 114704
guuuaaagcacuaaauaca

SEQ ID NO: 114706 - RNA, 19 nt, Artificial Sequence
  Description of Artificial Sequence: Synthetic oligonucleotide
  Sense strand starting at position 2269 of SEQ ID NO: 1460
uugauagaugaauguggua

SEQ ID NO: 114707 - RNA, 19 nt, Artificial Sequence
  Description of Artificial Sequence: Synthetic oligonucleotide
  Antisense strand to SEQ ID NO: 114706
uaccacauucaucuaucaa

SEQ ID NO: 114708 - RNA, 19 nt, Artificial Sequence
  Description of Artificial Sequence: Synthetic oligonucleotide
  Sense strand starting at position 2274 of SEQ ID NO: 1460
agaugaaugugguaauuua

SEQ ID NO: 114709 - RNA, 19 nt, Artificial Sequence
  Description of Artificial Sequence: Synthetic oligonucleotide
  Antisense strand to SEQ ID NO: 114708
uaaauuaccacauucaucu

SEQ ID NO: 114710 - RNA, 19 nt, Artificial Sequence
  Description of Artificial Sequence: Synthetic oligonucleotide
  Sense strand starting at position 2291 of SEQ ID NO: 1460
uauagauaugugcagucau

SEQ ID NO: 114711 - RNA, 19 nt, Artificial Sequence
  Description of Artificial Sequence: Synthetic oligonucleotide
  Antisense strand to SEQ ID NO: 114710
augacugcacauaucuaua

SEQ ID NO: 114712 - RNA, 19 nt, Artificial Sequence
  Description of Artificial Sequence: Synthetic oligonucleotide
  Sense strand starting at position 2346 of SEQ ID NO: 1460
gguauuaauguguaucuau

SEQ ID NO: 114713 - RNA, 19 nt, Artificial Sequence
  Description of Artificial Sequence: Synthetic oligonucleotide
  Antisense strand to SEQ ID NO: 114712
auagauacacauuaauacc

SEQ ID NO: 114714 - RNA, 19 nt, Artificial Sequence
  Description of Artificial Sequence: Synthetic oligonucleotide
  Sense strand starting at position 2357 of SEQ ID NO: 1460
guaucuaucuaucuaggga

SEQ ID NO: 114715 - RNA, 19 nt, Artificial Sequence
  Description of Artificial Sequence: Synthetic oligonucleotide
  Antisense strand to SEQ ID NO: 114714
ucccuagauagauagauac

SEQ ID NO: 114716 - RNA, 19 nt, Artificial Sequence
  Description of Artificial Sequence: Synthetic oligonucleotide
  Sense strand starting at position 2443 of SEQ ID NO: 1460
gguauauuccauuagugau

SEQ ID NO: 114717 - RNA, 19 nt, Artificial Sequence
  Description of Artificial Sequence: Synthetic oligonucleotide
  Antisense strand to SEQ ID NO: 114716
aucacuaauggaauauacc

SEQ ID NO: 114718 - RNA, 19 nt, Artificial Sequence
  Description of Artificial Sequence: Synthetic oligonucleotide
  Sense strand starting at position 2492 of SEQ ID NO: 1460
acagccauaccuggaaaua

SEQ ID NO: 114719 - RNA, 19 nt, Artificial Sequence
  Description of Artificial Sequence: Synthetic oligonucleotide
  Antisense strand to SEQ ID NO: 114718
uauuuccagguauggcugu

SEQ ID NO: 114720 - RNA, 19 nt, Artificial Sequence
  Description of Artificial Sequence: Synthetic oligonucleotide
  Sense strand starting at position 2585 of SEQ ID NO: 1460
gaguguuuauuucuaagcu

SEQ ID NO: 114721 - RNA, 19 nt, Artificial Sequence
  Description of Artificial Sequence: Synthetic oligonucleotide
  Antisense strand to SEQ ID NO: 114720
agcuuagaaauaaacacuc

SEQ ID NO: 114722 - RNA, 19 nt, Artificial Sequence
  Description of Artificial Sequence: Synthetic oligonucleotide
  Sense strand starting at position 2703 of SEQ ID NO: 1460
ucaaccuuacuggagcaau

SEQ ID NO: 114723 - RNA, 19 nt, Artificial Sequence
  Description of Artificial Sequence: Synthetic oligonucleotide
  Antisense strand to SEQ ID NO: 114722
auugcuccaguaagguuga

SEQ ID NO: 114724 - RNA, 19 nt, Artificial Sequence
  Description of Artificial Sequence: Synthetic oligonucleotide
  Sense strand starting at position 2777 of SEQ ID NO: 1460
gguagccacccugaaacau

SEQ ID NO: 114725 - RNA, 19 nt, Artificial Sequence
  Description of Artificial Sequence: Synthetic oligonucleotide
  Antisense strand to SEQ ID NO: 114724
auguuucaggguggcuacc

SEQ ID NO: 114726 - RNA, 19 nt, Artificial Sequence
  Description of Artificial Sequence: Synthetic oligonucleotide
  Sense strand starting at position 3143 of SEQ ID NO: 1460
acauaaauggcaugaaguu

SEQ ID NO: 114727 - RNA, 19 nt, Artificial Sequence
  Description of Artificial Sequence: Synthetic oligonucleotide
  Antisense strand to SEQ ID NO: 114726
aacuucaugccauuuaugu

SEQ ID NO: 114728 - RNA, 19 nt, Artificial Sequence
  Description of Artificial Sequence: Synthetic oligonucleotide
  Sense strand starting at position 3436 of SEQ ID NO: 1460
cuuaucuaucuauguagga

SEQ ID NO: 114729 - RNA, 19 nt, Artificial Sequence
  Description of Artificial Sequence: Synthetic oligonucleotide
  Antisense strand to SEQ ID NO: 114728
uccuacauagauagauaag

SEQ ID NO: 114730 - RNA, 19 nt, Artificial Sequence
  Description of Artificial Sequence: Synthetic oligonucleotide
  Sense strand starting at position 3437 of SEQ ID NO: 1460
uuaucuaucuauguaggau

SEQ ID NO: 114731 - RNA, 19 nt, Artificial Sequence
  Description of Artificial Sequence: Synthetic oligonucleotide
  Antisense strand to SEQ ID NO: 114730
auccuacauagauagauaa

SEQ ID NO: 114732 - RNA, 19 nt, Artificial Sequence
  Description of Artificial Sequence: Synthetic oligonucleotide
  Sense strand starting at position 3440 of SEQ ID NO: 1460
ucuaucuauguaggauaaa

SEQ ID NO: 114733 - RNA, 19 nt, Artificial Sequence
  Description of Artificial Sequence: Synthetic oligonucleotide
  Antisense strand to SEQ ID NO: 114732
uuuauccuacauagauaga

SEQ ID NO: 114734 - RNA, 19 nt, Artificial Sequence
  Description of Artificial Sequence: Synthetic oligonucleotide
  Sense strand starting at position 3529 of SEQ ID NO: 1460
caugacugugcagauugaa

SEQ ID NO: 114735 - RNA, 19 nt, Artificial Sequence
  Description of Artificial Sequence: Synthetic oligonucleotide
  Antisense strand to SEQ ID NO: 114734
uucaaucugcacagucaug

SEQ ID NO: 114736 - RNA, 19 nt, Artificial Sequence
  Description of Artificial Sequence: Synthetic oligonucleotide
  Sense strand starting at position 3550 of SEQ ID NO: 1460
ugaauuugcagaggugugu

SEQ ID NO: 114737 - RNA, 19 nt, Artificial Sequence
  Description of Artificial Sequence: Synthetic oligonucleotide
  Antisense strand to SEQ ID NO: 114736
acacaccucugcaaauuca

SEQ ID NO: 114738 - RNA, 19 nt, Artificial Sequence
  Description of Artificial Sequence: Synthetic oligonucleotide
  Sense strand starting at position 3568 of SEQ ID NO: 1460
uuggcugaaugauuauaau

SEQ ID NO: 114739 - RNA, 19 nt, Artificial Sequence
  Description of Artificial Sequence: Synthetic oligonucleotide
  Antisense strand to SEQ ID NO: 114738
auuauaaucauucagccaa

SEQ ID NO: 114740 - RNA, 19 nt, Artificial Sequence
  Description of Artificial Sequence: Synthetic oligonucleotide
  Sense strand starting at position 3695 of SEQ ID NO: 1460
ucucaauuagcagacagua

SEQ ID NO: 114741 - RNA, 19 nt, Artificial Sequence
  Description of Artificial Sequence: Synthetic oligonucleotide
  Antisense strand to SEQ ID NO: 114740
uacugucugcuaauugaga

SEQ ID NO: 114742 - RNA, 19 nt, Artificial Sequence
  Description of Artificial Sequence: Synthetic oligonucleotide
  Sense strand starting at position 3708 of SEQ ID NO: 1460
acaguaguacauuauacuu

SEQ ID NO: 114743 - RNA, 19 nt, Artificial Sequence
  Description of Artificial Sequence: Synthetic oligonucleotide
  Antisense strand to SEQ ID NO: 114742
aaguauaauguacuacugu

SEQ ID NO: 114744 - RNA, 19 nt, Artificial Sequence
  Description of Artificial Sequence: Synthetic oligonucleotide
  Sense strand starting at position 3718 of SEQ ID NO: 1460
auuauacuuguuugaguag

SEQ ID NO: 114745 - RNA, 19 nt, Artificial Sequence
  Description of Artificial Sequence: Synthetic oligonucleotide
  Antisense strand to SEQ ID NO: 114744
cuacucaaacaaguauaau

SEQ ID NO: 114746 - RNA, 19 nt, Artificial Sequence
  Description of Artificial Sequence: Synthetic oligonucleotide
  Sense strand starting at position 3959 of SEQ ID NO: 1460
gaaugucauuuguaacaag

SEQ ID NO: 114747 - RNA, 19 nt, Artificial Sequence
  Description of Artificial Sequence: Synthetic oligonucleotide
  Antisense strand to SEQ ID NO: 114746
cuuguuacaaaugacauuc

SEQ ID NO: 114748 - RNA, 19 nt, Artificial Sequence
  Description of Artificial Sequence: Synthetic oligonucleotide
  Sense strand starting at position 3962 of SEQ ID NO: 1460
ugucauuuguaacaagaag

SEQ ID NO: 114749 - RNA, 19 nt, Artificial Sequence
  Description of Artificial Sequence: Synthetic oligonucleotide
  Antisense strand to SEQ ID NO: 114748
cuucuuguuacaaaugaca

SEQ ID NO: 114750 - RNA, 19 nt, Artificial Sequence
  Description of Artificial Sequence: Synthetic oligonucleotide
  Sense strand starting at position 3979 of SEQ ID NO: 1460
aguuaauaagaaggcaaau

SEQ ID NO: 114751 - RNA, 19 nt, Artificial Sequence
  Description of Artificial Sequence: Synthetic oligonucleotide
  Antisense strand to SEQ ID NO: 114750
auuugccuucuuauuaacu

SEQ ID NO: 114752 - RNA, 19 nt, Artificial Sequence
  Description of Artificial Sequence: Synthetic oligonucleotide
  Sense strand starting at position 95 of SEQ ID NO: 1461
cucuuauggucuuuaucua

SEQ ID NO: 114753 - RNA, 19 nt, Artificial Sequence
  Description of Artificial Sequence: Synthetic oligonucleotide
  Antisense strand to SEQ ID NO: 114752
uagauaaagaccauaagag

SEQ ID NO: 114754 - RNA, 19 nt, Artificial Sequence
  Description of Artificial Sequence: Synthetic oligonucleotide
  Sense strand starting at position 96 of SEQ ID NO: 1461
ucuuauggucuuuaucuau

SEQ ID NO: 114755 - RNA, 19 nt, Artificial Sequence
  Description of Artificial Sequence: Synthetic oligonucleotide
  Antisense strand to SEQ ID NO: 114754
auagauaaagaccauaaga

SEQ ID NO: 114756 - RNA, 19 nt, Artificial Sequence
  Description of Artificial Sequence: Synthetic oligonucleotide
  Sense strand starting at position 157 of SEQ ID NO: 1461
aaguuuaaguacuugguaa

SEQ ID NO: 114757 - RNA, 19 nt, Artificial Sequence
  Description of Artificial Sequence: Synthetic oligonucleotide
  Antisense strand to SEQ ID NO: 114756
uuaccaaguacuuaaacuu

SEQ ID NO: 114758 - RNA, 19 nt, Artificial Sequence
  Description of Artificial Sequence: Synthetic oligonucleotide
  Sense strand starting at position 159 of SEQ ID NO: 1461
guuuaaguacuugguaaac

SEQ ID NO: 114759 - RNA, 19 nt, Artificial Sequence
  Description of Artificial Sequence: Synthetic oligonucleotide
  Antisense strand to SEQ ID NO: 114758
guuuaccaaguacuuaaac

SEQ ID NO: 114760 - RNA, 19 nt, Artificial Sequence
  Description of Artificial Sequence: Synthetic oligonucleotide
  Sense strand starting at position 387 of SEQ ID NO: 1461
cauaaaguaucucccgaug

SEQ ID NO: 114761 - RNA, 19 nt, Artificial Sequence
  Description of Artificial Sequence: Synthetic oligonucleotide
  Antisense strand to SEQ ID NO: 114760
caucgggagauacuuuaug

SEQ ID NO: 114762 - RNA, 19 nt, Artificial Sequence
  Description of Artificial Sequence: Synthetic oligonucleotide
  Sense strand starting at position 392 of SEQ ID NO: 1461
aguaucucccgaugggaua

SEQ ID NO: 114763 - RNA, 19 nt, Artificial Sequence
  Description of Artificial Sequence: Synthetic oligonucleotide
  Antisense strand to SEQ ID NO: 114762
uaucccaucgggagauacu

SEQ ID NO: 114764 - RNA, 19 nt, Artificial Sequence
  Description of Artificial Sequence: Synthetic oligonucleotide
  Sense strand starting at position 393 of SEQ ID NO: 1461
guaucucccgaugggauau

SEQ ID NO: 114765 - RNA, 19 nt, Artificial Sequence
  Description of Artificial Sequence: Synthetic oligonucleotide
  Antisense strand to SEQ ID NO: 114764
auaucccaucgggagauac

SEQ ID NO: 114766 - RNA, 19 nt, Artificial Sequence
  Description of Artificial Sequence: Synthetic oligonucleotide
  Sense strand starting at position 417 of SEQ ID NO: 1461
cugccuccuggucaacaua

SEQ ID NO: 114767 - RNA, 19 nt, Artificial Sequence
  Description of Artificial Sequence: Synthetic oligonucleotide
  Antisense strand to SEQ ID NO: 114766
uauguugaccaggaggcag

SEQ ID NO: 114768 - RNA, 19 nt, Artificial Sequence
  Description of Artificial Sequence: Synthetic oligonucleotide
  Sense strand starting at position 780 of SEQ ID NO: 1461
ucugcauccuaccugagau

SEQ ID NO: 114769 - RNA, 19 nt, Artificial Sequence
  Description of Artificial Sequence: Synthetic oligonucleotide
  Antisense strand to SEQ ID NO: 114768
aucucagguaggaugcaga

SEQ ID NO: 114770 - RNA, 19 nt, Artificial Sequence
  Description of Artificial Sequence: Synthetic oligonucleotide
  Sense strand starting at position 782 of SEQ ID NO: 1461
ugcauccuaccugagauaa

SEQ ID NO: 114771 - RNA, 19 nt, Artificial Sequence
  Description of Artificial Sequence: Synthetic oligonucleotide
  Antisense strand to SEQ ID NO: 114770
uuaucucagguaggaugca

SEQ ID NO: 114772 - RNA, 19 nt, Artificial Sequence
  Description of Artificial Sequence: Synthetic oligonucleotide
  Sense strand starting at position 920 of SEQ ID NO: 1461
ccacaaucagagcgaagua

SEQ ID NO: 114773 - RNA, 19 nt, Artificial Sequence
  Description of Artificial Sequence: Synthetic oligonucleotide
  Antisense strand to SEQ ID NO: 114772
uacuucgcucugauugugg

SEQ ID NO: 114774 - RNA, 19 nt, Artificial Sequence
  Description of Artificial Sequence: Synthetic oligonucleotide
  Sense strand starting at position 1684 of SEQ ID NO: 1461
accauucuuggcgagaaga

SEQ ID NO: 114775 - RNA, 19 nt, Artificial Sequence
  Description of Artificial Sequence: Synthetic oligonucleotide
  Antisense strand to SEQ ID NO: 114774
ucuucucgccaagaauggu

SEQ ID NO: 114776 - RNA, 19 nt, Artificial Sequence
  Description of Artificial Sequence: Synthetic oligonucleotide
  Sense strand starting at position 1740 of SEQ ID NO: 1461
ggcugagcuaguuagggau

SEQ ID NO: 114777 - RNA, 19 nt, Artificial Sequence
  Description of Artificial Sequence: Synthetic oligonucleotide
  Antisense strand to SEQ ID NO: 114776
aucccuaacuagcucagcc

SEQ ID NO: 114778 - RNA, 19 nt, Artificial Sequence
  Description of Artificial Sequence: Synthetic oligonucleotide
  Sense strand starting at position 1792 of SEQ ID NO: 1461
gggagaaggcgcguuuguu

SEQ ID NO: 114779 - RNA, 19 nt, Artificial Sequence
  Description of Artificial Sequence: Synthetic oligonucleotide
  Antisense strand to SEQ ID NO: 114778
aacaaacgcgccuucuccc

SEQ ID NO: 114780 - RNA, 19 nt, Artificial Sequence
  Description of Artificial Sequence: Synthetic oligonucleotide
  Sense strand starting at position 1793 of SEQ ID NO: 1461
ggagaaggcgcguuuguuc

SEQ ID NO: 114781 - RNA, 19 nt, Artificial Sequence
  Description of Artificial Sequence: Synthetic oligonucleotide
  Antisense strand to SEQ ID NO: 114780
gaacaaacgcgccuucucc

SEQ ID NO: 114782 - RNA, 19 nt, Artificial Sequence
  Description of Artificial Sequence: Synthetic oligonucleotide
  Sense strand starting at position 1844 of SEQ ID NO: 1461
gcgaguucucgggcagcuu

SEQ ID NO: 114783 - RNA, 19 nt, Artificial Sequence
  Description of Artificial Sequence: Synthetic oligonucleotide
  Antisense strand to SEQ ID NO: 114782
aagcugcccgagaacucgc

SEQ ID NO: 114784 - RNA, 19 nt, Artificial Sequence
  Description of Artificial Sequence: Synthetic oligonucleotide
  Sense strand starting at position 1864 of SEQ ID NO: 1461
gaacuuagcgccguuggua

SEQ ID NO: 114785 - RNA, 19 nt, Artificial Sequence
  Description of Artificial Sequence: Synthetic oligonucleotide
  Antisense strand to SEQ ID NO: 114784
uaccaacggcgcuaaguuc

SEQ ID NO: 114786 - RNA, 19 nt, Artificial Sequence
  Description of Artificial Sequence: Synthetic oligonucleotide
  Sense strand starting at position 1940 of SEQ ID NO: 1461
uugaauuccuuccuagagu

SEQ ID NO: 114787 - RNA, 19 nt, Artificial Sequence
  Description of Artificial Sequence: Synthetic oligonucleotide
  Antisense strand to SEQ ID NO: 114786
acucuaggaaggaauucaa

SEQ ID NO: 114788 - RNA, 19 nt, Artificial Sequence
  Description of Artificial Sequence: Synthetic oligonucleotide
  Sense strand starting at position 1957 of SEQ ID NO: 1461
guguguccugaguugugua

SEQ ID NO: 114789 - RNA, 19 nt, Artificial Sequence
  Description of Artificial Sequence: Synthetic oligonucleotide
  Antisense strand to SEQ ID NO: 114788
uacacaacucaggacacac

SEQ ID NO: 114790 - RNA, 19 nt, Artificial Sequence
  Description of Artificial Sequence: Synthetic oligonucleotide
  Sense strand starting at position 1965 of SEQ ID NO: 1461
ugaguuguguaaacguuga

SEQ ID NO: 114791 - RNA, 19 nt, Artificial Sequence
  Description of Artificial Sequence: Synthetic oligonucleotide
  Antisense strand to SEQ ID NO: 114790
ucaacguuuacacaacuca

SEQ ID NO: 114792 - RNA, 19 nt, Artificial Sequence
  Description of Artificial Sequence: Synthetic oligonucleotide
  Sense strand starting at position 2096 of SEQ ID NO: 1461
gggacaaaucuccgggucu

SEQ ID NO: 114793 - RNA, 19 nt, Artificial Sequence
  Description of Artificial Sequence: Synthetic oligonucleotide
  Antisense strand to SEQ ID NO: 114792
agacccggagauuuguccc

SEQ ID NO: 114794 - RNA, 19 nt, Artificial Sequence
  Description of Artificial Sequence: Synthetic oligonucleotide
  Sense strand starting at position 2098 of SEQ ID NO: 1461
gacaaaucuccgggucucu

SEQ ID NO: 114795 - RNA, 19 nt, Artificial Sequence
  Description of Artificial Sequence: Synthetic oligonucleotide
  Antisense strand to SEQ ID NO: 114794
agagacccggagauuuguc

SEQ ID NO: 114796 - RNA, 19 nt, Artificial Sequence
  Description of Artificial Sequence: Synthetic oligonucleotide
  Sense strand starting at position 2109 of SEQ ID NO: 1461
gggucucuguuaccagauu

SEQ ID NO: 114797 - RNA, 19 nt, Artificial Sequence
  Description of Artificial Sequence: Synthetic oligonucleotide
  Antisense strand to SEQ ID NO: 114796
aaucugguaacagagaccc

SEQ ID NO: 114798 - RNA, 19 nt, Artificial Sequence
  Description of Artificial Sequence: Synthetic oligonucleotide
  Sense strand starting at position 2263 of SEQ ID NO: 1461
ggacaacugucacucggaa

SEQ ID NO: 114799 - RNA, 19 nt, Artificial Sequence
  Description of Artificial Sequence: Synthetic oligonucleotide
  Antisense strand to SEQ ID NO: 114798
uuccgagugacaguugucc

SEQ ID NO: 114800 - RNA, 19 nt, Artificial Sequence
  Description of Artificial Sequence: Synthetic oligonucleotide
  Sense strand starting at position 2270 of SEQ ID NO: 1461
ugucacucggaauauugaa

SEQ ID NO: 114801 - RNA, 19 nt, Artificial Sequence
  Description of Artificial Sequence: Synthetic oligonucleotide
  Antisense strand to SEQ ID NO: 114800
uucaauauuccgagugaca

SEQ ID NO: 114802 - RNA, 19 nt, Artificial Sequence
  Description of Artificial Sequence: Synthetic oligonucleotide
  Sense strand starting at position 2314 of SEQ ID NO: 1461
uuaugcacccuugggaaau

SEQ ID NO: 114803 - RNA, 19 nt, Artificial Sequence
  Description of Artificial Sequence: Synthetic oligonucleotide
  Antisense strand to SEQ ID NO: 114802
auuucccaagggugcauaa

SEQ ID NO: 114804 - RNA, 19 nt, Artificial Sequence
  Description of Artificial Sequence: Synthetic oligonucleotide
  Sense strand starting at position 2344 of SEQ ID NO: 1461
gcuucuuaugcugaggaau

SEQ ID NO: 114805 - RNA, 19 nt, Artificial Sequence
  Description of Artificial Sequence: Synthetic oligonucleotide
  Antisense strand to SEQ ID NO: 114804
auuccucagcauaagaagc

SEQ ID NO: 114806 - RNA, 19 nt, Artificial Sequence
  Description of Artificial Sequence: Synthetic oligonucleotide
  Sense strand starting at position 2381 of SEQ ID NO: 1461
aggaaacuagcgcauauaa

SEQ ID NO: 114807 - RNA, 19 nt, Artificial Sequence
  Description of Artificial Sequence: Synthetic oligonucleotide
  Antisense strand to SEQ ID NO: 114806
uuauaugcgcuaguuuccu

SEQ ID NO: 114808 - RNA, 19 nt, Artificial Sequence
  Description of Artificial Sequence: Synthetic oligonucleotide
  Sense strand starting at position 2383 of SEQ ID NO: 1461
gaaacuagcgcauauaagu

SEQ ID NO: 114809 - RNA, 19 nt, Artificial Sequence
  Description of Artificial Sequence: Synthetic oligonucleotide
  Antisense strand to SEQ ID NO: 114808
acuuauaugcgcuaguuuc

SEQ ID NO: 114810 - RNA, 19 nt, Artificial Sequence
  Description of Artificial Sequence: Synthetic oligonucleotide
  Sense strand starting at position 2588 of SEQ ID NO: 1461
gguguauuugauuguuugu

SEQ ID NO: 114811 - RNA, 19 nt, Artificial Sequence
  Description of Artificial Sequence: Synthetic oligonucleotide
  Antisense strand to SEQ ID NO: 114810
acaaacaaucaaauacacc

SEQ ID NO: 114812 - RNA, 19 nt, Artificial Sequence
  Description of Artificial Sequence: Synthetic oligonucleotide
  Sense strand starting at position 3143 of SEQ ID NO: 1461
uacaguaagcauugaaugu

SEQ ID NO: 114813 - RNA, 19 nt, Artificial Sequence
  Description of Artificial Sequence: Synthetic oligonucleotide
  Antisense strand to SEQ ID NO: 114812
acauucaaugcuuacugua

SEQ ID NO: 114814 - RNA, 19 nt, Artificial Sequence
  Description of Artificial Sequence: Synthetic oligonucleotide
  Sense strand starting at position 3153 of SEQ ID NO: 1461
auugaauguugauuaagug

SEQ ID NO: 114815 - RNA, 19 nt, Artificial Sequence
  Description of Artificial Sequence: Synthetic oligonucleotide
  Antisense strand to SEQ ID NO: 114814
cacuuaaucaacauucaau

SEQ ID NO: 114816 - RNA, 19 nt, Artificial Sequence
  Description of Artificial Sequence: Synthetic oligonucleotide
  Sense strand starting at position 3160 of SEQ ID NO: 1461
guugauuaagugcaagaca

SEQ ID NO: 114817 - RNA, 19 nt, Artificial Sequence
  Description of Artificial Sequence: Synthetic oligonucleotide
  Antisense strand to SEQ ID NO: 114816
ugucuugcacuuaaucaac

SEQ ID NO: 114818 - RNA, 19 nt, Artificial Sequence
  Description of Artificial Sequence: Synthetic oligonucleotide
  Sense strand starting at position 3273 of SEQ ID NO: 1461
gaaauugugaggcagagua

SEQ ID NO: 114819 - RNA, 19 nt, Artificial Sequence
  Description of Artificial Sequence: Synthetic oligonucleotide
  Antisense strand to SEQ ID NO: 114818
uacucugccucacaauuuc

SEQ ID NO: 114820 - RNA, 19 nt, Artificial Sequence
  Description of Artificial Sequence: Synthetic oligonucleotide
  Sense strand starting at position 3337 of SEQ ID NO: 1461
uggaaaggucaguguggau

SEQ ID NO: 114821 - RNA, 19 nt, Artificial Sequence
  Description of Artificial Sequence: Synthetic oligonucleotide
  Antisense strand to SEQ ID NO: 114820
auccacacugaccuuucca

SEQ ID NO: 114822 - RNA, 19 nt, Artificial Sequence
  Description of Artificial Sequence: Synthetic oligonucleotide
  Sense strand starting at position 3375 of SEQ ID NO: 1461
gaagaugacugggaugaug

SEQ ID NO: 114823 - RNA, 19 nt, Artificial Sequence
  Description of Artificial Sequence: Synthetic oligonucleotide
  Antisense strand to SEQ ID NO: 114822
caucaucccagucaucuuc

SEQ ID NO: 114824 - RNA, 19 nt, Artificial Sequence
  Description of Artificial Sequence: Synthetic oligonucleotide
  Sense strand starting at position 3461 of SEQ ID NO: 1461
gagagcauucugggcaaag

SEQ ID NO: 114825 - RNA, 19 nt, Artificial Sequence
  Description of Artificial Sequence: Synthetic oligonucleotide
  Antisense strand to SEQ ID NO: 114824
cuuugcccagaaugcucuc

SEQ ID NO: 114826 - RNA, 19 nt, Artificial Sequence
  Description of Artificial Sequence: Synthetic oligonucleotide
  Sense strand starting at position 3463 of SEQ ID NO: 1461
gagcauucugggcaaagac

SEQ ID NO: 114827 - RNA, 19 nt, Artificial Sequence
  Description of Artificial Sequence: Synthetic oligonucleotide
  Antisense strand to SEQ ID NO: 114826
gucuuugcccagaaugcuc

SEQ ID NO: 114828 - RNA, 19 nt, Artificial Sequence
  Description of Artificial Sequence: Synthetic oligonucleotide
  Sense strand starting at position 3864 of SEQ ID NO: 1461
ggugcauuugacugcaagu

SEQ ID NO: 114829 - RNA, 19 nt, Artificial Sequence
  Description of Artificial Sequence: Synthetic oligonucleotide
  Antisense strand to SEQ ID NO: 114828
acuugcagucaaaugcacc

SEQ ID NO: 114830 - RNA, 19 nt, Artificial Sequence
  Description of Artificial Sequence: Synthetic oligonucleotide
  Sense strand starting at position 3899 of SEQ ID NO: 1461
aggaaugucucagucaaau

SEQ ID NO: 114831 - RNA, 19 nt, Artificial Sequence
  Description of Artificial Sequence: Synthetic oligonucleotide
  Antisense strand to SEQ ID NO: 114830
auuugacugagacauuccu

SEQ ID NO: 114832 - RNA, 19 nt, Artificial Sequence
  Description of Artificial Sequence: Synthetic oligonucleotide
  Sense strand starting at position 3482 of SEQ ID NO: 1462
ucucuaguacucuacugau

SEQ ID NO: 114833 - RNA, 19 nt, Artificial Sequence
  Description of Artificial Sequence: Synthetic oligonucleotide
  Antisense strand to SEQ ID NO: 114832
aucaguagaguacuagaga

SEQ ID NO: 114834 - RNA, 19 nt, Artificial Sequence
  Description of Artificial Sequence: Synthetic oligonucleotide
  Sense strand starting at position 3474 of SEQ ID NO: 1462
ugaaauugucucuaguacu

SEQ ID NO: 114835 - RNA, 19 nt, Artificial Sequence
  Description of Artificial Sequence: Synthetic oligonucleotide
  Antisense strand to SEQ ID NO: 114834
aguacuagagacaauuuca

SEQ ID NO: 114836 - RNA, 19 nt, Artificial Sequence
  Description of Artificial Sequence: Synthetic oligonucleotide
  Sense strand starting at position 3473 of SEQ ID NO: 1462
augaaauugucucuaguac

SEQ ID NO: 114837 - RNA, 19 nt, Artificial Sequence
  Description of Artificial Sequence: Synthetic oligonucleotide
  Antisense strand to SEQ ID NO: 114836
guacuagagacaauuucau

SEQ ID NO: 114838 - RNA, 19 nt, Artificial Sequence
  Description of Artificial Sequence: Synthetic oligonucleotide
  Sense strand starting at position 3471 of SEQ ID NO: 1462
gaaugaaauugucucuagu

SEQ ID NO: 114839 - RNA, 19 nt, Artificial Sequence
  Description of Artificial Sequence: Synthetic oligonucleotide
  Antisense strand to SEQ ID NO: 114838
acuagagacaauuucauuc

SEQ ID NO: 114840 - RNA, 19 nt, Artificial Sequence
  Description of Artificial Sequence: Synthetic oligonucleotide
  Sense strand starting at position 3462 of SEQ ID NO: 1462
uugugugaagaaugaaauu

SEQ ID NO: 114841 - RNA, 19 nt, Artificial Sequence
  Description of Artificial Sequence: Synthetic oligonucleotide
  Antisense strand to SEQ ID NO: 114840
aauuucauucuucacacaa

SEQ ID NO: 114842 - RNA, 19 nt, Artificial Sequence
  Description of Artificial Sequence: Synthetic oligonucleotide
  Sense strand starting at position 3456 of SEQ ID NO: 1462
ggagauuugugugaagaau

SEQ ID NO: 114843 - RNA, 19 nt, Artificial Sequence
  Description of Artificial Sequence: Synthetic oligonucleotide
  Antisense strand to SEQ ID NO: 114842
auucuucacacaaaucucc

SEQ ID NO: 114844 - RNA, 19 nt, Artificial Sequence
  Description of Artificial Sequence: Synthetic oligonucleotide
  Sense strand starting at position 3418 of SEQ ID NO: 1462
ggaaguauucccugccaaa

SEQ ID NO: 114845 - RNA, 19 nt, Artificial Sequence
  Description of Artificial Sequence: Synthetic oligonucleotide
  Antisense strand to SEQ ID NO: 114844
uuuggcagggaauacuucc

SEQ ID NO: 114846 - RNA, 19 nt, Artificial Sequence
  Description of Artificial Sequence: Synthetic oligonucleotide
  Sense strand starting at position 3405 of SEQ ID NO: 1462
cacugcauucuugggaagu

SEQ ID NO: 114847 - RNA, 19 nt, Artificial Sequence
  Description of Artificial Sequence: Synthetic oligonucleotide
  Antisense strand to SEQ ID NO: 114846
acuucccaagaaugcagug

SEQ ID NO: 114848 - RNA, 19 nt, Artificial Sequence
  Description of Artificial Sequence: Synthetic oligonucleotide
  Sense strand starting at position 3403 of SEQ ID NO: 1462
gacacugcauucuugggaa

SEQ ID NO: 114849 - RNA, 19 nt, Artificial Sequence
  Description of Artificial Sequence: Synthetic oligonucleotide
  Antisense strand to SEQ ID NO: 114848
uucccaagaaugcaguguc

SEQ ID NO: 114850 - RNA, 19 nt, Artificial Sequence
  Description of Artificial Sequence: Synthetic oligonucleotide
  Sense strand starting at position 3370 of SEQ ID NO: 1462
gucagauccagaugaugug

SEQ ID NO: 114851 - RNA, 19 nt, Artificial Sequence
  Description of Artificial Sequence: Synthetic oligonucleotide
  Antisense strand to SEQ ID NO: 114850
cacaucaucuggaucugac

SEQ ID NO: 114852 - RNA, 19 nt, Artificial Sequence
  Description of Artificial Sequence: Synthetic oligonucleotide
  Sense strand starting at position 3191 of SEQ ID NO: 1462
augagagguuccuucugua

SEQ ID NO: 114853 - RNA, 19 nt, Artificial Sequence
  Description of Artificial Sequence: Synthetic oligonucleotide
  Antisense strand to SEQ ID NO: 114852
uacagaaggaaccucucau

SEQ ID NO: 114854 - RNA, 19 nt, Artificial Sequence
  Description of Artificial Sequence: Synthetic oligonucleotide
  Sense strand starting at position 3178 of SEQ ID NO: 1462
ucaacagaaucugaugaga

SEQ ID NO: 114855 - RNA, 19 nt, Artificial Sequence
  Description of Artificial Sequence: Synthetic oligonucleotide
  Antisense strand to SEQ ID NO: 114854
ucucaucagauucuguuga

SEQ ID NO: 114856 - RNA, 19 nt, Artificial Sequence
  Description of Artificial Sequence: Synthetic oligonucleotide
  Sense strand starting at position 3115 of SEQ ID NO: 1462
ugcagucauuaaucgaaac

SEQ ID NO: 114857 - RNA, 19 nt, Artificial Sequence
  Description of Artificial Sequence: Synthetic oligonucleotide
  Antisense strand to SEQ ID NO: 114856
guuucgauuaaugacugca

SEQ ID NO: 114858 - RNA, 19 nt, Artificial Sequence
  Description of Artificial Sequence: Synthetic oligonucleotide
  Sense strand starting at position 3112 of SEQ ID NO: 1462
accugcagucauuaaucga

SEQ ID NO: 114859 - RNA, 19 nt, Artificial Sequence
  Description of Artificial Sequence: Synthetic oligonucleotide
  Antisense strand to SEQ ID NO: 114858
ucgauuaaugacugcaggu

SEQ ID NO: 114860 - RNA, 19 nt, Artificial Sequence
  Description of Artificial Sequence: Synthetic oligonucleotide
  Sense strand starting at position 3105 of SEQ ID NO: 1462
cucagagaccugcagucau

SEQ ID NO: 114861 - RNA, 19 nt, Artificial Sequence
  Description of Artificial Sequence: Synthetic oligonucleotide
  Antisense strand to SEQ ID NO: 114860
augacugcaggucucugag

SEQ ID NO: 114862 - RNA, 19 nt, Artificial Sequence
  Description of Artificial Sequence: Synthetic oligonucleotide
  Sense strand starting at position 3097 of SEQ ID NO: 1462
agcauuuacucagagaccu

SEQ ID NO: 114863 - RNA, 19 nt, Artificial Sequence
  Description of Artificial Sequence: Synthetic oligonucleotide
  Antisense strand to SEQ ID NO: 114862
aggucucugaguaaaugcu

SEQ ID NO: 114864 - RNA, 19 nt, Artificial Sequence
  Description of Artificial Sequence: Synthetic oligonucleotide
  Sense strand starting at position 2972 of SEQ ID NO: 1462
uucugaguguuucucauuu

SEQ ID NO: 114865 - RNA, 19 nt, Artificial Sequence
  Description of Artificial Sequence: Synthetic oligonucleotide
  Antisense strand to SEQ ID NO: 114864
aaaugagaaacacucagaa

SEQ ID NO: 114866 - RNA, 19 nt, Artificial Sequence
  Description of Artificial Sequence: Synthetic oligonucleotide
  Sense strand starting at position 2970 of SEQ ID NO: 1462
auuucugaguguuucucau

SEQ ID NO: 114867 - RNA, 19 nt, Artificial Sequence
  Description of Artificial Sequence: Synthetic oligonucleotide
  Antisense strand to SEQ ID NO: 114866
augagaaacacucagaaau

SEQ ID NO: 114868 - RNA, 19 nt, Artificial Sequence
  Description of Artificial Sequence: Synthetic oligonucleotide
  Sense strand starting at position 2967 of SEQ ID NO: 1462
gguauuucugaguguuucu

SEQ ID NO: 114869 - RNA, 19 nt, Artificial Sequence
  Description of Artificial Sequence: Synthetic oligonucleotide
  Antisense strand to SEQ ID NO: 114868
agaaacacucagaaauacc

SEQ ID NO: 114870 - RNA, 19 nt, Artificial Sequence
  Description of Artificial Sequence: Synthetic oligonucleotide
  Sense strand starting at position 2966 of SEQ ID NO: 1462
ggguauuucugaguguuuc

SEQ ID NO: 114871 - RNA, 19 nt, Artificial Sequence
  Description of Artificial Sequence: Synthetic oligonucleotide
  Antisense strand to SEQ ID NO: 114870
gaaacacucagaaauaccc

SEQ ID NO: 114872 - RNA, 19 nt, Artificial Sequence
  Description of Artificial Sequence: Synthetic oligonucleotide
  Sense strand starting at position 2936 of SEQ ID NO: 1462
uugguuauuucucuugguu

SEQ ID NO: 114873 - RNA, 19 nt, Artificial Sequence
  Description of Artificial Sequence: Synthetic oligonucleotide
  Antisense strand to SEQ ID NO: 114872
aaccaagagaaauaaccaa

SEQ ID NO: 114874 - RNA, 19 nt, Artificial Sequence
  Description of Artificial Sequence: Synthetic oligonucleotide
  Sense strand starting at position 2909 of SEQ ID NO: 1462
cuuccuuaccacugggaga

SEQ ID NO: 114875 - RNA, 19 nt, Artificial Sequence
  Description of Artificial Sequence: Synthetic oligonucleotide
  Antisense strand to SEQ ID NO: 114874
ucucccagugguaaggaag

SEQ ID NO: 114876 - RNA, 19 nt, Artificial Sequence
  Description of Artificial Sequence: Synthetic oligonucleotide
  Sense strand starting at position 2892 of SEQ ID NO: 1462
agaucaauguauucugacu

SEQ ID NO: 114877 - RNA, 19 nt, Artificial Sequence
  Description of Artificial Sequence: Synthetic oligonucleotide
  Antisense strand to SEQ ID NO: 114876
agucagaauacauugaucu

SEQ ID NO: 114878 - RNA, 19 nt, Artificial Sequence
  Description of Artificial Sequence: Synthetic oligonucleotide
  Sense strand starting at position 2887 of SEQ ID NO: 1462
agucuagaucaauguauuc

SEQ ID NO: 114879 - RNA, 19 nt, Artificial Sequence
  Description of Artificial Sequence: Synthetic oligonucleotide
  Antisense strand to SEQ ID NO: 114878
gaauacauugaucuagacu

SEQ ID NO: 114880 - RNA, 19 nt, Artificial Sequence
  Description of Artificial Sequence: Synthetic oligonucleotide
  Sense strand starting at position 2884 of SEQ ID NO: 1462
ugcagucuagaucaaugua

SEQ ID NO: 114881 - RNA, 19 nt, Artificial Sequence
  Description of Artificial Sequence: Synthetic oligonucleotide
  Antisense strand to SEQ ID NO: 114880
uacauugaucuagacugca

SEQ ID NO: 114882 - RNA, 19 nt, Artificial Sequence
  Description of Artificial Sequence: Synthetic oligonucleotide
  Sense strand starting at position 2881 of SEQ ID NO: 1462
uguugcagucuagaucaau

SEQ ID NO: 114883 - RNA, 19 nt, Artificial Sequence
  Description of Artificial Sequence: Synthetic oligonucleotide
  Antisense strand to SEQ ID NO: 114882
auugaucuagacugcaaca

SEQ ID NO: 114884 - RNA, 19 nt, Artificial Sequence
  Description of Artificial Sequence: Synthetic oligonucleotide
  Sense strand starting at position 2754 of SEQ ID NO: 1462
uuuccuuugcuugaaagag

SEQ ID NO: 114885 - RNA, 19 nt, Artificial Sequence
  Description of Artificial Sequence: Synthetic oligonucleotide
  Antisense strand to SEQ ID NO: 114884
cucuuucaagcaaaggaaa

SEQ ID NO: 114886 - RNA, 19 nt, Artificial Sequence
  Description of Artificial Sequence: Synthetic oligonucleotide
  Sense strand starting at position 2753 of SEQ ID NO: 1462
cuuuccuuugcuugaaaga

SEQ ID NO: 114887 - RNA, 19 nt, Artificial Sequence
  Description of Artificial Sequence: Synthetic oligonucleotide
  Antisense strand to SEQ ID NO: 114886
ucuuucaagcaaaggaaag

SEQ ID NO: 114888 - RNA, 19 nt, Artificial Sequence
  Description of Artificial Sequence: Synthetic oligonucleotide
  Sense strand starting at position 2706 of SEQ ID NO: 1462
cucgaucgucuggaaguua

SEQ ID NO: 114889 - RNA, 19 nt, Artificial Sequence
  Description of Artificial Sequence: Synthetic oligonucleotide
  Antisense strand to SEQ ID NO: 114888
uaacuuccagacgaucgag

SEQ ID NO: 114890 - RNA, 19 nt, Artificial Sequence
  Description of Artificial Sequence: Synthetic oligonucleotide
  Sense strand starting at position 2702 of SEQ ID NO: 1462
uuaacucgaucgucuggaa

SEQ ID NO: 114891 - RNA, 19 nt, Artificial Sequence
  Description of Artificial Sequence: Synthetic oligonucleotide
  Antisense strand to SEQ ID NO: 114890
uuccagacgaucgaguuaa

SEQ ID NO: 114892 - RNA, 19 nt, Artificial Sequence
  Description of Artificial Sequence: Synthetic oligonucleotide
  Sense strand starting at position 2697 of SEQ ID NO: 1462
guaaauuaacucgaucguc

SEQ ID NO: 114893 - RNA, 19 nt, Artificial Sequence
  Description of Artificial Sequence: Synthetic oligonucleotide
  Antisense strand to SEQ ID NO: 114892
gacgaucgaguuaauuuac

SEQ ID NO: 114894 - RNA, 19 nt, Artificial Sequence
  Description of Artificial Sequence: Synthetic oligonucleotide
  Sense strand starting at position 2617 of SEQ ID NO: 1462
augcaaauaucugauuuag

SEQ ID NO: 114895 - RNA, 19 nt, Artificial Sequence
  Description of Artificial Sequence: Synthetic oligonucleotide
  Antisense strand to SEQ ID NO: 114894
cuaaaucagauauuugcau

SEQ ID NO: 114896 - RNA, 19 nt, Artificial Sequence
  Description of Artificial Sequence: Synthetic oligonucleotide
  Sense strand starting at position 2612 of SEQ ID NO: 1462
gggcuaugcaaauaucuga

SEQ ID NO: 114897 - RNA, 19 nt, Artificial Sequence
  Description of Artificial Sequence: Synthetic oligonucleotide
  Antisense strand to SEQ ID NO: 114896
ucagauauuugcauagccc

SEQ ID NO: 114898 - RNA, 19 nt, Artificial Sequence
  Description of Artificial Sequence: Synthetic oligonucleotide
  Sense strand starting at position 2051 of SEQ ID NO: 1462
uccgccaggauugaucaaa

SEQ ID NO: 114899 - RNA, 19 nt, Artificial Sequence
  Description of Artificial Sequence: Synthetic oligonucleotide
  Antisense strand to SEQ ID NO: 114898
uuugaucaauccuggcgga

SEQ ID NO: 114900 - RNA, 19 nt, Artificial Sequence
  Description of Artificial Sequence: Synthetic oligonucleotide
  Sense strand starting at position 2044 of SEQ ID NO: 1462
ccuccuuuccgccaggauu

SEQ ID NO: 114901 - RNA, 19 nt, Artificial Sequence
  Description of Artificial Sequence: Synthetic oligonucleotide
  Antisense strand to SEQ ID NO: 114900
aauccuggcggaaaggagg

SEQ ID NO: 114902 - RNA, 19 nt, Artificial Sequence
  Description of Artificial Sequence: Synthetic oligonucleotide
  Sense strand starting at position 1567 of SEQ ID NO: 1462
gucgauuugcuuuggaauu

SEQ ID NO: 114903 - RNA, 19 nt, Artificial Sequence
  Description of Artificial Sequence: Synthetic oligonucleotide
  Antisense strand to SEQ ID NO: 114902
aauuccaaagcaaaucgac

SEQ ID NO: 114904 - RNA, 19 nt, Artificial Sequence
  Description of Artificial Sequence: Synthetic oligonucleotide
  Sense strand starting at position 1219 of SEQ ID NO: 1462
gugcuaaaugugcaaagag

SEQ ID NO: 114905 - RNA, 19 nt, Artificial Sequence
  Description of Artificial Sequence: Synthetic oligonucleotide
  Antisense strand to SEQ ID NO: 114904
cucuuugcacauuuagcac

SEQ ID NO: 114906 - RNA, 19 nt, Artificial Sequence
  Description of Artificial Sequence: Synthetic oligonucleotide
  Sense strand starting at position 1218 of SEQ ID NO: 1462
ggugcuaaaugugcaaaga

SEQ ID NO: 114907 - RNA, 19 nt, Artificial Sequence
  Description of Artificial Sequence: Synthetic oligonucleotide
  Antisense strand to SEQ ID NO: 114906
ucuuugcacauuuagcacc

SEQ ID NO: 114908 - RNA, 19 nt, Artificial Sequence
  Description of Artificial Sequence: Synthetic oligonucleotide
  Sense strand starting at position 723 of SEQ ID NO: 1462
ggaagaauaucgguucuga

SEQ ID NO: 114909 - RNA, 19 nt, Artificial Sequence
  Description of Artificial Sequence: Synthetic oligonucleotide
  Antisense strand to SEQ ID NO: 114908
ucagaaccgauauucuucc

SEQ ID NO: 114910 - RNA, 19 nt, Artificial Sequence
  Description of Artificial Sequence: Synthetic oligonucleotide
  Sense strand starting at position 621 of SEQ ID NO: 1462
cuuaauagaccuggcauua

SEQ ID NO: 114911 - RNA, 19 nt, Artificial Sequence
  Description of Artificial Sequence: Synthetic oligonucleotide
  Antisense strand to SEQ ID NO: 114910
uaaugccaggucuauuaag

SEQ ID NO: 114912 - RNA, 19 nt, Artificial Sequence
  Description of Artificial Sequence: Synthetic oligonucleotide
  Sense strand starting at position 195 of SEQ ID NO: 1463
gggcucaacugaucauacu

SEQ ID NO: 114913 - RNA, 19 nt, Artificial Sequence
  Description of Artificial Sequence: Synthetic oligonucleotide
  Antisense strand to SEQ ID NO: 114912
aguaugaucaguugagccc

SEQ ID NO: 114914 - RNA, 19 nt, Artificial Sequence
  Description of Artificial Sequence: Synthetic oligonucleotide
  Sense strand starting at position 615 of SEQ ID NO: 1463
uagaaacagugccugauau

SEQ ID NO: 114915 - RNA, 19 nt, Artificial Sequence
  Description of Artificial Sequence: Synthetic oligonucleotide
  Antisense strand to SEQ ID NO: 114914
auaucaggcacuguuucua

SEQ ID NO: 114916 - RNA, 19 nt, Artificial Sequence
  Description of Artificial Sequence: Synthetic oligonucleotide
  Sense strand starting at position 616 of SEQ ID NO: 1463
agaaacagugccugauauu

SEQ ID NO: 114917 - RNA, 19 nt, Artificial Sequence
  Description of Artificial Sequence: Synthetic oligonucleotide
  Antisense strand to SEQ ID NO: 114916
aauaucaggcacuguuucu

SEQ ID NO: 114918 - RNA, 19 nt, Artificial Sequence
  Description of Artificial Sequence: Synthetic oligonucleotide
  Sense strand starting at position 644 of SEQ ID NO: 1463
ccgguuuauccugaagaaa

SEQ ID NO: 114919 - RNA, 19 nt, Artificial Sequence
  Description of Artificial Sequence: Synthetic oligonucleotide
  Antisense strand to SEQ ID NO: 114918
uuucuucaggauaaaccgg

SEQ ID NO: 114920 - RNA, 19 nt, Artificial Sequence
  Description of Artificial Sequence: Synthetic oligonucleotide
  Sense strand starting at position 800 of SEQ ID NO: 1463
ggcagacuucuaggauaac

SEQ ID NO: 114921 - RNA, 19 nt, Artificial Sequence
  Description of Artificial Sequence: Synthetic oligonucleotide
  Antisense strand to SEQ ID NO: 114920
guuauccuagaagucugcc

SEQ ID NO: 114922 - RNA, 19 nt, Artificial Sequence
  Description of Artificial Sequence: Synthetic oligonucleotide
  Sense strand starting at position 1274 of SEQ ID NO: 1463
aggauugcacggcacaaua

SEQ ID NO: 114923 - RNA, 19 nt, Artificial Sequence
  Description of Artificial Sequence: Synthetic oligonucleotide
  Antisense strand to SEQ ID NO: 114922
uauugugccgugcaauccu

SEQ ID NO: 114924 - RNA, 19 nt, Artificial Sequence
  Description of Artificial Sequence: Synthetic oligonucleotide
  Sense strand starting at position 1333 of SEQ ID NO: 1463
cagugaguucuguagacga

SEQ ID NO: 114925 - RNA, 19 nt, Artificial Sequence
  Description of Artificial Sequence: Synthetic oligonucleotide
  Antisense strand to SEQ ID NO: 114924
ucgucuacagaacucacug

SEQ ID NO: 114926 - RNA, 19 nt, Artificial Sequence
  Description of Artificial Sequence: Synthetic oligonucleotide
  Sense strand starting at position 1348 of SEQ ID NO: 1463
acgaguuuacgaggaaauu

SEQ ID NO: 114927 - RNA, 19 nt, Artificial Sequence
  Description of Artificial Sequence: Synthetic oligonucleotide
  Antisense strand to SEQ ID NO: 114926
aauuuccucguaaacucgu

SEQ ID NO: 114928 - RNA, 19 nt, Artificial Sequence
  Description of Artificial Sequence: Synthetic oligonucleotide
  Sense strand starting at position 1349 of SEQ ID NO: 1463
cgaguuuacgaggaaauug

SEQ ID NO: 114929 - RNA, 19 nt, Artificial Sequence
  Description of Artificial Sequence: Synthetic oligonucleotide
  Antisense strand to SEQ ID NO: 114928
caauuuccucguaaacucg

SEQ ID NO: 114930 - RNA, 19 nt, Artificial Sequence
  Description of Artificial Sequence: Synthetic oligonucleotide
  Sense strand starting at position 1354 of SEQ ID NO: 1463
uuacgaggaaauuguuaaa

SEQ ID NO: 114931 - RNA, 19 nt, Artificial Sequence
  Description of Artificial Sequence: Synthetic oligonucleotide
  Antisense strand to SEQ ID NO: 114930
uuuaacaauuuccucguaa

SEQ ID NO: 114932 - RNA, 19 nt, Artificial Sequence
  Description of Artificial Sequence: Synthetic oligonucleotide
  Sense strand starting at position 2187 of SEQ ID NO: 1463
ugaguuggguccucuaaag

SEQ ID NO: 114933 - RNA, 19 nt, Artificial Sequence
  Description of Artificial Sequence: Synthetic oligonucleotide
  Antisense strand to SEQ ID NO: 114932
cuuuagaggacccaacuca

SEQ ID NO: 114934 - RNA, 19 nt, Artificial Sequence
  Description of Artificial Sequence: Synthetic oligonucleotide
  Sense strand starting at position 2219 of SEQ ID NO: 1463
aggcuguguccguuguagu

SEQ ID NO: 114935 - RNA, 19 nt, Artificial Sequence
  Description of Artificial Sequence: Synthetic oligonucleotide
  Antisense strand to SEQ ID NO: 114934
acuacaacggacacagccu

SEQ ID NO: 114936 - RNA, 19 nt, Artificial Sequence
  Description of Artificial Sequence: Synthetic oligonucleotide
  Sense strand starting at position 2320 of SEQ ID NO: 1463
uagaaauagucuuuggagu

SEQ ID NO: 114937 - RNA, 19 nt, Artificial Sequence
  Description of Artificial Sequence: Synthetic oligonucleotide
  Antisense strand to SEQ ID NO: 114936
acuccaaagacuauuucua

SEQ ID NO: 114938 - RNA, 19 nt, Artificial Sequence
  Description of Artificial Sequence: Synthetic oligonucleotide
  Sense strand starting at position 2321 of SEQ ID NO: 1463
agaaauagucuuuggagua

SEQ ID NO: 114939 - RNA, 19 nt, Artificial Sequence
  Description of Artificial Sequence: Synthetic oligonucleotide
  Antisense strand to SEQ ID NO: 114938
uacuccaaagacuauuucu

SEQ ID NO: 114940 - RNA, 19 nt, Artificial Sequence
  Description of Artificial Sequence: Synthetic oligonucleotide
  Sense strand starting at position 2326 of SEQ ID NO: 1463
uagucuuuggaguauggga

SEQ ID NO: 114941 - RNA, 19 nt, Artificial Sequence
  Description of Artificial Sequence: Synthetic oligonucleotide
  Antisense strand to SEQ ID NO: 114940
ucccauacuccaaagacua

SEQ ID NO: 114942 - RNA, 19 nt, Artificial Sequence
  Description of Artificial Sequence: Synthetic oligonucleotide
  Sense strand starting at position 2406 of SEQ ID NO: 1463
gugucuggagguuaaagua

SEQ ID NO: 114943 - RNA, 19 nt, Artificial Sequence
  Description of Artificial Sequence: Synthetic oligonucleotide
  Antisense strand to SEQ ID NO: 114942
uacuuuaaccuccagacac

SEQ ID NO: 114944 - RNA, 19 nt, Artificial Sequence
  Description of Artificial Sequence: Synthetic oligonucleotide
  Sense strand starting at position 2541 of SEQ ID NO: 1463
uuucgugaacuuuauauca

SEQ ID NO: 114945 - RNA, 19 nt, Artificial Sequence
  Description of Artificial Sequence: Synthetic oligonucleotide
  Antisense strand to SEQ ID NO: 114944
ugauauaaaguucacgaaa

SEQ ID NO: 114946 - RNA, 19 nt, Artificial Sequence
  Description of Artificial Sequence: Synthetic oligonucleotide
  Sense strand starting at position 2551 of SEQ ID NO: 1463
uuuauaucacagugaggaa

SEQ ID NO: 114947 - RNA, 19 nt, Artificial Sequence
  Description of Artificial Sequence: Synthetic oligonucleotide
  Antisense strand to SEQ ID NO: 114946
uuccucacugugauauaaa

SEQ ID NO: 114948 - RNA, 19 nt, Artificial Sequence
  Description of Artificial Sequence: Synthetic oligonucleotide
  Sense strand starting at position 2650 of SEQ ID NO: 1463
gauugugauggaugaguag

SEQ ID NO: 114949 - RNA, 19 nt, Artificial Sequence
  Description of Artificial Sequence: Synthetic oligonucleotide
  Antisense strand to SEQ ID NO: 114948
cuacucauccaucacaauc

SEQ ID NO: 114950 - RNA, 19 nt, Artificial Sequence
  Description of Artificial Sequence: Synthetic oligonucleotide
  Sense strand starting at position 2697 of SEQ ID NO: 1463
acacucugugcacaaugaa

SEQ ID NO: 114951 - RNA, 19 nt, Artificial Sequence
  Description of Artificial Sequence: Synthetic oligonucleotide
  Antisense strand to SEQ ID NO: 114950
uucauugugcacagagugu

SEQ ID NO: 114952 - RNA, 19 nt, Artificial Sequence
  Description of Artificial Sequence: Synthetic oligonucleotide
  Sense strand starting at position 2793 of SEQ ID NO: 1463
guguaaguuacuguuucgu

SEQ ID NO: 114953 - RNA, 19 nt, Artificial Sequence
  Description of Artificial Sequence: Synthetic oligonucleotide
  Antisense strand to SEQ ID NO: 114952
acgaaacaguaacuuacac

SEQ ID NO: 114954 - RNA, 19 nt, Artificial Sequence
  Description of Artificial Sequence: Synthetic oligonucleotide
  Sense strand starting at position 3020 of SEQ ID NO: 1463
uggugaaauagaugggugu

SEQ ID NO: 114955 - RNA, 19 nt, Artificial Sequence
  Description of Artificial Sequence: Synthetic oligonucleotide
  Antisense strand to SEQ ID NO: 114954
acacccaucuauuucacca

SEQ ID NO: 114956 - RNA, 19 nt, Artificial Sequence
  Description of Artificial Sequence: Synthetic oligonucleotide
  Sense strand starting at position 3022 of SEQ ID NO: 1463
gugaaauagauggguguga

SEQ ID NO: 114957 - RNA, 19 nt, Artificial Sequence
  Description of Artificial Sequence: Synthetic oligonucleotide
  Antisense strand to SEQ ID NO: 114956
ucacacccaucuauuucac

SEQ ID NO: 114958 - RNA, 19 nt, Artificial Sequence
  Description of Artificial Sequence: Synthetic oligonucleotide
  Sense strand starting at position 3023 of SEQ ID NO: 1463
ugaaauagaugggugugau

SEQ ID NO: 114959 - RNA, 19 nt, Artificial Sequence
  Description of Artificial Sequence: Synthetic oligonucleotide
  Antisense strand to SEQ ID NO: 114958
aucacacccaucuauuuca

SEQ ID NO: 114960 - RNA, 19 nt, Artificial Sequence
  Description of Artificial Sequence: Synthetic oligonucleotide
  Sense strand starting at position 3024 of SEQ ID NO: 1463
gaaauagaugggugugaug

SEQ ID NO: 114961 - RNA, 19 nt, Artificial Sequence
  Description of Artificial Sequence: Synthetic oligonucleotide
  Antisense strand to SEQ ID NO: 114960
caucacacccaucuauuuc

SEQ ID NO: 114962 - RNA, 19 nt, Artificial Sequence
  Description of Artificial Sequence: Synthetic oligonucleotide
  Sense strand starting at position 3026 of SEQ ID NO: 1463
aauagaugggugugauguu

SEQ ID NO: 114963 - RNA, 19 nt, Artificial Sequence
  Description of Artificial Sequence: Synthetic oligonucleotide
  Antisense strand to SEQ ID NO: 114962
aacaucacacccaucuauu

SEQ ID NO: 114964 - RNA, 19 nt, Artificial Sequence
  Description of Artificial Sequence: Synthetic oligonucleotide
  Sense strand starting at position 3138 of SEQ ID NO: 1463
uggcaaguuaaguagagau

SEQ ID NO: 114965 - RNA, 19 nt, Artificial Sequence
  Description of Artificial Sequence: Synthetic oligonucleotide
  Antisense strand to SEQ ID NO: 114964
aucucuacuuaacuugcca

SEQ ID NO: 114966 - RNA, 19 nt, Artificial Sequence
  Description of Artificial Sequence: Synthetic oligonucleotide
  Sense strand starting at position 3140 of SEQ ID NO: 1463
gcaaguuaaguagagauau

SEQ ID NO: 114967 - RNA, 19 nt, Artificial Sequence
  Description of Artificial Sequence: Synthetic oligonucleotide
  Antisense strand to SEQ ID NO: 114966
auaucucuacuuaacuugc

SEQ ID NO: 114968 - RNA, 19 nt, Artificial Sequence
  Description of Artificial Sequence: Synthetic oligonucleotide
  Sense strand starting at position 3455 of SEQ ID NO: 1463
cacuguaagcuggacauua

SEQ ID NO: 114969 - RNA, 19 nt, Artificial Sequence
  Description of Artificial Sequence: Synthetic oligonucleotide
  Antisense strand to SEQ ID NO: 114968
uaauguccagcuuacagug

SEQ ID NO: 114970 - RNA, 19 nt, Artificial Sequence
  Description of Artificial Sequence: Synthetic oligonucleotide
  Sense strand starting at position 3466 of SEQ ID NO: 1463
ggacauuauccaggacucu

SEQ ID NO: 114971 - RNA, 19 nt, Artificial Sequence
  Description of Artificial Sequence: Synthetic oligonucleotide
  Antisense strand to SEQ ID NO: 114970
agaguccuggauaaugucc

SEQ ID NO: 114972 - RNA, 19 nt, Artificial Sequence
  Description of Artificial Sequence: Synthetic oligonucleotide
  Sense strand starting at position 3535 of SEQ ID NO: 1463
uguuacauacuuuggguaa

SEQ ID NO: 114973 - RNA, 19 nt, Artificial Sequence
  Description of Artificial Sequence: Synthetic oligonucleotide
  Antisense strand to SEQ ID NO: 114972
uuacccaaaguauguaaca

SEQ ID NO: 114974 - RNA, 19 nt, Artificial Sequence
  Description of Artificial Sequence: Synthetic oligonucleotide
  Sense strand starting at position 3546 of SEQ ID NO: 1463
uuggguaacaccugugaaa

SEQ ID NO: 114975 - RNA, 19 nt, Artificial Sequence
  Description of Artificial Sequence: Synthetic oligonucleotide
  Antisense strand to SEQ ID NO: 114974
uuucacagguguuacccaa

SEQ ID NO: 114976 - RNA, 19 nt, Artificial Sequence
  Description of Artificial Sequence: Synthetic oligonucleotide
  Sense strand starting at position 3548 of SEQ ID NO: 1463
ggguaacaccugugaaaug

SEQ ID NO: 114977 - RNA, 19 nt, Artificial Sequence
  Description of Artificial Sequence: Synthetic oligonucleotide
  Antisense strand to SEQ ID NO: 114976
cauuucacagguguuaccc

SEQ ID NO: 114978 - RNA, 19 nt, Artificial Sequence
  Description of Artificial Sequence: Synthetic oligonucleotide
  Sense strand starting at position 3663 of SEQ ID NO: 1463
ucaguauugcaggauucuu

SEQ ID NO: 114979 - RNA, 19 nt, Artificial Sequence
  Description of Artificial Sequence: Synthetic oligonucleotide
  Antisense strand to SEQ ID NO: 114978
aagaauccugcaauacuga

SEQ ID NO: 114980 - RNA, 19 nt, Artificial Sequence
  Description of Artificial Sequence: Synthetic oligonucleotide
  Sense strand starting at position 3671 of SEQ ID NO: 1463
gcaggauucuucuuuauag

SEQ ID NO: 114981 - RNA, 19 nt, Artificial Sequence
  Description of Artificial Sequence: Synthetic oligonucleotide
  Antisense strand to SEQ ID NO: 114980
cuauaaagaagaauccugc

SEQ ID NO: 114982 - RNA, 19 nt, Artificial Sequence
  Description of Artificial Sequence: Synthetic oligonucleotide
  Sense strand starting at position 3672 of SEQ ID NO: 1463
caggauucuucuuuauagg

SEQ ID NO: 114983 - RNA, 19 nt, Artificial Sequence
  Description of Artificial Sequence: Synthetic oligonucleotide
  Antisense strand to SEQ ID NO: 114982
ccuauaaagaagaauccug

SEQ ID NO: 114984 - RNA, 19 nt, Artificial Sequence
  Description of Artificial Sequence: Synthetic oligonucleotide
  Sense strand starting at position 3747 of SEQ ID NO: 1463
aggucugagacuugagcaa

SEQ ID NO: 114985 - RNA, 19 nt, Artificial Sequence
  Description of Artificial Sequence: Synthetic oligonucleotide
  Antisense strand to SEQ ID NO: 114984
uugcucaagucucagaccu

SEQ ID NO: 114986 - RNA, 19 nt, Artificial Sequence
  Description of Artificial Sequence: Synthetic oligonucleotide
  Sense strand starting at position 3825 of SEQ ID NO: 1463
ccuccaguuguagauguua

SEQ ID NO: 114987 - RNA, 19 nt, Artificial Sequence
  Description of Artificial Sequence: Synthetic oligonucleotide
  Antisense strand to SEQ ID NO: 114986
uaacaucuacaacuggagg

SEQ ID NO: 114988 - RNA, 19 nt, Artificial Sequence
  Description of Artificial Sequence: Synthetic oligonucleotide
  Sense strand starting at position 3834 of SEQ ID NO: 1463
guagauguuaggcaacacu

SEQ ID NO: 114989 - RNA, 19 nt, Artificial Sequence
  Description of Artificial Sequence: Synthetic oligonucleotide
  Antisense strand to SEQ ID NO: 114988
aguguugccuaacaucuac

SEQ ID NO: 114990 - RNA, 19 nt, Artificial Sequence
  Description of Artificial Sequence: Synthetic oligonucleotide
  Sense strand starting at position 3883 of SEQ ID NO: 1463
gggagaccuuaugcuauua

SEQ ID NO: 114991 - RNA, 19 nt, Artificial Sequence
  Description of Artificial Sequence: Synthetic oligonucleotide
  Antisense strand to SEQ ID NO: 114990
uaauagcauaaggucuccc

SEQ ID NO: 114992 - RNA, 19 nt, Artificial Sequence
  Description of Artificial Sequence: Synthetic oligonucleotide
  Sense strand starting at position 51 of SEQ ID NO: 1464
gaacuuugaugucugugaa

SEQ ID NO: 114993 - RNA, 19 nt, Artificial Sequence
  Description of Artificial Sequence: Synthetic oligonucleotide
  Antisense strand to SEQ ID NO: 114992
uucacagacaucaaaguuc

SEQ ID NO: 114994 - RNA, 19 nt, Artificial Sequence
  Description of Artificial Sequence: Synthetic oligonucleotide
  Sense strand starting at position 52 of SEQ ID NO: 1464
aacuuugaugucugugaac

SEQ ID NO: 114995 - RNA, 19 nt, Artificial Sequence
  Description of Artificial Sequence: Synthetic oligonucleotide
  Antisense strand to SEQ ID NO: 114994
guucacagacaucaaaguu

SEQ ID NO: 114996 - RNA, 19 nt, Artificial Sequence
  Description of Artificial Sequence: Synthetic oligonucleotide
  Sense strand starting at position 54 of SEQ ID NO: 1464
cuuugaugucugugaacaa

SEQ ID NO: 114997 - RNA, 19 nt, Artificial Sequence
  Description of Artificial Sequence: Synthetic oligonucleotide
  Antisense strand to SEQ ID NO: 114996
uuguucacagacaucaaag

SEQ ID NO: 114998 - RNA, 19 nt, Artificial Sequence
  Description of Artificial Sequence: Synthetic oligonucleotide
  Sense strand starting at position 78 of SEQ ID NO: 1464
uguugacuacccuggagaa

SEQ ID NO: 114999 - RNA, 19 nt, Artificial Sequence
  Description of Artificial Sequence: Synthetic oligonucleotide
  Antisense strand to SEQ ID NO: 114998
uucuccaggguagucaaca

SEQ ID NO: 115000 - RNA, 19 nt, Artificial Sequence
  Description of Artificial Sequence: Synthetic oligonucleotide
  Sense strand starting at position 114 of SEQ ID NO: 1464
uaggcuugggcuugaauaa

SEQ ID NO: 115001 - RNA, 19 nt, Artificial Sequence
  Description of Artificial Sequence: Synthetic oligonucleotide
  Antisense strand to SEQ ID NO: 115000
uuauucaagcccaagccua

SEQ ID NO: 115002 - RNA, 19 nt, Artificial Sequence
  Description of Artificial Sequence: Synthetic oligonucleotide
  Sense strand starting at position 137 of SEQ ID NO: 1464
cuuagcauugccgaagaaa

SEQ ID NO: 115003 - RNA, 19 nt, Artificial Sequence
  Description of Artificial Sequence: Synthetic oligonucleotide
  Antisense strand to SEQ ID NO: 115002
uuucuucggcaaugcuaag

SEQ ID NO: 115004 - RNA, 19 nt, Artificial Sequence
  Description of Artificial Sequence: Synthetic oligonucleotide
  Sense strand starting at position 148 of SEQ ID NO: 1464
cgaagaaacugccugauag

SEQ ID NO: 115005 - RNA, 19 nt, Artificial Sequence
  Description of Artificial Sequence: Synthetic oligonucleotide
  Antisense strand to SEQ ID NO: 115004
cuaucaggcaguuucuucg

SEQ ID NO: 115006 - RNA, 19 nt, Artificial Sequence
  Description of Artificial Sequence: Synthetic oligonucleotide
  Sense strand starting at position 179 of SEQ ID NO: 1464
uaauauaaggaguguaauc

SEQ ID NO: 115007 - RNA, 19 nt, Artificial Sequence
  Description of Artificial Sequence: Synthetic oligonucleotide
  Antisense strand to SEQ ID NO: 115006
gauuacacuccuuauauua

SEQ ID NO: 115008 - RNA, 19 nt, Artificial Sequence
  Description of Artificial Sequence: Synthetic oligonucleotide
  Sense strand starting at position 184 of SEQ ID NO: 1464
uaaggaguguaaucccaua

SEQ ID NO: 115009 - RNA, 19 nt, Artificial Sequence
  Description of Artificial Sequence: Synthetic oligonucleotide
  Antisense strand to SEQ ID NO: 115008
uaugggauuacacuccuua

SEQ ID NO: 115010 - RNA, 19 nt, Artificial Sequence
  Description of Artificial Sequence: Synthetic oligonucleotide
  Sense strand starting at position 403 of SEQ ID NO: 1464
ugucauagcauagagguua

SEQ ID NO: 115011 - RNA, 19 nt, Artificial Sequence
  Description of Artificial Sequence: Synthetic oligonucleotide
  Antisense strand to SEQ ID NO: 115010
uaaccucuaugcuaugaca

SEQ ID NO: 115012 - RNA, 19 nt, Artificial Sequence
  Description of Artificial Sequence: Synthetic oligonucleotide
  Sense strand starting at position 637 of SEQ ID NO: 1464
ugaguuguugaucauccuu

SEQ ID NO: 115013 - RNA, 19 nt, Artificial Sequence
  Description of Artificial Sequence: Synthetic oligonucleotide
  Antisense strand to SEQ ID NO: 115012
aaggaugaucaacaacuca

SEQ ID NO: 115014 - RNA, 19 nt, Artificial Sequence
  Description of Artificial Sequence: Synthetic oligonucleotide
  Sense strand starting at position 696 of SEQ ID NO: 1464
aagaguacugucgaaauac

SEQ ID NO: 115015 - RNA, 19 nt, Artificial Sequence
  Description of Artificial Sequence: Synthetic oligonucleotide
  Antisense strand to SEQ ID NO: 115014
guauuucgacaguacucuu

SEQ ID NO: 115016 - RNA, 19 nt, Artificial Sequence
  Description of Artificial Sequence: Synthetic oligonucleotide
  Sense strand starting at position 789 of SEQ ID NO: 1464
augguauuggcugagccau

SEQ ID NO: 115017 - RNA, 19 nt, Artificial Sequence
  Description of Artificial Sequence: Synthetic oligonucleotide
  Antisense strand to SEQ ID NO: 115016
auggcucagccaauaccau

SEQ ID NO: 115018 - RNA, 19 nt, Artificial Sequence
  Description of Artificial Sequence: Synthetic oligonucleotide
  Sense strand starting at position 791 of SEQ ID NO: 1464
gguauuggcugagccauuu

SEQ ID NO: 115019 - RNA, 19 nt, Artificial Sequence
  Description of Artificial Sequence: Synthetic oligonucleotide
  Antisense strand to SEQ ID NO: 115018
aaauggcucagccaauacc

SEQ ID NO: 115020 - RNA, 19 nt, Artificial Sequence
  Description of Artificial Sequence: Synthetic oligonucleotide
  Sense strand starting at position 797 of SEQ ID NO: 1464
ggcugagccauuuguaauc

SEQ ID NO: 115021 - RNA, 19 nt, Artificial Sequence
  Description of Artificial Sequence: Synthetic oligonucleotide
  Antisense strand to SEQ ID NO: 115020
gauuacaaauggcucagcc

SEQ ID NO: 115022 - RNA, 19 nt, Artificial Sequence
  Description of Artificial Sequence: Synthetic oligonucleotide
  Sense strand starting at position 920 of SEQ ID NO: 1464
ugucucauucccuagaaag

SEQ ID NO: 115023 - RNA, 19 nt, Artificial Sequence
  Description of Artificial Sequence: Synthetic oligonucleotide
  Antisense strand to SEQ ID NO: 115022
cuuucuagggaaugagaca

SEQ ID NO: 115024 - RNA, 19 nt, Artificial Sequence
  Description of Artificial Sequence: Synthetic oligonucleotide
  Sense strand starting at position 1140 of SEQ ID NO: 1464
ugguuucgugccuuguuga

SEQ ID NO: 115025 - RNA, 19 nt, Artificial Sequence
  Description of Artificial Sequence: Synthetic oligonucleotide
  Antisense strand to SEQ ID NO: 115024
ucaacaaggcacgaaacca

SEQ ID NO: 115026 - RNA, 19 nt, Artificial Sequence
  Description of Artificial Sequence: Synthetic oligonucleotide
  Sense strand starting at position 2624 of SEQ ID NO: 1464
auggcauuccaauggaacu

SEQ ID NO: 115027 - RNA, 19 nt, Artificial Sequence
  Description of Artificial Sequence: Synthetic oligonucleotide
  Antisense strand to SEQ ID NO: 115026
aguuccauuggaaugccau

SEQ ID NO: 115028 - RNA, 19 nt, Artificial Sequence
  Description of Artificial Sequence: Synthetic oligonucleotide
  Sense strand starting at position 2831 of SEQ ID NO: 1464
ccucuucuccuguagugau

SEQ ID NO: 115029 - RNA, 19 nt, Artificial Sequence
  Description of Artificial Sequence: Synthetic oligonucleotide
  Antisense strand to SEQ ID NO: 115028
aucacuacaggagaagagg

SEQ ID NO: 115030 - RNA, 19 nt, Artificial Sequence
  Description of Artificial Sequence: Synthetic oligonucleotide
  Sense strand starting at position 2835 of SEQ ID NO: 1464
uucuccuguagugaugaga

SEQ ID NO: 115031 - RNA, 19 nt, Artificial Sequence
  Description of Artificial Sequence: Synthetic oligonucleotide
  Antisense strand to SEQ ID NO: 115030
ucucaucacuacaggagaa

SEQ ID NO: 115032 - RNA, 19 nt, Artificial Sequence
  Description of Artificial Sequence: Synthetic oligonucleotide
  Sense strand starting at position 2864 of SEQ ID NO: 1464
agucaaauauagguuguga

SEQ ID NO: 115033 - RNA, 19 nt, Artificial Sequence
  Description of Artificial Sequence: Synthetic oligonucleotide
  Antisense strand to SEQ ID NO: 115032
ucacaaccuauauuugacu

SEQ ID NO: 115034 - RNA, 19 nt, Artificial Sequence
  Description of Artificial Sequence: Synthetic oligonucleotide
  Sense strand starting at position 2866 of SEQ ID NO: 1464
ucaaauauagguugugaac

SEQ ID NO: 115035 - RNA, 19 nt, Artificial Sequence
  Description of Artificial Sequence: Synthetic oligonucleotide
  Antisense strand to SEQ ID NO: 115034
guucacaaccuauauuuga

SEQ ID NO: 115036 - RNA, 19 nt, Artificial Sequence
  Description of Artificial Sequence: Synthetic oligonucleotide
  Sense strand starting at position 2875 of SEQ ID NO: 1464
gguugugaacgucaucaca

SEQ ID NO: 115037 - RNA, 19 nt, Artificial Sequence
  Description of Artificial Sequence: Synthetic oligonucleotide
  Antisense strand to SEQ ID NO: 115036
ugugaugacguucacaacc

SEQ ID NO: 115038 - RNA, 19 nt, Artificial Sequence
  Description of Artificial Sequence: Synthetic oligonucleotide
  Sense strand starting at position 2885 of SEQ ID NO: 1464
gucaucacacucugcaaga

SEQ ID NO: 115039 - RNA, 19 nt, Artificial Sequence
  Description of Artificial Sequence: Synthetic oligonucleotide
  Antisense strand to SEQ ID NO: 115038
ucuugcagagugugaugac

SEQ ID NO: 115040 - RNA, 19 nt, Artificial Sequence
  Description of Artificial Sequence: Synthetic oligonucleotide
  Sense strand starting at position 3011 of SEQ ID NO: 1464
guuugugcaagcuaaagaa

SEQ ID NO: 115041 - RNA, 19 nt, Artificial Sequence
  Description of Artificial Sequence: Synthetic oligonucleotide
  Antisense strand to SEQ ID NO: 115040
uucuuuagcuugcacaaac

SEQ ID NO: 115042 - RNA, 19 nt, Artificial Sequence
  Description of Artificial Sequence: Synthetic oligonucleotide
  Sense strand starting at position 3052 of SEQ ID NO: 1464
cucaccucuguuugaaaga

SEQ ID NO: 115043 - RNA, 19 nt, Artificial Sequence
  Description of Artificial Sequence: Synthetic oligonucleotide
  Antisense strand to SEQ ID NO: 115042
ucuuucaaacagaggugag

SEQ ID NO: 115044 - RNA, 19 nt, Artificial Sequence
  Description of Artificial Sequence: Synthetic oligonucleotide
  Sense strand starting at position 3077 of SEQ ID NO: 1464
gggaaugacuagcuuggau

SEQ ID NO: 115045 - RNA, 19 nt, Artificial Sequence
  Description of Artificial Sequence: Synthetic oligonucleotide
  Antisense strand to SEQ ID NO: 115044
auccaagcuagucauuccc

SEQ ID NO: 115046 - RNA, 19 nt, Artificial Sequence
  Description of Artificial Sequence: Synthetic oligonucleotide
  Sense strand starting at position 3079 of SEQ ID NO: 1464
gaaugacuagcuuggauca

SEQ ID NO: 115047 - RNA, 19 nt, Artificial Sequence
  Description of Artificial Sequence: Synthetic oligonucleotide
  Antisense strand to SEQ ID NO: 115046
ugauccaagcuagucauuc

SEQ ID NO: 115048 - RNA, 19 nt, Artificial Sequence
  Description of Artificial Sequence: Synthetic oligonucleotide
  Sense strand starting at position 3105 of SEQ ID NO: 1464
uucugaauucccuggagag

SEQ ID NO: 115049 - RNA, 19 nt, Artificial Sequence
  Description of Artificial Sequence: Synthetic oligonucleotide
  Antisense strand to SEQ ID NO: 115048
cucuccagggaauucagaa

SEQ ID NO: 115050 - RNA, 19 nt, Artificial Sequence
  Description of Artificial Sequence: Synthetic oligonucleotide
  Sense strand starting at position 3160 of SEQ ID NO: 1464
ugcacugagcaauagcuaa

SEQ ID NO: 115051 - RNA, 19 nt, Artificial Sequence
  Description of Artificial Sequence: Synthetic oligonucleotide
  Antisense strand to SEQ ID NO: 115050
uuagcuauugcucagugca

SEQ ID NO: 115052 - RNA, 19 nt, Artificial Sequence
  Description of Artificial Sequence: Synthetic oligonucleotide
  Sense strand starting at position 3185 of SEQ ID NO: 1464
gugugcucugccuuugaca

SEQ ID NO: 115053 - RNA, 19 nt, Artificial Sequence
  Description of Artificial Sequence: Synthetic oligonucleotide
  Antisense strand to SEQ ID NO: 115052
ugucaaaggcagagcacac

SEQ ID NO: 115054 - RNA, 19 nt, Artificial Sequence
  Description of Artificial Sequence: Synthetic oligonucleotide
  Sense strand starting at position 3244 of SEQ ID NO: 1464
cugugagacuuccuaccca

SEQ ID NO: 115055 - RNA, 19 nt, Artificial Sequence
  Description of Artificial Sequence: Synthetic oligonucleotide
  Antisense strand to SEQ ID NO: 115054
uggguaggaagucucacag

SEQ ID NO: 115056 - RNA, 19 nt, Artificial Sequence
  Description of Artificial Sequence: Synthetic oligonucleotide
  Sense strand starting at position 3348 of SEQ ID NO: 1464
guucuauauguuuaauguc

SEQ ID NO: 115057 - RNA, 19 nt, Artificial Sequence
  Description of Artificial Sequence: Synthetic oligonucleotide
  Antisense strand to SEQ ID NO: 115056
gacauuaaacauauagaac

SEQ ID NO: 115058 - RNA, 19 nt, Artificial Sequence
  Description of Artificial Sequence: Synthetic oligonucleotide
  Sense strand starting at position 3355 of SEQ ID NO: 1464
auguuuaaugucgaaagug

SEQ ID NO: 115059 - RNA, 19 nt, Artificial Sequence
  Description of Artificial Sequence: Synthetic oligonucleotide
  Antisense strand to SEQ ID NO: 115058
cacuuucgacauuaaacau

SEQ ID NO: 115060 - RNA, 19 nt, Artificial Sequence
  Description of Artificial Sequence: Synthetic oligonucleotide
  Sense strand starting at position 3473 of SEQ ID NO: 1464
agucauugcccuuauaaag

SEQ ID NO: 115061 - RNA, 19 nt, Artificial Sequence
  Description of Artificial Sequence: Synthetic oligonucleotide
  Antisense strand to SEQ ID NO: 115060
cuuuauaagggcaaugacu

SEQ ID NO: 115062 - RNA, 19 nt, Artificial Sequence
  Description of Artificial Sequence: Synthetic oligonucleotide
  Sense strand starting at position 3544 of SEQ ID NO: 1464
ggugucagccacugacaaa

SEQ ID NO: 115063 - RNA, 19 nt, Artificial Sequence
  Description of Artificial Sequence: Synthetic oligonucleotide
  Antisense strand to SEQ ID NO: 115062
uuugucaguggcugacacc

SEQ ID NO: 115064 - RNA, 19 nt, Artificial Sequence
  Description of Artificial Sequence: Synthetic oligonucleotide
  Sense strand starting at position 3790 of SEQ ID NO: 1464
gggcaaggaguuuguaaga

SEQ ID NO: 115065 - RNA, 19 nt, Artificial Sequence
  Description of Artificial Sequence: Synthetic oligonucleotide
  Antisense strand to SEQ ID NO: 115064
ucuuacaaacuccuugccc

SEQ ID NO: 115066 - RNA, 19 nt, Artificial Sequence
  Description of Artificial Sequence: Synthetic oligonucleotide
  Sense strand starting at position 3843 of SEQ ID NO: 1464
ucaacagucagacaguguu

SEQ ID NO: 115067 - RNA, 19 nt, Artificial Sequence
  Description of Artificial Sequence: Synthetic oligonucleotide
  Antisense strand to SEQ ID NO: 115066
aacacugucugacuguuga

SEQ ID NO: 115068 - RNA, 19 nt, Artificial Sequence
  Description of Artificial Sequence: Synthetic oligonucleotide
  Sense strand starting at position 3846 of SEQ ID NO: 1464
acagucagacaguguuauu

SEQ ID NO: 115069 - RNA, 19 nt, Artificial Sequence
  Description of Artificial Sequence: Synthetic oligonucleotide
  Antisense strand to SEQ ID NO: 115068
aauaacacugucugacugu

SEQ ID NO: 115070 - RNA, 19 nt, Artificial Sequence
  Description of Artificial Sequence: Synthetic oligonucleotide
  Sense strand starting at position 3855 of SEQ ID NO: 1464
caguguuauuuggaagaau

SEQ ID NO: 115071 - RNA, 19 nt, Artificial Sequence
  Description of Artificial Sequence: Synthetic oligonucleotide
  Antisense strand to SEQ ID NO: 115070
auucuuccaaauaacacug

SEQ ID NO: 115072 - RNA, 19 nt, Artificial Sequence
  Description of Artificial Sequence: Synthetic oligonucleotide
  Sense strand starting at position 3898 of SEQ ID NO: 1465
auuaauaguuucccaugua

SEQ ID NO: 115073 - RNA, 19 nt, Artificial Sequence
  Description of Artificial Sequence: Synthetic oligonucleotide
  Antisense strand to SEQ ID NO: 115072
uacaugggaaacuauuaau

SEQ ID NO: 115074 - RNA, 19 nt, Artificial Sequence
  Description of Artificial Sequence: Synthetic oligonucleotide
  Sense strand starting at position 3880 of SEQ ID NO: 1465
cguacuucuucuuuacaua

SEQ ID NO: 115075 - RNA, 19 nt, Artificial Sequence
  Description of Artificial Sequence: Synthetic oligonucleotide
  Antisense strand to SEQ ID NO: 115074
uauguaaagaagaaguacg

SEQ ID NO: 115076 - RNA, 19 nt, Artificial Sequence
  Description of Artificial Sequence: Synthetic oligonucleotide
  Sense strand starting at position 3879 of SEQ ID NO: 1465
acguacuucuucuuuacau

SEQ ID NO: 115077 - RNA, 19 nt, Artificial Sequence
  Description of Artificial Sequence: Synthetic oligonucleotide
  Antisense strand to SEQ ID NO: 115076
auguaaagaagaaguacgu

SEQ ID NO: 115078 - RNA, 19 nt, Artificial Sequence
  Description of Artificial Sequence: Synthetic oligonucleotide
  Sense strand starting at position 3760 of SEQ ID NO: 1465
cagccuaagcguuauuuac

SEQ ID NO: 115079 - RNA, 19 nt, Artificial Sequence
  Description of Artificial Sequence: Synthetic oligonucleotide
  Antisense strand to SEQ ID NO: 115078
guaaauaacgcuuaggcug

SEQ ID NO: 115080 - RNA, 19 nt, Artificial Sequence
  Description of Artificial Sequence: Synthetic oligonucleotide
  Sense strand starting at position 3645 of SEQ ID NO: 1465
agggcuacuuuauuggaau

SEQ ID NO: 115081 - RNA, 19 nt, Artificial Sequence
  Description of Artificial Sequence: Synthetic oligonucleotide
  Antisense strand to SEQ ID NO: 115080
auuccaauaaaguagcccu

SEQ ID NO: 115082 - RNA, 19 nt, Artificial Sequence
  Description of Artificial Sequence: Synthetic oligonucleotide
  Sense strand starting at position 3620 of SEQ ID NO: 1465
gagagaaauugggauagga

SEQ ID NO: 115083 - RNA, 19 nt, Artificial Sequence
  Description of Artificial Sequence: Synthetic oligonucleotide
  Antisense strand to SEQ ID NO: 115082
uccuaucccaauuucucuc

SEQ ID NO: 115084 - RNA, 19 nt, Artificial Sequence
  Description of Artificial Sequence: Synthetic oligonucleotide
  Sense strand starting at position 3584 of SEQ ID NO: 1465
agggccugguacucagaaa

SEQ ID NO: 115085 - RNA, 19 nt, Artificial Sequence
  Description of Artificial Sequence: Synthetic oligonucleotide
  Antisense strand to SEQ ID NO: 115084
uuucugaguaccaggcccu

SEQ ID NO: 115086 - RNA, 19 nt, Artificial Sequence
  Description of Artificial Sequence: Synthetic oligonucleotide
  Sense strand starting at position 3322 of SEQ ID NO: 1465
ggagcucucccucaucuca

SEQ ID NO: 115087 - RNA, 19 nt, Artificial Sequence
  Description of Artificial Sequence: Synthetic oligonucleotide
  Antisense strand to SEQ ID NO: 115086
ugagaugagggagagcucc

SEQ ID NO: 115088 - RNA, 19 nt, Artificial Sequence
  Description of Artificial Sequence: Synthetic oligonucleotide
  Sense strand starting at position 3110 of SEQ ID NO: 1465
aguaauuauuucuauccga

SEQ ID NO: 115089 - RNA, 19 nt, Artificial Sequence
  Description of Artificial Sequence: Synthetic oligonucleotide
  Antisense strand to SEQ ID NO: 115088
ucggauagaaauaauuacu

SEQ ID NO: 115090 - RNA, 19 nt, Artificial Sequence
  Description of Artificial Sequence: Synthetic oligonucleotide
  Sense strand starting at position 3083 of SEQ ID NO: 1465
agugcucagcacuaaauua

SEQ ID NO: 115091 - RNA, 19 nt, Artificial Sequence
  Description of Artificial Sequence: Synthetic oligonucleotide
  Antisense strand to SEQ ID NO: 115090
uaauuuagugcugagcacu

SEQ ID NO: 115092 - RNA, 19 nt, Artificial Sequence
  Description of Artificial Sequence: Synthetic oligonucleotide
  Sense strand starting at position 3080 of SEQ ID NO: 1465
uuuagugcucagcacuaaa

SEQ ID NO: 115093 - RNA, 19 nt, Artificial Sequence
  Description of Artificial Sequence: Synthetic oligonucleotide
  Antisense strand to SEQ ID NO: 115092
uuuagugcugagcacuaaa

SEQ ID NO: 115094 - RNA, 19 nt, Artificial Sequence
  Description of Artificial Sequence: Synthetic oligonucleotide
  Sense strand starting at position 3076 of SEQ ID NO: 1465
cagauuuagugcucagcac

SEQ ID NO: 115095 - RNA, 19 nt, Artificial Sequence
  Description of Artificial Sequence: Synthetic oligonucleotide
  Antisense strand to SEQ ID NO: 115094
gugcugagcacuaaaucug

SEQ ID NO: 115096 - RNA, 19 nt, Artificial Sequence
  Description of Artificial Sequence: Synthetic oligonucleotide
  Sense strand starting at position 2997 of SEQ ID NO: 1465
ugcuccaggcacugugaua

SEQ ID NO: 115097 - RNA, 19 nt, Artificial Sequence
  Description of Artificial Sequence: Synthetic oligonucleotide
  Antisense strand to SEQ ID NO: 115096
uaucacagugccuggagca

SEQ ID NO: 115098 - RNA, 19 nt, Artificial Sequence
  Description of Artificial Sequence: Synthetic oligonucleotide
  Sense strand starting at position 2679 of SEQ ID NO: 1465
ugaggugaggugugaaguu

SEQ ID NO: 115099 - RNA, 19 nt, Artificial Sequence
  Description of Artificial Sequence: Synthetic oligonucleotide
  Antisense strand to SEQ ID NO: 115098
aacuucacaccucaccuca

SEQ ID NO: 115100 - RNA, 19 nt, Artificial Sequence
  Description of Artificial Sequence: Synthetic oligonucleotide
  Sense strand starting at position 2481 of SEQ ID NO: 1465
aauagaagagccggguauu

SEQ ID NO: 115101 - RNA, 19 nt, Artificial Sequence
  Description of Artificial Sequence: Synthetic oligonucleotide
  Antisense strand to SEQ ID NO: 115100
aauacccggcucuucuauu

SEQ ID NO: 115102 - RNA, 19 nt, Artificial Sequence
  Description of Artificial Sequence: Synthetic oligonucleotide
  Sense strand starting at position 2398 of SEQ ID NO: 1465
uuacaugcuccguaaauaa

SEQ ID NO: 115103 - RNA, 19 nt, Artificial Sequence
  Description of Artificial Sequence: Synthetic oligonucleotide
  Antisense strand to SEQ ID NO: 115102
uuauuuacggagcauguaa

SEQ ID NO: 115104 - RNA, 19 nt, Artificial Sequence
  Description of Artificial Sequence: Synthetic oligonucleotide
  Sense strand starting at position 2397 of SEQ ID NO: 1465
guuacaugcuccguaaaua

SEQ ID NO: 115105 - RNA, 19 nt, Artificial Sequence
  Description of Artificial Sequence: Synthetic oligonucleotide
  Antisense strand to SEQ ID NO: 115104
uauuuacggagcauguaac

SEQ ID NO: 115106 - RNA, 19 nt, Artificial Sequence
  Description of Artificial Sequence: Synthetic oligonucleotide
  Sense strand starting at position 2394 of SEQ ID NO: 1465
acaguuacaugcuccguaa

SEQ ID NO: 115107 - RNA, 19 nt, Artificial Sequence
  Description of Artificial Sequence: Synthetic oligonucleotide
  Antisense strand to SEQ ID NO: 115106
uuacggagcauguaacugu

SEQ ID NO: 115108 - RNA, 19 nt, Artificial Sequence
  Description of Artificial Sequence: Synthetic oligonucleotide
  Sense strand starting at position 2293 of SEQ ID NO: 1465
uugucugugagaugaggaa

SEQ ID NO: 115109 - RNA, 19 nt, Artificial Sequence
  Description of Artificial Sequence: Synthetic oligonucleotide
  Antisense strand to SEQ ID NO: 115108
uuccucaucucacagacaa

SEQ ID NO: 115110 - RNA, 19 nt, Artificial Sequence
  Description of Artificial Sequence: Synthetic oligonucleotide
  Sense strand starting at position 2287 of SEQ ID NO: 1465
uucucuuugucugugagau

SEQ ID NO: 115111 - RNA, 19 nt, Artificial Sequence
  Description of Artificial Sequence: Synthetic oligonucleotide
  Antisense strand to SEQ ID NO: 115110
aucucacagacaaagagaa

SEQ ID NO: 115112 - RNA, 19 nt, Artificial Sequence
  Description of Artificial Sequence: Synthetic oligonucleotide
  Sense strand starting at position 2286 of SEQ ID NO: 1465
auucucuuugucugugaga

SEQ ID NO: 115113 - RNA, 19 nt, Artificial Sequence
  Description of Artificial Sequence: Synthetic oligonucleotide
  Antisense strand to SEQ ID NO: 115112
ucucacagacaaagagaau

SEQ ID NO: 115114 - RNA, 19 nt, Artificial Sequence
  Description of Artificial Sequence: Synthetic oligonucleotide
  Sense strand starting at position 2247 of SEQ ID NO: 1465
gagugaccuuguguaaguc

SEQ ID NO: 115115 - RNA, 19 nt, Artificial Sequence
  Description of Artificial Sequence: Synthetic oligonucleotide
  Antisense strand to SEQ ID NO: 115114
gacuuacacaaggucacuc

SEQ ID NO: 115116 - RNA, 19 nt, Artificial Sequence
  Description of Artificial Sequence: Synthetic oligonucleotide
  Sense strand starting at position 954 of SEQ ID NO: 1465
acagucacauuguuacauu

SEQ ID NO: 115117 - RNA, 19 nt, Artificial Sequence
  Description of Artificial Sequence: Synthetic oligonucleotide
  Antisense strand to SEQ ID NO: 115116
aauguaacaaugugacugu

SEQ ID NO: 115118 - RNA, 19 nt, Artificial Sequence
  Description of Artificial Sequence: Synthetic oligonucleotide
  Sense strand starting at position 933 of SEQ ID NO: 1465
ucaagagcuugacaagaaa

SEQ ID NO: 115119 - RNA, 19 nt, Artificial Sequence
  Description of Artificial Sequence: Synthetic oligonucleotide
  Antisense strand to SEQ ID NO: 115118
uuucuugucaagcucuuga

SEQ ID NO: 115120 - RNA, 19 nt, Artificial Sequence
  Description of Artificial Sequence: Synthetic oligonucleotide
  Sense strand starting at position 841 of SEQ ID NO: 1465
ccauguuauccaggaauca

SEQ ID NO: 115121 - RNA, 19 nt, Artificial Sequence
  Description of Artificial Sequence: Synthetic oligonucleotide
  Antisense strand to SEQ ID NO: 115120
ugauuccuggauaacaugg

SEQ ID NO: 115122 - RNA, 19 nt, Artificial Sequence
  Description of Artificial Sequence: Synthetic oligonucleotide
  Sense strand starting at position 838 of SEQ ID NO: 1465
cgcccauguuauccaggaa

SEQ ID NO: 115123 - RNA, 19 nt, Artificial Sequence
  Description of Artificial Sequence: Synthetic oligonucleotide
  Antisense strand to SEQ ID NO: 115122
uuccuggauaacaugggcg

SEQ ID NO: 115124 - RNA, 19 nt, Artificial Sequence
  Description of Artificial Sequence: Synthetic oligonucleotide
  Sense strand starting at position 678 of SEQ ID NO: 1465
cugccucuggcagaagaaa

SEQ ID NO: 115125 - RNA, 19 nt, Artificial Sequence
  Description of Artificial Sequence: Synthetic oligonucleotide
  Antisense strand to SEQ ID NO: 115124
uuucuucugccagaggcag

SEQ ID NO: 115126 - RNA, 19 nt, Artificial Sequence
  Description of Artificial Sequence: Synthetic oligonucleotide
  Sense strand starting at position 624 of SEQ ID NO: 1465
ccucacuuccugggaugaa

SEQ ID NO: 115127 - RNA, 19 nt, Artificial Sequence
  Description of Artificial Sequence: Synthetic oligonucleotide
  Antisense strand to SEQ ID NO: 115126
uucaucccaggaagugagg

SEQ ID NO: 115128 - RNA, 19 nt, Artificial Sequence
  Description of Artificial Sequence: Synthetic oligonucleotide
  Sense strand starting at position 570 of SEQ ID NO: 1465
gucuuaggcucucugagaa

SEQ ID NO: 115129 - RNA, 19 nt, Artificial Sequence
  Description of Artificial Sequence: Synthetic oligonucleotide
  Antisense strand to SEQ ID NO: 115128
uucucagagagccuaagac

SEQ ID NO: 115130 - RNA, 19 nt, Artificial Sequence
  Description of Artificial Sequence: Synthetic oligonucleotide
  Sense strand starting at position 462 of SEQ ID NO: 1465
gagggcaucuuuguuguuu

SEQ ID NO: 115131 - RNA, 19 nt, Artificial Sequence
  Description of Artificial Sequence: Synthetic oligonucleotide
  Antisense strand to SEQ ID NO: 115130
aaacaacaaagaugcccuc

SEQ ID NO: 115132 - RNA, 19 nt, Artificial Sequence
  Description of Artificial Sequence: Synthetic oligonucleotide
  Sense strand starting at position 288 of SEQ ID NO: 1465
aagaaugaugccugggcau

SEQ ID NO: 115133 - RNA, 19 nt, Artificial Sequence
  Description of Artificial Sequence: Synthetic oligonucleotide
  Antisense strand to SEQ ID NO: 115132
augcccaggcaucauucuu

SEQ ID NO: 115134 - RNA, 19 nt, Artificial Sequence
  Description of Artificial Sequence: Synthetic oligonucleotide
  Sense strand starting at position 238 of SEQ ID NO: 1465
gucuguauucuucgaacag

SEQ ID NO: 115135 - RNA, 19 nt, Artificial Sequence
  Description of Artificial Sequence: Synthetic oligonucleotide
  Antisense strand to SEQ ID NO: 115134
cuguucgaagaauacagac

SEQ ID NO: 115136 - RNA, 19 nt, Artificial Sequence
  Description of Artificial Sequence: Synthetic oligonucleotide
  Sense strand starting at position 231 of SEQ ID NO: 1465
agauuaggucuguauucuu

SEQ ID NO: 115137 - RNA, 19 nt, Artificial Sequence
  Description of Artificial Sequence: Synthetic oligonucleotide
  Antisense strand to SEQ ID NO: 115136
aagaauacagaccuaaucu

SEQ ID NO: 115138 - RNA, 19 nt, Artificial Sequence
  Description of Artificial Sequence: Synthetic oligonucleotide
  Sense strand starting at position 230 of SEQ ID NO: 1465
gagauuaggucuguauucu

SEQ ID NO: 115139 - RNA, 19 nt, Artificial Sequence
  Description of Artificial Sequence: Synthetic oligonucleotide
  Antisense strand to SEQ ID NO: 115138
agaauacagaccuaaucuc

SEQ ID NO: 115140 - RNA, 19 nt, Artificial Sequence
  Description of Artificial Sequence: Synthetic oligonucleotide
  Sense strand starting at position 229 of SEQ ID NO: 1465
ggagauuaggucuguauuc

SEQ ID NO: 115141 - RNA, 19 nt, Artificial Sequence
  Description of Artificial Sequence: Synthetic oligonucleotide
  Antisense strand to SEQ ID NO: 115140
gaauacagaccuaaucucc

SEQ ID NO: 115142 - RNA, 19 nt, Artificial Sequence
  Description of Artificial Sequence: Synthetic oligonucleotide
  Sense strand starting at position 226 of SEQ ID NO: 1465
ugaggagauuaggucugua

SEQ ID NO: 115143 - RNA, 19 nt, Artificial Sequence
  Description of Artificial Sequence: Synthetic oligonucleotide
  Antisense strand to SEQ ID NO: 115142
uacagaccuaaucuccuca

SEQ ID NO: 115144 - RNA, 19 nt, Artificial Sequence
  Description of Artificial Sequence: Synthetic oligonucleotide
  Sense strand starting at position 175 of SEQ ID NO: 1465
ccacguucugcgcugcaga

SEQ ID NO: 115145 - RNA, 19 nt, Artificial Sequence
  Description of Artificial Sequence: Synthetic oligonucleotide
  Antisense strand to SEQ ID NO: 115144
ucugcagcgcagaacgugg

SEQ ID NO: 115146 - RNA, 19 nt, Artificial Sequence
  Description of Artificial Sequence: Synthetic oligonucleotide
  Sense strand starting at position 115 of SEQ ID NO: 1465
agagaucaucaaugccgaa

SEQ ID NO: 115147 - RNA, 19 nt, Artificial Sequence
  Description of Artificial Sequence: Synthetic oligonucleotide
  Antisense strand to SEQ ID NO: 115146
uucggcauugaugaucucu

SEQ ID NO: 115148 - RNA, 19 nt, Artificial Sequence
  Description of Artificial Sequence: Synthetic oligonucleotide
  Sense strand starting at position 87 of SEQ ID NO: 1465
acucuuucuggaggagcaa

SEQ ID NO: 115149 - RNA, 19 nt, Artificial Sequence
  Description of Artificial Sequence: Synthetic oligonucleotide
  Antisense strand to SEQ ID NO: 115148
uugcuccuccagaaagagu

SEQ ID NO: 115150 - RNA, 19 nt, Artificial Sequence
  Description of Artificial Sequence: Synthetic oligonucleotide
  Sense strand starting at position 39 of SEQ ID NO: 1465
guugcuugugaugagucau

SEQ ID NO: 115151 - RNA, 19 nt, Artificial Sequence
  Description of Artificial Sequence: Synthetic oligonucleotide
  Antisense strand to SEQ ID NO: 115150
augacucaucacaagcaac

SEQ ID NO: 115152 - RNA, 19 nt, Artificial Sequence
  Description of Artificial Sequence: Synthetic oligonucleotide
  Sense strand starting at position 3975 of SEQ ID NO: 1466
ccugcuuucccagagacau

SEQ ID NO: 115153 - RNA, 19 nt, Artificial Sequence
  Description of Artificial Sequence: Synthetic oligonucleotide
  Antisense strand to SEQ ID NO: 115152
augucucugggaaagcagg

SEQ ID NO: 115154 - RNA, 19 nt, Artificial Sequence
  Description of Artificial Sequence: Synthetic oligonucleotide
  Sense strand starting at position 3916 of SEQ ID NO: 1466
gagaaaugcaaaugcgagu

SEQ ID NO: 115155 - RNA, 19 nt, Artificial Sequence
  Description of Artificial Sequence: Synthetic oligonucleotide
  Antisense strand to SEQ ID NO: 115154
acucgcauuugcauuucuc

SEQ ID NO: 115156 - RNA, 19 nt, Artificial Sequence
  Description of Artificial Sequence: Synthetic oligonucleotide
  Sense strand starting at position 3904 of SEQ ID NO: 1466
auuuauuccugggagaaau

SEQ ID NO: 115157 - RNA, 19 nt, Artificial Sequence
  Description of Artificial Sequence: Synthetic oligonucleotide
  Antisense strand to SEQ ID NO: 115156
auuucucccaggaauaaau

SEQ ID NO: 115158 - RNA, 19 nt, Artificial Sequence
  Description of Artificial Sequence: Synthetic oligonucleotide
  Sense strand starting at position 3901 of SEQ ID NO: 1466
cacauuuauuccugggaga

SEQ ID NO: 115159 - RNA, 19 nt, Artificial Sequence
  Description of Artificial Sequence: Synthetic oligonucleotide
  Antisense strand to SEQ ID NO: 115158
ucucccaggaauaaaugug

SEQ ID NO: 115160 - RNA, 19 nt, Artificial Sequence
  Description of Artificial Sequence: Synthetic oligonucleotide
  Sense strand starting at position 3672 of SEQ ID NO: 1466
agaagagcauguucuugua

SEQ ID NO: 115161 - RNA, 19 nt, Artificial Sequence
  Description of Artificial Sequence: Synthetic oligonucleotide
  Antisense strand to SEQ ID NO: 115160
uacaagaacaugcucuucu

SEQ ID NO: 115162 - RNA, 19 nt, Artificial Sequence
  Description of Artificial Sequence: Synthetic oligonucleotide
  Sense strand starting at position 3669 of SEQ ID NO: 1466
cagagaagagcauguucuu

SEQ ID NO: 115163 - RNA, 19 nt, Artificial Sequence
  Description of Artificial Sequence: Synthetic oligonucleotide
  Antisense strand to SEQ ID NO: 115162
aagaacaugcucuucucug

SEQ ID NO: 115164 - RNA, 19 nt, Artificial Sequence
  Description of Artificial Sequence: Synthetic oligonucleotide
  Sense strand starting at position 3518 of SEQ ID NO: 1466
gauggcuuggcagaacuca

SEQ ID NO: 115165 - RNA, 19 nt, Artificial Sequence
  Description of Artificial Sequence: Synthetic oligonucleotide
  Antisense strand to SEQ ID NO: 115164
ugaguucugccaagccauc

SEQ ID NO: 115166 - RNA, 19 nt, Artificial Sequence
  Description of Artificial Sequence: Synthetic oligonucleotide
  Sense strand starting at position 3514 of SEQ ID NO: 1466
agcagauggcuuggcagaa

SEQ ID NO: 115167 - RNA, 19 nt, Artificial Sequence
  Description of Artificial Sequence: Synthetic oligonucleotide
  Antisense strand to SEQ ID NO: 115166
uucugccaagccaucugcu

SEQ ID NO: 115168 - RNA, 19 nt, Artificial Sequence
  Description of Artificial Sequence: Synthetic oligonucleotide
  Sense strand starting at position 3414 of SEQ ID NO: 1466
uugacucccuggucagaga

SEQ ID NO: 115169 - RNA, 19 nt, Artificial Sequence
  Description of Artificial Sequence: Synthetic oligonucleotide
  Antisense strand to SEQ ID NO: 115168
ucucugaccagggagucaa

SEQ ID NO: 115170 - RNA, 19 nt, Artificial Sequence
  Description of Artificial Sequence: Synthetic oligonucleotide
  Sense strand starting at position 3323 of SEQ ID NO: 1466
guccuugugguauagauga

SEQ ID NO: 115171 - RNA, 19 nt, Artificial Sequence
  Description of Artificial Sequence: Synthetic oligonucleotide
  Antisense strand to SEQ ID NO: 115170
ucaucuauaccacaaggac

SEQ ID NO: 115172 - RNA, 19 nt, Artificial Sequence
  Description of Artificial Sequence: Synthetic oligonucleotide
  Sense strand starting at position 3231 of SEQ ID NO: 1466
cagguuucucagugacucu

SEQ ID NO: 115173 - RNA, 19 nt, Artificial Sequence
  Description of Artificial Sequence: Synthetic oligonucleotide
  Antisense strand to SEQ ID NO: 115172
agagucacugagaaaccug

SEQ ID NO: 115174 - RNA, 19 nt, Artificial Sequence
  Description of Artificial Sequence: Synthetic oligonucleotide
  Sense strand starting at position 3230 of SEQ ID NO: 1466
ccagguuucucagugacuc

SEQ ID NO: 115175 - RNA, 19 nt, Artificial Sequence
  Description of Artificial Sequence: Synthetic oligonucleotide
  Antisense strand to SEQ ID NO: 115174
gagucacugagaaaccugg

SEQ ID NO: 115176 - RNA, 19 nt, Artificial Sequence
  Description of Artificial Sequence: Synthetic oligonucleotide
  Sense strand starting at position 2638 of SEQ ID NO: 1466
cuaaaucugcuaggaggaa

SEQ ID NO: 115177 - RNA, 19 nt, Artificial Sequence
  Description of Artificial Sequence: Synthetic oligonucleotide
  Antisense strand to SEQ ID NO: 115176
uuccuccuagcagauuuag

SEQ ID NO: 115178 - RNA, 19 nt, Artificial Sequence
  Description of Artificial Sequence: Synthetic oligonucleotide
  Sense strand starting at position 2634 of SEQ ID NO: 1466
uucucuaaaucugcuagga

SEQ ID NO: 115179 - RNA, 19 nt, Artificial Sequence
  Description of Artificial Sequence: Synthetic oligonucleotide
  Antisense strand to SEQ ID NO: 115178
uccuagcagauuuagagaa

SEQ ID NO: 115180 - RNA, 19 nt, Artificial Sequence
  Description of Artificial Sequence: Synthetic oligonucleotide
  Sense strand starting at position 2626 of SEQ ID NO: 1466
acgggaaauucucuaaauc

SEQ ID NO: 115181 - RNA, 19 nt, Artificial Sequence
  Description of Artificial Sequence: Synthetic oligonucleotide
  Antisense strand to SEQ ID NO: 115180
gauuuagagaauuucccgu

SEQ ID NO: 115182 - RNA, 19 nt, Artificial Sequence
  Description of Artificial Sequence: Synthetic oligonucleotide
  Sense strand starting at position 2548 of SEQ ID NO: 1466
guucaaagagaagguguau

SEQ ID NO: 115183 - RNA, 19 nt, Artificial Sequence
  Description of Artificial Sequence: Synthetic oligonucleotide
  Antisense strand to SEQ ID NO: 115182
auacaccuucucuuugaac

SEQ ID NO: 115184 - RNA, 19 nt, Artificial Sequence
  Description of Artificial Sequence: Synthetic oligonucleotide
  Sense strand starting at position 2366 of SEQ ID NO: 1466
agagauagagcuugucuuu

SEQ ID NO: 115185 - RNA, 19 nt, Artificial Sequence
  Description of Artificial Sequence: Synthetic oligonucleotide
  Antisense strand to SEQ ID NO: 115184
aaagacaagcucuaucucu

SEQ ID NO: 115186 - RNA, 19 nt, Artificial Sequence
  Description of Artificial Sequence: Synthetic oligonucleotide
  Sense strand starting at position 2325 of SEQ ID NO: 1466
gauucugaguccucagaga

SEQ ID NO: 115187 - RNA, 19 nt, Artificial Sequence
  Description of Artificial Sequence: Synthetic oligonucleotide
  Antisense strand to SEQ ID NO: 115186
ucucugaggacucagaauc

SEQ ID NO: 115188 - RNA, 19 nt, Artificial Sequence
  Description of Artificial Sequence: Synthetic oligonucleotide
  Sense strand starting at position 2321 of SEQ ID NO: 1466
cucagauucugaguccuca

SEQ ID NO: 115189 - RNA, 19 nt, Artificial Sequence
  Description of Artificial Sequence: Synthetic oligonucleotide
  Antisense strand to SEQ ID NO: 115188
ugaggacucagaaucugag

SEQ ID NO: 115190 - RNA, 19 nt, Artificial Sequence
  Description of Artificial Sequence: Synthetic oligonucleotide
  Sense strand starting at position 2264 of SEQ ID NO: 1466
aggccacaucuuugaggaa

SEQ ID NO: 115191 - RNA, 19 nt, Artificial Sequence
  Description of Artificial Sequence: Synthetic oligonucleotide
  Antisense strand to SEQ ID NO: 115190
uuccucaaagauguggccu

SEQ ID NO: 115192 - RNA, 19 nt, Artificial Sequence
  Description of Artificial Sequence: Synthetic oligonucleotide
  Sense strand starting at position 2258 of SEQ ID NO: 1466
cugauaaggccacaucuuu

SEQ ID NO: 115193 - RNA, 19 nt, Artificial Sequence
  Description of Artificial Sequence: Synthetic oligonucleotide
  Antisense strand to SEQ ID NO: 115192
aaagauguggccuuaucag

SEQ ID NO: 115194 - RNA, 19 nt, Artificial Sequence
  Description of Artificial Sequence: Synthetic oligonucleotide
  Sense strand starting at position 2245 of SEQ ID NO: 1466
cuuguccacucuccugaua

SEQ ID NO: 115195 - RNA, 19 nt, Artificial Sequence
  Description of Artificial Sequence: Synthetic oligonucleotide
  Antisense strand to SEQ ID NO: 115194
uaucaggagaguggacaag

SEQ ID NO: 115196 - RNA, 19 nt, Artificial Sequence
  Description of Artificial Sequence: Synthetic oligonucleotide
  Sense strand starting at position 1778 of SEQ ID NO: 1466
gaguuuagugcccacccaa

SEQ ID NO: 115197 - RNA, 19 nt, Artificial Sequence
  Description of Artificial Sequence: Synthetic oligonucleotide
  Antisense strand to SEQ ID NO: 115196
uugggugggcacuaaacuc

SEQ ID NO: 115198 - RNA, 19 nt, Artificial Sequence
  Description of Artificial Sequence: Synthetic oligonucleotide
  Sense strand starting at position 1351 of SEQ ID NO: 1466
ggcauaaguguauacaaca

SEQ ID NO: 115199 - RNA, 19 nt, Artificial Sequence
  Description of Artificial Sequence: Synthetic oligonucleotide
  Antisense strand to SEQ ID NO: 115198
uguuguauacacuuaugcc

SEQ ID NO: 115200 - RNA, 19 nt, Artificial Sequence
  Description of Artificial Sequence: Synthetic oligonucleotide
  Sense strand starting at position 1349 of SEQ ID NO: 1466
caggcauaaguguauacaa

SEQ ID NO: 115201 - RNA, 19 nt, Artificial Sequence
  Description of Artificial Sequence: Synthetic oligonucleotide
  Antisense strand to SEQ ID NO: 115200
uuguauacacuuaugccug

SEQ ID NO: 115202 - RNA, 19 nt, Artificial Sequence
  Description of Artificial Sequence: Synthetic oligonucleotide
  Sense strand starting at position 1295 of SEQ ID NO: 1466
uaguucguauauguauaga

SEQ ID NO: 115203 - RNA, 19 nt, Artificial Sequence
  Description of Artificial Sequence: Synthetic oligonucleotide
  Antisense strand to SEQ ID NO: 115202
ucuauacauauacgaacua

SEQ ID NO: 115204 - RNA, 19 nt, Artificial Sequence
  Description of Artificial Sequence: Synthetic oligonucleotide
  Sense strand starting at position 1269 of SEQ ID NO: 1466
uaugcaugugaguacaaau

SEQ ID NO: 115205 - RNA, 19 nt, Artificial Sequence
  Description of Artificial Sequence: Synthetic oligonucleotide
  Antisense strand to SEQ ID NO: 115204
auuuguacucacaugcaua

SEQ ID NO: 115206 - RNA, 19 nt, Artificial Sequence
  Description of Artificial Sequence: Synthetic oligonucleotide
  Sense strand starting at position 1268 of SEQ ID NO: 1466
auaugcaugugaguacaaa

SEQ ID NO: 115207 - RNA, 19 nt, Artificial Sequence
  Description of Artificial Sequence: Synthetic oligonucleotide
  Antisense strand to SEQ ID NO: 115206
uuuguacucacaugcauau

SEQ ID NO: 115208 - RNA, 19 nt, Artificial Sequence
  Description of Artificial Sequence: Synthetic oligonucleotide
  Sense strand starting at position 1261 of SEQ ID NO: 1466
guaugugauaugcauguga

SEQ ID NO: 115209 - RNA, 19 nt, Artificial Sequence
  Description of Artificial Sequence: Synthetic oligonucleotide
  Antisense strand to SEQ ID NO: 115208
ucacaugcauaucacauac

SEQ ID NO: 115210 - RNA, 19 nt, Artificial Sequence
  Description of Artificial Sequence: Synthetic oligonucleotide
  Sense strand starting at position 1211 of SEQ ID NO: 1466
uuagauaccuguguauauu

SEQ ID NO: 115211 - RNA, 19 nt, Artificial Sequence
  Description of Artificial Sequence: Synthetic oligonucleotide
  Antisense strand to SEQ ID NO: 115210
aauauacacagguaucuaa

SEQ ID NO: 115212 - RNA, 19 nt, Artificial Sequence
  Description of Artificial Sequence: Synthetic oligonucleotide
  Sense strand starting at position 1210 of SEQ ID NO: 1466
cuuagauaccuguguauau

SEQ ID NO: 115213 - RNA, 19 nt, Artificial Sequence
  Description of Artificial Sequence: Synthetic oligonucleotide
  Antisense strand to SEQ ID NO: 115212
auauacacagguaucuaag

SEQ ID NO: 115214 - RNA, 19 nt, Artificial Sequence
  Description of Artificial Sequence: Synthetic oligonucleotide
  Sense strand starting at position 1207 of SEQ ID NO: 1466
uuccuuagauaccugugua

SEQ ID NO: 115215 - RNA, 19 nt, Artificial Sequence
  Description of Artificial Sequence: Synthetic oligonucleotide
  Antisense strand to SEQ ID NO: 115214
uacacagguaucuaaggaa

SEQ ID NO: 115216 - RNA, 19 nt, Artificial Sequence
  Description of Artificial Sequence: Synthetic oligonucleotide
  Sense strand starting at position 1173 of SEQ ID NO: 1466
gugugauugcaugagugug

SEQ ID NO: 115217 - RNA, 19 nt, Artificial Sequence
  Description of Artificial Sequence: Synthetic oligonucleotide
  Antisense strand to SEQ ID NO: 115216
cacacucaugcaaucacac

SEQ ID NO: 115218 - RNA, 19 nt, Artificial Sequence
  Description of Artificial Sequence: Synthetic oligonucleotide
  Sense strand starting at position 1043 of SEQ ID NO: 1466
caccuagucucuuuaggag

SEQ ID NO: 115219 - RNA, 19 nt, Artificial Sequence
  Description of Artificial Sequence: Synthetic oligonucleotide
  Antisense strand to SEQ ID NO: 115218
cuccuaaagagacuaggug

SEQ ID NO: 115220 - RNA, 19 nt, Artificial Sequence
  Description of Artificial Sequence: Synthetic oligonucleotide
  Sense strand starting at position 1004 of SEQ ID NO: 1466
guggguacagaaugaauga

SEQ ID NO: 115221 - RNA, 19 nt, Artificial Sequence
  Description of Artificial Sequence: Synthetic oligonucleotide
  Antisense strand to SEQ ID NO: 115220
ucauucauucuguacccac

SEQ ID NO: 115222 - RNA, 19 nt, Artificial Sequence
  Description of Artificial Sequence: Synthetic oligonucleotide
  Sense strand starting at position 997 of SEQ ID NO: 1466
ugucucuguggguacagaa

SEQ ID NO: 115223 - RNA, 19 nt, Artificial Sequence
  Description of Artificial Sequence: Synthetic oligonucleotide
  Antisense strand to SEQ ID NO: 115222
uucuguacccacagagaca

SEQ ID NO: 115224 - RNA, 19 nt, Artificial Sequence
  Description of Artificial Sequence: Synthetic oligonucleotide
  Sense strand starting at position 992 of SEQ ID NO: 1466
ggacuugucucugugggua

SEQ ID NO: 115225 - RNA, 19 nt, Artificial Sequence
  Description of Artificial Sequence: Synthetic oligonucleotide
  Antisense strand to SEQ ID NO: 115224
uacccacagagacaagucc

SEQ ID NO: 115226 - RNA, 19 nt, Artificial Sequence
  Description of Artificial Sequence: Synthetic oligonucleotide
  Sense strand starting at position 991 of SEQ ID NO: 1466
aggacuugucucugugggu

SEQ ID NO: 115227 - RNA, 19 nt, Artificial Sequence
  Description of Artificial Sequence: Synthetic oligonucleotide
  Antisense strand to SEQ ID NO: 115226
acccacagagacaaguccu

SEQ ID NO: 115228 - RNA, 19 nt, Artificial Sequence
  Description of Artificial Sequence: Synthetic oligonucleotide
  Sense strand starting at position 555 of SEQ ID NO: 1466
agucacuaagcucgauuua

SEQ ID NO: 115229 - RNA, 19 nt, Artificial Sequence
  Description of Artificial Sequence: Synthetic oligonucleotide
  Antisense strand to SEQ ID NO: 115228
uaaaucgagcuuagugacu

SEQ ID NO: 115230 - RNA, 19 nt, Artificial Sequence
  Description of Artificial Sequence: Synthetic oligonucleotide
  Sense strand starting at position 425 of SEQ ID NO: 1466
gaggcaugugcagacacau

SEQ ID NO: 115231 - RNA, 19 nt, Artificial Sequence
  Description of Artificial Sequence: Synthetic oligonucleotide
  Antisense strand to SEQ ID NO: 115230
augugucugcacaugccuc

SEQ ID NO: 115232 - RNA, 19 nt, Artificial Sequence
  Description of Artificial Sequence: Synthetic oligonucleotide
  Sense strand starting at position 3939 of SEQ ID NO: 1467
aggagaugcucucccagga

SEQ ID NO: 115233 - RNA, 19 nt, Artificial Sequence
  Description of Artificial Sequence: Synthetic oligonucleotide
  Antisense strand to SEQ ID NO: 115232
uccugggagagcaucuccu

SEQ ID NO: 115234 - RNA, 19 nt, Artificial Sequence
  Description of Artificial Sequence: Synthetic oligonucleotide
  Sense strand starting at position 3882 of SEQ ID NO: 1467
uugagagucauaggcauuc

SEQ ID NO: 115235 - RNA, 19 nt, Artificial Sequence
  Description of Artificial Sequence: Synthetic oligonucleotide
  Antisense strand to SEQ ID NO: 115234
gaaugccuaugacucucaa

SEQ ID NO: 115236 - RNA, 19 nt, Artificial Sequence
  Description of Artificial Sequence: Synthetic oligonucleotide
  Sense strand starting at position 3864 of SEQ ID NO: 1467
guaggaauauagucagguu

SEQ ID NO: 115237 - RNA, 19 nt, Artificial Sequence
  Description of Artificial Sequence: Synthetic oligonucleotide
  Antisense strand to SEQ ID NO: 115236
aaccugacuauauuccuac

SEQ ID NO: 115238 - RNA, 19 nt, Artificial Sequence
  Description of Artificial Sequence: Synthetic oligonucleotide
  Sense strand starting at position 3561 of SEQ ID NO: 1467
gcaaauauagcuuaugaag

SEQ ID NO: 115239 - RNA, 19 nt, Artificial Sequence
  Description of Artificial Sequence: Synthetic oligonucleotide
  Antisense strand to SEQ ID NO: 115238
cuucauaagcuauauuugc

SEQ ID NO: 115240 - RNA, 19 nt, Artificial Sequence
  Description of Artificial Sequence: Synthetic oligonucleotide
  Sense strand starting at position 3521 of SEQ ID NO: 1467
cuuggaagucuauaauucu

SEQ ID NO: 115241 - RNA, 19 nt, Artificial Sequence
  Description of Artificial Sequence: Synthetic oligonucleotide
  Antisense strand to SEQ ID NO: 115240
agaauuauagacuuccaag

SEQ ID NO: 115242 - RNA, 19 nt, Artificial Sequence
  Description of Artificial Sequence: Synthetic oligonucleotide
  Sense strand starting at position 3478 of SEQ ID NO: 1467
guagaagaauggcuauuau

SEQ ID NO: 115243 - RNA, 19 nt, Artificial Sequence
  Description of Artificial Sequence: Synthetic oligonucleotide
  Antisense strand to SEQ ID NO: 115242
auaauagccauucuucuac

SEQ ID NO: 115244 - RNA, 19 nt, Artificial Sequence
  Description of Artificial Sequence: Synthetic oligonucleotide
  Sense strand starting at position 3467 of SEQ ID NO: 1467
ucugucuugagguagaaga

SEQ ID NO: 115245 - RNA, 19 nt, Artificial Sequence
  Description of Artificial Sequence: Synthetic oligonucleotide
  Antisense strand to SEQ ID NO: 115244
ucuucuaccucaagacaga

SEQ ID NO: 115246 - RNA, 19 nt, Artificial Sequence
  Description of Artificial Sequence: Synthetic oligonucleotide
  Sense strand starting at position 3447 of SEQ ID NO: 1467
ucuuaucuggcugaaacuu

SEQ ID NO: 115247 - RNA, 19 nt, Artificial Sequence
  Description of Artificial Sequence: Synthetic oligonucleotide
  Antisense strand to SEQ ID NO: 115246
aaguuucagccagauaaga

SEQ ID NO: 115248 - RNA, 19 nt, Artificial Sequence
  Description of Artificial Sequence: Synthetic oligonucleotide
  Sense strand starting at position 3446 of SEQ ID NO: 1467
aucuuaucuggcugaaacu

SEQ ID NO: 115249 - RNA, 19 nt, Artificial Sequence
  Description of Artificial Sequence: Synthetic oligonucleotide
  Antisense strand to SEQ ID NO: 115248
aguuucagccagauaagau

SEQ ID NO: 115250 - RNA, 19 nt, Artificial Sequence
  Description of Artificial Sequence: Synthetic oligonucleotide
  Sense strand starting at position 3370 of SEQ ID NO: 1467
gauucugcccaaggaagaa

SEQ ID NO: 115251 - RNA, 19 nt, Artificial Sequence
  Description of Artificial Sequence: Synthetic oligonucleotide
  Antisense strand to SEQ ID NO: 115250
uucuuccuugggcagaauc

SEQ ID NO: 115252 - RNA, 19 nt, Artificial Sequence
  Description of Artificial Sequence: Synthetic oligonucleotide
  Sense strand starting at position 3366 of SEQ ID NO: 1467
uggugauucugcccaagga

SEQ ID NO: 115253 - RNA, 19 nt, Artificial Sequence
  Description of Artificial Sequence: Synthetic oligonucleotide
  Antisense strand to SEQ ID NO: 115252
uccuugggcagaaucacca

SEQ ID NO: 115254 - RNA, 19 nt, Artificial Sequence
  Description of Artificial Sequence: Synthetic oligonucleotide
  Sense strand starting at position 3275 of SEQ ID NO: 1467
aucagaaaugcuuggcaga

SEQ ID NO: 115255 - RNA, 19 nt, Artificial Sequence
  Description of Artificial Sequence: Synthetic oligonucleotide
  Antisense strand to SEQ ID NO: 115254
ucugccaagcauuucugau

SEQ ID NO: 115256 - RNA, 19 nt, Artificial Sequence
  Description of Artificial Sequence: Synthetic oligonucleotide
  Sense strand starting at position 3260 of SEQ ID NO: 1467
ugccucuauggugaaauca

SEQ ID NO: 115257 - RNA, 19 nt, Artificial Sequence
  Description of Artificial Sequence: Synthetic oligonucleotide
  Antisense strand to SEQ ID NO: 115256
ugauuucaccauagaggca

SEQ ID NO: 115258 - RNA, 19 nt, Artificial Sequence
  Description of Artificial Sequence: Synthetic oligonucleotide
  Sense strand starting at position 3197 of SEQ ID NO: 1467
auuugucuucugugaggcu

SEQ ID NO: 115259 - RNA, 19 nt, Artificial Sequence
  Description of Artificial Sequence: Synthetic oligonucleotide
  Antisense strand to SEQ ID NO: 115258
agccucacagaagacaaau

SEQ ID NO: 115260 - RNA, 19 nt, Artificial Sequence
  Description of Artificial Sequence: Synthetic oligonucleotide
  Sense strand starting at position 2964 of SEQ ID NO: 1467
ugauuugcuuaugcauauu

SEQ ID NO: 115261 - RNA, 19 nt, Artificial Sequence
  Description of Artificial Sequence: Synthetic oligonucleotide
  Antisense strand to SEQ ID NO: 115260
aauaugcauaagcaaauca

SEQ ID NO: 115262 - RNA, 19 nt, Artificial Sequence
  Description of Artificial Sequence: Synthetic oligonucleotide
  Sense strand starting at position 2798 of SEQ ID NO: 1467
uuaagugucccucaccuaa

SEQ ID NO: 115263 - RNA, 19 nt, Artificial Sequence
  Description of Artificial Sequence: Synthetic oligonucleotide
  Antisense strand to SEQ ID NO: 115262
uuaggugagggacacuuaa

SEQ ID NO: 115264 - RNA, 19 nt, Artificial Sequence
  Description of Artificial Sequence: Synthetic oligonucleotide
  Sense strand starting at position 2729 of SEQ ID NO: 1467
caacuuugugaguaagccu

SEQ ID NO: 115265 - RNA, 19 nt, Artificial Sequence
  Description of Artificial Sequence: Synthetic oligonucleotide
  Antisense strand to SEQ ID NO: 115264
aggcuuacucacaaaguug

SEQ ID NO: 115266 - RNA, 19 nt, Artificial Sequence
  Description of Artificial Sequence: Synthetic oligonucleotide
  Sense strand starting at position 2723 of SEQ ID NO: 1467
ccaauacaacuuugugagu

SEQ ID NO: 115267 - RNA, 19 nt, Artificial Sequence
  Description of Artificial Sequence: Synthetic oligonucleotide
  Antisense strand to SEQ ID NO: 115266
acucacaaaguuguauugg

SEQ ID NO: 115268 - RNA, 19 nt, Artificial Sequence
  Description of Artificial Sequence: Synthetic oligonucleotide
  Sense strand starting at position 2620 of SEQ ID NO: 1467
gucugagugauggaagucu

SEQ ID NO: 115269 - RNA, 19 nt, Artificial Sequence
  Description of Artificial Sequence: Synthetic oligonucleotide
  Antisense strand to SEQ ID NO: 115268
agacuuccaucacucagac

SEQ ID NO: 115270 - RNA, 19 nt, Artificial Sequence
  Description of Artificial Sequence: Synthetic oligonucleotide
  Sense strand starting at position 2616 of SEQ ID NO: 1467
uucugucugagugauggaa

SEQ ID NO: 115271 - RNA, 19 nt, Artificial Sequence
  Description of Artificial Sequence: Synthetic oligonucleotide
  Antisense strand to SEQ ID NO: 115270
uuccaucacucagacagaa

SEQ ID NO: 115272 - RNA, 19 nt, Artificial Sequence
  Description of Artificial Sequence: Synthetic oligonucleotide
  Sense strand starting at position 2463 of SEQ ID NO: 1467
uuuguuuagggauggacua

SEQ ID NO: 115273 - RNA, 19 nt, Artificial Sequence
  Description of Artificial Sequence: Synthetic oligonucleotide
  Antisense strand to SEQ ID NO: 115272
uaguccaucccuaaacaaa

SEQ ID NO: 115274 - RNA, 19 nt, Artificial Sequence
  Description of Artificial Sequence: Synthetic oligonucleotide
  Sense strand starting at position 2429 of SEQ ID NO: 1467
ccaaauuaugcauggauug

SEQ ID NO: 115275 - RNA, 19 nt, Artificial Sequence
  Description of Artificial Sequence: Synthetic oligonucleotide
  Antisense strand to SEQ ID NO: 115274
caauccaugcauaauuugg

SEQ ID NO: 115276 - RNA, 19 nt, Artificial Sequence
  Description of Artificial Sequence: Synthetic oligonucleotide
  Sense strand starting at position 2426 of SEQ ID NO: 1467
gcuccaaauuaugcaugga

SEQ ID NO: 115277 - RNA, 19 nt, Artificial Sequence
  Description of Artificial Sequence: Synthetic oligonucleotide
  Antisense strand to SEQ ID NO: 115276
uccaugcauaauuuggagc

SEQ ID NO: 115278 - RNA, 19 nt, Artificial Sequence
  Description of Artificial Sequence: Synthetic oligonucleotide
  Sense strand starting at position 2304 of SEQ ID NO: 1467
ccguauuacacucagaggu

SEQ ID NO: 115279 - RNA, 19 nt, Artificial Sequence
  Description of Artificial Sequence: Synthetic oligonucleotide
  Antisense strand to SEQ ID NO: 115278
accucugaguguaauacgg

SEQ ID NO: 115280 - RNA, 19 nt, Artificial Sequence
  Description of Artificial Sequence: Synthetic oligonucleotide
  Sense strand starting at position 2069 of SEQ ID NO: 1467
aaguuaaucccuggguuua

SEQ ID NO: 115281 - RNA, 19 nt, Artificial Sequence
  Description of Artificial Sequence: Synthetic oligonucleotide
  Antisense strand to SEQ ID NO: 115280
uaaacccagggauuaacuu

SEQ ID NO: 115282 - RNA, 19 nt, Artificial Sequence
  Description of Artificial Sequence: Synthetic oligonucleotide
  Sense strand starting at position 2056 of SEQ ID NO: 1467
uuccuaguggauuaaguua

SEQ ID NO: 115283 - RNA, 19 nt, Artificial Sequence
  Description of Artificial Sequence: Synthetic oligonucleotide
  Antisense strand to SEQ ID NO: 115282
uaacuuaauccacuaggaa

SEQ ID NO: 115284 - RNA, 19 nt, Artificial Sequence
  Description of Artificial Sequence: Synthetic oligonucleotide
  Sense strand starting at position 2046 of SEQ ID NO: 1467
ggugauguauuuccuagug

SEQ ID NO: 115285 - RNA, 19 nt, Artificial Sequence
  Description of Artificial Sequence: Synthetic oligonucleotide
  Antisense strand to SEQ ID NO: 115284
cacuaggaaauacaucacc

SEQ ID NO: 115286 - RNA, 19 nt, Artificial Sequence
  Description of Artificial Sequence: Synthetic oligonucleotide
  Sense strand starting at position 2037 of SEQ ID NO: 1467
uacaaaucuggugauguau

SEQ ID NO: 115287 - RNA, 19 nt, Artificial Sequence
  Description of Artificial Sequence: Synthetic oligonucleotide
  Antisense strand to SEQ ID NO: 115286
auacaucaccagauuugua

SEQ ID NO: 115288 - RNA, 19 nt, Artificial Sequence
  Description of Artificial Sequence: Synthetic oligonucleotide
  Sense strand starting at position 2004 of SEQ ID NO: 1467
ucugaaauugauugaaguu

SEQ ID NO: 115289 - RNA, 19 nt, Artificial Sequence
  Description of Artificial Sequence: Synthetic oligonucleotide
  Antisense strand to SEQ ID NO: 115288
aacuucaaucaauuucaga

SEQ ID NO: 115290 - RNA, 19 nt, Artificial Sequence
  Description of Artificial Sequence: Synthetic oligonucleotide
  Sense strand starting at position 2003 of SEQ ID NO: 1467
uucugaaauugauugaagu

SEQ ID NO: 115291 - RNA, 19 nt, Artificial Sequence
  Description of Artificial Sequence: Synthetic oligonucleotide
  Antisense strand to SEQ ID NO: 115290
acuucaaucaauuucagaa

SEQ ID NO: 115292 - RNA, 19 nt, Artificial Sequence
  Description of Artificial Sequence: Synthetic oligonucleotide
  Sense strand starting at position 787 of SEQ ID NO: 1467
auccuuguuugucuauuua

SEQ ID NO: 115293 - RNA, 19 nt, Artificial Sequence
  Description of Artificial Sequence: Synthetic oligonucleotide
  Antisense strand to SEQ ID NO: 115292
uaaauagacaaacaaggau

SEQ ID NO: 115294 - RNA, 19 nt, Artificial Sequence
  Description of Artificial Sequence: Synthetic oligonucleotide
  Sense strand starting at position 610 of SEQ ID NO: 1467
ugcucuaguauaggaagaa

SEQ ID NO: 115295 - RNA, 19 nt, Artificial Sequence
  Description of Artificial Sequence: Synthetic oligonucleotide
  Antisense strand to SEQ ID NO: 115294
uucuuccuauacuagagca

SEQ ID NO: 115296 - RNA, 19 nt, Artificial Sequence
  Description of Artificial Sequence: Synthetic oligonucleotide
  Sense strand starting at position 510 of SEQ ID NO: 1467
cuaucuaauccugaggcca

SEQ ID NO: 115297 - RNA, 19 nt, Artificial Sequence
  Description of Artificial Sequence: Synthetic oligonucleotide
  Antisense strand to SEQ ID NO: 115296
uggccucaggauuagauag

SEQ ID NO: 115298 - RNA, 19 nt, Artificial Sequence
  Description of Artificial Sequence: Synthetic oligonucleotide
  Sense strand starting at position 495 of SEQ ID NO: 1467
ucuauuucuccugggcuau

SEQ ID NO: 115299 - RNA, 19 nt, Artificial Sequence
  Description of Artificial Sequence: Synthetic oligonucleotide
  Antisense strand to SEQ ID NO: 115298
auagcccaggagaaauaga

SEQ ID NO: 115300 - RNA, 19 nt, Artificial Sequence
  Description of Artificial Sequence: Synthetic oligonucleotide
  Sense strand starting at position 452 of SEQ ID NO: 1467
uuugcuagaaucugggaua

SEQ ID NO: 115301 - RNA, 19 nt, Artificial Sequence
  Description of Artificial Sequence: Synthetic oligonucleotide
  Antisense strand to SEQ ID NO: 115300
uaucccagauucuagcaaa

SEQ ID NO: 115302 - RNA, 19 nt, Artificial Sequence
  Description of Artificial Sequence: Synthetic oligonucleotide
  Sense strand starting at position 381 of SEQ ID NO: 1467
ugucaugaugacuguagaa

SEQ ID NO: 115303 - RNA, 19 nt, Artificial Sequence
  Description of Artificial Sequence: Synthetic oligonucleotide
  Antisense strand to SEQ ID NO: 115302
uucuacagucaucaugaca

SEQ ID NO: 115304 - RNA, 19 nt, Artificial Sequence
  Description of Artificial Sequence: Synthetic oligonucleotide
  Sense strand starting at position 380 of SEQ ID NO: 1467
cugucaugaugacuguaga

SEQ ID NO: 115305 - RNA, 19 nt, Artificial Sequence
  Description of Artificial Sequence: Synthetic oligonucleotide
  Antisense strand to SEQ ID NO: 115304
ucuacagucaucaugacag

SEQ ID NO: 115306 - RNA, 19 nt, Artificial Sequence
  Description of Artificial Sequence: Synthetic oligonucleotide
  Sense strand starting at position 378 of SEQ ID NO: 1467
cacugucaugaugacugua

SEQ ID NO: 115307 - RNA, 19 nt, Artificial Sequence
  Description of Artificial Sequence: Synthetic oligonucleotide
  Antisense strand to SEQ ID NO: 115306
uacagucaucaugacagug

SEQ ID NO: 115308 - RNA, 19 nt, Artificial Sequence
  Description of Artificial Sequence: Synthetic oligonucleotide
  Sense strand starting at position 148 of SEQ ID NO: 1467
uuuaauuguguguaaacac

SEQ ID NO: 115309 - RNA, 19 nt, Artificial Sequence
  Description of Artificial Sequence: Synthetic oligonucleotide
  Antisense strand to SEQ ID NO: 115308
guguuuacacacaauuaaa

SEQ ID NO: 115310 - RNA, 19 nt, Artificial Sequence
  Description of Artificial Sequence: Synthetic oligonucleotide
  Sense strand starting at position 138 of SEQ ID NO: 1467
ugaguucuucuuuaauugu

SEQ ID NO: 115311 - RNA, 19 nt, Artificial Sequence
  Description of Artificial Sequence: Synthetic oligonucleotide
  Antisense strand to SEQ ID NO: 115310
acaauuaaagaagaacuca

SEQ ID NO: 115312 - RNA, 19 nt, Artificial Sequence
  Description of Artificial Sequence: Synthetic oligonucleotide
  Sense strand starting at position 35 of SEQ ID NO: 1468
uuguguugaauguaugaaa

SEQ ID NO: 115313 - RNA, 19 nt, Artificial Sequence
  Description of Artificial Sequence: Synthetic oligonucleotide
  Antisense strand to SEQ ID NO: 115312
uuucauacauucaacacaa

SEQ ID NO: 115314 - RNA, 19 nt, Artificial Sequence
  Description of Artificial Sequence: Synthetic oligonucleotide
  Sense strand starting at position 280 of SEQ ID NO: 1468
cacagaaaugcauaugugu

SEQ ID NO: 115315 - RNA, 19 nt, Artificial Sequence
  Description of Artificial Sequence: Synthetic oligonucleotide
  Antisense strand to SEQ ID NO: 115314
acacauaugcauuucugug

SEQ ID NO: 115316 - RNA, 19 nt, Artificial Sequence
  Description of Artificial Sequence: Synthetic oligonucleotide
  Sense strand starting at position 332 of SEQ ID NO: 1468
ggcacaaauuauucugaca

SEQ ID NO: 115317 - RNA, 19 nt, Artificial Sequence
  Description of Artificial Sequence: Synthetic oligonucleotide
  Antisense strand to SEQ ID NO: 115316
ugucagaauaauuugugcc

SEQ ID NO: 115318 - RNA, 19 nt, Artificial Sequence
  Description of Artificial Sequence: Synthetic oligonucleotide
  Sense strand starting at position 378 of SEQ ID NO: 1468
cugggaugguuuccaaaca

SEQ ID NO: 115319 - RNA, 19 nt, Artificial Sequence
  Description of Artificial Sequence: Synthetic oligonucleotide
  Antisense strand to SEQ ID NO: 115318
uguuuggaaaccaucccag

SEQ ID NO: 115320 - RNA, 19 nt, Artificial Sequence
  Description of Artificial Sequence: Synthetic oligonucleotide
  Sense strand starting at position 858 of SEQ ID NO: 1468
aguguaugcuaagcuauuu

SEQ ID NO: 115321 - RNA, 19 nt, Artificial Sequence
  Description of Artificial Sequence: Synthetic oligonucleotide
  Antisense strand to SEQ ID NO: 115320
aaauagcuuagcauacacu

SEQ ID NO: 115322 - RNA, 19 nt, Artificial Sequence
  Description of Artificial Sequence: Synthetic oligonucleotide
  Sense strand starting at position 1153 of SEQ ID NO: 1468
gagugaugaguguagguca

SEQ ID NO: 115323 - RNA, 19 nt, Artificial Sequence
  Description of Artificial Sequence: Synthetic oligonucleotide
  Antisense strand to SEQ ID NO: 115322
ugaccuacacucaucacuc

SEQ ID NO: 115324 - RNA, 19 nt, Artificial Sequence
  Description of Artificial Sequence: Synthetic oligonucleotide
  Sense strand starting at position 1160 of SEQ ID NO: 1468
gaguguaggucacugagau

SEQ ID NO: 115325 - RNA, 19 nt, Artificial Sequence
  Description of Artificial Sequence: Synthetic oligonucleotide
  Antisense strand to SEQ ID NO: 115324
aucucagugaccuacacuc

SEQ ID NO: 115326 - RNA, 19 nt, Artificial Sequence
  Description of Artificial Sequence: Synthetic oligonucleotide
  Sense strand starting at position 1161 of SEQ ID NO: 1468
aguguaggucacugagaug

SEQ ID NO: 115327 - RNA, 19 nt, Artificial Sequence
  Description of Artificial Sequence: Synthetic oligonucleotide
  Antisense strand to SEQ ID NO: 115326
caucucagugaccuacacu

SEQ ID NO: 115328 - RNA, 19 nt, Artificial Sequence
  Description of Artificial Sequence: Synthetic oligonucleotide
  Sense strand starting at position 1448 of SEQ ID NO: 1468
ggugucucacaucacagaa

SEQ ID NO: 115329 - RNA, 19 nt, Artificial Sequence
  Description of Artificial Sequence: Synthetic oligonucleotide
  Antisense strand to SEQ ID NO: 115328
uucugugaugugagacacc

SEQ ID NO: 115330 - RNA, 19 nt, Artificial Sequence
  Description of Artificial Sequence: Synthetic oligonucleotide
  Sense strand starting at position 1509 of SEQ ID NO: 1468
cacagauguuacuuggaca

SEQ ID NO: 115331 - RNA, 19 nt, Artificial Sequence
  Description of Artificial Sequence: Synthetic oligonucleotide
  Antisense strand to SEQ ID NO: 115330
uguccaaguaacaucugug

SEQ ID NO: 115332 - RNA, 19 nt, Artificial Sequence
  Description of Artificial Sequence: Synthetic oligonucleotide
  Sense strand starting at position 1549 of SEQ ID NO: 1468
cccagugauccagaggcca

SEQ ID NO: 115333 - RNA, 19 nt, Artificial Sequence
  Description of Artificial Sequence: Synthetic oligonucleotide
  Antisense strand to SEQ ID NO: 115332
uggccucuggaucacuggg

SEQ ID NO: 115334 - RNA, 19 nt, Artificial Sequence
  Description of Artificial Sequence: Synthetic oligonucleotide
  Sense strand starting at position 1668 of SEQ ID NO: 1468
guugaugccaaaggugaga

SEQ ID NO: 115335 - RNA, 19 nt, Artificial Sequence
  Description of Artificial Sequence: Synthetic oligonucleotide
  Antisense strand to SEQ ID NO: 115334
ucucaccuuuggcaucaac

SEQ ID NO: 115336 - RNA, 19 nt, Artificial Sequence
  Description of Artificial Sequence: Synthetic oligonucleotide
  Sense strand starting at position 1670 of SEQ ID NO: 1468
ugaugccaaaggugagaua

SEQ ID NO: 115337 - RNA, 19 nt, Artificial Sequence
  Description of Artificial Sequence: Synthetic oligonucleotide
  Antisense strand to SEQ ID NO: 115336
uaucucaccuuuggcauca

SEQ ID NO: 115338 - RNA, 19 nt, Artificial Sequence
  Description of Artificial Sequence: Synthetic oligonucleotide
  Sense strand starting at position 1763 of SEQ ID NO: 1468
gaaugauggccacagugua

SEQ ID NO: 115339 - RNA, 19 nt, Artificial Sequence
  Description of Artificial Sequence: Synthetic oligonucleotide
  Antisense strand to SEQ ID NO: 115338
uacacuguggccaucauuc

SEQ ID NO: 115340 - RNA, 19 nt, Artificial Sequence
  Description of Artificial Sequence: Synthetic oligonucleotide
  Sense strand starting at position 1782 of SEQ ID NO: 1468
gcaggucucagagauggau

SEQ ID NO: 115341 - RNA, 19 nt, Artificial Sequence
  Description of Artificial Sequence: Synthetic oligonucleotide
  Antisense strand to SEQ ID NO: 115340
auccaucucugagaccugc

SEQ ID NO: 115342 - RNA, 19 nt, Artificial Sequence
  Description of Artificial Sequence: Synthetic oligonucleotide
  Sense strand starting at position 1838 of SEQ ID NO: 1468
gaugguccaggcgaauaau

SEQ ID NO: 115343 - RNA, 19 nt, Artificial Sequence
  Description of Artificial Sequence: Synthetic oligonucleotide
  Antisense strand to SEQ ID NO: 115342
auuauucgccuggaccauc

SEQ ID NO: 115344 - RNA, 19 nt, Artificial Sequence
  Description of Artificial Sequence: Synthetic oligonucleotide
  Sense strand starting at position 1847 of SEQ ID NO: 1468
ggcgaauaauggucaugau

SEQ ID NO: 115345 - RNA, 19 nt, Artificial Sequence
  Description of Artificial Sequence: Synthetic oligonucleotide
  Antisense strand to SEQ ID NO: 115344
aucaugaccauuauucgcc

SEQ ID NO: 115346 - RNA, 19 nt, Artificial Sequence
  Description of Artificial Sequence: Synthetic oligonucleotide
  Sense strand starting at position 1848 of SEQ ID NO: 1468
gcgaauaauggucaugaua

SEQ ID NO: 115347 - RNA, 19 nt, Artificial Sequence
  Description of Artificial Sequence: Synthetic oligonucleotide
  Antisense strand to SEQ ID NO: 115346
uaucaugaccauuauucgc

SEQ ID NO: 115348 - RNA, 19 nt, Artificial Sequence
  Description of Artificial Sequence: Synthetic oligonucleotide
  Sense strand starting at position 1856 of SEQ ID NO: 1468
uggucaugauaaucacauu

SEQ ID NO: 115349 - RNA, 19 nt, Artificial Sequence
  Description of Artificial Sequence: Synthetic oligonucleotide
  Antisense strand to SEQ ID NO: 115348
aaugugauuaucaugacca

SEQ ID NO: 115350 - RNA, 19 nt, Artificial Sequence
  Description of Artificial Sequence: Synthetic oligonucleotide
  Sense strand starting at position 1862 of SEQ ID NO: 1468
ugauaaucacauugccaga

SEQ ID NO: 115351 - RNA, 19 nt, Artificial Sequence
  Description of Artificial Sequence: Synthetic oligonucleotide
  Antisense strand to SEQ ID NO: 115350
ucuggcaaugugauuauca

SEQ ID NO: 115352 - RNA, 19 nt, Artificial Sequence
  Description of Artificial Sequence: Synthetic oligonucleotide
  Sense strand starting at position 2006 of SEQ ID NO: 1468
uaggucuagguuugaaaga

SEQ ID NO: 115353 - RNA, 19 nt, Artificial Sequence
  Description of Artificial Sequence: Synthetic oligonucleotide
  Antisense strand to SEQ ID NO: 115352
ucuuucaaaccuagaccua

SEQ ID NO: 115354 - RNA, 19 nt, Artificial Sequence
  Description of Artificial Sequence: Synthetic oligonucleotide
  Sense strand starting at position 2114 of SEQ ID NO: 1468
ugagcaaugcccuagaccu

SEQ ID NO: 115355 - RNA, 19 nt, Artificial Sequence
  Description of Artificial Sequence: Synthetic oligonucleotide
  Antisense strand to SEQ ID NO: 115354
aggucuagggcauugcuca

SEQ ID NO: 115356 - RNA, 19 nt, Artificial Sequence
  Description of Artificial Sequence: Synthetic oligonucleotide
  Sense strand starting at position 2135 of SEQ ID NO: 1468
ugucuacuugcucagaaua

SEQ ID NO: 115357 - RNA, 19 nt, Artificial Sequence
  Description of Artificial Sequence: Synthetic oligonucleotide
  Antisense strand to SEQ ID NO: 115356
uauucugagcaaguagaca

SEQ ID NO: 115358 - RNA, 19 nt, Artificial Sequence
  Description of Artificial Sequence: Synthetic oligonucleotide
  Sense strand starting at position 2225 of SEQ ID NO: 1468
uagugaucagaagguggua

SEQ ID NO: 115359 - RNA, 19 nt, Artificial Sequence
  Description of Artificial Sequence: Synthetic oligonucleotide
  Antisense strand to SEQ ID NO: 115358
uaccaccuucugaucacua

SEQ ID NO: 115360 - RNA, 19 nt, Artificial Sequence
  Description of Artificial Sequence: Synthetic oligonucleotide
  Sense strand starting at position 2316 of SEQ ID NO: 1468
guauaugauccagaggugu

SEQ ID NO: 115361 - RNA, 19 nt, Artificial Sequence
  Description of Artificial Sequence: Synthetic oligonucleotide
  Antisense strand to SEQ ID NO: 115360
acaccucuggaucauauac

SEQ ID NO: 115362 - RNA, 19 nt, Artificial Sequence
  Description of Artificial Sequence: Synthetic oligonucleotide
  Sense strand starting at position 2506 of SEQ ID NO: 1468
acuguuaugaggugauauc

SEQ ID NO: 115363 - RNA, 19 nt, Artificial Sequence
  Description of Artificial Sequence: Synthetic oligonucleotide
  Antisense strand to SEQ ID NO: 115362
gauaucaccucauaacagu

SEQ ID NO: 115364 - RNA, 19 nt, Artificial Sequence
  Description of Artificial Sequence: Synthetic oligonucleotide
  Sense strand starting at position 2507 of SEQ ID NO: 1468
cuguuaugaggugauauca

SEQ ID NO: 115365 - RNA, 19 nt, Artificial Sequence
  Description of Artificial Sequence: Synthetic oligonucleotide
  Antisense strand to SEQ ID NO: 115364
ugauaucaccucauaacag

SEQ ID NO: 115366 - RNA, 19 nt, Artificial Sequence
  Description of Artificial Sequence: Synthetic oligonucleotide
  Sense strand starting at position 2522 of SEQ ID NO: 1468
aucacauugugguuaugau

SEQ ID NO: 115367 - RNA, 19 nt, Artificial Sequence
  Description of Artificial Sequence: Synthetic oligonucleotide
  Antisense strand to SEQ ID NO: 115366
aucauaaccacaaugugau

SEQ ID NO: 115368 - RNA, 19 nt, Artificial Sequence
  Description of Artificial Sequence: Synthetic oligonucleotide
  Sense strand starting at position 2523 of SEQ ID NO: 1468
ucacauugugguuaugauu

SEQ ID NO: 115369 - RNA, 19 nt, Artificial Sequence
  Description of Artificial Sequence: Synthetic oligonucleotide
  Antisense strand to SEQ ID NO: 115368
aaucauaaccacaauguga

SEQ ID NO: 115370 - RNA, 19 nt, Artificial Sequence
  Description of Artificial Sequence: Synthetic oligonucleotide
  Sense strand starting at position 2607 of SEQ ID NO: 1468
agaagagauguuugcauuc

SEQ ID NO: 115371 - RNA, 19 nt, Artificial Sequence
  Description of Artificial Sequence: Synthetic oligonucleotide
  Antisense strand to SEQ ID NO: 115370
gaaugcaaacaucucuucu

SEQ ID NO: 115372 - RNA, 19 nt, Artificial Sequence
  Description of Artificial Sequence: Synthetic oligonucleotide
  Sense strand starting at position 2681 of SEQ ID NO: 1468
uccacugguagaugaauga

SEQ ID NO: 115373 - RNA, 19 nt, Artificial Sequence
  Description of Artificial Sequence: Synthetic oligonucleotide
  Antisense strand to SEQ ID NO: 115372
ucauucaucuaccagugga

SEQ ID NO: 115374 - RNA, 19 nt, Artificial Sequence
  Description of Artificial Sequence: Synthetic oligonucleotide
  Sense strand starting at position 2884 of SEQ ID NO: 1468
gucauagaagcaggaaaua

SEQ ID NO: 115375 - RNA, 19 nt, Artificial Sequence
  Description of Artificial Sequence: Synthetic oligonucleotide
  Antisense strand to SEQ ID NO: 115374
uauuuccugcuucuaugac

SEQ ID NO: 115376 - RNA, 19 nt, Artificial Sequence
  Description of Artificial Sequence: Synthetic oligonucleotide
  Sense strand starting at position 2976 of SEQ ID NO: 1468
gcaagauaauuaguucuag

SEQ ID NO: 115377 - RNA, 19 nt, Artificial Sequence
  Description of Artificial Sequence: Synthetic oligonucleotide
  Antisense strand to SEQ ID NO: 115376
cuagaacuaauuaucuugc

SEQ ID NO: 115378 - RNA, 19 nt, Artificial Sequence
  Description of Artificial Sequence: Synthetic oligonucleotide
  Sense strand starting at position 2982 of SEQ ID NO: 1468
uaauuaguucuagagagcu

SEQ ID NO: 115379 - RNA, 19 nt, Artificial Sequence
  Description of Artificial Sequence: Synthetic oligonucleotide
  Antisense strand to SEQ ID NO: 115378
agcucucuagaacuaauua

SEQ ID NO: 115380 - RNA, 19 nt, Artificial Sequence
  Description of Artificial Sequence: Synthetic oligonucleotide
  Sense strand starting at position 3137 of SEQ ID NO: 1468
gauagauauguuuguuacc

SEQ ID NO: 115381 - RNA, 19 nt, Artificial Sequence
  Description of Artificial Sequence: Synthetic oligonucleotide
  Antisense strand to SEQ ID NO: 115380
gguaacaaacauaucuauc

SEQ ID NO: 115382 - RNA, 19 nt, Artificial Sequence
  Description of Artificial Sequence: Synthetic oligonucleotide
  Sense strand starting at position 3308 of SEQ ID NO: 1468
ggccuaggucaaggaagaa

SEQ ID NO: 115383 - RNA, 19 nt, Artificial Sequence
  Description of Artificial Sequence: Synthetic oligonucleotide
  Antisense strand to SEQ ID NO: 115382
uucuuccuugaccuaggcc

SEQ ID NO: 115384 - RNA, 19 nt, Artificial Sequence
  Description of Artificial Sequence: Synthetic oligonucleotide
  Sense strand starting at position 3426 of SEQ ID NO: 1468
augugagacugauugauau

SEQ ID NO: 115385 - RNA, 19 nt, Artificial Sequence
  Description of Artificial Sequence: Synthetic oligonucleotide
  Antisense strand to SEQ ID NO: 115384
auaucaaucagucucacau

SEQ ID NO: 115386 - RNA, 19 nt, Artificial Sequence
  Description of Artificial Sequence: Synthetic oligonucleotide
  Sense strand starting at position 3732 of SEQ ID NO: 1468
aucugagggugacucuuua

SEQ ID NO: 115387 - RNA, 19 nt, Artificial Sequence
  Description of Artificial Sequence: Synthetic oligonucleotide
  Antisense strand to SEQ ID NO: 115386
uaaagagucacccucagau

SEQ ID NO: 115388 - RNA, 19 nt, Artificial Sequence
  Description of Artificial Sequence: Synthetic oligonucleotide
  Sense strand starting at position 3736 of SEQ ID NO: 1468
gagggugacucuuuaagua

SEQ ID NO: 115389 - RNA, 19 nt, Artificial Sequence
  Description of Artificial Sequence: Synthetic oligonucleotide
  Antisense strand to SEQ ID NO: 115388
uacuuaaagagucacccuc

SEQ ID NO: 115390 - RNA, 19 nt, Artificial Sequence
  Description of Artificial Sequence: Synthetic oligonucleotide
  Sense strand starting at position 3740 of SEQ ID NO: 1468
gugacucuuuaaguaagga

SEQ ID NO: 115391 - RNA, 19 nt, Artificial Sequence
  Description of Artificial Sequence: Synthetic oligonucleotide
  Antisense strand to SEQ ID NO: 115390
uccuuacuuaaagagucac

SEQ ID NO: 115392 - RNA, 19 nt, Artificial Sequence
  Description of Artificial Sequence: Synthetic oligonucleotide
  Sense strand starting at position 68 of SEQ ID NO: 1469
ucugucucagaguagagau

SEQ ID NO: 115393 - RNA, 19 nt, Artificial Sequence
  Description of Artificial Sequence: Synthetic oligonucleotide
  Antisense strand to SEQ ID NO: 115392
aucucuacucugagacaga

SEQ ID NO: 115394 - RNA, 19 nt, Artificial Sequence
  Description of Artificial Sequence: Synthetic oligonucleotide
  Sense strand starting at position 128 of SEQ ID NO: 1469
auguuucccauugagggua

SEQ ID NO: 115395 - RNA, 19 nt, Artificial Sequence
  Description of Artificial Sequence: Synthetic oligonucleotide
  Antisense strand to SEQ ID NO: 115394
uacccucaaugggaaacau

SEQ ID NO: 115396 - RNA, 19 nt, Artificial Sequence
  Description of Artificial Sequence: Synthetic oligonucleotide
  Sense strand starting at position 353 of SEQ ID NO: 1469
agagacgagucuucaugaa

SEQ ID NO: 115397 - RNA, 19 nt, Artificial Sequence
  Description of Artificial Sequence: Synthetic oligonucleotide
  Antisense strand to SEQ ID NO: 115396
uucaugaagacucgucucu

SEQ ID NO: 115398 - RNA, 19 nt, Artificial Sequence
  Description of Artificial Sequence: Synthetic oligonucleotide
  Sense strand starting at position 415 of SEQ ID NO: 1469
guauguguucuuucugcuu

SEQ ID NO: 115399 - RNA, 19 nt, Artificial Sequence
  Description of Artificial Sequence: Synthetic oligonucleotide
  Antisense strand to SEQ ID NO: 115398
aagcagaaagaacacauac

SEQ ID NO: 115400 - RNA, 19 nt, Artificial Sequence
  Description of Artificial Sequence: Synthetic oligonucleotide
  Sense strand starting at position 681 of SEQ ID NO: 1469
ggugucucugcggcuuauu

SEQ ID NO: 115401 - RNA, 19 nt, Artificial Sequence
  Description of Artificial Sequence: Synthetic oligonucleotide
  Antisense strand to SEQ ID NO: 115400
aauaagccgcagagacacc

SEQ ID NO: 115402 - RNA, 19 nt, Artificial Sequence
  Description of Artificial Sequence: Synthetic oligonucleotide
  Sense strand starting at position 690 of SEQ ID NO: 1469
gcggcuuauuucccuaaca

SEQ ID NO: 115403 - RNA, 19 nt, Artificial Sequence
  Description of Artificial Sequence: Synthetic oligonucleotide
  Antisense strand to SEQ ID NO: 115402
uguuagggaaauaagccgc

SEQ ID NO: 115404 - RNA, 19 nt, Artificial Sequence
  Description of Artificial Sequence: Synthetic oligonucleotide
  Sense strand starting at position 691 of SEQ ID NO: 1469
cggcuuauuucccuaacac

SEQ ID NO: 115405 - RNA, 19 nt, Artificial Sequence
  Description of Artificial Sequence: Synthetic oligonucleotide
  Antisense strand to SEQ ID NO: 115404
guguuagggaaauaagccg

SEQ ID NO: 115406 - RNA, 19 nt, Artificial Sequence
  Description of Artificial Sequence: Synthetic oligonucleotide
  Sense strand starting at position 768 of SEQ ID NO: 1469
agauuugacugucagagag

SEQ ID NO: 115407 - RNA, 19 nt, Artificial Sequence
  Description of Artificial Sequence: Synthetic oligonucleotide
  Antisense strand to SEQ ID NO: 115406
cucucugacagucaaaucu

SEQ ID NO: 115408 - RNA, 19 nt, Artificial Sequence
  Description of Artificial Sequence: Synthetic oligonucleotide
  Sense strand starting at position 838 of SEQ ID NO: 1469
agaaacaaguagucuuaau

SEQ ID NO: 115409 - RNA, 19 nt, Artificial Sequence
  Description of Artificial Sequence: Synthetic oligonucleotide
  Antisense strand to SEQ ID NO: 115408
auuaagacuacuuguuucu

SEQ ID NO: 115410 - RNA, 19 nt, Artificial Sequence
  Description of Artificial Sequence: Synthetic oligonucleotide
  Sense strand starting at position 996 of SEQ ID NO: 1469
uuguguauuguggcauguu

SEQ ID NO: 115411 - RNA, 19 nt, Artificial Sequence
  Description of Artificial Sequence: Synthetic oligonucleotide
  Antisense strand to SEQ ID NO: 115410
aacaugccacaauacacaa

SEQ ID NO: 115412 - RNA, 19 nt, Artificial Sequence
  Description of Artificial Sequence: Synthetic oligonucleotide
  Sense strand starting at position 1009 of SEQ ID NO: 1469
cauguuugugaguagacac

SEQ ID NO: 115413 - RNA, 19 nt, Artificial Sequence
  Description of Artificial Sequence: Synthetic oligonucleotide
  Antisense strand to SEQ ID NO: 115412
gugucuacucacaaacaug

SEQ ID NO: 115414 - RNA, 19 nt, Artificial Sequence
  Description of Artificial Sequence: Synthetic oligonucleotide
  Sense strand starting at position 1148 of SEQ ID NO: 1469
ucagcaagggagugaugau

SEQ ID NO: 115415 - RNA, 19 nt, Artificial Sequence
  Description of Artificial Sequence: Synthetic oligonucleotide
  Antisense strand to SEQ ID NO: 115414
aucaucacucccuugcuga

SEQ ID NO: 115416 - RNA, 19 nt, Artificial Sequence
  Description of Artificial Sequence: Synthetic oligonucleotide
  Sense strand starting at position 1178 of SEQ ID NO: 1469
cugagagaacaaggucuuu

SEQ ID NO: 115417 - RNA, 19 nt, Artificial Sequence
  Description of Artificial Sequence: Synthetic oligonucleotide
  Antisense strand to SEQ ID NO: 115416
aaagaccuuguucucucag

SEQ ID NO: 115418 - RNA, 19 nt, Artificial Sequence
  Description of Artificial Sequence: Synthetic oligonucleotide
  Sense strand starting at position 1426 of SEQ ID NO: 1469
gugguaucaaugcaagaaa

SEQ ID NO: 115419 - RNA, 19 nt, Artificial Sequence
  Description of Artificial Sequence: Synthetic oligonucleotide
  Antisense strand to SEQ ID NO: 115418
uuucuugcauugauaccac

SEQ ID NO: 115420 - RNA, 19 nt, Artificial Sequence
  Description of Artificial Sequence: Synthetic oligonucleotide
  Sense strand starting at position 1429 of SEQ ID NO: 1469
guaucaaugcaagaaaguu

SEQ ID NO: 115421 - RNA, 19 nt, Artificial Sequence
  Description of Artificial Sequence: Synthetic oligonucleotide
  Antisense strand to SEQ ID NO: 115420
aacuuucuugcauugauac

SEQ ID NO: 115422 - RNA, 19 nt, Artificial Sequence
  Description of Artificial Sequence: Synthetic oligonucleotide
  Sense strand starting at position 1515 of SEQ ID NO: 1469
ggcugucacauggagaacu

SEQ ID NO: 115423 - RNA, 19 nt, Artificial Sequence
  Description of Artificial Sequence: Synthetic oligonucleotide
  Antisense strand to SEQ ID NO: 115422
aguucuccaugugacagcc

SEQ ID NO: 115424 - RNA, 19 nt, Artificial Sequence
  Description of Artificial Sequence: Synthetic oligonucleotide
  Sense strand starting at position 1584 of SEQ ID NO: 1469
ucccuugcucaugaugaca

SEQ ID NO: 115425 - RNA, 19 nt, Artificial Sequence
  Description of Artificial Sequence: Synthetic oligonucleotide
  Antisense strand to SEQ ID NO: 115424
ugucaucaugagcaaggga

SEQ ID NO: 115426 - RNA, 19 nt, Artificial Sequence
  Description of Artificial Sequence: Synthetic oligonucleotide
  Sense strand starting at position 1658 of SEQ ID NO: 1469
gcaggaagcaauuauuagu

SEQ ID NO: 115427 - RNA, 19 nt, Artificial Sequence
  Description of Artificial Sequence: Synthetic oligonucleotide
  Antisense strand to SEQ ID NO: 115426
acuaauaauugcuuccugc

SEQ ID NO: 115428 - RNA, 19 nt, Artificial Sequence
  Description of Artificial Sequence: Synthetic oligonucleotide
  Sense strand starting at position 1667 of SEQ ID NO: 1469
aauuauuaguggccaagau

SEQ ID NO: 115429 - RNA, 19 nt, Artificial Sequence
  Description of Artificial Sequence: Synthetic oligonucleotide
  Antisense strand to SEQ ID NO: 115428
aucuuggccacuaauaauu

SEQ ID NO: 115430 - RNA, 19 nt, Artificial Sequence
  Description of Artificial Sequence: Synthetic oligonucleotide
  Sense strand starting at position 1668 of SEQ ID NO: 1469
auuauuaguggccaagaua

SEQ ID NO: 115431 - RNA, 19 nt, Artificial Sequence
  Description of Artificial Sequence: Synthetic oligonucleotide
  Antisense strand to SEQ ID NO: 115430
uaucuuggccacuaauaau

SEQ ID NO: 115432 - RNA, 19 nt, Artificial Sequence
  Description of Artificial Sequence: Synthetic oligonucleotide
  Sense strand starting at position 1721 of SEQ ID NO: 1469
aggagauagguugguuaug

SEQ ID NO: 115433 - RNA, 19 nt, Artificial Sequence
  Description of Artificial Sequence: Synthetic oligonucleotide
  Antisense strand to SEQ ID NO: 115432
cauaaccaaccuaucuccu

SEQ ID NO: 115434 - RNA, 19 nt, Artificial Sequence
  Description of Artificial Sequence: Synthetic oligonucleotide
  Sense strand starting at position 1722 of SEQ ID NO: 1469
ggagauagguugguuauga

SEQ ID NO: 115435 - RNA, 19 nt, Artificial Sequence
  Description of Artificial Sequence: Synthetic oligonucleotide
  Antisense strand to SEQ ID NO: 115434
ucauaaccaaccuaucucc

SEQ ID NO: 115436 - RNA, 19 nt, Artificial Sequence
  Description of Artificial Sequence: Synthetic oligonucleotide
  Sense strand starting at position 1723 of SEQ ID NO: 1469
gagauagguugguuaugaa

SEQ ID NO: 115437 - RNA, 19 nt, Artificial Sequence
  Description of Artificial Sequence: Synthetic oligonucleotide
  Antisense strand to SEQ ID NO: 115436
uucauaaccaaccuaucuc

SEQ ID NO: 115438 - RNA, 19 nt, Artificial Sequence
  Description of Artificial Sequence: Synthetic oligonucleotide
  Sense strand starting at position 1838 of SEQ ID NO: 1469
gaugauggucaaugcagau

SEQ ID NO: 115439 - RNA, 19 nt, Artificial Sequence
  Description of Artificial Sequence: Synthetic oligonucleotide
  Antisense strand to SEQ ID NO: 115438
aucugcauugaccaucauc

SEQ ID NO: 115440 - RNA, 19 nt, Artificial Sequence
  Description of Artificial Sequence: Synthetic oligonucleotide
  Sense strand starting at position 1850 of SEQ ID NO: 1469
ugcagaugauagucacaau

SEQ ID NO: 115441 - RNA, 19 nt, Artificial Sequence
  Description of Artificial Sequence: Synthetic oligonucleotide
  Antisense strand to SEQ ID NO: 115440
auugugacuaucaucugca

SEQ ID NO: 115442 - RNA, 19 nt, Artificial Sequence
  Description of Artificial Sequence: Synthetic oligonucleotide
  Sense strand starting at position 2147 of SEQ ID NO: 1469
guccuugcacaugaagaga

SEQ ID NO: 115443 - RNA, 19 nt, Artificial Sequence
  Description of Artificial Sequence: Synthetic oligonucleotide
  Antisense strand to SEQ ID NO: 115442
ucucuucaugugcaaggac

SEQ ID NO: 115444 - RNA, 19 nt, Artificial Sequence
  Description of Artificial Sequence: Synthetic oligonucleotide
  Sense strand starting at position 2210 of SEQ ID NO: 1469
gucacuguggagcaaauua

SEQ ID NO: 115445 - RNA, 19 nt, Artificial Sequence
  Description of Artificial Sequence: Synthetic oligonucleotide
  Antisense strand to SEQ ID NO: 115444
uaauuugcuccacagugac

SEQ ID NO: 115446 - RNA, 19 nt, Artificial Sequence
  Description of Artificial Sequence: Synthetic oligonucleotide
  Sense strand starting at position 2444 of SEQ ID NO: 1469
gauauagcaguuugaaaua

SEQ ID NO: 115447 - RNA, 19 nt, Artificial Sequence
  Description of Artificial Sequence: Synthetic oligonucleotide
  Antisense strand to SEQ ID NO: 115446
uauuucaaacugcuauauc

SEQ ID NO: 115448 - RNA, 19 nt, Artificial Sequence
  Description of Artificial Sequence: Synthetic oligonucleotide
  Sense strand starting at position 2576 of SEQ ID NO: 1469
gguaaugugguccaaauau

SEQ ID NO: 115449 - RNA, 19 nt, Artificial Sequence
  Description of Artificial Sequence: Synthetic oligonucleotide
  Antisense strand to SEQ ID NO: 115448
auauuuggaccacauuacc

SEQ ID NO: 115450 - RNA, 19 nt, Artificial Sequence
  Description of Artificial Sequence: Synthetic oligonucleotide
  Sense strand starting at position 2773 of SEQ ID NO: 1469
ugccacugucauuauaaag

SEQ ID NO: 115451 - RNA, 19 nt, Artificial Sequence
  Description of Artificial Sequence: Synthetic oligonucleotide
  Antisense strand to SEQ ID NO: 115450
cuuuauaaugacaguggca

SEQ ID NO: 115452 - RNA, 19 nt, Artificial Sequence
  Description of Artificial Sequence: Synthetic oligonucleotide
  Sense strand starting at position 2833 of SEQ ID NO: 1469
gagagaaaucugcagcuau

SEQ ID NO: 115453 - RNA, 19 nt, Artificial Sequence
  Description of Artificial Sequence: Synthetic oligonucleotide
  Antisense strand to SEQ ID NO: 115452
auagcugcagauuucucuc

SEQ ID NO: 115454 - RNA, 19 nt, Artificial Sequence
  Description of Artificial Sequence: Synthetic oligonucleotide
  Sense strand starting at position 2954 of SEQ ID NO: 1469
cuguauggagagcauauau

SEQ ID NO: 115455 - RNA, 19 nt, Artificial Sequence
  Description of Artificial Sequence: Synthetic oligonucleotide
  Antisense strand to SEQ ID NO: 115454
auauaugcucuccauacag

SEQ ID NO: 115456 - RNA, 19 nt, Artificial Sequence
  Description of Artificial Sequence: Synthetic oligonucleotide
  Sense strand starting at position 2987 of SEQ ID NO: 1469
cucuuuagugaccaucuua

SEQ ID NO: 115457 - RNA, 19 nt, Artificial Sequence
  Description of Artificial Sequence: Synthetic oligonucleotide
  Antisense strand to SEQ ID NO: 115456
uaagauggucacuaaagag

SEQ ID NO: 115458 - RNA, 19 nt, Artificial Sequence
  Description of Artificial Sequence: Synthetic oligonucleotide
  Sense strand starting at position 3110 of SEQ ID NO: 1469
gcucaaaugucaccaaaga

SEQ ID NO: 115459 - RNA, 19 nt, Artificial Sequence
  Description of Artificial Sequence: Synthetic oligonucleotide
  Antisense strand to SEQ ID NO: 115458
ucuuuggugacauuugagc

SEQ ID NO: 115460 - RNA, 19 nt, Artificial Sequence
  Description of Artificial Sequence: Synthetic oligonucleotide
  Sense strand starting at position 3126 of SEQ ID NO: 1469
agaauucuccauugcuaag

SEQ ID NO: 115461 - RNA, 19 nt, Artificial Sequence
  Description of Artificial Sequence: Synthetic oligonucleotide
  Antisense strand to SEQ ID NO: 115460
cuuagcaauggagaauucu

SEQ ID NO: 115462 - RNA, 19 nt, Artificial Sequence
  Description of Artificial Sequence: Synthetic oligonucleotide
  Sense strand starting at position 3371 of SEQ ID NO: 1469
uuaugaugauuguucucaa

SEQ ID NO: 115463 - RNA, 19 nt, Artificial Sequence
  Description of Artificial Sequence: Synthetic oligonucleotide
  Antisense strand to SEQ ID NO: 115462
uugagaacaaucaucauaa

SEQ ID NO: 115464 - RNA, 19 nt, Artificial Sequence
  Description of Artificial Sequence: Synthetic oligonucleotide
  Sense strand starting at position 3374 of SEQ ID NO: 1469
ugaugauuguucucaaauc

SEQ ID NO: 115465 - RNA, 19 nt, Artificial Sequence
  Description of Artificial Sequence: Synthetic oligonucleotide
  Antisense strand to SEQ ID NO: 115464
gauuugagaacaaucauca

SEQ ID NO: 115466 - RNA, 19 nt, Artificial Sequence
  Description of Artificial Sequence: Synthetic oligonucleotide
  Sense strand starting at position 3584 of SEQ ID NO: 1469
guacauuaaugggucaaca

SEQ ID NO: 115467 - RNA, 19 nt, Artificial Sequence
  Description of Artificial Sequence: Synthetic oligonucleotide
  Antisense strand to SEQ ID NO: 115466
uguugacccauuaauguac

SEQ ID NO: 115468 - RNA, 19 nt, Artificial Sequence
  Description of Artificial Sequence: Synthetic oligonucleotide
  Sense strand starting at position 3957 of SEQ ID NO: 1469
uaagguaucucagugacag

SEQ ID NO: 115469 - RNA, 19 nt, Artificial Sequence
  Description of Artificial Sequence: Synthetic oligonucleotide
  Antisense strand to SEQ ID NO: 115468
cugucacugagauaccuua

SEQ ID NO: 115470 - RNA, 19 nt, Artificial Sequence
  Description of Artificial Sequence: Synthetic oligonucleotide
  Sense strand starting at position 3959 of SEQ ID NO: 1469
agguaucucagugacagua

SEQ ID NO: 115471 - RNA, 19 nt, Artificial Sequence
  Description of Artificial Sequence: Synthetic oligonucleotide
  Antisense strand to SEQ ID NO: 115470
uacugucacugagauaccu

SEQ ID NO: 115472 - RNA, 19 nt, Artificial Sequence
  Description of Artificial Sequence: Synthetic oligonucleotide
  Sense strand starting at position 3948 of SEQ ID NO: 1470
gcccucacuugacugaaua

SEQ ID NO: 115473 - RNA, 19 nt, Artificial Sequence
  Description of Artificial Sequence: Synthetic oligonucleotide
  Antisense strand to SEQ ID NO: 115472
uauucagucaagugagggc

SEQ ID NO: 115474 - RNA, 19 nt, Artificial Sequence
  Description of Artificial Sequence: Synthetic oligonucleotide
  Sense strand starting at position 3726 of SEQ ID NO: 1470
gauauuuguguaugagugu

SEQ ID NO: 115475 - RNA, 19 nt, Artificial Sequence
  Description of Artificial Sequence: Synthetic oligonucleotide
  Antisense strand to SEQ ID NO: 115474
acacucauacacaaauauc

SEQ ID NO: 115476 - RNA, 19 nt, Artificial Sequence
  Description of Artificial Sequence: Synthetic oligonucleotide
  Sense strand starting at position 3713 of SEQ ID NO: 1470
guauaccuccauugauauu

SEQ ID NO: 115477 - RNA, 19 nt, Artificial Sequence
  Description of Artificial Sequence: Synthetic oligonucleotide
  Antisense strand to SEQ ID NO: 115476
aauaucaauggagguauac

SEQ ID NO: 115478 - RNA, 19 nt, Artificial Sequence
  Description of Artificial Sequence: Synthetic oligonucleotide
  Sense strand starting at position 3615 of SEQ ID NO: 1470
guccuaaacuuaguuaaua

SEQ ID NO: 115479 - RNA, 19 nt, Artificial Sequence
  Description of Artificial Sequence: Synthetic oligonucleotide
  Antisense strand to SEQ ID NO: 115478
uauuaacuaaguuuaggac

SEQ ID NO: 115480 - RNA, 19 nt, Artificial Sequence
  Description of Artificial Sequence: Synthetic oligonucleotide
  Sense strand starting at position 3536 of SEQ ID NO: 1470
ucaggcauucuugaaauuc

SEQ ID NO: 115481 - RNA, 19 nt, Artificial Sequence
  Description of Artificial Sequence: Synthetic oligonucleotide
  Antisense strand to SEQ ID NO: 115480
gaauuucaagaaugccuga

SEQ ID NO: 115482 - RNA, 19 nt, Artificial Sequence
  Description of Artificial Sequence: Synthetic oligonucleotide
  Sense strand starting at position 3434 of SEQ ID NO: 1470
gggaaauuauuggcaucug

SEQ ID NO: 115483 - RNA, 19 nt, Artificial Sequence
  Description of Artificial Sequence: Synthetic oligonucleotide
  Antisense strand to SEQ ID NO: 115482
cagaugccaauaauuuccc

SEQ ID NO: 115484 - RNA, 19 nt, Artificial Sequence
  Description of Artificial Sequence: Synthetic oligonucleotide
  Sense strand starting at position 3433 of SEQ ID NO: 1470
ugggaaauuauuggcaucu

SEQ ID NO: 115485 - RNA, 19 nt, Artificial Sequence
  Description of Artificial Sequence: Synthetic oligonucleotide
  Antisense strand to SEQ ID NO: 115484
agaugccaauaauuuccca

SEQ ID NO: 115486 - RNA, 19 nt, Artificial Sequence
  Description of Artificial Sequence: Synthetic oligonucleotide
  Sense strand starting at position 3061 of SEQ ID NO: 1470
uggagaaacucagagaaau

SEQ ID NO: 115487 - RNA, 19 nt, Artificial Sequence
  Description of Artificial Sequence: Synthetic oligonucleotide
  Antisense strand to SEQ ID NO: 115486
auuucucugaguuucucca

SEQ ID NO: 115488 - RNA, 19 nt, Artificial Sequence
  Description of Artificial Sequence: Synthetic oligonucleotide
  Sense strand starting at position 3050 of SEQ ID NO: 1470
cugagcuaacuuggagaaa

SEQ ID NO: 115489 - RNA, 19 nt, Artificial Sequence
  Description of Artificial Sequence: Synthetic oligonucleotide
  Antisense strand to SEQ ID NO: 115488
uuucuccaaguuagcucag

SEQ ID NO: 115490 - RNA, 19 nt, Artificial Sequence
  Description of Artificial Sequence: Synthetic oligonucleotide
  Sense strand starting at position 2975 of SEQ ID NO: 1470
agagaauagucaccagggu

SEQ ID NO: 115491 - RNA, 19 nt, Artificial Sequence
  Description of Artificial Sequence: Synthetic oligonucleotide
  Antisense strand to SEQ ID NO: 115490
acccuggugacuauucucu

SEQ ID NO: 115492 - RNA, 19 nt, Artificial Sequence
  Description of Artificial Sequence: Synthetic oligonucleotide
  Sense strand starting at position 2937 of SEQ ID NO: 1470
agugcauuaguauaaagaa

SEQ ID NO: 115493 - RNA, 19 nt, Artificial Sequence
  Description of Artificial Sequence: Synthetic oligonucleotide
  Antisense strand to SEQ ID NO: 115492
uucuuuauacuaaugcacu

SEQ ID NO: 115494 - RNA, 19 nt, Artificial Sequence
  Description of Artificial Sequence: Synthetic oligonucleotide
  Sense strand starting at position 2932 of SEQ ID NO: 1470
acauuagugcauuaguaua

SEQ ID NO: 115495 - RNA, 19 nt, Artificial Sequence
  Description of Artificial Sequence: Synthetic oligonucleotide
  Antisense strand to SEQ ID NO: 115494
uauacuaaugcacuaaugu

SEQ ID NO: 115496 - RNA, 19 nt, Artificial Sequence
  Description of Artificial Sequence: Synthetic oligonucleotide
  Sense strand starting at position 2929 of SEQ ID NO: 1470
auaacauuagugcauuagu

SEQ ID NO: 115497 - RNA, 19 nt, Artificial Sequence
  Description of Artificial Sequence: Synthetic oligonucleotide
  Antisense strand to SEQ ID NO: 115496
acuaaugcacuaauguuau

SEQ ID NO: 115498 - RNA, 19 nt, Artificial Sequence
  Description of Artificial Sequence: Synthetic oligonucleotide
  Sense strand starting at position 2584 of SEQ ID NO: 1470
uugagucaacagugaaaca

SEQ ID NO: 115499 - RNA, 19 nt, Artificial Sequence
  Description of Artificial Sequence: Synthetic oligonucleotide
  Antisense strand to SEQ ID NO: 115498
uguuucacuguugacucaa

SEQ ID NO: 115500 - RNA, 19 nt, Artificial Sequence
  Description of Artificial Sequence: Synthetic oligonucleotide
  Sense strand starting at position 2509 of SEQ ID NO: 1470
ucuauuuacugggaacuuu

SEQ ID NO: 115501 - RNA, 19 nt, Artificial Sequence
  Description of Artificial Sequence: Synthetic oligonucleotide
  Antisense strand to SEQ ID NO: 115500
aaaguucccaguaaauaga

SEQ ID NO: 115502 - RNA, 19 nt, Artificial Sequence
  Description of Artificial Sequence: Synthetic oligonucleotide
  Sense strand starting at position 2478 of SEQ ID NO: 1470
cauggucucuaaguaaaga

SEQ ID NO: 115503 - RNA, 19 nt, Artificial Sequence
  Description of Artificial Sequence: Synthetic oligonucleotide
  Antisense strand to SEQ ID NO: 115502
ucuuuacuuagagaccaug

SEQ ID NO: 115504 - RNA, 19 nt, Artificial Sequence
  Description of Artificial Sequence: Synthetic oligonucleotide
  Sense strand starting at position 2475 of SEQ ID NO: 1470
uuccauggucucuaaguaa

SEQ ID NO: 115505 - RNA, 19 nt, Artificial Sequence
  Description of Artificial Sequence: Synthetic oligonucleotide
  Antisense strand to SEQ ID NO: 115504
uuacuuagagaccauggaa

SEQ ID NO: 115506 - RNA, 19 nt, Artificial Sequence
  Description of Artificial Sequence: Synthetic oligonucleotide
  Sense strand starting at position 2474 of SEQ ID NO: 1470
auuccauggucucuaagua

SEQ ID NO: 115507 - RNA, 19 nt, Artificial Sequence
  Description of Artificial Sequence: Synthetic oligonucleotide
  Antisense strand to SEQ ID NO: 115506
uacuuagagaccauggaau

SEQ ID NO: 115508 - RNA, 19 nt, Artificial Sequence
  Description of Artificial Sequence: Synthetic oligonucleotide
  Sense strand starting at position 2471 of SEQ ID NO: 1470
aguauuccauggucucuaa

SEQ ID NO: 115509 - RNA, 19 nt, Artificial Sequence
  Description of Artificial Sequence: Synthetic oligonucleotide
  Antisense strand to SEQ ID NO: 115508
uuagagaccauggaauacu

SEQ ID NO: 115510 - RNA, 19 nt, Artificial Sequence
  Description of Artificial Sequence: Synthetic oligonucleotide
  Sense strand starting at position 2371 of SEQ ID NO: 1470
accugaagcugaucagaau

SEQ ID NO: 115511 - RNA, 19 nt, Artificial Sequence
  Description of Artificial Sequence: Synthetic oligonucleotide
  Antisense strand to SEQ ID NO: 115510
auucugaucagcuucaggu

SEQ ID NO: 115512 - RNA, 19 nt, Artificial Sequence
  Description of Artificial Sequence: Synthetic oligonucleotide
  Sense strand starting at position 2234 of SEQ ID NO: 1470
agguuaucucucugaccaa

SEQ ID NO: 115513 - RNA, 19 nt, Artificial Sequence
  Description of Artificial Sequence: Synthetic oligonucleotide
  Antisense strand to SEQ ID NO: 115512
uuggucagagagauaaccu

SEQ ID NO: 115514 - RNA, 19 nt, Artificial Sequence
  Description of Artificial Sequence: Synthetic oligonucleotide
  Sense strand starting at position 2065 of SEQ ID NO: 1470
uggaaauguacgggaaauu

SEQ ID NO: 115515 - RNA, 19 nt, Artificial Sequence
  Description of Artificial Sequence: Synthetic oligonucleotide
  Antisense strand to SEQ ID NO: 115514
aauuucccguacauuucca

SEQ ID NO: 115516 - RNA, 19 nt, Artificial Sequence
  Description of Artificial Sequence: Synthetic oligonucleotide
  Sense strand starting at position 2063 of SEQ ID NO: 1470
aguggaaauguacgggaaa

SEQ ID NO: 115517 - RNA, 19 nt, Artificial Sequence
  Description of Artificial Sequence: Synthetic oligonucleotide
  Antisense strand to SEQ ID NO: 115516
uuucccguacauuuccacu

SEQ ID NO: 115518 - RNA, 19 nt, Artificial Sequence
  Description of Artificial Sequence: Synthetic oligonucleotide
  Sense strand starting at position 1989 of SEQ ID NO: 1470
ugacuugcuccauggagag

SEQ ID NO: 115519 - RNA, 19 nt, Artificial Sequence
  Description of Artificial Sequence: Synthetic oligonucleotide
  Antisense strand to SEQ ID NO: 115518
cucuccauggagcaaguca

SEQ ID NO: 115520 - RNA, 19 nt, Artificial Sequence
  Description of Artificial Sequence: Synthetic oligonucleotide
  Sense strand starting at position 863 of SEQ ID NO: 1470
cccauaucugauuagucuu

SEQ ID NO: 115521 - RNA, 19 nt, Artificial Sequence
  Description of Artificial Sequence: Synthetic oligonucleotide
  Antisense strand to SEQ ID NO: 115520
aagacuaaucagauauggg

SEQ ID NO: 115522 - RNA, 19 nt, Artificial Sequence
  Description of Artificial Sequence: Synthetic oligonucleotide
  Sense strand starting at position 862 of SEQ ID NO: 1470
ucccauaucugauuagucu

SEQ ID NO: 115523 - RNA, 19 nt, Artificial Sequence
  Description of Artificial Sequence: Synthetic oligonucleotide
  Antisense strand to SEQ ID NO: 115522
agacuaaucagauauggga

SEQ ID NO: 115524 - RNA, 19 nt, Artificial Sequence
  Description of Artificial Sequence: Synthetic oligonucleotide
  Sense strand starting at position 851 of SEQ ID NO: 1470
gugugcucuguucccauau

SEQ ID NO: 115525 - RNA, 19 nt, Artificial Sequence
  Description of Artificial Sequence: Synthetic oligonucleotide
  Antisense strand to SEQ ID NO: 115524
auaugggaacagagcacac

SEQ ID NO: 115526 - RNA, 19 nt, Artificial Sequence
  Description of Artificial Sequence: Synthetic oligonucleotide
  Sense strand starting at position 849 of SEQ ID NO: 1470
cugugugcucuguucccau

SEQ ID NO: 115527 - RNA, 19 nt, Artificial Sequence
  Description of Artificial Sequence: Synthetic oligonucleotide
  Antisense strand to SEQ ID NO: 115526
augggaacagagcacacag

SEQ ID NO: 115528 - RNA, 19 nt, Artificial Sequence
  Description of Artificial Sequence: Synthetic oligonucleotide
  Sense strand starting at position 614 of SEQ ID NO: 1470
uucuguugucuuuaggaaa

SEQ ID NO: 115529 - RNA, 19 nt, Artificial Sequence
  Description of Artificial Sequence: Synthetic oligonucleotide
  Antisense strand to SEQ ID NO: 115528
uuuccuaaagacaacagaa

SEQ ID NO: 115530 - RNA, 19 nt, Artificial Sequence
  Description of Artificial Sequence: Synthetic oligonucleotide
  Sense strand starting at position 591 of SEQ ID NO: 1470
gcagaaugugugggaccaa

SEQ ID NO: 115531 - RNA, 19 nt, Artificial Sequence
  Description of Artificial Sequence: Synthetic oligonucleotide
  Antisense strand to SEQ ID NO: 115530
uuggucccacacauucugc

SEQ ID NO: 115532 - RNA, 19 nt, Artificial Sequence
  Description of Artificial Sequence: Synthetic oligonucleotide
  Sense strand starting at position 580 of SEQ ID NO: 1470
caagauuuguagcagaaug

SEQ ID NO: 115533 - RNA, 19 nt, Artificial Sequence
  Description of Artificial Sequence: Synthetic oligonucleotide
  Antisense strand to SEQ ID NO: 115532
cauucugcuacaaaucuug

SEQ ID NO: 115534 - RNA, 19 nt, Artificial Sequence
  Description of Artificial Sequence: Synthetic oligonucleotide
  Sense strand starting at position 477 of SEQ ID NO: 1470
gugguuccaccucaaacaa

SEQ ID NO: 115535 - RNA, 19 nt, Artificial Sequence
  Description of Artificial Sequence: Synthetic oligonucleotide
  Antisense strand to SEQ ID NO: 115534
uuguuugagguggaaccac

SEQ ID NO: 115536 - RNA, 19 nt, Artificial Sequence
  Description of Artificial Sequence: Synthetic oligonucleotide
  Sense strand starting at position 431 of SEQ ID NO: 1470
cuaguaugugaaggacaua

SEQ ID NO: 115537 - RNA, 19 nt, Artificial Sequence
  Description of Artificial Sequence: Synthetic oligonucleotide
  Antisense strand to SEQ ID NO: 115536
uauguccuucacauacuag

SEQ ID NO: 115538 - RNA, 19 nt, Artificial Sequence
  Description of Artificial Sequence: Synthetic oligonucleotide
  Sense strand starting at position 365 of SEQ ID NO: 1470
aguagcuuccuugaagaga

SEQ ID NO: 115539 - RNA, 19 nt, Artificial Sequence
  Description of Artificial Sequence: Synthetic oligonucleotide
  Antisense strand to SEQ ID NO: 115538
ucucuucaaggaagcuacu

SEQ ID NO: 115540 - RNA, 19 nt, Artificial Sequence
  Description of Artificial Sequence: Synthetic oligonucleotide
  Sense strand starting at position 363 of SEQ ID NO: 1470
cuaguagcuuccuugaaga

SEQ ID NO: 115541 - RNA, 19 nt, Artificial Sequence
  Description of Artificial Sequence: Synthetic oligonucleotide
  Antisense strand to SEQ ID NO: 115540
ucuucaaggaagcuacuag

SEQ ID NO: 115542 - RNA, 19 nt, Artificial Sequence
  Description of Artificial Sequence: Synthetic oligonucleotide
  Sense strand starting at position 328 of SEQ ID NO: 1470
ggaauuacuugagauauuu

SEQ ID NO: 115543 - RNA, 19 nt, Artificial Sequence
  Description of Artificial Sequence: Synthetic oligonucleotide
  Antisense strand to SEQ ID NO: 115542
aaauaucucaaguaauucc

SEQ ID NO: 115544 - RNA, 19 nt, Artificial Sequence
  Description of Artificial Sequence: Synthetic oligonucleotide
  Sense strand starting at position 283 of SEQ ID NO: 1470
cuaggaaucuagccuucua

SEQ ID NO: 115545 - RNA, 19 nt, Artificial Sequence
  Description of Artificial Sequence: Synthetic oligonucleotide
  Antisense strand to SEQ ID NO: 115544
uagaaggcuagauuccuag

SEQ ID NO: 115546 - RNA, 19 nt, Artificial Sequence
  Description of Artificial Sequence: Synthetic oligonucleotide
  Sense strand starting at position 274 of SEQ ID NO: 1470
cuggucauucuaggaaucu

SEQ ID NO: 115547 - RNA, 19 nt, Artificial Sequence
  Description of Artificial Sequence: Synthetic oligonucleotide
  Antisense strand to SEQ ID NO: 115546
agauuccuagaaugaccag

SEQ ID NO: 115548 - RNA, 19 nt, Artificial Sequence
  Description of Artificial Sequence: Synthetic oligonucleotide
  Sense strand starting at position 224 of SEQ ID NO: 1470
cauuaucuuguagggcaaa

SEQ ID NO: 115549 - RNA, 19 nt, Artificial Sequence
  Description of Artificial Sequence: Synthetic oligonucleotide
  Antisense strand to SEQ ID NO: 115548
uuugcccuacaagauaaug

SEQ ID NO: 115550 - RNA, 19 nt, Artificial Sequence
  Description of Artificial Sequence: Synthetic oligonucleotide
  Sense strand starting at position 211 of SEQ ID NO: 1470
gaaggacccuuggcauuau

SEQ ID NO: 115551 - RNA, 19 nt, Artificial Sequence
  Description of Artificial Sequence: Synthetic oligonucleotide
  Antisense strand to SEQ ID NO: 115550
auaaugccaaggguccuuc

SEQ ID NO: 115552 - RNA, 19 nt, Artificial Sequence
  Description of Artificial Sequence: Synthetic oligonucleotide
  Sense strand starting at position 5 of SEQ ID NO: 1471
acagauugauuguuccaua

SEQ ID NO: 115553 - RNA, 19 nt, Artificial Sequence
  Description of Artificial Sequence: Synthetic oligonucleotide
  Antisense strand to SEQ ID NO: 115552
uauggaacaaucaaucugu

SEQ ID NO: 115554 - RNA, 19 nt, Artificial Sequence
  Description of Artificial Sequence: Synthetic oligonucleotide
  Sense strand starting at position 32 of SEQ ID NO: 1471
uuuccacuuggugaauauu

SEQ ID NO: 115555 - RNA, 19 nt, Artificial Sequence
  Description of Artificial Sequence: Synthetic oligonucleotide
  Antisense strand to SEQ ID NO: 115554
aauauucaccaaguggaaa

SEQ ID NO: 115556 - RNA, 19 nt, Artificial Sequence
  Description of Artificial Sequence: Synthetic oligonucleotide
  Sense strand starting at position 106 of SEQ ID NO: 1471
aggucuugucauuaaucca

SEQ ID NO: 115557 - RNA, 19 nt, Artificial Sequence
  Description of Artificial Sequence: Synthetic oligonucleotide
  Antisense strand to SEQ ID NO: 115556
uggauuaaugacaagaccu

SEQ ID NO: 115558 - RNA, 19 nt, Artificial Sequence
  Description of Artificial Sequence: Synthetic oligonucleotide
  Sense strand starting at position 294 of SEQ ID NO: 1471
uguaaugacgcuuaacaag

SEQ ID NO: 115559 - RNA, 19 nt, Artificial Sequence
  Description of Artificial Sequence: Synthetic oligonucleotide
  Antisense strand to SEQ ID NO: 115558
cuuguuaagcgucauuaca

SEQ ID NO: 115560 - RNA, 19 nt, Artificial Sequence
  Description of Artificial Sequence: Synthetic oligonucleotide
  Sense strand starting at position 322 of SEQ ID NO: 1471
uaacaauugugaucugaug

SEQ ID NO: 115561 - RNA, 19 nt, Artificial Sequence
  Description of Artificial Sequence: Synthetic oligonucleotide
  Antisense strand to SEQ ID NO: 115560
caucagaucacaauuguua

SEQ ID NO: 115562 - RNA, 19 nt, Artificial Sequence
  Description of Artificial Sequence: Synthetic oligonucleotide
  Sense strand starting at position 633 of SEQ ID NO: 1471
cgggaaaugaucuauguuc

SEQ ID NO: 115563 - RNA, 19 nt, Artificial Sequence
  Description of Artificial Sequence: Synthetic oligonucleotide
  Antisense strand to SEQ ID NO: 115562
gaacauagaucauuucccg

SEQ ID NO: 115564 - RNA, 19 nt, Artificial Sequence
  Description of Artificial Sequence: Synthetic oligonucleotide
  Sense strand starting at position 635 of SEQ ID NO: 1471
ggaaaugaucuauguuccu

SEQ ID NO: 115565 - RNA, 19 nt, Artificial Sequence
  Description of Artificial Sequence: Synthetic oligonucleotide
  Antisense strand to SEQ ID NO: 115564
aggaacauagaucauuucc

SEQ ID NO: 115566 - RNA, 19 nt, Artificial Sequence
  Description of Artificial Sequence: Synthetic oligonucleotide
  Sense strand starting at position 640 of SEQ ID NO: 1471
ugaucuauguuccugaaca

SEQ ID NO: 115567 - RNA, 19 nt, Artificial Sequence
  Description of Artificial Sequence: Synthetic oligonucleotide
  Antisense strand to SEQ ID NO: 115566
uguucaggaacauagauca

SEQ ID NO: 115568 - RNA, 19 nt, Artificial Sequence
  Description of Artificial Sequence: Synthetic oligonucleotide
  Sense strand starting at position 668 of SEQ ID NO: 1471
auugcuugaucauuugugu

SEQ ID NO: 115569 - RNA, 19 nt, Artificial Sequence
  Description of Artificial Sequence: Synthetic oligonucleotide
  Antisense strand to SEQ ID NO: 115568
acacaaaugaucaagcaau

SEQ ID NO: 115570 - RNA, 19 nt, Artificial Sequence
  Description of Artificial Sequence: Synthetic oligonucleotide
  Sense strand starting at position 903 of SEQ ID NO: 1471
uccgguuaauuuguauauu

SEQ ID NO: 115571 - RNA, 19 nt, Artificial Sequence
  Description of Artificial Sequence: Synthetic oligonucleotide
  Antisense strand to SEQ ID NO: 115570
aauauacaaauuaaccgga

SEQ ID NO: 115572 - RNA, 19 nt, Artificial Sequence
  Description of Artificial Sequence: Synthetic oligonucleotide
  Sense strand starting at position 1016 of SEQ ID NO: 1471
gauuacagucgugagaaac

SEQ ID NO: 115573 - RNA, 19 nt, Artificial Sequence
  Description of Artificial Sequence: Synthetic oligonucleotide
  Antisense strand to SEQ ID NO: 115572
guuucucacgacuguaauc

SEQ ID NO: 115574 - RNA, 19 nt, Artificial Sequence
  Description of Artificial Sequence: Synthetic oligonucleotide
  Sense strand starting at position 1071 of SEQ ID NO: 1471
ggaaauuguucuucucaca

SEQ ID NO: 115575 - RNA, 19 nt, Artificial Sequence
  Description of Artificial Sequence: Synthetic oligonucleotide
  Antisense strand to SEQ ID NO: 115574
ugugagaagaacaauuucc

SEQ ID NO: 115576 - RNA, 19 nt, Artificial Sequence
  Description of Artificial Sequence: Synthetic oligonucleotide
  Sense strand starting at position 1140 of SEQ ID NO: 1471
uggguugaacaauggaguu

SEQ ID NO: 115577 - RNA, 19 nt, Artificial Sequence
  Description of Artificial Sequence: Synthetic oligonucleotide
  Antisense strand to SEQ ID NO: 115576
aacuccauuguucaaccca

SEQ ID NO: 115578 - RNA, 19 nt, Artificial Sequence
  Description of Artificial Sequence: Synthetic oligonucleotide
  Sense strand starting at position 1156 of SEQ ID NO: 1471
guuauaauaguguaggaua

SEQ ID NO: 115579 - RNA, 19 nt, Artificial Sequence
  Description of Artificial Sequence: Synthetic oligonucleotide
  Antisense strand to SEQ ID NO: 115578
uauccuacacuauuauaac

SEQ ID NO: 115580 - RNA, 19 nt, Artificial Sequence
  Description of Artificial Sequence: Synthetic oligonucleotide
  Sense strand starting at position 1244 of SEQ ID NO: 1471
cauaguggacagugacaau

SEQ ID NO: 115581 - RNA, 19 nt, Artificial Sequence
  Description of Artificial Sequence: Synthetic oligonucleotide
  Antisense strand to SEQ ID NO: 115580
auugucacuguccacuaug

SEQ ID NO: 115582 - RNA, 19 nt, Artificial Sequence
  Description of Artificial Sequence: Synthetic oligonucleotide
  Sense strand starting at position 1475 of SEQ ID NO: 1471
gauguaguugauuggagga

SEQ ID NO: 115583 - RNA, 19 nt, Artificial Sequence
  Description of Artificial Sequence: Synthetic oligonucleotide
  Antisense strand to SEQ ID NO: 115582
uccuccaaucaacuacauc

SEQ ID NO: 115584 - RNA, 19 nt, Artificial Sequence
  Description of Artificial Sequence: Synthetic oligonucleotide
  Sense strand starting at position 1506 of SEQ ID NO: 1471
gugaaauaccaaggaugug

SEQ ID NO: 115585 - RNA, 19 nt, Artificial Sequence
  Description of Artificial Sequence: Synthetic oligonucleotide
  Antisense strand to SEQ ID NO: 115584
cacauccuugguauuucac

SEQ ID NO: 115586 - RNA, 19 nt, Artificial Sequence
  Description of Artificial Sequence: Synthetic oligonucleotide
  Sense strand starting at position 1515 of SEQ ID NO: 1471
caaggaugugaugaucugu

SEQ ID NO: 115587 - RNA, 19 nt, Artificial Sequence
  Description of Artificial Sequence: Synthetic oligonucleotide
  Antisense strand to SEQ ID NO: 115586
acagaucaucacauccuug

SEQ ID NO: 115588 - RNA, 19 nt, Artificial Sequence
  Description of Artificial Sequence: Synthetic oligonucleotide
  Sense strand starting at position 1526 of SEQ ID NO: 1471
ugaucugugcaacagugaa

SEQ ID NO: 115589 - RNA, 19 nt, Artificial Sequence
  Description of Artificial Sequence: Synthetic oligonucleotide
  Antisense strand to SEQ ID NO: 115588
uucacuguugcacagauca

SEQ ID NO: 115590 - RNA, 19 nt, Artificial Sequence
  Description of Artificial Sequence: Synthetic oligonucleotide
  Sense strand starting at position 1617 of SEQ ID NO: 1471
guuacagauggcuauguaa

SEQ ID NO: 115591 - RNA, 19 nt, Artificial Sequence
  Description of Artificial Sequence: Synthetic oligonucleotide
  Antisense strand to SEQ ID NO: 115590
uuacauagccaucuguaac

SEQ ID NO: 115592 - RNA, 19 nt, Artificial Sequence
  Description of Artificial Sequence: Synthetic oligonucleotide
  Sense strand starting at position 1721 of SEQ ID NO: 1471
aagaaauggucuucuucug

SEQ ID NO: 115593 - RNA, 19 nt, Artificial Sequence
  Description of Artificial Sequence: Synthetic oligonucleotide
  Antisense strand to SEQ ID NO: 115592
cagaagaagaccauuucuu

SEQ ID NO: 115594 - RNA, 19 nt, Artificial Sequence
  Description of Artificial Sequence: Synthetic oligonucleotide
  Sense strand starting at position 1757 of SEQ ID NO: 1471
gcaucuuggguacaaugau

SEQ ID NO: 115595 - RNA, 19 nt, Artificial Sequence
  Description of Artificial Sequence: Synthetic oligonucleotide
  Antisense strand to SEQ ID NO: 115594
aucauuguacccaagaugc

SEQ ID NO: 115596 - RNA, 19 nt, Artificial Sequence
  Description of Artificial Sequence: Synthetic oligonucleotide
  Sense strand starting at position 1859 of SEQ ID NO: 1471
uggaaaugaugauugcauu

SEQ ID NO: 115597 - RNA, 19 nt, Artificial Sequence
  Description of Artificial Sequence: Synthetic oligonucleotide
  Antisense strand to SEQ ID NO: 115596
aaugcaaucaucauuucca

SEQ ID NO: 115598 - RNA, 19 nt, Artificial Sequence
  Description of Artificial Sequence: Synthetic oligonucleotide
  Sense strand starting at position 1860 of SEQ ID NO: 1471
ggaaaugaugauugcauug

SEQ ID NO: 115599 - RNA, 19 nt, Artificial Sequence
  Description of Artificial Sequence: Synthetic oligonucleotide
  Antisense strand to SEQ ID NO: 115598
caaugcaaucaucauuucc

SEQ ID NO: 115600 - RNA, 19 nt, Artificial Sequence
  Description of Artificial Sequence: Synthetic oligonucleotide
  Sense strand starting at position 2413 of SEQ ID NO: 1471
cugaauauaccauaguugu

SEQ ID NO: 115601 - RNA, 19 nt, Artificial Sequence
  Description of Artificial Sequence: Synthetic oligonucleotide
  Antisense strand to SEQ ID NO: 115600
acaacuaugguauauucag

SEQ ID NO: 115602 - RNA, 19 nt, Artificial Sequence
  Description of Artificial Sequence: Synthetic oligonucleotide
  Sense strand starting at position 2421 of SEQ ID NO: 1471
accauaguugucuauaacu

SEQ ID NO: 115603 - RNA, 19 nt, Artificial Sequence
  Description of Artificial Sequence: Synthetic oligonucleotide
  Antisense strand to SEQ ID NO: 115602
aguuauagacaacuauggu

SEQ ID NO: 115604 - RNA, 19 nt, Artificial Sequence
  Description of Artificial Sequence: Synthetic oligonucleotide
  Sense strand starting at position 2437 of SEQ ID NO: 1471
acucaaugguucuuaauug

SEQ ID NO: 115605 - RNA, 19 nt, Artificial Sequence
  Description of Artificial Sequence: Synthetic oligonucleotide
  Antisense strand to SEQ ID NO: 115604
caauuaagaaccauugagu

SEQ ID NO: 115606 - RNA, 19 nt, Artificial Sequence
  Description of Artificial Sequence: Synthetic oligonucleotide
  Sense strand starting at position 2659 of SEQ ID NO: 1471
guggaauaugucuacacuu

SEQ ID NO: 115607 - RNA, 19 nt, Artificial Sequence
  Description of Artificial Sequence: Synthetic oligonucleotide
  Antisense strand to SEQ ID NO: 115606
aaguguagacauauuccac

SEQ ID NO: 115608 - RNA, 19 nt, Artificial Sequence
  Description of Artificial Sequence: Synthetic oligonucleotide
  Sense strand starting at position 2661 of SEQ ID NO: 1471
ggaauaugucuacacuuuc

SEQ ID NO: 115609 - RNA, 19 nt, Artificial Sequence
  Description of Artificial Sequence: Synthetic oligonucleotide
  Antisense strand to SEQ ID NO: 115608
gaaaguguagacauauucc

SEQ ID NO: 115610 - RNA, 19 nt, Artificial Sequence
  Description of Artificial Sequence: Synthetic oligonucleotide
  Sense strand starting at position 2992 of SEQ ID NO: 1471
accuuaaugggauguauca

SEQ ID NO: 115611 - RNA, 19 nt, Artificial Sequence
  Description of Artificial Sequence: Synthetic oligonucleotide
  Antisense strand to SEQ ID NO: 115610
ugauacaucccauuaaggu

SEQ ID NO: 115612 - RNA, 19 nt, Artificial Sequence
  Description of Artificial Sequence: Synthetic oligonucleotide
  Sense strand starting at position 3189 of SEQ ID NO: 1471
auaagacauugauugccaa

SEQ ID NO: 115613 - RNA, 19 nt, Artificial Sequence
  Description of Artificial Sequence: Synthetic oligonucleotide
  Antisense strand to SEQ ID NO: 115612
uuggcaaucaaugucuuau

SEQ ID NO: 115614 - RNA, 19 nt, Artificial Sequence
  Description of Artificial Sequence: Synthetic oligonucleotide
  Sense strand starting at position 3435 of SEQ ID NO: 1471
agcacagacuucuuagaac

SEQ ID NO: 115615 - RNA, 19 nt, Artificial Sequence
  Description of Artificial Sequence: Synthetic oligonucleotide
  Antisense strand to SEQ ID NO: 115614
guucuaagaagucugugcu

SEQ ID NO: 115616 - RNA, 19 nt, Artificial Sequence
  Description of Artificial Sequence: Synthetic oligonucleotide
  Sense strand starting at position 3477 of SEQ ID NO: 1471
uguuauuucuuucuaggca

SEQ ID NO: 115617 - RNA, 19 nt, Artificial Sequence
  Description of Artificial Sequence: Synthetic oligonucleotide
  Antisense strand to SEQ ID NO: 115616
ugccuagaaagaaauaaca

SEQ ID NO: 115618 - RNA, 19 nt, Artificial Sequence
  Description of Artificial Sequence: Synthetic oligonucleotide
  Sense strand starting at position 3484 of SEQ ID NO: 1471
ucuuucuaggcacaagaau

SEQ ID NO: 115619 - RNA, 19 nt, Artificial Sequence
  Description of Artificial Sequence: Synthetic oligonucleotide
  Antisense strand to SEQ ID NO: 115618
auucuugugccuagaaaga

SEQ ID NO: 115620 - RNA, 19 nt, Artificial Sequence
  Description of Artificial Sequence: Synthetic oligonucleotide
  Sense strand starting at position 3557 of SEQ ID NO: 1471
ccauuuaaaucugaaagag

SEQ ID NO: 115621 - RNA, 19 nt, Artificial Sequence
  Description of Artificial Sequence: Synthetic oligonucleotide
  Antisense strand to SEQ ID NO: 115620
cucuuucagauuuaaaugg

SEQ ID NO: 115622 - RNA, 19 nt, Artificial Sequence
  Description of Artificial Sequence: Synthetic oligonucleotide
  Sense strand starting at position 3572 of SEQ ID NO: 1471
agagaaaucucuguuuaca

SEQ ID NO: 115623 - RNA, 19 nt, Artificial Sequence
  Description of Artificial Sequence: Synthetic oligonucleotide
  Antisense strand to SEQ ID NO: 115622
uguaaacagagauuucucu

SEQ ID NO: 115624 - RNA, 19 nt, Artificial Sequence
  Description of Artificial Sequence: Synthetic oligonucleotide
  Sense strand starting at position 3611 of SEQ ID NO: 1471
agagcaucuggucaucaga

SEQ ID NO: 115625 - RNA, 19 nt, Artificial Sequence
  Description of Artificial Sequence: Synthetic oligonucleotide
  Antisense strand to SEQ ID NO: 115624
ucugaugaccagaugcucu

SEQ ID NO: 115626 - RNA, 19 nt, Artificial Sequence
  Description of Artificial Sequence: Synthetic oligonucleotide
  Sense strand starting at position 3614 of SEQ ID NO: 1471
gcaucuggucaucagaauu

SEQ ID NO: 115627 - RNA, 19 nt, Artificial Sequence
  Description of Artificial Sequence: Synthetic oligonucleotide
  Antisense strand to SEQ ID NO: 115626
aauucugaugaccagaugc

SEQ ID NO: 115628 - RNA, 19 nt, Artificial Sequence
  Description of Artificial Sequence: Synthetic oligonucleotide
  Sense strand starting at position 3869 of SEQ ID NO: 1471
ugauuauaacaauguguca

SEQ ID NO: 115629 - RNA, 19 nt, Artificial Sequence
  Description of Artificial Sequence: Synthetic oligonucleotide
  Antisense strand to SEQ ID NO: 115628
ugacacauuguuauaauca

SEQ ID NO: 115630 - RNA, 19 nt, Artificial Sequence
  Description of Artificial Sequence: Synthetic oligonucleotide
  Sense strand starting at position 3889 of SEQ ID NO: 1471
cuacuaggucugcaaugaa

SEQ ID NO: 115631 - RNA, 19 nt, Artificial Sequence
  Description of Artificial Sequence: Synthetic oligonucleotide
  Antisense strand to SEQ ID NO: 115630
uucauugcagaccuaguag

SEQ ID NO: 115632 - RNA, 19 nt, Artificial Sequence
  Description of Artificial Sequence: Synthetic oligonucleotide
  Sense strand starting at position 3263 of SEQ ID NO: 1472
uuguguaugguuuaugaaa

SEQ ID NO: 115633 - RNA, 19 nt, Artificial Sequence
  Description of Artificial Sequence: Synthetic oligonucleotide
  Antisense strand to SEQ ID NO: 115632
uuucauaaaccauacacaa

SEQ ID NO: 115634 - RNA, 19 nt, Artificial Sequence
  Description of Artificial Sequence: Synthetic oligonucleotide
  Sense strand starting at position 2974 of SEQ ID NO: 1472
gcucaauauagauggauug

SEQ ID NO: 115635 - RNA, 19 nt, Artificial Sequence
  Description of Artificial Sequence: Synthetic oligonucleotide
  Antisense strand to SEQ ID NO: 115634
caauccaucuauauugagc

SEQ ID NO: 115636 - RNA, 19 nt, Artificial Sequence
  Description of Artificial Sequence: Synthetic oligonucleotide
  Sense strand starting at position 2968 of SEQ ID NO: 1472
uguugagcucaauauagau

SEQ ID NO: 115637 - RNA, 19 nt, Artificial Sequence
  Description of Artificial Sequence: Synthetic oligonucleotide
  Antisense strand to SEQ ID NO: 115636
aucuauauugagcucaaca

SEQ ID NO: 115638 - RNA, 19 nt, Artificial Sequence
  Description of Artificial Sequence: Synthetic oligonucleotide
  Sense strand starting at position 2965 of SEQ ID NO: 1472
uucuguugagcucaauaua

SEQ ID NO: 115639 - RNA, 19 nt, Artificial Sequence
  Description of Artificial Sequence: Synthetic oligonucleotide
  Antisense strand to SEQ ID NO: 115638
uauauugagcucaacagaa

SEQ ID NO: 115640 - RNA, 19 nt, Artificial Sequence
  Description of Artificial Sequence: Synthetic oligonucleotide
  Sense strand starting at position 2853 of SEQ ID NO: 1472
aguuuaccacucuaguaau

SEQ ID NO: 115641 - RNA, 19 nt, Artificial Sequence
  Description of Artificial Sequence: Synthetic oligonucleotide
  Antisense strand to SEQ ID NO: 115640
auuacuagagugguaaacu

SEQ ID NO: 115642 - RNA, 19 nt, Artificial Sequence
  Description of Artificial Sequence: Synthetic oligonucleotide
  Sense strand starting at position 2835 of SEQ ID NO: 1472
gcauucucaggcugauaaa

SEQ ID NO: 115643 - RNA, 19 nt, Artificial Sequence
  Description of Artificial Sequence: Synthetic oligonucleotide
  Antisense strand to SEQ ID NO: 115642
uuuaucagccugagaaugc

SEQ ID NO: 115644 - RNA, 19 nt, Artificial Sequence
  Description of Artificial Sequence: Synthetic oligonucleotide
  Sense strand starting at position 2823 of SEQ ID NO: 1472
aguugauuauuugcauucu

SEQ ID NO: 115645 - RNA, 19 nt, Artificial Sequence
  Description of Artificial Sequence: Synthetic oligonucleotide
  Antisense strand to SEQ ID NO: 115644
agaaugcaaauaaucaacu

SEQ ID NO: 115646 - RNA, 19 nt, Artificial Sequence
  Description of Artificial Sequence: Synthetic oligonucleotide
  Sense strand starting at position 2820 of SEQ ID NO: 1472
guaaguugauuauuugcau

SEQ ID NO: 115647 - RNA, 19 nt, Artificial Sequence
  Description of Artificial Sequence: Synthetic oligonucleotide
  Antisense strand to SEQ ID NO: 115646
augcaaauaaucaacuuac

SEQ ID NO: 115648 - RNA, 19 nt, Artificial Sequence
  Description of Artificial Sequence: Synthetic oligonucleotide
  Sense strand starting at position 2793 of SEQ ID NO: 1472
cuuugaagauuguugauag

SEQ ID NO: 115649 - RNA, 19 nt, Artificial Sequence
  Description of Artificial Sequence: Synthetic oligonucleotide
  Antisense strand to SEQ ID NO: 115648
cuaucaacaaucuucaaag

SEQ ID NO: 115650 - RNA, 19 nt, Artificial Sequence
  Description of Artificial Sequence: Synthetic oligonucleotide
  Sense strand starting at position 2791 of SEQ ID NO: 1472
cucuuugaagauuguugau

SEQ ID NO: 115651 - RNA, 19 nt, Artificial Sequence
  Description of Artificial Sequence: Synthetic oligonucleotide
  Antisense strand to SEQ ID NO: 115650
aucaacaaucuucaaagag

SEQ ID NO: 115652 - RNA, 19 nt, Artificial Sequence
  Description of Artificial Sequence: Synthetic oligonucleotide
  Sense strand starting at position 2788 of SEQ ID NO: 1472
cagcucuuugaagauuguu

SEQ ID NO: 115653 - RNA, 19 nt, Artificial Sequence
  Description of Artificial Sequence: Synthetic oligonucleotide
  Antisense strand to SEQ ID NO: 115652
aacaaucuucaaagagcug

SEQ ID NO: 115654 - RNA, 19 nt, Artificial Sequence
  Description of Artificial Sequence: Synthetic oligonucleotide
  Sense strand starting at position 2784 of SEQ ID NO: 1472
aucacagcucuuugaagau

SEQ ID NO: 115655 - RNA, 19 nt, Artificial Sequence
  Description of Artificial Sequence: Synthetic oligonucleotide
  Antisense strand to SEQ ID NO: 115654
aucuucaaagagcugugau

SEQ ID NO: 115656 - RNA, 19 nt, Artificial Sequence
  Description of Artificial Sequence: Synthetic oligonucleotide
  Sense strand starting at position 2769 of SEQ ID NO: 1472
guguuucuggaacacauca

SEQ ID NO: 115657 - RNA, 19 nt, Artificial Sequence
  Description of Artificial Sequence: Synthetic oligonucleotide
  Antisense strand to SEQ ID NO: 115656
ugauguguuccagaaacac

SEQ ID NO: 115658 - RNA, 19 nt, Artificial Sequence
  Description of Artificial Sequence: Synthetic oligonucleotide
  Sense strand starting at position 2682 of SEQ ID NO: 1472
ugucuaguuuaaucacuaa

SEQ ID NO: 115659 - RNA, 19 nt, Artificial Sequence
  Description of Artificial Sequence: Synthetic oligonucleotide
  Antisense strand to SEQ ID NO: 115658
uuagugauuaaacuagaca

SEQ ID NO: 115660 - RNA, 19 nt, Artificial Sequence
  Description of Artificial Sequence: Synthetic oligonucleotide
  Sense strand starting at position 2674 of SEQ ID NO: 1472
cccaaaugugucuaguuua

SEQ ID NO: 115661 - RNA, 19 nt, Artificial Sequence
  Description of Artificial Sequence: Synthetic oligonucleotide
  Antisense strand to SEQ ID NO: 115660
uaaacuagacacauuuggg

SEQ ID NO: 115662 - RNA, 19 nt, Artificial Sequence
  Description of Artificial Sequence: Synthetic oligonucleotide
  Sense strand starting at position 2664 of SEQ ID NO: 1472
aucagaauugcccaaaugu

SEQ ID NO: 115663 - RNA, 19 nt, Artificial Sequence
  Description of Artificial Sequence: Synthetic oligonucleotide
  Antisense strand to SEQ ID NO: 115662
acauuugggcaauucugau

SEQ ID NO: 115664 - RNA, 19 nt, Artificial Sequence
  Description of Artificial Sequence: Synthetic oligonucleotide
  Sense strand starting at position 2618 of SEQ ID NO: 1472
ucaucuaaagguugauaag

SEQ ID NO: 115665 - RNA, 19 nt, Artificial Sequence
  Description of Artificial Sequence: Synthetic oligonucleotide
  Antisense strand to SEQ ID NO: 115664
cuuaucaaccuuuagauga

SEQ ID NO: 115666 - RNA, 19 nt, Artificial Sequence
  Description of Artificial Sequence: Synthetic oligonucleotide
  Sense strand starting at position 2576 of SEQ ID NO: 1472
cuauguagucaacauaauu

SEQ ID NO: 115667 - RNA, 19 nt, Artificial Sequence
  Description of Artificial Sequence: Synthetic oligonucleotide
  Antisense strand to SEQ ID NO: 115666
aauuauguugacuacauag

SEQ ID NO: 115668 - RNA, 19 nt, Artificial Sequence
  Description of Artificial Sequence: Synthetic oligonucleotide
  Sense strand starting at position 2573 of SEQ ID NO: 1472
ggucuauguagucaacaua

SEQ ID NO: 115669 - RNA, 19 nt, Artificial Sequence
  Description of Artificial Sequence: Synthetic oligonucleotide
  Antisense strand to SEQ ID NO: 115668
uauguugacuacauagacc

SEQ ID NO: 115670 - RNA, 19 nt, Artificial Sequence
  Description of Artificial Sequence: Synthetic oligonucleotide
  Sense strand starting at position 2565 of SEQ ID NO: 1472
accaaauuggucuauguag

SEQ ID NO: 115671 - RNA, 19 nt, Artificial Sequence
  Description of Artificial Sequence: Synthetic oligonucleotide
  Antisense strand to SEQ ID NO: 115670
cuacauagaccaauuuggu

SEQ ID NO: 115672 - RNA, 19 nt, Artificial Sequence
  Description of Artificial Sequence: Synthetic oligonucleotide
  Sense strand starting at position 2563 of SEQ ID NO: 1472
ugaccaaauuggucuaugu

SEQ ID NO: 115673 - RNA, 19 nt, Artificial Sequence
  Description of Artificial Sequence: Synthetic oligonucleotide
  Antisense strand to SEQ ID NO: 115672
acauagaccaauuugguca

SEQ ID NO: 115674 - RNA, 19 nt, Artificial Sequence
  Description of Artificial Sequence: Synthetic oligonucleotide
  Sense strand starting at position 2471 of SEQ ID NO: 1472
aaacauugcuggguuaaau

SEQ ID NO: 115675 - RNA, 19 nt, Artificial Sequence
  Description of Artificial Sequence: Synthetic oligonucleotide
  Antisense strand to SEQ ID NO: 115674
auuuaacccagcaauguuu

SEQ ID NO: 115676 - RNA, 19 nt, Artificial Sequence
  Description of Artificial Sequence: Synthetic oligonucleotide
  Sense strand starting at position 2470 of SEQ ID NO: 1472
caaacauugcuggguuaaa

SEQ ID NO: 115677 - RNA, 19 nt, Artificial Sequence
  Description of Artificial Sequence: Synthetic oligonucleotide
  Antisense strand to SEQ ID NO: 115676
uuuaacccagcaauguuug

SEQ ID NO: 115678 - RNA, 19 nt, Artificial Sequence
  Description of Artificial Sequence: Synthetic oligonucleotide
  Sense strand starting at position 2469 of SEQ ID NO: 1472
ucaaacauugcuggguuaa

SEQ ID NO: 115679 - RNA, 19 nt, Artificial Sequence
  Description of Artificial Sequence: Synthetic oligonucleotide
  Antisense strand to SEQ ID NO: 115678
uuaacccagcaauguuuga

SEQ ID NO: 115680 - RNA, 19 nt, Artificial Sequence
  Description of Artificial Sequence: Synthetic oligonucleotide
  Sense strand starting at position 2295 of SEQ ID NO: 1472
ucagguucuggugauuaaa

SEQ ID NO: 115681 - RNA, 19 nt, Artificial Sequence
  Description of Artificial Sequence: Synthetic oligonucleotide
  Antisense strand to SEQ ID NO: 115680
uuuaaucaccagaaccuga

SEQ ID NO: 115682 - RNA, 19 nt, Artificial Sequence
  Description of Artificial Sequence: Synthetic oligonucleotide
  Sense strand starting at position 763 of SEQ ID NO: 1472
caguuaucccaguggacua

SEQ ID NO: 115683 - RNA, 19 nt, Artificial Sequence
  Description of Artificial Sequence: Synthetic oligonucleotide
  Antisense strand to SEQ ID NO: 115682
uaguccacugggauaacug

SEQ ID NO: 115684 - RNA, 19 nt, Artificial Sequence
  Description of Artificial Sequence: Synthetic oligonucleotide
  Sense strand starting at position 609 of SEQ ID NO: 1472
aagggucagucacugaaau

SEQ ID NO: 115685 - RNA, 19 nt, Artificial Sequence
  Description of Artificial Sequence: Synthetic oligonucleotide
  Antisense strand to SEQ ID NO: 115684
auuucagugacugacccuu

SEQ ID NO: 115686 - RNA, 19 nt, Artificial Sequence
  Description of Artificial Sequence: Synthetic oligonucleotide
  Sense strand starting at position 596 of SEQ ID NO: 1472
aguauaaugcuugaagggu

SEQ ID NO: 115687 - RNA, 19 nt, Artificial Sequence
  Description of Artificial Sequence: Synthetic oligonucleotide
  Antisense strand to SEQ ID NO: 115686
acccuucaagcauuauacu

SEQ ID NO: 115688 - RNA, 19 nt, Artificial Sequence
  Description of Artificial Sequence: Synthetic oligonucleotide
  Sense strand starting at position 565 of SEQ ID NO: 1472
agauguucccuccaccuau

SEQ ID NO: 115689 - RNA, 19 nt, Artificial Sequence
  Description of Artificial Sequence: Synthetic oligonucleotide
  Antisense strand to SEQ ID NO: 115688
auagguggagggaacaucu

SEQ ID NO: 115690 - RNA, 19 nt, Artificial Sequence
  Description of Artificial Sequence: Synthetic oligonucleotide
  Sense strand starting at position 483 of SEQ ID NO: 1472
augaaagcucccugcauaa

SEQ ID NO: 115691 - RNA, 19 nt, Artificial Sequence
  Description of Artificial Sequence: Synthetic oligonucleotide
  Antisense strand to SEQ ID NO: 115690
uuaugcagggagcuuucau

SEQ ID NO: 115692 - RNA, 19 nt, Artificial Sequence
  Description of Artificial Sequence: Synthetic oligonucleotide
  Sense strand starting at position 439 of SEQ ID NO: 1472
ggaaaugugguagaaguuc

SEQ ID NO: 115693 - RNA, 19 nt, Artificial Sequence
  Description of Artificial Sequence: Synthetic oligonucleotide
  Antisense strand to SEQ ID NO: 115692
gaacuucuaccacauuucc

SEQ ID NO: 115694 - RNA, 19 nt, Artificial Sequence
  Description of Artificial Sequence: Synthetic oligonucleotide
  Sense strand starting at position 292 of SEQ ID NO: 1472
agaaauugucauuguggaa

SEQ ID NO: 115695 - RNA, 19 nt, Artificial Sequence
  Description of Artificial Sequence: Synthetic oligonucleotide
  Antisense strand to SEQ ID NO: 115694
uuccacaaugacaauuucu

SEQ ID NO: 115696 - RNA, 19 nt, Artificial Sequence
  Description of Artificial Sequence: Synthetic oligonucleotide
  Sense strand starting at position 291 of SEQ ID NO: 1472
gagaaauugucauugugga

SEQ ID NO: 115697 - RNA, 19 nt, Artificial Sequence
  Description of Artificial Sequence: Synthetic oligonucleotide
  Antisense strand to SEQ ID NO: 115696
uccacaaugacaauuucuc

SEQ ID NO: 115698 - RNA, 19 nt, Artificial Sequence
  Description of Artificial Sequence: Synthetic oligonucleotide
  Sense strand starting at position 279 of SEQ ID NO: 1472
uugaccauuuaggagaaau

SEQ ID NO: 115699 - RNA, 19 nt, Artificial Sequence
  Description of Artificial Sequence: Synthetic oligonucleotide
  Antisense strand to SEQ ID NO: 115698
auuucuccuaaauggucaa

SEQ ID NO: 115700 - RNA, 19 nt, Artificial Sequence
  Description of Artificial Sequence: Synthetic oligonucleotide
  Sense strand starting at position 278 of SEQ ID NO: 1472
auugaccauuuaggagaaa

SEQ ID NO: 115701 - RNA, 19 nt, Artificial Sequence
  Description of Artificial Sequence: Synthetic oligonucleotide
  Antisense strand to SEQ ID NO: 115700
uuucuccuaaauggucaau

SEQ ID NO: 115702 - RNA, 19 nt, Artificial Sequence
  Description of Artificial Sequence: Synthetic oligonucleotide
  Sense strand starting at position 240 of SEQ ID NO: 1472
gguagcaaggauugucaaa

SEQ ID NO: 115703 - RNA, 19 nt, Artificial Sequence
  Description of Artificial Sequence: Synthetic oligonucleotide
  Antisense strand to SEQ ID NO: 115702
uuugacaauccuugcuacc

SEQ ID NO: 115704 - RNA, 19 nt, Artificial Sequence
  Description of Artificial Sequence: Synthetic oligonucleotide
  Sense strand starting at position 210 of SEQ ID NO: 1472
agaaauaugucagcacuuc

SEQ ID NO: 115705 - RNA, 19 nt, Artificial Sequence
  Description of Artificial Sequence: Synthetic oligonucleotide
  Antisense strand to SEQ ID NO: 115704
gaagugcugacauauuucu

SEQ ID NO: 115706 - RNA, 19 nt, Artificial Sequence
  Description of Artificial Sequence: Synthetic oligonucleotide
  Sense strand starting at position 180 of SEQ ID NO: 1472
caguuacuggccugaaaua

SEQ ID NO: 115707 - RNA, 19 nt, Artificial Sequence
  Description of Artificial Sequence: Synthetic oligonucleotide
  Antisense strand to SEQ ID NO: 115706
uauuucaggccaguaacug

SEQ ID NO: 115708 - RNA, 19 nt, Artificial Sequence
  Description of Artificial Sequence: Synthetic oligonucleotide
  Sense strand starting at position 168 of SEQ ID NO: 1472
uguagaaaucugcaguuac

SEQ ID NO: 115709 - RNA, 19 nt, Artificial Sequence
  Description of Artificial Sequence: Synthetic oligonucleotide
  Antisense strand to SEQ ID NO: 115708
guaacugcagauuucuaca

SEQ ID NO: 115710 - RNA, 19 nt, Artificial Sequence
  Description of Artificial Sequence: Synthetic oligonucleotide
  Sense strand starting at position 103 of SEQ ID NO: 1472
uauauaucugcuggagaua

SEQ ID NO: 115711 - RNA, 19 nt, Artificial Sequence
  Description of Artificial Sequence: Synthetic oligonucleotide
  Antisense strand to SEQ ID NO: 115710
uaucuccagcagauauaua

SEQ ID NO: 115712 - RNA, 19 nt, Artificial Sequence
  Description of Artificial Sequence: Synthetic oligonucleotide
  Sense strand starting at position 59 of SEQ ID NO: 1473
cugaucaguguuuauaauu

SEQ ID NO: 115713 - RNA, 19 nt, Artificial Sequence
  Description of Artificial Sequence: Synthetic oligonucleotide
  Antisense strand to SEQ ID NO: 115712
aauuauaaacacugaucag

SEQ ID NO: 115714 - RNA, 19 nt, Artificial Sequence
  Description of Artificial Sequence: Synthetic oligonucleotide
  Sense strand starting at position 169 of SEQ ID NO: 1473
agagcacuguguucuauuu

SEQ ID NO: 115715 - RNA, 19 nt, Artificial Sequence
  Description of Artificial Sequence: Synthetic oligonucleotide
  Antisense strand to SEQ ID NO: 115714
aaauagaacacagugcucu

SEQ ID NO: 115716 - RNA, 19 nt, Artificial Sequence
  Description of Artificial Sequence: Synthetic oligonucleotide
  Sense strand starting at position 188 of SEQ ID NO: 1473
gaucaucaagcaugaggau

SEQ ID NO: 115717 - RNA, 19 nt, Artificial Sequence
  Description of Artificial Sequence: Synthetic oligonucleotide
  Antisense strand to SEQ ID NO: 115716
auccucaugcuugaugauc

SEQ ID NO: 115718 - RNA, 19 nt, Artificial Sequence
  Description of Artificial Sequence: Synthetic oligonucleotide
  Sense strand starting at position 194 of SEQ ID NO: 1473
caagcaugaggaugucauu

SEQ ID NO: 115719 - RNA, 19 nt, Artificial Sequence
  Description of Artificial Sequence: Synthetic oligonucleotide
  Antisense strand to SEQ ID NO: 115718
aaugacauccucaugcuug

SEQ ID NO: 115720 - RNA, 19 nt, Artificial Sequence
  Description of Artificial Sequence: Synthetic oligonucleotide
  Sense strand starting at position 200 of SEQ ID NO: 1473
ugaggaugucauuauuguu

SEQ ID NO: 115721 - RNA, 19 nt, Artificial Sequence
  Description of Artificial Sequence: Synthetic oligonucleotide
  Antisense strand to SEQ ID NO: 115720
aacaauaaugacauccuca

SEQ ID NO: 115722 - RNA, 19 nt, Artificial Sequence
  Description of Artificial Sequence: Synthetic oligonucleotide
  Sense strand starting at position 662 of SEQ ID NO: 1473
uugaaugggacuugguaca

SEQ ID NO: 115723 - RNA, 19 nt, Artificial Sequence
  Description of Artificial Sequence: Synthetic oligonucleotide
  Antisense strand to SEQ ID NO: 115722
uguaccaagucccauucaa

SEQ ID NO: 115724 - RNA, 19 nt, Artificial Sequence
  Description of Artificial Sequence: Synthetic oligonucleotide
  Sense strand starting at position 684 of SEQ ID NO: 1473
augaauguauuacuagaug

SEQ ID NO: 115725 - RNA, 19 nt, Artificial Sequence
  Description of Artificial Sequence: Synthetic oligonucleotide
  Antisense strand to SEQ ID NO: 115724
caucuaguaauacauucau

SEQ ID NO: 115726 - RNA, 19 nt, Artificial Sequence
  Description of Artificial Sequence: Synthetic oligonucleotide
  Sense strand starting at position 877 of SEQ ID NO: 1473
gacaauauagaguguagau

SEQ ID NO: 115727 - RNA, 19 nt, Artificial Sequence
  Description of Artificial Sequence: Synthetic oligonucleotide
  Antisense strand to SEQ ID NO: 115726
aucuacacucuauauuguc

SEQ ID NO: 115728 - RNA, 19 nt, Artificial Sequence
  Description of Artificial Sequence: Synthetic oligonucleotide
  Sense strand starting at position 948 of SEQ ID NO: 1473
agucuuaauccuuggaaac

SEQ ID NO: 115729 - RNA, 19 nt, Artificial Sequence
  Description of Artificial Sequence: Synthetic oligonucleotide
  Antisense strand to SEQ ID NO: 115728
guuuccaaggauuaagacu

SEQ ID NO: 115730 - RNA, 19 nt, Artificial Sequence
  Description of Artificial Sequence: Synthetic oligonucleotide
  Sense strand starting at position 949 of SEQ ID NO: 1473
gucuuaauccuuggaaaca

SEQ ID NO: 115731 - RNA, 19 nt, Artificial Sequence
  Description of Artificial Sequence: Synthetic oligonucleotide
  Antisense strand to SEQ ID NO: 115730
uguuuccaaggauuaagac

SEQ ID NO: 115732 - RNA, 19 nt, Artificial Sequence
  Description of Artificial Sequence: Synthetic oligonucleotide
  Sense strand starting at position 1014 of SEQ ID NO: 1473
uucuucugugacuauccua

SEQ ID NO: 115733 - RNA, 19 nt, Artificial Sequence
  Description of Artificial Sequence: Synthetic oligonucleotide
  Antisense strand to SEQ ID NO: 115732
uaggauagucacagaagaa

SEQ ID NO: 115734 - RNA, 19 nt, Artificial Sequence
  Description of Artificial Sequence: Synthetic oligonucleotide
  Sense strand starting at position 1370 of SEQ ID NO: 1473
gcaccauaauuaccaggau

SEQ ID NO: 115735 - RNA, 19 nt, Artificial Sequence
  Description of Artificial Sequence: Synthetic oligonucleotide
  Antisense strand to SEQ ID NO: 115734
auccugguaauuauggugc

SEQ ID NO: 115736 - RNA, 19 nt, Artificial Sequence
  Description of Artificial Sequence: Synthetic oligonucleotide
  Sense strand starting at position 1373 of SEQ ID NO: 1473
ccauaauuaccaggaugcu

SEQ ID NO: 115737 - RNA, 19 nt, Artificial Sequence
  Description of Artificial Sequence: Synthetic oligonucleotide
  Antisense strand to SEQ ID NO: 115736
agcauccugguaauuaugg

SEQ ID NO: 115738 - RNA, 19 nt, Artificial Sequence
  Description of Artificial Sequence: Synthetic oligonucleotide
  Sense strand starting at position 1431 of SEQ ID NO: 1473
gcaggcuaacuugauaaca

SEQ ID NO: 115739 - RNA, 19 nt, Artificial Sequence
  Description of Artificial Sequence: Synthetic oligonucleotide
  Antisense strand to SEQ ID NO: 115738
uguuaucaaguuagccugc

SEQ ID NO: 115740 - RNA, 19 nt, Artificial Sequence
  Description of Artificial Sequence: Synthetic oligonucleotide
  Sense strand starting at position 1613 of SEQ ID NO: 1473
ggugacaaauugcuacaua

SEQ ID NO: 115741 - RNA, 19 nt, Artificial Sequence
  Description of Artificial Sequence: Synthetic oligonucleotide
  Antisense strand to SEQ ID NO: 115740
uauguagcaauuugucacc

SEQ ID NO: 115742 - RNA, 19 nt, Artificial Sequence
  Description of Artificial Sequence: Synthetic oligonucleotide
  Sense strand starting at position 1712 of SEQ ID NO: 1473
ccaugaaggagauggucuu

SEQ ID NO: 115743 - RNA, 19 nt, Artificial Sequence
  Description of Artificial Sequence: Synthetic oligonucleotide
  Antisense strand to SEQ ID NO: 115742
aagaccaucuccuucaugg

SEQ ID NO: 115744 - RNA, 19 nt, Artificial Sequence
  Description of Artificial Sequence: Synthetic oligonucleotide
  Sense strand starting at position 1877 of SEQ ID NO: 1473
ccaccaggauugucaagua

SEQ ID NO: 115745 - RNA, 19 nt, Artificial Sequence
  Description of Artificial Sequence: Synthetic oligonucleotide
  Antisense strand to SEQ ID NO: 115744
uacuugacaauccuggugg

SEQ ID NO: 115746 - RNA, 19 nt, Artificial Sequence
  Description of Artificial Sequence: Synthetic oligonucleotide
  Sense strand starting at position 2006 of SEQ ID NO: 1473
gaacuucuuucugugaaug

SEQ ID NO: 115747 - RNA, 19 nt, Artificial Sequence
  Description of Artificial Sequence: Synthetic oligonucleotide
  Antisense strand to SEQ ID NO: 115746
cauucacagaaagaaguuc

SEQ ID NO: 115748 - RNA, 19 nt, Artificial Sequence
  Description of Artificial Sequence: Synthetic oligonucleotide
  Sense strand starting at position 2017 of SEQ ID NO: 1473
ugugaauguguuugaaaga

SEQ ID NO: 115749 - RNA, 19 nt, Artificial Sequence
  Description of Artificial Sequence: Synthetic oligonucleotide
  Antisense strand to SEQ ID NO: 115748
ucuuucaaacacauucaca

SEQ ID NO: 115750 - RNA, 19 nt, Artificial Sequence
  Description of Artificial Sequence: Synthetic oligonucleotide
  Sense strand starting at position 2127 of SEQ ID NO: 1473
cucuuagucuaucuagaua

SEQ ID NO: 115751 - RNA, 19 nt, Artificial Sequence
  Description of Artificial Sequence: Synthetic oligonucleotide
  Antisense strand to SEQ ID NO: 115750
uaucuagauagacuaagag

SEQ ID NO: 115752 - RNA, 19 nt, Artificial Sequence
  Description of Artificial Sequence: Synthetic oligonucleotide
  Sense strand starting at position 2141 of SEQ ID NO: 1473
agauauagaugccucuuua

SEQ ID NO: 115753 - RNA, 19 nt, Artificial Sequence
  Description of Artificial Sequence: Synthetic oligonucleotide
  Antisense strand to SEQ ID NO: 115752
uaaagaggcaucuauaucu

SEQ ID NO: 115754 - RNA, 19 nt, Artificial Sequence
  Description of Artificial Sequence: Synthetic oligonucleotide
  Sense strand starting at position 2145 of SEQ ID NO: 1473
auagaugccucuuuaauga

SEQ ID NO: 115755 - RNA, 19 nt, Artificial Sequence
  Description of Artificial Sequence: Synthetic oligonucleotide
  Antisense strand to SEQ ID NO: 115754
ucauuaaagaggcaucuau

SEQ ID NO: 115756 - RNA, 19 nt, Artificial Sequence
  Description of Artificial Sequence: Synthetic oligonucleotide
  Sense strand starting at position 2327 of SEQ ID NO: 1473
ucuuguacuguauguauuu

SEQ ID NO: 115757 - RNA, 19 nt, Artificial Sequence
  Description of Artificial Sequence: Synthetic oligonucleotide
  Antisense strand to SEQ ID NO: 115756
aaauacauacaguacaaga

SEQ ID NO: 115758 - RNA, 19 nt, Artificial Sequence
  Description of Artificial Sequence: Synthetic oligonucleotide
  Sense strand starting at position 2340 of SEQ ID NO: 1473
guauuugguccuuggaugu

SEQ ID NO: 115759 - RNA, 19 nt, Artificial Sequence
  Description of Artificial Sequence: Synthetic oligonucleotide
  Antisense strand to SEQ ID NO: 115758
acauccaaggaccaaauac

SEQ ID NO: 115760 - RNA, 19 nt, Artificial Sequence
  Description of Artificial Sequence: Synthetic oligonucleotide
  Sense strand starting at position 2368 of SEQ ID NO: 1473
ccuaguaauuugguuucuu

SEQ ID NO: 115761 - RNA, 19 nt, Artificial Sequence
  Description of Artificial Sequence: Synthetic oligonucleotide
  Antisense strand to SEQ ID NO: 115760
aagaaaccaaauuacuagg

SEQ ID NO: 115762 - RNA, 19 nt, Artificial Sequence
  Description of Artificial Sequence: Synthetic oligonucleotide
  Sense strand starting at position 2369 of SEQ ID NO: 1473
cuaguaauuugguuucuuu

SEQ ID NO: 115763 - RNA, 19 nt, Artificial Sequence
  Description of Artificial Sequence: Synthetic oligonucleotide
  Antisense strand to SEQ ID NO: 115762
aaagaaaccaaauuacuag

SEQ ID NO: 115764 - RNA, 19 nt, Artificial Sequence
  Description of Artificial Sequence: Synthetic oligonucleotide
  Sense strand starting at position 2470 of SEQ ID NO: 1473
aaugcuagaguuugaaacu

SEQ ID NO: 115765 - RNA, 19 nt, Artificial Sequence
  Description of Artificial Sequence: Synthetic oligonucleotide
  Antisense strand to SEQ ID NO: 115764
aguuucaaacucuagcauu

SEQ ID NO: 115766 - RNA, 19 nt, Artificial Sequence
  Description of Artificial Sequence: Synthetic oligonucleotide
  Sense strand starting at position 2568 of SEQ ID NO: 1473
uauauaggauuguuguaag

SEQ ID NO: 115767 - RNA, 19 nt, Artificial Sequence
  Description of Artificial Sequence: Synthetic oligonucleotide
  Antisense strand to SEQ ID NO: 115766
cuuacaacaauccuauaua

SEQ ID NO: 115768 - RNA, 19 nt, Artificial Sequence
  Description of Artificial Sequence: Synthetic oligonucleotide
  Sense strand starting at position 2597 of SEQ ID NO: 1473
guaucaguaaaguacuuga

SEQ ID NO: 115769 - RNA, 19 nt, Artificial Sequence
  Description of Artificial Sequence: Synthetic oligonucleotide
  Antisense strand to SEQ ID NO: 115768
ucaaguacuuuacugauac

SEQ ID NO: 115770 - RNA, 19 nt, Artificial Sequence
  Description of Artificial Sequence: Synthetic oligonucleotide
  Sense strand starting at position 2600 of SEQ ID NO: 1473
ucaguaaaguacuugaaac

SEQ ID NO: 115771 - RNA, 19 nt, Artificial Sequence
  Description of Artificial Sequence: Synthetic oligonucleotide
  Antisense strand to SEQ ID NO: 115770
guuucaaguacuuuacuga

SEQ ID NO: 115772 - RNA, 19 nt, Artificial Sequence
  Description of Artificial Sequence: Synthetic oligonucleotide
  Sense strand starting at position 2767 of SEQ ID NO: 1473
guucuuauccuugagauuc

SEQ ID NO: 115773 - RNA, 19 nt, Artificial Sequence
  Description of Artificial Sequence: Synthetic oligonucleotide
  Antisense strand to SEQ ID NO: 115772
gaaucucaaggauaagaac

SEQ ID NO: 115774 - RNA, 19 nt, Artificial Sequence
  Description of Artificial Sequence: Synthetic oligonucleotide
  Sense strand starting at position 2952 of SEQ ID NO: 1473
ugauuaaaucaggguucuu

SEQ ID NO: 115775 - RNA, 19 nt, Artificial Sequence
  Description of Artificial Sequence: Synthetic oligonucleotide
  Antisense strand to SEQ ID NO: 115774
aagaacccugauuuaauca

SEQ ID NO: 115776 - RNA, 19 nt, Artificial Sequence
  Description of Artificial Sequence: Synthetic oligonucleotide
  Sense strand starting at position 3035 of SEQ ID NO: 1473
gacauuuguucuguauguu

SEQ ID NO: 115777 - RNA, 19 nt, Artificial Sequence
  Description of Artificial Sequence: Synthetic oligonucleotide
  Antisense strand to SEQ ID NO: 115776
aacauacagaacaaauguc

SEQ ID NO: 115778 - RNA, 19 nt, Artificial Sequence
  Description of Artificial Sequence: Synthetic oligonucleotide
  Sense strand starting at position 3103 of SEQ ID NO: 1473
gauguaucugucuaugaaa

SEQ ID NO: 115779 - RNA, 19 nt, Artificial Sequence
  Description of Artificial Sequence: Synthetic oligonucleotide
  Antisense strand to SEQ ID NO: 115778
uuucauagacagauacauc

SEQ ID NO: 115780 - RNA, 19 nt, Artificial Sequence
  Description of Artificial Sequence: Synthetic oligonucleotide
  Sense strand starting at position 3212 of SEQ ID NO: 1473
gugaacacaccuugaaucu

SEQ ID NO: 115781 - RNA, 19 nt, Artificial Sequence
  Description of Artificial Sequence: Synthetic oligonucleotide
  Antisense strand to SEQ ID NO: 115780
agauucaagguguguucac

SEQ ID NO: 115782 - RNA, 19 nt, Artificial Sequence
  Description of Artificial Sequence: Synthetic oligonucleotide
  Sense strand starting at position 3502 of SEQ ID NO: 1473
ugguuuauuugcuuaggua

SEQ ID NO: 115783 - RNA, 19 nt, Artificial Sequence
  Description of Artificial Sequence: Synthetic oligonucleotide
  Antisense strand to SEQ ID NO: 115782
uaccuaagcaaauaaacca

SEQ ID NO: 115784 - RNA, 19 nt, Artificial Sequence
  Description of Artificial Sequence: Synthetic oligonucleotide
  Sense strand starting at position 3608 of SEQ ID NO: 1473
cucuaacauccugguagau

SEQ ID NO: 115785 - RNA, 19 nt, Artificial Sequence
  Description of Artificial Sequence: Synthetic oligonucleotide
  Antisense strand to SEQ ID NO: 115784
aucuaccaggauguuagag

SEQ ID NO: 115786 - RNA, 19 nt, Artificial Sequence
  Description of Artificial Sequence: Synthetic oligonucleotide
  Sense strand starting at position 3755 of SEQ ID NO: 1473
uuuggcacucuuuauagau

SEQ ID NO: 115787 - RNA, 19 nt, Artificial Sequence
  Description of Artificial Sequence: Synthetic oligonucleotide
  Antisense strand to SEQ ID NO: 115786
aucuauaaagagugccaaa

SEQ ID NO: 115788 - RNA, 19 nt, Artificial Sequence
  Description of Artificial Sequence: Synthetic oligonucleotide
  Sense strand starting at position 3781 of SEQ ID NO: 1473
uucucacaugcaggaauaa

SEQ ID NO: 115789 - RNA, 19 nt, Artificial Sequence
  Description of Artificial Sequence: Synthetic oligonucleotide
  Antisense strand to SEQ ID NO: 115788
uuauuccugcaugugagaa

SEQ ID NO: 115790 - RNA, 19 nt, Artificial Sequence
  Description of Artificial Sequence: Synthetic oligonucleotide
  Sense strand starting at position 3832 of SEQ ID NO: 1473
auagcauaguuugugauuu

SEQ ID NO: 115791 - RNA, 19 nt, Artificial Sequence
  Description of Artificial Sequence: Synthetic oligonucleotide
  Antisense strand to SEQ ID NO: 115790
aaaucacaaacuaugcuau

SEQ ID NO: 115792 - RNA, 19 nt, Artificial Sequence
  Description of Artificial Sequence: Synthetic oligonucleotide
  Sense strand starting at position 16 of SEQ ID NO: 1474
accaauugucgggagugga

SEQ ID NO: 115793 - RNA, 19 nt, Artificial Sequence
  Description of Artificial Sequence: Synthetic oligonucleotide
  Antisense strand to SEQ ID NO: 115792
uccacucccgacaauuggu

SEQ ID NO: 115794 - RNA, 19 nt, Artificial Sequence
  Description of Artificial Sequence: Synthetic oligonucleotide
  Sense strand starting at position 74 of SEQ ID NO: 1474
gcagauugaagguagcaga

SEQ ID NO: 115795 - RNA, 19 nt, Artificial Sequence
  Description of Artificial Sequence: Synthetic oligonucleotide
  Antisense strand to SEQ ID NO: 115794
ucugcuaccuucaaucugc

SEQ ID NO: 115796 - RNA, 19 nt, Artificial Sequence
  Description of Artificial Sequence: Synthetic oligonucleotide
  Sense strand starting at position 151 of SEQ ID NO: 1474
ggguaaacuuaaucaguua

SEQ ID NO: 115797 - RNA, 19 nt, Artificial Sequence
  Description of Artificial Sequence: Synthetic oligonucleotide
  Antisense strand to SEQ ID NO: 115796
uaacugauuaaguuuaccc

SEQ ID NO: 115798 - RNA, 19 nt, Artificial Sequence
  Description of Artificial Sequence: Synthetic oligonucleotide
  Sense strand starting at position 692 of SEQ ID NO: 1474
aguggauuuauaugcuguu

SEQ ID NO: 115799 - RNA, 19 nt, Artificial Sequence
  Description of Artificial Sequence: Synthetic oligonucleotide
  Antisense strand to SEQ ID NO: 115798
aacagcauauaaauccacu

SEQ ID NO: 115800 - RNA, 19 nt, Artificial Sequence
  Description of Artificial Sequence: Synthetic oligonucleotide
  Sense strand starting at position 693 of SEQ ID NO: 1474
guggauuuauaugcuguuu

SEQ ID NO: 115801 - RNA, 19 nt, Artificial Sequence
  Description of Artificial Sequence: Synthetic oligonucleotide
  Antisense strand to SEQ ID NO: 115800
aaacagcauauaaauccac

SEQ ID NO: 115802 - RNA, 19 nt, Artificial Sequence
  Description of Artificial Sequence: Synthetic oligonucleotide
  Sense strand starting at position 790 of SEQ ID NO: 1474
gggacauucuucuucugau

SEQ ID NO: 115803 - RNA, 19 nt, Artificial Sequence
  Description of Artificial Sequence: Synthetic oligonucleotide
  Antisense strand to SEQ ID NO: 115802
aucagaagaagaauguccc

SEQ ID NO: 115804 - RNA, 19 nt, Artificial Sequence
  Description of Artificial Sequence: Synthetic oligonucleotide
  Sense strand starting at position 791 of SEQ ID NO: 1474
ggacauucuucuucugaua

SEQ ID NO: 115805 - RNA, 19 nt, Artificial Sequence
  Description of Artificial Sequence: Synthetic oligonucleotide
  Antisense strand to SEQ ID NO: 115804
uaucagaagaagaaugucc

SEQ ID NO: 115806 - RNA, 19 nt, Artificial Sequence
  Description of Artificial Sequence: Synthetic oligonucleotide
  Sense strand starting at position 919 of SEQ ID NO: 1474
aggcaaaugguacaaguuu

SEQ ID NO: 115807 - RNA, 19 nt, Artificial Sequence
  Description of Artificial Sequence: Synthetic oligonucleotide
  Antisense strand to SEQ ID NO: 115806
aaacuuguaccauuugccu

SEQ ID NO: 115808 - RNA, 19 nt, Artificial Sequence
  Description of Artificial Sequence: Synthetic oligonucleotide
  Sense strand starting at position 1373 of SEQ ID NO: 1474
gguuacugucuauacaaga

SEQ ID NO: 115809 - RNA, 19 nt, Artificial Sequence
  Description of Artificial Sequence: Synthetic oligonucleotide
  Antisense strand to SEQ ID NO: 115808
ucuuguauagacaguaacc

SEQ ID NO: 115810 - RNA, 19 nt, Artificial Sequence
  Description of Artificial Sequence: Synthetic oligonucleotide
  Sense strand starting at position 1532 of SEQ ID NO: 1474
auacaauguuggucauaag

SEQ ID NO: 115811 - RNA, 19 nt, Artificial Sequence
  Description of Artificial Sequence: Synthetic oligonucleotide
  Antisense strand to SEQ ID NO: 115810
cuuaugaccaacauuguau

SEQ ID NO: 115812 - RNA, 19 nt, Artificial Sequence
  Description of Artificial Sequence: Synthetic oligonucleotide
  Sense strand starting at position 1546 of SEQ ID NO: 1474
auaagcaguggauaucuua

SEQ ID NO: 115813 - RNA, 19 nt, Artificial Sequence
  Description of Artificial Sequence: Synthetic oligonucleotide
  Antisense strand to SEQ ID NO: 115812
uaagauauccacugcuuau

SEQ ID NO: 115814 - RNA, 19 nt, Artificial Sequence
  Description of Artificial Sequence: Synthetic oligonucleotide
  Sense strand starting at position 1555 of SEQ ID NO: 1474
ggauaucuuagaggguuac

SEQ ID NO: 115815 - RNA, 19 nt, Artificial Sequence
  Description of Artificial Sequence: Synthetic oligonucleotide
  Antisense strand to SEQ ID NO: 115814
guaacccucuaagauaucc

SEQ ID NO: 115816 - RNA, 19 nt, Artificial Sequence
  Description of Artificial Sequence: Synthetic oligonucleotide
  Sense strand starting at position 1556 of SEQ ID NO: 1474
gauaucuuagaggguuaca

SEQ ID NO: 115817 - RNA, 19 nt, Artificial Sequence
  Description of Artificial Sequence: Synthetic oligonucleotide
  Antisense strand to SEQ ID NO: 115816
uguaacccucuaagauauc

SEQ ID NO: 115818 - RNA, 19 nt, Artificial Sequence
  Description of Artificial Sequence: Synthetic oligonucleotide
  Sense strand starting at position 1590 of SEQ ID NO: 1474
gucauaucccaucaaagug

SEQ ID NO: 115819 - RNA, 19 nt, Artificial Sequence
  Description of Artificial Sequence: Synthetic oligonucleotide
  Antisense strand to SEQ ID NO: 115818
cacuuugaugggauaugac

SEQ ID NO: 115820 - RNA, 19 nt, Artificial Sequence
  Description of Artificial Sequence: Synthetic oligonucleotide
  Sense strand starting at position 1805 of SEQ ID NO: 1474
aaguuagacccaugaugau

SEQ ID NO: 115821 - RNA, 19 nt, Artificial Sequence
  Description of Artificial Sequence: Synthetic oligonucleotide
  Antisense strand to SEQ ID NO: 115820
aucaucaugggucuaacuu

SEQ ID NO: 115822 - RNA, 19 nt, Artificial Sequence
  Description of Artificial Sequence: Synthetic oligonucleotide
  Sense strand starting at position 1823 of SEQ ID NO: 1474
ucagauuaccugcaagggu

SEQ ID NO: 115823 - RNA, 19 nt, Artificial Sequence
  Description of Artificial Sequence: Synthetic oligonucleotide
  Antisense strand to SEQ ID NO: 115822
acccuugcagguaaucuga

SEQ ID NO: 115824 - RNA, 19 nt, Artificial Sequence
  Description of Artificial Sequence: Synthetic oligonucleotide
  Sense strand starting at position 1871 of SEQ ID NO: 1474
aaagaaaugucuguacaug

SEQ ID NO: 115825 - RNA, 19 nt, Artificial Sequence
  Description of Artificial Sequence: Synthetic oligonucleotide
  Antisense strand to SEQ ID NO: 115824
cauguacagacauuucuuu

SEQ ID NO: 115826 - RNA, 19 nt, Artificial Sequence
  Description of Artificial Sequence: Synthetic oligonucleotide
  Sense strand starting at position 1872 of SEQ ID NO: 1474
aagaaaugucuguacaugu

SEQ ID NO: 115827 - RNA, 19 nt, Artificial Sequence
  Description of Artificial Sequence: Synthetic oligonucleotide
  Antisense strand to SEQ ID NO: 115826
acauguacagacauuucuu

SEQ ID NO: 115828 - RNA, 19 nt, Artificial Sequence
  Description of Artificial Sequence: Synthetic oligonucleotide
  Sense strand starting at position 2166 of SEQ ID NO: 1474
agugaugacuuaguauaug

SEQ ID NO: 115829 - RNA, 19 nt, Artificial Sequence
  Description of Artificial Sequence: Synthetic oligonucleotide
  Antisense strand to SEQ ID NO: 115828
cauauacuaagucaucacu

SEQ ID NO: 115830 - RNA, 19 nt, Artificial Sequence
  Description of Artificial Sequence: Synthetic oligonucleotide
  Sense strand starting at position 2182 of SEQ ID NO: 1474
augacaucacuauguauau

SEQ ID NO: 115831 - RNA, 19 nt, Artificial Sequence
  Description of Artificial Sequence: Synthetic oligonucleotide
  Antisense strand to SEQ ID NO: 115830
auauacauagugaugucau

SEQ ID NO: 115832 - RNA, 19 nt, Artificial Sequence
  Description of Artificial Sequence: Synthetic oligonucleotide
  Sense strand starting at position 2183 of SEQ ID NO: 1474
ugacaucacuauguauaug

SEQ ID NO: 115833 - RNA, 19 nt, Artificial Sequence
  Description of Artificial Sequence: Synthetic oligonucleotide
  Antisense strand to SEQ ID NO: 115832
cauauacauagugauguca

SEQ ID NO: 115834 - RNA, 19 nt, Artificial Sequence
  Description of Artificial Sequence: Synthetic oligonucleotide
  Sense strand starting at position 2243 of SEQ ID NO: 1474
gagcaugugguauaauaug

SEQ ID NO: 115835 - RNA, 19 nt, Artificial Sequence
  Description of Artificial Sequence: Synthetic oligonucleotide
  Antisense strand to SEQ ID NO: 115834
cauauuauaccacaugcuc

SEQ ID NO: 115836 - RNA, 19 nt, Artificial Sequence
  Description of Artificial Sequence: Synthetic oligonucleotide
  Sense strand starting at position 2274 of SEQ ID NO: 1474
ccaguugaugcucagauaa

SEQ ID NO: 115837 - RNA, 19 nt, Artificial Sequence
  Description of Artificial Sequence: Synthetic oligonucleotide
  Antisense strand to SEQ ID NO: 115836
uuaucugagcaucaacugg

SEQ ID NO: 115838 - RNA, 19 nt, Artificial Sequence
  Description of Artificial Sequence: Synthetic oligonucleotide
  Sense strand starting at position 2317 of SEQ ID NO: 1474
gcuuuauuuggaugagcuu

SEQ ID NO: 115839 - RNA, 19 nt, Artificial Sequence
  Description of Artificial Sequence: Synthetic oligonucleotide
  Antisense strand to SEQ ID NO: 115838
aagcucauccaaauaaagc

SEQ ID NO: 115840 - RNA, 19 nt, Artificial Sequence
  Description of Artificial Sequence: Synthetic oligonucleotide
  Sense strand starting at position 2437 of SEQ ID NO: 1474
agaauugauuuccaaguaa

SEQ ID NO: 115841 - RNA, 19 nt, Artificial Sequence
  Description of Artificial Sequence: Synthetic oligonucleotide
  Antisense strand to SEQ ID NO: 115840
uuacuuggaaaucaauucu

SEQ ID NO: 115842 - RNA, 19 nt, Artificial Sequence
  Description of Artificial Sequence: Synthetic oligonucleotide
  Sense strand starting at position 2510 of SEQ ID NO: 1474
uuaacccuucuuggagaau

SEQ ID NO: 115843 - RNA, 19 nt, Artificial Sequence
  Description of Artificial Sequence: Synthetic oligonucleotide
  Antisense strand to SEQ ID NO: 115842
auucuccaagaaggguuaa

SEQ ID NO: 115844 - RNA, 19 nt, Artificial Sequence
  Description of Artificial Sequence: Synthetic oligonucleotide
  Sense strand starting at position 2646 of SEQ ID NO: 1474
uuaauuaaaucuguggaug

SEQ ID NO: 115845 - RNA, 19 nt, Artificial Sequence
  Description of Artificial Sequence: Synthetic oligonucleotide
  Antisense strand to SEQ ID NO: 115844
cauccacagauuuaauuaa

SEQ ID NO: 115846 - RNA, 19 nt, Artificial Sequence
  Description of Artificial Sequence: Synthetic oligonucleotide
  Sense strand starting at position 2649 of SEQ ID NO: 1474
auuaaaucuguggaugguu

SEQ ID NO: 115847 - RNA, 19 nt, Artificial Sequence
  Description of Artificial Sequence: Synthetic oligonucleotide
  Antisense strand to SEQ ID NO: 115846
aaccauccacagauuuaau

SEQ ID NO: 115848 - RNA, 19 nt, Artificial Sequence
  Description of Artificial Sequence: Synthetic oligonucleotide
  Sense strand starting at position 3019 of SEQ ID NO: 1474
uugcgaaauggguaggaca

SEQ ID NO: 115849 - RNA, 19 nt, Artificial Sequence
  Description of Artificial Sequence: Synthetic oligonucleotide
  Antisense strand to SEQ ID NO: 115848
uguccuacccauuucgcaa

SEQ ID NO: 115850 - RNA, 19 nt, Artificial Sequence
  Description of Artificial Sequence: Synthetic oligonucleotide
  Sense strand starting at position 3033 of SEQ ID NO: 1474
ggacaagugugauuacuua

SEQ ID NO: 115851 - RNA, 19 nt, Artificial Sequence
  Description of Artificial Sequence: Synthetic oligonucleotide
  Antisense strand to SEQ ID NO: 115850
uaaguaaucacacuugucc

SEQ ID NO: 115852 - RNA, 19 nt, Artificial Sequence
  Description of Artificial Sequence: Synthetic oligonucleotide
  Sense strand starting at position 3195 of SEQ ID NO: 1474
agaguaauaauauggagca

SEQ ID NO: 115853 - RNA, 19 nt, Artificial Sequence
  Description of Artificial Sequence: Synthetic oligonucleotide
  Antisense strand to SEQ ID NO: 115852
ugcuccauauuauuacucu

SEQ ID NO: 115854 - RNA, 19 nt, Artificial Sequence
  Description of Artificial Sequence: Synthetic oligonucleotide
  Sense strand starting at position 3211 of SEQ ID NO: 1474
gcacuuuaagaagguaaua

SEQ ID NO: 115855 - RNA, 19 nt, Artificial Sequence
  Description of Artificial Sequence: Synthetic oligonucleotide
  Antisense strand to SEQ ID NO: 115854
uauuaccuucuuaaagugc

SEQ ID NO: 115856 - RNA, 19 nt, Artificial Sequence
  Description of Artificial Sequence: Synthetic oligonucleotide
  Sense strand starting at position 3222 of SEQ ID NO: 1474
agguaauaauuccugguga

SEQ ID NO: 115857 - RNA, 19 nt, Artificial Sequence
  Description of Artificial Sequence: Synthetic oligonucleotide
  Antisense strand to SEQ ID NO: 115856
ucaccaggaauuauuaccu

SEQ ID NO: 115858 - RNA, 19 nt, Artificial Sequence
  Description of Artificial Sequence: Synthetic oligonucleotide
  Sense strand starting at position 3227 of SEQ ID NO: 1474
auaauuccuggugaauguu

SEQ ID NO: 115859 - RNA, 19 nt, Artificial Sequence
  Description of Artificial Sequence: Synthetic oligonucleotide
  Antisense strand to SEQ ID NO: 115858
aacauucaccaggaauuau

SEQ ID NO: 115860 - RNA, 19 nt, Artificial Sequence
  Description of Artificial Sequence: Synthetic oligonucleotide
  Sense strand starting at position 3237 of SEQ ID NO: 1474
gugaauguuagauggauga

SEQ ID NO: 115861 - RNA, 19 nt, Artificial Sequence
  Description of Artificial Sequence: Synthetic oligonucleotide
  Antisense strand to SEQ ID NO: 115860
ucauccaucuaacauucac

SEQ ID NO: 115862 - RNA, 19 nt, Artificial Sequence
  Description of Artificial Sequence: Synthetic oligonucleotide
  Sense strand starting at position 3241 of SEQ ID NO: 1474
auguuagauggaugaguua

SEQ ID NO: 115863 - RNA, 19 nt, Artificial Sequence
  Description of Artificial Sequence: Synthetic oligonucleotide
  Antisense strand to SEQ ID NO: 115862
uaacucauccaucuaacau

SEQ ID NO: 115864 - RNA, 19 nt, Artificial Sequence
  Description of Artificial Sequence: Synthetic oligonucleotide
  Sense strand starting at position 3402 of SEQ ID NO: 1474
cauggcagagucuaacuua

SEQ ID NO: 115865 - RNA, 19 nt, Artificial Sequence
  Description of Artificial Sequence: Synthetic oligonucleotide
  Antisense strand to SEQ ID NO: 115864
uaaguuagacucugccaug

SEQ ID NO: 115866 - RNA, 19 nt, Artificial Sequence
  Description of Artificial Sequence: Synthetic oligonucleotide
  Sense strand starting at position 3493 of SEQ ID NO: 1474
uuuggacucuacuuuaaag

SEQ ID NO: 115867 - RNA, 19 nt, Artificial Sequence
  Description of Artificial Sequence: Synthetic oligonucleotide
  Antisense strand to SEQ ID NO: 115866
cuuuaaaguagaguccaaa

SEQ ID NO: 115868 - RNA, 19 nt, Artificial Sequence
  Description of Artificial Sequence: Synthetic oligonucleotide
  Sense strand starting at position 3719 of SEQ ID NO: 1474
uauagaggaccaugucuau

SEQ ID NO: 115869 - RNA, 19 nt, Artificial Sequence
  Description of Artificial Sequence: Synthetic oligonucleotide
  Antisense strand to SEQ ID NO: 115868
auagacaugguccucuaua

SEQ ID NO: 115870 - RNA, 19 nt, Artificial Sequence
  Description of Artificial Sequence: Synthetic oligonucleotide
  Sense strand starting at position 3722 of SEQ ID NO: 1474
agaggaccaugucuauuau

SEQ ID NO: 115871 - RNA, 19 nt, Artificial Sequence
  Description of Artificial Sequence: Synthetic oligonucleotide
  Antisense strand to SEQ ID NO: 115870
auaauagacaugguccucu

SEQ ID NO: 115872 - RNA, 19 nt, Artificial Sequence
  Description of Artificial Sequence: Synthetic oligonucleotide
  Sense strand starting at position 3935 of SEQ ID NO: 1475
agguuaaucugacuuguca

SEQ ID NO: 115873 - RNA, 19 nt, Artificial Sequence
  Description of Artificial Sequence: Synthetic oligonucleotide
  Antisense strand to SEQ ID NO: 115872
ugacaagucagauuaaccu

SEQ ID NO: 115874 - RNA, 19 nt, Artificial Sequence
  Description of Artificial Sequence: Synthetic oligonucleotide
  Sense strand starting at position 3869 of SEQ ID NO: 1475
gugauauacuuuccaccuu

SEQ ID NO: 115875 - RNA, 19 nt, Artificial Sequence
  Description of Artificial Sequence: Synthetic oligonucleotide
  Antisense strand to SEQ ID NO: 115874
aagguggaaaguauaucac

SEQ ID NO: 115876 - RNA, 19 nt, Artificial Sequence
  Description of Artificial Sequence: Synthetic oligonucleotide
  Sense strand starting at position 3657 of SEQ ID NO: 1475
gucucaagagcuugauaua

SEQ ID NO: 115877 - RNA, 19 nt, Artificial Sequence
  Description of Artificial Sequence: Synthetic oligonucleotide
  Antisense strand to SEQ ID NO: 115876
uauaucaagcucuugagac

SEQ ID NO: 115878 - RNA, 19 nt, Artificial Sequence
  Description of Artificial Sequence: Synthetic oligonucleotide
  Sense strand starting at position 3528 of SEQ ID NO: 1475
uguaacugagccuaauaga

SEQ ID NO: 115879 - RNA, 19 nt, Artificial Sequence
  Description of Artificial Sequence: Synthetic oligonucleotide
  Antisense strand to SEQ ID NO: 115878
ucuauuaggcucaguuaca

SEQ ID NO: 115880 - RNA, 19 nt, Artificial Sequence
  Description of Artificial Sequence: Synthetic oligonucleotide
  Sense strand starting at position 3525 of SEQ ID NO: 1475
aaguguaacugagccuaau

SEQ ID NO: 115881 - RNA, 19 nt, Artificial Sequence
  Description of Artificial Sequence: Synthetic oligonucleotide
  Antisense strand to SEQ ID NO: 115880
auuaggcucaguuacacuu

SEQ ID NO: 115882 - RNA, 19 nt, Artificial Sequence
  Description of Artificial Sequence: Synthetic oligonucleotide
  Sense strand starting at position 3523 of SEQ ID NO: 1475
agaaguguaacugagccua

SEQ ID NO: 115883 - RNA, 19 nt, Artificial Sequence
  Description of Artificial Sequence: Synthetic oligonucleotide
  Antisense strand to SEQ ID NO: 115882
uaggcucaguuacacuucu

SEQ ID NO: 115884 - RNA, 19 nt, Artificial Sequence
  Description of Artificial Sequence: Synthetic oligonucleotide
  Sense strand starting at position 3390 of SEQ ID NO: 1475
auacuaggaucaugauuua

SEQ ID NO: 115885 - RNA, 19 nt, Artificial Sequence
  Description of Artificial Sequence: Synthetic oligonucleotide
  Antisense strand to SEQ ID NO: 115884
uaaaucaugauccuaguau

SEQ ID NO: 115886 - RNA, 19 nt, Artificial Sequence
  Description of Artificial Sequence: Synthetic oligonucleotide
  Sense strand starting at position 3332 of SEQ ID NO: 1475
uugucauuaguugggaaua

SEQ ID NO: 115887 - RNA, 19 nt, Artificial Sequence
  Description of Artificial Sequence: Synthetic oligonucleotide
  Antisense strand to SEQ ID NO: 115886
uauucccaacuaaugacaa

SEQ ID NO: 115888 - RNA, 19 nt, Artificial Sequence
  Description of Artificial Sequence: Synthetic oligonucleotide
  Sense strand starting at position 3331 of SEQ ID NO: 1475
uuugucauuaguugggaau

SEQ ID NO: 115889 - RNA, 19 nt, Artificial Sequence
  Description of Artificial Sequence: Synthetic oligonucleotide
  Antisense strand to SEQ ID NO: 115888
auucccaacuaaugacaaa

SEQ ID NO: 115890 - RNA, 19 nt, Artificial Sequence
  Description of Artificial Sequence: Synthetic oligonucleotide
  Sense strand starting at position 3276 of SEQ ID NO: 1475
aggauucucuagucccaau

SEQ ID NO: 115891 - RNA, 19 nt, Artificial Sequence
  Description of Artificial Sequence: Synthetic oligonucleotide
  Antisense strand to SEQ ID NO: 115890
auugggacuagagaauccu

SEQ ID NO: 115892 - RNA, 19 nt, Artificial Sequence
  Description of Artificial Sequence: Synthetic oligonucleotide
  Sense strand starting at position 3178 of SEQ ID NO: 1475
gugugaugucuccaaauga

SEQ ID NO: 115893 - RNA, 19 nt, Artificial Sequence
  Description of Artificial Sequence: Synthetic oligonucleotide
  Antisense strand to SEQ ID NO: 115892
ucauuuggagacaucacac

SEQ ID NO: 115894 - RNA, 19 nt, Artificial Sequence
  Description of Artificial Sequence: Synthetic oligonucleotide
  Sense strand starting at position 3009 of SEQ ID NO: 1475
gcauaagucaagggaggau

SEQ ID NO: 115895 - RNA, 19 nt, Artificial Sequence
  Description of Artificial Sequence: Synthetic oligonucleotide
  Antisense strand to SEQ ID NO: 115894
auccucccuugacuuaugc

SEQ ID NO: 115896 - RNA, 19 nt, Artificial Sequence
  Description of Artificial Sequence: Synthetic oligonucleotide
  Sense strand starting at position 2900 of SEQ ID NO: 1475
uauguuaagcacggaagaa

SEQ ID NO: 115897 - RNA, 19 nt, Artificial Sequence
  Description of Artificial Sequence: Synthetic oligonucleotide
  Antisense strand to SEQ ID NO: 115896
uucuuccgugcuuaacaua

SEQ ID NO: 115898 - RNA, 19 nt, Artificial Sequence
  Description of Artificial Sequence: Synthetic oligonucleotide
  Sense strand starting at position 2899 of SEQ ID NO: 1475
cuauguuaagcacggaaga

SEQ ID NO: 115899 - RNA, 19 nt, Artificial Sequence
  Description of Artificial Sequence: Synthetic oligonucleotide
  Antisense strand to SEQ ID NO: 115898
ucuuccgugcuuaacauag

SEQ ID NO: 115900 - RNA, 19 nt, Artificial Sequence
  Description of Artificial Sequence: Synthetic oligonucleotide
  Sense strand starting at position 2855 of SEQ ID NO: 1475
aaauuccuugggcagagua

SEQ ID NO: 115901 - RNA, 19 nt, Artificial Sequence
  Description of Artificial Sequence: Synthetic oligonucleotide
  Antisense strand to SEQ ID NO: 115900
uacucugcccaaggaauuu

SEQ ID NO: 115902 - RNA, 19 nt, Artificial Sequence
  Description of Artificial Sequence: Synthetic oligonucleotide
  Sense strand starting at position 2854 of SEQ ID NO: 1475
caaauuccuugggcagagu

SEQ ID NO: 115903 - RNA, 19 nt, Artificial Sequence
  Description of Artificial Sequence: Synthetic oligonucleotide
  Antisense strand to SEQ ID NO: 115902
acucugcccaaggaauuug

SEQ ID NO: 115904 - RNA, 19 nt, Artificial Sequence
  Description of Artificial Sequence: Synthetic oligonucleotide
  Sense strand starting at position 2852 of SEQ ID NO: 1475
uccaaauuccuugggcaga

SEQ ID NO: 115905 - RNA, 19 nt, Artificial Sequence
  Description of Artificial Sequence: Synthetic oligonucleotide
  Antisense strand to SEQ ID NO: 115904
ucugcccaaggaauuugga

SEQ ID NO: 115906 - RNA, 19 nt, Artificial Sequence
  Description of Artificial Sequence: Synthetic oligonucleotide
  Sense strand starting at position 2734 of SEQ ID NO: 1475
ugaugacucucuuuagaga

SEQ ID NO: 115907 - RNA, 19 nt, Artificial Sequence
  Description of Artificial Sequence: Synthetic oligonucleotide
  Antisense strand to SEQ ID NO: 115906
ucucuaaagagagucauca

SEQ ID NO: 115908 - RNA, 19 nt, Artificial Sequence
  Description of Artificial Sequence: Synthetic oligonucleotide
  Sense strand starting at position 2691 of SEQ ID NO: 1475
caaguauggugacucuuaa

SEQ ID NO: 115909 - RNA, 19 nt, Artificial Sequence
  Description of Artificial Sequence: Synthetic oligonucleotide
  Antisense strand to SEQ ID NO: 115908
uuaagagucaccauacuug

SEQ ID NO: 115910 - RNA, 19 nt, Artificial Sequence
  Description of Artificial Sequence: Synthetic oligonucleotide
  Sense strand starting at position 2651 of SEQ ID NO: 1475
agugacuuucuugaaguca

SEQ ID NO: 115911 - RNA, 19 nt, Artificial Sequence
  Description of Artificial Sequence: Synthetic oligonucleotide
  Antisense strand to SEQ ID NO: 115910
ugacuucaagaaagucacu

SEQ ID NO: 115912 - RNA, 19 nt, Artificial Sequence
  Description of Artificial Sequence: Synthetic oligonucleotide
  Sense strand starting at position 2648 of SEQ ID NO: 1475
ugaagugacuuucuugaag

SEQ ID NO: 115913 - RNA, 19 nt, Artificial Sequence
  Description of Artificial Sequence: Synthetic oligonucleotide
  Antisense strand to SEQ ID NO: 115912
cuucaagaaagucacuuca

SEQ ID NO: 115914 - RNA, 19 nt, Artificial Sequence
  Description of Artificial Sequence: Synthetic oligonucleotide
  Sense strand starting at position 2448 of SEQ ID NO: 1475
ugcaaauucguagauacac

SEQ ID NO: 115915 - RNA, 19 nt, Artificial Sequence
  Description of Artificial Sequence: Synthetic oligonucleotide
  Antisense strand to SEQ ID NO: 115914
guguaucuacgaauuugca

SEQ ID NO: 115916 - RNA, 19 nt, Artificial Sequence
  Description of Artificial Sequence: Synthetic oligonucleotide
  Sense strand starting at position 2275 of SEQ ID NO: 1475
acauauguaugacuacaua

SEQ ID NO: 115917 - RNA, 19 nt, Artificial Sequence
  Description of Artificial Sequence: Synthetic oligonucleotide
  Antisense strand to SEQ ID NO: 115916
uauguagucauacauaugu

SEQ ID NO: 115918 - RNA, 19 nt, Artificial Sequence
  Description of Artificial Sequence: Synthetic oligonucleotide
  Sense strand starting at position 2201 of SEQ ID NO: 1475
auaugacuguauguacaua

SEQ ID NO: 115919 - RNA, 19 nt, Artificial Sequence
  Description of Artificial Sequence: Synthetic oligonucleotide
  Antisense strand to SEQ ID NO: 115918
uauguacauacagucauau

SEQ ID NO: 115920 - RNA, 19 nt, Artificial Sequence
  Description of Artificial Sequence: Synthetic oligonucleotide
  Sense strand starting at position 2190 of SEQ ID NO: 1475
gguccauucccauaugacu

SEQ ID NO: 115921 - RNA, 19 nt, Artificial Sequence
  Description of Artificial Sequence: Synthetic oligonucleotide
  Antisense strand to SEQ ID NO: 115920
agucauaugggaauggacc

SEQ ID NO: 115922 - RNA, 19 nt, Artificial Sequence
  Description of Artificial Sequence: Synthetic oligonucleotide
  Sense strand starting at position 2179 of SEQ ID NO: 1475
acaaauguauggguccauu

SEQ ID NO: 115923 - RNA, 19 nt, Artificial Sequence
  Description of Artificial Sequence: Synthetic oligonucleotide
  Antisense strand to SEQ ID NO: 115922
aauggacccauacauuugu

SEQ ID NO: 115924 - RNA, 19 nt, Artificial Sequence
  Description of Artificial Sequence: Synthetic oligonucleotide
  Sense strand starting at position 2007 of SEQ ID NO: 1475
gagguauaucccugauaga

SEQ ID NO: 115925 - RNA, 19 nt, Artificial Sequence
  Description of Artificial Sequence: Synthetic oligonucleotide
  Antisense strand to SEQ ID NO: 115924
ucuaucagggauauaccuc

SEQ ID NO: 115926 - RNA, 19 nt, Artificial Sequence
  Description of Artificial Sequence: Synthetic oligonucleotide
  Sense strand starting at position 2006 of SEQ ID NO: 1475
agagguauaucccugauag

SEQ ID NO: 115927 - RNA, 19 nt, Artificial Sequence
  Description of Artificial Sequence: Synthetic oligonucleotide
  Antisense strand to SEQ ID NO: 115926
cuaucagggauauaccucu

SEQ ID NO: 115928 - RNA, 19 nt, Artificial Sequence
  Description of Artificial Sequence: Synthetic oligonucleotide
  Sense strand starting at position 1032 of SEQ ID NO: 1475
agaagaaaguguccuauug

SEQ ID NO: 115929 - RNA, 19 nt, Artificial Sequence
  Description of Artificial Sequence: Synthetic oligonucleotide
  Antisense strand to SEQ ID NO: 115928
caauaggacacuuucuucu

SEQ ID NO: 115930 - RNA, 19 nt, Artificial Sequence
  Description of Artificial Sequence: Synthetic oligonucleotide
  Sense strand starting at position 930 of SEQ ID NO: 1475
ggauaaggcuuucccagaa

SEQ ID NO: 115931 - RNA, 19 nt, Artificial Sequence
  Description of Artificial Sequence: Synthetic oligonucleotide
  Antisense strand to SEQ ID NO: 115930
uucugggaaagccuuaucc

SEQ ID NO: 115932 - RNA, 19 nt, Artificial Sequence
  Description of Artificial Sequence: Synthetic oligonucleotide
  Sense strand starting at position 776 of SEQ ID NO: 1475
uuuaauucucaauggguuu

SEQ ID NO: 115933 - RNA, 19 nt, Artificial Sequence
  Description of Artificial Sequence: Synthetic oligonucleotide
  Antisense strand to SEQ ID NO: 115932
aaacccauugagaauuaaa

SEQ ID NO: 115934 - RNA, 19 nt, Artificial Sequence
  Description of Artificial Sequence: Synthetic oligonucleotide
  Sense strand starting at position 627 of SEQ ID NO: 1475
ggucaaauagucuaauuau

SEQ ID NO: 115935 - RNA, 19 nt, Artificial Sequence
  Description of Artificial Sequence: Synthetic oligonucleotide
  Antisense strand to SEQ ID NO: 115934
auaauuagacuauuugacc

SEQ ID NO: 115936 - RNA, 19 nt, Artificial Sequence
  Description of Artificial Sequence: Synthetic oligonucleotide
  Sense strand starting at position 227 of SEQ ID NO: 1475
gagaaaggucuuugacacu

SEQ ID NO: 115937 - RNA, 19 nt, Artificial Sequence
  Description of Artificial Sequence: Synthetic oligonucleotide
  Antisense strand to SEQ ID NO: 115936
agugucaaagaccuuucuc

SEQ ID NO: 115938 - RNA, 19 nt, Artificial Sequence
  Description of Artificial Sequence: Synthetic oligonucleotide
  Sense strand starting at position 226 of SEQ ID NO: 1475
ugagaaaggucuuugacac

SEQ ID NO: 115939 - RNA, 19 nt, Artificial Sequence
  Description of Artificial Sequence: Synthetic oligonucleotide
  Antisense strand to SEQ ID NO: 115938
gugucaaagaccuuucuca

SEQ ID NO: 115940 - RNA, 19 nt, Artificial Sequence
  Description of Artificial Sequence: Synthetic oligonucleotide
  Sense strand starting at position 172 of SEQ ID NO: 1475
auaguucugcaauagauuc

SEQ ID NO: 115941 - RNA, 19 nt, Artificial Sequence
  Description of Artificial Sequence: Synthetic oligonucleotide
  Antisense strand to SEQ ID NO: 115940
gaaucuauugcagaacuau

SEQ ID NO: 115942 - RNA, 19 nt, Artificial Sequence
  Description of Artificial Sequence: Synthetic oligonucleotide
  Sense strand starting at position 169 of SEQ ID NO: 1475
uagauaguucugcaauaga

SEQ ID NO: 115943 - RNA, 19 nt, Artificial Sequence
  Description of Artificial Sequence: Synthetic oligonucleotide
  Antisense strand to SEQ ID NO: 115942
ucuauugcagaacuaucua

SEQ ID NO: 115944 - RNA, 19 nt, Artificial Sequence
  Description of Artificial Sequence: Synthetic oligonucleotide
  Sense strand starting at position 168 of SEQ ID NO: 1475
auagauaguucugcaauag

SEQ ID NO: 115945 - RNA, 19 nt, Artificial Sequence
  Description of Artificial Sequence: Synthetic oligonucleotide
  Antisense strand to SEQ ID NO: 115944
cuauugcagaacuaucuau

SEQ ID NO: 115946 - RNA, 19 nt, Artificial Sequence
  Description of Artificial Sequence: Synthetic oligonucleotide
  Sense strand starting at position 114 of SEQ ID NO: 1475
uaauguccgccgcuauaua

SEQ ID NO: 115947 - RNA, 19 nt, Artificial Sequence
  Description of Artificial Sequence: Synthetic oligonucleotide
  Antisense strand to SEQ ID NO: 115946
uauauagcggcggacauua

SEQ ID NO: 115948 - RNA, 19 nt, Artificial Sequence
  Description of Artificial Sequence: Synthetic oligonucleotide
  Sense strand starting at position 111 of SEQ ID NO: 1475
uaauaauguccgccgcuau

SEQ ID NO: 115949 - RNA, 19 nt, Artificial Sequence
  Description of Artificial Sequence: Synthetic oligonucleotide
  Antisense strand to SEQ ID NO: 115948
auagcggcggacauuauua

SEQ ID NO: 115950 - RNA, 19 nt, Artificial Sequence
  Description of Artificial Sequence: Synthetic oligonucleotide
  Sense strand starting at position 50 of SEQ ID NO: 1475
aguugaagaguuuggauuc

SEQ ID NO: 115951 - RNA, 19 nt, Artificial Sequence
  Description of Artificial Sequence: Synthetic oligonucleotide
  Antisense strand to SEQ ID NO: 115950
gaauccaaacucuucaacu

SEQ ID NO: 115952 - RNA, 19 nt, Artificial Sequence
  Description of Artificial Sequence: Synthetic oligonucleotide
  Sense strand starting at position 351 of SEQ ID NO: 1476
agugacauccucugacucu

SEQ ID NO: 115953 - RNA, 19 nt, Artificial Sequence
  Description of Artificial Sequence: Synthetic oligonucleotide
  Antisense strand to SEQ ID NO: 115952
agagucagaggaugucacu

SEQ ID NO: 115954 - RNA, 19 nt, Artificial Sequence
  Description of Artificial Sequence: Synthetic oligonucleotide
  Sense strand starting at position 502 of SEQ ID NO: 1476
aggucuuguagaugaauau

SEQ ID NO: 115955 - RNA, 19 nt, Artificial Sequence
  Description of Artificial Sequence: Synthetic oligonucleotide
  Antisense strand to SEQ ID NO: 115954
auauucaucuacaagaccu

SEQ ID NO: 115956 - RNA, 19 nt, Artificial Sequence
  Description of Artificial Sequence: Synthetic oligonucleotide
  Sense strand starting at position 503 of SEQ ID NO: 1476
ggucuuguagaugaauauu

SEQ ID NO: 115957 - RNA, 19 nt, Artificial Sequence
  Description of Artificial Sequence: Synthetic oligonucleotide
  Antisense strand to SEQ ID NO: 115956
aauauucaucuacaagacc

SEQ ID NO: 115958 - RNA, 19 nt, Artificial Sequence
  Description of Artificial Sequence: Synthetic oligonucleotide
  Sense strand starting at position 558 of SEQ ID NO: 1476
ggagauaauguaggucaac

SEQ ID NO: 115959 - RNA, 19 nt, Artificial Sequence
  Description of Artificial Sequence: Synthetic oligonucleotide
  Antisense strand to SEQ ID NO: 115958
guugaccuacauuaucucc

SEQ ID NO: 115960 - RNA, 19 nt, Artificial Sequence
  Description of Artificial Sequence: Synthetic oligonucleotide
  Sense strand starting at position 559 of SEQ ID NO: 1476
gagauaauguaggucaaca

SEQ ID NO: 115961 - RNA, 19 nt, Artificial Sequence
  Description of Artificial Sequence: Synthetic oligonucleotide
  Antisense strand to SEQ ID NO: 115960
uguugaccuacauuaucuc

SEQ ID NO: 115962 - RNA, 19 nt, Artificial Sequence
  Description of Artificial Sequence: Synthetic oligonucleotide
  Sense strand starting at position 672 of SEQ ID NO: 1476
gucuacuaagaguacuuaa

SEQ ID NO: 115963 - RNA, 19 nt, Artificial Sequence
  Description of Artificial Sequence: Synthetic oligonucleotide
  Antisense strand to SEQ ID NO: 115962
uuaaguacucuuaguagac

SEQ ID NO: 115964 - RNA, 19 nt, Artificial Sequence
  Description of Artificial Sequence: Synthetic oligonucleotide
  Sense strand starting at position 707 of SEQ ID NO: 1476
uguacauaagguuauguaa

SEQ ID NO: 115965 - RNA, 19 nt, Artificial Sequence
  Description of Artificial Sequence: Synthetic oligonucleotide
  Antisense strand to SEQ ID NO: 115964
uuacauaaccuuauguaca

SEQ ID NO: 115966 - RNA, 19 nt, Artificial Sequence
  Description of Artificial Sequence: Synthetic oligonucleotide
  Sense strand starting at position 710 of SEQ ID NO: 1476
acauaagguuauguaaaca

SEQ ID NO: 115967 - RNA, 19 nt, Artificial Sequence
  Description of Artificial Sequence: Synthetic oligonucleotide
  Antisense strand to SEQ ID NO: 115966
uguuuacauaaccuuaugu

SEQ ID NO: 115968 - RNA, 19 nt, Artificial Sequence
  Description of Artificial Sequence: Synthetic oligonucleotide
  Sense strand starting at position 738 of SEQ ID NO: 1476
cuuauuguagaaugugaaa

SEQ ID NO: 115969 - RNA, 19 nt, Artificial Sequence
  Description of Artificial Sequence: Synthetic oligonucleotide
  Antisense strand to SEQ ID NO: 115968
uuucacauucuacaauaag

SEQ ID NO: 115970 - RNA, 19 nt, Artificial Sequence
  Description of Artificial Sequence: Synthetic oligonucleotide
  Sense strand starting at position 764 of SEQ ID NO: 1476
guguguaaucaccauccac

SEQ ID NO: 115971 - RNA, 19 nt, Artificial Sequence
  Description of Artificial Sequence: Synthetic oligonucleotide
  Antisense strand to SEQ ID NO: 115970
guggauggugauuacacac

SEQ ID NO: 115972 - RNA, 19 nt, Artificial Sequence
  Description of Artificial Sequence: Synthetic oligonucleotide
  Sense strand starting at position 810 of SEQ ID NO: 1476
gauguuagaaagugucuag

SEQ ID NO: 115973 - RNA, 19 nt, Artificial Sequence
  Description of Artificial Sequence: Synthetic oligonucleotide
  Antisense strand to SEQ ID NO: 115972
cuagacacuuucuaacauc

SEQ ID NO: 115974 - RNA, 19 nt, Artificial Sequence
  Description of Artificial Sequence: Synthetic oligonucleotide
  Sense strand starting at position 850 of SEQ ID NO: 1476
guuugauggaggcaguuua

SEQ ID NO: 115975 - RNA, 19 nt, Artificial Sequence
  Description of Artificial Sequence: Synthetic oligonucleotide
  Antisense strand to SEQ ID NO: 115974
uaaacugccuccaucaaac

SEQ ID NO: 115976 - RNA, 19 nt, Artificial Sequence
  Description of Artificial Sequence: Synthetic oligonucleotide
  Sense strand starting at position 957 of SEQ ID NO: 1476
gguuuaaaggucugaaucu

SEQ ID NO: 115977 - RNA, 19 nt, Artificial Sequence
  Description of Artificial Sequence: Synthetic oligonucleotide
  Antisense strand to SEQ ID NO: 115976
agauucagaccuuuaaacc

SEQ ID NO: 115978 - RNA, 19 nt, Artificial Sequence
  Description of Artificial Sequence: Synthetic oligonucleotide
  Sense strand starting at position 1096 of SEQ ID NO: 1476
cuaacagcuucuuugaagu

SEQ ID NO: 115979 - RNA, 19 nt, Artificial Sequence
  Description of Artificial Sequence: Synthetic oligonucleotide
  Antisense strand to SEQ ID NO: 115978
acuucaaagaagcuguuag

SEQ ID NO: 115980 - RNA, 19 nt, Artificial Sequence
  Description of Artificial Sequence: Synthetic oligonucleotide
  Sense strand starting at position 1229 of SEQ ID NO: 1476
uggagaucauggucccgua

SEQ ID NO: 115981 - RNA, 19 nt, Artificial Sequence
  Description of Artificial Sequence: Synthetic oligonucleotide
  Antisense strand to SEQ ID NO: 115980
uacgggaccaugaucucca

SEQ ID NO: 115982 - RNA, 19 nt, Artificial Sequence
  Description of Artificial Sequence: Synthetic oligonucleotide
  Sense strand starting at position 1385 of SEQ ID NO: 1476
cggcaauugacaggaugaa

SEQ ID NO: 115983 - RNA, 19 nt, Artificial Sequence
  Description of Artificial Sequence: Synthetic oligonucleotide
  Antisense strand to SEQ ID NO: 115982
uucauccugucaauugccg

SEQ ID NO: 115984 - RNA, 19 nt, Artificial Sequence
  Description of Artificial Sequence: Synthetic oligonucleotide
  Sense strand starting at position 1407 of SEQ ID NO: 1476
ggucaccucggugauauaa

SEQ ID NO: 115985 - RNA, 19 nt, Artificial Sequence
  Description of Artificial Sequence: Synthetic oligonucleotide
  Antisense strand to SEQ ID NO: 115984
uuauaucaccgaggugacc

SEQ ID NO: 115986 - RNA, 19 nt, Artificial Sequence
  Description of Artificial Sequence: Synthetic oligonucleotide
  Sense strand starting at position 1455 of SEQ ID NO: 1476
cgggaggucgcagaagaaa

SEQ ID NO: 115987 - RNA, 19 nt, Artificial Sequence
  Description of Artificial Sequence: Synthetic oligonucleotide
  Antisense strand to SEQ ID NO: 115986
uuucuucugcgaccucccg

SEQ ID NO: 115988 - RNA, 19 nt, Artificial Sequence
  Description of Artificial Sequence: Synthetic oligonucleotide
  Sense strand starting at position 1463 of SEQ ID NO: 1476
cgcagaagaaaugguuaau

SEQ ID NO: 115989 - RNA, 19 nt, Artificial Sequence
  Description of Artificial Sequence: Synthetic oligonucleotide
  Antisense strand to SEQ ID NO: 115988
auuaaccauuucuucugcg

SEQ ID NO: 115990 - RNA, 19 nt, Artificial Sequence
  Description of Artificial Sequence: Synthetic oligonucleotide
  Sense strand starting at position 1469 of SEQ ID NO: 1476
agaaaugguuaaucugauu

SEQ ID NO: 115991 - RNA, 19 nt, Artificial Sequence
  Description of Artificial Sequence: Synthetic oligonucleotide
  Antisense strand to SEQ ID NO: 115990
aaucagauuaaccauuucu

SEQ ID NO: 115992 - RNA, 19 nt, Artificial Sequence
  Description of Artificial Sequence: Synthetic oligonucleotide
  Sense strand starting at position 1481 of SEQ ID NO: 1476
ucugauugcgcccacagaa

SEQ ID NO: 115993 - RNA, 19 nt, Artificial Sequence
  Description of Artificial Sequence: Synthetic oligonucleotide
  Antisense strand to SEQ ID NO: 115992
uucugugggcgcaaucaga

SEQ ID NO: 115994 - RNA, 19 nt, Artificial Sequence
  Description of Artificial Sequence: Synthetic oligonucleotide
  Sense strand starting at position 1952 of SEQ ID NO: 1476
auccuaacagcugaaaguu

SEQ ID NO: 115995 - RNA, 19 nt, Artificial Sequence
  Description of Artificial Sequence: Synthetic oligonucleotide
  Antisense strand to SEQ ID NO: 115994
aacuuucagcuguuaggau

SEQ ID NO: 115996 - RNA, 19 nt, Artificial Sequence
  Description of Artificial Sequence: Synthetic oligonucleotide
  Sense strand starting at position 2060 of SEQ ID NO: 1476
acuggugaugcuuggaacu

SEQ ID NO: 115997 - RNA, 19 nt, Artificial Sequence
  Description of Artificial Sequence: Synthetic oligonucleotide
  Antisense strand to SEQ ID NO: 115996
aguuccaagcaucaccagu

SEQ ID NO: 115998 - RNA, 19 nt, Artificial Sequence
  Description of Artificial Sequence: Synthetic oligonucleotide
  Sense strand starting at position 2099 of SEQ ID NO: 1476
aguuuagaucuguaugcac

SEQ ID NO: 115999 - RNA, 19 nt, Artificial Sequence
  Description of Artificial Sequence: Synthetic oligonucleotide
  Antisense strand to SEQ ID NO: 115998
gugcauacagaucuaaacu

SEQ ID NO: 116000 - RNA, 19 nt, Artificial Sequence
  Description of Artificial Sequence: Synthetic oligonucleotide
  Sense strand starting at position 2172 of SEQ ID NO: 1476
uugaaaucuuaagcugaau

SEQ ID NO: 116001 - RNA, 19 nt, Artificial Sequence
  Description of Artificial Sequence: Synthetic oligonucleotide
  Antisense strand to SEQ ID NO: 116000
auucagcuuaagauuucaa

SEQ ID NO: 116002 - RNA, 19 nt, Artificial Sequence
  Description of Artificial Sequence: Synthetic oligonucleotide
  Sense strand starting at position 2178 of SEQ ID NO: 1476
ucuuaagcugaaugugaau

SEQ ID NO: 116003 - RNA, 19 nt, Artificial Sequence
  Description of Artificial Sequence: Synthetic oligonucleotide
  Antisense strand to SEQ ID NO: 116002
auucacauucagcuuaaga

SEQ ID NO: 116004 - RNA, 19 nt, Artificial Sequence
  Description of Artificial Sequence: Synthetic oligonucleotide
  Sense strand starting at position 2208 of SEQ ID NO: 1476
uaaggagacucagcaaguu

SEQ ID NO: 116005 - RNA, 19 nt, Artificial Sequence
  Description of Artificial Sequence: Synthetic oligonucleotide
  Antisense strand to SEQ ID NO: 116004
aacuugcugagucuccuua

SEQ ID NO: 116006 - RNA, 19 nt, Artificial Sequence
  Description of Artificial Sequence: Synthetic oligonucleotide
  Sense strand starting at position 2231 of SEQ ID NO: 1476
ucaucuggguucucugaaa

SEQ ID NO: 116007 - RNA, 19 nt, Artificial Sequence
  Description of Artificial Sequence: Synthetic oligonucleotide
  Antisense strand to SEQ ID NO: 116006
uuucagagaacccagauga

SEQ ID NO: 116008 - RNA, 19 nt, Artificial Sequence
  Description of Artificial Sequence: Synthetic oligonucleotide
  Sense strand starting at position 2242 of SEQ ID NO: 1476
cucugaaaucuugaagucu

SEQ ID NO: 116009 - RNA, 19 nt, Artificial Sequence
  Description of Artificial Sequence: Synthetic oligonucleotide
  Antisense strand to SEQ ID NO: 116008
agacuucaagauuucagag

SEQ ID NO: 116010 - RNA, 19 nt, Artificial Sequence
  Description of Artificial Sequence: Synthetic oligonucleotide
  Sense strand starting at position 2280 of SEQ ID NO: 1476
aaaggacucuuauuaguag

SEQ ID NO: 116011 - RNA, 19 nt, Artificial Sequence
  Description of Artificial Sequence: Synthetic oligonucleotide
  Antisense strand to SEQ ID NO: 116010
cuacuaauaagaguccuuu

SEQ ID NO: 116012 - RNA, 19 nt, Artificial Sequence
  Description of Artificial Sequence: Synthetic oligonucleotide
  Sense strand starting at position 2283 of SEQ ID NO: 1476
ggacucuuauuaguagauc

SEQ ID NO: 116013 - RNA, 19 nt, Artificial Sequence
  Description of Artificial Sequence: Synthetic oligonucleotide
  Antisense strand to SEQ ID NO: 116012
gaucuacuaauaagagucc

SEQ ID NO: 116014 - RNA, 19 nt, Artificial Sequence
  Description of Artificial Sequence: Synthetic oligonucleotide
  Sense strand starting at position 2404 of SEQ ID NO: 1476
aguuguacacuguaaauau

SEQ ID NO: 116015 - RNA, 19 nt, Artificial Sequence
  Description of Artificial Sequence: Synthetic oligonucleotide
  Antisense strand to SEQ ID NO: 116014
auauuuacaguguacaacu

SEQ ID NO: 116016 - RNA, 19 nt, Artificial Sequence
  Description of Artificial Sequence: Synthetic oligonucleotide
  Sense strand starting at position 3052 of SEQ ID NO: 1476
ugccucauccgauaccaua

SEQ ID NO: 116017 - RNA, 19 nt, Artificial Sequence
  Description of Artificial Sequence: Synthetic oligonucleotide
  Antisense strand to SEQ ID NO: 116016
uaugguaucggaugaggca

SEQ ID NO: 116018 - RNA, 19 nt, Artificial Sequence
  Description of Artificial Sequence: Synthetic oligonucleotide
  Sense strand starting at position 3172 of SEQ ID NO: 1476
acaggagcuucugugaagu

SEQ ID NO: 116019 - RNA, 19 nt, Artificial Sequence
  Description of Artificial Sequence: Synthetic oligonucleotide
  Antisense strand to SEQ ID NO: 116018
acuucacagaagcuccugu

SEQ ID NO: 116020 - RNA, 19 nt, Artificial Sequence
  Description of Artificial Sequence: Synthetic oligonucleotide
  Sense strand starting at position 3449 of SEQ ID NO: 1476
ggcauaacugagcagcaau

SEQ ID NO: 116021 - RNA, 19 nt, Artificial Sequence
  Description of Artificial Sequence: Synthetic oligonucleotide
  Antisense strand to SEQ ID NO: 116020
auugcugcucaguuaugcc

SEQ ID NO: 116022 - RNA, 19 nt, Artificial Sequence
  Description of Artificial Sequence: Synthetic oligonucleotide
  Sense strand starting at position 3496 of SEQ ID NO: 1476
cgaaacagacucuguagaa

SEQ ID NO: 116023 - RNA, 19 nt, Artificial Sequence
  Description of Artificial Sequence: Synthetic oligonucleotide
  Antisense strand to SEQ ID NO: 116022
uucuacagagucuguuucg

SEQ ID NO: 116024 - RNA, 19 nt, Artificial Sequence
  Description of Artificial Sequence: Synthetic oligonucleotide
  Sense strand starting at position 3657 of SEQ ID NO: 1476
aucuacauucugcggagaa

SEQ ID NO: 116025 - RNA, 19 nt, Artificial Sequence
  Description of Artificial Sequence: Synthetic oligonucleotide
  Antisense strand to SEQ ID NO: 116024
uucuccgcagaauguagau

SEQ ID NO: 116026 - RNA, 19 nt, Artificial Sequence
  Description of Artificial Sequence: Synthetic oligonucleotide
  Sense strand starting at position 3659 of SEQ ID NO: 1476
cuacauucugcggagaauc

SEQ ID NO: 116027 - RNA, 19 nt, Artificial Sequence
  Description of Artificial Sequence: Synthetic oligonucleotide
  Antisense strand to SEQ ID NO: 116026
gauucuccgcagaauguag

SEQ ID NO: 116028 - RNA, 19 nt, Artificial Sequence
  Description of Artificial Sequence: Synthetic oligonucleotide
  Sense strand starting at position 3696 of SEQ ID NO: 1476
uuugucugauccucaagag

SEQ ID NO: 116029 - RNA, 19 nt, Artificial Sequence
  Description of Artificial Sequence: Synthetic oligonucleotide
  Antisense strand to SEQ ID NO: 116028
cucuugaggaucagacaaa

SEQ ID NO: 116030 - RNA, 19 nt, Artificial Sequence
  Description of Artificial Sequence: Synthetic oligonucleotide
  Sense strand starting at position 3934 of SEQ ID NO: 1476
cacguaugacuguaaccuu

SEQ ID NO: 116031 - RNA, 19 nt, Artificial Sequence
  Description of Artificial Sequence: Synthetic oligonucleotide
  Antisense strand to SEQ ID NO: 116030
aagguuacagucauacgug

SEQ ID NO: 116032 - RNA, 19 nt, Artificial Sequence
  Description of Artificial Sequence: Synthetic oligonucleotide
  Sense strand starting at position 181 of SEQ ID NO: 1477
ugagauguagcuuauacuu

SEQ ID NO: 116033 - RNA, 19 nt, Artificial Sequence
  Description of Artificial Sequence: Synthetic oligonucleotide
  Antisense strand to SEQ ID NO: 116032
aaguauaagcuacaucuca

SEQ ID NO: 116034 - RNA, 19 nt, Artificial Sequence
  Description of Artificial Sequence: Synthetic oligonucleotide
  Sense strand starting at position 271 of SEQ ID NO: 1477
uucuacuuggguuauggau

SEQ ID NO: 116035 - RNA, 19 nt, Artificial Sequence
  Description of Artificial Sequence: Synthetic oligonucleotide
  Antisense strand to SEQ ID NO: 116034
auccauaacccaaguagaa

SEQ ID NO: 116036 - RNA, 19 nt, Artificial Sequence
  Description of Artificial Sequence: Synthetic oligonucleotide
  Sense strand starting at position 286 of SEQ ID NO: 1477
ggaugagacgccuaguaau

SEQ ID NO: 116037 - RNA, 19 nt, Artificial Sequence
  Description of Artificial Sequence: Synthetic oligonucleotide
  Antisense strand to SEQ ID NO: 116036
auuacuaggcgucucaucc

SEQ ID NO: 116038 - RNA, 19 nt, Artificial Sequence
  Description of Artificial Sequence: Synthetic oligonucleotide
  Sense strand starting at position 605 of SEQ ID NO: 1477
guagauaccucauuaucac

SEQ ID NO: 116039 - RNA, 19 nt, Artificial Sequence
  Description of Artificial Sequence: Synthetic oligonucleotide
  Antisense strand to SEQ ID NO: 116038
gugauaaugagguaucuac

SEQ ID NO: 116040 - RNA, 19 nt, Artificial Sequence
  Description of Artificial Sequence: Synthetic oligonucleotide
  Sense strand starting at position 619 of SEQ ID NO: 1477
aucacaaugcuguaaguga

SEQ ID NO: 116041 - RNA, 19 nt, Artificial Sequence
  Description of Artificial Sequence: Synthetic oligonucleotide
  Antisense strand to SEQ ID NO: 116040
ucacuuacagcauugugau

SEQ ID NO: 116042 - RNA, 19 nt, Artificial Sequence
  Description of Artificial Sequence: Synthetic oligonucleotide
  Sense strand starting at position 771 of SEQ ID NO: 1477
augcacauauagguaaaua

SEQ ID NO: 116043 - RNA, 19 nt, Artificial Sequence
  Description of Artificial Sequence: Synthetic oligonucleotide
  Antisense strand to SEQ ID NO: 116042
uauuuaccuauaugugcau

SEQ ID NO: 116044 - RNA, 19 nt, Artificial Sequence
  Description of Artificial Sequence: Synthetic oligonucleotide
  Sense strand starting at position 1044 of SEQ ID NO: 1477
ggaguacagaagugauguu

SEQ ID NO: 116045 - RNA, 19 nt, Artificial Sequence
  Description of Artificial Sequence: Synthetic oligonucleotide
  Antisense strand to SEQ ID NO: 116044
aacaucacuucuguacucc

SEQ ID NO: 116046 - RNA, 19 nt, Artificial Sequence
  Description of Artificial Sequence: Synthetic oligonucleotide
  Sense strand starting at position 1228 of SEQ ID NO: 1477
cggauauagguguagauua

SEQ ID NO: 116047 - RNA, 19 nt, Artificial Sequence
  Description of Artificial Sequence: Synthetic oligonucleotide
  Antisense strand to SEQ ID NO: 116046
uaaucuacaccuauauccg

SEQ ID NO: 116048 - RNA, 19 nt, Artificial Sequence
  Description of Artificial Sequence: Synthetic oligonucleotide
  Sense strand starting at position 1260 of SEQ ID NO: 1477
aagggucaccacugugaga

SEQ ID NO: 116049 - RNA, 19 nt, Artificial Sequence
  Description of Artificial Sequence: Synthetic oligonucleotide
  Antisense strand to SEQ ID NO: 116048
ucucacaguggugacccuu

SEQ ID NO: 116050 - RNA, 19 nt, Artificial Sequence
  Description of Artificial Sequence: Synthetic oligonucleotide
  Sense strand starting at position 1393 of SEQ ID NO: 1477
aggguaauaucagcaacau

SEQ ID NO: 116051 - RNA, 19 nt, Artificial Sequence
  Description of Artificial Sequence: Synthetic oligonucleotide
  Antisense strand to SEQ ID NO: 116050
auguugcugauauuacccu

SEQ ID NO: 116052 - RNA, 19 nt, Artificial Sequence
  Description of Artificial Sequence: Synthetic oligonucleotide
  Sense strand starting at position 1427 of SEQ ID NO: 1477
ugauucuuacagggcuaca

SEQ ID NO: 116053 - RNA, 19 nt, Artificial Sequence
  Description of Artificial Sequence: Synthetic oligonucleotide
  Antisense strand to SEQ ID NO: 116052
uguagcccuguaagaauca

SEQ ID NO: 116054 - RNA, 19 nt, Artificial Sequence
  Description of Artificial Sequence: Synthetic oligonucleotide
  Sense strand starting at position 1492 of SEQ ID NO: 1477
guguuuggcccacagaaag

SEQ ID NO: 116055 - RNA, 19 nt, Artificial Sequence
  Description of Artificial Sequence: Synthetic oligonucleotide
  Antisense strand to SEQ ID NO: 116054
cuuucugugggccaaacac

SEQ ID NO: 116056 - RNA, 19 nt, Artificial Sequence
  Description of Artificial Sequence: Synthetic oligonucleotide
  Sense strand starting at position 1539 of SEQ ID NO: 1477
ccaggaauuggugacugca

SEQ ID NO: 116057 - RNA, 19 nt, Artificial Sequence
  Description of Artificial Sequence: Synthetic oligonucleotide
  Antisense strand to SEQ ID NO: 116056
ugcagucaccaauuccugg

SEQ ID NO: 116058 - RNA, 19 nt, Artificial Sequence
  Description of Artificial Sequence: Synthetic oligonucleotide
  Sense strand starting at position 1541 of SEQ ID NO: 1477
aggaauuggugacugcaau

SEQ ID NO: 116059 - RNA, 19 nt, Artificial Sequence
  Description of Artificial Sequence: Synthetic oligonucleotide
  Antisense strand to SEQ ID NO: 116058
auugcagucaccaauuccu

SEQ ID NO: 116060 - RNA, 19 nt, Artificial Sequence
  Description of Artificial Sequence: Synthetic oligonucleotide
  Sense strand starting at position 1542 of SEQ ID NO: 1477
ggaauuggugacugcaaua

SEQ ID NO: 116061 - RNA, 19 nt, Artificial Sequence
  Description of Artificial Sequence: Synthetic oligonucleotide
  Antisense strand to SEQ ID NO: 116060
uauugcagucaccaauucc

SEQ ID NO: 116062 - RNA, 19 nt, Artificial Sequence
  Description of Artificial Sequence: Synthetic oligonucleotide
  Sense strand starting at position 1791 of SEQ ID NO: 1477
gcagaugauguccacaaca

SEQ ID NO: 116063 - RNA, 19 nt, Artificial Sequence
  Description of Artificial Sequence: Synthetic oligonucleotide
  Antisense strand to SEQ ID NO: 116062
uguuguggacaucaucugc

SEQ ID NO: 116064 - RNA, 19 nt, Artificial Sequence
  Description of Artificial Sequence: Synthetic oligonucleotide
  Sense strand starting at position 1926 of SEQ ID NO: 1477
gaagauaauucccuggagu

SEQ ID NO: 116065 - RNA, 19 nt, Artificial Sequence
  Description of Artificial Sequence: Synthetic oligonucleotide
  Antisense strand to SEQ ID NO: 116064
acuccagggaauuaucuuc

SEQ ID NO: 116066 - RNA, 19 nt, Artificial Sequence
  Description of Artificial Sequence: Synthetic oligonucleotide
  Sense strand starting at position 1927 of SEQ ID NO: 1477
aagauaauucccuggaguu

SEQ ID NO: 116067 - RNA, 19 nt, Artificial Sequence
  Description of Artificial Sequence: Synthetic oligonucleotide
  Antisense strand to SEQ ID NO: 116066
aacuccagggaauuaucuu

SEQ ID NO: 116068 - RNA, 19 nt, Artificial Sequence
  Description of Artificial Sequence: Synthetic oligonucleotide
  Sense strand starting at position 1928 of SEQ ID NO: 1477
agauaauucccuggaguuc

SEQ ID NO: 116069 - RNA, 19 nt, Artificial Sequence
  Description of Artificial Sequence: Synthetic oligonucleotide
  Antisense strand to SEQ ID NO: 116068
gaacuccagggaauuaucu

SEQ ID NO: 116070 - RNA, 19 nt, Artificial Sequence
  Description of Artificial Sequence: Synthetic oligonucleotide
  Sense strand starting at position 1953 of SEQ ID NO: 1477
uuuggugaggcccagaaua

SEQ ID NO: 116071 - RNA, 19 nt, Artificial Sequence
  Description of Artificial Sequence: Synthetic oligonucleotide
  Antisense strand to SEQ ID NO: 116070
uauucugggccucaccaaa

SEQ ID NO: 116072 - RNA, 19 nt, Artificial Sequence
  Description of Artificial Sequence: Synthetic oligonucleotide
  Sense strand starting at position 2000 of SEQ ID NO: 1477
uccugcuugggugauugaa

SEQ ID NO: 116073 - RNA, 19 nt, Artificial Sequence
  Description of Artificial Sequence: Synthetic oligonucleotide
  Antisense strand to SEQ ID NO: 116072
uucaaucacccaagcagga

SEQ ID NO: 116074 - RNA, 19 nt, Artificial Sequence
  Description of Artificial Sequence: Synthetic oligonucleotide
  Sense strand starting at position 2021 of SEQ ID NO: 1477
gcaguaauugcacagaaua

SEQ ID NO: 116075 - RNA, 19 nt, Artificial Sequence
  Description of Artificial Sequence: Synthetic oligonucleotide
  Antisense strand to SEQ ID NO: 116074
uauucugugcaauuacugc

SEQ ID NO: 116076 - RNA, 19 nt, Artificial Sequence
  Description of Artificial Sequence: Synthetic oligonucleotide
  Sense strand starting at position 2094 of SEQ ID NO: 1477
uguguacuuagggacuuaa

SEQ ID NO: 116077 - RNA, 19 nt, Artificial Sequence
  Description of Artificial Sequence: Synthetic oligonucleotide
  Antisense strand to SEQ ID NO: 116076
uuaagucccuaaguacaca

SEQ ID NO: 116078 - RNA, 19 nt, Artificial Sequence
  Description of Artificial Sequence: Synthetic oligonucleotide
  Sense strand starting at position 2104 of SEQ ID NO: 1477
gggacuuaauucuugauug

SEQ ID NO: 116079 - RNA, 19 nt, Artificial Sequence
  Description of Artificial Sequence: Synthetic oligonucleotide
  Antisense strand to SEQ ID NO: 116078
caaucaagaauuaaguccc

SEQ ID NO: 116080 - RNA, 19 nt, Artificial Sequence
  Description of Artificial Sequence: Synthetic oligonucleotide
  Sense strand starting at position 2108 of SEQ ID NO: 1477
cuuaauucuugauuggaca

SEQ ID NO: 116081 - RNA, 19 nt, Artificial Sequence
  Description of Artificial Sequence: Synthetic oligonucleotide
  Antisense strand to SEQ ID NO: 116080
uguccaaucaagaauuaag

SEQ ID NO: 116082 - RNA, 19 nt, Artificial Sequence
  Description of Artificial Sequence: Synthetic oligonucleotide
  Sense strand starting at position 2126 of SEQ ID NO: 1477
acaacuuugcagcaggaau

SEQ ID NO: 116083 - RNA, 19 nt, Artificial Sequence
  Description of Artificial Sequence: Synthetic oligonucleotide
  Antisense strand to SEQ ID NO: 116082
auuccugcugcaaaguugu

SEQ ID NO: 116084 - RNA, 19 nt, Artificial Sequence
  Description of Artificial Sequence: Synthetic oligonucleotide
  Sense strand starting at position 2153 of SEQ ID NO: 1477
gauggaguucuguauucca

SEQ ID NO: 116085 - RNA, 19 nt, Artificial Sequence
  Description of Artificial Sequence: Synthetic oligonucleotide
  Antisense strand to SEQ ID NO: 116084
uggaauacagaacuccauc

SEQ ID NO: 116086 - RNA, 19 nt, Artificial Sequence
  Description of Artificial Sequence: Synthetic oligonucleotide
  Sense strand starting at position 2242 of SEQ ID NO: 1477
aagccagugguugagaaga

SEQ ID NO: 116087 - RNA, 19 nt, Artificial Sequence
  Description of Artificial Sequence: Synthetic oligonucleotide
  Antisense strand to SEQ ID NO: 116086
ucuucucaaccacuggcuu

SEQ ID NO: 116088 - RNA, 19 nt, Artificial Sequence
  Description of Artificial Sequence: Synthetic oligonucleotide
  Sense strand starting at position 2441 of SEQ ID NO: 1477
gguacauuuagguguccuu

SEQ ID NO: 116089 - RNA, 19 nt, Artificial Sequence
  Description of Artificial Sequence: Synthetic oligonucleotide
  Antisense strand to SEQ ID NO: 116088
aaggacaccuaaauguacc

SEQ ID NO: 116090 - RNA, 19 nt, Artificial Sequence
  Description of Artificial Sequence: Synthetic oligonucleotide
  Sense strand starting at position 2454 of SEQ ID NO: 1477
guccuugagauauacacga

SEQ ID NO: 116091 - RNA, 19 nt, Artificial Sequence
  Description of Artificial Sequence: Synthetic oligonucleotide
  Antisense strand to SEQ ID NO: 116090
ucguguauaucucaaggac

SEQ ID NO: 116092 - RNA, 19 nt, Artificial Sequence
  Description of Artificial Sequence: Synthetic oligonucleotide
  Sense strand starting at position 2458 of SEQ ID NO: 1477
uugagauauacacgagcaa

SEQ ID NO: 116093 - RNA, 19 nt, Artificial Sequence
  Description of Artificial Sequence: Synthetic oligonucleotide
  Antisense strand to SEQ ID NO: 116092
uugcucguguauaucucaa

SEQ ID NO: 116094 - RNA, 19 nt, Artificial Sequence
  Description of Artificial Sequence: Synthetic oligonucleotide
  Sense strand starting at position 2496 of SEQ ID NO: 1477
agcugacagggcuaauuau

SEQ ID NO: 116095 - RNA, 19 nt, Artificial Sequence
  Description of Artificial Sequence: Synthetic oligonucleotide
  Antisense strand to SEQ ID NO: 116094
auaauuagcccugucagcu

SEQ ID NO: 116096 - RNA, 19 nt, Artificial Sequence
  Description of Artificial Sequence: Synthetic oligonucleotide
  Sense strand starting at position 2707 of SEQ ID NO: 1477
auggcaagauaauuggauu

SEQ ID NO: 116097 - RNA, 19 nt, Artificial Sequence
  Description of Artificial Sequence: Synthetic oligonucleotide
  Antisense strand to SEQ ID NO: 116096
aauccaauuaucuugccau

SEQ ID NO: 116098 - RNA, 19 nt, Artificial Sequence
  Description of Artificial Sequence: Synthetic oligonucleotide
  Sense strand starting at position 2710 of SEQ ID NO: 1477
gcaagauaauuggauuuaa

SEQ ID NO: 116099 - RNA, 19 nt, Artificial Sequence
  Description of Artificial Sequence: Synthetic oligonucleotide
  Antisense strand to SEQ ID NO: 116098
uuaaauccaauuaucuugc

SEQ ID NO: 116100 - RNA, 19 nt, Artificial Sequence
  Description of Artificial Sequence: Synthetic oligonucleotide
  Sense strand starting at position 2789 of SEQ ID NO: 1477
ucuguaagauuuggauuua

SEQ ID NO: 116101 - RNA, 19 nt, Artificial Sequence
  Description of Artificial Sequence: Synthetic oligonucleotide
  Antisense strand to SEQ ID NO: 116100
uaaauccaaaucuuacaga

SEQ ID NO: 116102 - RNA, 19 nt, Artificial Sequence
  Description of Artificial Sequence: Synthetic oligonucleotide
  Sense strand starting at position 3602 of SEQ ID NO: 1477
uuagguccucugcagagau

SEQ ID NO: 116103 - RNA, 19 nt, Artificial Sequence
  Description of Artificial Sequence: Synthetic oligonucleotide
  Antisense strand to SEQ ID NO: 116102
aucucugcagaggaccuaa

SEQ ID NO: 116104 - RNA, 19 nt, Artificial Sequence
  Description of Artificial Sequence: Synthetic oligonucleotide
  Sense strand starting at position 3604 of SEQ ID NO: 1477
agguccucugcagagauga

SEQ ID NO: 116105 - RNA, 19 nt, Artificial Sequence
  Description of Artificial Sequence: Synthetic oligonucleotide
  Antisense strand to SEQ ID NO: 116104
ucaucucugcagaggaccu

SEQ ID NO: 116106 - RNA, 19 nt, Artificial Sequence
  Description of Artificial Sequence: Synthetic oligonucleotide
  Sense strand starting at position 3606 of SEQ ID NO: 1477
guccucugcagagaugaua

SEQ ID NO: 116107 - RNA, 19 nt, Artificial Sequence
  Description of Artificial Sequence: Synthetic oligonucleotide
  Antisense strand to SEQ ID NO: 116106
uaucaucucugcagaggac

SEQ ID NO: 116108 - RNA, 19 nt, Artificial Sequence
  Description of Artificial Sequence: Synthetic oligonucleotide
  Sense strand starting at position 3686 of SEQ ID NO: 1477
caaacaaugcaugggagua

SEQ ID NO: 116109 - RNA, 19 nt, Artificial Sequence
  Description of Artificial Sequence: Synthetic oligonucleotide
  Antisense strand to SEQ ID NO: 116108
uacucccaugcauuguuug

SEQ ID NO: 116110 - RNA, 19 nt, Artificial Sequence
  Description of Artificial Sequence: Synthetic oligonucleotide
  Sense strand starting at position 3732 of SEQ ID NO: 1477
ucauaagugccaggauuaa

SEQ ID NO: 116111 - RNA, 19 nt, Artificial Sequence
  Description of Artificial Sequence: Synthetic oligonucleotide
  Antisense strand to SEQ ID NO: 116110
uuaauccuggcacuuauga

SEQ ID NO: 116112 - RNA, 19 nt, Artificial Sequence
  Description of Artificial Sequence: Synthetic oligonucleotide
  Sense strand starting at position 4 of SEQ ID NO: 1478
acuggaaauuuguaguaca

SEQ ID NO: 116113 - RNA, 19 nt, Artificial Sequence
  Description of Artificial Sequence: Synthetic oligonucleotide
  Antisense strand to SEQ ID NO: 116112
uguacuacaaauuuccagu

SEQ ID NO: 116114 - RNA, 19 nt, Artificial Sequence
  Description of Artificial Sequence: Synthetic oligonucleotide
  Sense strand starting at position 7 of SEQ ID NO: 1478
ggaaauuuguaguacagau

SEQ ID NO: 116115 - RNA, 19 nt, Artificial Sequence
  Description of Artificial Sequence: Synthetic oligonucleotide
  Antisense strand to SEQ ID NO: 116114
aucuguacuacaaauuucc

SEQ ID NO: 116116 - RNA, 19 nt, Artificial Sequence
  Description of Artificial Sequence: Synthetic oligonucleotide
  Sense strand starting at position 112 of SEQ ID NO: 1478
aagaaagauugagcaaugu

SEQ ID NO: 116117 - RNA, 19 nt, Artificial Sequence
  Description of Artificial Sequence: Synthetic oligonucleotide
  Antisense strand to SEQ ID NO: 116116
acauugcucaaucuuucuu

SEQ ID NO: 116118 - RNA, 19 nt, Artificial Sequence
  Description of Artificial Sequence: Synthetic oligonucleotide
  Sense strand starting at position 116 of SEQ ID NO: 1478
aagauugagcaauguauga

SEQ ID NO: 116119 - RNA, 19 nt, Artificial Sequence
  Description of Artificial Sequence: Synthetic oligonucleotide
  Antisense strand to SEQ ID NO: 116118
ucauacauugcucaaucuu

SEQ ID NO: 116120 - RNA, 19 nt, Artificial Sequence
  Description of Artificial Sequence: Synthetic oligonucleotide
  Sense strand starting at position 453 of SEQ ID NO: 1478
uuauuucuuugagugcuga

SEQ ID NO: 116121 - RNA, 19 nt, Artificial Sequence
  Description of Artificial Sequence: Synthetic oligonucleotide
  Antisense strand to SEQ ID NO: 116120
ucagcacucaaagaaauaa

SEQ ID NO: 116122 - RNA, 19 nt, Artificial Sequence
  Description of Artificial Sequence: Synthetic oligonucleotide
  Sense strand starting at position 454 of SEQ ID NO: 1478
uauuucuuugagugcugau

SEQ ID NO: 116123 - RNA, 19 nt, Artificial Sequence
  Description of Artificial Sequence: Synthetic oligonucleotide
  Antisense strand to SEQ ID NO: 116122
aucagcacucaaagaaaua

SEQ ID NO: 116124 - RNA, 19 nt, Artificial Sequence
  Description of Artificial Sequence: Synthetic oligonucleotide
  Sense strand starting at position 605 of SEQ ID NO: 1478
uuauucuucucagugacau

SEQ ID NO: 116125 - RNA, 19 nt, Artificial Sequence
  Description of Artificial Sequence: Synthetic oligonucleotide
  Antisense strand to SEQ ID NO: 116124
augucacugagaagaauaa

SEQ ID NO: 116126 - RNA, 19 nt, Artificial Sequence
  Description of Artificial Sequence: Synthetic oligonucleotide
  Sense strand starting at position 656 of SEQ ID NO: 1478
uggauaauuugucaaagaa

SEQ ID NO: 116127 - RNA, 19 nt, Artificial Sequence
  Description of Artificial Sequence: Synthetic oligonucleotide
  Antisense strand to SEQ ID NO: 116126
uucuuugacaaauuaucca

SEQ ID NO: 116128 - RNA, 19 nt, Artificial Sequence
  Description of Artificial Sequence: Synthetic oligonucleotide
  Sense strand starting at position 695 of SEQ ID NO: 1478
cagauugauuaggucauaa

SEQ ID NO: 116129 - RNA, 19 nt, Artificial Sequence
  Description of Artificial Sequence: Synthetic oligonucleotide
  Antisense strand to SEQ ID NO: 116128
uuaugaccuaaucaaucug

SEQ ID NO: 116130 - RNA, 19 nt, Artificial Sequence
  Description of Artificial Sequence: Synthetic oligonucleotide
  Sense strand starting at position 772 of SEQ ID NO: 1478
gugagauaguaaguucuaa

SEQ ID NO: 116131 - RNA, 19 nt, Artificial Sequence
  Description of Artificial Sequence: Synthetic oligonucleotide
  Antisense strand to SEQ ID NO: 116130
uuagaacuuacuaucucac

SEQ ID NO: 116132 - RNA, 19 nt, Artificial Sequence
  Description of Artificial Sequence: Synthetic oligonucleotide
  Sense strand starting at position 918 of SEQ ID NO: 1478
guaauuaauugcccaagga

SEQ ID NO: 116133 - RNA, 19 nt, Artificial Sequence
  Description of Artificial Sequence: Synthetic oligonucleotide
  Antisense strand to SEQ ID NO: 116132
uccuugggcaauuaauuac

SEQ ID NO: 116134 - RNA, 19 nt, Artificial Sequence
  Description of Artificial Sequence: Synthetic oligonucleotide
  Sense strand starting at position 1009 of SEQ ID NO: 1478
aagaauuaauguguguaca

SEQ ID NO: 116135 - RNA, 19 nt, Artificial Sequence
  Description of Artificial Sequence: Synthetic oligonucleotide
  Antisense strand to SEQ ID NO: 116134
uguacacacauuaauucuu

SEQ ID NO: 116136 - RNA, 19 nt, Artificial Sequence
  Description of Artificial Sequence: Synthetic oligonucleotide
  Sense strand starting at position 1010 of SEQ ID NO: 1478
agaauuaauguguguacau

SEQ ID NO: 116137 - RNA, 19 nt, Artificial Sequence
  Description of Artificial Sequence: Synthetic oligonucleotide
  Antisense strand to SEQ ID NO: 116136
auguacacacauuaauucu

SEQ ID NO: 116138 - RNA, 19 nt, Artificial Sequence
  Description of Artificial Sequence: Synthetic oligonucleotide
  Sense strand starting at position 1011 of SEQ ID NO: 1478
gaauuaauguguguacauu

SEQ ID NO: 116139 - RNA, 19 nt, Artificial Sequence
  Description of Artificial Sequence: Synthetic oligonucleotide
  Antisense strand to SEQ ID NO: 116138
aauguacacacauuaauuc

SEQ ID NO: 116140 - RNA, 19 nt, Artificial Sequence
  Description of Artificial Sequence: Synthetic oligonucleotide
  Sense strand starting at position 1035 of SEQ ID NO: 1478
ugguaucuauuauugaaag

SEQ ID NO: 116141 - RNA, 19 nt, Artificial Sequence
  Description of Artificial Sequence: Synthetic oligonucleotide
  Antisense strand to SEQ ID NO: 116140
cuuucaauaauagauacca

SEQ ID NO: 116142 - RNA, 19 nt, Artificial Sequence
  Description of Artificial Sequence: Synthetic oligonucleotide
  Sense strand starting at position 1307 of SEQ ID NO: 1478
ggccuucuguggaagggau

SEQ ID NO: 116143 - RNA, 19 nt, Artificial Sequence
  Description of Artificial Sequence: Synthetic oligonucleotide
  Antisense strand to SEQ ID NO: 116142
aucccuuccacagaaggcc

SEQ ID NO: 116144 - RNA, 19 nt, Artificial Sequence
  Description of Artificial Sequence: Synthetic oligonucleotide
  Sense strand starting at position 1322 of SEQ ID NO: 1478
ggaucuucuugacuguaga

SEQ ID NO: 116145 - RNA, 19 nt, Artificial Sequence
  Description of Artificial Sequence: Synthetic oligonucleotide
  Antisense strand to SEQ ID NO: 116144
ucuacagucaagaagaucc

SEQ ID NO: 116146 - RNA, 19 nt, Artificial Sequence
  Description of Artificial Sequence: Synthetic oligonucleotide
  Sense strand starting at position 1346 of SEQ ID NO: 1478
cguggacauagguaaugau

SEQ ID NO: 116147 - RNA, 19 nt, Artificial Sequence
  Description of Artificial Sequence: Synthetic oligonucleotide
  Antisense strand to SEQ ID NO: 116146
aucauuaccuauguccacg

SEQ ID NO: 116148 - RNA, 19 nt, Artificial Sequence
  Description of Artificial Sequence: Synthetic oligonucleotide
  Sense strand starting at position 1400 of SEQ ID NO: 1478
uaauaaggaugagugcaau

SEQ ID NO: 116149 - RNA, 19 nt, Artificial Sequence
  Description of Artificial Sequence: Synthetic oligonucleotide
  Antisense strand to SEQ ID NO: 116148
auugcacucauccuuauua

SEQ ID NO: 116150 - RNA, 19 nt, Artificial Sequence
  Description of Artificial Sequence: Synthetic oligonucleotide
  Sense strand starting at position 1590 of SEQ ID NO: 1478
gcuccuguccaugaugaca

SEQ ID NO: 116151 - RNA, 19 nt, Artificial Sequence
  Description of Artificial Sequence: Synthetic oligonucleotide
  Antisense strand to SEQ ID NO: 116150
ugucaucauggacaggagc

SEQ ID NO: 116152 - RNA, 19 nt, Artificial Sequence
  Description of Artificial Sequence: Synthetic oligonucleotide
  Sense strand starting at position 1619 of SEQ ID NO: 1478
gagggugacauauagcagu

SEQ ID NO: 116153 - RNA, 19 nt, Artificial Sequence
  Description of Artificial Sequence: Synthetic oligonucleotide
  Antisense strand to SEQ ID NO: 116152
acugcuauaugucacccuc

SEQ ID NO: 116154 - RNA, 19 nt, Artificial Sequence
  Description of Artificial Sequence: Synthetic oligonucleotide
  Sense strand starting at position 1634 of SEQ ID NO: 1478
caguauagcggucaaagga

SEQ ID NO: 116155 - RNA, 19 nt, Artificial Sequence
  Description of Artificial Sequence: Synthetic oligonucleotide
  Antisense strand to SEQ ID NO: 116154
uccuuugaccgcuauacug

SEQ ID NO: 116156 - RNA, 19 nt, Artificial Sequence
  Description of Artificial Sequence: Synthetic oligonucleotide
  Sense strand starting at position 1734 of SEQ ID NO: 1478
ggaguuguuguguaucaaa

SEQ ID NO: 116157 - RNA, 19 nt, Artificial Sequence
  Description of Artificial Sequence: Synthetic oligonucleotide
  Antisense strand to SEQ ID NO: 116156
uuugauacacaacaacucc

SEQ ID NO: 116158 - RNA, 19 nt, Artificial Sequence
  Description of Artificial Sequence: Synthetic oligonucleotide
  Sense strand starting at position 1745 of SEQ ID NO: 1478
guaucaaagaauuggcgau

SEQ ID NO: 116159 - RNA, 19 nt, Artificial Sequence
  Description of Artificial Sequence: Synthetic oligonucleotide
  Antisense strand to SEQ ID NO: 116158
aucgccaauucuuugauac

SEQ ID NO: 116160 - RNA, 19 nt, Artificial Sequence
  Description of Artificial Sequence: Synthetic oligonucleotide
  Sense strand starting at position 1770 of SEQ ID NO: 1478
gggagccgugacugaaaua

SEQ ID NO: 116161 - RNA, 19 nt, Artificial Sequence
  Description of Artificial Sequence: Synthetic oligonucleotide
  Antisense strand to SEQ ID NO: 116160
uauuucagucacggcuccc

SEQ ID NO: 116162 - RNA, 19 nt, Artificial Sequence
  Description of Artificial Sequence: Synthetic oligonucleotide
  Sense strand starting at position 1771 of SEQ ID NO: 1478
ggagccgugacugaaauaa

SEQ ID NO: 116163 - RNA, 19 nt, Artificial Sequence
  Description of Artificial Sequence: Synthetic oligonucleotide
  Antisense strand to SEQ ID NO: 116162
uuauuucagucacggcucc

SEQ ID NO: 116164 - RNA, 19 nt, Artificial Sequence
  Description of Artificial Sequence: Synthetic oligonucleotide
  Sense strand starting at position 2005 of SEQ ID NO: 1478
gcaggaguaaucugcagga

SEQ ID NO: 116165 - RNA, 19 nt, Artificial Sequence
  Description of Artificial Sequence: Synthetic oligonucleotide
  Antisense strand to SEQ ID NO: 116164
uccugcagauuacuccugc

SEQ ID NO: 116166 - RNA, 19 nt, Artificial Sequence
  Description of Artificial Sequence: Synthetic oligonucleotide
  Sense strand starting at position 2129 of SEQ ID NO: 1478
augguaauuccaugccaau

SEQ ID NO: 116167 - RNA, 19 nt, Artificial Sequence
  Description of Artificial Sequence: Synthetic oligonucleotide
  Antisense strand to SEQ ID NO: 116166
auuggcauggaauuaccau

SEQ ID NO: 116168 - RNA, 19 nt, Artificial Sequence
  Description of Artificial Sequence: Synthetic oligonucleotide
  Sense strand starting at position 2185 of SEQ ID NO: 1478
ugcauugaucaccaagcau

SEQ ID NO: 116169 - RNA, 19 nt, Artificial Sequence
  Description of Artificial Sequence: Synthetic oligonucleotide
  Antisense strand to SEQ ID NO: 116168
augcuuggugaucaaugca

SEQ ID NO: 116170 - RNA, 19 nt, Artificial Sequence
  Description of Artificial Sequence: Synthetic oligonucleotide
  Sense strand starting at position 3156 of SEQ ID NO: 1478
caaguuguacaacgacaau

SEQ ID NO: 116171 - RNA, 19 nt, Artificial Sequence
  Description of Artificial Sequence: Synthetic oligonucleotide
  Antisense strand to SEQ ID NO: 116170
auugucguuguacaacuug

SEQ ID NO: 116172 - RNA, 19 nt, Artificial Sequence
  Description of Artificial Sequence: Synthetic oligonucleotide
  Sense strand starting at position 3274 of SEQ ID NO: 1478
ggagaaggaucgccacaua

SEQ ID NO: 116173 - RNA, 19 nt, Artificial Sequence
  Description of Artificial Sequence: Synthetic oligonucleotide
  Antisense strand to SEQ ID NO: 116172
uauguggcgauccuucucc

SEQ ID NO: 116174 - RNA, 19 nt, Artificial Sequence
  Description of Artificial Sequence: Synthetic oligonucleotide
  Sense strand starting at position 3277 of SEQ ID NO: 1478
gaaggaucgccacauaauu

SEQ ID NO: 116175 - RNA, 19 nt, Artificial Sequence
  Description of Artificial Sequence: Synthetic oligonucleotide
  Antisense strand to SEQ ID NO: 116174
aauuauguggcgauccuuc

SEQ ID NO: 116176 - RNA, 19 nt, Artificial Sequence
  Description of Artificial Sequence: Synthetic oligonucleotide
  Sense strand starting at position 3310 of SEQ ID NO: 1478
auggucuuacucugaugga

SEQ ID NO: 116177 - RNA, 19 nt, Artificial Sequence
  Description of Artificial Sequence: Synthetic oligonucleotide
  Antisense strand to SEQ ID NO: 116176
uccaucagaguaagaccau

SEQ ID NO: 116178 - RNA, 19 nt, Artificial Sequence
  Description of Artificial Sequence: Synthetic oligonucleotide
  Sense strand starting at position 3496 of SEQ ID NO: 1478
cucucucaggagugauaga

SEQ ID NO: 116179 - RNA, 19 nt, Artificial Sequence
  Description of Artificial Sequence: Synthetic oligonucleotide
  Antisense strand to SEQ ID NO: 116178
ucuaucacuccugagagag

SEQ ID NO: 116180 - RNA, 19 nt, Artificial Sequence
  Description of Artificial Sequence: Synthetic oligonucleotide
  Sense strand starting at position 3544 of SEQ ID NO: 1478
ugcugaauuuaggagagaa

SEQ ID NO: 116181 - RNA, 19 nt, Artificial Sequence
  Description of Artificial Sequence: Synthetic oligonucleotide
  Antisense strand to SEQ ID NO: 116180
uucucuccuaaauucagca

SEQ ID NO: 116182 - RNA, 19 nt, Artificial Sequence
  Description of Artificial Sequence: Synthetic oligonucleotide
  Sense strand starting at position 3810 of SEQ ID NO: 1478
gacagauguccauacgugu

SEQ ID NO: 116183 - RNA, 19 nt, Artificial Sequence
  Description of Artificial Sequence: Synthetic oligonucleotide
  Antisense strand to SEQ ID NO: 116182
acacguauggacaucuguc

SEQ ID NO: 116184 - RNA, 19 nt, Artificial Sequence
  Description of Artificial Sequence: Synthetic oligonucleotide
  Sense strand starting at position 3816 of SEQ ID NO: 1478
uguccauacgugucucuuu

SEQ ID NO: 116185 - RNA, 19 nt, Artificial Sequence
  Description of Artificial Sequence: Synthetic oligonucleotide
  Antisense strand to SEQ ID NO: 116184
aaagagacacguauggaca

SEQ ID NO: 116186 - RNA, 19 nt, Artificial Sequence
  Description of Artificial Sequence: Synthetic oligonucleotide
  Sense strand starting at position 3874 of SEQ ID NO: 1478
acucaaagacagugguauu

SEQ ID NO: 116187 - RNA, 19 nt, Artificial Sequence
  Description of Artificial Sequence: Synthetic oligonucleotide
  Antisense strand to SEQ ID NO: 116186
aauaccacugucuuugagu

SEQ ID NO: 116188 - RNA, 19 nt, Artificial Sequence
  Description of Artificial Sequence: Synthetic oligonucleotide
  Sense strand starting at position 3892 of SEQ ID NO: 1478
ugaugauucugucugacug

SEQ ID NO: 116189 - RNA, 19 nt, Artificial Sequence
  Description of Artificial Sequence: Synthetic oligonucleotide
  Antisense strand to SEQ ID NO: 116188
cagucagacagaaucauca

SEQ ID NO: 116190 - RNA, 19 nt, Artificial Sequence
  Description of Artificial Sequence: Synthetic oligonucleotide
  Sense strand starting at position 3893 of SEQ ID NO: 1478
gaugauucugucugacuga

SEQ ID NO: 116191 - RNA, 19 nt, Artificial Sequence
  Description of Artificial Sequence: Synthetic oligonucleotide
  Antisense strand to SEQ ID NO: 116190
ucagucagacagaaucauc

SEQ ID NO: 116192 - RNA, 19 nt, Artificial Sequence
  Description of Artificial Sequence: Synthetic oligonucleotide
  Sense strand starting at position 3902 of SEQ ID NO: 1479
agagaagcacacuguguau

SEQ ID NO: 116193 - RNA, 19 nt, Artificial Sequence
  Description of Artificial Sequence: Synthetic oligonucleotide
  Antisense strand to SEQ ID NO: 116192
auacacagugugcuucucu

SEQ ID NO: 116194 - RNA, 19 nt, Artificial Sequence
  Description of Artificial Sequence: Synthetic oligonucleotide
  Sense strand starting at position 3887 of SEQ ID NO: 1479
guuugcuuuauguaaagag

SEQ ID NO: 116195 - RNA, 19 nt, Artificial Sequence
  Description of Artificial Sequence: Synthetic oligonucleotide
  Antisense strand to SEQ ID NO: 116194
cucuuuacauaaagcaaac

SEQ ID NO: 116196 - RNA, 19 nt, Artificial Sequence
  Description of Artificial Sequence: Synthetic oligonucleotide
  Sense strand starting at position 3797 of SEQ ID NO: 1479
ugauuaguuaaguggaagu

SEQ ID NO: 116197 - RNA, 19 nt, Artificial Sequence
  Description of Artificial Sequence: Synthetic oligonucleotide
  Antisense strand to SEQ ID NO: 116196
acuuccacuuaacuaauca

SEQ ID NO: 116198 - RNA, 19 nt, Artificial Sequence
  Description of Artificial Sequence: Synthetic oligonucleotide
  Sense strand starting at position 3792 of SEQ ID NO: 1479
ggaguugauuaguuaagug

SEQ ID NO: 116199 - RNA, 19 nt, Artificial Sequence
  Description of Artificial Sequence: Synthetic oligonucleotide
  Antisense strand to SEQ ID NO: 116198
cacuuaacuaaucaacucc

SEQ ID NO: 116200 - RNA, 19 nt, Artificial Sequence
  Description of Artificial Sequence: Synthetic oligonucleotide
  Sense strand starting at position 3791 of SEQ ID NO: 1479
gggaguugauuaguuaagu

SEQ ID NO: 116201 - RNA, 19 nt, Artificial Sequence
  Description of Artificial Sequence: Synthetic oligonucleotide
  Antisense strand to SEQ ID NO: 116200
acuuaacuaaucaacuccc

SEQ ID NO: 116202 - RNA, 19 nt, Artificial Sequence
  Description of Artificial Sequence: Synthetic oligonucleotide
  Sense strand starting at position 3789 of SEQ ID NO: 1479
acgggaguugauuaguuaa

SEQ ID NO: 116203 - RNA, 19 nt, Artificial Sequence
  Description of Artificial Sequence: Synthetic oligonucleotide
  Antisense strand to SEQ ID NO: 116202
uuaacuaaucaacucccgu

SEQ ID NO: 116204 - RNA, 19 nt, Artificial Sequence
  Description of Artificial Sequence: Synthetic oligonucleotide
  Sense strand starting at position 3681 of SEQ ID NO: 1479
uuaaacaugugagaaagaa

SEQ ID NO: 116205 - RNA, 19 nt, Artificial Sequence
  Description of Artificial Sequence: Synthetic oligonucleotide
  Antisense strand to SEQ ID NO: 116204
uucuuucucacauguuuaa

SEQ ID NO: 116206 - RNA, 19 nt, Artificial Sequence
  Description of Artificial Sequence: Synthetic oligonucleotide
  Sense strand starting at position 3620 of SEQ ID NO: 1479
agaauaagugccuaaaucu

SEQ ID NO: 116207 - RNA, 19 nt, Artificial Sequence
  Description of Artificial Sequence: Synthetic oligonucleotide
  Antisense strand to SEQ ID NO: 116206
agauuuaggcacuuauucu

SEQ ID NO: 116208 - RNA, 19 nt, Artificial Sequence
  Description of Artificial Sequence: Synthetic oligonucleotide
  Sense strand starting at position 3483 of SEQ ID NO: 1479
agaaucaugguguguacua

SEQ ID NO: 116209 - RNA, 19 nt, Artificial Sequence
  Description of Artificial Sequence: Synthetic oligonucleotide
  Antisense strand to SEQ ID NO: 116208
uaguacacaccaugauucu

SEQ ID NO: 116210 - RNA, 19 nt, Artificial Sequence
  Description of Artificial Sequence: Synthetic oligonucleotide
  Sense strand starting at position 3427 of SEQ ID NO: 1479
cauguaaaguuggcaacau

SEQ ID NO: 116211 - RNA, 19 nt, Artificial Sequence
  Description of Artificial Sequence: Synthetic oligonucleotide
  Antisense strand to SEQ ID NO: 116210
auguugccaacuuuacaug

SEQ ID NO: 116212 - RNA, 19 nt, Artificial Sequence
  Description of Artificial Sequence: Synthetic oligonucleotide
  Sense strand starting at position 3295 of SEQ ID NO: 1479
guauuagguaaauacagua

SEQ ID NO: 116213 - RNA, 19 nt, Artificial Sequence
  Description of Artificial Sequence: Synthetic oligonucleotide
  Antisense strand to SEQ ID NO: 116212
uacuguauuuaccuaauac

SEQ ID NO: 116214 - RNA, 19 nt, Artificial Sequence
  Description of Artificial Sequence: Synthetic oligonucleotide
  Sense strand starting at position 3242 of SEQ ID NO: 1479
uuauguugaugauccaauu

SEQ ID NO: 116215 - RNA, 19 nt, Artificial Sequence
  Description of Artificial Sequence: Synthetic oligonucleotide
  Antisense strand to SEQ ID NO: 116214
aauuggaucaucaacauaa

SEQ ID NO: 116216 - RNA, 19 nt, Artificial Sequence
  Description of Artificial Sequence: Synthetic oligonucleotide
  Sense strand starting at position 2998 of SEQ ID NO: 1479
uugaaugacucugucaguu

SEQ ID NO: 116217 - RNA, 19 nt, Artificial Sequence
  Description of Artificial Sequence: Synthetic oligonucleotide
  Antisense strand to SEQ ID NO: 116216
aacugacagagucauucaa

SEQ ID NO: 116218 - RNA, 19 nt, Artificial Sequence
  Description of Artificial Sequence: Synthetic oligonucleotide
  Sense strand starting at position 2971 of SEQ ID NO: 1479
agcagauaacuuggagacu

SEQ ID NO: 116219 - RNA, 19 nt, Artificial Sequence
  Description of Artificial Sequence: Synthetic oligonucleotide
  Antisense strand to SEQ ID NO: 116218
agucuccaaguuaucugcu

SEQ ID NO: 116220 - RNA, 19 nt, Artificial Sequence
  Description of Artificial Sequence: Synthetic oligonucleotide
  Sense strand starting at position 2760 of SEQ ID NO: 1479
uuguuauugguauguagga

SEQ ID NO: 116221 - RNA, 19 nt, Artificial Sequence
  Description of Artificial Sequence: Synthetic oligonucleotide
  Antisense strand to SEQ ID NO: 116220
uccuacauaccaauaacaa

SEQ ID NO: 116222 - RNA, 19 nt, Artificial Sequence
  Description of Artificial Sequence: Synthetic oligonucleotide
  Sense strand starting at position 2746 of SEQ ID NO: 1479
cagaaacaucgauauuguu

SEQ ID NO: 116223 - RNA, 19 nt, Artificial Sequence
  Description of Artificial Sequence: Synthetic oligonucleotide
  Antisense strand to SEQ ID NO: 116222
aacaauaucgauguuucug

SEQ ID NO: 116224 - RNA, 19 nt, Artificial Sequence
  Description of Artificial Sequence: Synthetic oligonucleotide
  Sense strand starting at position 2711 of SEQ ID NO: 1479
augaauguuccuuaacugu

SEQ ID NO: 116225 - RNA, 19 nt, Artificial Sequence
  Description of Artificial Sequence: Synthetic oligonucleotide
  Antisense strand to SEQ ID NO: 116224
acaguuaaggaacauucau

SEQ ID NO: 116226 - RNA, 19 nt, Artificial Sequence
  Description of Artificial Sequence: Synthetic oligonucleotide
  Sense strand starting at position 2692 of SEQ ID NO: 1479
ggaaauugucuaggacauc

SEQ ID NO: 116227 - RNA, 19 nt, Artificial Sequence
  Description of Artificial Sequence: Synthetic oligonucleotide
  Antisense strand to SEQ ID NO: 116226
gauguccuagacaauuucc

SEQ ID NO: 116228 - RNA, 19 nt, Artificial Sequence
  Description of Artificial Sequence: Synthetic oligonucleotide
  Sense strand starting at position 2653 of SEQ ID NO: 1479
gugcuucaucaggaugaga

SEQ ID NO: 116229 - RNA, 19 nt, Artificial Sequence
  Description of Artificial Sequence: Synthetic oligonucleotide
  Antisense strand to SEQ ID NO: 116228
ucucauccugaugaagcac

SEQ ID NO: 116230 - RNA, 19 nt, Artificial Sequence
  Description of Artificial Sequence: Synthetic oligonucleotide
  Sense strand starting at position 2567 of SEQ ID NO: 1479
uccaucauagugugaaaug

SEQ ID NO: 116231 - RNA, 19 nt, Artificial Sequence
  Description of Artificial Sequence: Synthetic oligonucleotide
  Antisense strand to SEQ ID NO: 116230
cauuucacacuaugaugga

SEQ ID NO: 116232 - RNA, 19 nt, Artificial Sequence
  Description of Artificial Sequence: Synthetic oligonucleotide
  Sense strand starting at position 2471 of SEQ ID NO: 1479
ucuugagguucuuuagaua

SEQ ID NO: 116233 - RNA, 19 nt, Artificial Sequence
  Description of Artificial Sequence: Synthetic oligonucleotide
  Antisense strand to SEQ ID NO: 116232
uaucuaaagaaccucaaga

SEQ ID NO: 116234 - RNA, 19 nt, Artificial Sequence
  Description of Artificial Sequence: Synthetic oligonucleotide
  Sense strand starting at position 2461 of SEQ ID NO: 1479
cuggauaguuucuugaggu

SEQ ID NO: 116235 - RNA, 19 nt, Artificial Sequence
  Description of Artificial Sequence: Synthetic oligonucleotide
  Antisense strand to SEQ ID NO: 116234
accucaagaaacuauccag

SEQ ID NO: 116236 - RNA, 19 nt, Artificial Sequence
  Description of Artificial Sequence: Synthetic oligonucleotide
  Sense strand starting at position 2454 of SEQ ID NO: 1479
guauguucuggauaguuuc

SEQ ID NO: 116237 - RNA, 19 nt, Artificial Sequence
  Description of Artificial Sequence: Synthetic oligonucleotide
  Antisense strand to SEQ ID NO: 116236
gaaacuauccagaacauac

SEQ ID NO: 116238 - RNA, 19 nt, Artificial Sequence
  Description of Artificial Sequence: Synthetic oligonucleotide
  Sense strand starting at position 2452 of SEQ ID NO: 1479
auguauguucuggauaguu

SEQ ID NO: 116239 - RNA, 19 nt, Artificial Sequence
  Description of Artificial Sequence: Synthetic oligonucleotide
  Antisense strand to SEQ ID NO: 116238
aacuauccagaacauacau

SEQ ID NO: 116240 - RNA, 19 nt, Artificial Sequence
  Description of Artificial Sequence: Synthetic oligonucleotide
  Sense strand starting at position 2448 of SEQ ID NO: 1479
acaaauguauguucuggau

SEQ ID NO: 116241 - RNA, 19 nt, Artificial Sequence
  Description of Artificial Sequence: Synthetic oligonucleotide
  Antisense strand to SEQ ID NO: 116240
auccagaacauacauuugu

SEQ ID NO: 116242 - RNA, 19 nt, Artificial Sequence
  Description of Artificial Sequence: Synthetic oligonucleotide
  Sense strand starting at position 2421 of SEQ ID NO: 1479
gucuuuauaugcuuaagaa

SEQ ID NO: 116243 - RNA, 19 nt, Artificial Sequence
  Description of Artificial Sequence: Synthetic oligonucleotide
  Antisense strand to SEQ ID NO: 116242
uucuuaagcauauaaagac

SEQ ID NO: 116244 - RNA, 19 nt, Artificial Sequence
  Description of Artificial Sequence: Synthetic oligonucleotide
  Sense strand starting at position 2108 of SEQ ID NO: 1479
aguuguaaucuacauuguu

SEQ ID NO: 116245 - RNA, 19 nt, Artificial Sequence
  Description of Artificial Sequence: Synthetic oligonucleotide
  Antisense strand to SEQ ID NO: 116244
aacaauguagauuacaacu

SEQ ID NO: 116246 - RNA, 19 nt, Artificial Sequence
  Description of Artificial Sequence: Synthetic oligonucleotide
  Sense strand starting at position 2081 of SEQ ID NO: 1479
uaaauaucguagucuugau

SEQ ID NO: 116247 - RNA, 19 nt, Artificial Sequence
  Description of Artificial Sequence: Synthetic oligonucleotide
  Antisense strand to SEQ ID NO: 116246
aucaagacuacgauauuua

SEQ ID NO: 116248 - RNA, 19 nt, Artificial Sequence
  Description of Artificial Sequence: Synthetic oligonucleotide
  Sense strand starting at position 2013 of SEQ ID NO: 1479
gaagcuuggaccugggaaa

SEQ ID NO: 116249 - RNA, 19 nt, Artificial Sequence
  Description of Artificial Sequence: Synthetic oligonucleotide
  Antisense strand to SEQ ID NO: 116248
uuucccagguccaagcuuc

SEQ ID NO: 116250 - RNA, 19 nt, Artificial Sequence
  Description of Artificial Sequence: Synthetic oligonucleotide
  Sense strand starting at position 1987 of SEQ ID NO: 1479
gguugaauugggcaucggu

SEQ ID NO: 116251 - RNA, 19 nt, Artificial Sequence
  Description of Artificial Sequence: Synthetic oligonucleotide
  Antisense strand to SEQ ID NO: 116250
accgaugcccaauucaacc

SEQ ID NO: 116252 - RNA, 19 nt, Artificial Sequence
  Description of Artificial Sequence: Synthetic oligonucleotide
  Sense strand starting at position 810 of SEQ ID NO: 1479
gugagucauuaacuugaaa

SEQ ID NO: 116253 - RNA, 19 nt, Artificial Sequence
  Description of Artificial Sequence: Synthetic oligonucleotide
  Antisense strand to SEQ ID NO: 116252
uuucaaguuaaugacucac

SEQ ID NO: 116254 - RNA, 19 nt, Artificial Sequence
  Description of Artificial Sequence: Synthetic oligonucleotide
  Sense strand starting at position 806 of SEQ ID NO: 1479
uuuagugagucauuaacuu

SEQ ID NO: 116255 - RNA, 19 nt, Artificial Sequence
  Description of Artificial Sequence: Synthetic oligonucleotide
  Antisense strand to SEQ ID NO: 116254
aaguuaaugacucacuaaa

SEQ ID NO: 116256 - RNA, 19 nt, Artificial Sequence
  Description of Artificial Sequence: Synthetic oligonucleotide
  Sense strand starting at position 499 of SEQ ID NO: 1479
aagggaagcuauguaaagu

SEQ ID NO: 116257 - RNA, 19 nt, Artificial Sequence
  Description of Artificial Sequence: Synthetic oligonucleotide
  Antisense strand to SEQ ID NO: 116256
acuuuacauagcuucccuu

SEQ ID NO: 116258 - RNA, 19 nt, Artificial Sequence
  Description of Artificial Sequence: Synthetic oligonucleotide
  Sense strand starting at position 466 of SEQ ID NO: 1479
guaugauguaucuagagcu

SEQ ID NO: 116259 - RNA, 19 nt, Artificial Sequence
  Description of Artificial Sequence: Synthetic oligonucleotide
  Antisense strand to SEQ ID NO: 116258
agcucuagauacaucauac

SEQ ID NO: 116260 - RNA, 19 nt, Artificial Sequence
  Description of Artificial Sequence: Synthetic oligonucleotide
  Sense strand starting at position 457 of SEQ ID NO: 1479
ggcugauaaguaugaugua

SEQ ID NO: 116261 - RNA, 19 nt, Artificial Sequence
  Description of Artificial Sequence: Synthetic oligonucleotide
  Antisense strand to SEQ ID NO: 116260
uacaucauacuuaucagcc

SEQ ID NO: 116262 - RNA, 19 nt, Artificial Sequence
  Description of Artificial Sequence: Synthetic oligonucleotide
  Sense strand starting at position 253 of SEQ ID NO: 1479
guuacuauuggccaucaaa

SEQ ID NO: 116263 - RNA, 19 nt, Artificial Sequence
  Description of Artificial Sequence: Synthetic oligonucleotide
  Antisense strand to SEQ ID NO: 116262
uuugauggccaauaguaac

SEQ ID NO: 116264 - RNA, 19 nt, Artificial Sequence
  Description of Artificial Sequence: Synthetic oligonucleotide
  Sense strand starting at position 252 of SEQ ID NO: 1479
uguuacuauuggccaucaa

SEQ ID NO: 116265 - RNA, 19 nt, Artificial Sequence
  Description of Artificial Sequence: Synthetic oligonucleotide
  Antisense strand to SEQ ID NO: 116264
uugauggccaauaguaaca

SEQ ID NO: 116266 - RNA, 19 nt, Artificial Sequence
  Description of Artificial Sequence: Synthetic oligonucleotide
  Sense strand starting at position 219 of SEQ ID NO: 1479
ugauuauugcaauauaagc

SEQ ID NO: 116267 - RNA, 19 nt, Artificial Sequence
  Description of Artificial Sequence: Synthetic oligonucleotide
  Antisense strand to SEQ ID NO: 116266
gcuuauauugcaauaauca

SEQ ID NO: 116268 - RNA, 19 nt, Artificial Sequence
  Description of Artificial Sequence: Synthetic oligonucleotide
  Sense strand starting at position 201 of SEQ ID NO: 1479
cuaagaauuugggauuacu

SEQ ID NO: 116269 - RNA, 19 nt, Artificial Sequence
  Description of Artificial Sequence: Synthetic oligonucleotide
  Antisense strand to SEQ ID NO: 116268
aguaaucccaaauucuuag

SEQ ID NO: 116270 - RNA, 19 nt, Artificial Sequence
  Description of Artificial Sequence: Synthetic oligonucleotide
  Sense strand starting at position 144 of SEQ ID NO: 1479
cgaucugaauuugaaagau

SEQ ID NO: 116271 - RNA, 19 nt, Artificial Sequence
  Description of Artificial Sequence: Synthetic oligonucleotide
  Antisense strand to SEQ ID NO: 116270
aucuuucaaauucagaucg

SEQ ID NO: 116272 - RNA, 19 nt, Artificial Sequence
  Description of Artificial Sequence: Synthetic oligonucleotide
  Sense strand starting at position 4 of SEQ ID NO: 1480
gcaaucucucuggaaagua

SEQ ID NO: 116273 - RNA, 19 nt, Artificial Sequence
  Description of Artificial Sequence: Synthetic oligonucleotide
  Antisense strand to SEQ ID NO: 116272
uacuuuccagagagauugc

SEQ ID NO: 116274 - RNA, 19 nt, Artificial Sequence
  Description of Artificial Sequence: Synthetic oligonucleotide
  Sense strand starting at position 50 of SEQ ID NO: 1480
gugccuaauggagagguca

SEQ ID NO: 116275 - RNA, 19 nt, Artificial Sequence
  Description of Artificial Sequence: Synthetic oligonucleotide
  Antisense strand to SEQ ID NO: 116274
ugaccucuccauuaggcac

SEQ ID NO: 116276 - RNA, 19 nt, Artificial Sequence
  Description of Artificial Sequence: Synthetic oligonucleotide
  Sense strand starting at position 284 of SEQ ID NO: 1480
ugacaauggcgaugaugau

SEQ ID NO: 116277 - RNA, 19 nt, Artificial Sequence
  Description of Artificial Sequence: Synthetic oligonucleotide
  Antisense strand to SEQ ID NO: 116276
aucaucaucgccauuguca

SEQ ID NO: 116278 - RNA, 19 nt, Artificial Sequence
  Description of Artificial Sequence: Synthetic oligonucleotide
  Sense strand starting at position 297 of SEQ ID NO: 1480
gaugauaaucaccagcagu

SEQ ID NO: 116279 - RNA, 19 nt, Artificial Sequence
  Description of Artificial Sequence: Synthetic oligonucleotide
  Antisense strand to SEQ ID NO: 116278
acugcuggugauuaucauc

SEQ ID NO: 116280 - RNA, 19 nt, Artificial Sequence
  Description of Artificial Sequence: Synthetic oligonucleotide
  Sense strand starting at position 336 of SEQ ID NO: 1480
gaaagagcucuguauguau

SEQ ID NO: 116281 - RNA, 19 nt, Artificial Sequence
  Description of Artificial Sequence: Synthetic oligonucleotide
  Antisense strand to SEQ ID NO: 116280
auacauacagagcucuuuc

SEQ ID NO: 116282 - RNA, 19 nt, Artificial Sequence
  Description of Artificial Sequence: Synthetic oligonucleotide
  Sense strand starting at position 404 of SEQ ID NO: 1480
aggaaagagauccguuucu

SEQ ID NO: 116283 - RNA, 19 nt, Artificial Sequence
  Description of Artificial Sequence: Synthetic oligonucleotide
  Antisense strand to SEQ ID NO: 116282
agaaacggaucucuuuccu

SEQ ID NO: 116284 - RNA, 19 nt, Artificial Sequence
  Description of Artificial Sequence: Synthetic oligonucleotide
  Sense strand starting at position 469 of SEQ ID NO: 1480
gugacaaucucaguagaug

SEQ ID NO: 116285 - RNA, 19 nt, Artificial Sequence
  Description of Artificial Sequence: Synthetic oligonucleotide
  Antisense strand to SEQ ID NO: 116284
caucuacugagauugucac

SEQ ID NO: 116286 - RNA, 19 nt, Artificial Sequence
  Description of Artificial Sequence: Synthetic oligonucleotide
  Sense strand starting at position 483 of SEQ ID NO: 1480
agaugcauugauggaaauu

SEQ ID NO: 116287 - RNA, 19 nt, Artificial Sequence
  Description of Artificial Sequence: Synthetic oligonucleotide
  Antisense strand to SEQ ID NO: 116286
aauuuccaucaaugcaucu

SEQ ID NO: 116288 - RNA, 19 nt, Artificial Sequence
  Description of Artificial Sequence: Synthetic oligonucleotide
  Sense strand starting at position 489 of SEQ ID NO: 1480
auugauggaaauuguguua

SEQ ID NO: 116289 - RNA, 19 nt, Artificial Sequence
  Description of Artificial Sequence: Synthetic oligonucleotide
  Antisense strand to SEQ ID NO: 116288
uaacacaauuuccaucaau

SEQ ID NO: 116290 - RNA, 19 nt, Artificial Sequence
  Description of Artificial Sequence: Synthetic oligonucleotide
  Sense strand starting at position 492 of SEQ ID NO: 1480
gauggaaauuguguuaauu

SEQ ID NO: 116291 - RNA, 19 nt, Artificial Sequence
  Description of Artificial Sequence: Synthetic oligonucleotide
  Antisense strand to SEQ ID NO: 116290
aauuaacacaauuuccauc

SEQ ID NO: 116292 - RNA, 19 nt, Artificial Sequence
  Description of Artificial Sequence: Synthetic oligonucleotide
  Sense strand starting at position 1034 of SEQ ID NO: 1480
gcagaucuucuauaguaaa

SEQ ID NO: 116293 - RNA, 19 nt, Artificial Sequence
  Description of Artificial Sequence: Synthetic oligonucleotide
  Antisense strand to SEQ ID NO: 116292
uuuacuauagaagaucugc

SEQ ID NO: 116294 - RNA, 19 nt, Artificial Sequence
  Description of Artificial Sequence: Synthetic oligonucleotide
  Sense strand starting at position 1046 of SEQ ID NO: 1480
uaguaaagaccaggauguu

SEQ ID NO: 116295 - RNA, 19 nt, Artificial Sequence
  Description of Artificial Sequence: Synthetic oligonucleotide
  Antisense strand to SEQ ID NO: 116294
aacauccuggucuuuacua

SEQ ID NO: 116296 - RNA, 19 nt, Artificial Sequence
  Description of Artificial Sequence: Synthetic oligonucleotide
  Sense strand starting at position 1306 of SEQ ID NO: 1480
cgacucuguccugaaggga

SEQ ID NO: 116297 - RNA, 19 nt, Artificial Sequence
  Description of Artificial Sequence: Synthetic oligonucleotide
  Antisense strand to SEQ ID NO: 116296
ucccuucaggacagagucg

SEQ ID NO: 116298 - RNA, 19 nt, Artificial Sequence
  Description of Artificial Sequence: Synthetic oligonucleotide
  Sense strand starting at position 1337 of SEQ ID NO: 1480
uugagaagauuuggaaaua

SEQ ID NO: 116299 - RNA, 19 nt, Artificial Sequence
  Description of Artificial Sequence: Synthetic oligonucleotide
  Antisense strand to SEQ ID NO: 116298
uauuuccaaaucuucucaa

SEQ ID NO: 116300 - RNA, 19 nt, Artificial Sequence
  Description of Artificial Sequence: Synthetic oligonucleotide
  Sense strand starting at position 1634 of SEQ ID NO: 1480
caacauagcggucauaaga

SEQ ID NO: 116301 - RNA, 19 nt, Artificial Sequence
  Description of Artificial Sequence: Synthetic oligonucleotide
  Antisense strand to SEQ ID NO: 116300
ucuuaugaccgcuauguug

SEQ ID NO: 116302 - RNA, 19 nt, Artificial Sequence
  Description of Artificial Sequence: Synthetic oligonucleotide
  Sense strand starting at position 1641 of SEQ ID NO: 1480
gcggucauaagacaugaca

SEQ ID NO: 116303 - RNA, 19 nt, Artificial Sequence
  Description of Artificial Sequence: Synthetic oligonucleotide
  Antisense strand to SEQ ID NO: 116302
ugucaugucuuaugaccgc

SEQ ID NO: 116304 - RNA, 19 nt, Artificial Sequence
  Description of Artificial Sequence: Synthetic oligonucleotide
  Sense strand starting at position 1643 of SEQ ID NO: 1480
ggucauaagacaugacagu

SEQ ID NO: 116305 - RNA, 19 nt, Artificial Sequence
  Description of Artificial Sequence: Synthetic oligonucleotide
  Antisense strand to SEQ ID NO: 116304
acugucaugucuuaugacc

SEQ ID NO: 116306 - RNA, 19 nt, Artificial Sequence
  Description of Artificial Sequence: Synthetic oligonucleotide
  Sense strand starting at position 1777 of SEQ ID NO: 1480
gugacugagauguagcaca

SEQ ID NO: 116307 - RNA, 19 nt, Artificial Sequence
  Description of Artificial Sequence: Synthetic oligonucleotide
  Antisense strand to SEQ ID NO: 116306
ugugcuacaucucagucac

SEQ ID NO: 116308 - RNA, 19 nt, Artificial Sequence
  Description of Artificial Sequence: Synthetic oligonucleotide
  Sense strand starting at position 1805 of SEQ ID NO: 1480
cggagagguucuucaggaa

SEQ ID NO: 116309 - RNA, 19 nt, Artificial Sequence
  Description of Artificial Sequence: Synthetic oligonucleotide
  Antisense strand to SEQ ID NO: 116308
uuccugaagaaccucuccg

SEQ ID NO: 116310 - RNA, 19 nt, Artificial Sequence
  Description of Artificial Sequence: Synthetic oligonucleotide
  Sense strand starting at position 1844 of SEQ ID NO: 1480
gaugcugaucgagagugau

SEQ ID NO: 116311 - RNA, 19 nt, Artificial Sequence
  Description of Artificial Sequence: Synthetic oligonucleotide
  Antisense strand to SEQ ID NO: 116310
aucacucucgaucagcauc

SEQ ID NO: 116312 - RNA, 19 nt, Artificial Sequence
  Description of Artificial Sequence: Synthetic oligonucleotide
  Sense strand starting at position 1854 of SEQ ID NO: 1480
gagagugaugacugcaaug

SEQ ID NO: 116313 - RNA, 19 nt, Artificial Sequence
  Description of Artificial Sequence: Synthetic oligonucleotide
  Antisense strand to SEQ ID NO: 116312
cauugcagucaucacucuc

SEQ ID NO: 116314 - RNA, 19 nt, Artificial Sequence
  Description of Artificial Sequence: Synthetic oligonucleotide
  Sense strand starting at position 1889 of SEQ ID NO: 1480
ccagcacugccagauaaau

SEQ ID NO: 116315 - RNA, 19 nt, Artificial Sequence
  Description of Artificial Sequence: Synthetic oligonucleotide
  Antisense strand to SEQ ID NO: 116314
auuuaucuggcagugcugg

SEQ ID NO: 116316 - RNA, 19 nt, Artificial Sequence
  Description of Artificial Sequence: Synthetic oligonucleotide
  Sense strand starting at position 2005 of SEQ ID NO: 1480
cagggaaaucugugaucug

SEQ ID NO: 116317 - RNA, 19 nt, Artificial Sequence
  Description of Artificial Sequence: Synthetic oligonucleotide
  Antisense strand to SEQ ID NO: 116316
cagaucacagauuucccug

SEQ ID NO: 116318 - RNA, 19 nt, Artificial Sequence
  Description of Artificial Sequence: Synthetic oligonucleotide
  Sense strand starting at position 2008 of SEQ ID NO: 1480
ggaaaucugugaucugauu

SEQ ID NO: 116319 - RNA, 19 nt, Artificial Sequence
  Description of Artificial Sequence: Synthetic oligonucleotide
  Antisense strand to SEQ ID NO: 116318
aaucagaucacagauuucc

SEQ ID NO: 116320 - RNA, 19 nt, Artificial Sequence
  Description of Artificial Sequence: Synthetic oligonucleotide
  Sense strand starting at position 2016 of SEQ ID NO: 1480
gugaucugauuguugagaa

SEQ ID NO: 116321 - RNA, 19 nt, Artificial Sequence
  Description of Artificial Sequence: Synthetic oligonucleotide
  Antisense strand to SEQ ID NO: 116320
uucucaacaaucagaucac

SEQ ID NO: 116322 - RNA, 19 nt, Artificial Sequence
  Description of Artificial Sequence: Synthetic oligonucleotide
  Sense strand starting at position 2084 of SEQ ID NO: 1480
ggaguaauauccuccuaaa

SEQ ID NO: 116323 - RNA, 19 nt, Artificial Sequence
  Description of Artificial Sequence: Synthetic oligonucleotide
  Antisense strand to SEQ ID NO: 116322
uuuaggaggauauuacucc

SEQ ID NO: 116324 - RNA, 19 nt, Artificial Sequence
  Description of Artificial Sequence: Synthetic oligonucleotide
  Sense strand starting at position 2195 of SEQ ID NO: 1480
cuaagacuaugaguugagu

SEQ ID NO: 116325 - RNA, 19 nt, Artificial Sequence
  Description of Artificial Sequence: Synthetic oligonucleotide
  Antisense strand to SEQ ID NO: 116324
acucaacucauagucuuag

SEQ ID NO: 116326 - RNA, 19 nt, Artificial Sequence
  Description of Artificial Sequence: Synthetic oligonucleotide
  Sense strand starting at position 2437 of SEQ ID NO: 1480
uuuaacugugguuauacau

SEQ ID NO: 116327 - RNA, 19 nt, Artificial Sequence
  Description of Artificial Sequence: Synthetic oligonucleotide
  Antisense strand to SEQ ID NO: 116326
auguauaaccacaguuaaa

SEQ ID NO: 116328 - RNA, 19 nt, Artificial Sequence
  Description of Artificial Sequence: Synthetic oligonucleotide
  Sense strand starting at position 2473 of SEQ ID NO: 1480
gucuuuagcuauuuguuga

SEQ ID NO: 116329 - RNA, 19 nt, Artificial Sequence
  Description of Artificial Sequence: Synthetic oligonucleotide
  Antisense strand to SEQ ID NO: 116328
ucaacaaauagcuaaagac

SEQ ID NO: 116330 - RNA, 19 nt, Artificial Sequence
  Description of Artificial Sequence: Synthetic oligonucleotide
  Sense strand starting at position 2489 of SEQ ID NO: 1480
ugaauaaauugggugguaa

SEQ ID NO: 116331 - RNA, 19 nt, Artificial Sequence
  Description of Artificial Sequence: Synthetic oligonucleotide
  Antisense strand to SEQ ID NO: 116330
uuaccacccaauuuauuca

SEQ ID NO: 116332 - RNA, 19 nt, Artificial Sequence
  Description of Artificial Sequence: Synthetic oligonucleotide
  Sense strand starting at position 2490 of SEQ ID NO: 1480
gaauaaauugggugguaag

SEQ ID NO: 116333 - RNA, 19 nt, Artificial Sequence
  Description of Artificial Sequence: Synthetic oligonucleotide
  Antisense strand to SEQ ID NO: 116332
cuuaccacccaauuuauuc

SEQ ID NO: 116334 - RNA, 19 nt, Artificial Sequence
  Description of Artificial Sequence: Synthetic oligonucleotide
  Sense strand starting at position 2530 of SEQ ID NO: 1480
cuguuuaagacauggaaug

SEQ ID NO: 116335 - RNA, 19 nt, Artificial Sequence
  Description of Artificial Sequence: Synthetic oligonucleotide
  Antisense strand to SEQ ID NO: 116334
cauuccaugucuuaaacag

SEQ ID NO: 116336 - RNA, 19 nt, Artificial Sequence
  Description of Artificial Sequence: Synthetic oligonucleotide
  Sense strand starting at position 2617 of SEQ ID NO: 1480
gucaaugugcaagacauga

SEQ ID NO: 116337 - RNA, 19 nt, Artificial Sequence
  Description of Artificial Sequence: Synthetic oligonucleotide
  Antisense strand to SEQ ID NO: 116336
ucaugucuugcacauugac

SEQ ID NO: 116338 - RNA, 19 nt, Artificial Sequence
  Description of Artificial Sequence: Synthetic oligonucleotide
  Sense strand starting at position 2691 of SEQ ID NO: 1480
ugcuauuaucucuacagga

SEQ ID NO: 116339 - RNA, 19 nt, Artificial Sequence
  Description of Artificial Sequence: Synthetic oligonucleotide
  Antisense strand to SEQ ID NO: 116338
uccuguagagauaauagca

SEQ ID NO: 116340 - RNA, 19 nt, Artificial Sequence
  Description of Artificial Sequence: Synthetic oligonucleotide
  Sense strand starting at position 2707 of SEQ ID NO: 1480
ggacacaccuuggcucaau

SEQ ID NO: 116341 - RNA, 19 nt, Artificial Sequence
  Description of Artificial Sequence: Synthetic oligonucleotide
  Antisense strand to SEQ ID NO: 116340
auugagccaaggugugucc

SEQ ID NO: 116342 - RNA, 19 nt, Artificial Sequence
  Description of Artificial Sequence: Synthetic oligonucleotide
  Sense strand starting at position 3143 of SEQ ID NO: 1480
ucagguuacugaucaucua

SEQ ID NO: 116343 - RNA, 19 nt, Artificial Sequence
  Description of Artificial Sequence: Synthetic oligonucleotide
  Antisense strand to SEQ ID NO: 116342
uagaugaucaguaaccuga

SEQ ID NO: 116344 - RNA, 19 nt, Artificial Sequence
  Description of Artificial Sequence: Synthetic oligonucleotide
  Sense strand starting at position 3162 of SEQ ID NO: 1480
agguuuaguugccuuauuu

SEQ ID NO: 116345 - RNA, 19 nt, Artificial Sequence
  Description of Artificial Sequence: Synthetic oligonucleotide
  Antisense strand to SEQ ID NO: 116344
aaauaaggcaacuaaaccu

SEQ ID NO: 116346 - RNA, 19 nt, Artificial Sequence
  Description of Artificial Sequence: Synthetic oligonucleotide
  Sense strand starting at position 3365 of SEQ ID NO: 1480
guccaaaugcuauaaauga

SEQ ID NO: 116347 - RNA, 19 nt, Artificial Sequence
  Description of Artificial Sequence: Synthetic oligonucleotide
  Antisense strand to SEQ ID NO: 116346
ucauuuauagcauuuggac

SEQ ID NO: 116348 - RNA, 19 nt, Artificial Sequence
  Description of Artificial Sequence: Synthetic oligonucleotide
  Sense strand starting at position 3768 of SEQ ID NO: 1480
ucaagugacgagcaauaca

SEQ ID NO: 116349 - RNA, 19 nt, Artificial Sequence
  Description of Artificial Sequence: Synthetic oligonucleotide
  Antisense strand to SEQ ID NO: 116348
uguauugcucgucacuuga

SEQ ID NO: 116350 - RNA, 19 nt, Artificial Sequence
  Description of Artificial Sequence: Synthetic oligonucleotide
  Sense strand starting at position 3809 of SEQ ID NO: 1480
ggagcacuaucccugauaa

SEQ ID NO: 116351 - RNA, 19 nt, Artificial Sequence
  Description of Artificial Sequence: Synthetic oligonucleotide
  Antisense strand to SEQ ID NO: 116350
uuaucagggauagugcucc

SEQ ID NO: 116352 - RNA, 19 nt, Artificial Sequence
  Description of Artificial Sequence: Synthetic oligonucleotide
  Sense strand starting at position 52 of SEQ ID NO: 1481
agaaauuacagaggucugu

SEQ ID NO: 116353 - RNA, 19 nt, Artificial Sequence
  Description of Artificial Sequence: Synthetic oligonucleotide
  Antisense strand to SEQ ID NO: 116352
acagaccucuguaauuucu

SEQ ID NO: 116354 - RNA, 19 nt, Artificial Sequence
  Description of Artificial Sequence: Synthetic oligonucleotide
  Sense strand starting at position 61 of SEQ ID NO: 1481
agaggucugugagcagaca

SEQ ID NO: 116355 - RNA, 19 nt, Artificial Sequence
  Description of Artificial Sequence: Synthetic oligonucleotide
  Antisense strand to SEQ ID NO: 116354
ugucugcucacagaccucu

SEQ ID NO: 116356 - RNA, 19 nt, Artificial Sequence
  Description of Artificial Sequence: Synthetic oligonucleotide
  Sense strand starting at position 62 of SEQ ID NO: 1481
gaggucugugagcagacau

SEQ ID NO: 116357 - RNA, 19 nt, Artificial Sequence
  Description of Artificial Sequence: Synthetic oligonucleotide
  Antisense strand to SEQ ID NO: 116356
augucugcucacagaccuc

SEQ ID NO: 116358 - RNA, 19 nt, Artificial Sequence
  Description of Artificial Sequence: Synthetic oligonucleotide
  Sense strand starting at position 149 of SEQ ID NO: 1481
accggaauagguugaauaa

SEQ ID NO: 116359 - RNA, 19 nt, Artificial Sequence
  Description of Artificial Sequence: Synthetic oligonucleotide
  Antisense strand to SEQ ID NO: 116358
uuauucaaccuauuccggu

SEQ ID NO: 116360 - RNA, 19 nt, Artificial Sequence
  Description of Artificial Sequence: Synthetic oligonucleotide
  Sense strand starting at position 176 of SEQ ID NO: 1481
auuggauuggaugguuaau

SEQ ID NO: 116361 - RNA, 19 nt, Artificial Sequence
  Description of Artificial Sequence: Synthetic oligonucleotide
  Antisense strand to SEQ ID NO: 116360
auuaaccauccaauccaau

SEQ ID NO: 116362 - RNA, 19 nt, Artificial Sequence
  Description of Artificial Sequence: Synthetic oligonucleotide
  Sense strand starting at position 178 of SEQ ID NO: 1481
uggauuggaugguuaauau

SEQ ID NO: 116363 - RNA, 19 nt, Artificial Sequence
  Description of Artificial Sequence: Synthetic oligonucleotide
  Antisense strand to SEQ ID NO: 116362
auauuaaccauccaaucca

SEQ ID NO: 116364 - RNA, 19 nt, Artificial Sequence
  Description of Artificial Sequence: Synthetic oligonucleotide
  Sense strand starting at position 359 of SEQ ID NO: 1481
cugagaaccugaucucuuc

SEQ ID NO: 116365 - RNA, 19 nt, Artificial Sequence
  Description of Artificial Sequence: Synthetic oligonucleotide
  Antisense strand to SEQ ID NO: 116364
gaagagaucagguucucag

SEQ ID NO: 116366 - RNA, 19 nt, Artificial Sequence
  Description of Artificial Sequence: Synthetic oligonucleotide
  Sense strand starting at position 431 of SEQ ID NO: 1481
gccucugcccuauaaagau

SEQ ID NO: 116367 - RNA, 19 nt, Artificial Sequence
  Description of Artificial Sequence: Synthetic oligonucleotide
  Antisense strand to SEQ ID NO: 116366
aucuuuauagggcagaggc

SEQ ID NO: 116368 - RNA, 19 nt, Artificial Sequence
  Description of Artificial Sequence: Synthetic oligonucleotide
  Sense strand starting at position 443 of SEQ ID NO: 1481
uaaagauggcugggagauu

SEQ ID NO: 116369 - RNA, 19 nt, Artificial Sequence
  Description of Artificial Sequence: Synthetic oligonucleotide
  Antisense strand to SEQ ID NO: 116368
aaucucccagccaucuuua

SEQ ID NO: 116370 - RNA, 19 nt, Artificial Sequence
  Description of Artificial Sequence: Synthetic oligonucleotide
  Sense strand starting at position 454 of SEQ ID NO: 1481
gggagauucugaguuccuc

SEQ ID NO: 116371 - RNA, 19 nt, Artificial Sequence
  Description of Artificial Sequence: Synthetic oligonucleotide
  Antisense strand to SEQ ID NO: 116370
gaggaacucagaaucuccc

SEQ ID NO: 116372 - RNA, 19 nt, Artificial Sequence
  Description of Artificial Sequence: Synthetic oligonucleotide
  Sense strand starting at position 759 of SEQ ID NO: 1481
agauucucaucacuaaggu

SEQ ID NO: 116373 - RNA, 19 nt, Artificial Sequence
  Description of Artificial Sequence: Synthetic oligonucleotide
  Antisense strand to SEQ ID NO: 116372
accuuagugaugagaaucu

SEQ ID NO: 116374 - RNA, 19 nt, Artificial Sequence
  Description of Artificial Sequence: Synthetic oligonucleotide
  Sense strand starting at position 773 of SEQ ID NO: 1481
aagguauauuuguacugga

SEQ ID NO: 116375 - RNA, 19 nt, Artificial Sequence
  Description of Artificial Sequence: Synthetic oligonucleotide
  Antisense strand to SEQ ID NO: 116374
uccaguacaaauauaccuu

SEQ ID NO: 116376 - RNA, 19 nt, Artificial Sequence
  Description of Artificial Sequence: Synthetic oligonucleotide
  Sense strand starting at position 813 of SEQ ID NO: 1481
auggguuguaugcagacua

SEQ ID NO: 116377 - RNA, 19 nt, Artificial Sequence
  Description of Artificial Sequence: Synthetic oligonucleotide
  Antisense strand to SEQ ID NO: 116376
uagucugcauacaacccau

SEQ ID NO: 116378 - RNA, 19 nt, Artificial Sequence
  Description of Artificial Sequence: Synthetic oligonucleotide
  Sense strand starting at position 856 of SEQ ID NO: 1481
cuguauaaagaaugcuaua

SEQ ID NO: 116379 - RNA, 19 nt, Artificial Sequence
  Description of Artificial Sequence: Synthetic oligonucleotide
  Antisense strand to SEQ ID NO: 116378
uauagcauucuuuauacag

SEQ ID NO: 116380 - RNA, 19 nt, Artificial Sequence
  Description of Artificial Sequence: Synthetic oligonucleotide
  Sense strand starting at position 861 of SEQ ID NO: 1481
uaaagaaugcuauaugguu

SEQ ID NO: 116381 - RNA, 19 nt, Artificial Sequence
  Description of Artificial Sequence: Synthetic oligonucleotide
  Antisense strand to SEQ ID NO: 116380
aaccauauagcauucuuua

SEQ ID NO: 116382 - RNA, 19 nt, Artificial Sequence
  Description of Artificial Sequence: Synthetic oligonucleotide
  Sense strand starting at position 950 of SEQ ID NO: 1481
ggagacauuuaauagcagu

SEQ ID NO: 116383 - RNA, 19 nt, Artificial Sequence
  Description of Artificial Sequence: Synthetic oligonucleotide
  Antisense strand to SEQ ID NO: 116382
acugcuauuaaaugucucc

SEQ ID NO: 116384 - RNA, 19 nt, Artificial Sequence
  Description of Artificial Sequence: Synthetic oligonucleotide
  Sense strand starting at position 1042 of SEQ ID NO: 1481
agucacugaggucauuauu

SEQ ID NO: 116385 - RNA, 19 nt, Artificial Sequence
  Description of Artificial Sequence: Synthetic oligonucleotide
  Antisense strand to SEQ ID NO: 116384
aauaaugaccucagugacu

SEQ ID NO: 116386 - RNA, 19 nt, Artificial Sequence
  Description of Artificial Sequence: Synthetic oligonucleotide
  Sense strand starting at position 1113 of SEQ ID NO: 1481
aucccuguuccuuagggua

SEQ ID NO: 116387 - RNA, 19 nt, Artificial Sequence
  Description of Artificial Sequence: Synthetic oligonucleotide
  Antisense strand to SEQ ID NO: 116386
uacccuaaggaacagggau

SEQ ID NO: 116388 - RNA, 19 nt, Artificial Sequence
  Description of Artificial Sequence: Synthetic oligonucleotide
  Sense strand starting at position 1118 of SEQ ID NO: 1481
uguuccuuaggguauagau

SEQ ID NO: 116389 - RNA, 19 nt, Artificial Sequence
  Description of Artificial Sequence: Synthetic oligonucleotide
  Antisense strand to SEQ ID NO: 116388
aucuauacccuaaggaaca

SEQ ID NO: 116390 - RNA, 19 nt, Artificial Sequence
  Description of Artificial Sequence: Synthetic oligonucleotide
  Sense strand starting at position 1371 of SEQ ID NO: 1481
gggcgugagagccaauaga

SEQ ID NO: 116391 - RNA, 19 nt, Artificial Sequence
  Description of Artificial Sequence: Synthetic oligonucleotide
  Antisense strand to SEQ ID NO: 116390
ucuauuggcucucacgccc

SEQ ID NO: 116392 - RNA, 19 nt, Artificial Sequence
  Description of Artificial Sequence: Synthetic oligonucleotide
  Sense strand starting at position 1415 of SEQ ID NO: 1481
cauugaaggagacgucaga

SEQ ID NO: 116393 - RNA, 19 nt, Artificial Sequence
  Description of Artificial Sequence: Synthetic oligonucleotide
  Antisense strand to SEQ ID NO: 116392
ucugacgucuccuucaaug

SEQ ID NO: 116394 - RNA, 19 nt, Artificial Sequence
  Description of Artificial Sequence: Synthetic oligonucleotide
  Sense strand starting at position 1508 of SEQ ID NO: 1481
gugcuauuaggacaguaug

SEQ ID NO: 116395 - RNA, 19 nt, Artificial Sequence
  Description of Artificial Sequence: Synthetic oligonucleotide
  Antisense strand to SEQ ID NO: 116394
cauacuguccuaauagcac

SEQ ID NO: 116396 - RNA, 19 nt, Artificial Sequence
  Description of Artificial Sequence: Synthetic oligonucleotide
  Sense strand starting at position 1619 of SEQ ID NO: 1481
ggcaaaucgccacauaucu

SEQ ID NO: 116397 - RNA, 19 nt, Artificial Sequence
  Description of Artificial Sequence: Synthetic oligonucleotide
  Antisense strand to SEQ ID NO: 116396
agauauguggcgauuugcc

SEQ ID NO: 116398 - RNA, 19 nt, Artificial Sequence
  Description of Artificial Sequence: Synthetic oligonucleotide
  Sense strand starting at position 1658 of SEQ ID NO: 1481
gaaggaggcuguccauauu

SEQ ID NO: 116399 - RNA, 19 nt, Artificial Sequence
  Description of Artificial Sequence: Synthetic oligonucleotide
  Antisense strand to SEQ ID NO: 116398
aauauggacagccuccuuc

SEQ ID NO: 116400 - RNA, 19 nt, Artificial Sequence
  Description of Artificial Sequence: Synthetic oligonucleotide
  Sense strand starting at position 1731 of SEQ ID NO: 1481
cuuggugccagucaagaua

SEQ ID NO: 116401 - RNA, 19 nt, Artificial Sequence
  Description of Artificial Sequence: Synthetic oligonucleotide
  Antisense strand to SEQ ID NO: 116400
uaucuugacuggcaccaag

SEQ ID NO: 116402 - RNA, 19 nt, Artificial Sequence
  Description of Artificial Sequence: Synthetic oligonucleotide
  Sense strand starting at position 1961 of SEQ ID NO: 1481
ggacgaauucccugacaac

SEQ ID NO: 116403 - RNA, 19 nt, Artificial Sequence
  Description of Artificial Sequence: Synthetic oligonucleotide
  Antisense strand to SEQ ID NO: 116402
guugucagggaauucgucc

SEQ ID NO: 116404 - RNA, 19 nt, Artificial Sequence
  Description of Artificial Sequence: Synthetic oligonucleotide
  Sense strand starting at position 2150 of SEQ ID NO: 1481
cuugaaugcuuuccaauga

SEQ ID NO: 116405 - RNA, 19 nt, Artificial Sequence
  Description of Artificial Sequence: Synthetic oligonucleotide
  Antisense strand to SEQ ID NO: 116404
ucauuggaaagcauucaag

SEQ ID NO: 116406 - RNA, 19 nt, Artificial Sequence
  Description of Artificial Sequence: Synthetic oligonucleotide
  Sense strand starting at position 2392 of SEQ ID NO: 1481
augcuuacccaguagaaau

SEQ ID NO: 116407 - RNA, 19 nt, Artificial Sequence
  Description of Artificial Sequence: Synthetic oligonucleotide
  Antisense strand to SEQ ID NO: 116406
auuucuacuggguaagcau

SEQ ID NO: 116408 - RNA, 19 nt, Artificial Sequence
  Description of Artificial Sequence: Synthetic oligonucleotide
  Sense strand starting at position 2394 of SEQ ID NO: 1481
gcuuacccaguagaaauau

SEQ ID NO: 116409 - RNA, 19 nt, Artificial Sequence
  Description of Artificial Sequence: Synthetic oligonucleotide
  Antisense strand to SEQ ID NO: 116408
auauuucuacuggguaagc

SEQ ID NO: 116410 - RNA, 19 nt, Artificial Sequence
  Description of Artificial Sequence: Synthetic oligonucleotide
  Sense strand starting at position 2444 of SEQ ID NO: 1481
ugaugcuuauacuuaugau

SEQ ID NO: 116411 - RNA, 19 nt, Artificial Sequence
  Description of Artificial Sequence: Synthetic oligonucleotide
  Antisense strand to SEQ ID NO: 116410
aucauaaguauaagcauca

SEQ ID NO: 116412 - RNA, 19 nt, Artificial Sequence
  Description of Artificial Sequence: Synthetic oligonucleotide
  Sense strand starting at position 2587 of SEQ ID NO: 1481
cucugacuuguguaguaag

SEQ ID NO: 116413 - RNA, 19 nt, Artificial Sequence
  Description of Artificial Sequence: Synthetic oligonucleotide
  Antisense strand to SEQ ID NO: 116412
cuuacuacacaagucagag

SEQ ID NO: 116414 - RNA, 19 nt, Artificial Sequence
  Description of Artificial Sequence: Synthetic oligonucleotide
  Sense strand starting at position 2595 of SEQ ID NO: 1481
uguguaguaagucauugag

SEQ ID NO: 116415 - RNA, 19 nt, Artificial Sequence
  Description of Artificial Sequence: Synthetic oligonucleotide
  Antisense strand to SEQ ID NO: 116414
cucaaugacuuacuacaca

SEQ ID NO: 116416 - RNA, 19 nt, Artificial Sequence
  Description of Artificial Sequence: Synthetic oligonucleotide
  Sense strand starting at position 2597 of SEQ ID NO: 1481
uguaguaagucauugagag

SEQ ID NO: 116417 - RNA, 19 nt, Artificial Sequence
  Description of Artificial Sequence: Synthetic oligonucleotide
  Antisense strand to SEQ ID NO: 116416
cucucaaugacuuacuaca

SEQ ID NO: 116418 - RNA, 19 nt, Artificial Sequence
  Description of Artificial Sequence: Synthetic oligonucleotide
  Sense strand starting at position 2835 of SEQ ID NO: 1481
guuguauaacaauaagcaa

SEQ ID NO: 116419 - RNA, 19 nt, Artificial Sequence
  Description of Artificial Sequence: Synthetic oligonucleotide
  Antisense strand to SEQ ID NO: 116418
uugcuuauuguuauacaac

SEQ ID NO: 116420 - RNA, 19 nt, Artificial Sequence
  Description of Artificial Sequence: Synthetic oligonucleotide
  Sense strand starting at position 2932 of SEQ ID NO: 1481
ugcacaauuuaggaccaaa

SEQ ID NO: 116421 - RNA, 19 nt, Artificial Sequence
  Description of Artificial Sequence: Synthetic oligonucleotide
  Antisense strand to SEQ ID NO: 116420
uuugguccuaaauugugca

SEQ ID NO: 116422 - RNA, 19 nt, Artificial Sequence
  Description of Artificial Sequence: Synthetic oligonucleotide
  Sense strand starting at position 3149 of SEQ ID NO: 1481
uuccaagaguuaucuagga

SEQ ID NO: 116423 - RNA, 19 nt, Artificial Sequence
  Description of Artificial Sequence: Synthetic oligonucleotide
  Antisense strand to SEQ ID NO: 116422
uccuagauaacucuuggaa

SEQ ID NO: 116424 - RNA, 19 nt, Artificial Sequence
  Description of Artificial Sequence: Synthetic oligonucleotide
  Sense strand starting at position 3153 of SEQ ID NO: 1481
aagaguuaucuaggacuuc

SEQ ID NO: 116425 - RNA, 19 nt, Artificial Sequence
  Description of Artificial Sequence: Synthetic oligonucleotide
  Antisense strand to SEQ ID NO: 116424
gaaguccuagauaacucuu

SEQ ID NO: 116426 - RNA, 19 nt, Artificial Sequence
  Description of Artificial Sequence: Synthetic oligonucleotide
  Sense strand starting at position 3286 of SEQ ID NO: 1481
ugcaguguauuuguuucua

SEQ ID NO: 116427 - RNA, 19 nt, Artificial Sequence
  Description of Artificial Sequence: Synthetic oligonucleotide
  Antisense strand to SEQ ID NO: 116426
uagaaacaaauacacugca

SEQ ID NO: 116428 - RNA, 19 nt, Artificial Sequence
  Description of Artificial Sequence: Synthetic oligonucleotide
  Sense strand starting at position 3290 of SEQ ID NO: 1481
guguauuuguuucuauuac

SEQ ID NO: 116429 - RNA, 19 nt, Artificial Sequence
  Description of Artificial Sequence: Synthetic oligonucleotide
  Antisense strand to SEQ ID NO: 116428
guaauagaaacaaauacac

SEQ ID NO: 116430 - RNA, 19 nt, Artificial Sequence
  Description of Artificial Sequence: Synthetic oligonucleotide
  Sense strand starting at position 3886 of SEQ ID NO: 1481
uuaguccaccauugaaaug

SEQ ID NO: 116431 - RNA, 19 nt, Artificial Sequence
  Description of Artificial Sequence: Synthetic oligonucleotide
  Antisense strand to SEQ ID NO: 116430
cauuucaaugguggacuaa

SEQ ID NO: 116432 - RNA, 19 nt, Artificial Sequence
  Description of Artificial Sequence: Synthetic oligonucleotide
  Sense strand starting at position 3883 of SEQ ID NO: 1482
ugguaaauaagcugacuga

SEQ ID NO: 116433 - RNA, 19 nt, Artificial Sequence
  Description of Artificial Sequence: Synthetic oligonucleotide
  Antisense strand to SEQ ID NO: 116432
ucagucagcuuauuuacca

SEQ ID NO: 116434 - RNA, 19 nt, Artificial Sequence
  Description of Artificial Sequence: Synthetic oligonucleotide
  Sense strand starting at position 3819 of SEQ ID NO: 1482
ggaauucagccggacuugu

SEQ ID NO: 116435 - RNA, 19 nt, Artificial Sequence
  Description of Artificial Sequence: Synthetic oligonucleotide
  Antisense strand to SEQ ID NO: 116434
acaaguccggcugaauucc

SEQ ID NO: 116436 - RNA, 19 nt, Artificial Sequence
  Description of Artificial Sequence: Synthetic oligonucleotide
  Sense strand starting at position 3803 of SEQ ID NO: 1482
gaauauuccugagauagga

SEQ ID NO: 116437 - RNA, 19 nt, Artificial Sequence
  Description of Artificial Sequence: Synthetic oligonucleotide
  Antisense strand to SEQ ID NO: 116436
uccuaucucaggaauauuc

SEQ ID NO: 116438 - RNA, 19 nt, Artificial Sequence
  Description of Artificial Sequence: Synthetic oligonucleotide
  Sense strand starting at position 3799 of SEQ ID NO: 1482
ccuugaauauuccugagau

SEQ ID NO: 116439 - RNA, 19 nt, Artificial Sequence
  Description of Artificial Sequence: Synthetic oligonucleotide
  Antisense strand to SEQ ID NO: 116438
aucucaggaauauucaagg

SEQ ID NO: 116440 - RNA, 19 nt, Artificial Sequence
  Description of Artificial Sequence: Synthetic oligonucleotide
  Sense strand starting at position 3729 of SEQ ID NO: 1482
gcauaucucgauuauacua

SEQ ID NO: 116441 - RNA, 19 nt, Artificial Sequence
  Description of Artificial Sequence: Synthetic oligonucleotide
  Antisense strand to SEQ ID NO: 116440
uaguauaaucgagauaugc

SEQ ID NO: 116442 - RNA, 19 nt, Artificial Sequence
  Description of Artificial Sequence: Synthetic oligonucleotide
  Sense strand starting at position 3586 of SEQ ID NO: 1482
gaggacauauaugaggaau

SEQ ID NO: 116443 - RNA, 19 nt, Artificial Sequence
  Description of Artificial Sequence: Synthetic oligonucleotide
  Antisense strand to SEQ ID NO: 116442
auuccucauauauguccuc

SEQ ID NO: 116444 - RNA, 19 nt, Artificial Sequence
  Description of Artificial Sequence: Synthetic oligonucleotide
  Sense strand starting at position 3523 of SEQ ID NO: 1482
ugugucuaccuauggaaug

SEQ ID NO: 116445 - RNA, 19 nt, Artificial Sequence
  Description of Artificial Sequence: Synthetic oligonucleotide
  Antisense strand to SEQ ID NO: 116444
cauuccauagguagacaca

SEQ ID NO: 116446 - RNA, 19 nt, Artificial Sequence
  Description of Artificial Sequence: Synthetic oligonucleotide
  Sense strand starting at position 3520 of SEQ ID NO: 1482
auaugugucuaccuaugga

SEQ ID NO: 116447 - RNA, 19 nt, Artificial Sequence
  Description of Artificial Sequence: Synthetic oligonucleotide
  Antisense strand to SEQ ID NO: 116446
uccauagguagacacauau

SEQ ID NO: 116448 - RNA, 19 nt, Artificial Sequence
  Description of Artificial Sequence: Synthetic oligonucleotide
  Sense strand starting at position 3516 of SEQ ID NO: 1482
ucauauaugugucuaccua

SEQ ID NO: 116449 - RNA, 19 nt, Artificial Sequence
  Description of Artificial Sequence: Synthetic oligonucleotide
  Antisense strand to SEQ ID NO: 116448
uagguagacacauauauga

SEQ ID NO: 116450 - RNA, 19 nt, Artificial Sequence
  Description of Artificial Sequence: Synthetic oligonucleotide
  Sense strand starting at position 3336 of SEQ ID NO: 1482
ugcugacauuggucuauau

SEQ ID NO: 116451 - RNA, 19 nt, Artificial Sequence
  Description of Artificial Sequence: Synthetic oligonucleotide
  Antisense strand to SEQ ID NO: 116450
auauagaccaaugucagca

SEQ ID NO: 116452 - RNA, 19 nt, Artificial Sequence
  Description of Artificial Sequence: Synthetic oligonucleotide
  Sense strand starting at position 3299 of SEQ ID NO: 1482
uuuguuuggaaaugggaau

SEQ ID NO: 116453 - RNA, 19 nt, Artificial Sequence
  Description of Artificial Sequence: Synthetic oligonucleotide
  Antisense strand to SEQ ID NO: 116452
auucccauuuccaaacaaa

SEQ ID NO: 116454 - RNA, 19 nt, Artificial Sequence
  Description of Artificial Sequence: Synthetic oligonucleotide
  Sense strand starting at position 3175 of SEQ ID NO: 1482
aguagaauaagugguuuaa

SEQ ID NO: 116455 - RNA, 19 nt, Artificial Sequence
  Description of Artificial Sequence: Synthetic oligonucleotide
  Antisense strand to SEQ ID NO: 116454
uuaaaccacuuauucuacu

SEQ ID NO: 116456 - RNA, 19 nt, Artificial Sequence
  Description of Artificial Sequence: Synthetic oligonucleotide
  Sense strand starting at position 3164 of SEQ ID NO: 1482
aggccaaacucaguagaau

SEQ ID NO: 116457 - RNA, 19 nt, Artificial Sequence
  Description of Artificial Sequence: Synthetic oligonucleotide
  Antisense strand to SEQ ID NO: 116456
auucuacugaguuuggccu

SEQ ID NO: 116458 - RNA, 19 nt, Artificial Sequence
  Description of Artificial Sequence: Synthetic oligonucleotide
  Sense strand starting at position 3128 of SEQ ID NO: 1482
gagacaggaaugugucaua

SEQ ID NO: 116459 - RNA, 19 nt, Artificial Sequence
  Description of Artificial Sequence: Synthetic oligonucleotide
  Antisense strand to SEQ ID NO: 116458
uaugacacauuccugucuc

SEQ ID NO: 116460 - RNA, 19 nt, Artificial Sequence
  Description of Artificial Sequence: Synthetic oligonucleotide
  Sense strand starting at position 3062 of SEQ ID NO: 1482
uccugauauggcuaaacac

SEQ ID NO: 116461 - RNA, 19 nt, Artificial Sequence
  Description of Artificial Sequence: Synthetic oligonucleotide
  Antisense strand to SEQ ID NO: 116460
guguuuagccauaucagga

SEQ ID NO: 116462 - RNA, 19 nt, Artificial Sequence
  Description of Artificial Sequence: Synthetic oligonucleotide
  Sense strand starting at position 3043 of SEQ ID NO: 1482
ccaaauaggugcccaucaa

SEQ ID NO: 116463 - RNA, 19 nt, Artificial Sequence
  Description of Artificial Sequence: Synthetic oligonucleotide
  Antisense strand to SEQ ID NO: 116462
uugaugggcaccuauuugg

SEQ ID NO: 116464 - RNA, 19 nt, Artificial Sequence
  Description of Artificial Sequence: Synthetic oligonucleotide
  Sense strand starting at position 2956 of SEQ ID NO: 1482
cuggguauauaaucaauua

SEQ ID NO: 116465 - RNA, 19 nt, Artificial Sequence
  Description of Artificial Sequence: Synthetic oligonucleotide
  Antisense strand to SEQ ID NO: 116464
uaauugauuauauacccag

SEQ ID NO: 116466 - RNA, 19 nt, Artificial Sequence
  Description of Artificial Sequence: Synthetic oligonucleotide
  Sense strand starting at position 2949 of SEQ ID NO: 1482
gcaguuccuggguauauaa

SEQ ID NO: 116467 - RNA, 19 nt, Artificial Sequence
  Description of Artificial Sequence: Synthetic oligonucleotide
  Antisense strand to SEQ ID NO: 116466
uuauauacccaggaacugc

SEQ ID NO: 116468 - RNA, 19 nt, Artificial Sequence
  Description of Artificial Sequence: Synthetic oligonucleotide
  Sense strand starting at position 2948 of SEQ ID NO: 1482
agcaguuccuggguauaua

SEQ ID NO: 116469 - RNA, 19 nt, Artificial Sequence
  Description of Artificial Sequence: Synthetic oligonucleotide
  Antisense strand to SEQ ID NO: 116468
uauauacccaggaacugcu

SEQ ID NO: 116470 - RNA, 19 nt, Artificial Sequence
  Description of Artificial Sequence: Synthetic oligonucleotide
  Sense strand starting at position 2864 of SEQ ID NO: 1482
cuuccaauagagugcaaau

SEQ ID NO: 116471 - RNA, 19 nt, Artificial Sequence
  Description of Artificial Sequence: Synthetic oligonucleotide
  Antisense strand to SEQ ID NO: 116470
auuugcacucuauuggaag

SEQ ID NO: 116472 - RNA, 19 nt, Artificial Sequence
  Description of Artificial Sequence: Synthetic oligonucleotide
  Sense strand starting at position 2824 of SEQ ID NO: 1482
uuguguggaugauaaauuu

SEQ ID NO: 116473 - RNA, 19 nt, Artificial Sequence
  Description of Artificial Sequence: Synthetic oligonucleotide
  Antisense strand to SEQ ID NO: 116472
aaauuuaucauccacacaa

SEQ ID NO: 116474 - RNA, 19 nt, Artificial Sequence
  Description of Artificial Sequence: Synthetic oligonucleotide
  Sense strand starting at position 2686 of SEQ ID NO: 1482
ugaacuaugcuauguuaau

SEQ ID NO: 116475 - RNA, 19 nt, Artificial Sequence
  Description of Artificial Sequence: Synthetic oligonucleotide
  Antisense strand to SEQ ID NO: 116474
auuaacauagcauaguuca

SEQ ID NO: 116476 - RNA, 19 nt, Artificial Sequence
  Description of Artificial Sequence: Synthetic oligonucleotide
  Sense strand starting at position 2601 of SEQ ID NO: 1482
uaucauagauguguagaag

SEQ ID NO: 116477 - RNA, 19 nt, Artificial Sequence
  Description of Artificial Sequence: Synthetic oligonucleotide
  Antisense strand to SEQ ID NO: 116476
cuucuacacaucuaugaua

SEQ ID NO: 116478 - RNA, 19 nt, Artificial Sequence
  Description of Artificial Sequence: Synthetic oligonucleotide
  Sense strand starting at position 2600 of SEQ ID NO: 1482
guaucauagauguguagaa

SEQ ID NO: 116479 - RNA, 19 nt, Artificial Sequence
  Description of Artificial Sequence: Synthetic oligonucleotide
  Antisense strand to SEQ ID NO: 116478
uucuacacaucuaugauac

SEQ ID NO: 116480 - RNA, 19 nt, Artificial Sequence
  Description of Artificial Sequence: Synthetic oligonucleotide
  Sense strand starting at position 2598 of SEQ ID NO: 1482
acguaucauagauguguag

SEQ ID NO: 116481 - RNA, 19 nt, Artificial Sequence
  Description of Artificial Sequence: Synthetic oligonucleotide
  Antisense strand to SEQ ID NO: 116480
cuacacaucuaugauacgu

SEQ ID NO: 116482 - RNA, 19 nt, Artificial Sequence
  Description of Artificial Sequence: Synthetic oligonucleotide
  Sense strand starting at position 2596 of SEQ ID NO: 1482
acacguaucauagaugugu

SEQ ID NO: 116483 - RNA, 19 nt, Artificial Sequence
  Description of Artificial Sequence: Synthetic oligonucleotide
  Antisense strand to SEQ ID NO: 116482
acacaucuaugauacgugu

SEQ ID NO: 116484 - RNA, 19 nt, Artificial Sequence
  Description of Artificial Sequence: Synthetic oligonucleotide
  Sense strand starting at position 2553 of SEQ ID NO: 1482
acacauauguguguaaacu

SEQ ID NO: 116485 - RNA, 19 nt, Artificial Sequence
  Description of Artificial Sequence: Synthetic oligonucleotide
  Antisense strand to SEQ ID NO: 116484
aguuuacacacauaugugu

SEQ ID NO: 116486 - RNA, 19 nt, Artificial Sequence
  Description of Artificial Sequence: Synthetic oligonucleotide
  Sense strand starting at position 2524 of SEQ ID NO: 1482
uguguacagcaauacauau

SEQ ID NO: 116487 - RNA, 19 nt, Artificial Sequence
  Description of Artificial Sequence: Synthetic oligonucleotide
  Antisense strand to SEQ ID NO: 116486
auauguauugcuguacaca

SEQ ID NO: 116488 - RNA, 19 nt, Artificial Sequence
  Description of Artificial Sequence: Synthetic oligonucleotide
  Sense strand starting at position 2521 of SEQ ID NO: 1482
guauguguacagcaauaca

SEQ ID NO: 116489 - RNA, 19 nt, Artificial Sequence
  Description of Artificial Sequence: Synthetic oligonucleotide
  Antisense strand to SEQ ID NO: 116488
uguauugcuguacacauac

SEQ ID NO: 116490 - RNA, 19 nt, Artificial Sequence
  Description of Artificial Sequence: Synthetic oligonucleotide
  Sense strand starting at position 2518 of SEQ ID NO: 1482
uauguauguguacagcaau

SEQ ID NO: 116491 - RNA, 19 nt, Artificial Sequence
  Description of Artificial Sequence: Synthetic oligonucleotide
  Antisense strand to SEQ ID NO: 116490
auugcuguacacauacaua

SEQ ID NO: 116492 - RNA, 19 nt, Artificial Sequence
  Description of Artificial Sequence: Synthetic oligonucleotide
  Sense strand starting at position 2144 of SEQ ID NO: 1482
cuguuacugggaugcaaau

SEQ ID NO: 116493 - RNA, 19 nt, Artificial Sequence
  Description of Artificial Sequence: Synthetic oligonucleotide
  Antisense strand to SEQ ID NO: 116492
auuugcaucccaguaacag

SEQ ID NO: 116494 - RNA, 19 nt, Artificial Sequence
  Description of Artificial Sequence: Synthetic oligonucleotide
  Sense strand starting at position 2076 of SEQ ID NO: 1482
ggcaacuaucuacauguuu

SEQ ID NO: 116495 - RNA, 19 nt, Artificial Sequence
  Description of Artificial Sequence: Synthetic oligonucleotide
  Antisense strand to SEQ ID NO: 116494
aaacauguagauaguugcc

SEQ ID NO: 116496 - RNA, 19 nt, Artificial Sequence
  Description of Artificial Sequence: Synthetic oligonucleotide
  Sense strand starting at position 2065 of SEQ ID NO: 1482
cuuacauguuuggcaacua

SEQ ID NO: 116497 - RNA, 19 nt, Artificial Sequence
  Description of Artificial Sequence: Synthetic oligonucleotide
  Antisense strand to SEQ ID NO: 116496
uaguugccaaacauguaag

SEQ ID NO: 116498 - RNA, 19 nt, Artificial Sequence
  Description of Artificial Sequence: Synthetic oligonucleotide
  Sense strand starting at position 979 of SEQ ID NO: 1482
guuguuaaugcucaaucaa

SEQ ID NO: 116499 - RNA, 19 nt, Artificial Sequence
  Description of Artificial Sequence: Synthetic oligonucleotide
  Antisense strand to SEQ ID NO: 116498
uugauugagcauuaacaac

SEQ ID NO: 116500 - RNA, 19 nt, Artificial Sequence
  Description of Artificial Sequence: Synthetic oligonucleotide
  Sense strand starting at position 759 of SEQ ID NO: 1482
agguuaaauguuuaaguag

SEQ ID NO: 116501 - RNA, 19 nt, Artificial Sequence
  Description of Artificial Sequence: Synthetic oligonucleotide
  Antisense strand to SEQ ID NO: 116500
cuacuuaaacauuuaaccu

SEQ ID NO: 116502 - RNA, 19 nt, Artificial Sequence
  Description of Artificial Sequence: Synthetic oligonucleotide
  Sense strand starting at position 758 of SEQ ID NO: 1482
gagguuaaauguuuaagua

SEQ ID NO: 116503 - RNA, 19 nt, Artificial Sequence
  Description of Artificial Sequence: Synthetic oligonucleotide
  Antisense strand to SEQ ID NO: 116502
uacuuaaacauuuaaccuc

SEQ ID NO: 116504 - RNA, 19 nt, Artificial Sequence
  Description of Artificial Sequence: Synthetic oligonucleotide
  Sense strand starting at position 751 of SEQ ID NO: 1482
uuaucuugagguuaaaugu

SEQ ID NO: 116505 - RNA, 19 nt, Artificial Sequence
  Description of Artificial Sequence: Synthetic oligonucleotide
  Antisense strand to SEQ ID NO: 116504
acauuuaaccucaagauaa

SEQ ID NO: 116506 - RNA, 19 nt, Artificial Sequence
  Description of Artificial Sequence: Synthetic oligonucleotide
  Sense strand starting at position 576 of SEQ ID NO: 1482
aaauuaaguuugccgauca

SEQ ID NO: 116507 - RNA, 19 nt, Artificial Sequence
  Description of Artificial Sequence: Synthetic oligonucleotide
  Antisense strand to SEQ ID NO: 116506
ugaucggcaaacuuaauuu

SEQ ID NO: 116508 - RNA, 19 nt, Artificial Sequence
  Description of Artificial Sequence: Synthetic oligonucleotide
  Sense strand starting at position 575 of SEQ ID NO: 1482
gaaauuaaguuugccgauc

SEQ ID NO: 116509 - RNA, 19 nt, Artificial Sequence
  Description of Artificial Sequence: Synthetic oligonucleotide
  Antisense strand to SEQ ID NO: 116508
gaucggcaaacuuaauuuc

SEQ ID NO: 116510 - RNA, 19 nt, Artificial Sequence
  Description of Artificial Sequence: Synthetic oligonucleotide
  Sense strand starting at position 574 of SEQ ID NO: 1482
agaaauuaaguuugccgau

SEQ ID NO: 116511 - RNA, 19 nt, Artificial Sequence
  Description of Artificial Sequence: Synthetic oligonucleotide
  Antisense strand to SEQ ID NO: 116510
aucggcaaacuuaauuucu

SEQ ID NO: 116512 - RNA, 19 nt, Artificial Sequence
  Description of Artificial Sequence: Synthetic oligonucleotide
  Sense strand starting at position 878 of SEQ ID NO: 1483
gaacuuugucgcuauggga

SEQ ID NO: 116513 - RNA, 19 nt, Artificial Sequence
  Description of Artificial Sequence: Synthetic oligonucleotide
  Antisense strand to SEQ ID NO: 116512
ucccauagcgacaaaguuc

SEQ ID NO: 116514 - RNA, 19 nt, Artificial Sequence
  Description of Artificial Sequence: Synthetic oligonucleotide
  Sense strand starting at position 912 of SEQ ID NO: 1483
caggaagugagauguuuga

SEQ ID NO: 116515 - RNA, 19 nt, Artificial Sequence
  Description of Artificial Sequence: Synthetic oligonucleotide
  Antisense strand to SEQ ID NO: 116514
ucaaacaucucacuuccug

SEQ ID NO: 116516 - RNA, 19 nt, Artificial Sequence
  Description of Artificial Sequence: Synthetic oligonucleotide
  Sense strand starting at position 916 of SEQ ID NO: 1483
aagugagauguuugaagac

SEQ ID NO: 116517 - RNA, 19 nt, Artificial Sequence
  Description of Artificial Sequence: Synthetic oligonucleotide
  Antisense strand to SEQ ID NO: 116516
gucuucaaacaucucacuu

SEQ ID NO: 116518 - RNA, 19 nt, Artificial Sequence
  Description of Artificial Sequence: Synthetic oligonucleotide
  Sense strand starting at position 944 of SEQ ID NO: 1483
gagcucucuggguauuaac

SEQ ID NO: 116519 - RNA, 19 nt, Artificial Sequence
  Description of Artificial Sequence: Synthetic oligonucleotide
  Antisense strand to SEQ ID NO: 116518
guuaauacccagagagcuc

SEQ ID NO: 116520 - RNA, 19 nt, Artificial Sequence
  Description of Artificial Sequence: Synthetic oligonucleotide
  Sense strand starting at position 954 of SEQ ID NO: 1483
gguauuaacuccuuaagug

SEQ ID NO: 116521 - RNA, 19 nt, Artificial Sequence
  Description of Artificial Sequence: Synthetic oligonucleotide
  Antisense strand to SEQ ID NO: 116520
cacuuaaggaguuaauacc

SEQ ID NO: 116522 - RNA, 19 nt, Artificial Sequence
  Description of Artificial Sequence: Synthetic oligonucleotide
  Sense strand starting at position 955 of SEQ ID NO: 1483
guauuaacuccuuaaguga

SEQ ID NO: 116523 - RNA, 19 nt, Artificial Sequence
  Description of Artificial Sequence: Synthetic oligonucleotide
  Antisense strand to SEQ ID NO: 116522
ucacuuaaggaguuaauac

SEQ ID NO: 116524 - RNA, 19 nt, Artificial Sequence
  Description of Artificial Sequence: Synthetic oligonucleotide
  Sense strand starting at position 969 of SEQ ID NO: 1483
agugaaagaugcucugagu

SEQ ID NO: 116525 - RNA, 19 nt, Artificial Sequence
  Description of Artificial Sequence: Synthetic oligonucleotide
  Antisense strand to SEQ ID NO: 116524
acucagagcaucuuucacu

SEQ ID NO: 116526 - RNA, 19 nt, Artificial Sequence
  Description of Artificial Sequence: Synthetic oligonucleotide
  Sense strand starting at position 977 of SEQ ID NO: 1483
augcucugagugcacaaua

SEQ ID NO: 116527 - RNA, 19 nt, Artificial Sequence
  Description of Artificial Sequence: Synthetic oligonucleotide
  Antisense strand to SEQ ID NO: 116526
uauugugcacucagagcau

SEQ ID NO: 116528 - RNA, 19 nt, Artificial Sequence
  Description of Artificial Sequence: Synthetic oligonucleotide
  Sense strand starting at position 997 of SEQ ID NO: 1483
acuugugcuguguucuuua

SEQ ID NO: 116529 - RNA, 19 nt, Artificial Sequence
  Description of Artificial Sequence: Synthetic oligonucleotide
  Antisense strand to SEQ ID NO: 116528
uaaagaacacagcacaagu

SEQ ID NO: 116530 - RNA, 19 nt, Artificial Sequence
  Description of Artificial Sequence: Synthetic oligonucleotide
  Sense strand starting at position 999 of SEQ ID NO: 1483
uugugcuguguucuuuaau

SEQ ID NO: 116531 - RNA, 19 nt, Artificial Sequence
  Description of Artificial Sequence: Synthetic oligonucleotide
  Antisense strand to SEQ ID NO: 116530
auuaaagaacacagcacaa

SEQ ID NO: 116532 - RNA, 19 nt, Artificial Sequence
  Description of Artificial Sequence: Synthetic oligonucleotide
  Sense strand starting at position 1006 of SEQ ID NO: 1483
guguucuuuaauugaugga

SEQ ID NO: 116533 - RNA, 19 nt, Artificial Sequence
  Description of Artificial Sequence: Synthetic oligonucleotide
  Antisense strand to SEQ ID NO: 116532
uccaucaauuaaagaacac

SEQ ID NO: 116534 - RNA, 19 nt, Artificial Sequence
  Description of Artificial Sequence: Synthetic oligonucleotide
  Sense strand starting at position 2317 of SEQ ID NO: 1483
agacauuaaguaugugaga

SEQ ID NO: 116535 - RNA, 19 nt, Artificial Sequence
  Description of Artificial Sequence: Synthetic oligonucleotide
  Antisense strand to SEQ ID NO: 116534
ucucacauacuuaaugucu

SEQ ID NO: 116536 - RNA, 19 nt, Artificial Sequence
  Description of Artificial Sequence: Synthetic oligonucleotide
  Sense strand starting at position 2318 of SEQ ID NO: 1483
gacauuaaguaugugagaa

SEQ ID NO: 116537 - RNA, 19 nt, Artificial Sequence
  Description of Artificial Sequence: Synthetic oligonucleotide
  Antisense strand to SEQ ID NO: 116536
uucucacauacuuaauguc

SEQ ID NO: 116538 - RNA, 19 nt, Artificial Sequence
  Description of Artificial Sequence: Synthetic oligonucleotide
  Sense strand starting at position 2319 of SEQ ID NO: 1483
acauuaaguaugugagaag

SEQ ID NO: 116539 - RNA, 19 nt, Artificial Sequence
  Description of Artificial Sequence: Synthetic oligonucleotide
  Antisense strand to SEQ ID NO: 116538
cuucucacauacuuaaugu

SEQ ID NO: 116540 - RNA, 19 nt, Artificial Sequence
  Description of Artificial Sequence: Synthetic oligonucleotide
  Sense strand starting at position 2339 of SEQ ID NO: 1483
auaccucacgaaugacaau

SEQ ID NO: 116541 - RNA, 19 nt, Artificial Sequence
  Description of Artificial Sequence: Synthetic oligonucleotide
  Antisense strand to SEQ ID NO: 116540
auugucauucgugagguau

SEQ ID NO: 116542 - RNA, 19 nt, Artificial Sequence
  Description of Artificial Sequence: Synthetic oligonucleotide
  Sense strand starting at position 2351 of SEQ ID NO: 1483
ugacaauuauguuccaggu

SEQ ID NO: 116543 - RNA, 19 nt, Artificial Sequence
  Description of Artificial Sequence: Synthetic oligonucleotide
  Antisense strand to SEQ ID NO: 116542
accuggaacauaauuguca

SEQ ID NO: 116544 - RNA, 19 nt, Artificial Sequence
  Description of Artificial Sequence: Synthetic oligonucleotide
  Sense strand starting at position 2355 of SEQ ID NO: 1483
aauuauguuccagguagag

SEQ ID NO: 116545 - RNA, 19 nt, Artificial Sequence
  Description of Artificial Sequence: Synthetic oligonucleotide
  Antisense strand to SEQ ID NO: 116544
cucuaccuggaacauaauu

SEQ ID NO: 116546 - RNA, 19 nt, Artificial Sequence
  Description of Artificial Sequence: Synthetic oligonucleotide
  Sense strand starting at position 2398 of SEQ ID NO: 1483
ccgucagaguguuugauuu

SEQ ID NO: 116547 - RNA, 19 nt, Artificial Sequence
  Description of Artificial Sequence: Synthetic oligonucleotide
  Antisense strand to SEQ ID NO: 116546
aaaucaaacacucugacgg

SEQ ID NO: 116548 - RNA, 19 nt, Artificial Sequence
  Description of Artificial Sequence: Synthetic oligonucleotide
  Sense strand starting at position 2405 of SEQ ID NO: 1483
aguguuugauuucucucua

SEQ ID NO: 116549 - RNA, 19 nt, Artificial Sequence
  Description of Artificial Sequence: Synthetic oligonucleotide
  Antisense strand to SEQ ID NO: 116548
uagagagaaaucaaacacu

SEQ ID NO: 116550 - RNA, 19 nt, Artificial Sequence
  Description of Artificial Sequence: Synthetic oligonucleotide
  Sense strand starting at position 2542 of SEQ ID NO: 1483
gcuguauugauaggaccac

SEQ ID NO: 116551 - RNA, 19 nt, Artificial Sequence
  Description of Artificial Sequence: Synthetic oligonucleotide
  Antisense strand to SEQ ID NO: 116550
gugguccuaucaauacagc

SEQ ID NO: 116552 - RNA, 19 nt, Artificial Sequence
  Description of Artificial Sequence: Synthetic oligonucleotide
  Sense strand starting at position 2603 of SEQ ID NO: 1483
ugcugaucuccgcugucau

SEQ ID NO: 116553 - RNA, 19 nt, Artificial Sequence
  Description of Artificial Sequence: Synthetic oligonucleotide
  Antisense strand to SEQ ID NO: 116552
augacagcggagaucagca

SEQ ID NO: 116554 - RNA, 19 nt, Artificial Sequence
  Description of Artificial Sequence: Synthetic oligonucleotide
  Sense strand starting at position 2690 of SEQ ID NO: 1483
gagucucuggaguggaaga

SEQ ID NO: 116555 - RNA, 19 nt, Artificial Sequence
  Description of Artificial Sequence: Synthetic oligonucleotide
  Antisense strand to SEQ ID NO: 116554
ucuuccacuccagagacuc

SEQ ID NO: 116556 - RNA, 19 nt, Artificial Sequence
  Description of Artificial Sequence: Synthetic oligonucleotide
  Sense strand starting at position 2732 of SEQ ID NO: 1483
cccugaauaggucauggua

SEQ ID NO: 116557 - RNA, 19 nt, Artificial Sequence
  Description of Artificial Sequence: Synthetic oligonucleotide
  Antisense strand to SEQ ID NO: 116556
uaccaugaccuauucaggg

SEQ ID NO: 116558 - RNA, 19 nt, Artificial Sequence
  Description of Artificial Sequence: Synthetic oligonucleotide
  Sense strand starting at position 2740 of SEQ ID NO: 1483
aggucaugguaguuaauga

SEQ ID NO: 116559 - RNA, 19 nt, Artificial Sequence
  Description of Artificial Sequence: Synthetic oligonucleotide
  Antisense strand to SEQ ID NO: 116558
ucauuaacuaccaugaccu

SEQ ID NO: 116560 - RNA, 19 nt, Artificial Sequence
  Description of Artificial Sequence: Synthetic oligonucleotide
  Sense strand starting at position 2798 of SEQ ID NO: 1483
cuugauuggcgugagaaag

SEQ ID NO: 116561 - RNA, 19 nt, Artificial Sequence
  Description of Artificial Sequence: Synthetic oligonucleotide
  Antisense strand to SEQ ID NO: 116560
cuuucucacgccaaucaag

SEQ ID NO: 116562 - RNA, 19 nt, Artificial Sequence
  Description of Artificial Sequence: Synthetic oligonucleotide
  Sense strand starting at position 2823 of SEQ ID NO: 1483
ccuggaauugucuacggaa

SEQ ID NO: 116563 - RNA, 19 nt, Artificial Sequence
  Description of Artificial Sequence: Synthetic oligonucleotide
  Antisense strand to SEQ ID NO: 116562
uuccguagacaauuccagg

SEQ ID NO: 116564 - RNA, 19 nt, Artificial Sequence
  Description of Artificial Sequence: Synthetic oligonucleotide
  Sense strand starting at position 2825 of SEQ ID NO: 1483
uggaauugucuacggaaag

SEQ ID NO: 116565 - RNA, 19 nt, Artificial Sequence
  Description of Artificial Sequence: Synthetic oligonucleotide
  Antisense strand to SEQ ID NO: 116564
cuuuccguagacaauucca

SEQ ID NO: 116566 - RNA, 19 nt, Artificial Sequence
  Description of Artificial Sequence: Synthetic oligonucleotide
  Sense strand starting at position 2903 of SEQ ID NO: 1483
ugcacaauuucuuugccga

SEQ ID NO: 116567 - RNA, 19 nt, Artificial Sequence
  Description of Artificial Sequence: Synthetic oligonucleotide
  Antisense strand to SEQ ID NO: 116566
ucggcaaagaaauugugca

SEQ ID NO: 116568 - RNA, 19 nt, Artificial Sequence
  Description of Artificial Sequence: Synthetic oligonucleotide
  Sense strand starting at position 2904 of SEQ ID NO: 1483
gcacaauuucuuugccgag

SEQ ID NO: 116569 - RNA, 19 nt, Artificial Sequence
  Description of Artificial Sequence: Synthetic oligonucleotide
  Antisense strand to SEQ ID NO: 116568
cucggcaaagaaauugugc

SEQ ID NO: 116570 - RNA, 19 nt, Artificial Sequence
  Description of Artificial Sequence: Synthetic oligonucleotide
  Sense strand starting at position 2906 of SEQ ID NO: 1483
acaauuucuuugccgagca

SEQ ID NO: 116571 - RNA, 19 nt, Artificial Sequence
  Description of Artificial Sequence: Synthetic oligonucleotide
  Antisense strand to SEQ ID NO: 116570
ugcucggcaaagaaauugu

SEQ ID NO: 116572 - RNA, 19 nt, Artificial Sequence
  Description of Artificial Sequence: Synthetic oligonucleotide
  Sense strand starting at position 2928 of SEQ ID NO: 1483
gucaccucucagugauaga

SEQ ID NO: 116573 - RNA, 19 nt, Artificial Sequence
  Description of Artificial Sequence: Synthetic oligonucleotide
  Antisense strand to SEQ ID NO: 116572
ucuaucacugagaggugac

SEQ ID NO: 116574 - RNA, 19 nt, Artificial Sequence
  Description of Artificial Sequence: Synthetic oligonucleotide
  Sense strand starting at position 3093 of SEQ ID NO: 1483
gauguuaugcuccaugaua

SEQ ID NO: 116575 - RNA, 19 nt, Artificial Sequence
  Description of Artificial Sequence: Synthetic oligonucleotide
  Antisense strand to SEQ ID NO: 116574
uaucauggagcauaacauc

SEQ ID NO: 116576 - RNA, 19 nt, Artificial Sequence
  Description of Artificial Sequence: Synthetic oligonucleotide
  Sense strand starting at position 3175 of SEQ ID NO: 1483
gcagauaauuuaugaagga

SEQ ID NO: 116577 - RNA, 19 nt, Artificial Sequence
  Description of Artificial Sequence: Synthetic oligonucleotide
  Antisense strand to SEQ ID NO: 116576
uccuucauaaauuaucugc

SEQ ID NO: 116578 - RNA, 19 nt, Artificial Sequence
  Description of Artificial Sequence: Synthetic oligonucleotide
  Sense strand starting at position 3297 of SEQ ID NO: 1483
ucugaagaacucuacuguu

SEQ ID NO: 116579 - RNA, 19 nt, Artificial Sequence
  Description of Artificial Sequence: Synthetic oligonucleotide
  Antisense strand to SEQ ID NO: 116578
aacaguagaguucuucaga

SEQ ID NO: 116580 - RNA, 19 nt, Artificial Sequence
  Description of Artificial Sequence: Synthetic oligonucleotide
  Sense strand starting at position 3305 of SEQ ID NO: 1483
acucuacuguuacuggaaa

SEQ ID NO: 116581 - RNA, 19 nt, Artificial Sequence
  Description of Artificial Sequence: Synthetic oligonucleotide
  Antisense strand to SEQ ID NO: 116580
uuuccaguaacaguagagu

SEQ ID NO: 116582 - RNA, 19 nt, Artificial Sequence
  Description of Artificial Sequence: Synthetic oligonucleotide
  Sense strand starting at position 3503 of SEQ ID NO: 1483
ugaucuuaucucuaacgag

SEQ ID NO: 116583 - RNA, 19 nt, Artificial Sequence
  Description of Artificial Sequence: Synthetic oligonucleotide
  Antisense strand to SEQ ID NO: 116582
cucguuagagauaagauca

SEQ ID NO: 116584 - RNA, 19 nt, Artificial Sequence
  Description of Artificial Sequence: Synthetic oligonucleotide
  Sense strand starting at position 3677 of SEQ ID NO: 1483
gggagaaguuguagggaua

SEQ ID NO: 116585 - RNA, 19 nt, Artificial Sequence
  Description of Artificial Sequence: Synthetic oligonucleotide
  Antisense strand to SEQ ID NO: 116584
uaucccuacaacuucuccc

SEQ ID NO: 116586 - RNA, 19 nt, Artificial Sequence
  Description of Artificial Sequence: Synthetic oligonucleotide
  Sense strand starting at position 3754 of SEQ ID NO: 1483
ggcaauuuauaauaaagac

SEQ ID NO: 116587 - RNA, 19 nt, Artificial Sequence
  Description of Artificial Sequence: Synthetic oligonucleotide
  Antisense strand to SEQ ID NO: 116586
gucuuuauuauaaauugcc

SEQ ID NO: 116588 - RNA, 19 nt, Artificial Sequence
  Description of Artificial Sequence: Synthetic oligonucleotide
  Sense strand starting at position 3827 of SEQ ID NO: 1483
cuuaauaucucagcaaggu

SEQ ID NO: 116589 - RNA, 19 nt, Artificial Sequence
  Description of Artificial Sequence: Synthetic oligonucleotide
  Antisense strand to SEQ ID NO: 116588
accuugcugagauauuaag

SEQ ID NO: 116590 - RNA, 19 nt, Artificial Sequence
  Description of Artificial Sequence: Synthetic oligonucleotide
  Sense strand starting at position 3828 of SEQ ID NO: 1483
uuaauaucucagcaagguc

SEQ ID NO: 116591 - RNA, 19 nt, Artificial Sequence
  Description of Artificial Sequence: Synthetic oligonucleotide
  Antisense strand to SEQ ID NO: 116590
gaccuugcugagauauuaa

SEQ ID NO: 116592 - RNA, 19 nt, Artificial Sequence
  Description of Artificial Sequence: Synthetic oligonucleotide
  Sense strand starting at position 136 of SEQ ID NO: 1484
aaagaaguggucgaugcaa

SEQ ID NO: 116593 - RNA, 19 nt, Artificial Sequence
  Description of Artificial Sequence: Synthetic oligonucleotide
  Antisense strand to SEQ ID NO: 116592
uugcaucgaccacuucuuu

SEQ ID NO: 116594 - RNA, 19 nt, Artificial Sequence
  Description of Artificial Sequence: Synthetic oligonucleotide
  Sense strand starting at position 261 of SEQ ID NO: 1484
gcauaaugacaguguaaug

SEQ ID NO: 116595 - RNA, 19 nt, Artificial Sequence
  Description of Artificial Sequence: Synthetic oligonucleotide
  Antisense strand to SEQ ID NO: 116594
cauuacacugucauuaugc

SEQ ID NO: 116596 - RNA, 19 nt, Artificial Sequence
  Description of Artificial Sequence: Synthetic oligonucleotide
  Sense strand starting at position 423 of SEQ ID NO: 1484
ccaggagcugugggacaau

SEQ ID NO: 116597 - RNA, 19 nt, Artificial Sequence
  Description of Artificial Sequence: Synthetic oligonucleotide
  Antisense strand to SEQ ID NO: 116596
auugucccacagcuccugg

SEQ ID NO: 116598 - RNA, 19 nt, Artificial Sequence
  Description of Artificial Sequence: Synthetic oligonucleotide
  Sense strand starting at position 507 of SEQ ID NO: 1484
ggugcacaucuguauggga

SEQ ID NO: 116599 - RNA, 19 nt, Artificial Sequence
  Description of Artificial Sequence: Synthetic oligonucleotide
  Antisense strand to SEQ ID NO: 116598
ucccauacagaugugcacc

SEQ ID NO: 116600 - RNA, 19 nt, Artificial Sequence
  Description of Artificial Sequence: Synthetic oligonucleotide
  Sense strand starting at position 509 of SEQ ID NO: 1484
ugcacaucuguaugggaga

SEQ ID NO: 116601 - RNA, 19 nt, Artificial Sequence
  Description of Artificial Sequence: Synthetic oligonucleotide
  Antisense strand to SEQ ID NO: 116600
ucucccauacagaugugca

SEQ ID NO: 116602 - RNA, 19 nt, Artificial Sequence
  Description of Artificial Sequence: Synthetic oligonucleotide
  Sense strand starting at position 547 of SEQ ID NO: 1484
gcccaagaucgauaccaug

SEQ ID NO: 116603 - RNA, 19 nt, Artificial Sequence
  Description of Artificial Sequence: Synthetic oligonucleotide
  Antisense strand to SEQ ID NO: 116602
caugguaucgaucuugggc

SEQ ID NO: 116604 - RNA, 19 nt, Artificial Sequence
  Description of Artificial Sequence: Synthetic oligonucleotide
  Sense strand starting at position 588 of SEQ ID NO: 1484
agaggacaguuucuaguga

SEQ ID NO: 116605 - RNA, 19 nt, Artificial Sequence
  Description of Artificial Sequence: Synthetic oligonucleotide
  Antisense strand to SEQ ID NO: 116604
ucacuagaaacuguccucu

SEQ ID NO: 116606 - RNA, 19 nt, Artificial Sequence
  Description of Artificial Sequence: Synthetic oligonucleotide
  Sense strand starting at position 727 of SEQ ID NO: 1484
gggcaugagacaugaagca

SEQ ID NO: 116607 - RNA, 19 nt, Artificial Sequence
  Description of Artificial Sequence: Synthetic oligonucleotide
  Antisense strand to SEQ ID NO: 116606
ugcuucaugucucaugccc

SEQ ID NO: 116608 - RNA, 19 nt, Artificial Sequence
  Description of Artificial Sequence: Synthetic oligonucleotide
  Sense strand starting at position 1004 of SEQ ID NO: 1484
gccaacuuggacuguauaa

SEQ ID NO: 116609 - RNA, 19 nt, Artificial Sequence
  Description of Artificial Sequence: Synthetic oligonucleotide
  Antisense strand to SEQ ID NO: 116608
uuauacaguccaaguuggc

SEQ ID NO: 116610 - RNA, 19 nt, Artificial Sequence
  Description of Artificial Sequence: Synthetic oligonucleotide
  Sense strand starting at position 1666 of SEQ ID NO: 1484
accuuacuggauuguagau

SEQ ID NO: 116611 - RNA, 19 nt, Artificial Sequence
  Description of Artificial Sequence: Synthetic oligonucleotide
  Antisense strand to SEQ ID NO: 116610
aucuacaauccaguaaggu

SEQ ID NO: 116612 - RNA, 19 nt, Artificial Sequence
  Description of Artificial Sequence: Synthetic oligonucleotide
  Sense strand starting at position 1707 of SEQ ID NO: 1484
ggucuuauugcauaccaag

SEQ ID NO: 116613 - RNA, 19 nt, Artificial Sequence
  Description of Artificial Sequence: Synthetic oligonucleotide
  Antisense strand to SEQ ID NO: 116612
cuugguaugcaauaagacc

SEQ ID NO: 116614 - RNA, 19 nt, Artificial Sequence
  Description of Artificial Sequence: Synthetic oligonucleotide
  Sense strand starting at position 1792 of SEQ ID NO: 1484
ucaguccaucaguauuaga

SEQ ID NO: 116615 - RNA, 19 nt, Artificial Sequence
  Description of Artificial Sequence: Synthetic oligonucleotide
  Antisense strand to SEQ ID NO: 116614
ucuaauacugauggacuga

SEQ ID NO: 116616 - RNA, 19 nt, Artificial Sequence
  Description of Artificial Sequence: Synthetic oligonucleotide
  Sense strand starting at position 1878 of SEQ ID NO: 1484
augggaaguuucucuugua

SEQ ID NO: 116617 - RNA, 19 nt, Artificial Sequence
  Description of Artificial Sequence: Synthetic oligonucleotide
  Antisense strand to SEQ ID NO: 116616
uacaagagaaacuucccau

SEQ ID NO: 116618 - RNA, 19 nt, Artificial Sequence
  Description of Artificial Sequence: Synthetic oligonucleotide
  Sense strand starting at position 1899 of SEQ ID NO: 1484
uuuggauucucaucugaag

SEQ ID NO: 116619 - RNA, 19 nt, Artificial Sequence
  Description of Artificial Sequence: Synthetic oligonucleotide
  Antisense strand to SEQ ID NO: 116618
cuucagaugagaauccaaa

SEQ ID NO: 116620 - RNA, 19 nt, Artificial Sequence
  Description of Artificial Sequence: Synthetic oligonucleotide
  Sense strand starting at position 2364 of SEQ ID NO: 1484
cucgcuccacuagaucaua

SEQ ID NO: 116621 - RNA, 19 nt, Artificial Sequence
  Description of Artificial Sequence: Synthetic oligonucleotide
  Antisense strand to SEQ ID NO: 116620
uaugaucuaguggagcgag

SEQ ID NO: 116622 - RNA, 19 nt, Artificial Sequence
  Description of Artificial Sequence: Synthetic oligonucleotide
  Sense strand starting at position 2443 of SEQ ID NO: 1484
gugucugauacacaguagu

SEQ ID NO: 116623 - RNA, 19 nt, Artificial Sequence
  Description of Artificial Sequence: Synthetic oligonucleotide
  Antisense strand to SEQ ID NO: 116622
acuacuguguaucagacac

SEQ ID NO: 116624 - RNA, 19 nt, Artificial Sequence
  Description of Artificial Sequence: Synthetic oligonucleotide
  Sense strand starting at position 2454 of SEQ ID NO: 1484
acaguagucccuuaaucaa

SEQ ID NO: 116625 - RNA, 19 nt, Artificial Sequence
  Description of Artificial Sequence: Synthetic oligonucleotide
  Antisense strand to SEQ ID NO: 116624
uugauuaagggacuacugu

SEQ ID NO: 116626 - RNA, 19 nt, Artificial Sequence
  Description of Artificial Sequence: Synthetic oligonucleotide
  Sense strand starting at position 2457 of SEQ ID NO: 1484
guagucccuuaaucaauau

SEQ ID NO: 116627 - RNA, 19 nt, Artificial Sequence
  Description of Artificial Sequence: Synthetic oligonucleotide
  Antisense strand to SEQ ID NO: 116626
auauugauuaagggacuac

SEQ ID NO: 116628 - RNA, 19 nt, Artificial Sequence
  Description of Artificial Sequence: Synthetic oligonucleotide
  Sense strand starting at position 2478 of SEQ ID NO: 1484
auggacgugcaucaugaaa

SEQ ID NO: 116629 - RNA, 19 nt, Artificial Sequence
  Description of Artificial Sequence: Synthetic oligonucleotide
  Antisense strand to SEQ ID NO: 116628
uuucaugaugcacguccau

SEQ ID NO: 116630 - RNA, 19 nt, Artificial Sequence
  Description of Artificial Sequence: Synthetic oligonucleotide
  Sense strand starting at position 2492 of SEQ ID NO: 1484
ugaaacagguugcuagaaa

SEQ ID NO: 116631 - RNA, 19 nt, Artificial Sequence
  Description of Artificial Sequence: Synthetic oligonucleotide
  Antisense strand to SEQ ID NO: 116630
uuucuagcaaccuguuuca

SEQ ID NO: 116632 - RNA, 19 nt, Artificial Sequence
  Description of Artificial Sequence: Synthetic oligonucleotide
  Sense strand starting at position 2585 of SEQ ID NO: 1484
uaguguugucaggagagag

SEQ ID NO: 116633 - RNA, 19 nt, Artificial Sequence
  Description of Artificial Sequence: Synthetic oligonucleotide
  Antisense strand to SEQ ID NO: 116632
cucucuccugacaacacua

SEQ ID NO: 116634 - RNA, 19 nt, Artificial Sequence
  Description of Artificial Sequence: Synthetic oligonucleotide
  Sense strand starting at position 2597 of SEQ ID NO: 1484
gagagagcucuuggaacug

SEQ ID NO: 116635 - RNA, 19 nt, Artificial Sequence
  Description of Artificial Sequence: Synthetic oligonucleotide
  Antisense strand to SEQ ID NO: 116634
caguuccaagagcucucuc

SEQ ID NO: 116636 - RNA, 19 nt, Artificial Sequence
  Description of Artificial Sequence: Synthetic oligonucleotide
  Sense strand starting at position 2607 of SEQ ID NO: 1484
uuggaacugccagagucau

SEQ ID NO: 116637 - RNA, 19 nt, Artificial Sequence
  Description of Artificial Sequence: Synthetic oligonucleotide
  Antisense strand to SEQ ID NO: 116636
augacucuggcaguuccaa

SEQ ID NO: 116638 - RNA, 19 nt, Artificial Sequence
  Description of Artificial Sequence: Synthetic oligonucleotide
  Sense strand starting at position 2625 of SEQ ID NO: 1484
ugcagaagggucuggacua

SEQ ID NO: 116639 - RNA, 19 nt, Artificial Sequence
  Description of Artificial Sequence: Synthetic oligonucleotide
  Antisense strand to SEQ ID NO: 116638
uaguccagacccuucugca

SEQ ID NO: 116640 - RNA, 19 nt, Artificial Sequence
  Description of Artificial Sequence: Synthetic oligonucleotide
  Sense strand starting at position 2990 of SEQ ID NO: 1484
ugugcauguauagaaauga

SEQ ID NO: 116641 - RNA, 19 nt, Artificial Sequence
  Description of Artificial Sequence: Synthetic oligonucleotide
  Antisense strand to SEQ ID NO: 116640
ucauuucuauacaugcaca

SEQ ID NO: 116642 - RNA, 19 nt, Artificial Sequence
  Description of Artificial Sequence: Synthetic oligonucleotide
  Sense strand starting at position 3064 of SEQ ID NO: 1484
uggacuuacugugucagaa

SEQ ID NO: 116643 - RNA, 19 nt, Artificial Sequence
  Description of Artificial Sequence: Synthetic oligonucleotide
  Antisense strand to SEQ ID NO: 116642
uucugacacaguaagucca

SEQ ID NO: 116644 - RNA, 19 nt, Artificial Sequence
  Description of Artificial Sequence: Synthetic oligonucleotide
  Sense strand starting at position 3125 of SEQ ID NO: 1484
gcauuaauacuaugggaga

SEQ ID NO: 116645 - RNA, 19 nt, Artificial Sequence
  Description of Artificial Sequence: Synthetic oligonucleotide
  Antisense strand to SEQ ID NO: 116644
ucucccauaguauuaaugc

SEQ ID NO: 116646 - RNA, 19 nt, Artificial Sequence
  Description of Artificial Sequence: Synthetic oligonucleotide
  Sense strand starting at position 3293 of SEQ ID NO: 1484
gugagagauugucuuuaca

SEQ ID NO: 116647 - RNA, 19 nt, Artificial Sequence
  Description of Artificial Sequence: Synthetic oligonucleotide
  Antisense strand to SEQ ID NO: 116646
uguaaagacaaucucucac

SEQ ID NO: 116648 - RNA, 19 nt, Artificial Sequence
  Description of Artificial Sequence: Synthetic oligonucleotide
  Sense strand starting at position 3295 of SEQ ID NO: 1484
gagagauugucuuuacaaa

SEQ ID NO: 116649 - RNA, 19 nt, Artificial Sequence
  Description of Artificial Sequence: Synthetic oligonucleotide
  Antisense strand to SEQ ID NO: 116648
uuuguaaagacaaucucuc

SEQ ID NO: 116650 - RNA, 19 nt, Artificial Sequence
  Description of Artificial Sequence: Synthetic oligonucleotide
  Sense strand starting at position 3402 of SEQ ID NO: 1484
cgagaucaaggcuguaaug

SEQ ID NO: 116651 - RNA, 19 nt, Artificial Sequence
  Description of Artificial Sequence: Synthetic oligonucleotide
  Antisense strand to SEQ ID NO: 116650
cauuacagccuugaucucg

SEQ ID NO: 116652 - RNA, 19 nt, Artificial Sequence
  Description of Artificial Sequence: Synthetic oligonucleotide
  Sense strand starting at position 3412 of SEQ ID NO: 1484
gcuguaaugaggcaugauu

SEQ ID NO: 116653 - RNA, 19 nt, Artificial Sequence
  Description of Artificial Sequence: Synthetic oligonucleotide
  Antisense strand to SEQ ID NO: 116652
aaucaugccucauuacagc

SEQ ID NO: 116654 - RNA, 19 nt, Artificial Sequence
  Description of Artificial Sequence: Synthetic oligonucleotide
  Sense strand starting at position 3508 of SEQ ID NO: 1484
agaguugagaccugucaaa

SEQ ID NO: 116655 - RNA, 19 nt, Artificial Sequence
  Description of Artificial Sequence: Synthetic oligonucleotide
  Antisense strand to SEQ ID NO: 116654
uuugacaggucucaacucu

SEQ ID NO: 116656 - RNA, 19 nt, Artificial Sequence
  Description of Artificial Sequence: Synthetic oligonucleotide
  Sense strand starting at position 3539 of SEQ ID NO: 1484
ucaucaugugaaugugaga

SEQ ID NO: 116657 - RNA, 19 nt, Artificial Sequence
  Description of Artificial Sequence: Synthetic oligonucleotide
  Antisense strand to SEQ ID NO: 116656
ucucacauucacaugauga

SEQ ID NO: 116658 - RNA, 19 nt, Artificial Sequence
  Description of Artificial Sequence: Synthetic oligonucleotide
  Sense strand starting at position 3615 of SEQ ID NO: 1484
guggguguacuguauauag

SEQ ID NO: 116659 - RNA, 19 nt, Artificial Sequence
  Description of Artificial Sequence: Synthetic oligonucleotide
  Antisense strand to SEQ ID NO: 116658
cuauauacaguacacccac

SEQ ID NO: 116660 - RNA, 19 nt, Artificial Sequence
  Description of Artificial Sequence: Synthetic oligonucleotide
  Sense strand starting at position 3617 of SEQ ID NO: 1484
ggguguacuguauauagag

SEQ ID NO: 116661 - RNA, 19 nt, Artificial Sequence
  Description of Artificial Sequence: Synthetic oligonucleotide
  Antisense strand to SEQ ID NO: 116660
cucuauauacaguacaccc

SEQ ID NO: 116662 - RNA, 19 nt, Artificial Sequence
  Description of Artificial Sequence: Synthetic oligonucleotide
  Sense strand starting at position 3802 of SEQ ID NO: 1484
gagguaauaguuuaguaga

SEQ ID NO: 116663 - RNA, 19 nt, Artificial Sequence
  Description of Artificial Sequence: Synthetic oligonucleotide
  Antisense strand to SEQ ID NO: 116662
ucuacuaaacuauuaccuc

SEQ ID NO: 116664 - RNA, 19 nt, Artificial Sequence
  Description of Artificial Sequence: Synthetic oligonucleotide
  Sense strand starting at position 3804 of SEQ ID NO: 1484
gguaauaguuuaguagaau

SEQ ID NO: 116665 - RNA, 19 nt, Artificial Sequence
  Description of Artificial Sequence: Synthetic oligonucleotide
  Antisense strand to SEQ ID NO: 116664
auucuacuaaacuauuacc

SEQ ID NO: 116666 - RNA, 19 nt, Artificial Sequence
  Description of Artificial Sequence: Synthetic oligonucleotide
  Sense strand starting at position 3838 of SEQ ID NO: 1484
gaucuuuguggugaucuga

SEQ ID NO: 116667 - RNA, 19 nt, Artificial Sequence
  Description of Artificial Sequence: Synthetic oligonucleotide
  Antisense strand to SEQ ID NO: 116666
ucagaucaccacaaagauc

SEQ ID NO: 116668 - RNA, 19 nt, Artificial Sequence
  Description of Artificial Sequence: Synthetic oligonucleotide
  Sense strand starting at position 3863 of SEQ ID NO: 1484
ucuagaaauguuuaguaac

SEQ ID NO: 116669 - RNA, 19 nt, Artificial Sequence
  Description of Artificial Sequence: Synthetic oligonucleotide
  Antisense strand to SEQ ID NO: 116668
guuacuaaacauuucuaga

SEQ ID NO: 116670 - RNA, 19 nt, Artificial Sequence
  Description of Artificial Sequence: Synthetic oligonucleotide
  Sense strand starting at position 3904 of SEQ ID NO: 1484
uuagucauacuggagcuau

SEQ ID NO: 116671 - RNA, 19 nt, Artificial Sequence
  Description of Artificial Sequence: Synthetic oligonucleotide
  Antisense strand to SEQ ID NO: 116670
auagcuccaguaugacuaa

SEQ ID NO: 116672 - RNA, 19 nt, Artificial Sequence
  Description of Artificial Sequence: Synthetic oligonucleotide
  Sense strand starting at position 3963 of SEQ ID NO: 1485
ugaacauauggauguacua

SEQ ID NO: 116673 - RNA, 19 nt, Artificial Sequence
  Description of Artificial Sequence: Synthetic oligonucleotide
  Antisense strand to SEQ ID NO: 116672
uaguacauccauauguuca

SEQ ID NO: 116674 - RNA, 19 nt, Artificial Sequence
  Description of Artificial Sequence: Synthetic oligonucleotide
  Sense strand starting at position 3767 of SEQ ID NO: 1485
ugucauaggcuaggguaaa

SEQ ID NO: 116675 - RNA, 19 nt, Artificial Sequence
  Description of Artificial Sequence: Synthetic oligonucleotide
  Antisense strand to SEQ ID NO: 116674
uuuacccuagccuaugaca

SEQ ID NO: 116676 - RNA, 19 nt, Artificial Sequence
  Description of Artificial Sequence: Synthetic oligonucleotide
  Sense strand starting at position 3736 of SEQ ID NO: 1485
ggaugagugcuccaauuaa

SEQ ID NO: 116677 - RNA, 19 nt, Artificial Sequence
  Description of Artificial Sequence: Synthetic oligonucleotide
  Antisense strand to SEQ ID NO: 116676
uuaauuggagcacucaucc

SEQ ID NO: 116678 - RNA, 19 nt, Artificial Sequence
  Description of Artificial Sequence: Synthetic oligonucleotide
  Sense strand starting at position 3734 of SEQ ID NO: 1485
agggaugagugcuccaauu

SEQ ID NO: 116679 - RNA, 19 nt, Artificial Sequence
  Description of Artificial Sequence: Synthetic oligonucleotide
  Antisense strand to SEQ ID NO: 116678
aauuggagcacucaucccu

SEQ ID NO: 116680 - RNA, 19 nt, Artificial Sequence
  Description of Artificial Sequence: Synthetic oligonucleotide
  Sense strand starting at position 3685 of SEQ ID NO: 1485
gcucauagaugauuauaaa

SEQ ID NO: 116681 - RNA, 19 nt, Artificial Sequence
  Description of Artificial Sequence: Synthetic oligonucleotide
  Antisense strand to SEQ ID NO: 116680
uuuauaaucaucuaugagc

SEQ ID NO: 116682 - RNA, 19 nt, Artificial Sequence
  Description of Artificial Sequence: Synthetic oligonucleotide
  Sense strand starting at position 3683 of SEQ ID NO: 1485
uugcucauagaugauuaua

SEQ ID NO: 116683 - RNA, 19 nt, Artificial Sequence
  Description of Artificial Sequence: Synthetic oligonucleotide
  Antisense strand to SEQ ID NO: 116682
uauaaucaucuaugagcaa

SEQ ID NO: 116684 - RNA, 19 nt, Artificial Sequence
  Description of Artificial Sequence: Synthetic oligonucleotide
  Sense strand starting at position 3319 of SEQ ID NO: 1485
aagaaaucccagcgacuug

SEQ ID NO: 116685 - RNA, 19 nt, Artificial Sequence
  Description of Artificial Sequence: Synthetic oligonucleotide
  Antisense strand to SEQ ID NO: 116684
caagucgcugggauuucuu

SEQ ID NO: 116686 - RNA, 19 nt, Artificial Sequence
  Description of Artificial Sequence: Synthetic oligonucleotide
  Sense strand starting at position 3173 of SEQ ID NO: 1485
aguuacuaacagugauaaa

SEQ ID NO: 116687 - RNA, 19 nt, Artificial Sequence
  Description of Artificial Sequence: Synthetic oligonucleotide
  Antisense strand to SEQ ID NO: 116686
uuuaucacuguuaguaacu

SEQ ID NO: 116688 - RNA, 19 nt, Artificial Sequence
  Description of Artificial Sequence: Synthetic oligonucleotide
  Sense strand starting at position 3162 of SEQ ID NO: 1485
gucacuccaucaguuacua

SEQ ID NO: 116689 - RNA, 19 nt, Artificial Sequence
  Description of Artificial Sequence: Synthetic oligonucleotide
  Antisense strand to SEQ ID NO: 116688
uaguaacugauggagugac

SEQ ID NO: 116690 - RNA, 19 nt, Artificial Sequence
  Description of Artificial Sequence: Synthetic oligonucleotide
  Sense strand starting at position 2963 of SEQ ID NO: 1485
acgcuaagugacgaguuaa

SEQ ID NO: 116691 - RNA, 19 nt, Artificial Sequence
  Description of Artificial Sequence: Synthetic oligonucleotide
  Antisense strand to SEQ ID NO: 116690
uuaacucgucacuuagcgu

SEQ ID NO: 116692 - RNA, 19 nt, Artificial Sequence
  Description of Artificial Sequence: Synthetic oligonucleotide
  Sense strand starting at position 2285 of SEQ ID NO: 1485
ggaaauaaauuugacccuu

SEQ ID NO: 116693 - RNA, 19 nt, Artificial Sequence
  Description of Artificial Sequence: Synthetic oligonucleotide
  Antisense strand to SEQ ID NO: 116692
aagggucaaauuuauuucc

SEQ ID NO: 116694 - RNA, 19 nt, Artificial Sequence
  Description of Artificial Sequence: Synthetic oligonucleotide
  Sense strand starting at position 2252 of SEQ ID NO: 1485
agcagacauuaggaaacau

SEQ ID NO: 116695 - RNA, 19 nt, Artificial Sequence
  Description of Artificial Sequence: Synthetic oligonucleotide
  Antisense strand to SEQ ID NO: 116694
auguuuccuaaugucugcu

SEQ ID NO: 116696 - RNA, 19 nt, Artificial Sequence
  Description of Artificial Sequence: Synthetic oligonucleotide
  Sense strand starting at position 2226 of SEQ ID NO: 1485
ugcuuuccgaagcagagaa

SEQ ID NO: 116697 - RNA, 19 nt, Artificial Sequence
  Description of Artificial Sequence: Synthetic oligonucleotide
  Antisense strand to SEQ ID NO: 116696
uucucugcuucggaaagca

SEQ ID NO: 116698 - RNA, 19 nt, Artificial Sequence
  Description of Artificial Sequence: Synthetic oligonucleotide
  Sense strand starting at position 2162 of SEQ ID NO: 1485
uccgaauaugugcauuaua

SEQ ID NO: 116699 - RNA, 19 nt, Artificial Sequence
  Description of Artificial Sequence: Synthetic oligonucleotide
  Antisense strand to SEQ ID NO: 116698
uauaaugcacauauucgga

SEQ ID NO: 116700 - RNA, 19 nt, Artificial Sequence
  Description of Artificial Sequence: Synthetic oligonucleotide
  Sense strand starting at position 2161 of SEQ ID NO: 1485
uuccgaauaugugcauuau

SEQ ID NO: 116701 - RNA, 19 nt, Artificial Sequence
  Description of Artificial Sequence: Synthetic oligonucleotide
  Antisense strand to SEQ ID NO: 116700
auaaugcacauauucggaa

SEQ ID NO: 116702 - RNA, 19 nt, Artificial Sequence
  Description of Artificial Sequence: Synthetic oligonucleotide
  Sense strand starting at position 2130 of SEQ ID NO: 1485
cuuuacauccagugacuua

SEQ ID NO: 116703 - RNA, 19 nt, Artificial Sequence
  Description of Artificial Sequence: Synthetic oligonucleotide
  Antisense strand to SEQ ID NO: 116702
uaagucacuggauguaaag

SEQ ID NO: 116704 - RNA, 19 nt, Artificial Sequence
  Description of Artificial Sequence: Synthetic oligonucleotide
  Sense strand starting at position 2116 of SEQ ID NO: 1485
cuuagaagcuaugucuuua

SEQ ID NO: 116705 - RNA, 19 nt, Artificial Sequence
  Description of Artificial Sequence: Synthetic oligonucleotide
  Antisense strand to SEQ ID NO: 116704
uaaagacauagcuucuaag

SEQ ID NO: 116706 - RNA, 19 nt, Artificial Sequence
  Description of Artificial Sequence: Synthetic oligonucleotide
  Sense strand starting at position 2105 of SEQ ID NO: 1485
uauguuaaaugcuuagaag

SEQ ID NO: 116707 - RNA, 19 nt, Artificial Sequence
  Description of Artificial Sequence: Synthetic oligonucleotide
  Antisense strand to SEQ ID NO: 116706
cuucuaagcauuuaacaua

SEQ ID NO: 116708 - RNA, 19 nt, Artificial Sequence
  Description of Artificial Sequence: Synthetic oligonucleotide
  Sense strand starting at position 2059 of SEQ ID NO: 1485
ggguuaaaugagugacaau

SEQ ID NO: 116709 - RNA, 19 nt, Artificial Sequence
  Description of Artificial Sequence: Synthetic oligonucleotide
  Antisense strand to SEQ ID NO: 116708
auugucacucauuuaaccc

SEQ ID NO: 116710 - RNA, 19 nt, Artificial Sequence
  Description of Artificial Sequence: Synthetic oligonucleotide
  Sense strand starting at position 1016 of SEQ ID NO: 1485
aucacagugucacuuaaau

SEQ ID NO: 116711 - RNA, 19 nt, Artificial Sequence
  Description of Artificial Sequence: Synthetic oligonucleotide
  Antisense strand to SEQ ID NO: 116710
auuuaagugacacugugau

SEQ ID NO: 116712 - RNA, 19 nt, Artificial Sequence
  Description of Artificial Sequence: Synthetic oligonucleotide
  Sense strand starting at position 872 of SEQ ID NO: 1485
ucauguauguauguagaca

SEQ ID NO: 116713 - RNA, 19 nt, Artificial Sequence
  Description of Artificial Sequence: Synthetic oligonucleotide
  Antisense strand to SEQ ID NO: 116712
ugucuacauacauacauga

SEQ ID NO: 116714 - RNA, 19 nt, Artificial Sequence
  Description of Artificial Sequence: Synthetic oligonucleotide
  Sense strand starting at position 793 of SEQ ID NO: 1485
ugaagcauagauugacuaa

SEQ ID NO: 116715 - RNA, 19 nt, Artificial Sequence
  Description of Artificial Sequence: Synthetic oligonucleotide
  Antisense strand to SEQ ID NO: 116714
uuagucaaucuaugcuuca

SEQ ID NO: 116716 - RNA, 19 nt, Artificial Sequence
  Description of Artificial Sequence: Synthetic oligonucleotide
  Sense strand starting at position 645 of SEQ ID NO: 1485
auuaaugcguuauuagcaa

SEQ ID NO: 116717 - RNA, 19 nt, Artificial Sequence
  Description of Artificial Sequence: Synthetic oligonucleotide
  Antisense strand to SEQ ID NO: 116716
uugcuaauaacgcauuaau

SEQ ID NO: 116718 - RNA, 19 nt, Artificial Sequence
  Description of Artificial Sequence: Synthetic oligonucleotide
  Sense strand starting at position 643 of SEQ ID NO: 1485
agauuaaugcguuauuagc

SEQ ID NO: 116719 - RNA, 19 nt, Artificial Sequence
  Description of Artificial Sequence: Synthetic oligonucleotide
  Antisense strand to SEQ ID NO: 116718
gcuaauaacgcauuaaucu

SEQ ID NO: 116720 - RNA, 19 nt, Artificial Sequence
  Description of Artificial Sequence: Synthetic oligonucleotide
  Sense strand starting at position 641 of SEQ ID NO: 1485
agagauuaaugcguuauua

SEQ ID NO: 116721 - RNA, 19 nt, Artificial Sequence
  Description of Artificial Sequence: Synthetic oligonucleotide
  Antisense strand to SEQ ID NO: 116720
uaauaacgcauuaaucucu

SEQ ID NO: 116722 - RNA, 19 nt, Artificial Sequence
  Description of Artificial Sequence: Synthetic oligonucleotide
  Sense strand starting at position 630 of SEQ ID NO: 1485
caggaaggcucagagauua

SEQ ID NO: 116723 - RNA, 19 nt, Artificial Sequence
  Description of Artificial Sequence: Synthetic oligonucleotide
  Antisense strand to SEQ ID NO: 116722
uaaucucugagccuuccug

SEQ ID NO: 116724 - RNA, 19 nt, Artificial Sequence
  Description of Artificial Sequence: Synthetic oligonucleotide
  Sense strand starting at position 607 of SEQ ID NO: 1485
ggaauaagcuaugugucca

SEQ ID NO: 116725 - RNA, 19 nt, Artificial Sequence
  Description of Artificial Sequence: Synthetic oligonucleotide
  Antisense strand to SEQ ID NO: 116724
uggacacauagcuuauucc

SEQ ID NO: 116726 - RNA, 19 nt, Artificial Sequence
  Description of Artificial Sequence: Synthetic oligonucleotide
  Sense strand starting at position 579 of SEQ ID NO: 1485
gcaugcaucucagcuacau

SEQ ID NO: 116727 - RNA, 19 nt, Artificial Sequence
  Description of Artificial Sequence: Synthetic oligonucleotide
  Antisense strand to SEQ ID NO: 116726
auguagcugagaugcaugc

SEQ ID NO: 116728 - RNA, 19 nt, Artificial Sequence
  Description of Artificial Sequence: Synthetic oligonucleotide
  Sense strand starting at position 515 of SEQ ID NO: 1485
auguuaagaggauggcaua

SEQ ID NO: 116729 - RNA, 19 nt, Artificial Sequence
  Description of Artificial Sequence: Synthetic oligonucleotide
  Antisense strand to SEQ ID NO: 116728
uaugccauccucuuaacau

SEQ ID NO: 116730 - RNA, 19 nt, Artificial Sequence
  Description of Artificial Sequence: Synthetic oligonucleotide
  Sense strand starting at position 486 of SEQ ID NO: 1485
guauuugcaugucuacaca

SEQ ID NO: 116731 - RNA, 19 nt, Artificial Sequence
  Description of Artificial Sequence: Synthetic oligonucleotide
  Antisense strand to SEQ ID NO: 116730
uguguagacaugcaaauac

SEQ ID NO: 116732 - RNA, 19 nt, Artificial Sequence
  Description of Artificial Sequence: Synthetic oligonucleotide
  Sense strand starting at position 483 of SEQ ID NO: 1485
guuguauuugcaugucuac

SEQ ID NO: 116733 - RNA, 19 nt, Artificial Sequence
  Description of Artificial Sequence: Synthetic oligonucleotide
  Antisense strand to SEQ ID NO: 116732
guagacaugcaaauacaac

SEQ ID NO: 116734 - RNA, 19 nt, Artificial Sequence
  Description of Artificial Sequence: Synthetic oligonucleotide
  Sense strand starting at position 317 of SEQ ID NO: 1485
uguguauccaugugagcca

SEQ ID NO: 116735 - RNA, 19 nt, Artificial Sequence
  Description of Artificial Sequence: Synthetic oligonucleotide
  Antisense strand to SEQ ID NO: 116734
uggcucacauggauacaca

SEQ ID NO: 116736 - RNA, 19 nt, Artificial Sequence
  Description of Artificial Sequence: Synthetic oligonucleotide
  Sense strand starting at position 308 of SEQ ID NO: 1485
guuauuauuuguguaucca

SEQ ID NO: 116737 - RNA, 19 nt, Artificial Sequence
  Description of Artificial Sequence: Synthetic oligonucleotide
  Antisense strand to SEQ ID NO: 116736
uggauacacaaauaauaac

SEQ ID NO: 116738 - RNA, 19 nt, Artificial Sequence
  Description of Artificial Sequence: Synthetic oligonucleotide
  Sense strand starting at position 306 of SEQ ID NO: 1485
guguuauuauuuguguauc

SEQ ID NO: 116739 - RNA, 19 nt, Artificial Sequence
  Description of Artificial Sequence: Synthetic oligonucleotide
  Antisense strand to SEQ ID NO: 116738
gauacacaaauaauaacac

SEQ ID NO: 116740 - RNA, 19 nt, Artificial Sequence
  Description of Artificial Sequence: Synthetic oligonucleotide
  Sense strand starting at position 171 of SEQ ID NO: 1485
gagugaagccaugggaaau

SEQ ID NO: 116741 - RNA, 19 nt, Artificial Sequence
  Description of Artificial Sequence: Synthetic oligonucleotide
  Antisense strand to SEQ ID NO: 116740
auuucccauggcuucacuc

SEQ ID NO: 116742 - RNA, 19 nt, Artificial Sequence
  Description of Artificial Sequence: Synthetic oligonucleotide
  Sense strand starting at position 82 of SEQ ID NO: 1485
aguauaauaccaugaguuc

SEQ ID NO: 116743 - RNA, 19 nt, Artificial Sequence
  Description of Artificial Sequence: Synthetic oligonucleotide
  Antisense strand to SEQ ID NO: 116742
gaacucaugguauuauacu

SEQ ID NO: 116744 - RNA, 19 nt, Artificial Sequence
  Description of Artificial Sequence: Synthetic oligonucleotide
  Sense strand starting at position 67 of SEQ ID NO: 1485
ugcagugaaauaggaagua

SEQ ID NO: 116745 - RNA, 19 nt, Artificial Sequence
  Description of Artificial Sequence: Synthetic oligonucleotide
  Antisense strand to SEQ ID NO: 116744
uacuuccuauuucacugca

SEQ ID NO: 116746 - RNA, 19 nt, Artificial Sequence
  Description of Artificial Sequence: Synthetic oligonucleotide
  Sense strand starting at position 60 of SEQ ID NO: 1485
gcuauaaugcagugaaaua

SEQ ID NO: 116747 - RNA, 19 nt, Artificial Sequence
  Description of Artificial Sequence: Synthetic oligonucleotide
  Antisense strand to SEQ ID NO: 116746
uauuucacugcauuauagc

SEQ ID NO: 116748 - RNA, 19 nt, Artificial Sequence
  Description of Artificial Sequence: Synthetic oligonucleotide
  Sense strand starting at position 20 of SEQ ID NO: 1485
ggacauaguuuccuacuac

SEQ ID NO: 116749 - RNA, 19 nt, Artificial Sequence
  Description of Artificial Sequence: Synthetic oligonucleotide
  Antisense strand to SEQ ID NO: 116748
guaguaggaaacuaugucc

SEQ ID NO: 116750 - RNA, 19 nt, Artificial Sequence
  Description of Artificial Sequence: Synthetic oligonucleotide
  Sense strand starting at position 19 of SEQ ID NO: 1485
aggacauaguuuccuacua

SEQ ID NO: 116751 - RNA, 19 nt, Artificial Sequence
  Description of Artificial Sequence: Synthetic oligonucleotide
  Antisense strand to SEQ ID NO: 116750
uaguaggaaacuauguccu

SEQ ID NO: 116752 - RNA, 19 nt, Artificial Sequence
  Description of Artificial Sequence: Synthetic oligonucleotide
  Sense strand starting at position 3885 of SEQ ID NO: 1486
guuauacaucauggaauac

SEQ ID NO: 116753 - RNA, 19 nt, Artificial Sequence
  Description of Artificial Sequence: Synthetic oligonucleotide
  Antisense strand to SEQ ID NO: 116752
guauuccaugauguauaac

SEQ ID NO: 116754 - RNA, 19 nt, Artificial Sequence
  Description of Artificial Sequence: Synthetic oligonucleotide
  Sense strand starting at position 3851 of SEQ ID NO: 1486
ugcccauaaaccgaugaga

SEQ ID NO: 116755 - RNA, 19 nt, Artificial Sequence
  Description of Artificial Sequence: Synthetic oligonucleotide
  Antisense strand to SEQ ID NO: 116754
ucucaucgguuuaugggca

SEQ ID NO: 116756 - RNA, 19 nt, Artificial Sequence
  Description of Artificial Sequence: Synthetic oligonucleotide
  Sense strand starting at position 3296 of SEQ ID NO: 1486
ucacuugucuuuguaagaa

SEQ ID NO: 116757 - RNA, 19 nt, Artificial Sequence
  Description of Artificial Sequence: Synthetic oligonucleotide
  Antisense strand to SEQ ID NO: 116756
uucuuacaaagacaaguga

SEQ ID NO: 116758 - RNA, 19 nt, Artificial Sequence
  Description of Artificial Sequence: Synthetic oligonucleotide
  Sense strand starting at position 3264 of SEQ ID NO: 1486
uggagaaugucggaagaga

SEQ ID NO: 116759 - RNA, 19 nt, Artificial Sequence
  Description of Artificial Sequence: Synthetic oligonucleotide
  Antisense strand to SEQ ID NO: 116758
ucucuuccgacauucucca

SEQ ID NO: 116760 - RNA, 19 nt, Artificial Sequence
  Description of Artificial Sequence: Synthetic oligonucleotide
  Sense strand starting at position 3222 of SEQ ID NO: 1486
gaaaguaauuuaugagacu

SEQ ID NO: 116761 - RNA, 19 nt, Artificial Sequence
  Description of Artificial Sequence: Synthetic oligonucleotide
  Antisense strand to SEQ ID NO: 116760
agucucauaaauuacuuuc

SEQ ID NO: 116762 - RNA, 19 nt, Artificial Sequence
  Description of Artificial Sequence: Synthetic oligonucleotide
  Sense strand starting at position 2777 of SEQ ID NO: 1486
gaugcauugcaguauucuu

SEQ ID NO: 116763 - RNA, 19 nt, Artificial Sequence
  Description of Artificial Sequence: Synthetic oligonucleotide
  Antisense strand to SEQ ID NO: 116762
aagaauacugcaaugcauc

SEQ ID NO: 116764 - RNA, 19 nt, Artificial Sequence
  Description of Artificial Sequence: Synthetic oligonucleotide
  Sense strand starting at position 2708 of SEQ ID NO: 1486
gcuaauaguccuuacuagu

SEQ ID NO: 116765 - RNA, 19 nt, Artificial Sequence
  Description of Artificial Sequence: Synthetic oligonucleotide
  Antisense strand to SEQ ID NO: 116764
acuaguaaggacuauuagc

SEQ ID NO: 116766 - RNA, 19 nt, Artificial Sequence
  Description of Artificial Sequence: Synthetic oligonucleotide
  Sense strand starting at position 2707 of SEQ ID NO: 1486
ggcuaauaguccuuacuag

SEQ ID NO: 116767 - RNA, 19 nt, Artificial Sequence
  Description of Artificial Sequence: Synthetic oligonucleotide
  Antisense strand to SEQ ID NO: 116766
cuaguaaggacuauuagcc

SEQ ID NO: 116768 - RNA, 19 nt, Artificial Sequence
  Description of Artificial Sequence: Synthetic oligonucleotide
  Sense strand starting at position 2698 of SEQ ID NO: 1486
aaccaaguuggcuaauagu

SEQ ID NO: 116769 - RNA, 19 nt, Artificial Sequence
  Description of Artificial Sequence: Synthetic oligonucleotide
  Antisense strand to SEQ ID NO: 116768
acuauuagccaacuugguu

SEQ ID NO: 116770 - RNA, 19 nt, Artificial Sequence
  Description of Artificial Sequence: Synthetic oligonucleotide
  Sense strand starting at position 2572 of SEQ ID NO: 1486
agacauauuuaaggaacca

SEQ ID NO: 116771 - RNA, 19 nt, Artificial Sequence
  Description of Artificial Sequence: Synthetic oligonucleotide
  Antisense strand to SEQ ID NO: 116770
ugguuccuuaaauaugucu

SEQ ID NO: 116772 - RNA, 19 nt, Artificial Sequence
  Description of Artificial Sequence: Synthetic oligonucleotide
  Sense strand starting at position 2537 of SEQ ID NO: 1486
ugugucacauugguacuaa

SEQ ID NO: 116773 - RNA, 19 nt, Artificial Sequence
  Description of Artificial Sequence: Synthetic oligonucleotide
  Antisense strand to SEQ ID NO: 116772
uuaguaccaaugugacaca

SEQ ID NO: 116774 - RNA, 19 nt, Artificial Sequence
  Description of Artificial Sequence: Synthetic oligonucleotide
  Sense strand starting at position 2536 of SEQ ID NO: 1486
augugucacauugguacua

SEQ ID NO: 116775 - RNA, 19 nt, Artificial Sequence
  Description of Artificial Sequence: Synthetic oligonucleotide
  Antisense strand to SEQ ID NO: 116774
uaguaccaaugugacacau

SEQ ID NO: 116776 - RNA, 19 nt, Artificial Sequence
  Description of Artificial Sequence: Synthetic oligonucleotide
  Sense strand starting at position 2497 of SEQ ID NO: 1486
guaugauugguaugaagga

SEQ ID NO: 116777 - RNA, 19 nt, Artificial Sequence
  Description of Artificial Sequence: Synthetic oligonucleotide
  Antisense strand to SEQ ID NO: 116776
uccuucauaccaaucauac

SEQ ID NO: 116778 - RNA, 19 nt, Artificial Sequence
  Description of Artificial Sequence: Synthetic oligonucleotide
  Sense strand starting at position 2494 of SEQ ID NO: 1486
uggguaugauugguaugaa

SEQ ID NO: 116779 - RNA, 19 nt, Artificial Sequence
  Description of Artificial Sequence: Synthetic oligonucleotide
  Antisense strand to SEQ ID NO: 116778
uucauaccaaucauaccca

SEQ ID NO: 116780 - RNA, 19 nt, Artificial Sequence
  Description of Artificial Sequence: Synthetic oligonucleotide
  Sense strand starting at position 2493 of SEQ ID NO: 1486
auggguaugauugguauga

SEQ ID NO: 116781 - RNA, 19 nt, Artificial Sequence
  Description of Artificial Sequence: Synthetic oligonucleotide
  Antisense strand to SEQ ID NO: 116780
ucauaccaaucauacccau

SEQ ID NO: 116782 - RNA, 19 nt, Artificial Sequence
  Description of Artificial Sequence: Synthetic oligonucleotide
  Sense strand starting at position 2412 of SEQ ID NO: 1486
cagauuugauuguaagcac

SEQ ID NO: 116783 - RNA, 19 nt, Artificial Sequence
  Description of Artificial Sequence: Synthetic oligonucleotide
  Antisense strand to SEQ ID NO: 116782
gugcuuacaaucaaaucug

SEQ ID NO: 116784 - RNA, 19 nt, Artificial Sequence
  Description of Artificial Sequence: Synthetic oligonucleotide
  Sense strand starting at position 2407 of SEQ ID NO: 1486
uuacucagauuugauugua

SEQ ID NO: 116785 - RNA, 19 nt, Artificial Sequence
  Description of Artificial Sequence: Synthetic oligonucleotide
  Antisense strand to SEQ ID NO: 116784
uacaaucaaaucugaguaa

SEQ ID NO: 116786 - RNA, 19 nt, Artificial Sequence
  Description of Artificial Sequence: Synthetic oligonucleotide
  Sense strand starting at position 2351 of SEQ ID NO: 1486
ugaacaguaucucccugau

SEQ ID NO: 116787 - RNA, 19 nt, Artificial Sequence
  Description of Artificial Sequence: Synthetic oligonucleotide
  Antisense strand to SEQ ID NO: 116786
aucagggagauacuguuca

SEQ ID NO: 116788 - RNA, 19 nt, Artificial Sequence
  Description of Artificial Sequence: Synthetic oligonucleotide
  Sense strand starting at position 1052 of SEQ ID NO: 1486
gcaaaucauguccauagga

SEQ ID NO: 116789 - RNA, 19 nt, Artificial Sequence
  Description of Artificial Sequence: Synthetic oligonucleotide
  Antisense strand to SEQ ID NO: 116788
uccuauggacaugauuugc

SEQ ID NO: 116790 - RNA, 19 nt, Artificial Sequence
  Description of Artificial Sequence: Synthetic oligonucleotide
  Sense strand starting at position 992 of SEQ ID NO: 1486
gaacuauggguuugacuaa

SEQ ID NO: 116791 - RNA, 19 nt, Artificial Sequence
  Description of Artificial Sequence: Synthetic oligonucleotide
  Antisense strand to SEQ ID NO: 116790
uuagucaaacccauaguuc

SEQ ID NO: 116792 - RNA, 19 nt, Artificial Sequence
  Description of Artificial Sequence: Synthetic oligonucleotide
  Sense strand starting at position 988 of SEQ ID NO: 1486
uuuagaacuauggguuuga

SEQ ID NO: 116793 - RNA, 19 nt, Artificial Sequence
  Description of Artificial Sequence: Synthetic oligonucleotide
  Antisense strand to SEQ ID NO: 116792
ucaaacccauaguucuaaa

SEQ ID NO: 116794 - RNA, 19 nt, Artificial Sequence
  Description of Artificial Sequence: Synthetic oligonucleotide
  Sense strand starting at position 957 of SEQ ID NO: 1486
auaagugagcaguaauaua

SEQ ID NO: 116795 - RNA, 19 nt, Artificial Sequence
  Description of Artificial Sequence: Synthetic oligonucleotide
  Antisense strand to SEQ ID NO: 116794
uauauuacugcucacuuau

SEQ ID NO: 116796 - RNA, 19 nt, Artificial Sequence
  Description of Artificial Sequence: Synthetic oligonucleotide
  Sense strand starting at position 833 of SEQ ID NO: 1486
uggugaggaucacaauuua

SEQ ID NO: 116797 - RNA, 19 nt, Artificial Sequence
  Description of Artificial Sequence: Synthetic oligonucleotide
  Antisense strand to SEQ ID NO: 116796
uaaauugugauccucacca

SEQ ID NO: 116798 - RNA, 19 nt, Artificial Sequence
  Description of Artificial Sequence: Synthetic oligonucleotide
  Sense strand starting at position 831 of SEQ ID NO: 1486
uguggugaggaucacaauu

SEQ ID NO: 116799 - RNA, 19 nt, Artificial Sequence
  Description of Artificial Sequence: Synthetic oligonucleotide
  Antisense strand to SEQ ID NO: 116798
aauugugauccucaccaca

SEQ ID NO: 116800 - RNA, 19 nt, Artificial Sequence
  Description of Artificial Sequence: Synthetic oligonucleotide
  Sense strand starting at position 828 of SEQ ID NO: 1486
cuuuguggugaggaucaca

SEQ ID NO: 116801 - RNA, 19 nt, Artificial Sequence
  Description of Artificial Sequence: Synthetic oligonucleotide
  Antisense strand to SEQ ID NO: 116800
ugugauccucaccacaaag

SEQ ID NO: 116802 - RNA, 19 nt, Artificial Sequence
  Description of Artificial Sequence: Synthetic oligonucleotide
  Sense strand starting at position 799 of SEQ ID NO: 1486
gggaauaaguaucagacau

SEQ ID NO: 116803 - RNA, 19 nt, Artificial Sequence
  Description of Artificial Sequence: Synthetic oligonucleotide
  Antisense strand to SEQ ID NO: 116802
augucugauacuuauuccc

SEQ ID NO: 116804 - RNA, 19 nt, Artificial Sequence
  Description of Artificial Sequence: Synthetic oligonucleotide
  Sense strand starting at position 789 of SEQ ID NO: 1486
cugaaucccugggaauaag

SEQ ID NO: 116805 - RNA, 19 nt, Artificial Sequence
  Description of Artificial Sequence: Synthetic oligonucleotide
  Antisense strand to SEQ ID NO: 116804
cuuauucccagggauucag

SEQ ID NO: 116806 - RNA, 19 nt, Artificial Sequence
  Description of Artificial Sequence: Synthetic oligonucleotide
  Sense strand starting at position 787 of SEQ ID NO: 1486
uucugaaucccugggaaua

SEQ ID NO: 116807 - RNA, 19 nt, Artificial Sequence
  Description of Artificial Sequence: Synthetic oligonucleotide
  Antisense strand to SEQ ID NO: 116806
uauucccagggauucagaa

SEQ ID NO: 116808 - RNA, 19 nt, Artificial Sequence
  Description of Artificial Sequence: Synthetic oligonucleotide
  Sense strand starting at position 695 of SEQ ID NO: 1486
aaguguuuggcaggaaacu

SEQ ID NO: 116809 - RNA, 19 nt, Artificial Sequence
  Description of Artificial Sequence: Synthetic oligonucleotide
  Antisense strand to SEQ ID NO: 116808
aguuuccugccaaacacuu

SEQ ID NO: 116810 - RNA, 19 nt, Artificial Sequence
  Description of Artificial Sequence: Synthetic oligonucleotide
  Sense strand starting at position 679 of SEQ ID NO: 1486
uuacgauguaaauguaaag

SEQ ID NO: 116811 - RNA, 19 nt, Artificial Sequence
  Description of Artificial Sequence: Synthetic oligonucleotide
  Antisense strand to SEQ ID NO: 116810
cuuuacauuuacaucguaa

SEQ ID NO: 116812 - RNA, 19 nt, Artificial Sequence
  Description of Artificial Sequence: Synthetic oligonucleotide
  Sense strand starting at position 673 of SEQ ID NO: 1486
aggacauuacgauguaaau

SEQ ID NO: 116813 - RNA, 19 nt, Artificial Sequence
  Description of Artificial Sequence: Synthetic oligonucleotide
  Antisense strand to SEQ ID NO: 116812
auuuacaucguaauguccu

SEQ ID NO: 116814 - RNA, 19 nt, Artificial Sequence
  Description of Artificial Sequence: Synthetic oligonucleotide
  Sense strand starting at position 662 of SEQ ID NO: 1486
agcuauaaugaaggacauu

SEQ ID NO: 116815 - RNA, 19 nt, Artificial Sequence
  Description of Artificial Sequence: Synthetic oligonucleotide
  Antisense strand to SEQ ID NO: 116814
aauguccuucauuauagcu

SEQ ID NO: 116816 - RNA, 19 nt, Artificial Sequence
  Description of Artificial Sequence: Synthetic oligonucleotide
  Sense strand starting at position 562 of SEQ ID NO: 1486
uguauuuggaacgguuauu

SEQ ID NO: 116817 - RNA, 19 nt, Artificial Sequence
  Description of Artificial Sequence: Synthetic oligonucleotide
  Antisense strand to SEQ ID NO: 116816
aauaaccguuccaaauaca

SEQ ID NO: 116818 - RNA, 19 nt, Artificial Sequence
  Description of Artificial Sequence: Synthetic oligonucleotide
  Sense strand starting at position 509 of SEQ ID NO: 1486
aaauaauguguuuagcgua

SEQ ID NO: 116819 - RNA, 19 nt, Artificial Sequence
  Description of Artificial Sequence: Synthetic oligonucleotide
  Antisense strand to SEQ ID NO: 116818
uacgcuaaacacauuauuu

SEQ ID NO: 116820 - RNA, 19 nt, Artificial Sequence
  Description of Artificial Sequence: Synthetic oligonucleotide
  Sense strand starting at position 489 of SEQ ID NO: 1486
ugcacacucuaaguuauga

SEQ ID NO: 116821 - RNA, 19 nt, Artificial Sequence
  Description of Artificial Sequence: Synthetic oligonucleotide
  Antisense strand to SEQ ID NO: 116820
ucauaacuuagagugugca

SEQ ID NO: 116822 - RNA, 19 nt, Artificial Sequence
  Description of Artificial Sequence: Synthetic oligonucleotide
  Sense strand starting at position 486 of SEQ ID NO: 1486
agaugcacacucuaaguua

SEQ ID NO: 116823 - RNA, 19 nt, Artificial Sequence
  Description of Artificial Sequence: Synthetic oligonucleotide
  Antisense strand to SEQ ID NO: 116822
uaacuuagagugugcaucu

SEQ ID NO: 116824 - RNA, 19 nt, Artificial Sequence
  Description of Artificial Sequence: Synthetic oligonucleotide
  Sense strand starting at position 457 of SEQ ID NO: 1486
aggauaaaguggccucaga

SEQ ID NO: 116825 - RNA, 19 nt, Artificial Sequence
  Description of Artificial Sequence: Synthetic oligonucleotide
  Antisense strand to SEQ ID NO: 116824
ucugaggccacuuuauccu

SEQ ID NO: 116826 - RNA, 19 nt, Artificial Sequence
  Description of Artificial Sequence: Synthetic oligonucleotide
  Sense strand starting at position 371 of SEQ ID NO: 1486
uguauaaagugaccucagu

SEQ ID NO: 116827 - RNA, 19 nt, Artificial Sequence
  Description of Artificial Sequence: Synthetic oligonucleotide
  Antisense strand to SEQ ID NO: 116826
acugaggucacuuuauaca

SEQ ID NO: 116828 - RNA, 19 nt, Artificial Sequence
  Description of Artificial Sequence: Synthetic oligonucleotide
  Sense strand starting at position 359 of SEQ ID NO: 1486
uuguaccuaccauguauaa

SEQ ID NO: 116829 - RNA, 19 nt, Artificial Sequence
  Description of Artificial Sequence: Synthetic oligonucleotide
  Antisense strand to SEQ ID NO: 116828
uuauacaugguagguacaa

SEQ ID NO: 116830 - RNA, 19 nt, Artificial Sequence
  Description of Artificial Sequence: Synthetic oligonucleotide
  Sense strand starting at position 289 of SEQ ID NO: 1486
auucucauugauugaaugu

SEQ ID NO: 116831 - RNA, 19 nt, Artificial Sequence
  Description of Artificial Sequence: Synthetic oligonucleotide
  Antisense strand to SEQ ID NO: 116830
acauucaaucaaugagaau

SEQ ID NO: 116832 - RNA, 19 nt, Artificial Sequence
  Description of Artificial Sequence: Synthetic oligonucleotide
  Sense strand starting at position 3672 of SEQ ID NO: 1487
guguccaugugacuuuaua

SEQ ID NO: 116833 - RNA, 19 nt, Artificial Sequence
  Description of Artificial Sequence: Synthetic oligonucleotide
  Antisense strand to SEQ ID NO: 116832
uauaaagucacauggacac

SEQ ID NO: 116834 - RNA, 19 nt, Artificial Sequence
  Description of Artificial Sequence: Synthetic oligonucleotide
  Sense strand starting at position 3313 of SEQ ID NO: 1487
auugucaucuauguuaggu

SEQ ID NO: 116835 - RNA, 19 nt, Artificial Sequence
  Description of Artificial Sequence: Synthetic oligonucleotide
  Antisense strand to SEQ ID NO: 116834
accuaacauagaugacaau

SEQ ID NO: 116836 - RNA, 19 nt, Artificial Sequence
  Description of Artificial Sequence: Synthetic oligonucleotide
  Sense strand starting at position 3308 of SEQ ID NO: 1487
aucaaauugucaucuaugu

SEQ ID NO: 116837 - RNA, 19 nt, Artificial Sequence
  Description of Artificial Sequence: Synthetic oligonucleotide
  Antisense strand to SEQ ID NO: 116836
acauagaugacaauuugau

SEQ ID NO: 116838 - RNA, 19 nt, Artificial Sequence
  Description of Artificial Sequence: Synthetic oligonucleotide
  Sense strand starting at position 3261 of SEQ ID NO: 1487
gugcacguuacauaaguau

SEQ ID NO: 116839 - RNA, 19 nt, Artificial Sequence
  Description of Artificial Sequence: Synthetic oligonucleotide
  Antisense strand to SEQ ID NO: 116838
auacuuauguaacgugcac

SEQ ID NO: 116840 - RNA, 19 nt, Artificial Sequence
  Description of Artificial Sequence: Synthetic oligonucleotide
  Sense strand starting at position 3257 of SEQ ID NO: 1487
gaacgugcacguuacauaa

SEQ ID NO: 116841 - RNA, 19 nt, Artificial Sequence
  Description of Artificial Sequence: Synthetic oligonucleotide
  Antisense strand to SEQ ID NO: 116840
uuauguaacgugcacguuc

SEQ ID NO: 116842 - RNA, 19 nt, Artificial Sequence
  Description of Artificial Sequence: Synthetic oligonucleotide
  Sense strand starting at position 3192 of SEQ ID NO: 1487
guagaauuacaucgaaagc

SEQ ID NO: 116843 - RNA, 19 nt, Artificial Sequence
  Description of Artificial Sequence: Synthetic oligonucleotide
  Antisense strand to SEQ ID NO: 116842
gcuuucgauguaauucuac

SEQ ID NO: 116844 - RNA, 19 nt, Artificial Sequence
  Description of Artificial Sequence: Synthetic oligonucleotide
  Sense strand starting at position 3180 of SEQ ID NO: 1487
agaguugucuaaguagaau

SEQ ID NO: 116845 - RNA, 19 nt, Artificial Sequence
  Description of Artificial Sequence: Synthetic oligonucleotide
  Antisense strand to SEQ ID NO: 116844
auucuacuuagacaacucu

SEQ ID NO: 116846 - RNA, 19 nt, Artificial Sequence
  Description of Artificial Sequence: Synthetic oligonucleotide
  Sense strand starting at position 3177 of SEQ ID NO: 1487
auaagaguugucuaaguag

SEQ ID NO: 116847 - RNA, 19 nt, Artificial Sequence
  Description of Artificial Sequence: Synthetic oligonucleotide
  Antisense strand to SEQ ID NO: 116846
cuacuuagacaacucuuau

SEQ ID NO: 116848 - RNA, 19 nt, Artificial Sequence
  Description of Artificial Sequence: Synthetic oligonucleotide
  Sense strand starting at position 3175 of SEQ ID NO: 1487
guauaagaguugucuaagu

SEQ ID NO: 116849 - RNA, 19 nt, Artificial Sequence
  Description of Artificial Sequence: Synthetic oligonucleotide
  Antisense strand to SEQ ID NO: 116848
acuuagacaacucuuauac

SEQ ID NO: 116850 - RNA, 19 nt, Artificial Sequence
  Description of Artificial Sequence: Synthetic oligonucleotide
  Sense strand starting at position 3166 of SEQ ID NO: 1487
acucuauauguauaagagu

SEQ ID NO: 116851 - RNA, 19 nt, Artificial Sequence
  Description of Artificial Sequence: Synthetic oligonucleotide
  Antisense strand to SEQ ID NO: 116850
acucuuauacauauagagu

SEQ ID NO: 116852 - RNA, 19 nt, Artificial Sequence
  Description of Artificial Sequence: Synthetic oligonucleotide
  Sense strand starting at position 3156 of SEQ ID NO: 1487
uguacauguuacucuauau

SEQ ID NO: 116853 - RNA, 19 nt, Artificial Sequence
  Description of Artificial Sequence: Synthetic oligonucleotide
  Antisense strand to SEQ ID NO: 116852
auauagaguaacauguaca

SEQ ID NO: 116854 - RNA, 19 nt, Artificial Sequence
  Description of Artificial Sequence: Synthetic oligonucleotide
  Sense strand starting at position 3155 of SEQ ID NO: 1487
guguacauguuacucuaua

SEQ ID NO: 116855 - RNA, 19 nt, Artificial Sequence
  Description of Artificial Sequence: Synthetic oligonucleotide
  Antisense strand to SEQ ID NO: 116854
uauagaguaacauguacac

SEQ ID NO: 116856 - RNA, 19 nt, Artificial Sequence
  Description of Artificial Sequence: Synthetic oligonucleotide
  Sense strand starting at position 3146 of SEQ ID NO: 1487
augaaauguguguacaugu

SEQ ID NO: 116857 - RNA, 19 nt, Artificial Sequence
  Description of Artificial Sequence: Synthetic oligonucleotide
  Antisense strand to SEQ ID NO: 116856
acauguacacacauuucau

SEQ ID NO: 116858 - RNA, 19 nt, Artificial Sequence
  Description of Artificial Sequence: Synthetic oligonucleotide
  Sense strand starting at position 3050 of SEQ ID NO: 1487
gcccgaccucuauacaaau

SEQ ID NO: 116859 - RNA, 19 nt, Artificial Sequence
  Description of Artificial Sequence: Synthetic oligonucleotide
  Antisense strand to SEQ ID NO: 116858
auuuguauagaggucgggc

SEQ ID NO: 116860 - RNA, 19 nt, Artificial Sequence
  Description of Artificial Sequence: Synthetic oligonucleotide
  Sense strand starting at position 3048 of SEQ ID NO: 1487
gugcccgaccucuauacaa

SEQ ID NO: 116861 - RNA, 19 nt, Artificial Sequence
  Description of Artificial Sequence: Synthetic oligonucleotide
  Antisense strand to SEQ ID NO: 116860
uuguauagaggucgggcac

SEQ ID NO: 116862 - RNA, 19 nt, Artificial Sequence
  Description of Artificial Sequence: Synthetic oligonucleotide
  Sense strand starting at position 2135 of SEQ ID NO: 1487
acauguugugaagaccuau

SEQ ID NO: 116863 - RNA, 19 nt, Artificial Sequence
  Description of Artificial Sequence: Synthetic oligonucleotide
  Antisense strand to SEQ ID NO: 116862
auaggucuucacaacaugu

SEQ ID NO: 116864 - RNA, 19 nt, Artificial Sequence
  Description of Artificial Sequence: Synthetic oligonucleotide
  Sense strand starting at position 2093 of SEQ ID NO: 1487
agucguuuacaguauaauu

SEQ ID NO: 116865 - RNA, 19 nt, Artificial Sequence
  Description of Artificial Sequence: Synthetic oligonucleotide
  Antisense strand to SEQ ID NO: 116864
aauuauacuguaaacgacu

SEQ ID NO: 116866 - RNA, 19 nt, Artificial Sequence
  Description of Artificial Sequence: Synthetic oligonucleotide
  Sense strand starting at position 2088 of SEQ ID NO: 1487
uccacagucguuuacagua

SEQ ID NO: 116867 - RNA, 19 nt, Artificial Sequence
  Description of Artificial Sequence: Synthetic oligonucleotide
  Antisense strand to SEQ ID NO: 116866
uacuguaaacgacugugga

SEQ ID NO: 116868 - RNA, 19 nt, Artificial Sequence
  Description of Artificial Sequence: Synthetic oligonucleotide
  Sense strand starting at position 2070 of SEQ ID NO: 1487
ugaggucaagaaugguaau

SEQ ID NO: 116869 - RNA, 19 nt, Artificial Sequence
  Description of Artificial Sequence: Synthetic oligonucleotide
  Antisense strand to SEQ ID NO: 116868
auuaccauucuugaccuca

SEQ ID NO: 116870 - RNA, 19 nt, Artificial Sequence
  Description of Artificial Sequence: Synthetic oligonucleotide
  Sense strand starting at position 1031 of SEQ ID NO: 1487
uuuagaauuccagguguuu

SEQ ID NO: 116871 - RNA, 19 nt, Artificial Sequence
  Description of Artificial Sequence: Synthetic oligonucleotide
  Antisense strand to SEQ ID NO: 116870
aaacaccuggaauucuaaa

SEQ ID NO: 116872 - RNA, 19 nt, Artificial Sequence
  Description of Artificial Sequence: Synthetic oligonucleotide
  Sense strand starting at position 1021 of SEQ ID NO: 1487
guuucccuuguuuagaauu

SEQ ID NO: 116873 - RNA, 19 nt, Artificial Sequence
  Description of Artificial Sequence: Synthetic oligonucleotide
  Antisense strand to SEQ ID NO: 116872
aauucuaaacaagggaaac

SEQ ID NO: 116874 - RNA, 19 nt, Artificial Sequence
  Description of Artificial Sequence: Synthetic oligonucleotide
  Sense strand starting at position 1020 of SEQ ID NO: 1487
uguuucccuuguuuagaau

SEQ ID NO: 116875 - RNA, 19 nt, Artificial Sequence
  Description of Artificial Sequence: Synthetic oligonucleotide
  Antisense strand to SEQ ID NO: 116874
auucuaaacaagggaaaca

SEQ ID NO: 116876 - RNA, 19 nt, Artificial Sequence
  Description of Artificial Sequence: Synthetic oligonucleotide
  Sense strand starting at position 960 of SEQ ID NO: 1487
uggcuuugggauugacaag

SEQ ID NO: 116877 - RNA, 19 nt, Artificial Sequence
  Description of Artificial Sequence: Synthetic oligonucleotide
  Antisense strand to SEQ ID NO: 116876
cuugucaaucccaaagcca

SEQ ID NO: 116878 - RNA, 19 nt, Artificial Sequence
  Description of Artificial Sequence: Synthetic oligonucleotide
  Sense strand starting at position 919 of SEQ ID NO: 1487
guguuucccuucuuuagaa

SEQ ID NO: 116879 - RNA, 19 nt, Artificial Sequence
  Description of Artificial Sequence: Synthetic oligonucleotide
  Antisense strand to SEQ ID NO: 116878
uucuaaagaagggaaacac

SEQ ID NO: 116880 - RNA, 19 nt, Artificial Sequence
  Description of Artificial Sequence: Synthetic oligonucleotide
  Sense strand starting at position 892 of SEQ ID NO: 1487
gaggaugaauccucacgcu

SEQ ID NO: 116881 - RNA, 19 nt, Artificial Sequence
  Description of Artificial Sequence: Synthetic oligonucleotide
  Antisense strand to SEQ ID NO: 116880
agcgugaggauucauccuc

SEQ ID NO: 116882 - RNA, 19 nt, Artificial Sequence
  Description of Artificial Sequence: Synthetic oligonucleotide
  Sense strand starting at position 819 of SEQ ID NO: 1487
guguuucucuucuuuagaa

SEQ ID NO: 116883 - RNA, 19 nt, Artificial Sequence
  Description of Artificial Sequence: Synthetic oligonucleotide
  Antisense strand to SEQ ID NO: 116882
uucuaaagaagagaaacac

SEQ ID NO: 116884 - RNA, 19 nt, Artificial Sequence
  Description of Artificial Sequence: Synthetic oligonucleotide
  Sense strand starting at position 648 of SEQ ID NO: 1487
gaagcauuaguagaagucu

SEQ ID NO: 116885 - RNA, 19 nt, Artificial Sequence
  Description of Artificial Sequence: Synthetic oligonucleotide
  Antisense strand to SEQ ID NO: 116884
agacuucuacuaaugcuuc

SEQ ID NO: 116886 - RNA, 19 nt, Artificial Sequence
  Description of Artificial Sequence: Synthetic oligonucleotide
  Sense strand starting at position 592 of SEQ ID NO: 1487
gaaggaugguguuucagga

SEQ ID NO: 116887 - RNA, 19 nt, Artificial Sequence
  Description of Artificial Sequence: Synthetic oligonucleotide
  Antisense strand to SEQ ID NO: 116886
uccugaaacaccauccuuc

SEQ ID NO: 116888 - RNA, 19 nt, Artificial Sequence
  Description of Artificial Sequence: Synthetic oligonucleotide
  Sense strand starting at position 586 of SEQ ID NO: 1487
ggaugagaaggaugguguu

SEQ ID NO: 116889 - RNA, 19 nt, Artificial Sequence
  Description of Artificial Sequence: Synthetic oligonucleotide
  Antisense strand to SEQ ID NO: 116888
aacaccauccuucucaucc

SEQ ID NO: 116890 - RNA, 19 nt, Artificial Sequence
  Description of Artificial Sequence: Synthetic oligonucleotide
  Sense strand starting at position 571 of SEQ ID NO: 1487
guuaauucugcacaaggau

SEQ ID NO: 116891 - RNA, 19 nt, Artificial Sequence
  Description of Artificial Sequence: Synthetic oligonucleotide
  Antisense strand to SEQ ID NO: 116890
auccuugugcagaauuaac

SEQ ID NO: 116892 - RNA, 19 nt, Artificial Sequence
  Description of Artificial Sequence: Synthetic oligonucleotide
  Sense strand starting at position 568 of SEQ ID NO: 1487
acaguuaauucugcacaag

SEQ ID NO: 116893 - RNA, 19 nt, Artificial Sequence
  Description of Artificial Sequence: Synthetic oligonucleotide
  Antisense strand to SEQ ID NO: 116892
cuugugcagaauuaacugu

SEQ ID NO: 116894 - RNA, 19 nt, Artificial Sequence
  Description of Artificial Sequence: Synthetic oligonucleotide
  Sense strand starting at position 552 of SEQ ID NO: 1487
ggaaacauauuaugaaaca

SEQ ID NO: 116895 - RNA, 19 nt, Artificial Sequence
  Description of Artificial Sequence: Synthetic oligonucleotide
  Antisense strand to SEQ ID NO: 116894
uguuucauaauauguuucc

SEQ ID NO: 116896 - RNA, 19 nt, Artificial Sequence
  Description of Artificial Sequence: Synthetic oligonucleotide
  Sense strand starting at position 539 of SEQ ID NO: 1487
gaucaagugcuauggaaac

SEQ ID NO: 116897 - RNA, 19 nt, Artificial Sequence
  Description of Artificial Sequence: Synthetic oligonucleotide
  Antisense strand to SEQ ID NO: 116896
guuuccauagcacuugauc

SEQ ID NO: 116898 - RNA, 19 nt, Artificial Sequence
  Description of Artificial Sequence: Synthetic oligonucleotide
  Sense strand starting at position 399 of SEQ ID NO: 1487
gguuccauucuccaguuaa

SEQ ID NO: 116899 - RNA, 19 nt, Artificial Sequence
  Description of Artificial Sequence: Synthetic oligonucleotide
  Antisense strand to SEQ ID NO: 116898
uuaacuggagaauggaacc

SEQ ID NO: 116900 - RNA, 19 nt, Artificial Sequence
  Description of Artificial Sequence: Synthetic oligonucleotide
  Sense strand starting at position 398 of SEQ ID NO: 1487
ugguuccauucuccaguua

SEQ ID NO: 116901 - RNA, 19 nt, Artificial Sequence
  Description of Artificial Sequence: Synthetic oligonucleotide
  Antisense strand to SEQ ID NO: 116900
uaacuggagaauggaacca

SEQ ID NO: 116902 - RNA, 19 nt, Artificial Sequence
  Description of Artificial Sequence: Synthetic oligonucleotide
  Sense strand starting at position 371 of SEQ ID NO: 1487
uguuguaaauaagccaaua

SEQ ID NO: 116903 - RNA, 19 nt, Artificial Sequence
  Description of Artificial Sequence: Synthetic oligonucleotide
  Antisense strand to SEQ ID NO: 116902
uauuggcuuauuuacaaca

SEQ ID NO: 116904 - RNA, 19 nt, Artificial Sequence
  Description of Artificial Sequence: Synthetic oligonucleotide
  Sense strand starting at position 368 of SEQ ID NO: 1487
ucguguuguaaauaagcca

SEQ ID NO: 116905 - RNA, 19 nt, Artificial Sequence
  Description of Artificial Sequence: Synthetic oligonucleotide
  Antisense strand to SEQ ID NO: 116904
uggcuuauuuacaacacga

SEQ ID NO: 116906 - RNA, 19 nt, Artificial Sequence
  Description of Artificial Sequence: Synthetic oligonucleotide
  Sense strand starting at position 361 of SEQ ID NO: 1487
guguuucucguguuguaaa

SEQ ID NO: 116907 - RNA, 19 nt, Artificial Sequence
  Description of Artificial Sequence: Synthetic oligonucleotide
  Antisense strand to SEQ ID NO: 116906
uuuacaacacgagaaacac

SEQ ID NO: 116908 - RNA, 19 nt, Artificial Sequence
  Description of Artificial Sequence: Synthetic oligonucleotide
  Sense strand starting at position 360 of SEQ ID NO: 1487
uguguuucucguguuguaa

SEQ ID NO: 116909 - RNA, 19 nt, Artificial Sequence
  Description of Artificial Sequence: Synthetic oligonucleotide
  Antisense strand to SEQ ID NO: 116908
uuacaacacgagaaacaca

SEQ ID NO: 116910 - RNA, 19 nt, Artificial Sequence
  Description of Artificial Sequence: Synthetic oligonucleotide
  Sense strand starting at position 82 of SEQ ID NO: 1487
gaucguuaacgugagacag

SEQ ID NO: 116911 - RNA, 19 nt, Artificial Sequence
  Description of Artificial Sequence: Synthetic oligonucleotide
  Antisense strand to SEQ ID NO: 116910
cugucucacguuaacgauc

SEQ ID NO: 116912 - RNA, 19 nt, Artificial Sequence
  Description of Artificial Sequence: Synthetic oligonucleotide
  Sense strand starting at position 3917 of SEQ ID NO: 1488
ucuagcauaggaugaguaa

SEQ ID NO: 116913 - RNA, 19 nt, Artificial Sequence
  Description of Artificial Sequence: Synthetic oligonucleotide
  Antisense strand to SEQ ID NO: 116912
uuacucauccuaugcuaga

SEQ ID NO: 116914 - RNA, 19 nt, Artificial Sequence
  Description of Artificial Sequence: Synthetic oligonucleotide
  Sense strand starting at position 3848 of SEQ ID NO: 1488
aucauccuguauguauaaa

SEQ ID NO: 116915 - RNA, 19 nt, Artificial Sequence
  Description of Artificial Sequence: Synthetic oligonucleotide
  Antisense strand to SEQ ID NO: 116914
uuuauacauacaggaugau

SEQ ID NO: 116916 - RNA, 19 nt, Artificial Sequence
  Description of Artificial Sequence: Synthetic oligonucleotide
  Sense strand starting at position 3818 of SEQ ID NO: 1488
aggauaaauugcuagaaga

SEQ ID NO: 116917 - RNA, 19 nt, Artificial Sequence
  Description of Artificial Sequence: Synthetic oligonucleotide
  Antisense strand to SEQ ID NO: 116916
ucuucuagcaauuuauccu

SEQ ID NO: 116918 - RNA, 19 nt, Artificial Sequence
  Description of Artificial Sequence: Synthetic oligonucleotide
  Sense strand starting at position 3720 of SEQ ID NO: 1488
gugugucuuaguguuugua

SEQ ID NO: 116919 - RNA, 19 nt, Artificial Sequence
  Description of Artificial Sequence: Synthetic oligonucleotide
  Antisense strand to SEQ ID NO: 116918
uacaaacacuaagacacac

SEQ ID NO: 116920 - RNA, 19 nt, Artificial Sequence
  Description of Artificial Sequence: Synthetic oligonucleotide
  Sense strand starting at position 3711 of SEQ ID NO: 1488
acuuacaaagugugucuua

SEQ ID NO: 116921 - RNA, 19 nt, Artificial Sequence
  Description of Artificial Sequence: Synthetic oligonucleotide
  Antisense strand to SEQ ID NO: 116920
uaagacacacuuuguaagu

SEQ ID NO: 116922 - RNA, 19 nt, Artificial Sequence
  Description of Artificial Sequence: Synthetic oligonucleotide
  Sense strand starting at position 3097 of SEQ ID NO: 1488
ggcugagacucuucugcac

SEQ ID NO: 116923 - RNA, 19 nt, Artificial Sequence
  Description of Artificial Sequence: Synthetic oligonucleotide
  Antisense strand to SEQ ID NO: 116922
gugcagaagagucucagcc

SEQ ID NO: 116924 - RNA, 19 nt, Artificial Sequence
  Description of Artificial Sequence: Synthetic oligonucleotide
  Sense strand starting at position 3005 of SEQ ID NO: 1488
agugacaugcuccaagacu

SEQ ID NO: 116925 - RNA, 19 nt, Artificial Sequence
  Description of Artificial Sequence: Synthetic oligonucleotide
  Antisense strand to SEQ ID NO: 116924
agucuuggagcaugucacu

SEQ ID NO: 116926 - RNA, 19 nt, Artificial Sequence
  Description of Artificial Sequence: Synthetic oligonucleotide
  Sense strand starting at position 2944 of SEQ ID NO: 1488
ccuaguuugggaugagaac

SEQ ID NO: 116927 - RNA, 19 nt, Artificial Sequence
  Description of Artificial Sequence: Synthetic oligonucleotide
  Antisense strand to SEQ ID NO: 116926
guucucaucccaaacuagg

SEQ ID NO: 116928 - RNA, 19 nt, Artificial Sequence
  Description of Artificial Sequence: Synthetic oligonucleotide
  Sense strand starting at position 2899 of SEQ ID NO: 1488
cgugaucuccuguaccaag

SEQ ID NO: 116929 - RNA, 19 nt, Artificial Sequence
  Description of Artificial Sequence: Synthetic oligonucleotide
  Antisense strand to SEQ ID NO: 116928
cuugguacaggagaucacg

SEQ ID NO: 116930 - RNA, 19 nt, Artificial Sequence
  Description of Artificial Sequence: Synthetic oligonucleotide
  Sense strand starting at position 2894 of SEQ ID NO: 1488
uuacgcgugaucuccugua

SEQ ID NO: 116931 - RNA, 19 nt, Artificial Sequence
  Description of Artificial Sequence: Synthetic oligonucleotide
  Antisense strand to SEQ ID NO: 116930
uacaggagaucacgcguaa

SEQ ID NO: 116932 - RNA, 19 nt, Artificial Sequence
  Description of Artificial Sequence: Synthetic oligonucleotide
  Sense strand starting at position 2744 of SEQ ID NO: 1488
ugaacugauccuugaucug

SEQ ID NO: 116933 - RNA, 19 nt, Artificial Sequence
  Description of Artificial Sequence: Synthetic oligonucleotide
  Antisense strand to SEQ ID NO: 116932
cagaucaaggaucaguuca

SEQ ID NO: 116934 - RNA, 19 nt, Artificial Sequence
  Description of Artificial Sequence: Synthetic oligonucleotide
  Sense strand starting at position 2592 of SEQ ID NO: 1488
uguggauucugaguuaaac

SEQ ID NO: 116935 - RNA, 19 nt, Artificial Sequence
  Description of Artificial Sequence: Synthetic oligonucleotide
  Antisense strand to SEQ ID NO: 116934
guuuaacucagaauccaca

SEQ ID NO: 116936 - RNA, 19 nt, Artificial Sequence
  Description of Artificial Sequence: Synthetic oligonucleotide
  Sense strand starting at position 2449 of SEQ ID NO: 1488
ccuugaguucccgaaggag

SEQ ID NO: 116937 - RNA, 19 nt, Artificial Sequence
  Description of Artificial Sequence: Synthetic oligonucleotide
  Antisense strand to SEQ ID NO: 116936
cuccuucgggaacucaagg

SEQ ID NO: 116938 - RNA, 19 nt, Artificial Sequence
  Description of Artificial Sequence: Synthetic oligonucleotide
  Sense strand starting at position 1800 of SEQ ID NO: 1488
ucugauaccucggucugga

SEQ ID NO: 116939 - RNA, 19 nt, Artificial Sequence
  Description of Artificial Sequence: Synthetic oligonucleotide
  Antisense strand to SEQ ID NO: 116938
uccagaccgagguaucaga

SEQ ID NO: 116940 - RNA, 19 nt, Artificial Sequence
  Description of Artificial Sequence: Synthetic oligonucleotide
  Sense strand starting at position 1368 of SEQ ID NO: 1488
guuggcaugcuauaauaaa

SEQ ID NO: 116941 - RNA, 19 nt, Artificial Sequence
  Description of Artificial Sequence: Synthetic oligonucleotide
  Antisense strand to SEQ ID NO: 116940
uuuauuauagcaugccaac

SEQ ID NO: 116942 - RNA, 19 nt, Artificial Sequence
  Description of Artificial Sequence: Synthetic oligonucleotide
  Sense strand starting at position 1216 of SEQ ID NO: 1488
auguuaugauguccaauuc

SEQ ID NO: 116943 - RNA, 19 nt, Artificial Sequence
  Description of Artificial Sequence: Synthetic oligonucleotide
  Antisense strand to SEQ ID NO: 116942
gaauuggacaucauaacau

SEQ ID NO: 116944 - RNA, 19 nt, Artificial Sequence
  Description of Artificial Sequence: Synthetic oligonucleotide
  Sense strand starting at position 1203 of SEQ ID NO: 1488
guaugccuacaauauguua

SEQ ID NO: 116945 - RNA, 19 nt, Artificial Sequence
  Description of Artificial Sequence: Synthetic oligonucleotide
  Antisense strand to SEQ ID NO: 116944
uaacauauuguaggcauac

SEQ ID NO: 116946 - RNA, 19 nt, Artificial Sequence
  Description of Artificial Sequence: Synthetic oligonucleotide
  Sense strand starting at position 906 of SEQ ID NO: 1488
gaacgucucuuagcaauac

SEQ ID NO: 116947 - RNA, 19 nt, Artificial Sequence
  Description of Artificial Sequence: Synthetic oligonucleotide
  Antisense strand to SEQ ID NO: 116946
guauugcuaagagacguuc

SEQ ID NO: 116948 - RNA, 19 nt, Artificial Sequence
  Description of Artificial Sequence: Synthetic oligonucleotide
  Sense strand starting at position 807 of SEQ ID NO: 1488
gguccacauuagguauuau

SEQ ID NO: 116949 - RNA, 19 nt, Artificial Sequence
  Description of Artificial Sequence: Synthetic oligonucleotide
  Antisense strand to SEQ ID NO: 116948
auaauaccuaauguggacc

SEQ ID NO: 116950 - RNA, 19 nt, Artificial Sequence
  Description of Artificial Sequence: Synthetic oligonucleotide
  Sense strand starting at position 799 of SEQ ID NO: 1488
ugcucuuggguccacauua

SEQ ID NO: 116951 - RNA, 19 nt, Artificial Sequence
  Description of Artificial Sequence: Synthetic oligonucleotide
  Antisense strand to SEQ ID NO: 116950
uaauguggacccaagagca

SEQ ID NO: 116952 - RNA, 19 nt, Artificial Sequence
  Description of Artificial Sequence: Synthetic oligonucleotide
  Sense strand starting at position 758 of SEQ ID NO: 1488
auaucuugcuauucggauu

SEQ ID NO: 116953 - RNA, 19 nt, Artificial Sequence
  Description of Artificial Sequence: Synthetic oligonucleotide
  Antisense strand to SEQ ID NO: 116952
aauccgaauagcaagauau

SEQ ID NO: 116954 - RNA, 19 nt, Artificial Sequence
  Description of Artificial Sequence: Synthetic oligonucleotide
  Sense strand starting at position 665 of SEQ ID NO: 1488
ucuggaaauuuguaaaucu

SEQ ID NO: 116955 - RNA, 19 nt, Artificial Sequence
  Description of Artificial Sequence: Synthetic oligonucleotide
  Antisense strand to SEQ ID NO: 116954
agauuuacaaauuuccaga

SEQ ID NO: 116956 - RNA, 19 nt, Artificial Sequence
  Description of Artificial Sequence: Synthetic oligonucleotide
  Sense strand starting at position 591 of SEQ ID NO: 1488
guuucuauguuucuauauc

SEQ ID NO: 116957 - RNA, 19 nt, Artificial Sequence
  Description of Artificial Sequence: Synthetic oligonucleotide
  Antisense strand to SEQ ID NO: 116956
gauauagaaacauagaaac

SEQ ID NO: 116958 - RNA, 19 nt, Artificial Sequence
  Description of Artificial Sequence: Synthetic oligonucleotide
  Sense strand starting at position 588 of SEQ ID NO: 1488
ggcguuucuauguuucuau

SEQ ID NO: 116959 - RNA, 19 nt, Artificial Sequence
  Description of Artificial Sequence: Synthetic oligonucleotide
  Antisense strand to SEQ ID NO: 116958
auagaaacauagaaacgcc

SEQ ID NO: 116960 - RNA, 19 nt, Artificial Sequence
  Description of Artificial Sequence: Synthetic oligonucleotide
  Sense strand starting at position 539 of SEQ ID NO: 1488
gugugugggcauguuuauu

SEQ ID NO: 116961 - RNA, 19 nt, Artificial Sequence
  Description of Artificial Sequence: Synthetic oligonucleotide
  Antisense strand to SEQ ID NO: 116960
aauaaacaugcccacacac

SEQ ID NO: 116962 - RNA, 19 nt, Artificial Sequence
  Description of Artificial Sequence: Synthetic oligonucleotide
  Sense strand starting at position 464 of SEQ ID NO: 1488
cugauugaaccaugcucuu

SEQ ID NO: 116963 - RNA, 19 nt, Artificial Sequence
  Description of Artificial Sequence: Synthetic oligonucleotide
  Antisense strand to SEQ ID NO: 116962
aagagcaugguucaaucag

SEQ ID NO: 116964 - RNA, 19 nt, Artificial Sequence
  Description of Artificial Sequence: Synthetic oligonucleotide
  Sense strand starting at position 389 of SEQ ID NO: 1488
uagguaugugguuaauguu

SEQ ID NO: 116965 - RNA, 19 nt, Artificial Sequence
  Description of Artificial Sequence: Synthetic oligonucleotide
  Antisense strand to SEQ ID NO: 116964
aacauuaaccacauaccua

SEQ ID NO: 116966 - RNA, 19 nt, Artificial Sequence
  Description of Artificial Sequence: Synthetic oligonucleotide
  Sense strand starting at position 385 of SEQ ID NO: 1488
acuuuagguaugugguuaa

SEQ ID NO: 116967 - RNA, 19 nt, Artificial Sequence
  Description of Artificial Sequence: Synthetic oligonucleotide
  Antisense strand to SEQ ID NO: 116966
uuaaccacauaccuaaagu

SEQ ID NO: 116968 - RNA, 19 nt, Artificial Sequence
  Description of Artificial Sequence: Synthetic oligonucleotide
  Sense strand starting at position 384 of SEQ ID NO: 1488
uacuuuagguaugugguua

SEQ ID NO: 116969 - RNA, 19 nt, Artificial Sequence
  Description of Artificial Sequence: Synthetic oligonucleotide
  Antisense strand to SEQ ID NO: 116968
uaaccacauaccuaaagua

SEQ ID NO: 116970 - RNA, 19 nt, Artificial Sequence
  Description of Artificial Sequence: Synthetic oligonucleotide
  Sense strand starting at position 377 of SEQ ID NO: 1488
ugugcaguacuuuagguau

SEQ ID NO: 116971 - RNA, 19 nt, Artificial Sequence
  Description of Artificial Sequence: Synthetic oligonucleotide
  Antisense strand to SEQ ID NO: 116970
auaccuaaaguacugcaca

SEQ ID NO: 116972 - RNA, 19 nt, Artificial Sequence
  Description of Artificial Sequence: Synthetic oligonucleotide
  Sense strand starting at position 372 of SEQ ID NO: 1488
uucuaugugcaguacuuua

SEQ ID NO: 116973 - RNA, 19 nt, Artificial Sequence
  Description of Artificial Sequence: Synthetic oligonucleotide
  Antisense strand to SEQ ID NO: 116972
uaaaguacugcacauagaa

SEQ ID NO: 116974 - RNA, 19 nt, Artificial Sequence
  Description of Artificial Sequence: Synthetic oligonucleotide
  Sense strand starting at position 362 of SEQ ID NO: 1488
gccuaauuauuucuaugug

SEQ ID NO: 116975 - RNA, 19 nt, Artificial Sequence
  Description of Artificial Sequence: Synthetic oligonucleotide
  Antisense strand to SEQ ID NO: 116974
cacauagaaauaauuaggc

SEQ ID NO: 116976 - RNA, 19 nt, Artificial Sequence
  Description of Artificial Sequence: Synthetic oligonucleotide
  Sense strand starting at position 341 of SEQ ID NO: 1488
ugugauaggcuuuaccuuu

SEQ ID NO: 116977 - RNA, 19 nt, Artificial Sequence
  Description of Artificial Sequence: Synthetic oligonucleotide
  Antisense strand to SEQ ID NO: 116976
aaagguaaagccuaucaca

SEQ ID NO: 116978 - RNA, 19 nt, Artificial Sequence
  Description of Artificial Sequence: Synthetic oligonucleotide
  Sense strand starting at position 329 of SEQ ID NO: 1488
augucuuuagauugugaua

SEQ ID NO: 116979 - RNA, 19 nt, Artificial Sequence
  Description of Artificial Sequence: Synthetic oligonucleotide
  Antisense strand to SEQ ID NO: 116978
uaucacaaucuaaagacau

SEQ ID NO: 116980 - RNA, 19 nt, Artificial Sequence
  Description of Artificial Sequence: Synthetic oligonucleotide
  Sense strand starting at position 324 of SEQ ID NO: 1488
aaugcaugucuuuagauug

SEQ ID NO: 116981 - RNA, 19 nt, Artificial Sequence
  Description of Artificial Sequence: Synthetic oligonucleotide
  Antisense strand to SEQ ID NO: 116980
caaucuaaagacaugcauu

SEQ ID NO: 116982 - RNA, 19 nt, Artificial Sequence
  Description of Artificial Sequence: Synthetic oligonucleotide
  Sense strand starting at position 321 of SEQ ID NO: 1488
acaaaugcaugucuuuaga

SEQ ID NO: 116983 - RNA, 19 nt, Artificial Sequence
  Description of Artificial Sequence: Synthetic oligonucleotide
  Antisense strand to SEQ ID NO: 116982
ucuaaagacaugcauuugu

SEQ ID NO: 116984 - RNA, 19 nt, Artificial Sequence
  Description of Artificial Sequence: Synthetic oligonucleotide
  Sense strand starting at position 277 of SEQ ID NO: 1488
guguaucuccaccacaaua

SEQ ID NO: 116985 - RNA, 19 nt, Artificial Sequence
  Description of Artificial Sequence: Synthetic oligonucleotide
  Antisense strand to SEQ ID NO: 116984
uauugugguggagauacac

SEQ ID NO: 116986 - RNA, 19 nt, Artificial Sequence
  Description of Artificial Sequence: Synthetic oligonucleotide
  Sense strand starting at position 93 of SEQ ID NO: 1488
ucuuaaacucucuaagcga

SEQ ID NO: 116987 - RNA, 19 nt, Artificial Sequence
  Description of Artificial Sequence: Synthetic oligonucleotide
  Antisense strand to SEQ ID NO: 116986
ucgcuuagagaguuuaaga

SEQ ID NO: 116988 - RNA, 19 nt, Artificial Sequence
  Description of Artificial Sequence: Synthetic oligonucleotide
  Sense strand starting at position 37 of SEQ ID NO: 1488
guuuauuaagcagaaucga

SEQ ID NO: 116989 - RNA, 19 nt, Artificial Sequence
  Description of Artificial Sequence: Synthetic oligonucleotide
  Antisense strand to SEQ ID NO: 116988
ucgauucugcuuaauaaac

SEQ ID NO: 116990 - RNA, 19 nt, Artificial Sequence
  Description of Artificial Sequence: Synthetic oligonucleotide
  Sense strand starting at position 34 of SEQ ID NO: 1488
gcaguuuauuaagcagaau

SEQ ID NO: 116991 - RNA, 19 nt, Artificial Sequence
  Description of Artificial Sequence: Synthetic oligonucleotide
  Antisense strand to SEQ ID NO: 116990
auucugcuuaauaaacugc

SEQ ID NO: 116992 - RNA, 19 nt, Artificial Sequence
  Description of Artificial Sequence: Synthetic oligonucleotide
  Sense strand starting at position 3862 of SEQ ID NO: 1489
uugauaccgcauuaaauga

SEQ ID NO: 116993 - RNA, 19 nt, Artificial Sequence
  Description of Artificial Sequence: Synthetic oligonucleotide
  Antisense strand to SEQ ID NO: 116992
ucauuuaaugcgguaucaa

SEQ ID NO: 116994 - RNA, 19 nt, Artificial Sequence
  Description of Artificial Sequence: Synthetic oligonucleotide
  Sense strand starting at position 3801 of SEQ ID NO: 1489
gcuauaugcaaggauguga

SEQ ID NO: 116995 - RNA, 19 nt, Artificial Sequence
  Description of Artificial Sequence: Synthetic oligonucleotide
  Antisense strand to SEQ ID NO: 116994
ucacauccuugcauauagc

SEQ ID NO: 116996 - RNA, 19 nt, Artificial Sequence
  Description of Artificial Sequence: Synthetic oligonucleotide
  Sense strand starting at position 3753 of SEQ ID NO: 1489
ugaagaugucuaugauaug

SEQ ID NO: 116997 - RNA, 19 nt, Artificial Sequence
  Description of Artificial Sequence: Synthetic oligonucleotide
  Antisense strand to SEQ ID NO: 116996
cauaucauagacaucuuca

SEQ ID NO: 116998 - RNA, 19 nt, Artificial Sequence
  Description of Artificial Sequence: Synthetic oligonucleotide
  Sense strand starting at position 3672 of SEQ ID NO: 1489
guguauguacacugaguua

SEQ ID NO: 116999 - RNA, 19 nt, Artificial Sequence
  Description of Artificial Sequence: Synthetic oligonucleotide
  Antisense strand to SEQ ID NO: 116998
uaacucaguguacauacac

SEQ ID NO: 117000 - RNA, 19 nt, Artificial Sequence
  Description of Artificial Sequence: Synthetic oligonucleotide
  Sense strand starting at position 3659 of SEQ ID NO: 1489
aggaucaauacacguguau

SEQ ID NO: 117001 - RNA, 19 nt, Artificial Sequence
  Description of Artificial Sequence: Synthetic oligonucleotide
  Antisense strand to SEQ ID NO: 117000
auacacguguauugauccu

SEQ ID NO: 117002 - RNA, 19 nt, Artificial Sequence
  Description of Artificial Sequence: Synthetic oligonucleotide
  Sense strand starting at position 3594 of SEQ ID NO: 1489
guaagaucuacacagugug

SEQ ID NO: 117003 - RNA, 19 nt, Artificial Sequence
  Description of Artificial Sequence: Synthetic oligonucleotide
  Antisense strand to SEQ ID NO: 117002
cacacuguguagaucuuac

SEQ ID NO: 117004 - RNA, 19 nt, Artificial Sequence
  Description of Artificial Sequence: Synthetic oligonucleotide
  Sense strand starting at position 3570 of SEQ ID NO: 1489
gaggaaguguaacaauaug

SEQ ID NO: 117005 - RNA, 19 nt, Artificial Sequence
  Description of Artificial Sequence: Synthetic oligonucleotide
  Antisense strand to SEQ ID NO: 117004
cauauuguuacacuuccuc

SEQ ID NO: 117006 - RNA, 19 nt, Artificial Sequence
  Description of Artificial Sequence: Synthetic oligonucleotide
  Sense strand starting at position 3457 of SEQ ID NO: 1489
aguauucuucuccagauag

SEQ ID NO: 117007 - RNA, 19 nt, Artificial Sequence
  Description of Artificial Sequence: Synthetic oligonucleotide
  Antisense strand to SEQ ID NO: 117006
cuaucuggagaagaauacu

SEQ ID NO: 117008 - RNA, 19 nt, Artificial Sequence
  Description of Artificial Sequence: Synthetic oligonucleotide
  Sense strand starting at position 3455 of SEQ ID NO: 1489
cgaguauucuucuccagau

SEQ ID NO: 117009 - RNA, 19 nt, Artificial Sequence
  Description of Artificial Sequence: Synthetic oligonucleotide
  Antisense strand to SEQ ID NO: 117008
aucuggagaagaauacucg

SEQ ID NO: 117010 - RNA, 19 nt, Artificial Sequence
  Description of Artificial Sequence: Synthetic oligonucleotide
  Sense strand starting at position 3443 of SEQ ID NO: 1489
guagaggugguucgaguau

SEQ ID NO: 117011 - RNA, 19 nt, Artificial Sequence
  Description of Artificial Sequence: Synthetic oligonucleotide
  Antisense strand to SEQ ID NO: 117010
auacucgaaccaccucuac

SEQ ID NO: 117012 - RNA, 19 nt, Artificial Sequence
  Description of Artificial Sequence: Synthetic oligonucleotide
  Sense strand starting at position 3208 of SEQ ID NO: 1489
gugucuuugcuucccucau

SEQ ID NO: 117013 - RNA, 19 nt, Artificial Sequence
  Description of Artificial Sequence: Synthetic oligonucleotide
  Antisense strand to SEQ ID NO: 117012
augagggaagcaaagacac

SEQ ID NO: 117014 - RNA, 19 nt, Artificial Sequence
  Description of Artificial Sequence: Synthetic oligonucleotide
  Sense strand starting at position 3196 of SEQ ID NO: 1489
gauguauauucugugucuu

SEQ ID NO: 117015 - RNA, 19 nt, Artificial Sequence
  Description of Artificial Sequence: Synthetic oligonucleotide
  Antisense strand to SEQ ID NO: 117014
aagacacagaauauacauc

SEQ ID NO: 117016 - RNA, 19 nt, Artificial Sequence
  Description of Artificial Sequence: Synthetic oligonucleotide
  Sense strand starting at position 3188 of SEQ ID NO: 1489
ccguauacgauguauauuc

SEQ ID NO: 117017 - RNA, 19 nt, Artificial Sequence
  Description of Artificial Sequence: Synthetic oligonucleotide
  Antisense strand to SEQ ID NO: 117016
gaauauacaucguauacgg

SEQ ID NO: 117018 - RNA, 19 nt, Artificial Sequence
  Description of Artificial Sequence: Synthetic oligonucleotide
  Sense strand starting at position 2936 of SEQ ID NO: 1489
gucaaacuuucucuaaguu

SEQ ID NO: 117019 - RNA, 19 nt, Artificial Sequence
  Description of Artificial Sequence: Synthetic oligonucleotide
  Antisense strand to SEQ ID NO: 117018
aacuuagagaaaguuugac

SEQ ID NO: 117020 - RNA, 19 nt, Artificial Sequence
  Description of Artificial Sequence: Synthetic oligonucleotide
  Sense strand starting at position 2921 of SEQ ID NO: 1489
gcauaauaauuugaaguca

SEQ ID NO: 117021 - RNA, 19 nt, Artificial Sequence
  Description of Artificial Sequence: Synthetic oligonucleotide
  Antisense strand to SEQ ID NO: 117020
ugacuucaaauuauuaugc

SEQ ID NO: 117022 - RNA, 19 nt, Artificial Sequence
  Description of Artificial Sequence: Synthetic oligonucleotide
  Sense strand starting at position 2863 of SEQ ID NO: 1489
acugcagcagccuaugauu

SEQ ID NO: 117023 - RNA, 19 nt, Artificial Sequence
  Description of Artificial Sequence: Synthetic oligonucleotide
  Antisense strand to SEQ ID NO: 117022
aaucauaggcugcugcagu

SEQ ID NO: 117024 - RNA, 19 nt, Artificial Sequence
  Description of Artificial Sequence: Synthetic oligonucleotide
  Sense strand starting at position 2780 of SEQ ID NO: 1489
ggauccauauuaugaauaa

SEQ ID NO: 117025 - RNA, 19 nt, Artificial Sequence
  Description of Artificial Sequence: Synthetic oligonucleotide
  Antisense strand to SEQ ID NO: 117024
uuauucauaauauggaucc

SEQ ID NO: 117026 - RNA, 19 nt, Artificial Sequence
  Description of Artificial Sequence: Synthetic oligonucleotide
  Sense strand starting at position 2778 of SEQ ID NO: 1489
auggauccauauuaugaau

SEQ ID NO: 117027 - RNA, 19 nt, Artificial Sequence
  Description of Artificial Sequence: Synthetic oligonucleotide
  Antisense strand to SEQ ID NO: 117026
auucauaauauggauccau

SEQ ID NO: 117028 - RNA, 19 nt, Artificial Sequence
  Description of Artificial Sequence: Synthetic oligonucleotide
  Sense strand starting at position 2722 of SEQ ID NO: 1489
gaucaugugcuaugcuuaa

SEQ ID NO: 117029 - RNA, 19 nt, Artificial Sequence
  Description of Artificial Sequence: Synthetic oligonucleotide
  Antisense strand to SEQ ID NO: 117028
uuaagcauagcacaugauc

SEQ ID NO: 117030 - RNA, 19 nt, Artificial Sequence
  Description of Artificial Sequence: Synthetic oligonucleotide
  Sense strand starting at position 2707 of SEQ ID NO: 1489
cucagaugccauuaagauc

SEQ ID NO: 117031 - RNA, 19 nt, Artificial Sequence
  Description of Artificial Sequence: Synthetic oligonucleotide
  Antisense strand to SEQ ID NO: 117030
gaucuuaauggcaucugag

SEQ ID NO: 117032 - RNA, 19 nt, Artificial Sequence
  Description of Artificial Sequence: Synthetic oligonucleotide
  Sense strand starting at position 2491 of SEQ ID NO: 1489
uuaguaaggcugugaauua

SEQ ID NO: 117033 - RNA, 19 nt, Artificial Sequence
  Description of Artificial Sequence: Synthetic oligonucleotide
  Antisense strand to SEQ ID NO: 117032
uaauucacagccuuacuaa

SEQ ID NO: 117034 - RNA, 19 nt, Artificial Sequence
  Description of Artificial Sequence: Synthetic oligonucleotide
  Sense strand starting at position 2394 of SEQ ID NO: 1489
cgcauuugauuacaggaga

SEQ ID NO: 117035 - RNA, 19 nt, Artificial Sequence
  Description of Artificial Sequence: Synthetic oligonucleotide
  Antisense strand to SEQ ID NO: 117034
ucuccuguaaucaaaugcg

SEQ ID NO: 117036 - RNA, 19 nt, Artificial Sequence
  Description of Artificial Sequence: Synthetic oligonucleotide
  Sense strand starting at position 2308 of SEQ ID NO: 1489
ugaugugacguugggcuau

SEQ ID NO: 117037 - RNA, 19 nt, Artificial Sequence
  Description of Artificial Sequence: Synthetic oligonucleotide
  Antisense strand to SEQ ID NO: 117036
auagcccaacgucacauca

SEQ ID NO: 117038 - RNA, 19 nt, Artificial Sequence
  Description of Artificial Sequence: Synthetic oligonucleotide
  Sense strand starting at position 857 of SEQ ID NO: 1489
agauuaacuucuguuugac

SEQ ID NO: 117039 - RNA, 19 nt, Artificial Sequence
  Description of Artificial Sequence: Synthetic oligonucleotide
  Antisense strand to SEQ ID NO: 117038
gucaaacagaaguuaaucu

SEQ ID NO: 117040 - RNA, 19 nt, Artificial Sequence
  Description of Artificial Sequence: Synthetic oligonucleotide
  Sense strand starting at position 787 of SEQ ID NO: 1489
gaugucuuagaauauguau

SEQ ID NO: 117041 - RNA, 19 nt, Artificial Sequence
  Description of Artificial Sequence: Synthetic oligonucleotide
  Antisense strand to SEQ ID NO: 117040
auacauauucuaagacauc

SEQ ID NO: 117042 - RNA, 19 nt, Artificial Sequence
  Description of Artificial Sequence: Synthetic oligonucleotide
  Sense strand starting at position 479 of SEQ ID NO: 1489
auaugauuaguuuggaccu

SEQ ID NO: 117043 - RNA, 19 nt, Artificial Sequence
  Description of Artificial Sequence: Synthetic oligonucleotide
  Antisense strand to SEQ ID NO: 117042
agguccaaacuaaucauau

SEQ ID NO: 117044 - RNA, 19 nt, Artificial Sequence
  Description of Artificial Sequence: Synthetic oligonucleotide
  Sense strand starting at position 470 of SEQ ID NO: 1489
ugcugaaugauaugauuag

SEQ ID NO: 117045 - RNA, 19 nt, Artificial Sequence
  Description of Artificial Sequence: Synthetic oligonucleotide
  Antisense strand to SEQ ID NO: 117044
cuaaucauaucauucagca

SEQ ID NO: 117046 - RNA, 19 nt, Artificial Sequence
  Description of Artificial Sequence: Synthetic oligonucleotide
  Sense strand starting at position 264 of SEQ ID NO: 1489
uuggcugcuccacaaacau

SEQ ID NO: 117047 - RNA, 19 nt, Artificial Sequence
  Description of Artificial Sequence: Synthetic oligonucleotide
  Antisense strand to SEQ ID NO: 117046
auguuuguggagcagccaa

SEQ ID NO: 117048 - RNA, 19 nt, Artificial Sequence
  Description of Artificial Sequence: Synthetic oligonucleotide
  Sense strand starting at position 199 of SEQ ID NO: 1489
gggucuauagacuguaacu

SEQ ID NO: 117049 - RNA, 19 nt, Artificial Sequence
  Description of Artificial Sequence: Synthetic oligonucleotide
  Antisense strand to SEQ ID NO: 117048
aguuacagucuauagaccc

SEQ ID NO: 117050 - RNA, 19 nt, Artificial Sequence
  Description of Artificial Sequence: Synthetic oligonucleotide
  Sense strand starting at position 180 of SEQ ID NO: 1489
agucaacuauagucuaaga

SEQ ID NO: 117051 - RNA, 19 nt, Artificial Sequence
  Description of Artificial Sequence: Synthetic oligonucleotide
  Antisense strand to SEQ ID NO: 117050
ucuuagacuauaguugacu

SEQ ID NO: 117052 - RNA, 19 nt, Artificial Sequence
  Description of Artificial Sequence: Synthetic oligonucleotide
  Sense strand starting at position 177 of SEQ ID NO: 1489
cuaagucaacuauagucua

SEQ ID NO: 117053 - RNA, 19 nt, Artificial Sequence
  Description of Artificial Sequence: Synthetic oligonucleotide
  Antisense strand to SEQ ID NO: 117052
uagacuauaguugacuuag

SEQ ID NO: 117054 - RNA, 19 nt, Artificial Sequence
  Description of Artificial Sequence: Synthetic oligonucleotide
  Sense strand starting at position 133 of SEQ ID NO: 1489
ugacgugacugggaaauga

SEQ ID NO: 117055 - RNA, 19 nt, Artificial Sequence
  Description of Artificial Sequence: Synthetic oligonucleotide
  Antisense strand to SEQ ID NO: 117054
ucauuucccagucacguca

SEQ ID NO: 117056 - RNA, 19 nt, Artificial Sequence
  Description of Artificial Sequence: Synthetic oligonucleotide
  Sense strand starting at position 131 of SEQ ID NO: 1489
ugugacgugacugggaaau

SEQ ID NO: 117057 - RNA, 19 nt, Artificial Sequence
  Description of Artificial Sequence: Synthetic oligonucleotide
  Antisense strand to SEQ ID NO: 117056
auuucccagucacgucaca

SEQ ID NO: 117058 - RNA, 19 nt, Artificial Sequence
  Description of Artificial Sequence: Synthetic oligonucleotide
  Sense strand starting at position 130 of SEQ ID NO: 1489
uugugacgugacugggaaa

SEQ ID NO: 117059 - RNA, 19 nt, Artificial Sequence
  Description of Artificial Sequence: Synthetic oligonucleotide
  Antisense strand to SEQ ID NO: 117058
uuucccagucacgucacaa

SEQ ID NO: 117060 - RNA, 19 nt, Artificial Sequence
  Description of Artificial Sequence: Synthetic oligonucleotide
  Sense strand starting at position 117 of SEQ ID NO: 1489
aaucuugaguguguuguga

SEQ ID NO: 117061 - RNA, 19 nt, Artificial Sequence
  Description of Artificial Sequence: Synthetic oligonucleotide
  Antisense strand to SEQ ID NO: 117060
ucacaacacacucaagauu

SEQ ID NO: 117062 - RNA, 19 nt, Artificial Sequence
  Description of Artificial Sequence: Synthetic oligonucleotide
  Sense strand starting at position 114 of SEQ ID NO: 1489
gcaaaucuugaguguguug

SEQ ID NO: 117063 - RNA, 19 nt, Artificial Sequence
  Description of Artificial Sequence: Synthetic oligonucleotide
  Antisense strand to SEQ ID NO: 117062
caacacacucaagauuugc

SEQ ID NO: 117064 - RNA, 19 nt, Artificial Sequence
  Description of Artificial Sequence: Synthetic oligonucleotide
  Sense strand starting at position 113 of SEQ ID NO: 1489
ggcaaaucuugaguguguu

SEQ ID NO: 117065 - RNA, 19 nt, Artificial Sequence
  Description of Artificial Sequence: Synthetic oligonucleotide
  Antisense strand to SEQ ID NO: 117064
aacacacucaagauuugcc

SEQ ID NO: 117066 - RNA, 19 nt, Artificial Sequence
  Description of Artificial Sequence: Synthetic oligonucleotide
  Sense strand starting at position 70 of SEQ ID NO: 1489
agaagagaaugucuugcau

SEQ ID NO: 117067 - RNA, 19 nt, Artificial Sequence
  Description of Artificial Sequence: Synthetic oligonucleotide
  Antisense strand to SEQ ID NO: 117066
augcaagacauucucuucu

SEQ ID NO: 117068 - RNA, 19 nt, Artificial Sequence
  Description of Artificial Sequence: Synthetic oligonucleotide
  Sense strand starting at position 31 of SEQ ID NO: 1489
auugauuuaugagaagagu

SEQ ID NO: 117069 - RNA, 19 nt, Artificial Sequence
  Description of Artificial Sequence: Synthetic oligonucleotide
  Antisense strand to SEQ ID NO: 117068
acucuucucauaaaucaau

SEQ ID NO: 117070 - RNA, 19 nt, Artificial Sequence
  Description of Artificial Sequence: Synthetic oligonucleotide
  Sense strand starting at position 28 of SEQ ID NO: 1489
ccuauugauuuaugagaag

SEQ ID NO: 117071 - RNA, 19 nt, Artificial Sequence
  Description of Artificial Sequence: Synthetic oligonucleotide
  Antisense strand to SEQ ID NO: 117070
cuucucauaaaucaauagg

SEQ ID NO: 117072 - RNA, 19 nt, Artificial Sequence
  Description of Artificial Sequence: Synthetic oligonucleotide
  Sense strand starting at position 3895 of SEQ ID NO: 1490
cuuagaaaugcauauagca

SEQ ID NO: 117073 - RNA, 19 nt, Artificial Sequence
  Description of Artificial Sequence: Synthetic oligonucleotide
  Antisense strand to SEQ ID NO: 117072
ugcuauaugcauuucuaag

SEQ ID NO: 117074 - RNA, 19 nt, Artificial Sequence
  Description of Artificial Sequence: Synthetic oligonucleotide
  Sense strand starting at position 3873 of SEQ ID NO: 1490
acaauaugugcuuaaggac

SEQ ID NO: 117075 - RNA, 19 nt, Artificial Sequence
  Description of Artificial Sequence: Synthetic oligonucleotide
  Antisense strand to SEQ ID NO: 117074
guccuuaagcacauauugu

SEQ ID NO: 117076 - RNA, 19 nt, Artificial Sequence
  Description of Artificial Sequence: Synthetic oligonucleotide
  Sense strand starting at position 3870 of SEQ ID NO: 1490
ggaacaauaugugcuuaag

SEQ ID NO: 117077 - RNA, 19 nt, Artificial Sequence
  Description of Artificial Sequence: Synthetic oligonucleotide
  Antisense strand to SEQ ID NO: 117076
cuuaagcacauauuguucc

SEQ ID NO: 117078 - RNA, 19 nt, Artificial Sequence
  Description of Artificial Sequence: Synthetic oligonucleotide
  Sense strand starting at position 3867 of SEQ ID NO: 1490
ggaggaacaauaugugcuu

SEQ ID NO: 117079 - RNA, 19 nt, Artificial Sequence
  Description of Artificial Sequence: Synthetic oligonucleotide
  Antisense strand to SEQ ID NO: 117078
aagcacauauuguuccucc

SEQ ID NO: 117080 - RNA, 19 nt, Artificial Sequence
  Description of Artificial Sequence: Synthetic oligonucleotide
  Sense strand starting at position 3648 of SEQ ID NO: 1490
uuacgaaaucugugaaaua

SEQ ID NO: 117081 - RNA, 19 nt, Artificial Sequence
  Description of Artificial Sequence: Synthetic oligonucleotide
  Antisense strand to SEQ ID NO: 117080
uauuucacagauuucguaa

SEQ ID NO: 117082 - RNA, 19 nt, Artificial Sequence
  Description of Artificial Sequence: Synthetic oligonucleotide
  Sense strand starting at position 3646 of SEQ ID NO: 1490
uguuacgaaaucugugaaa

SEQ ID NO: 117083 - RNA, 19 nt, Artificial Sequence
  Description of Artificial Sequence: Synthetic oligonucleotide
  Antisense strand to SEQ ID NO: 117082
uuucacagauuucguaaca

SEQ ID NO: 117084 - RNA, 19 nt, Artificial Sequence
  Description of Artificial Sequence: Synthetic oligonucleotide
  Sense strand starting at position 3635 of SEQ ID NO: 1490
gauguaugauauguuacga

SEQ ID NO: 117085 - RNA, 19 nt, Artificial Sequence
  Description of Artificial Sequence: Synthetic oligonucleotide
  Antisense strand to SEQ ID NO: 117084
ucguaacauaucauacauc

SEQ ID NO: 117086 - RNA, 19 nt, Artificial Sequence
  Description of Artificial Sequence: Synthetic oligonucleotide
  Sense strand starting at position 3604 of SEQ ID NO: 1490
aauuguugugaucagaauu

SEQ ID NO: 117087 - RNA, 19 nt, Artificial Sequence
  Description of Artificial Sequence: Synthetic oligonucleotide
  Antisense strand to SEQ ID NO: 117086
aauucugaucacaacaauu

SEQ ID NO: 117088 - RNA, 19 nt, Artificial Sequence
  Description of Artificial Sequence: Synthetic oligonucleotide
  Sense strand starting at position 3597 of SEQ ID NO: 1490
aagaaugaauuguugugau

SEQ ID NO: 117089 - RNA, 19 nt, Artificial Sequence
  Description of Artificial Sequence: Synthetic oligonucleotide
  Antisense strand to SEQ ID NO: 117088
aucacaacaauucauucuu

SEQ ID NO: 117090 - RNA, 19 nt, Artificial Sequence
  Description of Artificial Sequence: Synthetic oligonucleotide
  Sense strand starting at position 3335 of SEQ ID NO: 1490
gacaaacuuccggguagag

SEQ ID NO: 117091 - RNA, 19 nt, Artificial Sequence
  Description of Artificial Sequence: Synthetic oligonucleotide
  Antisense strand to SEQ ID NO: 117090
cucuacccggaaguuuguc

SEQ ID NO: 117092 - RNA, 19 nt, Artificial Sequence
  Description of Artificial Sequence: Synthetic oligonucleotide
  Sense strand starting at position 3252 of SEQ ID NO: 1490
uacagauugcuuuauggau

SEQ ID NO: 117093 - RNA, 19 nt, Artificial Sequence
  Description of Artificial Sequence: Synthetic oligonucleotide
  Antisense strand to SEQ ID NO: 117092
auccauaaagcaaucugua

SEQ ID NO: 117094 - RNA, 19 nt, Artificial Sequence
  Description of Artificial Sequence: Synthetic oligonucleotide
  Sense strand starting at position 3230 of SEQ ID NO: 1490
uucucuagugcuuagauaa

SEQ ID NO: 117095 - RNA, 19 nt, Artificial Sequence
  Description of Artificial Sequence: Synthetic oligonucleotide
  Antisense strand to SEQ ID NO: 117094
uuaucuaagcacuagagaa

SEQ ID NO: 117096 - RNA, 19 nt, Artificial Sequence
  Description of Artificial Sequence: Synthetic oligonucleotide
  Sense strand starting at position 3229 of SEQ ID NO: 1490
cuucucuagugcuuagaua

SEQ ID NO: 117097 - RNA, 19 nt, Artificial Sequence
  Description of Artificial Sequence: Synthetic oligonucleotide
  Antisense strand to SEQ ID NO: 117096
uaucuaagcacuagagaag

SEQ ID NO: 117098 - RNA, 19 nt, Artificial Sequence
  Description of Artificial Sequence: Synthetic oligonucleotide
  Sense strand starting at position 3189 of SEQ ID NO: 1490
gcagaugccuuaccaaaua

SEQ ID NO: 117099 - RNA, 19 nt, Artificial Sequence
  Description of Artificial Sequence: Synthetic oligonucleotide
  Antisense strand to SEQ ID NO: 117098
uauuugguaaggcaucugc

SEQ ID NO: 117100 - RNA, 19 nt, Artificial Sequence
  Description of Artificial Sequence: Synthetic oligonucleotide
  Sense strand starting at position 2983 of SEQ ID NO: 1490
uugaaugauguuugcacaa

SEQ ID NO: 117101 - RNA, 19 nt, Artificial Sequence
  Description of Artificial Sequence: Synthetic oligonucleotide
  Antisense strand to SEQ ID NO: 117100
uugugcaaacaucauucaa

SEQ ID NO: 117102 - RNA, 19 nt, Artificial Sequence
  Description of Artificial Sequence: Synthetic oligonucleotide
  Sense strand starting at position 2982 of SEQ ID NO: 1490
cuugaaugauguuugcaca

SEQ ID NO: 117103 - RNA, 19 nt, Artificial Sequence
  Description of Artificial Sequence: Synthetic oligonucleotide
  Antisense strand to SEQ ID NO: 117102
ugugcaaacaucauucaag

SEQ ID NO: 117104 - RNA, 19 nt, Artificial Sequence
  Description of Artificial Sequence: Synthetic oligonucleotide
  Sense strand starting at position 2672 of SEQ ID NO: 1490
gugggagugaaguggcaau

SEQ ID NO: 117105 - RNA, 19 nt, Artificial Sequence
  Description of Artificial Sequence: Synthetic oligonucleotide
  Antisense strand to SEQ ID NO: 117104
auugccacuucacucccac

SEQ ID NO: 117106 - RNA, 19 nt, Artificial Sequence
  Description of Artificial Sequence: Synthetic oligonucleotide
  Sense strand starting at position 2591 of SEQ ID NO: 1490
aucuuuauaggaugaucua

SEQ ID NO: 117107 - RNA, 19 nt, Artificial Sequence
  Description of Artificial Sequence: Synthetic oligonucleotide
  Antisense strand to SEQ ID NO: 117106
uagaucauccuauaaagau

SEQ ID NO: 117108 - RNA, 19 nt, Artificial Sequence
  Description of Artificial Sequence: Synthetic oligonucleotide
  Sense strand starting at position 2522 of SEQ ID NO: 1490
uugaauacauaugcauaga

SEQ ID NO: 117109 - RNA, 19 nt, Artificial Sequence
  Description of Artificial Sequence: Synthetic oligonucleotide
  Antisense strand to SEQ ID NO: 117108
ucuaugcauauguauucaa

SEQ ID NO: 117110 - RNA, 19 nt, Artificial Sequence
  Description of Artificial Sequence: Synthetic oligonucleotide
  Sense strand starting at position 2312 of SEQ ID NO: 1490
agccuucuuugaucugacu

SEQ ID NO: 117111 - RNA, 19 nt, Artificial Sequence
  Description of Artificial Sequence: Synthetic oligonucleotide
  Antisense strand to SEQ ID NO: 117110
agucagaucaaagaaggcu

SEQ ID NO: 117112 - RNA, 19 nt, Artificial Sequence
  Description of Artificial Sequence: Synthetic oligonucleotide
  Sense strand starting at position 2263 of SEQ ID NO: 1490
augucaauauggucucuau

SEQ ID NO: 117113 - RNA, 19 nt, Artificial Sequence
  Description of Artificial Sequence: Synthetic oligonucleotide
  Antisense strand to SEQ ID NO: 117112
auagagaccauauugacau

SEQ ID NO: 117114 - RNA, 19 nt, Artificial Sequence
  Description of Artificial Sequence: Synthetic oligonucleotide
  Sense strand starting at position 2101 of SEQ ID NO: 1490
aauucuugagacuggaguu

SEQ ID NO: 117115 - RNA, 19 nt, Artificial Sequence
  Description of Artificial Sequence: Synthetic oligonucleotide
  Antisense strand to SEQ ID NO: 117114
aacuccagucucaagaauu

SEQ ID NO: 117116 - RNA, 19 nt, Artificial Sequence
  Description of Artificial Sequence: Synthetic oligonucleotide
  Sense strand starting at position 2094 of SEQ ID NO: 1490
cucaguaaauucuugagac

SEQ ID NO: 117117 - RNA, 19 nt, Artificial Sequence
  Description of Artificial Sequence: Synthetic oligonucleotide
  Antisense strand to SEQ ID NO: 117116
gucucaagaauuuacugag

SEQ ID NO: 117118 - RNA, 19 nt, Artificial Sequence
  Description of Artificial Sequence: Synthetic oligonucleotide
  Sense strand starting at position 2063 of SEQ ID NO: 1490
ucuuuaucugcagggaaug

SEQ ID NO: 117119 - RNA, 19 nt, Artificial Sequence
  Description of Artificial Sequence: Synthetic oligonucleotide
  Antisense strand to SEQ ID NO: 117118
cauucccugcagauaaaga

SEQ ID NO: 117120 - RNA, 19 nt, Artificial Sequence
  Description of Artificial Sequence: Synthetic oligonucleotide
  Sense strand starting at position 2061 of SEQ ID NO: 1490
cgucuuuaucugcagggaa

SEQ ID NO: 117121 - RNA, 19 nt, Artificial Sequence
  Description of Artificial Sequence: Synthetic oligonucleotide
  Antisense strand to SEQ ID NO: 117120
uucccugcagauaaagacg

SEQ ID NO: 117122 - RNA, 19 nt, Artificial Sequence
  Description of Artificial Sequence: Synthetic oligonucleotide
  Sense strand starting at position 2054 of SEQ ID NO: 1490
agaaauucgucuuuaucug

SEQ ID NO: 117123 - RNA, 19 nt, Artificial Sequence
  Description of Artificial Sequence: Synthetic oligonucleotide
  Antisense strand to SEQ ID NO: 117122
cagauaaagacgaauuucu

SEQ ID NO: 117124 - RNA, 19 nt, Artificial Sequence
  Description of Artificial Sequence: Synthetic oligonucleotide
  Sense strand starting at position 2041 of SEQ ID NO: 1490
guaaguuaagcacagaaau

SEQ ID NO: 117125 - RNA, 19 nt, Artificial Sequence
  Description of Artificial Sequence: Synthetic oligonucleotide
  Antisense strand to SEQ ID NO: 117124
auuucugugcuuaacuuac

SEQ ID NO: 117126 - RNA, 19 nt, Artificial Sequence
  Description of Artificial Sequence: Synthetic oligonucleotide
  Sense strand starting at position 2013 of SEQ ID NO: 1490
gugcucuuuccugaaggga

SEQ ID NO: 117127 - RNA, 19 nt, Artificial Sequence
  Description of Artificial Sequence: Synthetic oligonucleotide
  Antisense strand to SEQ ID NO: 117126
ucccuucaggaaagagcac

SEQ ID NO: 117128 - RNA, 19 nt, Artificial Sequence
  Description of Artificial Sequence: Synthetic oligonucleotide
  Sense strand starting at position 2009 of SEQ ID NO: 1490
ucgugugcucuuuccugaa

SEQ ID NO: 117129 - RNA, 19 nt, Artificial Sequence
  Description of Artificial Sequence: Synthetic oligonucleotide
  Antisense strand to SEQ ID NO: 117128
uucaggaaagagcacacga

SEQ ID NO: 117130 - RNA, 19 nt, Artificial Sequence
  Description of Artificial Sequence: Synthetic oligonucleotide
  Sense strand starting at position 1014 of SEQ ID NO: 1490
gcuggauggauguguaucu

SEQ ID NO: 117131 - RNA, 19 nt, Artificial Sequence
  Description of Artificial Sequence: Synthetic oligonucleotide
  Antisense strand to SEQ ID NO: 117130
agauacacauccauccagc

SEQ ID NO: 117132 - RNA, 19 nt, Artificial Sequence
  Description of Artificial Sequence: Synthetic oligonucleotide
  Sense strand starting at position 970 of SEQ ID NO: 1490
uccugaacucuaggauuga

SEQ ID NO: 117133 - RNA, 19 nt, Artificial Sequence
  Description of Artificial Sequence: Synthetic oligonucleotide
  Antisense strand to SEQ ID NO: 117132
ucaauccuagaguucagga

SEQ ID NO: 117134 - RNA, 19 nt, Artificial Sequence
  Description of Artificial Sequence: Synthetic oligonucleotide
  Sense strand starting at position 968 of SEQ ID NO: 1490
gcuccugaacucuaggauu

SEQ ID NO: 117135 - RNA, 19 nt, Artificial Sequence
  Description of Artificial Sequence: Synthetic oligonucleotide
  Antisense strand to SEQ ID NO: 117134
aauccuagaguucaggagc

SEQ ID NO: 117136 - RNA, 19 nt, Artificial Sequence
  Description of Artificial Sequence: Synthetic oligonucleotide
  Sense strand starting at position 882 of SEQ ID NO: 1490
guuguuuggaguuauauau

SEQ ID NO: 117137 - RNA, 19 nt, Artificial Sequence
  Description of Artificial Sequence: Synthetic oligonucleotide
  Antisense strand to SEQ ID NO: 117136
auauauaacuccaaacaac

SEQ ID NO: 117138 - RNA, 19 nt, Artificial Sequence
  Description of Artificial Sequence: Synthetic oligonucleotide
  Sense strand starting at position 736 of SEQ ID NO: 1490
ggaaauuguuaugcugagu

SEQ ID NO: 117139 - RNA, 19 nt, Artificial Sequence
  Description of Artificial Sequence: Synthetic oligonucleotide
  Antisense strand to SEQ ID NO: 117138
acucagcauaacaauuucc

SEQ ID NO: 117140 - RNA, 19 nt, Artificial Sequence
  Description of Artificial Sequence: Synthetic oligonucleotide
  Sense strand starting at position 582 of SEQ ID NO: 1490
gaguaauugguacguuaag

SEQ ID NO: 117141 - RNA, 19 nt, Artificial Sequence
  Description of Artificial Sequence: Synthetic oligonucleotide
  Antisense strand to SEQ ID NO: 117140
cuuaacguaccaauuacuc

SEQ ID NO: 117142 - RNA, 19 nt, Artificial Sequence
  Description of Artificial Sequence: Synthetic oligonucleotide
  Sense strand starting at position 578 of SEQ ID NO: 1490
gaaugaguaauugguacgu

SEQ ID NO: 117143 - RNA, 19 nt, Artificial Sequence
  Description of Artificial Sequence: Synthetic oligonucleotide
  Antisense strand to SEQ ID NO: 117142
acguaccaauuacucauuc

SEQ ID NO: 117144 - RNA, 19 nt, Artificial Sequence
  Description of Artificial Sequence: Synthetic oligonucleotide
  Sense strand starting at position 554 of SEQ ID NO: 1490
uguaaugaguucccuaaau

SEQ ID NO: 117145 - RNA, 19 nt, Artificial Sequence
  Description of Artificial Sequence: Synthetic oligonucleotide
  Antisense strand to SEQ ID NO: 117144
auuuagggaacucauuaca

SEQ ID NO: 117146 - RNA, 19 nt, Artificial Sequence
  Description of Artificial Sequence: Synthetic oligonucleotide
  Sense strand starting at position 544 of SEQ ID NO: 1490
ugcuaaacuguguaaugag

SEQ ID NO: 117147 - RNA, 19 nt, Artificial Sequence
  Description of Artificial Sequence: Synthetic oligonucleotide
  Antisense strand to SEQ ID NO: 117146
cucauuacacaguuuagca

SEQ ID NO: 117148 - RNA, 19 nt, Artificial Sequence
  Description of Artificial Sequence: Synthetic oligonucleotide
  Sense strand starting at position 543 of SEQ ID NO: 1490
cugcuaaacuguguaauga

SEQ ID NO: 117149 - RNA, 19 nt, Artificial Sequence
  Description of Artificial Sequence: Synthetic oligonucleotide
  Antisense strand to SEQ ID NO: 117148
ucauuacacaguuuagcag

SEQ ID NO: 117150 - RNA, 19 nt, Artificial Sequence
  Description of Artificial Sequence: Synthetic oligonucleotide
  Sense strand starting at position 532 of SEQ ID NO: 1490
ugaugagcucucugcuaaa

SEQ ID NO: 117151 - RNA, 19 nt, Artificial Sequence
  Description of Artificial Sequence: Synthetic oligonucleotide
  Antisense strand to SEQ ID NO: 117150
uuuagcagagagcucauca

SEQ ID NO: 117152 - RNA, 19 nt, Artificial Sequence
  Description of Artificial Sequence: Synthetic oligonucleotide
  Sense strand starting at position 3926 of SEQ ID NO: 1491
acugcuugagcucagaaca

SEQ ID NO: 117153 - RNA, 19 nt, Artificial Sequence
  Description of Artificial Sequence: Synthetic oligonucleotide
  Antisense strand to SEQ ID NO: 117152
uguucugagcucaagcagu

SEQ ID NO: 117154 - RNA, 19 nt, Artificial Sequence
  Description of Artificial Sequence: Synthetic oligonucleotide
  Sense strand starting at position 3838 of SEQ ID NO: 1491
agacauguauaccaauaga

SEQ ID NO: 117155 - RNA, 19 nt, Artificial Sequence
  Description of Artificial Sequence: Synthetic oligonucleotide
  Antisense strand to SEQ ID NO: 117154
ucuauugguauacaugucu

SEQ ID NO: 117156 - RNA, 19 nt, Artificial Sequence
  Description of Artificial Sequence: Synthetic oligonucleotide
  Sense strand starting at position 3835 of SEQ ID NO: 1491
gccagacauguauaccaau

SEQ ID NO: 117157 - RNA, 19 nt, Artificial Sequence
  Description of Artificial Sequence: Synthetic oligonucleotide
  Antisense strand to SEQ ID NO: 117156
auugguauacaugucuggc

SEQ ID NO: 117158 - RNA, 19 nt, Artificial Sequence
  Description of Artificial Sequence: Synthetic oligonucleotide
  Sense strand starting at position 3814 of SEQ ID NO: 1491
acaguauggcauugguaua

SEQ ID NO: 117159 - RNA, 19 nt, Artificial Sequence
  Description of Artificial Sequence: Synthetic oligonucleotide
  Antisense strand to SEQ ID NO: 117158
uauaccaaugccauacugu

SEQ ID NO: 117160 - RNA, 19 nt, Artificial Sequence
  Description of Artificial Sequence: Synthetic oligonucleotide
  Sense strand starting at position 3562 of SEQ ID NO: 1491
ugucaugaaacuuggcuga

SEQ ID NO: 117161 - RNA, 19 nt, Artificial Sequence
  Description of Artificial Sequence: Synthetic oligonucleotide
  Antisense strand to SEQ ID NO: 117160
ucagccaaguuucaugaca

SEQ ID NO: 117162 - RNA, 19 nt, Artificial Sequence
  Description of Artificial Sequence: Synthetic oligonucleotide
  Sense strand starting at position 3525 of SEQ ID NO: 1491
ggugaauagaacugcugau

SEQ ID NO: 117163 - RNA, 19 nt, Artificial Sequence
  Description of Artificial Sequence: Synthetic oligonucleotide
  Antisense strand to SEQ ID NO: 117162
aucagcaguucuauucacc

SEQ ID NO: 117164 - RNA, 19 nt, Artificial Sequence
  Description of Artificial Sequence: Synthetic oligonucleotide
  Sense strand starting at position 3519 of SEQ ID NO: 1491
gcuguuggugaauagaacu

SEQ ID NO: 117165 - RNA, 19 nt, Artificial Sequence
  Description of Artificial Sequence: Synthetic oligonucleotide
  Antisense strand to SEQ ID NO: 117164
aguucuauucaccaacagc

SEQ ID NO: 117166 - RNA, 19 nt, Artificial Sequence
  Description of Artificial Sequence: Synthetic oligonucleotide
  Sense strand starting at position 3516 of SEQ ID NO: 1491
gcugcuguuggugaauaga

SEQ ID NO: 117167 - RNA, 19 nt, Artificial Sequence
  Description of Artificial Sequence: Synthetic oligonucleotide
  Antisense strand to SEQ ID NO: 117166
ucuauucaccaacagcagc

SEQ ID NO: 117168 - RNA, 19 nt, Artificial Sequence
  Description of Artificial Sequence: Synthetic oligonucleotide
  Sense strand starting at position 3200 of SEQ ID NO: 1491
gucaaacuuucucuaaguc

SEQ ID NO: 117169 - RNA, 19 nt, Artificial Sequence
  Description of Artificial Sequence: Synthetic oligonucleotide
  Antisense strand to SEQ ID NO: 117168
gacuuagagaaaguuugac

SEQ ID NO: 117170 - RNA, 19 nt, Artificial Sequence
  Description of Artificial Sequence: Synthetic oligonucleotide
  Sense strand starting at position 3063 of SEQ ID NO: 1491
auacauaugugacuuggaa

SEQ ID NO: 117171 - RNA, 19 nt, Artificial Sequence
  Description of Artificial Sequence: Synthetic oligonucleotide
  Antisense strand to SEQ ID NO: 117170
uuccaagucacauauguau

SEQ ID NO: 117172 - RNA, 19 nt, Artificial Sequence
  Description of Artificial Sequence: Synthetic oligonucleotide
  Sense strand starting at position 2966 of SEQ ID NO: 1491
gugacuuauuuggaggaac

SEQ ID NO: 117173 - RNA, 19 nt, Artificial Sequence
  Description of Artificial Sequence: Synthetic oligonucleotide
  Antisense strand to SEQ ID NO: 117172
guuccuccaaauaagucac

SEQ ID NO: 117174 - RNA, 19 nt, Artificial Sequence
  Description of Artificial Sequence: Synthetic oligonucleotide
  Sense strand starting at position 2965 of SEQ ID NO: 1491
ugugacuuauuuggaggaa

SEQ ID NO: 117175 - RNA, 19 nt, Artificial Sequence
  Description of Artificial Sequence: Synthetic oligonucleotide
  Antisense strand to SEQ ID NO: 117174
uuccuccaaauaagucaca

SEQ ID NO: 117176 - RNA, 19 nt, Artificial Sequence
  Description of Artificial Sequence: Synthetic oligonucleotide
  Sense strand starting at position 2933 of SEQ ID NO: 1491
guguaacacuuacuucuaa

SEQ ID NO: 117177 - RNA, 19 nt, Artificial Sequence
  Description of Artificial Sequence: Synthetic oligonucleotide
  Antisense strand to SEQ ID NO: 117176
uuagaaguaaguguuacac

SEQ ID NO: 117178 - RNA, 19 nt, Artificial Sequence
  Description of Artificial Sequence: Synthetic oligonucleotide
  Sense strand starting at position 2922 of SEQ ID NO: 1491
cuacauuuauuguguaaca

SEQ ID NO: 117179 - RNA, 19 nt, Artificial Sequence
  Description of Artificial Sequence: Synthetic oligonucleotide
  Antisense strand to SEQ ID NO: 117178
uguuacacaauaaauguag

SEQ ID NO: 117180 - RNA, 19 nt, Artificial Sequence
  Description of Artificial Sequence: Synthetic oligonucleotide
  Sense strand starting at position 2884 of SEQ ID NO: 1491
ggaauaaauuagcauuaug

SEQ ID NO: 117181 - RNA, 19 nt, Artificial Sequence
  Description of Artificial Sequence: Synthetic oligonucleotide
  Antisense strand to SEQ ID NO: 117180
cauaaugcuaauuuauucc

SEQ ID NO: 117182 - RNA, 19 nt, Artificial Sequence
  Description of Artificial Sequence: Synthetic oligonucleotide
  Sense strand starting at position 2873 of SEQ ID NO: 1491
ggaucuuauuaggaauaaa

SEQ ID NO: 117183 - RNA, 19 nt, Artificial Sequence
  Description of Artificial Sequence: Synthetic oligonucleotide
  Antisense strand to SEQ ID NO: 117182
uuuauuccuaauaagaucc

SEQ ID NO: 117184 - RNA, 19 nt, Artificial Sequence
  Description of Artificial Sequence: Synthetic oligonucleotide
  Sense strand starting at position 2674 of SEQ ID NO: 1491
uccagagauuaauauuuga

SEQ ID NO: 117185 - RNA, 19 nt, Artificial Sequence
  Description of Artificial Sequence: Synthetic oligonucleotide
  Antisense strand to SEQ ID NO: 117184
ucaaauauuaaucucugga

SEQ ID NO: 117186 - RNA, 19 nt, Artificial Sequence
  Description of Artificial Sequence: Synthetic oligonucleotide
  Sense strand starting at position 2663 of SEQ ID NO: 1491
cguauucucuauccagaga

SEQ ID NO: 117187 - RNA, 19 nt, Artificial Sequence
  Description of Artificial Sequence: Synthetic oligonucleotide
  Antisense strand to SEQ ID NO: 117186
ucucuggauagagaauacg

SEQ ID NO: 117188 - RNA, 19 nt, Artificial Sequence
  Description of Artificial Sequence: Synthetic oligonucleotide
  Sense strand starting at position 2589 of SEQ ID NO: 1491
uuaguuagacugugaauua

SEQ ID NO: 117189 - RNA, 19 nt, Artificial Sequence
  Description of Artificial Sequence: Synthetic oligonucleotide
  Antisense strand to SEQ ID NO: 117188
uaauucacagucuaacuaa

SEQ ID NO: 117190 - RNA, 19 nt, Artificial Sequence
  Description of Artificial Sequence: Synthetic oligonucleotide
  Sense strand starting at position 2438 of SEQ ID NO: 1491
cugauaauuuaugaagugu

SEQ ID NO: 117191 - RNA, 19 nt, Artificial Sequence
  Description of Artificial Sequence: Synthetic oligonucleotide
  Antisense strand to SEQ ID NO: 117190
acacuucauaaauuaucag

SEQ ID NO: 117192 - RNA, 19 nt, Artificial Sequence
  Description of Artificial Sequence: Synthetic oligonucleotide
  Sense strand starting at position 2416 of SEQ ID NO: 1491
uugggcuaugacugaaauc

SEQ ID NO: 117193 - RNA, 19 nt, Artificial Sequence
  Description of Artificial Sequence: Synthetic oligonucleotide
  Antisense strand to SEQ ID NO: 117192
gauuucagucauagcccaa

SEQ ID NO: 117194 - RNA, 19 nt, Artificial Sequence
  Description of Artificial Sequence: Synthetic oligonucleotide
  Sense strand starting at position 2094 of SEQ ID NO: 1491
uccagugaaugccugaaau

SEQ ID NO: 117195 - RNA, 19 nt, Artificial Sequence
  Description of Artificial Sequence: Synthetic oligonucleotide
  Antisense strand to SEQ ID NO: 117194
auuucaggcauucacugga

SEQ ID NO: 117196 - RNA, 19 nt, Artificial Sequence
  Description of Artificial Sequence: Synthetic oligonucleotide
  Sense strand starting at position 2039 of SEQ ID NO: 1491
ggguaagucaaguacagua

SEQ ID NO: 117197 - RNA, 19 nt, Artificial Sequence
  Description of Artificial Sequence: Synthetic oligonucleotide
  Antisense strand to SEQ ID NO: 117196
uacuguacuugacuuaccc

SEQ ID NO: 117198 - RNA, 19 nt, Artificial Sequence
  Description of Artificial Sequence: Synthetic oligonucleotide
  Sense strand starting at position 953 of SEQ ID NO: 1491
ggauuaaucucuguuugac

SEQ ID NO: 117199 - RNA, 19 nt, Artificial Sequence
  Description of Artificial Sequence: Synthetic oligonucleotide
  Antisense strand to SEQ ID NO: 117198
gucaaacagagauuaaucc

SEQ ID NO: 117200 - RNA, 19 nt, Artificial Sequence
  Description of Artificial Sequence: Synthetic oligonucleotide
  Sense strand starting at position 952 of SEQ ID NO: 1491
uggauuaaucucuguuuga

SEQ ID NO: 117201 - RNA, 19 nt, Artificial Sequence
  Description of Artificial Sequence: Synthetic oligonucleotide
  Antisense strand to SEQ ID NO: 117200
ucaaacagagauuaaucca

SEQ ID NO: 117202 - RNA, 19 nt, Artificial Sequence
  Description of Artificial Sequence: Synthetic oligonucleotide
  Sense strand starting at position 940 of SEQ ID NO: 1491
agacaaacauucuggauua

SEQ ID NO: 117203 - RNA, 19 nt, Artificial Sequence
  Description of Artificial Sequence: Synthetic oligonucleotide
  Antisense strand to SEQ ID NO: 117202
uaauccagaauguuugucu

SEQ ID NO: 117204 - RNA, 19 nt, Artificial Sequence
  Description of Artificial Sequence: Synthetic oligonucleotide
  Sense strand starting at position 900 of SEQ ID NO: 1491
gucuuagaauaugcaacua

SEQ ID NO: 117205 - RNA, 19 nt, Artificial Sequence
  Description of Artificial Sequence: Synthetic oligonucleotide
  Antisense strand to SEQ ID NO: 117204
uaguugcauauucuaagac

SEQ ID NO: 117206 - RNA, 19 nt, Artificial Sequence
  Description of Artificial Sequence: Synthetic oligonucleotide
  Sense strand starting at position 771 of SEQ ID NO: 1491
auaugauuccuuuggacau

SEQ ID NO: 117207 - RNA, 19 nt, Artificial Sequence
  Description of Artificial Sequence: Synthetic oligonucleotide
  Antisense strand to SEQ ID NO: 117206
auguccaaaggaaucauau

SEQ ID NO: 117208 - RNA, 19 nt, Artificial Sequence
  Description of Artificial Sequence: Synthetic oligonucleotide
  Sense strand starting at position 769 of SEQ ID NO: 1491
ugauaugauuccuuuggac

SEQ ID NO: 117209 - RNA, 19 nt, Artificial Sequence
  Description of Artificial Sequence: Synthetic oligonucleotide
  Antisense strand to SEQ ID NO: 117208
guccaaaggaaucauauca

SEQ ID NO: 117210 - RNA, 19 nt, Artificial Sequence
  Description of Artificial Sequence: Synthetic oligonucleotide
  Sense strand starting at position 579 of SEQ ID NO: 1491
acuuauuuauccugaggua

SEQ ID NO: 117211 - RNA, 19 nt, Artificial Sequence
  Description of Artificial Sequence: Synthetic oligonucleotide
  Antisense strand to SEQ ID NO: 117210
uaccucaggauaaauaagu

SEQ ID NO: 117212 - RNA, 19 nt, Artificial Sequence
  Description of Artificial Sequence: Synthetic oligonucleotide
  Sense strand starting at position 495 of SEQ ID NO: 1491
gguucuauagaagguaaau

SEQ ID NO: 117213 - RNA, 19 nt, Artificial Sequence
  Description of Artificial Sequence: Synthetic oligonucleotide
  Antisense strand to SEQ ID NO: 117212
auuuaccuucuauagaacc

SEQ ID NO: 117214 - RNA, 19 nt, Artificial Sequence
  Description of Artificial Sequence: Synthetic oligonucleotide
  Sense strand starting at position 483 of SEQ ID NO: 1491
uguagucuaagagguucua

SEQ ID NO: 117215 - RNA, 19 nt, Artificial Sequence
  Description of Artificial Sequence: Synthetic oligonucleotide
  Antisense strand to SEQ ID NO: 117214
uagaaccucuuagacuaca

SEQ ID NO: 117216 - RNA, 19 nt, Artificial Sequence
  Description of Artificial Sequence: Synthetic oligonucleotide
  Sense strand starting at position 476 of SEQ ID NO: 1491
agucaacuguagucuaaga

SEQ ID NO: 117217 - RNA, 19 nt, Artificial Sequence
  Description of Artificial Sequence: Synthetic oligonucleotide
  Antisense strand to SEQ ID NO: 117216
ucuuagacuacaguugacu

SEQ ID NO: 117218 - RNA, 19 nt, Artificial Sequence
  Description of Artificial Sequence: Synthetic oligonucleotide
  Sense strand starting at position 473 of SEQ ID NO: 1491
cuaagucaacuguagucua

SEQ ID NO: 117219 - RNA, 19 nt, Artificial Sequence
  Description of Artificial Sequence: Synthetic oligonucleotide
  Antisense strand to SEQ ID NO: 117218
uagacuacaguugacuuag

SEQ ID NO: 117220 - RNA, 19 nt, Artificial Sequence
  Description of Artificial Sequence: Synthetic oligonucleotide
  Sense strand starting at position 471 of SEQ ID NO: 1491
gucuaagucaacuguaguc

SEQ ID NO: 117221 - RNA, 19 nt, Artificial Sequence
  Description of Artificial Sequence: Synthetic oligonucleotide
  Antisense strand to SEQ ID NO: 117220
gacuacaguugacuuagac

SEQ ID NO: 117222 - RNA, 19 nt, Artificial Sequence
  Description of Artificial Sequence: Synthetic oligonucleotide
  Sense strand starting at position 379 of SEQ ID NO: 1491
gagaauacccguggcuacu

SEQ ID NO: 117223 - RNA, 19 nt, Artificial Sequence
  Description of Artificial Sequence: Synthetic oligonucleotide
  Antisense strand to SEQ ID NO: 117222
aguagccacggguauucuc

SEQ ID NO: 117224 - RNA, 19 nt, Artificial Sequence
  Description of Artificial Sequence: Synthetic oligonucleotide
  Sense strand starting at position 378 of SEQ ID NO: 1491
ugagaauacccguggcuac

SEQ ID NO: 117225 - RNA, 19 nt, Artificial Sequence
  Description of Artificial Sequence: Synthetic oligonucleotide
  Antisense strand to SEQ ID NO: 117224
guagccacggguauucuca

SEQ ID NO: 117226 - RNA, 19 nt, Artificial Sequence
  Description of Artificial Sequence: Synthetic oligonucleotide
  Sense strand starting at position 76 of SEQ ID NO: 1491
uggaaaguuguauaaugca

SEQ ID NO: 117227 - RNA, 19 nt, Artificial Sequence
  Description of Artificial Sequence: Synthetic oligonucleotide
  Antisense strand to SEQ ID NO: 117226
ugcauuauacaacuuucca

SEQ ID NO: 117228 - RNA, 19 nt, Artificial Sequence
  Description of Artificial Sequence: Synthetic oligonucleotide
  Sense strand starting at position 12 of SEQ ID NO: 1491
auuauucuauuugagagca

SEQ ID NO: 117229 - RNA, 19 nt, Artificial Sequence
  Description of Artificial Sequence: Synthetic oligonucleotide
  Antisense strand to SEQ ID NO: 117228
ugcucucaaauagaauaau

SEQ ID NO: 117230 - RNA, 19 nt, Artificial Sequence
  Description of Artificial Sequence: Synthetic oligonucleotide
  Sense strand starting at position 4 of SEQ ID NO: 1491
gagugaagauuauucuauu

SEQ ID NO: 117231 - RNA, 19 nt, Artificial Sequence
  Description of Artificial Sequence: Synthetic oligonucleotide
  Antisense strand to SEQ ID NO: 117230
aauagaauaaucuucacuc

SEQ ID NO: 117232 - RNA, 19 nt, Artificial Sequence
  Description of Artificial Sequence: Synthetic oligonucleotide
  Sense strand starting at position 3874 of SEQ ID NO: 1492
ccaauaugugcuuaaggac

SEQ ID NO: 117233 - RNA, 19 nt, Artificial Sequence
  Description of Artificial Sequence: Synthetic oligonucleotide
  Antisense strand to SEQ ID NO: 117232
guccuuaagcacauauugg

SEQ ID NO: 117234 - RNA, 19 nt, Artificial Sequence
  Description of Artificial Sequence: Synthetic oligonucleotide
  Sense strand starting at position 3873 of SEQ ID NO: 1492
accaauaugugcuuaagga

SEQ ID NO: 117235 - RNA, 19 nt, Artificial Sequence
  Description of Artificial Sequence: Synthetic oligonucleotide
  Antisense strand to SEQ ID NO: 117234
uccuuaagcacauauuggu

SEQ ID NO: 117236 - RNA, 19 nt, Artificial Sequence
  Description of Artificial Sequence: Synthetic oligonucleotide
  Sense strand starting at position 3871 of SEQ ID NO: 1492
ggaccaauaugugcuuaag

SEQ ID NO: 117237 - RNA, 19 nt, Artificial Sequence
  Description of Artificial Sequence: Synthetic oligonucleotide
  Antisense strand to SEQ ID NO: 117236
cuuaagcacauauuggucc

SEQ ID NO: 117238 - RNA, 19 nt, Artificial Sequence
  Description of Artificial Sequence: Synthetic oligonucleotide
  Sense strand starting at position 3826 of SEQ ID NO: 1492
acugcuauuuagggaagau

SEQ ID NO: 117239 - RNA, 19 nt, Artificial Sequence
  Description of Artificial Sequence: Synthetic oligonucleotide
  Antisense strand to SEQ ID NO: 117238
aucuucccuaaauagcagu

SEQ ID NO: 117240 - RNA, 19 nt, Artificial Sequence
  Description of Artificial Sequence: Synthetic oligonucleotide
  Sense strand starting at position 3825 of SEQ ID NO: 1492
gacugcuauuuagggaaga

SEQ ID NO: 117241 - RNA, 19 nt, Artificial Sequence
  Description of Artificial Sequence: Synthetic oligonucleotide
  Antisense strand to SEQ ID NO: 117240
ucuucccuaaauagcaguc

SEQ ID NO: 117242 - RNA, 19 nt, Artificial Sequence
  Description of Artificial Sequence: Synthetic oligonucleotide
  Sense strand starting at position 3746 of SEQ ID NO: 1492
aaauauuaagcggaaguuu

SEQ ID NO: 117243 - RNA, 19 nt, Artificial Sequence
  Description of Artificial Sequence: Synthetic oligonucleotide
  Antisense strand to SEQ ID NO: 117242
aaacuuccgcuuaauauuu

SEQ ID NO: 117244 - RNA, 19 nt, Artificial Sequence
  Description of Artificial Sequence: Synthetic oligonucleotide
  Sense strand starting at position 3689 of SEQ ID NO: 1492
ggaugugacacguaacauu

SEQ ID NO: 117245 - RNA, 19 nt, Artificial Sequence
  Description of Artificial Sequence: Synthetic oligonucleotide
  Antisense strand to SEQ ID NO: 117244
aauguuacgugucacaucc

SEQ ID NO: 117246 - RNA, 19 nt, Artificial Sequence
  Description of Artificial Sequence: Synthetic oligonucleotide
  Sense strand starting at position 3636 of SEQ ID NO: 1492
gauguaugaucuguuauga

SEQ ID NO: 117247 - RNA, 19 nt, Artificial Sequence
  Description of Artificial Sequence: Synthetic oligonucleotide
  Antisense strand to SEQ ID NO: 117246
ucauaacagaucauacauc

SEQ ID NO: 117248 - RNA, 19 nt, Artificial Sequence
  Description of Artificial Sequence: Synthetic oligonucleotide
  Sense strand starting at position 3635 of SEQ ID NO: 1492
agauguaugaucuguuaug

SEQ ID NO: 117249 - RNA, 19 nt, Artificial Sequence
  Description of Artificial Sequence: Synthetic oligonucleotide
  Antisense strand to SEQ ID NO: 117248
cauaacagaucauacaucu

SEQ ID NO: 117250 - RNA, 19 nt, Artificial Sequence
  Description of Artificial Sequence: Synthetic oligonucleotide
  Sense strand starting at position 3633 of SEQ ID NO: 1492
agagauguaugaucuguua

SEQ ID NO: 117251 - RNA, 19 nt, Artificial Sequence
  Description of Artificial Sequence: Synthetic oligonucleotide
  Antisense strand to SEQ ID NO: 117250
uaacagaucauacaucucu

SEQ ID NO: 117252 - RNA, 19 nt, Artificial Sequence
  Description of Artificial Sequence: Synthetic oligonucleotide
  Sense strand starting at position 3503 of SEQ ID NO: 1492
gaagauucccagugugcaa

SEQ ID NO: 117253 - RNA, 19 nt, Artificial Sequence
  Description of Artificial Sequence: Synthetic oligonucleotide
  Antisense strand to SEQ ID NO: 117252
uugcacacugggaaucuuc

SEQ ID NO: 117254 - RNA, 19 nt, Artificial Sequence
  Description of Artificial Sequence: Synthetic oligonucleotide
  Sense strand starting at position 3499 of SEQ ID NO: 1492
cgaggaagauucccagugu

SEQ ID NO: 117255 - RNA, 19 nt, Artificial Sequence
  Description of Artificial Sequence: Synthetic oligonucleotide
  Antisense strand to SEQ ID NO: 117254
acacugggaaucuuccucg

SEQ ID NO: 117256 - RNA, 19 nt, Artificial Sequence
  Description of Artificial Sequence: Synthetic oligonucleotide
  Sense strand starting at position 3490 of SEQ ID NO: 1492
caacauguacgaggaagau

SEQ ID NO: 117257 - RNA, 19 nt, Artificial Sequence
  Description of Artificial Sequence: Synthetic oligonucleotide
  Antisense strand to SEQ ID NO: 117256
aucuuccucguacauguug

SEQ ID NO: 117258 - RNA, 19 nt, Artificial Sequence
  Description of Artificial Sequence: Synthetic oligonucleotide
  Sense strand starting at position 3348 of SEQ ID NO: 1492
uagguagagguguguuaga

SEQ ID NO: 117259 - RNA, 19 nt, Artificial Sequence
  Description of Artificial Sequence: Synthetic oligonucleotide
  Antisense strand to SEQ ID NO: 117258
ucuaacacaccucuaccua

SEQ ID NO: 117260 - RNA, 19 nt, Artificial Sequence
  Description of Artificial Sequence: Synthetic oligonucleotide
  Sense strand starting at position 3340 of SEQ ID NO: 1492
cagacuucuagguagaggu

SEQ ID NO: 117261 - RNA, 19 nt, Artificial Sequence
  Description of Artificial Sequence: Synthetic oligonucleotide
  Antisense strand to SEQ ID NO: 117260
accucuaccuagaagucug

SEQ ID NO: 117262 - RNA, 19 nt, Artificial Sequence
  Description of Artificial Sequence: Synthetic oligonucleotide
  Sense strand starting at position 3231 of SEQ ID NO: 1492
cuucucuagugauuagaua

SEQ ID NO: 117263 - RNA, 19 nt, Artificial Sequence
  Description of Artificial Sequence: Synthetic oligonucleotide
  Antisense strand to SEQ ID NO: 117262
uaucuaaucacuagagaag

SEQ ID NO: 117264 - RNA, 19 nt, Artificial Sequence
  Description of Artificial Sequence: Synthetic oligonucleotide
  Sense strand starting at position 3033 of SEQ ID NO: 1492
guuauaauuugguccuccu

SEQ ID NO: 117265 - RNA, 19 nt, Artificial Sequence
  Description of Artificial Sequence: Synthetic oligonucleotide
  Antisense strand to SEQ ID NO: 117264
aggaggaccaaauuauaac

SEQ ID NO: 117266 - RNA, 19 nt, Artificial Sequence
  Description of Artificial Sequence: Synthetic oligonucleotide
  Sense strand starting at position 2991 of SEQ ID NO: 1492
augaucuuugugcaauaau

SEQ ID NO: 117267 - RNA, 19 nt, Artificial Sequence
  Description of Artificial Sequence: Synthetic oligonucleotide
  Antisense strand to SEQ ID NO: 117266
auuauugcacaaagaucau

SEQ ID NO: 117268 - RNA, 19 nt, Artificial Sequence
  Description of Artificial Sequence: Synthetic oligonucleotide
  Sense strand starting at position 2987 of SEQ ID NO: 1492
uugaaugaucuuugugcaa

SEQ ID NO: 117269 - RNA, 19 nt, Artificial Sequence
  Description of Artificial Sequence: Synthetic oligonucleotide
  Antisense strand to SEQ ID NO: 117268
uugcacaaagaucauucaa

SEQ ID NO: 117270 - RNA, 19 nt, Artificial Sequence
  Description of Artificial Sequence: Synthetic oligonucleotide
  Sense strand starting at position 2986 of SEQ ID NO: 1492
cuugaaugaucuuugugca

SEQ ID NO: 117271 - RNA, 19 nt, Artificial Sequence
  Description of Artificial Sequence: Synthetic oligonucleotide
  Antisense strand to SEQ ID NO: 117270
ugcacaaagaucauucaag

SEQ ID NO: 117272 - RNA, 19 nt, Artificial Sequence
  Description of Artificial Sequence: Synthetic oligonucleotide
  Sense strand starting at position 2960 of SEQ ID NO: 1492
agcagcuugucucucauuu

SEQ ID NO: 117273 - RNA, 19 nt, Artificial Sequence
  Description of Artificial Sequence: Synthetic oligonucleotide
  Antisense strand to SEQ ID NO: 117272
aaaugagagacaagcugcu

SEQ ID NO: 117274 - RNA, 19 nt, Artificial Sequence
  Description of Artificial Sequence: Synthetic oligonucleotide
  Sense strand starting at position 2848 of SEQ ID NO: 1492
aacccucggccucaguaau

SEQ ID NO: 117275 - RNA, 19 nt, Artificial Sequence
  Description of Artificial Sequence: Synthetic oligonucleotide
  Antisense strand to SEQ ID NO: 117274
auuacugaggccgaggguu

SEQ ID NO: 117276 - RNA, 19 nt, Artificial Sequence
  Description of Artificial Sequence: Synthetic oligonucleotide
  Sense strand starting at position 2808 of SEQ ID NO: 1492
guagacaugaagugucacu

SEQ ID NO: 117277 - RNA, 19 nt, Artificial Sequence
  Description of Artificial Sequence: Synthetic oligonucleotide
  Antisense strand to SEQ ID NO: 117276
agugacacuucaugucuac

SEQ ID NO: 117278 - RNA, 19 nt, Artificial Sequence
  Description of Artificial Sequence: Synthetic oligonucleotide
  Sense strand starting at position 2777 of SEQ ID NO: 1492
ugccacaaugccuaguuaa

SEQ ID NO: 117279 - RNA, 19 nt, Artificial Sequence
  Description of Artificial Sequence: Synthetic oligonucleotide
  Antisense strand to SEQ ID NO: 117278
uuaacuaggcauuguggca

SEQ ID NO: 117280 - RNA, 19 nt, Artificial Sequence
  Description of Artificial Sequence: Synthetic oligonucleotide
  Sense strand starting at position 2520 of SEQ ID NO: 1492
cugaauaccuaugcauaga

SEQ ID NO: 117281 - RNA, 19 nt, Artificial Sequence
  Description of Artificial Sequence: Synthetic oligonucleotide
  Antisense strand to SEQ ID NO: 117280
ucuaugcauagguauucag

SEQ ID NO: 117282 - RNA, 19 nt, Artificial Sequence
  Description of Artificial Sequence: Synthetic oligonucleotide
  Sense strand starting at position 2519 of SEQ ID NO: 1492
acugaauaccuaugcauag

SEQ ID NO: 117283 - RNA, 19 nt, Artificial Sequence
  Description of Artificial Sequence: Synthetic oligonucleotide
  Antisense strand to SEQ ID NO: 117282
cuaugcauagguauucagu

SEQ ID NO: 117284 - RNA, 19 nt, Artificial Sequence
  Description of Artificial Sequence: Synthetic oligonucleotide
  Sense strand starting at position 2461 of SEQ ID NO: 1492
gaauaugaaugguuuacug

SEQ ID NO: 117285 - RNA, 19 nt, Artificial Sequence
  Description of Artificial Sequence: Synthetic oligonucleotide
  Antisense strand to SEQ ID NO: 117284
caguaaaccauucauauuc

SEQ ID NO: 117286 - RNA, 19 nt, Artificial Sequence
  Description of Artificial Sequence: Synthetic oligonucleotide
  Sense strand starting at position 2307 of SEQ ID NO: 1492
agacuucuuuguucugauu

SEQ ID NO: 117287 - RNA, 19 nt, Artificial Sequence
  Description of Artificial Sequence: Synthetic oligonucleotide
  Antisense strand to SEQ ID NO: 117286
aaucagaacaaagaagucu

SEQ ID NO: 117288 - RNA, 19 nt, Artificial Sequence
  Description of Artificial Sequence: Synthetic oligonucleotide
  Sense strand starting at position 2305 of SEQ ID NO: 1492
ucagacuucuuuguucuga

SEQ ID NO: 117289 - RNA, 19 nt, Artificial Sequence
  Description of Artificial Sequence: Synthetic oligonucleotide
  Antisense strand to SEQ ID NO: 117288
ucagaacaaagaagucuga

SEQ ID NO: 117290 - RNA, 19 nt, Artificial Sequence
  Description of Artificial Sequence: Synthetic oligonucleotide
  Sense strand starting at position 2293 of SEQ ID NO: 1492
auuguacuguacucagacu

SEQ ID NO: 117291 - RNA, 19 nt, Artificial Sequence
  Description of Artificial Sequence: Synthetic oligonucleotide
  Antisense strand to SEQ ID NO: 117290
agucugaguacaguacaau

SEQ ID NO: 117292 - RNA, 19 nt, Artificial Sequence
  Description of Artificial Sequence: Synthetic oligonucleotide
  Sense strand starting at position 2257 of SEQ ID NO: 1492
augugaauaugaucucuau

SEQ ID NO: 117293 - RNA, 19 nt, Artificial Sequence
  Description of Artificial Sequence: Synthetic oligonucleotide
  Antisense strand to SEQ ID NO: 117292
auagagaucauauucacau

SEQ ID NO: 117294 - RNA, 19 nt, Artificial Sequence
  Description of Artificial Sequence: Synthetic oligonucleotide
  Sense strand starting at position 2152 of SEQ ID NO: 1492
gucuauacauacuucugau

SEQ ID NO: 117295 - RNA, 19 nt, Artificial Sequence
  Description of Artificial Sequence: Synthetic oligonucleotide
  Antisense strand to SEQ ID NO: 117294
aucagaaguauguauagac

SEQ ID NO: 117296 - RNA, 19 nt, Artificial Sequence
  Description of Artificial Sequence: Synthetic oligonucleotide
  Sense strand starting at position 2002 of SEQ ID NO: 1492
ggagcauuccuacaaucca

SEQ ID NO: 117297 - RNA, 19 nt, Artificial Sequence
  Description of Artificial Sequence: Synthetic oligonucleotide
  Antisense strand to SEQ ID NO: 117296
uggauuguaggaaugcucc

SEQ ID NO: 117298 - RNA, 19 nt, Artificial Sequence
  Description of Artificial Sequence: Synthetic oligonucleotide
  Sense strand starting at position 598 of SEQ ID NO: 1492
gaguaacugguacguuaag

SEQ ID NO: 117299 - RNA, 19 nt, Artificial Sequence
  Description of Artificial Sequence: Synthetic oligonucleotide
  Antisense strand to SEQ ID NO: 117298
cuuaacguaccaguuacuc

SEQ ID NO: 117300 - RNA, 19 nt, Artificial Sequence
  Description of Artificial Sequence: Synthetic oligonucleotide
  Sense strand starting at position 423 of SEQ ID NO: 1492
auacuuguuguugaucuaa

SEQ ID NO: 117301 - RNA, 19 nt, Artificial Sequence
  Description of Artificial Sequence: Synthetic oligonucleotide
  Antisense strand to SEQ ID NO: 117300
uuagaucaacaacaaguau

SEQ ID NO: 117302 - RNA, 19 nt, Artificial Sequence
  Description of Artificial Sequence: Synthetic oligonucleotide
  Sense strand starting at position 418 of SEQ ID NO: 1492
uuccaauacuuguuguuga

SEQ ID NO: 117303 - RNA, 19 nt, Artificial Sequence
  Description of Artificial Sequence: Synthetic oligonucleotide
  Antisense strand to SEQ ID NO: 117302
ucaacaacaaguauuggaa

SEQ ID NO: 117304 - RNA, 19 nt, Artificial Sequence
  Description of Artificial Sequence: Synthetic oligonucleotide
  Sense strand starting at position 412 of SEQ ID NO: 1492
ggcaucuuccaauacuugu

SEQ ID NO: 117305 - RNA, 19 nt, Artificial Sequence
  Description of Artificial Sequence: Synthetic oligonucleotide
  Antisense strand to SEQ ID NO: 117304
acaaguauuggaagaugcc

SEQ ID NO: 117306 - RNA, 19 nt, Artificial Sequence
  Description of Artificial Sequence: Synthetic oligonucleotide
  Sense strand starting at position 388 of SEQ ID NO: 1492
guguaaucauucuugauca

SEQ ID NO: 117307 - RNA, 19 nt, Artificial Sequence
  Description of Artificial Sequence: Synthetic oligonucleotide
  Antisense strand to SEQ ID NO: 117306
ugaucaagaaugauuacac

SEQ ID NO: 117308 - RNA, 19 nt, Artificial Sequence
  Description of Artificial Sequence: Synthetic oligonucleotide
  Sense strand starting at position 382 of SEQ ID NO: 1492
accuaaguguaaucauucu

SEQ ID NO: 117309 - RNA, 19 nt, Artificial Sequence
  Description of Artificial Sequence: Synthetic oligonucleotide
  Antisense strand to SEQ ID NO: 117308
agaaugauuacacuuaggu

SEQ ID NO: 117310 - RNA, 19 nt, Artificial Sequence
  Description of Artificial Sequence: Synthetic oligonucleotide
  Sense strand starting at position 34 of SEQ ID NO: 1492
gcucuuauucgugcuaucu

SEQ ID NO: 117311 - RNA, 19 nt, Artificial Sequence
  Description of Artificial Sequence: Synthetic oligonucleotide
  Antisense strand to SEQ ID NO: 117310
agauagcacgaauaagagc

SEQ ID NO: 117312 - RNA, 19 nt, Artificial Sequence
  Description of Artificial Sequence: Synthetic oligonucleotide
  Sense strand starting at position 3965 of SEQ ID NO: 1493
agcuguuauguggaaauac

SEQ ID NO: 117313 - RNA, 19 nt, Artificial Sequence
  Description of Artificial Sequence: Synthetic oligonucleotide
  Antisense strand to SEQ ID NO: 117312
guauuuccacauaacagcu

SEQ ID NO: 117314 - RNA, 19 nt, Artificial Sequence
  Description of Artificial Sequence: Synthetic oligonucleotide
  Sense strand starting at position 3963 of SEQ ID NO: 1493
acagcuguuauguggaaau

SEQ ID NO: 117315 - RNA, 19 nt, Artificial Sequence
  Description of Artificial Sequence: Synthetic oligonucleotide
  Antisense strand to SEQ ID NO: 117314
auuuccacauaacagcugu

SEQ ID NO: 117316 - RNA, 19 nt, Artificial Sequence
  Description of Artificial Sequence: Synthetic oligonucleotide
  Sense strand starting at position 3962 of SEQ ID NO: 1493
aacagcuguuauguggaaa

SEQ ID NO: 117317 - RNA, 19 nt, Artificial Sequence
  Description of Artificial Sequence: Synthetic oligonucleotide
  Antisense strand to SEQ ID NO: 117316
uuuccacauaacagcuguu

SEQ ID NO: 117318 - RNA, 19 nt, Artificial Sequence
  Description of Artificial Sequence: Synthetic oligonucleotide
  Sense strand starting at position 3861 of SEQ ID NO: 1493
aguauaccucuuugaguuu

SEQ ID NO: 117319 - RNA, 19 nt, Artificial Sequence
  Description of Artificial Sequence: Synthetic oligonucleotide
  Antisense strand to SEQ ID NO: 117318
aaacucaaagagguauacu

SEQ ID NO: 117320 - RNA, 19 nt, Artificial Sequence
  Description of Artificial Sequence: Synthetic oligonucleotide
  Sense strand starting at position 3842 of SEQ ID NO: 1493
uuaaauagguggguaguaa

SEQ ID NO: 117321 - RNA, 19 nt, Artificial Sequence
  Description of Artificial Sequence: Synthetic oligonucleotide
  Antisense strand to SEQ ID NO: 117320
uuacuacccaccuauuuaa

SEQ ID NO: 117322 - RNA, 19 nt, Artificial Sequence
  Description of Artificial Sequence: Synthetic oligonucleotide
  Sense strand starting at position 3598 of SEQ ID NO: 1493
caaugugugaagggagauu

SEQ ID NO: 117323 - RNA, 19 nt, Artificial Sequence
  Description of Artificial Sequence: Synthetic oligonucleotide
  Antisense strand to SEQ ID NO: 117322
aaucucccuucacacauug

SEQ ID NO: 117324 - RNA, 19 nt, Artificial Sequence
  Description of Artificial Sequence: Synthetic oligonucleotide
  Sense strand starting at position 3408 of SEQ ID NO: 1493
acaggaaaggguuguacau

SEQ ID NO: 117325 - RNA, 19 nt, Artificial Sequence
  Description of Artificial Sequence: Synthetic oligonucleotide
  Antisense strand to SEQ ID NO: 117324
auguacaacccuuuccugu

SEQ ID NO: 117326 - RNA, 19 nt, Artificial Sequence
  Description of Artificial Sequence: Synthetic oligonucleotide
  Sense strand starting at position 3286 of SEQ ID NO: 1493
gucaaagauggguguuaga

SEQ ID NO: 117327 - RNA, 19 nt, Artificial Sequence
  Description of Artificial Sequence: Synthetic oligonucleotide
  Antisense strand to SEQ ID NO: 117326
ucuaacacccaucuuugac

SEQ ID NO: 117328 - RNA, 19 nt, Artificial Sequence
  Description of Artificial Sequence: Synthetic oligonucleotide
  Sense strand starting at position 3284 of SEQ ID NO: 1493
aagucaaagauggguguua

SEQ ID NO: 117329 - RNA, 19 nt, Artificial Sequence
  Description of Artificial Sequence: Synthetic oligonucleotide
  Antisense strand to SEQ ID NO: 117328
uaacacccaucuuugacuu

SEQ ID NO: 117330 - RNA, 19 nt, Artificial Sequence
  Description of Artificial Sequence: Synthetic oligonucleotide
  Sense strand starting at position 3219 of SEQ ID NO: 1493
gugcgaucagaugaugacu

SEQ ID NO: 117331 - RNA, 19 nt, Artificial Sequence
  Description of Artificial Sequence: Synthetic oligonucleotide
  Antisense strand to SEQ ID NO: 117330
agucaucaucugaucgcac

SEQ ID NO: 117332 - RNA, 19 nt, Artificial Sequence
  Description of Artificial Sequence: Synthetic oligonucleotide
  Sense strand starting at position 3003 of SEQ ID NO: 1493
agguaaucaguuugagaua

SEQ ID NO: 117333 - RNA, 19 nt, Artificial Sequence
  Description of Artificial Sequence: Synthetic oligonucleotide
  Antisense strand to SEQ ID NO: 117332
uaucucaaacugauuaccu

SEQ ID NO: 117334 - RNA, 19 nt, Artificial Sequence
  Description of Artificial Sequence: Synthetic oligonucleotide
  Sense strand starting at position 2968 of SEQ ID NO: 1493
aauccagaacugugaggua

SEQ ID NO: 117335 - RNA, 19 nt, Artificial Sequence
  Description of Artificial Sequence: Synthetic oligonucleotide
  Antisense strand to SEQ ID NO: 117334
uaccucacaguucuggauu

SEQ ID NO: 117336 - RNA, 19 nt, Artificial Sequence
  Description of Artificial Sequence: Synthetic oligonucleotide
  Sense strand starting at position 2900 of SEQ ID NO: 1493
acagauucguccucuuaga

SEQ ID NO: 117337 - RNA, 19 nt, Artificial Sequence
  Description of Artificial Sequence: Synthetic oligonucleotide
  Antisense strand to SEQ ID NO: 117336
ucuaagaggacgaaucugu

SEQ ID NO: 117338 - RNA, 19 nt, Artificial Sequence
  Description of Artificial Sequence: Synthetic oligonucleotide
  Sense strand starting at position 2897 of SEQ ID NO: 1493
gggacagauucguccucuu

SEQ ID NO: 117339 - RNA, 19 nt, Artificial Sequence
  Description of Artificial Sequence: Synthetic oligonucleotide
  Antisense strand to SEQ ID NO: 117338
aagaggacgaaucuguccc

SEQ ID NO: 117340 - RNA, 19 nt, Artificial Sequence
  Description of Artificial Sequence: Synthetic oligonucleotide
  Sense strand starting at position 2722 of SEQ ID NO: 1493
cacagugggucucucuaau

SEQ ID NO: 117341 - RNA, 19 nt, Artificial Sequence
  Description of Artificial Sequence: Synthetic oligonucleotide
  Antisense strand to SEQ ID NO: 117340
auuagagagacccacugug

SEQ ID NO: 117342 - RNA, 19 nt, Artificial Sequence
  Description of Artificial Sequence: Synthetic oligonucleotide
  Sense strand starting at position 2699 of SEQ ID NO: 1493
guuaaugugaggugauauu

SEQ ID NO: 117343 - RNA, 19 nt, Artificial Sequence
  Description of Artificial Sequence: Synthetic oligonucleotide
  Antisense strand to SEQ ID NO: 117342
aauaucaccucacauuaac

SEQ ID NO: 117344 - RNA, 19 nt, Artificial Sequence
  Description of Artificial Sequence: Synthetic oligonucleotide
  Sense strand starting at position 2688 of SEQ ID NO: 1493
gacgguaauuaguuaaugu

SEQ ID NO: 117345 - RNA, 19 nt, Artificial Sequence
  Description of Artificial Sequence: Synthetic oligonucleotide
  Antisense strand to SEQ ID NO: 117344
acauuaacuaauuaccguc

SEQ ID NO: 117346 - RNA, 19 nt, Artificial Sequence
  Description of Artificial Sequence: Synthetic oligonucleotide
  Sense strand starting at position 2684 of SEQ ID NO: 1493
uaaagacgguaauuaguua

SEQ ID NO: 117347 - RNA, 19 nt, Artificial Sequence
  Description of Artificial Sequence: Synthetic oligonucleotide
  Antisense strand to SEQ ID NO: 117346
uaacuaauuaccgucuuua

SEQ ID NO: 117348 - RNA, 19 nt, Artificial Sequence
  Description of Artificial Sequence: Synthetic oligonucleotide
  Sense strand starting at position 2679 of SEQ ID NO: 1493
auacguaaagacgguaauu

SEQ ID NO: 117349 - RNA, 19 nt, Artificial Sequence
  Description of Artificial Sequence: Synthetic oligonucleotide
  Antisense strand to SEQ ID NO: 117348
aauuaccgucuuuacguau

SEQ ID NO: 117350 - RNA, 19 nt, Artificial Sequence
  Description of Artificial Sequence: Synthetic oligonucleotide
  Sense strand starting at position 2668 of SEQ ID NO: 1493
cuuguuuggaaauacguaa

SEQ ID NO: 117351 - RNA, 19 nt, Artificial Sequence
  Description of Artificial Sequence: Synthetic oligonucleotide
  Antisense strand to SEQ ID NO: 117350
uuacguauuuccaaacaag

SEQ ID NO: 117352 - RNA, 19 nt, Artificial Sequence
  Description of Artificial Sequence: Synthetic oligonucleotide
  Sense strand starting at position 2659 of SEQ ID NO: 1493
gcgugugagcuuguuugga

SEQ ID NO: 117353 - RNA, 19 nt, Artificial Sequence
  Description of Artificial Sequence: Synthetic oligonucleotide
  Antisense strand to SEQ ID NO: 117352
uccaaacaagcucacacgc

SEQ ID NO: 117354 - RNA, 19 nt, Artificial Sequence
  Description of Artificial Sequence: Synthetic oligonucleotide
  Sense strand starting at position 2616 of SEQ ID NO: 1493
aguguuauggauugaauua

SEQ ID NO: 117355 - RNA, 19 nt, Artificial Sequence
  Description of Artificial Sequence: Synthetic oligonucleotide
  Antisense strand to SEQ ID NO: 117354
uaauucaauccauaacacu

SEQ ID NO: 117356 - RNA, 19 nt, Artificial Sequence
  Description of Artificial Sequence: Synthetic oligonucleotide
  Sense strand starting at position 2613 of SEQ ID NO: 1493
cccaguguuauggauugaa

SEQ ID NO: 117357 - RNA, 19 nt, Artificial Sequence
  Description of Artificial Sequence: Synthetic oligonucleotide
  Antisense strand to SEQ ID NO: 117356
uucaauccauaacacuggg

SEQ ID NO: 117358 - RNA, 19 nt, Artificial Sequence
  Description of Artificial Sequence: Synthetic oligonucleotide
  Sense strand starting at position 2540 of SEQ ID NO: 1493
uguauaugguaaguggaua

SEQ ID NO: 117359 - RNA, 19 nt, Artificial Sequence
  Description of Artificial Sequence: Synthetic oligonucleotide
  Antisense strand to SEQ ID NO: 117358
uauccacuuaccauauaca

SEQ ID NO: 117360 - RNA, 19 nt, Artificial Sequence
  Description of Artificial Sequence: Synthetic oligonucleotide
  Sense strand starting at position 2485 of SEQ ID NO: 1493
ugcuuauuacuuuacaguu

SEQ ID NO: 117361 - RNA, 19 nt, Artificial Sequence
  Description of Artificial Sequence: Synthetic oligonucleotide
  Antisense strand to SEQ ID NO: 117360
aacuguaaaguaauaagca

SEQ ID NO: 117362 - RNA, 19 nt, Artificial Sequence
  Description of Artificial Sequence: Synthetic oligonucleotide
  Sense strand starting at position 2341 of SEQ ID NO: 1493
cgagaaguauuucagagau

SEQ ID NO: 117363 - RNA, 19 nt, Artificial Sequence
  Description of Artificial Sequence: Synthetic oligonucleotide
  Antisense strand to SEQ ID NO: 117362
aucucugaaauacuucucg

SEQ ID NO: 117364 - RNA, 19 nt, Artificial Sequence
  Description of Artificial Sequence: Synthetic oligonucleotide
  Sense strand starting at position 2318 of SEQ ID NO: 1493
gcaaacagauaguuccuaa

SEQ ID NO: 117365 - RNA, 19 nt, Artificial Sequence
  Description of Artificial Sequence: Synthetic oligonucleotide
  Antisense strand to SEQ ID NO: 117364
uuaggaacuaucuguuugc

SEQ ID NO: 117366 - RNA, 19 nt, Artificial Sequence
  Description of Artificial Sequence: Synthetic oligonucleotide
  Sense strand starting at position 2206 of SEQ ID NO: 1493
uauggagcuuguucuaaga

SEQ ID NO: 117367 - RNA, 19 nt, Artificial Sequence
  Description of Artificial Sequence: Synthetic oligonucleotide
  Antisense strand to SEQ ID NO: 117366
ucuuagaacaagcuccaua

SEQ ID NO: 117368 - RNA, 19 nt, Artificial Sequence
  Description of Artificial Sequence: Synthetic oligonucleotide
  Sense strand starting at position 2203 of SEQ ID NO: 1493
aauuauggagcuuguucua

SEQ ID NO: 117369 - RNA, 19 nt, Artificial Sequence
  Description of Artificial Sequence: Synthetic oligonucleotide
  Antisense strand to SEQ ID NO: 117368
uagaacaagcuccauaauu

SEQ ID NO: 117370 - RNA, 19 nt, Artificial Sequence
  Description of Artificial Sequence: Synthetic oligonucleotide
  Sense strand starting at position 2092 of SEQ ID NO: 1493
aaauucuguaguuggguga

SEQ ID NO: 117371 - RNA, 19 nt, Artificial Sequence
  Description of Artificial Sequence: Synthetic oligonucleotide
  Antisense strand to SEQ ID NO: 117370
ucacccaacuacagaauuu

SEQ ID NO: 117372 - RNA, 19 nt, Artificial Sequence
  Description of Artificial Sequence: Synthetic oligonucleotide
  Sense strand starting at position 2057 of SEQ ID NO: 1493
uuuacccagugucuuauaa

SEQ ID NO: 117373 - RNA, 19 nt, Artificial Sequence
  Description of Artificial Sequence: Synthetic oligonucleotide
  Antisense strand to SEQ ID NO: 117372
uuauaagacacuggguaaa

SEQ ID NO: 117374 - RNA, 19 nt, Artificial Sequence
  Description of Artificial Sequence: Synthetic oligonucleotide
  Sense strand starting at position 954 of SEQ ID NO: 1493
uauguuaggcaauguacau

SEQ ID NO: 117375 - RNA, 19 nt, Artificial Sequence
  Description of Artificial Sequence: Synthetic oligonucleotide
  Antisense strand to SEQ ID NO: 117374
auguacauugccuaacaua

SEQ ID NO: 117376 - RNA, 19 nt, Artificial Sequence
  Description of Artificial Sequence: Synthetic oligonucleotide
  Sense strand starting at position 950 of SEQ ID NO: 1493
uaaauauguuaggcaaugu

SEQ ID NO: 117377 - RNA, 19 nt, Artificial Sequence
  Description of Artificial Sequence: Synthetic oligonucleotide
  Antisense strand to SEQ ID NO: 117376
acauugccuaacauauuua

SEQ ID NO: 117378 - RNA, 19 nt, Artificial Sequence
  Description of Artificial Sequence: Synthetic oligonucleotide
  Sense strand starting at position 936 of SEQ ID NO: 1493
uguauaggugcccauaaau

SEQ ID NO: 117379 - RNA, 19 nt, Artificial Sequence
  Description of Artificial Sequence: Synthetic oligonucleotide
  Antisense strand to SEQ ID NO: 117378
auuuaugggcaccuauaca

SEQ ID NO: 117380 - RNA, 19 nt, Artificial Sequence
  Description of Artificial Sequence: Synthetic oligonucleotide
  Sense strand starting at position 935 of SEQ ID NO: 1493
uuguauaggugcccauaaa

SEQ ID NO: 117381 - RNA, 19 nt, Artificial Sequence
  Description of Artificial Sequence: Synthetic oligonucleotide
  Antisense strand to SEQ ID NO: 117380
uuuaugggcaccuauacaa

SEQ ID NO: 117382 - RNA, 19 nt, Artificial Sequence
  Description of Artificial Sequence: Synthetic oligonucleotide
  Sense strand starting at position 866 of SEQ ID NO: 1493
cuuauauuguagucauaac

SEQ ID NO: 117383 - RNA, 19 nt, Artificial Sequence
  Description of Artificial Sequence: Synthetic oligonucleotide
  Antisense strand to SEQ ID NO: 117382
guuaugacuacaauauaag

SEQ ID NO: 117384 - RNA, 19 nt, Artificial Sequence
  Description of Artificial Sequence: Synthetic oligonucleotide
  Sense strand starting at position 841 of SEQ ID NO: 1493
acuuuaguguccuuauuga

SEQ ID NO: 117385 - RNA, 19 nt, Artificial Sequence
  Description of Artificial Sequence: Synthetic oligonucleotide
  Antisense strand to SEQ ID NO: 117384
ucaauaaggacacuaaagu

SEQ ID NO: 117386 - RNA, 19 nt, Artificial Sequence
  Description of Artificial Sequence: Synthetic oligonucleotide
  Sense strand starting at position 716 of SEQ ID NO: 1493
ugaacacugcuuggaugau

SEQ ID NO: 117387 - RNA, 19 nt, Artificial Sequence
  Description of Artificial Sequence: Synthetic oligonucleotide
  Antisense strand to SEQ ID NO: 117386
aucauccaagcaguguuca

SEQ ID NO: 117388 - RNA, 19 nt, Artificial Sequence
  Description of Artificial Sequence: Synthetic oligonucleotide
  Sense strand starting at position 715 of SEQ ID NO: 1493
gugaacacugcuuggauga

SEQ ID NO: 117389 - RNA, 19 nt, Artificial Sequence
  Description of Artificial Sequence: Synthetic oligonucleotide
  Antisense strand to SEQ ID NO: 117388
ucauccaagcaguguucac

SEQ ID NO: 117390 - RNA, 19 nt, Artificial Sequence
  Description of Artificial Sequence: Synthetic oligonucleotide
  Sense strand starting at position 241 of SEQ ID NO: 1493
uggccaacaaugugaagau

SEQ ID NO: 117391 - RNA, 19 nt, Artificial Sequence
  Description of Artificial Sequence: Synthetic oligonucleotide
  Antisense strand to SEQ ID NO: 117390
aucuucacauuguuggcca

SEQ ID NO: 117392 - RNA, 19 nt, Artificial Sequence
  Description of Artificial Sequence: Synthetic oligonucleotide
  Sense strand starting at position 3963 of SEQ ID NO: 1494
gagcaaagccaauauguga

SEQ ID NO: 117393 - RNA, 19 nt, Artificial Sequence
  Description of Artificial Sequence: Synthetic oligonucleotide
  Antisense strand to SEQ ID NO: 117392
ucacauauuggcuuugcuc

SEQ ID NO: 117394 - RNA, 19 nt, Artificial Sequence
  Description of Artificial Sequence: Synthetic oligonucleotide
  Sense strand starting at position 3900 of SEQ ID NO: 1494
gaauuauguuucucguaug

SEQ ID NO: 117395 - RNA, 19 nt, Artificial Sequence
  Description of Artificial Sequence: Synthetic oligonucleotide
  Antisense strand to SEQ ID NO: 117394
cauacgagaaacauaauuc

SEQ ID NO: 117396 - RNA, 19 nt, Artificial Sequence
  Description of Artificial Sequence: Synthetic oligonucleotide
  Sense strand starting at position 3899 of SEQ ID NO: 1494
agaauuauguuucucguau

SEQ ID NO: 117397 - RNA, 19 nt, Artificial Sequence
  Description of Artificial Sequence: Synthetic oligonucleotide
  Antisense strand to SEQ ID NO: 117396
auacgagaaacauaauucu

SEQ ID NO: 117398 - RNA, 19 nt, Artificial Sequence
  Description of Artificial Sequence: Synthetic oligonucleotide
  Sense strand starting at position 3677 of SEQ ID NO: 1494
agaauugcaugaguauguu

SEQ ID NO: 117399 - RNA, 19 nt, Artificial Sequence
  Description of Artificial Sequence: Synthetic oligonucleotide
  Antisense strand to SEQ ID NO: 117398
aacauacucaugcaauucu

SEQ ID NO: 117400 - RNA, 19 nt, Artificial Sequence
  Description of Artificial Sequence: Synthetic oligonucleotide
  Sense strand starting at position 3670 of SEQ ID NO: 1494
gggcauuagaauugcauga

SEQ ID NO: 117401 - RNA, 19 nt, Artificial Sequence
  Description of Artificial Sequence: Synthetic oligonucleotide
  Antisense strand to SEQ ID NO: 117400
ucaugcaauucuaaugccc

SEQ ID NO: 117402 - RNA, 19 nt, Artificial Sequence
  Description of Artificial Sequence: Synthetic oligonucleotide
  Sense strand starting at position 3232 of SEQ ID NO: 1494
caauuuauguuauaagagg

SEQ ID NO: 117403 - RNA, 19 nt, Artificial Sequence
  Description of Artificial Sequence: Synthetic oligonucleotide
  Antisense strand to SEQ ID NO: 117402
ccucuuauaacauaaauug

SEQ ID NO: 117404 - RNA, 19 nt, Artificial Sequence
  Description of Artificial Sequence: Synthetic oligonucleotide
  Sense strand starting at position 3211 of SEQ ID NO: 1494
aucagaugaugacauauaa

SEQ ID NO: 117405 - RNA, 19 nt, Artificial Sequence
  Description of Artificial Sequence: Synthetic oligonucleotide
  Antisense strand to SEQ ID NO: 117404
uuauaugucaucaucugau

SEQ ID NO: 117406 - RNA, 19 nt, Artificial Sequence
  Description of Artificial Sequence: Synthetic oligonucleotide
  Sense strand starting at position 3200 of SEQ ID NO: 1494
cagugagugugaucagaug

SEQ ID NO: 117407 - RNA, 19 nt, Artificial Sequence
  Description of Artificial Sequence: Synthetic oligonucleotide
  Antisense strand to SEQ ID NO: 117406
caucugaucacacucacug

SEQ ID NO: 117408 - RNA, 19 nt, Artificial Sequence
  Description of Artificial Sequence: Synthetic oligonucleotide
  Sense strand starting at position 3020 of SEQ ID NO: 1494
uuggcauuccuaggaaacu

SEQ ID NO: 117409 - RNA, 19 nt, Artificial Sequence
  Description of Artificial Sequence: Synthetic oligonucleotide
  Antisense strand to SEQ ID NO: 117408
aguuuccuaggaaugccaa

SEQ ID NO: 117410 - RNA, 19 nt, Artificial Sequence
  Description of Artificial Sequence: Synthetic oligonucleotide
  Sense strand starting at position 2810 of SEQ ID NO: 1494
agggauuagaguggugcau

SEQ ID NO: 117411 - RNA, 19 nt, Artificial Sequence
  Description of Artificial Sequence: Synthetic oligonucleotide
  Antisense strand to SEQ ID NO: 117410
augcaccacucuaaucccu

SEQ ID NO: 117412 - RNA, 19 nt, Artificial Sequence
  Description of Artificial Sequence: Synthetic oligonucleotide
  Sense strand starting at position 2718 of SEQ ID NO: 1494
ggguuucucuaaucaguua

SEQ ID NO: 117413 - RNA, 19 nt, Artificial Sequence
  Description of Artificial Sequence: Synthetic oligonucleotide
  Antisense strand to SEQ ID NO: 117412
uaacugauuagagaaaccc

SEQ ID NO: 117414 - RNA, 19 nt, Artificial Sequence
  Description of Artificial Sequence: Synthetic oligonucleotide
  Sense strand starting at position 2712 of SEQ ID NO: 1494
uagaguggguuucucuaau

SEQ ID NO: 117415 - RNA, 19 nt, Artificial Sequence
  Description of Artificial Sequence: Synthetic oligonucleotide
  Antisense strand to SEQ ID NO: 117414
auuagagaaacccacucua

SEQ ID NO: 117416 - RNA, 19 nt, Artificial Sequence
  Description of Artificial Sequence: Synthetic oligonucleotide
  Sense strand starting at position 2705 of SEQ ID NO: 1494
auuggauuagaguggguuu

SEQ ID NO: 117417 - RNA, 19 nt, Artificial Sequence
  Description of Artificial Sequence: Synthetic oligonucleotide
  Antisense strand to SEQ ID NO: 117416
aaacccacucuaauccaau

SEQ ID NO: 117418 - RNA, 19 nt, Artificial Sequence
  Description of Artificial Sequence: Synthetic oligonucleotide
  Sense strand starting at position 2678 of SEQ ID NO: 1494
gaguguaacuaguuaaggu

SEQ ID NO: 117419 - RNA, 19 nt, Artificial Sequence
  Description of Artificial Sequence: Synthetic oligonucleotide
  Antisense strand to SEQ ID NO: 117418
accuuaacuaguuacacuc

SEQ ID NO: 117420 - RNA, 19 nt, Artificial Sequence
  Description of Artificial Sequence: Synthetic oligonucleotide
  Sense strand starting at position 2674 of SEQ ID NO: 1494
uaaagaguguaacuaguua

SEQ ID NO: 117421 - RNA, 19 nt, Artificial Sequence
  Description of Artificial Sequence: Synthetic oligonucleotide
  Antisense strand to SEQ ID NO: 117420
uaacuaguuacacucuuua

SEQ ID NO: 117422 - RNA, 19 nt, Artificial Sequence
  Description of Artificial Sequence: Synthetic oligonucleotide
  Sense strand starting at position 2669 of SEQ ID NO: 1494
auacauaaagaguguaacu

SEQ ID NO: 117423 - RNA, 19 nt, Artificial Sequence
  Description of Artificial Sequence: Synthetic oligonucleotide
  Antisense strand to SEQ ID NO: 117422
aguuacacucuuuauguau

SEQ ID NO: 117424 - RNA, 19 nt, Artificial Sequence
  Description of Artificial Sequence: Synthetic oligonucleotide
  Sense strand starting at position 2618 of SEQ ID NO: 1494
ugaguuguauuucuuccca

SEQ ID NO: 117425 - RNA, 19 nt, Artificial Sequence
  Description of Artificial Sequence: Synthetic oligonucleotide
  Antisense strand to SEQ ID NO: 117424
ugggaagaaauacaacuca

SEQ ID NO: 117426 - RNA, 19 nt, Artificial Sequence
  Description of Artificial Sequence: Synthetic oligonucleotide
  Sense strand starting at position 2611 of SEQ ID NO: 1494
uacggauugaguuguauuu

SEQ ID NO: 117427 - RNA, 19 nt, Artificial Sequence
  Description of Artificial Sequence: Synthetic oligonucleotide
  Antisense strand to SEQ ID NO: 117426
aaauacaacucaauccgua

SEQ ID NO: 117428 - RNA, 19 nt, Artificial Sequence
  Description of Artificial Sequence: Synthetic oligonucleotide
  Sense strand starting at position 2529 of SEQ ID NO: 1494
ucuauacaguaauuggaua

SEQ ID NO: 117429 - RNA, 19 nt, Artificial Sequence
  Description of Artificial Sequence: Synthetic oligonucleotide
  Antisense strand to SEQ ID NO: 117428
uauccaauuacuguauaga

SEQ ID NO: 117430 - RNA, 19 nt, Artificial Sequence
  Description of Artificial Sequence: Synthetic oligonucleotide
  Sense strand starting at position 2506 of SEQ ID NO: 1494
gauguacacuuuguaguaa

SEQ ID NO: 117431 - RNA, 19 nt, Artificial Sequence
  Description of Artificial Sequence: Synthetic oligonucleotide
  Antisense strand to SEQ ID NO: 117430
uuacuacaaaguguacauc

SEQ ID NO: 117432 - RNA, 19 nt, Artificial Sequence
  Description of Artificial Sequence: Synthetic oligonucleotide
  Sense strand starting at position 2505 of SEQ ID NO: 1494
ugauguacacuuuguagua

SEQ ID NO: 117433 - RNA, 19 nt, Artificial Sequence
  Description of Artificial Sequence: Synthetic oligonucleotide
  Antisense strand to SEQ ID NO: 117432
uacuacaaaguguacauca

SEQ ID NO: 117434 - RNA, 19 nt, Artificial Sequence
  Description of Artificial Sequence: Synthetic oligonucleotide
  Sense strand starting at position 2492 of SEQ ID NO: 1494
acuuuagaguguuugaugu

SEQ ID NO: 117435 - RNA, 19 nt, Artificial Sequence
  Description of Artificial Sequence: Synthetic oligonucleotide
  Antisense strand to SEQ ID NO: 117434
acaucaaacacucuaaagu

SEQ ID NO: 117436 - RNA, 19 nt, Artificial Sequence
  Description of Artificial Sequence: Synthetic oligonucleotide
  Sense strand starting at position 2489 of SEQ ID NO: 1494
auuacuuuagaguguuuga

SEQ ID NO: 117437 - RNA, 19 nt, Artificial Sequence
  Description of Artificial Sequence: Synthetic oligonucleotide
  Antisense strand to SEQ ID NO: 117436
ucaaacacucuaaaguaau

SEQ ID NO: 117438 - RNA, 19 nt, Artificial Sequence
  Description of Artificial Sequence: Synthetic oligonucleotide
  Sense strand starting at position 2484 of SEQ ID NO: 1494
ugucuauuacuuuagagug

SEQ ID NO: 117439 - RNA, 19 nt, Artificial Sequence
  Description of Artificial Sequence: Synthetic oligonucleotide
  Antisense strand to SEQ ID NO: 117438
cacucuaaaguaauagaca

SEQ ID NO: 117440 - RNA, 19 nt, Artificial Sequence
  Description of Artificial Sequence: Synthetic oligonucleotide
  Sense strand starting at position 2481 of SEQ ID NO: 1494
guuugucuauuacuuuaga

SEQ ID NO: 117441 - RNA, 19 nt, Artificial Sequence
  Description of Artificial Sequence: Synthetic oligonucleotide
  Antisense strand to SEQ ID NO: 117440
ucuaaaguaauagacaaac

SEQ ID NO: 117442 - RNA, 19 nt, Artificial Sequence
  Description of Artificial Sequence: Synthetic oligonucleotide
  Sense strand starting at position 2426 of SEQ ID NO: 1494
ugugccuuugcucacauaa

SEQ ID NO: 117443 - RNA, 19 nt, Artificial Sequence
  Description of Artificial Sequence: Synthetic oligonucleotide
  Antisense strand to SEQ ID NO: 117442
uuaugugagcaaaggcaca

SEQ ID NO: 117444 - RNA, 19 nt, Artificial Sequence
  Description of Artificial Sequence: Synthetic oligonucleotide
  Sense strand starting at position 2417 of SEQ ID NO: 1494
gaauaaaugugugccuuug

SEQ ID NO: 117445 - RNA, 19 nt, Artificial Sequence
  Description of Artificial Sequence: Synthetic oligonucleotide
  Antisense strand to SEQ ID NO: 117444
caaaggcacacauuuauuc

SEQ ID NO: 117446 - RNA, 19 nt, Artificial Sequence
  Description of Artificial Sequence: Synthetic oligonucleotide
  Sense strand starting at position 2416 of SEQ ID NO: 1494
agaauaaaugugugccuuu

SEQ ID NO: 117447 - RNA, 19 nt, Artificial Sequence
  Description of Artificial Sequence: Synthetic oligonucleotide
  Antisense strand to SEQ ID NO: 117446
aaaggcacacauuuauucu

SEQ ID NO: 117448 - RNA, 19 nt, Artificial Sequence
  Description of Artificial Sequence: Synthetic oligonucleotide
  Sense strand starting at position 2415 of SEQ ID NO: 1494
gagaauaaaugugugccuu

SEQ ID NO: 117449 - RNA, 19 nt, Artificial Sequence
  Description of Artificial Sequence: Synthetic oligonucleotide
  Antisense strand to SEQ ID NO: 117448
aaggcacacauuuauucuc

SEQ ID NO: 117450 - RNA, 19 nt, Artificial Sequence
  Description of Artificial Sequence: Synthetic oligonucleotide
  Sense strand starting at position 2414 of SEQ ID NO: 1494
ggagaauaaaugugugccu

SEQ ID NO: 117451 - RNA, 19 nt, Artificial Sequence
  Description of Artificial Sequence: Synthetic oligonucleotide
  Antisense strand to SEQ ID NO: 117450
aggcacacauuuauucucc

SEQ ID NO: 117452 - RNA, 19 nt, Artificial Sequence
  Description of Artificial Sequence: Synthetic oligonucleotide
  Sense strand starting at position 2387 of SEQ ID NO: 1494
gcaugugaccaucacagua

SEQ ID NO: 117453 - RNA, 19 nt, Artificial Sequence
  Description of Artificial Sequence: Synthetic oligonucleotide
  Antisense strand to SEQ ID NO: 117452
uacugugauggucacaugc

SEQ ID NO: 117454 - RNA, 19 nt, Artificial Sequence
  Description of Artificial Sequence: Synthetic oligonucleotide
  Sense strand starting at position 2316 of SEQ ID NO: 1494
ggaaacagauaguuccuau

SEQ ID NO: 117455 - RNA, 19 nt, Artificial Sequence
  Description of Artificial Sequence: Synthetic oligonucleotide
  Antisense strand to SEQ ID NO: 117454
auaggaacuaucuguuucc

SEQ ID NO: 117456 - RNA, 19 nt, Artificial Sequence
  Description of Artificial Sequence: Synthetic oligonucleotide
  Sense strand starting at position 2074 of SEQ ID NO: 1494
aaaucaugugauuguggua

SEQ ID NO: 117457 - RNA, 19 nt, Artificial Sequence
  Description of Artificial Sequence: Synthetic oligonucleotide
  Antisense strand to SEQ ID NO: 117456
uaccacaaucacaugauuu

SEQ ID NO: 117458 - RNA, 19 nt, Artificial Sequence
  Description of Artificial Sequence: Synthetic oligonucleotide
  Sense strand starting at position 2036 of SEQ ID NO: 1494
agcguauuaauuugguaaa

SEQ ID NO: 117459 - RNA, 19 nt, Artificial Sequence
  Description of Artificial Sequence: Synthetic oligonucleotide
  Antisense strand to SEQ ID NO: 117458
uuuaccaaauuaauacgcu

SEQ ID NO: 117460 - RNA, 19 nt, Artificial Sequence
  Description of Artificial Sequence: Synthetic oligonucleotide
  Sense strand starting at position 1042 of SEQ ID NO: 1494
acaugaaguuuauuaggua

SEQ ID NO: 117461 - RNA, 19 nt, Artificial Sequence
  Description of Artificial Sequence: Synthetic oligonucleotide
  Antisense strand to SEQ ID NO: 117460
uaccuaauaaacuucaugu

SEQ ID NO: 117462 - RNA, 19 nt, Artificial Sequence
  Description of Artificial Sequence: Synthetic oligonucleotide
  Sense strand starting at position 942 of SEQ ID NO: 1494
auaaauaugucauugcaga

SEQ ID NO: 117463 - RNA, 19 nt, Artificial Sequence
  Description of Artificial Sequence: Synthetic oligonucleotide
  Antisense strand to SEQ ID NO: 117462
ucugcaaugacauauuuau

SEQ ID NO: 117464 - RNA, 19 nt, Artificial Sequence
  Description of Artificial Sequence: Synthetic oligonucleotide
  Sense strand starting at position 927 of SEQ ID NO: 1494
auuauauaggugcacauaa

SEQ ID NO: 117465 - RNA, 19 nt, Artificial Sequence
  Description of Artificial Sequence: Synthetic oligonucleotide
  Antisense strand to SEQ ID NO: 117464
uuaugugcaccuauauaau

SEQ ID NO: 117466 - RNA, 19 nt, Artificial Sequence
  Description of Artificial Sequence: Synthetic oligonucleotide
  Sense strand starting at position 867 of SEQ ID NO: 1494
guggucauagcagaaauga

SEQ ID NO: 117467 - RNA, 19 nt, Artificial Sequence
  Description of Artificial Sequence: Synthetic oligonucleotide
  Antisense strand to SEQ ID NO: 117466
ucauuucugcuaugaccac

SEQ ID NO: 117468 - RNA, 19 nt, Artificial Sequence
  Description of Artificial Sequence: Synthetic oligonucleotide
  Sense strand starting at position 860 of SEQ ID NO: 1494
uuacauuguggucauagca

SEQ ID NO: 117469 - RNA, 19 nt, Artificial Sequence
  Description of Artificial Sequence: Synthetic oligonucleotide
  Antisense strand to SEQ ID NO: 117468
ugcuaugaccacaauguaa

SEQ ID NO: 117470 - RNA, 19 nt, Artificial Sequence
  Description of Artificial Sequence: Synthetic oligonucleotide
  Sense strand starting at position 320 of SEQ ID NO: 1494
uguauaaagcagcacaauu

SEQ ID NO: 117471 - RNA, 19 nt, Artificial Sequence
  Description of Artificial Sequence: Synthetic oligonucleotide
  Antisense strand to SEQ ID NO: 117470
aauugugcugcuuuauaca

SEQ ID NO: 117472 - RNA, 19 nt, Artificial Sequence
  Description of Artificial Sequence: Synthetic oligonucleotide
  Sense strand starting at position 3953 of SEQ ID NO: 1495
auagaaucagguugugaau

SEQ ID NO: 117473 - RNA, 19 nt, Artificial Sequence
  Description of Artificial Sequence: Synthetic oligonucleotide
  Antisense strand to SEQ ID NO: 117472
auucacaaccugauucuau

SEQ ID NO: 117474 - RNA, 19 nt, Artificial Sequence
  Description of Artificial Sequence: Synthetic oligonucleotide
  Sense strand starting at position 3781 of SEQ ID NO: 1495
cucgauauuuaccagggau

SEQ ID NO: 117475 - RNA, 19 nt, Artificial Sequence
  Description of Artificial Sequence: Synthetic oligonucleotide
  Antisense strand to SEQ ID NO: 117474
aucccugguaaauaucgag

SEQ ID NO: 117476 - RNA, 19 nt, Artificial Sequence
  Description of Artificial Sequence: Synthetic oligonucleotide
  Sense strand starting at position 3711 of SEQ ID NO: 1495
gaucgugguagauaauauu

SEQ ID NO: 117477 - RNA, 19 nt, Artificial Sequence
  Description of Artificial Sequence: Synthetic oligonucleotide
  Antisense strand to SEQ ID NO: 117476
aauauuaucuaccacgauc

SEQ ID NO: 117478 - RNA, 19 nt, Artificial Sequence
  Description of Artificial Sequence: Synthetic oligonucleotide
  Sense strand starting at position 3709 of SEQ ID NO: 1495
uugaucgugguagauaaua

SEQ ID NO: 117479 - RNA, 19 nt, Artificial Sequence
  Description of Artificial Sequence: Synthetic oligonucleotide
  Antisense strand to SEQ ID NO: 117478
uauuaucuaccacgaucaa

SEQ ID NO: 117480 - RNA, 19 nt, Artificial Sequence
  Description of Artificial Sequence: Synthetic oligonucleotide
  Sense strand starting at position 3644 of SEQ ID NO: 1495
uugguuguuuaugugauga

SEQ ID NO: 117481 - RNA, 19 nt, Artificial Sequence
  Description of Artificial Sequence: Synthetic oligonucleotide
  Antisense strand to SEQ ID NO: 117480
ucaucacauaaacaaccaa

SEQ ID NO: 117482 - RNA, 19 nt, Artificial Sequence
  Description of Artificial Sequence: Synthetic oligonucleotide
  Sense strand starting at position 3167 of SEQ ID NO: 1495
cgugauauuggcuaugagu

SEQ ID NO: 117483 - RNA, 19 nt, Artificial Sequence
  Description of Artificial Sequence: Synthetic oligonucleotide
  Antisense strand to SEQ ID NO: 117482
acucauagccaauaucacg

SEQ ID NO: 117484 - RNA, 19 nt, Artificial Sequence
  Description of Artificial Sequence: Synthetic oligonucleotide
  Sense strand starting at position 3012 of SEQ ID NO: 1495
acccuucuguggucuuuaa

SEQ ID NO: 117485 - RNA, 19 nt, Artificial Sequence
  Description of Artificial Sequence: Synthetic oligonucleotide
  Antisense strand to SEQ ID NO: 117484
uuaaagaccacagaagggu

SEQ ID NO: 117486 - RNA, 19 nt, Artificial Sequence
  Description of Artificial Sequence: Synthetic oligonucleotide
  Sense strand starting at position 2700 of SEQ ID NO: 1495
cuuccaauucuguguggaa

SEQ ID NO: 117487 - RNA, 19 nt, Artificial Sequence
  Description of Artificial Sequence: Synthetic oligonucleotide
  Antisense strand to SEQ ID NO: 117486
uuccacacagaauuggaag

SEQ ID NO: 117488 - RNA, 19 nt, Artificial Sequence
  Description of Artificial Sequence: Synthetic oligonucleotide
  Sense strand starting at position 2596 of SEQ ID NO: 1495
agaccaagucgugaagucu

SEQ ID NO: 117489 - RNA, 19 nt, Artificial Sequence
  Description of Artificial Sequence: Synthetic oligonucleotide
  Antisense strand to SEQ ID NO: 117488
agacuucacgacuuggucu

SEQ ID NO: 117490 - RNA, 19 nt, Artificial Sequence
  Description of Artificial Sequence: Synthetic oligonucleotide
  Sense strand starting at position 2562 of SEQ ID NO: 1495
gguauaguacucuauguuu

SEQ ID NO: 117491 - RNA, 19 nt, Artificial Sequence
  Description of Artificial Sequence: Synthetic oligonucleotide
  Antisense strand to SEQ ID NO: 117490
aaacauagaguacuauacc

SEQ ID NO: 117492 - RNA, 19 nt, Artificial Sequence
  Description of Artificial Sequence: Synthetic oligonucleotide
  Sense strand starting at position 2560 of SEQ ID NO: 1495
aggguauaguacucuaugu

SEQ ID NO: 117493 - RNA, 19 nt, Artificial Sequence
  Description of Artificial Sequence: Synthetic oligonucleotide
  Antisense strand to SEQ ID NO: 117492
acauagaguacuauacccu

SEQ ID NO: 117494 - RNA, 19 nt, Artificial Sequence
  Description of Artificial Sequence: Synthetic oligonucleotide
  Sense strand starting at position 2499 of SEQ ID NO: 1495
aggauuauaugagaucaau

SEQ ID NO: 117495 - RNA, 19 nt, Artificial Sequence
  Description of Artificial Sequence: Synthetic oligonucleotide
  Antisense strand to SEQ ID NO: 117494
auugaucucauauaauccu

SEQ ID NO: 117496 - RNA, 19 nt, Artificial Sequence
  Description of Artificial Sequence: Synthetic oligonucleotide
  Sense strand starting at position 2497 of SEQ ID NO: 1495
gaaggauuauaugagauca

SEQ ID NO: 117497 - RNA, 19 nt, Artificial Sequence
  Description of Artificial Sequence: Synthetic oligonucleotide
  Antisense strand to SEQ ID NO: 117496
ugaucucauauaauccuuc

SEQ ID NO: 117498 - RNA, 19 nt, Artificial Sequence
  Description of Artificial Sequence: Synthetic oligonucleotide
  Sense strand starting at position 2494 of SEQ ID NO: 1495
agugaaggauuauaugaga

SEQ ID NO: 117499 - RNA, 19 nt, Artificial Sequence
  Description of Artificial Sequence: Synthetic oligonucleotide
  Antisense strand to SEQ ID NO: 117498
ucucauauaauccuucacu

SEQ ID NO: 117500 - RNA, 19 nt, Artificial Sequence
  Description of Artificial Sequence: Synthetic oligonucleotide
  Sense strand starting at position 2431 of SEQ ID NO: 1495
ucucguugacaacagaauu

SEQ ID NO: 117501 - RNA, 19 nt, Artificial Sequence
  Description of Artificial Sequence: Synthetic oligonucleotide
  Antisense strand to SEQ ID NO: 117500
aauucuguugucaacgaga

SEQ ID NO: 117502 - RNA, 19 nt, Artificial Sequence
  Description of Artificial Sequence: Synthetic oligonucleotide
  Sense strand starting at position 2426 of SEQ ID NO: 1495
aguagucucguugacaaca

SEQ ID NO: 117503 - RNA, 19 nt, Artificial Sequence
  Description of Artificial Sequence: Synthetic oligonucleotide
  Antisense strand to SEQ ID NO: 117502
uguugucaacgagacuacu

SEQ ID NO: 117504 - RNA, 19 nt, Artificial Sequence
  Description of Artificial Sequence: Synthetic oligonucleotide
  Sense strand starting at position 2258 of SEQ ID NO: 1495
aaugcugaaguguauaaga

SEQ ID NO: 117505 - RNA, 19 nt, Artificial Sequence
  Description of Artificial Sequence: Synthetic oligonucleotide
  Antisense strand to SEQ ID NO: 117504
ucuuauacacuucagcauu

SEQ ID NO: 117506 - RNA, 19 nt, Artificial Sequence
  Description of Artificial Sequence: Synthetic oligonucleotide
  Sense strand starting at position 2224 of SEQ ID NO: 1495
uggaguacauuuggacauu

SEQ ID NO: 117507 - RNA, 19 nt, Artificial Sequence
  Description of Artificial Sequence: Synthetic oligonucleotide
  Antisense strand to SEQ ID NO: 117506
aauguccaaauguacucca

SEQ ID NO: 117508 - RNA, 19 nt, Artificial Sequence
  Description of Artificial Sequence: Synthetic oligonucleotide
  Sense strand starting at position 2157 of SEQ ID NO: 1495
guaaauuguguggauuagu

SEQ ID NO: 117509 - RNA, 19 nt, Artificial Sequence
  Description of Artificial Sequence: Synthetic oligonucleotide
  Antisense strand to SEQ ID NO: 117508
acuaauccacacaauuuac

SEQ ID NO: 117510 - RNA, 19 nt, Artificial Sequence
  Description of Artificial Sequence: Synthetic oligonucleotide
  Sense strand starting at position 2155 of SEQ ID NO: 1495
ugguaaauuguguggauua

SEQ ID NO: 117511 - RNA, 19 nt, Artificial Sequence
  Description of Artificial Sequence: Synthetic oligonucleotide
  Antisense strand to SEQ ID NO: 117510
uaauccacacaauuuacca

SEQ ID NO: 117512 - RNA, 19 nt, Artificial Sequence
  Description of Artificial Sequence: Synthetic oligonucleotide
  Sense strand starting at position 2154 of SEQ ID NO: 1495
augguaaauuguguggauu

SEQ ID NO: 117513 - RNA, 19 nt, Artificial Sequence
  Description of Artificial Sequence: Synthetic oligonucleotide
  Antisense strand to SEQ ID NO: 117512
aauccacacaauuuaccau

SEQ ID NO: 117514 - RNA, 19 nt, Artificial Sequence
  Description of Artificial Sequence: Synthetic oligonucleotide
  Sense strand starting at position 2144 of SEQ ID NO: 1495
uccuuuagucaugguaaau

SEQ ID NO: 117515 - RNA, 19 nt, Artificial Sequence
  Description of Artificial Sequence: Synthetic oligonucleotide
  Antisense strand to SEQ ID NO: 117514
auuuaccaugacuaaagga

SEQ ID NO: 117516 - RNA, 19 nt, Artificial Sequence
  Description of Artificial Sequence: Synthetic oligonucleotide
  Sense strand starting at position 2137 of SEQ ID NO: 1495
guuaccuuccuuuagucau

SEQ ID NO: 117517 - RNA, 19 nt, Artificial Sequence
  Description of Artificial Sequence: Synthetic oligonucleotide
  Antisense strand to SEQ ID NO: 117516
augacuaaaggaagguaac

SEQ ID NO: 117518 - RNA, 19 nt, Artificial Sequence
  Description of Artificial Sequence: Synthetic oligonucleotide
  Sense strand starting at position 2098 of SEQ ID NO: 1495
aguuuauaugcaugcauaa

SEQ ID NO: 117519 - RNA, 19 nt, Artificial Sequence
  Description of Artificial Sequence: Synthetic oligonucleotide
  Antisense strand to SEQ ID NO: 117518
uuaugcaugcauauaaacu

SEQ ID NO: 117520 - RNA, 19 nt, Artificial Sequence
  Description of Artificial Sequence: Synthetic oligonucleotide
  Sense strand starting at position 2019 of SEQ ID NO: 1495
aucugagaauuccaaagaa

SEQ ID NO: 117521 - RNA, 19 nt, Artificial Sequence
  Description of Artificial Sequence: Synthetic oligonucleotide
  Antisense strand to SEQ ID NO: 117520
uucuuuggaauucucagau

SEQ ID NO: 117522 - RNA, 19 nt, Artificial Sequence
  Description of Artificial Sequence: Synthetic oligonucleotide
  Sense strand starting at position 1022 of SEQ ID NO: 1495
augaguguugaccacagua

SEQ ID NO: 117523 - RNA, 19 nt, Artificial Sequence
  Description of Artificial Sequence: Synthetic oligonucleotide
  Antisense strand to SEQ ID NO: 117522
uacuguggucaacacucau

SEQ ID NO: 117524 - RNA, 19 nt, Artificial Sequence
  Description of Artificial Sequence: Synthetic oligonucleotide
  Sense strand starting at position 904 of SEQ ID NO: 1495
acaaacgauguauauguaa

SEQ ID NO: 117525 - RNA, 19 nt, Artificial Sequence
  Description of Artificial Sequence: Synthetic oligonucleotide
  Antisense strand to SEQ ID NO: 117524
uuacauauacaucguuugu

SEQ ID NO: 117526 - RNA, 19 nt, Artificial Sequence
  Description of Artificial Sequence: Synthetic oligonucleotide
  Sense strand starting at position 900 of SEQ ID NO: 1495
guauacaaacgauguauau

SEQ ID NO: 117527 - RNA, 19 nt, Artificial Sequence
  Description of Artificial Sequence: Synthetic oligonucleotide
  Antisense strand to SEQ ID NO: 117526
auauacaucguuuguauac

SEQ ID NO: 117528 - RNA, 19 nt, Artificial Sequence
  Description of Artificial Sequence: Synthetic oligonucleotide
  Sense strand starting at position 653 of SEQ ID NO: 1495
guuugaggaugggcaaauu

SEQ ID NO: 117529 - RNA, 19 nt, Artificial Sequence
  Description of Artificial Sequence: Synthetic oligonucleotide
  Antisense strand to SEQ ID NO: 117528
aauuugcccauccucaaac

SEQ ID NO: 117530 - RNA, 19 nt, Artificial Sequence
  Description of Artificial Sequence: Synthetic oligonucleotide
  Sense strand starting at position 521 of SEQ ID NO: 1495
uuauacgaguuucuaggaa

SEQ ID NO: 117531 - RNA, 19 nt, Artificial Sequence
  Description of Artificial Sequence: Synthetic oligonucleotide
  Antisense strand to SEQ ID NO: 117530
uuccuagaaacucguauaa

SEQ ID NO: 117532 - RNA, 19 nt, Artificial Sequence
  Description of Artificial Sequence: Synthetic oligonucleotide
  Sense strand starting at position 511 of SEQ ID NO: 1495
guguguauguuuauacgag

SEQ ID NO: 117533 - RNA, 19 nt, Artificial Sequence
  Description of Artificial Sequence: Synthetic oligonucleotide
  Antisense strand to SEQ ID NO: 117532
cucguauaaacauacacac

SEQ ID NO: 117534 - RNA, 19 nt, Artificial Sequence
  Description of Artificial Sequence: Synthetic oligonucleotide
  Sense strand starting at position 363 of SEQ ID NO: 1495
agauucugaugguuaauau

SEQ ID NO: 117535 - RNA, 19 nt, Artificial Sequence
  Description of Artificial Sequence: Synthetic oligonucleotide
  Antisense strand to SEQ ID NO: 117534
auauuaaccaucagaaucu

SEQ ID NO: 117536 - RNA, 19 nt, Artificial Sequence
  Description of Artificial Sequence: Synthetic oligonucleotide
  Sense strand starting at position 361 of SEQ ID NO: 1495
ucagauucugaugguuaau

SEQ ID NO: 117537 - RNA, 19 nt, Artificial Sequence
  Description of Artificial Sequence: Synthetic oligonucleotide
  Antisense strand to SEQ ID NO: 117536
auuaaccaucagaaucuga

SEQ ID NO: 117538 - RNA, 19 nt, Artificial Sequence
  Description of Artificial Sequence: Synthetic oligonucleotide
  Sense strand starting at position 310 of SEQ ID NO: 1495
uugcaugugaacgaucagu

SEQ ID NO: 117539 - RNA, 19 nt, Artificial Sequence
  Description of Artificial Sequence: Synthetic oligonucleotide
  Antisense strand to SEQ ID NO: 117538
acugaucguucacaugcaa

SEQ ID NO: 117540 - RNA, 19 nt, Artificial Sequence
  Description of Artificial Sequence: Synthetic oligonucleotide
  Sense strand starting at position 281 of SEQ ID NO: 1495
guguauggauuauuguuaa

SEQ ID NO: 117541 - RNA, 19 nt, Artificial Sequence
  Description of Artificial Sequence: Synthetic oligonucleotide
  Antisense strand to SEQ ID NO: 117540
uuaacaauaauccauacac

SEQ ID NO: 117542 - RNA, 19 nt, Artificial Sequence
  Description of Artificial Sequence: Synthetic oligonucleotide
  Sense strand starting at position 279 of SEQ ID NO: 1495
ucguguauggauuauuguu

SEQ ID NO: 117543 - RNA, 19 nt, Artificial Sequence
  Description of Artificial Sequence: Synthetic oligonucleotide
  Antisense strand to SEQ ID NO: 117542
aacaauaauccauacacga

SEQ ID NO: 117544 - RNA, 19 nt, Artificial Sequence
  Description of Artificial Sequence: Synthetic oligonucleotide
  Sense strand starting at position 273 of SEQ ID NO: 1495
uguuguucguguauggauu

SEQ ID NO: 117545 - RNA, 19 nt, Artificial Sequence
  Description of Artificial Sequence: Synthetic oligonucleotide
  Antisense strand to SEQ ID NO: 117544
aauccauacacgaacaaca

SEQ ID NO: 117546 - RNA, 19 nt, Artificial Sequence
  Description of Artificial Sequence: Synthetic oligonucleotide
  Sense strand starting at position 271 of SEQ ID NO: 1495
uguguuguucguguaugga

SEQ ID NO: 117547 - RNA, 19 nt, Artificial Sequence
  Description of Artificial Sequence: Synthetic oligonucleotide
  Antisense strand to SEQ ID NO: 117546
uccauacacgaacaacaca

SEQ ID NO: 117548 - RNA, 19 nt, Artificial Sequence
  Description of Artificial Sequence: Synthetic oligonucleotide
  Sense strand starting at position 237 of SEQ ID NO: 1495
uacgaaggcucaccugauu

SEQ ID NO: 117549 - RNA, 19 nt, Artificial Sequence
  Description of Artificial Sequence: Synthetic oligonucleotide
  Antisense strand to SEQ ID NO: 117548
aaucaggugagccuucgua

SEQ ID NO: 117550 - RNA, 19 nt, Artificial Sequence
  Description of Artificial Sequence: Synthetic oligonucleotide
  Sense strand starting at position 138 of SEQ ID NO: 1495
ccuucugucaguggugaga

SEQ ID NO: 117551 - RNA, 19 nt, Artificial Sequence
  Description of Artificial Sequence: Synthetic oligonucleotide
  Antisense strand to SEQ ID NO: 117550
ucucaccacugacagaagg

SEQ ID NO: 117552 - RNA, 19 nt, Artificial Sequence
  Description of Artificial Sequence: Synthetic oligonucleotide
  Sense strand starting at position 3983 of SEQ ID NO: 1496
cucuucagugcugggaaga

SEQ ID NO: 117553 - RNA, 19 nt, Artificial Sequence
  Description of Artificial Sequence: Synthetic oligonucleotide
  Antisense strand to SEQ ID NO: 117552
ucuucccagcacugaagag

SEQ ID NO: 117554 - RNA, 19 nt, Artificial Sequence
  Description of Artificial Sequence: Synthetic oligonucleotide
  Sense strand starting at position 3883 of SEQ ID NO: 1496
auaauauuguggguaagaa

SEQ ID NO: 117555 - RNA, 19 nt, Artificial Sequence
  Description of Artificial Sequence: Synthetic oligonucleotide
  Antisense strand to SEQ ID NO: 117554
uucuuacccacaauauuau

SEQ ID NO: 117556 - RNA, 19 nt, Artificial Sequence
  Description of Artificial Sequence: Synthetic oligonucleotide
  Sense strand starting at position 3799 of SEQ ID NO: 1496
gccugauggguugaaauac

SEQ ID NO: 117557 - RNA, 19 nt, Artificial Sequence
  Description of Artificial Sequence: Synthetic oligonucleotide
  Antisense strand to SEQ ID NO: 117556
guauuucaacccaucaggc

SEQ ID NO: 117558 - RNA, 19 nt, Artificial Sequence
  Description of Artificial Sequence: Synthetic oligonucleotide
  Sense strand starting at position 3796 of SEQ ID NO: 1496
ucggccugauggguugaaa

SEQ ID NO: 117559 - RNA, 19 nt, Artificial Sequence
  Description of Artificial Sequence: Synthetic oligonucleotide
  Antisense strand to SEQ ID NO: 117558
uuucaacccaucaggccga

SEQ ID NO: 117560 - RNA, 19 nt, Artificial Sequence
  Description of Artificial Sequence: Synthetic oligonucleotide
  Sense strand starting at position 3733 of SEQ ID NO: 1496
cugaauaaucuaggagcaa

SEQ ID NO: 117561 - RNA, 19 nt, Artificial Sequence
  Description of Artificial Sequence: Synthetic oligonucleotide
  Antisense strand to SEQ ID NO: 117560
uugcuccuagauuauucag

SEQ ID NO: 117562 - RNA, 19 nt, Artificial Sequence
  Description of Artificial Sequence: Synthetic oligonucleotide
  Sense strand starting at position 3649 of SEQ ID NO: 1496
agacucauuugacagaaau

SEQ ID NO: 117563 - RNA, 19 nt, Artificial Sequence
  Description of Artificial Sequence: Synthetic oligonucleotide
  Antisense strand to SEQ ID NO: 117562
auuucugucaaaugagucu

SEQ ID NO: 117564 - RNA, 19 nt, Artificial Sequence
  Description of Artificial Sequence: Synthetic oligonucleotide
  Sense strand starting at position 3647 of SEQ ID NO: 1496
guagacucauuugacagaa

SEQ ID NO: 117565 - RNA, 19 nt, Artificial Sequence
  Description of Artificial Sequence: Synthetic oligonucleotide
  Antisense strand to SEQ ID NO: 117564
uucugucaaaugagucuac

SEQ ID NO: 117566 - RNA, 19 nt, Artificial Sequence
  Description of Artificial Sequence: Synthetic oligonucleotide
  Sense strand starting at position 3638 of SEQ ID NO: 1496
gccuguugaguagacucau

SEQ ID NO: 117567 - RNA, 19 nt, Artificial Sequence
  Description of Artificial Sequence: Synthetic oligonucleotide
  Antisense strand to SEQ ID NO: 117566
augagucuacucaacaggc

SEQ ID NO: 117568 - RNA, 19 nt, Artificial Sequence
  Description of Artificial Sequence: Synthetic oligonucleotide
  Sense strand starting at position 3574 of SEQ ID NO: 1496
aagccaauuugugaaggaa

SEQ ID NO: 117569 - RNA, 19 nt, Artificial Sequence
  Description of Artificial Sequence: Synthetic oligonucleotide
  Antisense strand to SEQ ID NO: 117568
uuccuucacaaauuggcuu

SEQ ID NO: 117570 - RNA, 19 nt, Artificial Sequence
  Description of Artificial Sequence: Synthetic oligonucleotide
  Sense strand starting at position 3573 of SEQ ID NO: 1496
aaagccaauuugugaagga

SEQ ID NO: 117571 - RNA, 19 nt, Artificial Sequence
  Description of Artificial Sequence: Synthetic oligonucleotide
  Antisense strand to SEQ ID NO: 117570
uccuucacaaauuggcuuu

SEQ ID NO: 117572 - RNA, 19 nt, Artificial Sequence
  Description of Artificial Sequence: Synthetic oligonucleotide
  Sense strand starting at position 3421 of SEQ ID NO: 1496
aggaaagguuuauccauau

SEQ ID NO: 117573 - RNA, 19 nt, Artificial Sequence
  Description of Artificial Sequence: Synthetic oligonucleotide
  Antisense strand to SEQ ID NO: 117572
auauggauaaaccuuuccu

SEQ ID NO: 117574 - RNA, 19 nt, Artificial Sequence
  Description of Artificial Sequence: Synthetic oligonucleotide
  Sense strand starting at position 3381 of SEQ ID NO: 1496
ucgcaaagacucugaggaa

SEQ ID NO: 117575 - RNA, 19 nt, Artificial Sequence
  Description of Artificial Sequence: Synthetic oligonucleotide
  Antisense strand to SEQ ID NO: 117574
uuccucagagucuuugcga

SEQ ID NO: 117576 - RNA, 19 nt, Artificial Sequence
  Description of Artificial Sequence: Synthetic oligonucleotide
  Sense strand starting at position 3306 of SEQ ID NO: 1496
agguguucgaauugcaaga

SEQ ID NO: 117577 - RNA, 19 nt, Artificial Sequence
  Description of Artificial Sequence: Synthetic oligonucleotide
  Antisense strand to SEQ ID NO: 117576
ucuugcaauucgaacaccu

SEQ ID NO: 117578 - RNA, 19 nt, Artificial Sequence
  Description of Artificial Sequence: Synthetic oligonucleotide
  Sense strand starting at position 3301 of SEQ ID NO: 1496
aagaaagguguucgaauug

SEQ ID NO: 117579 - RNA, 19 nt, Artificial Sequence
  Description of Artificial Sequence: Synthetic oligonucleotide
  Antisense strand to SEQ ID NO: 117578
caauucgaacaccuuucuu

SEQ ID NO: 117580 - RNA, 19 nt, Artificial Sequence
  Description of Artificial Sequence: Synthetic oligonucleotide
  Sense strand starting at position 3300 of SEQ ID NO: 1496
aaagaaagguguucgaauu

SEQ ID NO: 117581 - RNA, 19 nt, Artificial Sequence
  Description of Artificial Sequence: Synthetic oligonucleotide
  Antisense strand to SEQ ID NO: 117580
aauucgaacaccuuucuuu

SEQ ID NO: 117582 - RNA, 19 nt, Artificial Sequence
  Description of Artificial Sequence: Synthetic oligonucleotide
  Sense strand starting at position 3297 of SEQ ID NO: 1496
gucaaagaaagguguucga

SEQ ID NO: 117583 - RNA, 19 nt, Artificial Sequence
  Description of Artificial Sequence: Synthetic oligonucleotide
  Antisense strand to SEQ ID NO: 117582
ucgaacaccuuucuuugac

SEQ ID NO: 117584 - RNA, 19 nt, Artificial Sequence
  Description of Artificial Sequence: Synthetic oligonucleotide
  Sense strand starting at position 3133 of SEQ ID NO: 1496
ucgaaacaugcuuaugaag

SEQ ID NO: 117585 - RNA, 19 nt, Artificial Sequence
  Description of Artificial Sequence: Synthetic oligonucleotide
  Antisense strand to SEQ ID NO: 117584
cuucauaagcauguuucga

SEQ ID NO: 117586 - RNA, 19 nt, Artificial Sequence
  Description of Artificial Sequence: Synthetic oligonucleotide
  Sense strand starting at position 3132 of SEQ ID NO: 1496
uucgaaacaugcuuaugaa

SEQ ID NO: 117587 - RNA, 19 nt, Artificial Sequence
  Description of Artificial Sequence: Synthetic oligonucleotide
  Antisense strand to SEQ ID NO: 117586
uucauaagcauguuucgaa

SEQ ID NO: 117588 - RNA, 19 nt, Artificial Sequence
  Description of Artificial Sequence: Synthetic oligonucleotide
  Sense strand starting at position 3119 of SEQ ID NO: 1496
ugagaugcaugcuuucgaa

SEQ ID NO: 117589 - RNA, 19 nt, Artificial Sequence
  Description of Artificial Sequence: Synthetic oligonucleotide
  Antisense strand to SEQ ID NO: 117588
uucgaaagcaugcaucuca

SEQ ID NO: 117590 - RNA, 19 nt, Artificial Sequence
  Description of Artificial Sequence: Synthetic oligonucleotide
  Sense strand starting at position 3039 of SEQ ID NO: 1496
uucucauuccuagggaacu

SEQ ID NO: 117591 - RNA, 19 nt, Artificial Sequence
  Description of Artificial Sequence: Synthetic oligonucleotide
  Antisense strand to SEQ ID NO: 117590
aguucccuaggaaugagaa

SEQ ID NO: 117592 - RNA, 19 nt, Artificial Sequence
  Description of Artificial Sequence: Synthetic oligonucleotide
  Sense strand starting at position 3036 of SEQ ID NO: 1496
guauucucauuccuaggga

SEQ ID NO: 117593 - RNA, 19 nt, Artificial Sequence
  Description of Artificial Sequence: Synthetic oligonucleotide
  Antisense strand to SEQ ID NO: 117592
ucccuaggaaugagaauac

SEQ ID NO: 117594 - RNA, 19 nt, Artificial Sequence
  Description of Artificial Sequence: Synthetic oligonucleotide
  Sense strand starting at position 3033 of SEQ ID NO: 1496
ucuguauucucauuccuag

SEQ ID NO: 117595 - RNA, 19 nt, Artificial Sequence
  Description of Artificial Sequence: Synthetic oligonucleotide
  Antisense strand to SEQ ID NO: 117594
cuaggaaugagaauacaga

SEQ ID NO: 117596 - RNA, 19 nt, Artificial Sequence
  Description of Artificial Sequence: Synthetic oligonucleotide
  Sense strand starting at position 3025 of SEQ ID NO: 1496
ugugauacucuguauucuc

SEQ ID NO: 117597 - RNA, 19 nt, Artificial Sequence
  Description of Artificial Sequence: Synthetic oligonucleotide
  Antisense strand to SEQ ID NO: 117596
gagaauacagaguaucaca

SEQ ID NO: 117598 - RNA, 19 nt, Artificial Sequence
  Description of Artificial Sequence: Synthetic oligonucleotide
  Sense strand starting at position 3024 of SEQ ID NO: 1496
uugugauacucuguauucu

SEQ ID NO: 117599 - RNA, 19 nt, Artificial Sequence
  Description of Artificial Sequence: Synthetic oligonucleotide
  Antisense strand to SEQ ID NO: 117598
agaauacagaguaucacaa

SEQ ID NO: 117600 - RNA, 19 nt, Artificial Sequence
  Description of Artificial Sequence: Synthetic oligonucleotide
  Sense strand starting at position 2696 of SEQ ID NO: 1496
gacuguaauuaguuaaggu

SEQ ID NO: 117601 - RNA, 19 nt, Artificial Sequence
  Description of Artificial Sequence: Synthetic oligonucleotide
  Antisense strand to SEQ ID NO: 117600
accuuaacuaauuacaguc

SEQ ID NO: 117602 - RNA, 19 nt, Artificial Sequence
  Description of Artificial Sequence: Synthetic oligonucleotide
  Sense strand starting at position 2520 of SEQ ID NO: 1496
uugaucuacuccucauagu

SEQ ID NO: 117603 - RNA, 19 nt, Artificial Sequence
  Description of Artificial Sequence: Synthetic oligonucleotide
  Antisense strand to SEQ ID NO: 117602
acuaugaggaguagaucaa

SEQ ID NO: 117604 - RNA, 19 nt, Artificial Sequence
  Description of Artificial Sequence: Synthetic oligonucleotide
  Sense strand starting at position 2510 of SEQ ID NO: 1496
uuuagaguauuugaucuac

SEQ ID NO: 117605 - RNA, 19 nt, Artificial Sequence
  Description of Artificial Sequence: Synthetic oligonucleotide
  Antisense strand to SEQ ID NO: 117604
guagaucaaauacucuaaa

SEQ ID NO: 117606 - RNA, 19 nt, Artificial Sequence
  Description of Artificial Sequence: Synthetic oligonucleotide
  Sense strand starting at position 2493 of SEQ ID NO: 1496
ugccuauuacuuuacaguu

SEQ ID NO: 117607 - RNA, 19 nt, Artificial Sequence
  Description of Artificial Sequence: Synthetic oligonucleotide
  Antisense strand to SEQ ID NO: 117606
aacuguaaaguaauaggca

SEQ ID NO: 117608 - RNA, 19 nt, Artificial Sequence
  Description of Artificial Sequence: Synthetic oligonucleotide
  Sense strand starting at position 2425 of SEQ ID NO: 1496
guaaauuugugucuuuguu

SEQ ID NO: 117609 - RNA, 19 nt, Artificial Sequence
  Description of Artificial Sequence: Synthetic oligonucleotide
  Antisense strand to SEQ ID NO: 117608
aacaaagacacaaauuuac

SEQ ID NO: 117610 - RNA, 19 nt, Artificial Sequence
  Description of Artificial Sequence: Synthetic oligonucleotide
  Sense strand starting at position 2393 of SEQ ID NO: 1496
gcaugugaccaacacaaua

SEQ ID NO: 117611 - RNA, 19 nt, Artificial Sequence
  Description of Artificial Sequence: Synthetic oligonucleotide
  Antisense strand to SEQ ID NO: 117610
uauuguguuggucacaugc

SEQ ID NO: 117612 - RNA, 19 nt, Artificial Sequence
  Description of Artificial Sequence: Synthetic oligonucleotide
  Sense strand starting at position 2382 of SEQ ID NO: 1496
agcuuuagucagcauguga

SEQ ID NO: 117613 - RNA, 19 nt, Artificial Sequence
  Description of Artificial Sequence: Synthetic oligonucleotide
  Antisense strand to SEQ ID NO: 117612
ucacaugcugacuaaagcu

SEQ ID NO: 117614 - RNA, 19 nt, Artificial Sequence
  Description of Artificial Sequence: Synthetic oligonucleotide
  Sense strand starting at position 2279 of SEQ ID NO: 1496
uacauuauugauggaguuu

SEQ ID NO: 117615 - RNA, 19 nt, Artificial Sequence
  Description of Artificial Sequence: Synthetic oligonucleotide
  Antisense strand to SEQ ID NO: 117614
aaacuccaucaauaaugua

SEQ ID NO: 117616 - RNA, 19 nt, Artificial Sequence
  Description of Artificial Sequence: Synthetic oligonucleotide
  Sense strand starting at position 2184 of SEQ ID NO: 1496
agcacugccucacugauaa

SEQ ID NO: 117617 - RNA, 19 nt, Artificial Sequence
  Description of Artificial Sequence: Synthetic oligonucleotide
  Antisense strand to SEQ ID NO: 117616
uuaucagugaggcagugcu

SEQ ID NO: 117618 - RNA, 19 nt, Artificial Sequence
  Description of Artificial Sequence: Synthetic oligonucleotide
  Sense strand starting at position 2153 of SEQ ID NO: 1496
aguauagaaucagaacaaa

SEQ ID NO: 117619 - RNA, 19 nt, Artificial Sequence
  Description of Artificial Sequence: Synthetic oligonucleotide
  Antisense strand to SEQ ID NO: 117618
uuuguucugauucuauacu

SEQ ID NO: 117620 - RNA, 19 nt, Artificial Sequence
  Description of Artificial Sequence: Synthetic oligonucleotide
  Sense strand starting at position 2103 of SEQ ID NO: 1496
gucagugaucaauacagua

SEQ ID NO: 117621 - RNA, 19 nt, Artificial Sequence
  Description of Artificial Sequence: Synthetic oligonucleotide
  Antisense strand to SEQ ID NO: 117620
uacuguauugaucacugac

SEQ ID NO: 117622 - RNA, 19 nt, Artificial Sequence
  Description of Artificial Sequence: Synthetic oligonucleotide
  Sense strand starting at position 2099 of SEQ ID NO: 1496
gcaggucagugaucaauac

SEQ ID NO: 117623 - RNA, 19 nt, Artificial Sequence
  Description of Artificial Sequence: Synthetic oligonucleotide
  Antisense strand to SEQ ID NO: 117622
guauugaucacugaccugc

SEQ ID NO: 117624 - RNA, 19 nt, Artificial Sequence
  Description of Artificial Sequence: Synthetic oligonucleotide
  Sense strand starting at position 2096 of SEQ ID NO: 1496
uuugcaggucagugaucaa

SEQ ID NO: 117625 - RNA, 19 nt, Artificial Sequence
  Description of Artificial Sequence: Synthetic oligonucleotide
  Antisense strand to SEQ ID NO: 117624
uugaucacugaccugcaaa

SEQ ID NO: 117626 - RNA, 19 nt, Artificial Sequence
  Description of Artificial Sequence: Synthetic oligonucleotide
  Sense strand starting at position 750 of SEQ ID NO: 1496
uugggugaugggugaacaa

SEQ ID NO: 117627 - RNA, 19 nt, Artificial Sequence
  Description of Artificial Sequence: Synthetic oligonucleotide
  Antisense strand to SEQ ID NO: 117626
uuguucacccaucacccaa

SEQ ID NO: 117628 - RNA, 19 nt, Artificial Sequence
  Description of Artificial Sequence: Synthetic oligonucleotide
  Sense strand starting at position 740 of SEQ ID NO: 1496
cgaacacugcuugggugau

SEQ ID NO: 117629 - RNA, 19 nt, Artificial Sequence
  Description of Artificial Sequence: Synthetic oligonucleotide
  Antisense strand to SEQ ID NO: 117628
aucacccaagcaguguucg

SEQ ID NO: 117630 - RNA, 19 nt, Artificial Sequence
  Description of Artificial Sequence: Synthetic oligonucleotide
  Sense strand starting at position 621 of SEQ ID NO: 1496
cacucauaucugggagcca

SEQ ID NO: 117631 - RNA, 19 nt, Artificial Sequence
  Description of Artificial Sequence: Synthetic oligonucleotide
  Antisense strand to SEQ ID NO: 117630
uggcucccagauaugagug

SEQ ID NO: 117632 - RNA, 19 nt, Artificial Sequence
  Description of Artificial Sequence: Synthetic oligonucleotide
  Sense strand starting at position 18 of SEQ ID NO: 1497
ggcuaagggacuugaauag

SEQ ID NO: 117633 - RNA, 19 nt, Artificial Sequence
  Description of Artificial Sequence: Synthetic oligonucleotide
  Antisense strand to SEQ ID NO: 117632
cuauucaagucccuuagcc

SEQ ID NO: 117634 - RNA, 19 nt, Artificial Sequence
  Description of Artificial Sequence: Synthetic oligonucleotide
  Sense strand starting at position 270 of SEQ ID NO: 1497
ugugaagauucuuuaaaca

SEQ ID NO: 117635 - RNA, 19 nt, Artificial Sequence
  Description of Artificial Sequence: Synthetic oligonucleotide
  Antisense strand to SEQ ID NO: 117634
uguuuaaagaaucuucaca

SEQ ID NO: 117636 - RNA, 19 nt, Artificial Sequence
  Description of Artificial Sequence: Synthetic oligonucleotide
  Sense strand starting at position 430 of SEQ ID NO: 1497
agccuaaaugaucaucagu

SEQ ID NO: 117637 - RNA, 19 nt, Artificial Sequence
  Description of Artificial Sequence: Synthetic oligonucleotide
  Antisense strand to SEQ ID NO: 117636
acugaugaucauuuaggcu

SEQ ID NO: 117638 - RNA, 19 nt, Artificial Sequence
  Description of Artificial Sequence: Synthetic oligonucleotide
  Sense strand starting at position 488 of SEQ ID NO: 1497
gggauacuauucuuccaua

SEQ ID NO: 117639 - RNA, 19 nt, Artificial Sequence
  Description of Artificial Sequence: Synthetic oligonucleotide
  Antisense strand to SEQ ID NO: 117638
uauggaagaauaguauccc

SEQ ID NO: 117640 - RNA, 19 nt, Artificial Sequence
  Description of Artificial Sequence: Synthetic oligonucleotide
  Sense strand starting at position 573 of SEQ ID NO: 1497
gucacacaggcauggaaau

SEQ ID NO: 117641 - RNA, 19 nt, Artificial Sequence
  Description of Artificial Sequence: Synthetic oligonucleotide
  Antisense strand to SEQ ID NO: 117640
auuuccaugccugugugac

SEQ ID NO: 117642 - RNA, 19 nt, Artificial Sequence
  Description of Artificial Sequence: Synthetic oligonucleotide
  Sense strand starting at position 845 of SEQ ID NO: 1497
aauggaaugucuuuauuga

SEQ ID NO: 117643 - RNA, 19 nt, Artificial Sequence
  Description of Artificial Sequence: Synthetic oligonucleotide
  Antisense strand to SEQ ID NO: 117642
ucaauaaagacauuccauu

SEQ ID NO: 117644 - RNA, 19 nt, Artificial Sequence
  Description of Artificial Sequence: Synthetic oligonucleotide
  Sense strand starting at position 956 of SEQ ID NO: 1497
uugagcaaugcacacaauu

SEQ ID NO: 117645 - RNA, 19 nt, Artificial Sequence
  Description of Artificial Sequence: Synthetic oligonucleotide
  Antisense strand to SEQ ID NO: 117644
aauugugugcauugcucaa

SEQ ID NO: 117646 - RNA, 19 nt, Artificial Sequence
  Description of Artificial Sequence: Synthetic oligonucleotide
  Sense strand starting at position 1042 of SEQ ID NO: 1497
caugaaauuuaugagguaa

SEQ ID NO: 117647 - RNA, 19 nt, Artificial Sequence
  Description of Artificial Sequence: Synthetic oligonucleotide
  Antisense strand to SEQ ID NO: 117646
uuaccucauaaauuucaug

SEQ ID NO: 117648 - RNA, 19 nt, Artificial Sequence
  Description of Artificial Sequence: Synthetic oligonucleotide
  Sense strand starting at position 1139 of SEQ ID NO: 1497
gaggauucagcaugggagu

SEQ ID NO: 117649 - RNA, 19 nt, Artificial Sequence
  Description of Artificial Sequence: Synthetic oligonucleotide
  Antisense strand to SEQ ID NO: 117648
acucccaugcugaauccuc

SEQ ID NO: 117650 - RNA, 19 nt, Artificial Sequence
  Description of Artificial Sequence: Synthetic oligonucleotide
  Sense strand starting at position 1158 of SEQ ID NO: 1497
gacgaugguguagaauaca

SEQ ID NO: 117651 - RNA, 19 nt, Artificial Sequence
  Description of Artificial Sequence: Synthetic oligonucleotide
  Antisense strand to SEQ ID NO: 117650
uguauucuacaccaucguc

SEQ ID NO: 117652 - RNA, 19 nt, Artificial Sequence
  Description of Artificial Sequence: Synthetic oligonucleotide
  Sense strand starting at position 1184 of SEQ ID NO: 1497
ucuuguccugcauaggaga

SEQ ID NO: 117653 - RNA, 19 nt, Artificial Sequence
  Description of Artificial Sequence: Synthetic oligonucleotide
  Antisense strand to SEQ ID NO: 117652
ucuccuaugcaggacaaga

SEQ ID NO: 117654 - RNA, 19 nt, Artificial Sequence
  Description of Artificial Sequence: Synthetic oligonucleotide
  Sense strand starting at position 1204 of SEQ ID NO: 1497
ugaugagaugugggcugaa

SEQ ID NO: 117655 - RNA, 19 nt, Artificial Sequence
  Description of Artificial Sequence: Synthetic oligonucleotide
  Antisense strand to SEQ ID NO: 117654
uucagcccacaucucauca

SEQ ID NO: 117656 - RNA, 19 nt, Artificial Sequence
  Description of Artificial Sequence: Synthetic oligonucleotide
  Sense strand starting at position 1331 of SEQ ID NO: 1497
ccagaauaacucgagcaua

SEQ ID NO: 117657 - RNA, 19 nt, Artificial Sequence
  Description of Artificial Sequence: Synthetic oligonucleotide
  Antisense strand to SEQ ID NO: 117656
uaugcucgaguuauucugg

SEQ ID NO: 117658 - RNA, 19 nt, Artificial Sequence
  Description of Artificial Sequence: Synthetic oligonucleotide
  Sense strand starting at position 1343 of SEQ ID NO: 1497
gagcauaggaagugaugau

SEQ ID NO: 117659 - RNA, 19 nt, Artificial Sequence
  Description of Artificial Sequence: Synthetic oligonucleotide
  Antisense strand to SEQ ID NO: 117658
aucaucacuuccuaugcuc

SEQ ID NO: 117660 - RNA, 19 nt, Artificial Sequence
  Description of Artificial Sequence: Synthetic oligonucleotide
  Sense strand starting at position 1352 of SEQ ID NO: 1497
aagugaugaugauugcaac

SEQ ID NO: 117661 - RNA, 19 nt, Artificial Sequence
  Description of Artificial Sequence: Synthetic oligonucleotide
  Antisense strand to SEQ ID NO: 117660
guugcaaucaucaucacuu

SEQ ID NO: 117662 - RNA, 19 nt, Artificial Sequence
  Description of Artificial Sequence: Synthetic oligonucleotide
  Sense strand starting at position 1353 of SEQ ID NO: 1497
agugaugaugauugcaaca

SEQ ID NO: 117663 - RNA, 19 nt, Artificial Sequence
  Description of Artificial Sequence: Synthetic oligonucleotide
  Antisense strand to SEQ ID NO: 117662
uguugcaaucaucaucacu

SEQ ID NO: 117664 - RNA, 19 nt, Artificial Sequence
  Description of Artificial Sequence: Synthetic oligonucleotide
  Sense strand starting at position 1426 of SEQ ID NO: 1497
gugucauugcaugagagga

SEQ ID NO: 117665 - RNA, 19 nt, Artificial Sequence
  Description of Artificial Sequence: Synthetic oligonucleotide
  Antisense strand to SEQ ID NO: 117664
uccucucaugcaaugacac

SEQ ID NO: 117666 - RNA, 19 nt, Artificial Sequence
  Description of Artificial Sequence: Synthetic oligonucleotide
  Sense strand starting at position 1557 of SEQ ID NO: 1497
ggagaaggcagucauaagu

SEQ ID NO: 117667 - RNA, 19 nt, Artificial Sequence
  Description of Artificial Sequence: Synthetic oligonucleotide
  Antisense strand to SEQ ID NO: 117666
acuuaugacugccuucucc

SEQ ID NO: 117668 - RNA, 19 nt, Artificial Sequence
  Description of Artificial Sequence: Synthetic oligonucleotide
  Sense strand starting at position 1594 of SEQ ID NO: 1497
augagauugguguaucuua

SEQ ID NO: 117669 - RNA, 19 nt, Artificial Sequence
  Description of Artificial Sequence: Synthetic oligonucleotide
  Antisense strand to SEQ ID NO: 117668
uaagauacaccaaucucau

SEQ ID NO: 117670 - RNA, 19 nt, Artificial Sequence
  Description of Artificial Sequence: Synthetic oligonucleotide
  Sense strand starting at position 1635 of SEQ ID NO: 1497
gcggucauaagacauaaca

SEQ ID NO: 117671 - RNA, 19 nt, Artificial Sequence
  Description of Artificial Sequence: Synthetic oligonucleotide
  Antisense strand to SEQ ID NO: 117670
uguuaugucuuaugaccgc

SEQ ID NO: 117672 - RNA, 19 nt, Artificial Sequence
  Description of Artificial Sequence: Synthetic oligonucleotide
  Sense strand starting at position 1784 of SEQ ID NO: 1497
gcaugagguccaugaggga

SEQ ID NO: 117673 - RNA, 19 nt, Artificial Sequence
  Description of Artificial Sequence: Synthetic oligonucleotide
  Antisense strand to SEQ ID NO: 117672
ucccucauggaccucaugc

SEQ ID NO: 117674 - RNA, 19 nt, Artificial Sequence
  Description of Artificial Sequence: Synthetic oligonucleotide
  Sense strand starting at position 1964 of SEQ ID NO: 1497
ggaagucagaguugaaggu

SEQ ID NO: 117675 - RNA, 19 nt, Artificial Sequence
  Description of Artificial Sequence: Synthetic oligonucleotide
  Antisense strand to SEQ ID NO: 117674
accuucaacucugacuucc

SEQ ID NO: 117676 - RNA, 19 nt, Artificial Sequence
  Description of Artificial Sequence: Synthetic oligonucleotide
  Sense strand starting at position 1989 of SEQ ID NO: 1497
cucccaugccaugaugaau

SEQ ID NO: 117677 - RNA, 19 nt, Artificial Sequence
  Description of Artificial Sequence: Synthetic oligonucleotide
  Antisense strand to SEQ ID NO: 117676
auucaucauggcaugggag

SEQ ID NO: 117678 - RNA, 19 nt, Artificial Sequence
  Description of Artificial Sequence: Synthetic oligonucleotide
  Sense strand starting at position 2099 of SEQ ID NO: 1497
uaguuuggugaucaauaca

SEQ ID NO: 117679 - RNA, 19 nt, Artificial Sequence
  Description of Artificial Sequence: Synthetic oligonucleotide
  Antisense strand to SEQ ID NO: 117678
uguauugaucaccaaacua

SEQ ID NO: 117680 - RNA, 19 nt, Artificial Sequence
  Description of Artificial Sequence: Synthetic oligonucleotide
  Sense strand starting at position 2276 of SEQ ID NO: 1497
cuacaugaucaauggaguu

SEQ ID NO: 117681 - RNA, 19 nt, Artificial Sequence
  Description of Artificial Sequence: Synthetic oligonucleotide
  Antisense strand to SEQ ID NO: 117680
aacuccauugaucauguag

SEQ ID NO: 117682 - RNA, 19 nt, Artificial Sequence
  Description of Artificial Sequence: Synthetic oligonucleotide
  Sense strand starting at position 2686 of SEQ ID NO: 1497
gguauaauuaguuaaggug

SEQ ID NO: 117683 - RNA, 19 nt, Artificial Sequence
  Description of Artificial Sequence: Synthetic oligonucleotide
  Antisense strand to SEQ ID NO: 117682
caccuuaacuaauuauacc

SEQ ID NO: 117684 - RNA, 19 nt, Artificial Sequence
  Description of Artificial Sequence: Synthetic oligonucleotide
  Sense strand starting at position 3003 of SEQ ID NO: 1497
gguaaccuguuugugauuu

SEQ ID NO: 117685 - RNA, 19 nt, Artificial Sequence
  Description of Artificial Sequence: Synthetic oligonucleotide
  Antisense strand to SEQ ID NO: 117684
aaaucacaaacagguuacc

SEQ ID NO: 117686 - RNA, 19 nt, Artificial Sequence
  Description of Artificial Sequence: Synthetic oligonucleotide
  Sense strand starting at position 3007 of SEQ ID NO: 1497
accuguuugugauuucucu

SEQ ID NO: 117687 - RNA, 19 nt, Artificial Sequence
  Description of Artificial Sequence: Synthetic oligonucleotide
  Antisense strand to SEQ ID NO: 117686
agagaaaucacaaacaggu

SEQ ID NO: 117688 - RNA, 19 nt, Artificial Sequence
  Description of Artificial Sequence: Synthetic oligonucleotide
  Sense strand starting at position 3011 of SEQ ID NO: 1497
guuugugauuucucuguac

SEQ ID NO: 117689 - RNA, 19 nt, Artificial Sequence
  Description of Artificial Sequence: Synthetic oligonucleotide
  Antisense strand to SEQ ID NO: 117688
guacagagaaaucacaaac

SEQ ID NO: 117690 - RNA, 19 nt, Artificial Sequence
  Description of Artificial Sequence: Synthetic oligonucleotide
  Sense strand starting at position 3013 of SEQ ID NO: 1497
uugugauuucucuguacug

SEQ ID NO: 117691 - RNA, 19 nt, Artificial Sequence
  Description of Artificial Sequence: Synthetic oligonucleotide
  Antisense strand to SEQ ID NO: 117690
caguacagagaaaucacaa

SEQ ID NO: 117692 - RNA, 19 nt, Artificial Sequence
  Description of Artificial Sequence: Synthetic oligonucleotide
  Sense strand starting at position 3218 of SEQ ID NO: 1497
gugugaucagaugaugauu

SEQ ID NO: 117693 - RNA, 19 nt, Artificial Sequence
  Description of Artificial Sequence: Synthetic oligonucleotide
  Antisense strand to SEQ ID NO: 117692
aaucaucaucugaucacac

SEQ ID NO: 117694 - RNA, 19 nt, Artificial Sequence
  Description of Artificial Sequence: Synthetic oligonucleotide
  Sense strand starting at position 3283 of SEQ ID NO: 1497
aagucaaagaaggguguua

SEQ ID NO: 117695 - RNA, 19 nt, Artificial Sequence
  Description of Artificial Sequence: Synthetic oligonucleotide
  Antisense strand to SEQ ID NO: 117694
uaacacccuucuuugacuu

SEQ ID NO: 117696 - RNA, 19 nt, Artificial Sequence
  Description of Artificial Sequence: Synthetic oligonucleotide
  Sense strand starting at position 3285 of SEQ ID NO: 1497
gucaaagaaggguguuaga

SEQ ID NO: 117697 - RNA, 19 nt, Artificial Sequence
  Description of Artificial Sequence: Synthetic oligonucleotide
  Antisense strand to SEQ ID NO: 117696
ucuaacacccuucuuugac

SEQ ID NO: 117698 - RNA, 19 nt, Artificial Sequence
  Description of Artificial Sequence: Synthetic oligonucleotide
  Sense strand starting at position 3299 of SEQ ID NO: 1497
uuagaaaugcacuaguaug

SEQ ID NO: 117699 - RNA, 19 nt, Artificial Sequence
  Description of Artificial Sequence: Synthetic oligonucleotide
  Antisense strand to SEQ ID NO: 117698
cauacuagugcauuucuaa

SEQ ID NO: 117700 - RNA, 19 nt, Artificial Sequence
  Description of Artificial Sequence: Synthetic oligonucleotide
  Sense strand starting at position 3413 of SEQ ID NO: 1497
aaggguuguacguauauaa

SEQ ID NO: 117701 - RNA, 19 nt, Artificial Sequence
  Description of Artificial Sequence: Synthetic oligonucleotide
  Antisense strand to SEQ ID NO: 117700
uuauauacguacaacccuu

SEQ ID NO: 117702 - RNA, 19 nt, Artificial Sequence
  Description of Artificial Sequence: Synthetic oligonucleotide
  Sense strand starting at position 3587 of SEQ ID NO: 1497
gagcaaagccaauauguga

SEQ ID NO: 117703 - RNA, 19 nt, Artificial Sequence
  Description of Artificial Sequence: Synthetic oligonucleotide
  Antisense strand to SEQ ID NO: 117702
ucacauauuggcuuugcuc

SEQ ID NO: 117704 - RNA, 19 nt, Artificial Sequence
  Description of Artificial Sequence: Synthetic oligonucleotide
  Sense strand starting at position 3662 of SEQ ID NO: 1497
ugaguagacucacuugaca

SEQ ID NO: 117705 - RNA, 19 nt, Artificial Sequence
  Description of Artificial Sequence: Synthetic oligonucleotide
  Antisense strand to SEQ ID NO: 117704
ugucaagugagucuacuca

SEQ ID NO: 117706 - RNA, 19 nt, Artificial Sequence
  Description of Artificial Sequence: Synthetic oligonucleotide
  Sense strand starting at position 3844 of SEQ ID NO: 1497
uuucaauagggagguagua

SEQ ID NO: 117707 - RNA, 19 nt, Artificial Sequence
  Description of Artificial Sequence: Synthetic oligonucleotide
  Antisense strand to SEQ ID NO: 117706
uacuaccucccuauugaaa

SEQ ID NO: 117708 - RNA, 19 nt, Artificial Sequence
  Description of Artificial Sequence: Synthetic oligonucleotide
  Sense strand starting at position 3856 of SEQ ID NO: 1497
gguaguaaaguauaccuuu

SEQ ID NO: 117709 - RNA, 19 nt, Artificial Sequence
  Description of Artificial Sequence: Synthetic oligonucleotide
  Antisense strand to SEQ ID NO: 117708
aaagguauacuuuacuacc

SEQ ID NO: 117710 - RNA, 19 nt, Artificial Sequence
  Description of Artificial Sequence: Synthetic oligonucleotide
  Sense strand starting at position 3901 of SEQ ID NO: 1497
gugaauaauauugguaaga

SEQ ID NO: 117711 - RNA, 19 nt, Artificial Sequence
  Description of Artificial Sequence: Synthetic oligonucleotide
  Antisense strand to SEQ ID NO: 117710
ucuuaccaauauuauucac

SEQ ID NO: 117712 - RNA, 19 nt, Artificial Sequence
  Description of Artificial Sequence: Synthetic oligonucleotide
  Sense strand starting at position 3834 of SEQ ID NO: 1498
gguauaacucaccgaugau

SEQ ID NO: 117713 - RNA, 19 nt, Artificial Sequence
  Description of Artificial Sequence: Synthetic oligonucleotide
  Antisense strand to SEQ ID NO: 117712
aucaucggugaguuauacc

SEQ ID NO: 117714 - RNA, 19 nt, Artificial Sequence
  Description of Artificial Sequence: Synthetic oligonucleotide
  Sense strand starting at position 3833 of SEQ ID NO: 1498
agguauaacucaccgauga

SEQ ID NO: 117715 - RNA, 19 nt, Artificial Sequence
  Description of Artificial Sequence: Synthetic oligonucleotide
  Antisense strand to SEQ ID NO: 117714
ucaucggugaguuauaccu

SEQ ID NO: 117716 - RNA, 19 nt, Artificial Sequence
  Description of Artificial Sequence: Synthetic oligonucleotide
  Sense strand starting at position 3831 of SEQ ID NO: 1498
ugagguauaacucaccgau

SEQ ID NO: 117717 - RNA, 19 nt, Artificial Sequence
  Description of Artificial Sequence: Synthetic oligonucleotide
  Antisense strand to SEQ ID NO: 117716
aucggugaguuauaccuca

SEQ ID NO: 117718 - RNA, 19 nt, Artificial Sequence
  Description of Artificial Sequence: Synthetic oligonucleotide
  Sense strand starting at position 3807 of SEQ ID NO: 1498
guaauagcacagggacaua

SEQ ID NO: 117719 - RNA, 19 nt, Artificial Sequence
  Description of Artificial Sequence: Synthetic oligonucleotide
  Antisense strand to SEQ ID NO: 117718
uaugucccugugcuauuac

SEQ ID NO: 117720 - RNA, 19 nt, Artificial Sequence
  Description of Artificial Sequence: Synthetic oligonucleotide
  Sense strand starting at position 3682 of SEQ ID NO: 1498
uuuaucaugcgauaagaca

SEQ ID NO: 117721 - RNA, 19 nt, Artificial Sequence
  Description of Artificial Sequence: Synthetic oligonucleotide
  Antisense strand to SEQ ID NO: 117720
ugucuuaucgcaugauaaa

SEQ ID NO: 117722 - RNA, 19 nt, Artificial Sequence
  Description of Artificial Sequence: Synthetic oligonucleotide
  Sense strand starting at position 3612 of SEQ ID NO: 1498
guuuaugucgcagccuaaa

SEQ ID NO: 117723 - RNA, 19 nt, Artificial Sequence
  Description of Artificial Sequence: Synthetic oligonucleotide
  Antisense strand to SEQ ID NO: 117722
uuuaggcugcgacauaaac

SEQ ID NO: 117724 - RNA, 19 nt, Artificial Sequence
  Description of Artificial Sequence: Synthetic oligonucleotide
  Sense strand starting at position 3597 of SEQ ID NO: 1498
ggaaacuccucuccaguuu

SEQ ID NO: 117725 - RNA, 19 nt, Artificial Sequence
  Description of Artificial Sequence: Synthetic oligonucleotide
  Antisense strand to SEQ ID NO: 117724
aaacuggagaggaguuucc

SEQ ID NO: 117726 - RNA, 19 nt, Artificial Sequence
  Description of Artificial Sequence: Synthetic oligonucleotide
  Sense strand starting at position 3511 of SEQ ID NO: 1498
guacaaugucaucauuacu

SEQ ID NO: 117727 - RNA, 19 nt, Artificial Sequence
  Description of Artificial Sequence: Synthetic oligonucleotide
  Antisense strand to SEQ ID NO: 117726
aguaaugaugacauuguac

SEQ ID NO: 117728 - RNA, 19 nt, Artificial Sequence
  Description of Artificial Sequence: Synthetic oligonucleotide
  Sense strand starting at position 3510 of SEQ ID NO: 1498
uguacaaugucaucauuac

SEQ ID NO: 117729 - RNA, 19 nt, Artificial Sequence
  Description of Artificial Sequence: Synthetic oligonucleotide
  Antisense strand to SEQ ID NO: 117728
guaaugaugacauuguaca

SEQ ID NO: 117730 - RNA, 19 nt, Artificial Sequence
  Description of Artificial Sequence: Synthetic oligonucleotide
  Sense strand starting at position 3364 of SEQ ID NO: 1498
ggauauaaacuauguguac

SEQ ID NO: 117731 - RNA, 19 nt, Artificial Sequence
  Description of Artificial Sequence: Synthetic oligonucleotide
  Antisense strand to SEQ ID NO: 117730
guacacauaguuuauaucc

SEQ ID NO: 117732 - RNA, 19 nt, Artificial Sequence
  Description of Artificial Sequence: Synthetic oligonucleotide
  Sense strand starting at position 3307 of SEQ ID NO: 1498
uuagucauacuugagagua

SEQ ID NO: 117733 - RNA, 19 nt, Artificial Sequence
  Description of Artificial Sequence: Synthetic oligonucleotide
  Antisense strand to SEQ ID NO: 117732
uacucucaaguaugacuaa

SEQ ID NO: 117734 - RNA, 19 nt, Artificial Sequence
  Description of Artificial Sequence: Synthetic oligonucleotide
  Sense strand starting at position 3190 of SEQ ID NO: 1498
ggaagcuuuauaugggaau

SEQ ID NO: 117735 - RNA, 19 nt, Artificial Sequence
  Description of Artificial Sequence: Synthetic oligonucleotide
  Antisense strand to SEQ ID NO: 117734
auucccauauaaagcuucc

SEQ ID NO: 117736 - RNA, 19 nt, Artificial Sequence
  Description of Artificial Sequence: Synthetic oligonucleotide
  Sense strand starting at position 3174 of SEQ ID NO: 1498
uggcauuguguauauagga

SEQ ID NO: 117737 - RNA, 19 nt, Artificial Sequence
  Description of Artificial Sequence: Synthetic oligonucleotide
  Antisense strand to SEQ ID NO: 117736
uccuauauacacaaugcca

SEQ ID NO: 117738 - RNA, 19 nt, Artificial Sequence
  Description of Artificial Sequence: Synthetic oligonucleotide
  Sense strand starting at position 2999 of SEQ ID NO: 1498
aguacuuuguaacuauuga

SEQ ID NO: 117739 - RNA, 19 nt, Artificial Sequence
  Description of Artificial Sequence: Synthetic oligonucleotide
  Antisense strand to SEQ ID NO: 117738
ucaauaguuacaaaguacu

SEQ ID NO: 117740 - RNA, 19 nt, Artificial Sequence
  Description of Artificial Sequence: Synthetic oligonucleotide
  Sense strand starting at position 2957 of SEQ ID NO: 1498
gaugacaucguggaguuua

SEQ ID NO: 117741 - RNA, 19 nt, Artificial Sequence
  Description of Artificial Sequence: Synthetic oligonucleotide
  Antisense strand to SEQ ID NO: 117740
uaaacuccacgaugucauc

SEQ ID NO: 117742 - RNA, 19 nt, Artificial Sequence
  Description of Artificial Sequence: Synthetic oligonucleotide
  Sense strand starting at position 2912 of SEQ ID NO: 1498
ugagucaauugcccagaaa

SEQ ID NO: 117743 - RNA, 19 nt, Artificial Sequence
  Description of Artificial Sequence: Synthetic oligonucleotide
  Antisense strand to SEQ ID NO: 117742
uuucugggcaauugacuca

SEQ ID NO: 117744 - RNA, 19 nt, Artificial Sequence
  Description of Artificial Sequence: Synthetic oligonucleotide
  Sense strand starting at position 2841 of SEQ ID NO: 1498
caacauauuugggaguaaa

SEQ ID NO: 117745 - RNA, 19 nt, Artificial Sequence
  Description of Artificial Sequence: Synthetic oligonucleotide
  Antisense strand to SEQ ID NO: 117744
uuuacucccaaauauguug

SEQ ID NO: 117746 - RNA, 19 nt, Artificial Sequence
  Description of Artificial Sequence: Synthetic oligonucleotide
  Sense strand starting at position 2639 of SEQ ID NO: 1498
cguaaacauugagcuauaa

SEQ ID NO: 117747 - RNA, 19 nt, Artificial Sequence
  Description of Artificial Sequence: Synthetic oligonucleotide
  Antisense strand to SEQ ID NO: 117746
uuauagcucaauguuuacg

SEQ ID NO: 117748 - RNA, 19 nt, Artificial Sequence
  Description of Artificial Sequence: Synthetic oligonucleotide
  Sense strand starting at position 2636 of SEQ ID NO: 1498
ggacguaaacauugagcua

SEQ ID NO: 117749 - RNA, 19 nt, Artificial Sequence
  Description of Artificial Sequence: Synthetic oligonucleotide
  Antisense strand to SEQ ID NO: 117748
uagcucaauguuuacgucc

SEQ ID NO: 117750 - RNA, 19 nt, Artificial Sequence
  Description of Artificial Sequence: Synthetic oligonucleotide
  Sense strand starting at position 2590 of SEQ ID NO: 1498
auuagaaaucaguauuagc

SEQ ID NO: 117751 - RNA, 19 nt, Artificial Sequence
  Description of Artificial Sequence: Synthetic oligonucleotide
  Antisense strand to SEQ ID NO: 117750
gcuaauacugauuucuaau

SEQ ID NO: 117752 - RNA, 19 nt, Artificial Sequence
  Description of Artificial Sequence: Synthetic oligonucleotide
  Sense strand starting at position 2573 of SEQ ID NO: 1498
uuaugauuagcaugaccau

SEQ ID NO: 117753 - RNA, 19 nt, Artificial Sequence
  Description of Artificial Sequence: Synthetic oligonucleotide
  Antisense strand to SEQ ID NO: 117752
auggucaugcuaaucauaa

SEQ ID NO: 117754 - RNA, 19 nt, Artificial Sequence
  Description of Artificial Sequence: Synthetic oligonucleotide
  Sense strand starting at position 2567 of SEQ ID NO: 1498
uuaggauuaugauuagcau

SEQ ID NO: 117755 - RNA, 19 nt, Artificial Sequence
  Description of Artificial Sequence: Synthetic oligonucleotide
  Antisense strand to SEQ ID NO: 117754
augcuaaucauaauccuaa

SEQ ID NO: 117756 - RNA, 19 nt, Artificial Sequence
  Description of Artificial Sequence: Synthetic oligonucleotide
  Sense strand starting at position 2380 of SEQ ID NO: 1498
agaguauacuugguguuag

SEQ ID NO: 117757 - RNA, 19 nt, Artificial Sequence
  Description of Artificial Sequence: Synthetic oligonucleotide
  Antisense strand to SEQ ID NO: 117756
cuaacaccaaguauacucu

SEQ ID NO: 117758 - RNA, 19 nt, Artificial Sequence
  Description of Artificial Sequence: Synthetic oligonucleotide
  Sense strand starting at position 2379 of SEQ ID NO: 1498
gagaguauacuugguguua

SEQ ID NO: 117759 - RNA, 19 nt, Artificial Sequence
  Description of Artificial Sequence: Synthetic oligonucleotide
  Antisense strand to SEQ ID NO: 117758
uaacaccaaguauacucuc

SEQ ID NO: 117760 - RNA, 19 nt, Artificial Sequence
  Description of Artificial Sequence: Synthetic oligonucleotide
  Sense strand starting at position 2367 of SEQ ID NO: 1498
ugucuacaucaugagagua

SEQ ID NO: 117761 - RNA, 19 nt, Artificial Sequence
  Description of Artificial Sequence: Synthetic oligonucleotide
  Antisense strand to SEQ ID NO: 117760
uacucucaugauguagaca

SEQ ID NO: 117762 - RNA, 19 nt, Artificial Sequence
  Description of Artificial Sequence: Synthetic oligonucleotide
  Sense strand starting at position 2122 of SEQ ID NO: 1498
cgaugaugugcauaacaau

SEQ ID NO: 117763 - RNA, 19 nt, Artificial Sequence
  Description of Artificial Sequence: Synthetic oligonucleotide
  Antisense strand to SEQ ID NO: 117762
auuguuaugcacaucaucg

SEQ ID NO: 117764 - RNA, 19 nt, Artificial Sequence
  Description of Artificial Sequence: Synthetic oligonucleotide
  Sense strand starting at position 2075 of SEQ ID NO: 1498
gcuuaaauacauuggagaa

SEQ ID NO: 117765 - RNA, 19 nt, Artificial Sequence
  Description of Artificial Sequence: Synthetic oligonucleotide
  Antisense strand to SEQ ID NO: 117764
uucuccaauguauuuaagc

SEQ ID NO: 117766 - RNA, 19 nt, Artificial Sequence
  Description of Artificial Sequence: Synthetic oligonucleotide
  Sense strand starting at position 2002 of SEQ ID NO: 1498
ugagacugauaucuagcau

SEQ ID NO: 117767 - RNA, 19 nt, Artificial Sequence
  Description of Artificial Sequence: Synthetic oligonucleotide
  Antisense strand to SEQ ID NO: 117766
augcuagauaucagucuca

SEQ ID NO: 117768 - RNA, 19 nt, Artificial Sequence
  Description of Artificial Sequence: Synthetic oligonucleotide
  Sense strand starting at position 1996 of SEQ ID NO: 1498
ccacauugagacugauauc

SEQ ID NO: 117769 - RNA, 19 nt, Artificial Sequence
  Description of Artificial Sequence: Synthetic oligonucleotide
  Antisense strand to SEQ ID NO: 117768
gauaucagucucaaugugg

SEQ ID NO: 117770 - RNA, 19 nt, Artificial Sequence
  Description of Artificial Sequence: Synthetic oligonucleotide
  Sense strand starting at position 1987 of SEQ ID NO: 1498
guauucuugccacauugag

SEQ ID NO: 117771 - RNA, 19 nt, Artificial Sequence
  Description of Artificial Sequence: Synthetic oligonucleotide
  Antisense strand to SEQ ID NO: 117770
cucaauguggcaagaauac

SEQ ID NO: 117772 - RNA, 19 nt, Artificial Sequence
  Description of Artificial Sequence: Synthetic oligonucleotide
  Sense strand starting at position 878 of SEQ ID NO: 1498
gaaggagucgacugucaaa

SEQ ID NO: 117773 - RNA, 19 nt, Artificial Sequence
  Description of Artificial Sequence: Synthetic oligonucleotide
  Antisense strand to SEQ ID NO: 117772
uuugacagucgacuccuuc

SEQ ID NO: 117774 - RNA, 19 nt, Artificial Sequence
  Description of Artificial Sequence: Synthetic oligonucleotide
  Sense strand starting at position 863 of SEQ ID NO: 1498
uuaccauaugcaugggaag

SEQ ID NO: 117775 - RNA, 19 nt, Artificial Sequence
  Description of Artificial Sequence: Synthetic oligonucleotide
  Antisense strand to SEQ ID NO: 117774
cuucccaugcauaugguaa

SEQ ID NO: 117776 - RNA, 19 nt, Artificial Sequence
  Description of Artificial Sequence: Synthetic oligonucleotide
  Sense strand starting at position 734 of SEQ ID NO: 1498
acaucauaacuauggaguu

SEQ ID NO: 117777 - RNA, 19 nt, Artificial Sequence
  Description of Artificial Sequence: Synthetic oligonucleotide
  Antisense strand to SEQ ID NO: 117776
aacuccauaguuaugaugu

SEQ ID NO: 117778 - RNA, 19 nt, Artificial Sequence
  Description of Artificial Sequence: Synthetic oligonucleotide
  Sense strand starting at position 570 of SEQ ID NO: 1498
cagacaagguagucagaua

SEQ ID NO: 117779 - RNA, 19 nt, Artificial Sequence
  Description of Artificial Sequence: Synthetic oligonucleotide
  Antisense strand to SEQ ID NO: 117778
uaucugacuaccuugucug

SEQ ID NO: 117780 - RNA, 19 nt, Artificial Sequence
  Description of Artificial Sequence: Synthetic oligonucleotide
  Sense strand starting at position 373 of SEQ ID NO: 1498
aauagucaugauugaagca

SEQ ID NO: 117781 - RNA, 19 nt, Artificial Sequence
  Description of Artificial Sequence: Synthetic oligonucleotide
  Antisense strand to SEQ ID NO: 117780
ugcuucaaucaugacuauu

SEQ ID NO: 117782 - RNA, 19 nt, Artificial Sequence
  Description of Artificial Sequence: Synthetic oligonucleotide
  Sense strand starting at position 349 of SEQ ID NO: 1498
ggcccuuauauggagacuu

SEQ ID NO: 117783 - RNA, 19 nt, Artificial Sequence
  Description of Artificial Sequence: Synthetic oligonucleotide
  Antisense strand to SEQ ID NO: 117782
aagucuccauauaagggcc

SEQ ID NO: 117784 - RNA, 19 nt, Artificial Sequence
  Description of Artificial Sequence: Synthetic oligonucleotide
  Sense strand starting at position 204 of SEQ ID NO: 1498
gagggugaggucuggaaga

SEQ ID NO: 117785 - RNA, 19 nt, Artificial Sequence
  Description of Artificial Sequence: Synthetic oligonucleotide
  Antisense strand to SEQ ID NO: 117784
ucuuccagaccucacccuc

SEQ ID NO: 117786 - RNA, 19 nt, Artificial Sequence
  Description of Artificial Sequence: Synthetic oligonucleotide
  Sense strand starting at position 140 of SEQ ID NO: 1498
guuuaccacuuguuauaaa

SEQ ID NO: 117787 - RNA, 19 nt, Artificial Sequence
  Description of Artificial Sequence: Synthetic oligonucleotide
  Antisense strand to SEQ ID NO: 117786
uuuauaacaagugguaaac

SEQ ID NO: 117788 - RNA, 19 nt, Artificial Sequence
  Description of Artificial Sequence: Synthetic oligonucleotide
  Sense strand starting at position 43 of SEQ ID NO: 1498
ugaccaagugauuguaaau

SEQ ID NO: 117789 - RNA, 19 nt, Artificial Sequence
  Description of Artificial Sequence: Synthetic oligonucleotide
  Antisense strand to SEQ ID NO: 117788
auuuacaaucacuugguca

SEQ ID NO: 117790 - RNA, 19 nt, Artificial Sequence
  Description of Artificial Sequence: Synthetic oligonucleotide
  Sense strand starting at position 42 of SEQ ID NO: 1498
uugaccaagugauuguaaa

SEQ ID NO: 117791 - RNA, 19 nt, Artificial Sequence
  Description of Artificial Sequence: Synthetic oligonucleotide
  Antisense strand to SEQ ID NO: 117790
uuuacaaucacuuggucaa

SEQ ID NO: 117792 - RNA, 19 nt, Artificial Sequence
  Description of Artificial Sequence: Synthetic oligonucleotide
  Sense strand starting at position 77 of SEQ ID NO: 1499
cuaauaauaggcugugaaa

SEQ ID NO: 117793 - RNA, 19 nt, Artificial Sequence
  Description of Artificial Sequence: Synthetic oligonucleotide
  Antisense strand to SEQ ID NO: 117792
uuucacagccuauuauuag

SEQ ID NO: 117794 - RNA, 19 nt, Artificial Sequence
  Description of Artificial Sequence: Synthetic oligonucleotide
  Sense strand starting at position 294 of SEQ ID NO: 1499
ucugguuaagucuaugaau

SEQ ID NO: 117795 - RNA, 19 nt, Artificial Sequence
  Description of Artificial Sequence: Synthetic oligonucleotide
  Antisense strand to SEQ ID NO: 117794
auucauagacuuaaccaga

SEQ ID NO: 117796 - RNA, 19 nt, Artificial Sequence
  Description of Artificial Sequence: Synthetic oligonucleotide
  Sense strand starting at position 296 of SEQ ID NO: 1499
ugguuaagucuaugaauaa

SEQ ID NO: 117797 - RNA, 19 nt, Artificial Sequence
  Description of Artificial Sequence: Synthetic oligonucleotide
  Antisense strand to SEQ ID NO: 117796
uuauucauagacuuaacca

SEQ ID NO: 117798 - RNA, 19 nt, Artificial Sequence
  Description of Artificial Sequence: Synthetic oligonucleotide
  Sense strand starting at position 484 of SEQ ID NO: 1499
cucugaggucuugaaugug

SEQ ID NO: 117799 - RNA, 19 nt, Artificial Sequence
  Description of Artificial Sequence: Synthetic oligonucleotide
  Antisense strand to SEQ ID NO: 117798
cacauucaagaccucagag

SEQ ID NO: 117800 - RNA, 19 nt, Artificial Sequence
  Description of Artificial Sequence: Synthetic oligonucleotide
  Sense strand starting at position 507 of SEQ ID NO: 1499
ucuccaaaugccuauggau

SEQ ID NO: 117801 - RNA, 19 nt, Artificial Sequence
  Description of Artificial Sequence: Synthetic oligonucleotide
  Antisense strand to SEQ ID NO: 117800
auccauaggcauuuggaga

SEQ ID NO: 117802 - RNA, 19 nt, Artificial Sequence
  Description of Artificial Sequence: Synthetic oligonucleotide
  Sense strand starting at position 509 of SEQ ID NO: 1499
uccaaaugccuauggauga

SEQ ID NO: 117803 - RNA, 19 nt, Artificial Sequence
  Description of Artificial Sequence: Synthetic oligonucleotide
  Antisense strand to SEQ ID NO: 117802
ucauccauaggcauuugga

SEQ ID NO: 117804 - RNA, 19 nt, Artificial Sequence
  Description of Artificial Sequence: Synthetic oligonucleotide
  Sense strand starting at position 603 of SEQ ID NO: 1499
ugaaaugugggugaccuua

SEQ ID NO: 117805 - RNA, 19 nt, Artificial Sequence
  Description of Artificial Sequence: Synthetic oligonucleotide
  Antisense strand to SEQ ID NO: 117804
uaaggucacccacauuuca

SEQ ID NO: 117806 - RNA, 19 nt, Artificial Sequence
  Description of Artificial Sequence: Synthetic oligonucleotide
  Sense strand starting at position 859 of SEQ ID NO: 1499
agaucaaugcuacgaggga

SEQ ID NO: 117807 - RNA, 19 nt, Artificial Sequence
  Description of Artificial Sequence: Synthetic oligonucleotide
  Antisense strand to SEQ ID NO: 117806
ucccucguagcauugaucu

SEQ ID NO: 117808 - RNA, 19 nt, Artificial Sequence
  Description of Artificial Sequence: Synthetic oligonucleotide
  Sense strand starting at position 1106 of SEQ ID NO: 1499
uugugacauccuuauuccu

SEQ ID NO: 117809 - RNA, 19 nt, Artificial Sequence
  Description of Artificial Sequence: Synthetic oligonucleotide
  Antisense strand to SEQ ID NO: 117808
aggaauaaggaugucacaa

SEQ ID NO: 117810 - RNA, 19 nt, Artificial Sequence
  Description of Artificial Sequence: Synthetic oligonucleotide
  Sense strand starting at position 1187 of SEQ ID NO: 1499
uaucuuucucaggaguuug

SEQ ID NO: 117811 - RNA, 19 nt, Artificial Sequence
  Description of Artificial Sequence: Synthetic oligonucleotide
  Antisense strand to SEQ ID NO: 117810
caaacuccugagaaagaua

SEQ ID NO: 117812 - RNA, 19 nt, Artificial Sequence
  Description of Artificial Sequence: Synthetic oligonucleotide
  Sense strand starting at position 1234 of SEQ ID NO: 1499
auagcagcuccauagaaga

SEQ ID NO: 117813 - RNA, 19 nt, Artificial Sequence
  Description of Artificial Sequence: Synthetic oligonucleotide
  Antisense strand to SEQ ID NO: 117812
ucuucuauggagcugcuau

SEQ ID NO: 117814 - RNA, 19 nt, Artificial Sequence
  Description of Artificial Sequence: Synthetic oligonucleotide
  Sense strand starting at position 1344 of SEQ ID NO: 1499
guaguaagacacugaaaug

SEQ ID NO: 117815 - RNA, 19 nt, Artificial Sequence
  Description of Artificial Sequence: Synthetic oligonucleotide
  Antisense strand to SEQ ID NO: 117814
cauuucagugucuuacuac

SEQ ID NO: 117816 - RNA, 19 nt, Artificial Sequence
  Description of Artificial Sequence: Synthetic oligonucleotide
  Sense strand starting at position 1353 of SEQ ID NO: 1499
cacugaaaugaccgucaca

SEQ ID NO: 117817 - RNA, 19 nt, Artificial Sequence
  Description of Artificial Sequence: Synthetic oligonucleotide
  Antisense strand to SEQ ID NO: 117816
ugugacggucauuucagug

SEQ ID NO: 117818 - RNA, 19 nt, Artificial Sequence
  Description of Artificial Sequence: Synthetic oligonucleotide
  Sense strand starting at position 1356 of SEQ ID NO: 1499
ugaaaugaccgucacaggu

SEQ ID NO: 117819 - RNA, 19 nt, Artificial Sequence
  Description of Artificial Sequence: Synthetic oligonucleotide
  Antisense strand to SEQ ID NO: 117818
accugugacggucauuuca

SEQ ID NO: 117820 - RNA, 19 nt, Artificial Sequence
  Description of Artificial Sequence: Synthetic oligonucleotide
  Sense strand starting at position 1481 of SEQ ID NO: 1499
ucucaugggaucugcagaa

SEQ ID NO: 117821 - RNA, 19 nt, Artificial Sequence
  Description of Artificial Sequence: Synthetic oligonucleotide
  Antisense strand to SEQ ID NO: 117820
uucugcagaucccaugaga

SEQ ID NO: 117822 - RNA, 19 nt, Artificial Sequence
  Description of Artificial Sequence: Synthetic oligonucleotide
  Sense strand starting at position 1560 of SEQ ID NO: 1499
gccugaugccaggaggaga

SEQ ID NO: 117823 - RNA, 19 nt, Artificial Sequence
  Description of Artificial Sequence: Synthetic oligonucleotide
  Antisense strand to SEQ ID NO: 117822
ucuccuccuggcaucaggc

SEQ ID NO: 117824 - RNA, 19 nt, Artificial Sequence
  Description of Artificial Sequence: Synthetic oligonucleotide
  Sense strand starting at position 1589 of SEQ ID NO: 1499
ggcucaugagcacagagua

SEQ ID NO: 117825 - RNA, 19 nt, Artificial Sequence
  Description of Artificial Sequence: Synthetic oligonucleotide
  Antisense strand to SEQ ID NO: 117824
uacucugugcucaugagcc

SEQ ID NO: 117826 - RNA, 19 nt, Artificial Sequence
  Description of Artificial Sequence: Synthetic oligonucleotide
  Sense strand starting at position 1774 of SEQ ID NO: 1499
acagaaauauaugucaagu

SEQ ID NO: 117827 - RNA, 19 nt, Artificial Sequence
  Description of Artificial Sequence: Synthetic oligonucleotide
  Antisense strand to SEQ ID NO: 117826
acuugacauauauuucugu

SEQ ID NO: 117828 - RNA, 19 nt, Artificial Sequence
  Description of Artificial Sequence: Synthetic oligonucleotide
  Sense strand starting at position 1782 of SEQ ID NO: 1499
auaugucaagucuaugagu

SEQ ID NO: 117829 - RNA, 19 nt, Artificial Sequence
  Description of Artificial Sequence: Synthetic oligonucleotide
  Antisense strand to SEQ ID NO: 117828
acucauagacuugacauau

SEQ ID NO: 117830 - RNA, 19 nt, Artificial Sequence
  Description of Artificial Sequence: Synthetic oligonucleotide
  Sense strand starting at position 1845 of SEQ ID NO: 1499
gucaauguggaucagaagu

SEQ ID NO: 117831 - RNA, 19 nt, Artificial Sequence
  Description of Artificial Sequence: Synthetic oligonucleotide
  Antisense strand to SEQ ID NO: 117830
acuucugauccacauugac

SEQ ID NO: 117832 - RNA, 19 nt, Artificial Sequence
  Description of Artificial Sequence: Synthetic oligonucleotide
  Sense strand starting at position 2020 of SEQ ID NO: 1499
uggcuuuaccuggaggaca

SEQ ID NO: 117833 - RNA, 19 nt, Artificial Sequence
  Description of Artificial Sequence: Synthetic oligonucleotide
  Antisense strand to SEQ ID NO: 117832
uguccuccagguaaagcca

SEQ ID NO: 117834 - RNA, 19 nt, Artificial Sequence
  Description of Artificial Sequence: Synthetic oligonucleotide
  Sense strand starting at position 2022 of SEQ ID NO: 1499
gcuuuaccuggaggacaaa

SEQ ID NO: 117835 - RNA, 19 nt, Artificial Sequence
  Description of Artificial Sequence: Synthetic oligonucleotide
  Antisense strand to SEQ ID NO: 117834
uuuguccuccagguaaagc

SEQ ID NO: 117836 - RNA, 19 nt, Artificial Sequence
  Description of Artificial Sequence: Synthetic oligonucleotide
  Sense strand starting at position 2366 of SEQ ID NO: 1499
aucccauucccaugggauu

SEQ ID NO: 117837 - RNA, 19 nt, Artificial Sequence
  Description of Artificial Sequence: Synthetic oligonucleotide
  Antisense strand to SEQ ID NO: 117836
aaucccaugggaaugggau

SEQ ID NO: 117838 - RNA, 19 nt, Artificial Sequence
  Description of Artificial Sequence: Synthetic oligonucleotide
  Sense strand starting at position 2484 of SEQ ID NO: 1499
guuacaaaucuacgaacau

SEQ ID NO: 117839 - RNA, 19 nt, Artificial Sequence
  Description of Artificial Sequence: Synthetic oligonucleotide
  Antisense strand to SEQ ID NO: 117838
auguucguagauuuguaac

SEQ ID NO: 117840 - RNA, 19 nt, Artificial Sequence
  Description of Artificial Sequence: Synthetic oligonucleotide
  Sense strand starting at position 2733 of SEQ ID NO: 1499
ucuugugaguuauuuauuc

SEQ ID NO: 117841 - RNA, 19 nt, Artificial Sequence
  Description of Artificial Sequence: Synthetic oligonucleotide
  Antisense strand to SEQ ID NO: 117840
gaauaaauaacucacaaga

SEQ ID NO: 117842 - RNA, 19 nt, Artificial Sequence
  Description of Artificial Sequence: Synthetic oligonucleotide
  Sense strand starting at position 2776 of SEQ ID NO: 1499
uguucuaauccguuguguu

SEQ ID NO: 117843 - RNA, 19 nt, Artificial Sequence
  Description of Artificial Sequence: Synthetic oligonucleotide
  Antisense strand to SEQ ID NO: 117842
aacacaacggauuagaaca

SEQ ID NO: 117844 - RNA, 19 nt, Artificial Sequence
  Description of Artificial Sequence: Synthetic oligonucleotide
  Sense strand starting at position 2831 of SEQ ID NO: 1499
gcuaucucagaucaaugau

SEQ ID NO: 117845 - RNA, 19 nt, Artificial Sequence
  Description of Artificial Sequence: Synthetic oligonucleotide
  Antisense strand to SEQ ID NO: 117844
aucauugaucugagauagc

SEQ ID NO: 117846 - RNA, 19 nt, Artificial Sequence
  Description of Artificial Sequence: Synthetic oligonucleotide
  Sense strand starting at position 2834 of SEQ ID NO: 1499
aucucagaucaaugaugcu

SEQ ID NO: 117847 - RNA, 19 nt, Artificial Sequence
  Description of Artificial Sequence: Synthetic oligonucleotide
  Antisense strand to SEQ ID NO: 117846
agcaucauugaucugagau

SEQ ID NO: 117848 - RNA, 19 nt, Artificial Sequence
  Description of Artificial Sequence: Synthetic oligonucleotide
  Sense strand starting at position 2840 of SEQ ID NO: 1499
gaucaaugaugcuuuagga

SEQ ID NO: 117849 - RNA, 19 nt, Artificial Sequence
  Description of Artificial Sequence: Synthetic oligonucleotide
  Antisense strand to SEQ ID NO: 117848
uccuaaagcaucauugauc

SEQ ID NO: 117850 - RNA, 19 nt, Artificial Sequence
  Description of Artificial Sequence: Synthetic oligonucleotide
  Sense strand starting at position 2888 of SEQ ID NO: 1499
ugaggugauuggucugaac

SEQ ID NO: 117851 - RNA, 19 nt, Artificial Sequence
  Description of Artificial Sequence: Synthetic oligonucleotide
  Antisense strand to SEQ ID NO: 117850
guucagaccaaucaccuca

SEQ ID NO: 117852 - RNA, 19 nt, Artificial Sequence
  Description of Artificial Sequence: Synthetic oligonucleotide
  Sense strand starting at position 2899 of SEQ ID NO: 1499
gucugaaccucacuuggaa

SEQ ID NO: 117853 - RNA, 19 nt, Artificial Sequence
  Description of Artificial Sequence: Synthetic oligonucleotide
  Antisense strand to SEQ ID NO: 117852
uuccaagugagguucagac

SEQ ID NO: 117854 - RNA, 19 nt, Artificial Sequence
  Description of Artificial Sequence: Synthetic oligonucleotide
  Sense strand starting at position 3024 of SEQ ID NO: 1499
gagagaaaguuugccucaa

SEQ ID NO: 117855 - RNA, 19 nt, Artificial Sequence
  Description of Artificial Sequence: Synthetic oligonucleotide
  Antisense strand to SEQ ID NO: 117854
uugaggcaaacuuucucuc

SEQ ID NO: 117856 - RNA, 19 nt, Artificial Sequence
  Description of Artificial Sequence: Synthetic oligonucleotide
  Sense strand starting at position 3025 of SEQ ID NO: 1499
agagaaaguuugccucaau

SEQ ID NO: 117857 - RNA, 19 nt, Artificial Sequence
  Description of Artificial Sequence: Synthetic oligonucleotide
  Antisense strand to SEQ ID NO: 117856
auugaggcaaacuuucucu

SEQ ID NO: 117858 - RNA, 19 nt, Artificial Sequence
  Description of Artificial Sequence: Synthetic oligonucleotide
  Sense strand starting at position 3073 of SEQ ID NO: 1499
uauuuauuguaugcaggua

SEQ ID NO: 117859 - RNA, 19 nt, Artificial Sequence
  Description of Artificial Sequence: Synthetic oligonucleotide
  Antisense strand to SEQ ID NO: 117858
uaccugcauacaauaaaua

SEQ ID NO: 117860 - RNA, 19 nt, Artificial Sequence
  Description of Artificial Sequence: Synthetic oligonucleotide
  Sense strand starting at position 3423 of SEQ ID NO: 1499
acauauggaugcucauuau

SEQ ID NO: 117861 - RNA, 19 nt, Artificial Sequence
  Description of Artificial Sequence: Synthetic oligonucleotide
  Antisense strand to SEQ ID NO: 117860
auaaugagcauccauaugu

SEQ ID NO: 117862 - RNA, 19 nt, Artificial Sequence
  Description of Artificial Sequence: Synthetic oligonucleotide
  Sense strand starting at position 3427 of SEQ ID NO: 1499
auggaugcucauuauuauu

SEQ ID NO: 117863 - RNA, 19 nt, Artificial Sequence
  Description of Artificial Sequence: Synthetic oligonucleotide
  Antisense strand to SEQ ID NO: 117862
aauaauaaugagcauccau

SEQ ID NO: 117864 - RNA, 19 nt, Artificial Sequence
  Description of Artificial Sequence: Synthetic oligonucleotide
  Sense strand starting at position 3524 of SEQ ID NO: 1499
cgugucaaauguuuauuua

SEQ ID NO: 117865 - RNA, 19 nt, Artificial Sequence
  Description of Artificial Sequence: Synthetic oligonucleotide
  Antisense strand to SEQ ID NO: 117864
uaaauaaacauuugacacg

SEQ ID NO: 117866 - RNA, 19 nt, Artificial Sequence
  Description of Artificial Sequence: Synthetic oligonucleotide
  Sense strand starting at position 3656 of SEQ ID NO: 1499
auugcaauuggucauauua

SEQ ID NO: 117867 - RNA, 19 nt, Artificial Sequence
  Description of Artificial Sequence: Synthetic oligonucleotide
  Antisense strand to SEQ ID NO: 117866
uaauaugaccaauugcaau

SEQ ID NO: 117868 - RNA, 19 nt, Artificial Sequence
  Description of Artificial Sequence: Synthetic oligonucleotide
  Sense strand starting at position 3866 of SEQ ID NO: 1499
ugucauuggccauaacaaa

SEQ ID NO: 117869 - RNA, 19 nt, Artificial Sequence
  Description of Artificial Sequence: Synthetic oligonucleotide
  Antisense strand to SEQ ID NO: 117868
uuuguuauggccaaugaca

SEQ ID NO: 117870 - RNA, 19 nt, Artificial Sequence
  Description of Artificial Sequence: Synthetic oligonucleotide
  Sense strand starting at position 3873 of SEQ ID NO: 1499
ggccauaacaaaugguaga

SEQ ID NO: 117871 - RNA, 19 nt, Artificial Sequence
  Description of Artificial Sequence: Synthetic oligonucleotide
  Antisense strand to SEQ ID NO: 117870
ucuaccauuuguuauggcc

SEQ ID NO: 117872 - RNA, 19 nt, Artificial Sequence
  Description of Artificial Sequence: Synthetic oligonucleotide
  Sense strand starting at position 6 of SEQ ID NO: 1500
ggcccaaaccaauaaguua

SEQ ID NO: 117873 - RNA, 19 nt, Artificial Sequence
  Description of Artificial Sequence: Synthetic oligonucleotide
  Antisense strand to SEQ ID NO: 117872
uaacuuauugguuugggcc

SEQ ID NO: 117874 - RNA, 19 nt, Artificial Sequence
  Description of Artificial Sequence: Synthetic oligonucleotide
  Sense strand starting at position 54 of SEQ ID NO: 1500
cgccaaauccaugagccaa

SEQ ID NO: 117875 - RNA, 19 nt, Artificial Sequence
  Description of Artificial Sequence: Synthetic oligonucleotide
  Antisense strand to SEQ ID NO: 117874
uuggcucauggauuuggcg

SEQ ID NO: 117876 - RNA, 19 nt, Artificial Sequence
  Description of Artificial Sequence: Synthetic oligonucleotide
  Sense strand starting at position 314 of SEQ ID NO: 1500
ggaaguuucuggccaugga

SEQ ID NO: 117877 - RNA, 19 nt, Artificial Sequence
  Description of Artificial Sequence: Synthetic oligonucleotide
  Antisense strand to SEQ ID NO: 117876
uccauggccagaaacuucc

SEQ ID NO: 117878 - RNA, 19 nt, Artificial Sequence
  Description of Artificial Sequence: Synthetic oligonucleotide
  Sense strand starting at position 315 of SEQ ID NO: 1500
gaaguuucuggccauggau

SEQ ID NO: 117879 - RNA, 19 nt, Artificial Sequence
  Description of Artificial Sequence: Synthetic oligonucleotide
  Antisense strand to SEQ ID NO: 117878
auccauggccagaaacuuc

SEQ ID NO: 117880 - RNA, 19 nt, Artificial Sequence
  Description of Artificial Sequence: Synthetic oligonucleotide
  Sense strand starting at position 354 of SEQ ID NO: 1500
guuaauacauccucaagga

SEQ ID NO: 117881 - RNA, 19 nt, Artificial Sequence
  Description of Artificial Sequence: Synthetic oligonucleotide
  Antisense strand to SEQ ID NO: 117880
uccuugaggauguauuaac

SEQ ID NO: 117882 - RNA, 19 nt, Artificial Sequence
  Description of Artificial Sequence: Synthetic oligonucleotide
  Sense strand starting at position 482 of SEQ ID NO: 1500
cauuuauuguggccuagua

SEQ ID NO: 117883 - RNA, 19 nt, Artificial Sequence
  Description of Artificial Sequence: Synthetic oligonucleotide
  Antisense strand to SEQ ID NO: 117882
uacuaggccacaauaaaug

SEQ ID NO: 117884 - RNA, 19 nt, Artificial Sequence
  Description of Artificial Sequence: Synthetic oligonucleotide
  Sense strand starting at position 735 of SEQ ID NO: 1500
aaauguugugaaggagauc

SEQ ID NO: 117885 - RNA, 19 nt, Artificial Sequence
  Description of Artificial Sequence: Synthetic oligonucleotide
  Antisense strand to SEQ ID NO: 117884
gaucuccuucacaacauuu

SEQ ID NO: 117886 - RNA, 19 nt, Artificial Sequence
  Description of Artificial Sequence: Synthetic oligonucleotide
  Sense strand starting at position 772 of SEQ ID NO: 1500
ugcugugaacucuaauauu

SEQ ID NO: 117887 - RNA, 19 nt, Artificial Sequence
  Description of Artificial Sequence: Synthetic oligonucleotide
  Antisense strand to SEQ ID NO: 117886
aauauuagaguucacagca

SEQ ID NO: 117888 - RNA, 19 nt, Artificial Sequence
  Description of Artificial Sequence: Synthetic oligonucleotide
  Sense strand starting at position 864 of SEQ ID NO: 1500
acugaaagaucucugcaua

SEQ ID NO: 117889 - RNA, 19 nt, Artificial Sequence
  Description of Artificial Sequence: Synthetic oligonucleotide
  Antisense strand to SEQ ID NO: 117888
uaugcagagaucuuucagu

SEQ ID NO: 117890 - RNA, 19 nt, Artificial Sequence
  Description of Artificial Sequence: Synthetic oligonucleotide
  Sense strand starting at position 865 of SEQ ID NO: 1500
cugaaagaucucugcauaa

SEQ ID NO: 117891 - RNA, 19 nt, Artificial Sequence
  Description of Artificial Sequence: Synthetic oligonucleotide
  Antisense strand to SEQ ID NO: 117890
uuaugcagagaucuuucag

SEQ ID NO: 117892 - RNA, 19 nt, Artificial Sequence
  Description of Artificial Sequence: Synthetic oligonucleotide
  Sense strand starting at position 928 of SEQ ID NO: 1500
cagggugaaucaucuuaac

SEQ ID NO: 117893 - RNA, 19 nt, Artificial Sequence
  Description of Artificial Sequence: Synthetic oligonucleotide
  Antisense strand to SEQ ID NO: 117892
guuaagaugauucacccug

SEQ ID NO: 117894 - RNA, 19 nt, Artificial Sequence
  Description of Artificial Sequence: Synthetic oligonucleotide
  Sense strand starting at position 1067 of SEQ ID NO: 1500
cuacuuucugagcagauga

SEQ ID NO: 117895 - RNA, 19 nt, Artificial Sequence
  Description of Artificial Sequence: Synthetic oligonucleotide
  Antisense strand to SEQ ID NO: 117894
ucaucugcucagaaaguag

SEQ ID NO: 117896 - RNA, 19 nt, Artificial Sequence
  Description of Artificial Sequence: Synthetic oligonucleotide
  Sense strand starting at position 1173 of SEQ ID NO: 1500
gguauagaaggcugacacu

SEQ ID NO: 117897 - RNA, 19 nt, Artificial Sequence
  Description of Artificial Sequence: Synthetic oligonucleotide
  Antisense strand to SEQ ID NO: 117896
agugucagccuucuauacc

SEQ ID NO: 117898 - RNA, 19 nt, Artificial Sequence
  Description of Artificial Sequence: Synthetic oligonucleotide
  Sense strand starting at position 1256 of SEQ ID NO: 1500
agaagaugcuaacuacagu

SEQ ID NO: 117899 - RNA, 19 nt, Artificial Sequence
  Description of Artificial Sequence: Synthetic oligonucleotide
  Antisense strand to SEQ ID NO: 117898
acuguaguuagcaucuucu

SEQ ID NO: 117900 - RNA, 19 nt, Artificial Sequence
  Description of Artificial Sequence: Synthetic oligonucleotide
  Sense strand starting at position 1404 of SEQ ID NO: 1500
gcagauguacaucagaguu

SEQ ID NO: 117901 - RNA, 19 nt, Artificial Sequence
  Description of Artificial Sequence: Synthetic oligonucleotide
  Antisense strand to SEQ ID NO: 117900
aacucugauguacaucugc

SEQ ID NO: 117902 - RNA, 19 nt, Artificial Sequence
  Description of Artificial Sequence: Synthetic oligonucleotide
  Sense strand starting at position 1682 of SEQ ID NO: 1500
aaccaaucauggucaggua

SEQ ID NO: 117903 - RNA, 19 nt, Artificial Sequence
  Description of Artificial Sequence: Synthetic oligonucleotide
  Antisense strand to SEQ ID NO: 117902
uaccugaccaugauugguu

SEQ ID NO: 117904 - RNA, 19 nt, Artificial Sequence
  Description of Artificial Sequence: Synthetic oligonucleotide
  Sense strand starting at position 1703 of SEQ ID NO: 1500
ggaagaucuggaugccaca

SEQ ID NO: 117905 - RNA, 19 nt, Artificial Sequence
  Description of Artificial Sequence: Synthetic oligonucleotide
  Antisense strand to SEQ ID NO: 117904
uguggcauccagaucuucc

SEQ ID NO: 117906 - RNA, 19 nt, Artificial Sequence
  Description of Artificial Sequence: Synthetic oligonucleotide
  Sense strand starting at position 1730 of SEQ ID NO: 1500
aggaaaugaucuucucuuu

SEQ ID NO: 117907 - RNA, 19 nt, Artificial Sequence
  Description of Artificial Sequence: Synthetic oligonucleotide
  Antisense strand to SEQ ID NO: 117906
aaagagaagaucauuuccu

SEQ ID NO: 117908 - RNA, 19 nt, Artificial Sequence
  Description of Artificial Sequence: Synthetic oligonucleotide
  Sense strand starting at position 1910 of SEQ ID NO: 1500
cagcaaggaucacuguaaa

SEQ ID NO: 117909 - RNA, 19 nt, Artificial Sequence
  Description of Artificial Sequence: Synthetic oligonucleotide
  Antisense strand to SEQ ID NO: 117908
uuuacagugauccuugcug

SEQ ID NO: 117910 - RNA, 19 nt, Artificial Sequence
  Description of Artificial Sequence: Synthetic oligonucleotide
  Sense strand starting at position 1971 of SEQ ID NO: 1500
ggugaagucagaggaugau

SEQ ID NO: 117911 - RNA, 19 nt, Artificial Sequence
  Description of Artificial Sequence: Synthetic oligonucleotide
  Antisense strand to SEQ ID NO: 117910
aucauccucugacuucacc

SEQ ID NO: 117912 - RNA, 19 nt, Artificial Sequence
  Description of Artificial Sequence: Synthetic oligonucleotide
  Sense strand starting at position 2078 of SEQ ID NO: 1500
gggaaaggucugcaguaga

SEQ ID NO: 117913 - RNA, 19 nt, Artificial Sequence
  Description of Artificial Sequence: Synthetic oligonucleotide
  Antisense strand to SEQ ID NO: 117912
ucuacugcagaccuuuccc

SEQ ID NO: 117914 - RNA, 19 nt, Artificial Sequence
  Description of Artificial Sequence: Synthetic oligonucleotide
  Sense strand starting at position 2195 of SEQ ID NO: 1500
gcugcauuucccugucaga

SEQ ID NO: 117915 - RNA, 19 nt, Artificial Sequence
  Description of Artificial Sequence: Synthetic oligonucleotide
  Antisense strand to SEQ ID NO: 117914
ucugacagggaaaugcagc

SEQ ID NO: 117916 - RNA, 19 nt, Artificial Sequence
  Description of Artificial Sequence: Synthetic oligonucleotide
  Sense strand starting at position 2265 of SEQ ID NO: 1500
ugguaacugcgugauacaa

SEQ ID NO: 117917 - RNA, 19 nt, Artificial Sequence
  Description of Artificial Sequence: Synthetic oligonucleotide
  Antisense strand to SEQ ID NO: 117916
uuguaucacgcaguuacca

SEQ ID NO: 117918 - RNA, 19 nt, Artificial Sequence
  Description of Artificial Sequence: Synthetic oligonucleotide
  Sense strand starting at position 2278 of SEQ ID NO: 1500
auacaauugcuguaugcua

SEQ ID NO: 117919 - RNA, 19 nt, Artificial Sequence
  Description of Artificial Sequence: Synthetic oligonucleotide
  Antisense strand to SEQ ID NO: 117918
uagcauacagcaauuguau

SEQ ID NO: 117920 - RNA, 19 nt, Artificial Sequence
  Description of Artificial Sequence: Synthetic oligonucleotide
  Sense strand starting at position 2358 of SEQ ID NO: 1500
aguuauccagcccauagua

SEQ ID NO: 117921 - RNA, 19 nt, Artificial Sequence
  Description of Artificial Sequence: Synthetic oligonucleotide
  Antisense strand to SEQ ID NO: 117920
uacuaugggcuggauaacu

SEQ ID NO: 117922 - RNA, 19 nt, Artificial Sequence
  Description of Artificial Sequence: Synthetic oligonucleotide
  Sense strand starting at position 2377 of SEQ ID NO: 1500
ggguuaaguaaauacuagu

SEQ ID NO: 117923 - RNA, 19 nt, Artificial Sequence
  Description of Artificial Sequence: Synthetic oligonucleotide
  Antisense strand to SEQ ID NO: 117922
acuaguauuuacuuaaccc

SEQ ID NO: 117924 - RNA, 19 nt, Artificial Sequence
  Description of Artificial Sequence: Synthetic oligonucleotide
  Sense strand starting at position 2504 of SEQ ID NO: 1500
ccauguuucuguucuauuu

SEQ ID NO: 117925 - RNA, 19 nt, Artificial Sequence
  Description of Artificial Sequence: Synthetic oligonucleotide
  Antisense strand to SEQ ID NO: 117924
aaauagaacagaaacaugg

SEQ ID NO: 117926 - RNA, 19 nt, Artificial Sequence
  Description of Artificial Sequence: Synthetic oligonucleotide
  Sense strand starting at position 2562 of SEQ ID NO: 1500
agugucaugacauggaugu

SEQ ID NO: 117927 - RNA, 19 nt, Artificial Sequence
  Description of Artificial Sequence: Synthetic oligonucleotide
  Antisense strand to SEQ ID NO: 117926
acauccaugucaugacacu

SEQ ID NO: 117928 - RNA, 19 nt, Artificial Sequence
  Description of Artificial Sequence: Synthetic oligonucleotide
  Sense strand starting at position 2563 of SEQ ID NO: 1500
gugucaugacauggaugua

SEQ ID NO: 117929 - RNA, 19 nt, Artificial Sequence
  Description of Artificial Sequence: Synthetic oligonucleotide
  Antisense strand to SEQ ID NO: 117928
uacauccaugucaugacac

SEQ ID NO: 117930 - RNA, 19 nt, Artificial Sequence
  Description of Artificial Sequence: Synthetic oligonucleotide
  Sense strand starting at position 2564 of SEQ ID NO: 1500
ugucaugacauggauguau

SEQ ID NO: 117931 - RNA, 19 nt, Artificial Sequence
  Description of Artificial Sequence: Synthetic oligonucleotide
  Antisense strand to SEQ ID NO: 117930
auacauccaugucaugaca

SEQ ID NO: 117932 - RNA, 19 nt, Artificial Sequence
  Description of Artificial Sequence: Synthetic oligonucleotide
  Sense strand starting at position 2575 of SEQ ID NO: 1500
ggauguaucgcauagugga

SEQ ID NO: 117933 - RNA, 19 nt, Artificial Sequence
  Description of Artificial Sequence: Synthetic oligonucleotide
  Antisense strand to SEQ ID NO: 117932
uccacuaugcgauacaucc

SEQ ID NO: 117934 - RNA, 19 nt, Artificial Sequence
  Description of Artificial Sequence: Synthetic oligonucleotide
  Sense strand starting at position 2714 of SEQ ID NO: 1500
acuguuuaugucuaaaguu

SEQ ID NO: 117935 - RNA, 19 nt, Artificial Sequence
  Description of Artificial Sequence: Synthetic oligonucleotide
  Antisense strand to SEQ ID NO: 117934
aacuuuagacauaaacagu

SEQ ID NO: 117936 - RNA, 19 nt, Artificial Sequence
  Description of Artificial Sequence: Synthetic oligonucleotide
  Sense strand starting at position 3136 of SEQ ID NO: 1500
agauuuaacuguuagacaa

SEQ ID NO: 117937 - RNA, 19 nt, Artificial Sequence
  Description of Artificial Sequence: Synthetic oligonucleotide
  Antisense strand to SEQ ID NO: 117936
uugucuaacaguuaaaucu

SEQ ID NO: 117938 - RNA, 19 nt, Artificial Sequence
  Description of Artificial Sequence: Synthetic oligonucleotide
  Sense strand starting at position 3138 of SEQ ID NO: 1500
auuuaacuguuagacaaga

SEQ ID NO: 117939 - RNA, 19 nt, Artificial Sequence
  Description of Artificial Sequence: Synthetic oligonucleotide
  Antisense strand to SEQ ID NO: 117938
ucuugucuaacaguuaaau

SEQ ID NO: 117940 - RNA, 19 nt, Artificial Sequence
  Description of Artificial Sequence: Synthetic oligonucleotide
  Sense strand starting at position 3369 of SEQ ID NO: 1500
gauacaggauucucagcua

SEQ ID NO: 117941 - RNA, 19 nt, Artificial Sequence
  Description of Artificial Sequence: Synthetic oligonucleotide
  Antisense strand to SEQ ID NO: 117940
uagcugagaauccuguauc

SEQ ID NO: 117942 - RNA, 19 nt, Artificial Sequence
  Description of Artificial Sequence: Synthetic oligonucleotide
  Sense strand starting at position 3372 of SEQ ID NO: 1500
acaggauucucagcuaugu

SEQ ID NO: 117943 - RNA, 19 nt, Artificial Sequence
  Description of Artificial Sequence: Synthetic oligonucleotide
  Antisense strand to SEQ ID NO: 117942
acauagcugagaauccugu

SEQ ID NO: 117944 - RNA, 19 nt, Artificial Sequence
  Description of Artificial Sequence: Synthetic oligonucleotide
  Sense strand starting at position 3533 of SEQ ID NO: 1500
guaccagaauuguuaugac

SEQ ID NO: 117945 - RNA, 19 nt, Artificial Sequence
  Description of Artificial Sequence: Synthetic oligonucleotide
  Antisense strand to SEQ ID NO: 117944
gucauaacaauucugguac

SEQ ID NO: 117946 - RNA, 19 nt, Artificial Sequence
  Description of Artificial Sequence: Synthetic oligonucleotide
  Sense strand starting at position 3564 of SEQ ID NO: 1500
ccaguagaaucaguacaaa

SEQ ID NO: 117947 - RNA, 19 nt, Artificial Sequence
  Description of Artificial Sequence: Synthetic oligonucleotide
  Antisense strand to SEQ ID NO: 117946
uuuguacugauucuacugg

SEQ ID NO: 117948 - RNA, 19 nt, Artificial Sequence
  Description of Artificial Sequence: Synthetic oligonucleotide
  Sense strand starting at position 3714 of SEQ ID NO: 1500
agaaauacuccguggucaa

SEQ ID NO: 117949 - RNA, 19 nt, Artificial Sequence
  Description of Artificial Sequence: Synthetic oligonucleotide
  Antisense strand to SEQ ID NO: 117948
uugaccacggaguauuucu

SEQ ID NO: 117950 - RNA, 19 nt, Artificial Sequence
  Description of Artificial Sequence: Synthetic oligonucleotide
  Sense strand starting at position 3715 of SEQ ID NO: 1500
gaaauacuccguggucaaa

SEQ ID NO: 117951 - RNA, 19 nt, Artificial Sequence
  Description of Artificial Sequence: Synthetic oligonucleotide
  Antisense strand to SEQ ID NO: 117950
uuugaccacggaguauuuc

SEQ ID NO: 117952 - RNA, 19 nt, Artificial Sequence
  Description of Artificial Sequence: Synthetic oligonucleotide
  Sense strand starting at position 30 of SEQ ID NO: 1501
uuaccuaugccuugggaga

SEQ ID NO: 117953 - RNA, 19 nt, Artificial Sequence
  Description of Artificial Sequence: Synthetic oligonucleotide
  Antisense strand to SEQ ID NO: 117952
ucucccaaggcauagguaa

SEQ ID NO: 117954 - RNA, 19 nt, Artificial Sequence
  Description of Artificial Sequence: Synthetic oligonucleotide
  Sense strand starting at position 31 of SEQ ID NO: 1501
uaccuaugccuugggagaa

SEQ ID NO: 117955 - RNA, 19 nt, Artificial Sequence
  Description of Artificial Sequence: Synthetic oligonucleotide
  Antisense strand to SEQ ID NO: 117954
uucucccaaggcauaggua

SEQ ID NO: 117956 - RNA, 19 nt, Artificial Sequence
  Description of Artificial Sequence: Synthetic oligonucleotide
  Sense strand starting at position 59 of SEQ ID NO: 1501
cccaauaauguauaagguu

SEQ ID NO: 117957 - RNA, 19 nt, Artificial Sequence
  Description of Artificial Sequence: Synthetic oligonucleotide
  Antisense strand to SEQ ID NO: 117956
aaccuuauacauuauuggg

SEQ ID NO: 117958 - RNA, 19 nt, Artificial Sequence
  Description of Artificial Sequence: Synthetic oligonucleotide
  Sense strand starting at position 68 of SEQ ID NO: 1501
guauaagguuguugagucu

SEQ ID NO: 117959 - RNA, 19 nt, Artificial Sequence
  Description of Artificial Sequence: Synthetic oligonucleotide
  Antisense strand to SEQ ID NO: 117958
agacucaacaaccuuauac

SEQ ID NO: 117960 - RNA, 19 nt, Artificial Sequence
  Description of Artificial Sequence: Synthetic oligonucleotide
  Sense strand starting at position 75 of SEQ ID NO: 1501
guuguugagucuuacucag

SEQ ID NO: 117961 - RNA, 19 nt, Artificial Sequence
  Description of Artificial Sequence: Synthetic oligonucleotide
  Antisense strand to SEQ ID NO: 117960
cugaguaagacucaacaac

SEQ ID NO: 117962 - RNA, 19 nt, Artificial Sequence
  Description of Artificial Sequence: Synthetic oligonucleotide
  Sense strand starting at position 77 of SEQ ID NO: 1501
uguugagucuuacucagcu

SEQ ID NO: 117963 - RNA, 19 nt, Artificial Sequence
  Description of Artificial Sequence: Synthetic oligonucleotide
  Antisense strand to SEQ ID NO: 117962
agcugaguaagacucaaca

SEQ ID NO: 117964 - RNA, 19 nt, Artificial Sequence
  Description of Artificial Sequence: Synthetic oligonucleotide
  Sense strand starting at position 81 of SEQ ID NO: 1501
gagucuuacucagcuuuga

SEQ ID NO: 117965 - RNA, 19 nt, Artificial Sequence
  Description of Artificial Sequence: Synthetic oligonucleotide
  Antisense strand to SEQ ID NO: 117964
ucaaagcugaguaagacuc

SEQ ID NO: 117966 - RNA, 19 nt, Artificial Sequence
  Description of Artificial Sequence: Synthetic oligonucleotide
  Sense strand starting at position 127 of SEQ ID NO: 1501
ucagcaugaucaugcaauu

SEQ ID NO: 117967 - RNA, 19 nt, Artificial Sequence
  Description of Artificial Sequence: Synthetic oligonucleotide
  Antisense strand to SEQ ID NO: 117966
aauugcaugaucaugcuga

SEQ ID NO: 117968 - RNA, 19 nt, Artificial Sequence
  Description of Artificial Sequence: Synthetic oligonucleotide
  Sense strand starting at position 188 of SEQ ID NO: 1501
ccuuaaagcacguguagaa

SEQ ID NO: 117969 - RNA, 19 nt, Artificial Sequence
  Description of Artificial Sequence: Synthetic oligonucleotide
  Antisense strand to SEQ ID NO: 117968
uucuacacgugcuuuaagg

SEQ ID NO: 117970 - RNA, 19 nt, Artificial Sequence
  Description of Artificial Sequence: Synthetic oligonucleotide
  Sense strand starting at position 381 of SEQ ID NO: 1501
acauuugaguuguguacuu

SEQ ID NO: 117971 - RNA, 19 nt, Artificial Sequence
  Description of Artificial Sequence: Synthetic oligonucleotide
  Antisense strand to SEQ ID NO: 117970
aaguacacaacucaaaugu

SEQ ID NO: 117972 - RNA, 19 nt, Artificial Sequence
  Description of Artificial Sequence: Synthetic oligonucleotide
  Sense strand starting at position 444 of SEQ ID NO: 1501
aauguuauuugucuuuggu

SEQ ID NO: 117973 - RNA, 19 nt, Artificial Sequence
  Description of Artificial Sequence: Synthetic oligonucleotide
  Antisense strand to SEQ ID NO: 117972
accaaagacaaauaacauu

SEQ ID NO: 117974 - RNA, 19 nt, Artificial Sequence
  Description of Artificial Sequence: Synthetic oligonucleotide
  Sense strand starting at position 447 of SEQ ID NO: 1501
guuauuugucuuuggugga

SEQ ID NO: 117975 - RNA, 19 nt, Artificial Sequence
  Description of Artificial Sequence: Synthetic oligonucleotide
  Antisense strand to SEQ ID NO: 117974
uccaccaaagacaaauaac

SEQ ID NO: 117976 - RNA, 19 nt, Artificial Sequence
  Description of Artificial Sequence: Synthetic oligonucleotide
  Sense strand starting at position 494 of SEQ ID NO: 1501
gcauacacaugggaaauaa

SEQ ID NO: 117977 - RNA, 19 nt, Artificial Sequence
  Description of Artificial Sequence: Synthetic oligonucleotide
  Antisense strand to SEQ ID NO: 117976
uuauuucccauguguaugc

SEQ ID NO: 117978 - RNA, 19 nt, Artificial Sequence
  Description of Artificial Sequence: Synthetic oligonucleotide
  Sense strand starting at position 558 of SEQ ID NO: 1501
gguacaagcuuuggaguca

SEQ ID NO: 117979 - RNA, 19 nt, Artificial Sequence
  Description of Artificial Sequence: Synthetic oligonucleotide
  Antisense strand to SEQ ID NO: 117978
ugacuccaaagcuuguacc

SEQ ID NO: 117980 - RNA, 19 nt, Artificial Sequence
  Description of Artificial Sequence: Synthetic oligonucleotide
  Sense strand starting at position 584 of SEQ ID NO: 1501
auauuucuguucuauguga

SEQ ID NO: 117981 - RNA, 19 nt, Artificial Sequence
  Description of Artificial Sequence: Synthetic oligonucleotide
  Antisense strand to SEQ ID NO: 117980
ucacauagaacagaaauau

SEQ ID NO: 117982 - RNA, 19 nt, Artificial Sequence
  Description of Artificial Sequence: Synthetic oligonucleotide
  Sense strand starting at position 589 of SEQ ID NO: 1501
ucuguucuaugugaaauua

SEQ ID NO: 117983 - RNA, 19 nt, Artificial Sequence
  Description of Artificial Sequence: Synthetic oligonucleotide
  Antisense strand to SEQ ID NO: 117982
uaauuucacauagaacaga

SEQ ID NO: 117984 - RNA, 19 nt, Artificial Sequence
  Description of Artificial Sequence: Synthetic oligonucleotide
  Sense strand starting at position 597 of SEQ ID NO: 1501
augugaaauuaggaaccau

SEQ ID NO: 117985 - RNA, 19 nt, Artificial Sequence
  Description of Artificial Sequence: Synthetic oligonucleotide
  Antisense strand to SEQ ID NO: 117984
augguuccuaauuucacau

SEQ ID NO: 117986 - RNA, 19 nt, Artificial Sequence
  Description of Artificial Sequence: Synthetic oligonucleotide
  Sense strand starting at position 617 of SEQ ID NO: 1501
uuuaacuuuccauguguua

SEQ ID NO: 117987 - RNA, 19 nt, Artificial Sequence
  Description of Artificial Sequence: Synthetic oligonucleotide
  Antisense strand to SEQ ID NO: 117986
uaacacauggaaaguuaaa

SEQ ID NO: 117988 - RNA, 19 nt, Artificial Sequence
  Description of Artificial Sequence: Synthetic oligonucleotide
  Sense strand starting at position 680 of SEQ ID NO: 1501
cuuauacauuauuggguua

SEQ ID NO: 117989 - RNA, 19 nt, Artificial Sequence
  Description of Artificial Sequence: Synthetic oligonucleotide
  Antisense strand to SEQ ID NO: 117988
uaacccaauaauguauaag

SEQ ID NO: 117990 - RNA, 19 nt, Artificial Sequence
  Description of Artificial Sequence: Synthetic oligonucleotide
  Sense strand starting at position 685 of SEQ ID NO: 1501
acauuauuggguuaccuua

SEQ ID NO: 117991 - RNA, 19 nt, Artificial Sequence
  Description of Artificial Sequence: Synthetic oligonucleotide
  Antisense strand to SEQ ID NO: 117990
uaagguaacccaauaaugu

SEQ ID NO: 117992 - RNA, 19 nt, Artificial Sequence
  Description of Artificial Sequence: Synthetic oligonucleotide
  Sense strand starting at position 714 of SEQ ID NO: 1501
ggcauagguaaguagagau

SEQ ID NO: 117993 - RNA, 19 nt, Artificial Sequence
  Description of Artificial Sequence: Synthetic oligonucleotide
  Antisense strand to SEQ ID NO: 117992
aucucuacuuaccuaugcc

SEQ ID NO: 117994 - RNA, 19 nt, Artificial Sequence
  Description of Artificial Sequence: Synthetic oligonucleotide
  Sense strand starting at position 881 of SEQ ID NO: 1501
gguaucugucaauacaauu

SEQ ID NO: 117995 - RNA, 19 nt, Artificial Sequence
  Description of Artificial Sequence: Synthetic oligonucleotide
  Antisense strand to SEQ ID NO: 117994
aauuguauugacagauacc

SEQ ID NO: 117996 - RNA, 19 nt, Artificial Sequence
  Description of Artificial Sequence: Synthetic oligonucleotide
  Sense strand starting at position 1019 of SEQ ID NO: 1501
agacucaucugacacuaga

SEQ ID NO: 117997 - RNA, 19 nt, Artificial Sequence
  Description of Artificial Sequence: Synthetic oligonucleotide
  Antisense strand to SEQ ID NO: 117996
ucuagugucagaugagucu

SEQ ID NO: 117998 - RNA, 19 nt, Artificial Sequence
  Description of Artificial Sequence: Synthetic oligonucleotide
  Sense strand starting at position 1187 of SEQ ID NO: 1501
caaccuuaucgugguuagu

SEQ ID NO: 117999 - RNA, 19 nt, Artificial Sequence
  Description of Artificial Sequence: Synthetic oligonucleotide
  Antisense strand to SEQ ID NO: 117998
acuaaccacgauaagguug

SEQ ID NO: 118000 - RNA, 19 nt, Artificial Sequence
  Description of Artificial Sequence: Synthetic oligonucleotide
  Sense strand starting at position 1865 of SEQ ID NO: 1501
ggagaaucaugagggcauu

SEQ ID NO: 118001 - RNA, 19 nt, Artificial Sequence
  Description of Artificial Sequence: Synthetic oligonucleotide
  Antisense strand to SEQ ID NO: 118000
aaugcccucaugauucucc

SEQ ID NO: 118002 - RNA, 19 nt, Artificial Sequence
  Description of Artificial Sequence: Synthetic oligonucleotide
  Sense strand starting at position 1871 of SEQ ID NO: 1501
ucaugagggcauugcuaaa

SEQ ID NO: 118003 - RNA, 19 nt, Artificial Sequence
  Description of Artificial Sequence: Synthetic oligonucleotide
  Antisense strand to SEQ ID NO: 118002
uuuagcaaugcccucauga

SEQ ID NO: 118004 - RNA, 19 nt, Artificial Sequence
  Description of Artificial Sequence: Synthetic oligonucleotide
  Sense strand starting at position 2077 of SEQ ID NO: 1501
ugcacaguuucuggacaua

SEQ ID NO: 118005 - RNA, 19 nt, Artificial Sequence
  Description of Artificial Sequence: Synthetic oligonucleotide
  Antisense strand to SEQ ID NO: 118004
uauguccagaaacugugca

SEQ ID NO: 118006 - RNA, 19 nt, Artificial Sequence
  Description of Artificial Sequence: Synthetic oligonucleotide
  Sense strand starting at position 2080 of SEQ ID NO: 1501
acaguuucuggacauaugu

SEQ ID NO: 118007 - RNA, 19 nt, Artificial Sequence
  Description of Artificial Sequence: Synthetic oligonucleotide
  Antisense strand to SEQ ID NO: 118006
acauauguccagaaacugu

SEQ ID NO: 118008 - RNA, 19 nt, Artificial Sequence
  Description of Artificial Sequence: Synthetic oligonucleotide
  Sense strand starting at position 2089 of SEQ ID NO: 1501
ggacauauguacuggauau

SEQ ID NO: 118009 - RNA, 19 nt, Artificial Sequence
  Description of Artificial Sequence: Synthetic oligonucleotide
  Antisense strand to SEQ ID NO: 118008
auauccaguacauaugucc

SEQ ID NO: 118010 - RNA, 19 nt, Artificial Sequence
  Description of Artificial Sequence: Synthetic oligonucleotide
  Sense strand starting at position 2091 of SEQ ID NO: 1501
acauauguacuggauaugu

SEQ ID NO: 118011 - RNA, 19 nt, Artificial Sequence
  Description of Artificial Sequence: Synthetic oligonucleotide
  Antisense strand to SEQ ID NO: 118010
acauauccaguacauaugu

SEQ ID NO: 118012 - RNA, 19 nt, Artificial Sequence
  Description of Artificial Sequence: Synthetic oligonucleotide
  Sense strand starting at position 2093 of SEQ ID NO: 1501
auauguacuggauauguua

SEQ ID NO: 118013 - RNA, 19 nt, Artificial Sequence
  Description of Artificial Sequence: Synthetic oligonucleotide
  Antisense strand to SEQ ID NO: 118012
uaacauauccaguacauau

SEQ ID NO: 118014 - RNA, 19 nt, Artificial Sequence
  Description of Artificial Sequence: Synthetic oligonucleotide
  Sense strand starting at position 2101 of SEQ ID NO: 1501
uggauauguuaucccaggu

SEQ ID NO: 118015 - RNA, 19 nt, Artificial Sequence
  Description of Artificial Sequence: Synthetic oligonucleotide
  Antisense strand to SEQ ID NO: 118014
accugggauaacauaucca

SEQ ID NO: 118016 - RNA, 19 nt, Artificial Sequence
  Description of Artificial Sequence: Synthetic oligonucleotide
  Sense strand starting at position 2199 of SEQ ID NO: 1501
uguucuaacugagaucaug

SEQ ID NO: 118017 - RNA, 19 nt, Artificial Sequence
  Description of Artificial Sequence: Synthetic oligonucleotide
  Antisense strand to SEQ ID NO: 118016
caugaucucaguuagaaca

SEQ ID NO: 118018 - RNA, 19 nt, Artificial Sequence
  Description of Artificial Sequence: Synthetic oligonucleotide
  Sense strand starting at position 2511 of SEQ ID NO: 1501
gugagaauacccgguguuu

SEQ ID NO: 118019 - RNA, 19 nt, Artificial Sequence
  Description of Artificial Sequence: Synthetic oligonucleotide
  Antisense strand to SEQ ID NO: 118018
aaacaccggguauucucac

SEQ ID NO: 118020 - RNA, 19 nt, Artificial Sequence
  Description of Artificial Sequence: Synthetic oligonucleotide
  Sense strand starting at position 3355 of SEQ ID NO: 1501
cuauguccucaaugguaac

SEQ ID NO: 118021 - RNA, 19 nt, Artificial Sequence
  Description of Artificial Sequence: Synthetic oligonucleotide
  Antisense strand to SEQ ID NO: 118020
guuaccauugaggacauag

SEQ ID NO: 118022 - RNA, 19 nt, Artificial Sequence
  Description of Artificial Sequence: Synthetic oligonucleotide
  Sense strand starting at position 3928 of SEQ ID NO: 1502
uucgaaucaugggucaaga

SEQ ID NO: 118023 - RNA, 19 nt, Artificial Sequence
  Description of Artificial Sequence: Synthetic oligonucleotide
  Antisense strand to SEQ ID NO: 118022
ucuugacccaugauucgaa

SEQ ID NO: 118024 - RNA, 19 nt, Artificial Sequence
  Description of Artificial Sequence: Synthetic oligonucleotide
  Sense strand starting at position 3694 of SEQ ID NO: 1502
gugcucagagauggagaua

SEQ ID NO: 118025 - RNA, 19 nt, Artificial Sequence
  Description of Artificial Sequence: Synthetic oligonucleotide
  Antisense strand to SEQ ID NO: 118024
uaucuccaucucugagcac

SEQ ID NO: 118026 - RNA, 19 nt, Artificial Sequence
  Description of Artificial Sequence: Synthetic oligonucleotide
  Sense strand starting at position 3693 of SEQ ID NO: 1502
agugcucagagauggagau

SEQ ID NO: 118027 - RNA, 19 nt, Artificial Sequence
  Description of Artificial Sequence: Synthetic oligonucleotide
  Antisense strand to SEQ ID NO: 118026
aucuccaucucugagcacu

SEQ ID NO: 118028 - RNA, 19 nt, Artificial Sequence
  Description of Artificial Sequence: Synthetic oligonucleotide
  Sense strand starting at position 3687 of SEQ ID NO: 1502
cuucuuagugcucagagau

SEQ ID NO: 118029 - RNA, 19 nt, Artificial Sequence
  Description of Artificial Sequence: Synthetic oligonucleotide
  Antisense strand to SEQ ID NO: 118028
aucucugagcacuaagaag

SEQ ID NO: 118030 - RNA, 19 nt, Artificial Sequence
  Description of Artificial Sequence: Synthetic oligonucleotide
  Sense strand starting at position 3643 of SEQ ID NO: 1502
ucuccuuauguugaagcaa

SEQ ID NO: 118031 - RNA, 19 nt, Artificial Sequence
  Description of Artificial Sequence: Synthetic oligonucleotide
  Antisense strand to SEQ ID NO: 118030
uugcuucaacauaaggaga

SEQ ID NO: 118032 - RNA, 19 nt, Artificial Sequence
  Description of Artificial Sequence: Synthetic oligonucleotide
  Sense strand starting at position 3612 of SEQ ID NO: 1502
uuuacagucccugaagcau

SEQ ID NO: 118033 - RNA, 19 nt, Artificial Sequence
  Description of Artificial Sequence: Synthetic oligonucleotide
  Antisense strand to SEQ ID NO: 118032
augcuucagggacuguaaa

SEQ ID NO: 118034 - RNA, 19 nt, Artificial Sequence
  Description of Artificial Sequence: Synthetic oligonucleotide
  Sense strand starting at position 3591 of SEQ ID NO: 1502
uugguucuagaauagucaa

SEQ ID NO: 118035 - RNA, 19 nt, Artificial Sequence
  Description of Artificial Sequence: Synthetic oligonucleotide
  Antisense strand to SEQ ID NO: 118034
uugacuauucuagaaccaa

SEQ ID NO: 118036 - RNA, 19 nt, Artificial Sequence
  Description of Artificial Sequence: Synthetic oligonucleotide
  Sense strand starting at position 3494 of SEQ ID NO: 1502
ugguguauuucuucucauu

SEQ ID NO: 118037 - RNA, 19 nt, Artificial Sequence
  Description of Artificial Sequence: Synthetic oligonucleotide
  Antisense strand to SEQ ID NO: 118036
aaugagaagaaauacacca

SEQ ID NO: 118038 - RNA, 19 nt, Artificial Sequence
  Description of Artificial Sequence: Synthetic oligonucleotide
  Sense strand starting at position 3399 of SEQ ID NO: 1502
uggaaugaauucucaugcu

SEQ ID NO: 118039 - RNA, 19 nt, Artificial Sequence
  Description of Artificial Sequence: Synthetic oligonucleotide
  Antisense strand to SEQ ID NO: 118038
agcaugagaauucauucca

SEQ ID NO: 118040 - RNA, 19 nt, Artificial Sequence
  Description of Artificial Sequence: Synthetic oligonucleotide
  Sense strand starting at position 3152 of SEQ ID NO: 1502
agauuaaucgggcauggug

SEQ ID NO: 118041 - RNA, 19 nt, Artificial Sequence
  Description of Artificial Sequence: Synthetic oligonucleotide
  Antisense strand to SEQ ID NO: 118040
caccaugcccgauuaaucu

SEQ ID NO: 118042 - RNA, 19 nt, Artificial Sequence
  Description of Artificial Sequence: Synthetic oligonucleotide
  Sense strand starting at position 2788 of SEQ ID NO: 1502
uccaguugacaaugaauuc

SEQ ID NO: 118043 - RNA, 19 nt, Artificial Sequence
  Description of Artificial Sequence: Synthetic oligonucleotide
  Antisense strand to SEQ ID NO: 118042
gaauucauugucaacugga

SEQ ID NO: 118044 - RNA, 19 nt, Artificial Sequence
  Description of Artificial Sequence: Synthetic oligonucleotide
  Sense strand starting at position 2682 of SEQ ID NO: 1502
gugucuauuuguucucaca

SEQ ID NO: 118045 - RNA, 19 nt, Artificial Sequence
  Description of Artificial Sequence: Synthetic oligonucleotide
  Antisense strand to SEQ ID NO: 118044
ugugagaacaaauagacac

SEQ ID NO: 118046 - RNA, 19 nt, Artificial Sequence
  Description of Artificial Sequence: Synthetic oligonucleotide
  Sense strand starting at position 2473 of SEQ ID NO: 1502
agacgucuauuugugacuu

SEQ ID NO: 118047 - RNA, 19 nt, Artificial Sequence
  Description of Artificial Sequence: Synthetic oligonucleotide
  Antisense strand to SEQ ID NO: 118046
aagucacaaauagacgucu

SEQ ID NO: 118048 - RNA, 19 nt, Artificial Sequence
  Description of Artificial Sequence: Synthetic oligonucleotide
  Sense strand starting at position 2460 of SEQ ID NO: 1502
uagagucauccacagacgu

SEQ ID NO: 118049 - RNA, 19 nt, Artificial Sequence
  Description of Artificial Sequence: Synthetic oligonucleotide
  Antisense strand to SEQ ID NO: 118048
acgucuguggaugacucua

SEQ ID NO: 118050 - RNA, 19 nt, Artificial Sequence
  Description of Artificial Sequence: Synthetic oligonucleotide
  Sense strand starting at position 2456 of SEQ ID NO: 1502
guacuagagucauccacag

SEQ ID NO: 118051 - RNA, 19 nt, Artificial Sequence
  Description of Artificial Sequence: Synthetic oligonucleotide
  Antisense strand to SEQ ID NO: 118050
cuguggaugacucuaguac

SEQ ID NO: 118052 - RNA, 19 nt, Artificial Sequence
  Description of Artificial Sequence: Synthetic oligonucleotide
  Sense strand starting at position 2450 of SEQ ID NO: 1502
augauuguacuagagucau

SEQ ID NO: 118053 - RNA, 19 nt, Artificial Sequence
  Description of Artificial Sequence: Synthetic oligonucleotide
  Antisense strand to SEQ ID NO: 118052
augacucuaguacaaucau

SEQ ID NO: 118054 - RNA, 19 nt, Artificial Sequence
  Description of Artificial Sequence: Synthetic oligonucleotide
  Sense strand starting at position 2443 of SEQ ID NO: 1502
caucgagaugauuguacua

SEQ ID NO: 118055 - RNA, 19 nt, Artificial Sequence
  Description of Artificial Sequence: Synthetic oligonucleotide
  Antisense strand to SEQ ID NO: 118054
uaguacaaucaucucgaug

SEQ ID NO: 118056 - RNA, 19 nt, Artificial Sequence
  Description of Artificial Sequence: Synthetic oligonucleotide
  Sense strand starting at position 2440 of SEQ ID NO: 1502
cuccaucgagaugauugua

SEQ ID NO: 118057 - RNA, 19 nt, Artificial Sequence
  Description of Artificial Sequence: Synthetic oligonucleotide
  Antisense strand to SEQ ID NO: 118056
uacaaucaucucgauggag

SEQ ID NO: 118058 - RNA, 19 nt, Artificial Sequence
  Description of Artificial Sequence: Synthetic oligonucleotide
  Sense strand starting at position 2437 of SEQ ID NO: 1502
caucuccaucgagaugauu

SEQ ID NO: 118059 - RNA, 19 nt, Artificial Sequence
  Description of Artificial Sequence: Synthetic oligonucleotide
  Antisense strand to SEQ ID NO: 118058
aaucaucucgauggagaug

SEQ ID NO: 118060 - RNA, 19 nt, Artificial Sequence
  Description of Artificial Sequence: Synthetic oligonucleotide
  Sense strand starting at position 2435 of SEQ ID NO: 1502
ugcaucuccaucgagauga

SEQ ID NO: 118061 - RNA, 19 nt, Artificial Sequence
  Description of Artificial Sequence: Synthetic oligonucleotide
  Antisense strand to SEQ ID NO: 118060
ucaucucgauggagaugca

SEQ ID NO: 118062 - RNA, 19 nt, Artificial Sequence
  Description of Artificial Sequence: Synthetic oligonucleotide
  Sense strand starting at position 2392 of SEQ ID NO: 1502
ucccauuucgccuagcgaa

SEQ ID NO: 118063 - RNA, 19 nt, Artificial Sequence
  Description of Artificial Sequence: Synthetic oligonucleotide
  Antisense strand to SEQ ID NO: 118062
uucgcuaggcgaaauggga

SEQ ID NO: 118064 - RNA, 19 nt, Artificial Sequence
  Description of Artificial Sequence: Synthetic oligonucleotide
  Sense strand starting at position 2374 of SEQ ID NO: 1502
ugguuacugugccuuauuu

SEQ ID NO: 118065 - RNA, 19 nt, Artificial Sequence
  Description of Artificial Sequence: Synthetic oligonucleotide
  Antisense strand to SEQ ID NO: 118064
aaauaaggcacaguaacca

SEQ ID NO: 118066 - RNA, 19 nt, Artificial Sequence
  Description of Artificial Sequence: Synthetic oligonucleotide
  Sense strand starting at position 2279 of SEQ ID NO: 1502
uacaguaccugguuuagaa

SEQ ID NO: 118067 - RNA, 19 nt, Artificial Sequence
  Description of Artificial Sequence: Synthetic oligonucleotide
  Antisense strand to SEQ ID NO: 118066
uucuaaaccagguacugua

SEQ ID NO: 118068 - RNA, 19 nt, Artificial Sequence
  Description of Artificial Sequence: Synthetic oligonucleotide
  Sense strand starting at position 2258 of SEQ ID NO: 1502
gugagauguaaauguaauu

SEQ ID NO: 118069 - RNA, 19 nt, Artificial Sequence
  Description of Artificial Sequence: Synthetic oligonucleotide
  Antisense strand to SEQ ID NO: 118068
aauuacauuuacaucucac

SEQ ID NO: 118070 - RNA, 19 nt, Artificial Sequence
  Description of Artificial Sequence: Synthetic oligonucleotide
  Sense strand starting at position 2254 of SEQ ID NO: 1502
ggaugugagauguaaaugu

SEQ ID NO: 118071 - RNA, 19 nt, Artificial Sequence
  Description of Artificial Sequence: Synthetic oligonucleotide
  Antisense strand to SEQ ID NO: 118070
acauuuacaucucacaucc

SEQ ID NO: 118072 - RNA, 19 nt, Artificial Sequence
  Description of Artificial Sequence: Synthetic oligonucleotide
  Sense strand starting at position 2252 of SEQ ID NO: 1502
cuggaugugagauguaaau

SEQ ID NO: 118073 - RNA, 19 nt, Artificial Sequence
  Description of Artificial Sequence: Synthetic oligonucleotide
  Antisense strand to SEQ ID NO: 118072
auuuacaucucacauccag

SEQ ID NO: 118074 - RNA, 19 nt, Artificial Sequence
  Description of Artificial Sequence: Synthetic oligonucleotide
  Sense strand starting at position 2229 of SEQ ID NO: 1502
aucauaguucuguacucua

SEQ ID NO: 118075 - RNA, 19 nt, Artificial Sequence
  Description of Artificial Sequence: Synthetic oligonucleotide
  Antisense strand to SEQ ID NO: 118074
uagaguacagaacuaugau

SEQ ID NO: 118076 - RNA, 19 nt, Artificial Sequence
  Description of Artificial Sequence: Synthetic oligonucleotide
  Sense strand starting at position 2219 of SEQ ID NO: 1502
gugaaaggucaucauaguu

SEQ ID NO: 118077 - RNA, 19 nt, Artificial Sequence
  Description of Artificial Sequence: Synthetic oligonucleotide
  Antisense strand to SEQ ID NO: 118076
aacuaugaugaccuuucac

SEQ ID NO: 118078 - RNA, 19 nt, Artificial Sequence
  Description of Artificial Sequence: Synthetic oligonucleotide
  Sense strand starting at position 2171 of SEQ ID NO: 1502
cuguaugauauuggacaga

SEQ ID NO: 118079 - RNA, 19 nt, Artificial Sequence
  Description of Artificial Sequence: Synthetic oligonucleotide
  Antisense strand to SEQ ID NO: 118078
ucuguccaauaucauacag

SEQ ID NO: 118080 - RNA, 19 nt, Artificial Sequence
  Description of Artificial Sequence: Synthetic oligonucleotide
  Sense strand starting at position 2081 of SEQ ID NO: 1502
ccaggaauaguaugucaga

SEQ ID NO: 118081 - RNA, 19 nt, Artificial Sequence
  Description of Artificial Sequence: Synthetic oligonucleotide
  Antisense strand to SEQ ID NO: 118080
ucugacauacuauuccugg

SEQ ID NO: 118082 - RNA, 19 nt, Artificial Sequence
  Description of Artificial Sequence: Synthetic oligonucleotide
  Sense strand starting at position 2023 of SEQ ID NO: 1502
gcuguaaaggcagaaaucu

SEQ ID NO: 118083 - RNA, 19 nt, Artificial Sequence
  Description of Artificial Sequence: Synthetic oligonucleotide
  Antisense strand to SEQ ID NO: 118082
agauuucugccuuuacagc

SEQ ID NO: 118084 - RNA, 19 nt, Artificial Sequence
  Description of Artificial Sequence: Synthetic oligonucleotide
  Sense strand starting at position 875 of SEQ ID NO: 1502
ucuguaauagcugcguuau

SEQ ID NO: 118085 - RNA, 19 nt, Artificial Sequence
  Description of Artificial Sequence: Synthetic oligonucleotide
  Antisense strand to SEQ ID NO: 118084
auaacgcagcuauuacaga

SEQ ID NO: 118086 - RNA, 19 nt, Artificial Sequence
  Description of Artificial Sequence: Synthetic oligonucleotide
  Sense strand starting at position 712 of SEQ ID NO: 1502
cuggaaauguuugugaauc

SEQ ID NO: 118087 - RNA, 19 nt, Artificial Sequence
  Description of Artificial Sequence: Synthetic oligonucleotide
  Antisense strand to SEQ ID NO: 118086
gauucacaaacauuuccag

SEQ ID NO: 118088 - RNA, 19 nt, Artificial Sequence
  Description of Artificial Sequence: Synthetic oligonucleotide
  Sense strand starting at position 703 of SEQ ID NO: 1502
gaaugcccucuggaaaugu

SEQ ID NO: 118089 - RNA, 19 nt, Artificial Sequence
  Description of Artificial Sequence: Synthetic oligonucleotide
  Antisense strand to SEQ ID NO: 118088
acauuuccagagggcauuc

SEQ ID NO: 118090 - RNA, 19 nt, Artificial Sequence
  Description of Artificial Sequence: Synthetic oligonucleotide
  Sense strand starting at position 701 of SEQ ID NO: 1502
gagaaugcccucuggaaau

SEQ ID NO: 118091 - RNA, 19 nt, Artificial Sequence
  Description of Artificial Sequence: Synthetic oligonucleotide
  Antisense strand to SEQ ID NO: 118090
auuuccagagggcauucuc

SEQ ID NO: 118092 - RNA, 19 nt, Artificial Sequence
  Description of Artificial Sequence: Synthetic oligonucleotide
  Sense strand starting at position 688 of SEQ ID NO: 1502
gggcuacuugacugagaau

SEQ ID NO: 118093 - RNA, 19 nt, Artificial Sequence
  Description of Artificial Sequence: Synthetic oligonucleotide
  Antisense strand to SEQ ID NO: 118092
auucucagucaaguagccc

SEQ ID NO: 118094 - RNA, 19 nt, Artificial Sequence
  Description of Artificial Sequence: Synthetic oligonucleotide
  Sense strand starting at position 687 of SEQ ID NO: 1502
agggcuacuugacugagaa

SEQ ID NO: 118095 - RNA, 19 nt, Artificial Sequence
  Description of Artificial Sequence: Synthetic oligonucleotide
  Antisense strand to SEQ ID NO: 118094
uucucagucaaguagcccu

SEQ ID NO: 118096 - RNA, 19 nt, Artificial Sequence
  Description of Artificial Sequence: Synthetic oligonucleotide
  Sense strand starting at position 591 of SEQ ID NO: 1502
augaucacacguuagcaau

SEQ ID NO: 118097 - RNA, 19 nt, Artificial Sequence
  Description of Artificial Sequence: Synthetic oligonucleotide
  Antisense strand to SEQ ID NO: 118096
auugcuaacgugugaucau

SEQ ID NO: 118098 - RNA, 19 nt, Artificial Sequence
  Description of Artificial Sequence: Synthetic oligonucleotide
  Sense strand starting at position 234 of SEQ ID NO: 1502
aaaguuggucagcaauaca

SEQ ID NO: 118099 - RNA, 19 nt, Artificial Sequence
  Description of Artificial Sequence: Synthetic oligonucleotide
  Antisense strand to SEQ ID NO: 118098
uguauugcugaccaacuuu

SEQ ID NO: 118100 - RNA, 19 nt, Artificial Sequence
  Description of Artificial Sequence: Synthetic oligonucleotide
  Sense strand starting at position 180 of SEQ ID NO: 1502
guuugaaauuaagucauca

SEQ ID NO: 118101 - RNA, 19 nt, Artificial Sequence
  Description of Artificial Sequence: Synthetic oligonucleotide
  Antisense strand to SEQ ID NO: 118100
ugaugacuuaauuucaaac

SEQ ID NO: 118102 - RNA, 19 nt, Artificial Sequence
  Description of Artificial Sequence: Synthetic oligonucleotide
  Sense strand starting at position 264 of SEQ ID NO: 1503
gccaaaccauuaucagaga

SEQ ID NO: 118103 - RNA, 19 nt, Artificial Sequence
  Description of Artificial Sequence: Synthetic oligonucleotide
  Antisense strand to SEQ ID NO: 118102
ucucugauaaugguuuggc

SEQ ID NO: 118104 - RNA, 19 nt, Artificial Sequence
  Description of Artificial Sequence: Synthetic oligonucleotide
  Sense strand starting at position 373 of SEQ ID NO: 1503
ugaaauuguguaggaggaa

SEQ ID NO: 118105 - RNA, 19 nt, Artificial Sequence
  Description of Artificial Sequence: Synthetic oligonucleotide
  Antisense strand to SEQ ID NO: 118104
uuccuccuacacaauuuca

SEQ ID NO: 118106 - RNA, 19 nt, Artificial Sequence
  Description of Artificial Sequence: Synthetic oligonucleotide
  Sense strand starting at position 485 of SEQ ID NO: 1503
uuacauuuaugguagaaga

SEQ ID NO: 118107 - RNA, 19 nt, Artificial Sequence
  Description of Artificial Sequence: Synthetic oligonucleotide
  Antisense strand to SEQ ID NO: 118106
ucuucuaccauaaauguaa

SEQ ID NO: 118108 - RNA, 19 nt, Artificial Sequence
  Description of Artificial Sequence: Synthetic oligonucleotide
  Sense strand starting at position 538 of SEQ ID NO: 1503
ucuauaguucuauacuaug

SEQ ID NO: 118109 - RNA, 19 nt, Artificial Sequence
  Description of Artificial Sequence: Synthetic oligonucleotide
  Antisense strand to SEQ ID NO: 118108
cauaguauagaacuauaga

SEQ ID NO: 118110 - RNA, 19 nt, Artificial Sequence
  Description of Artificial Sequence: Synthetic oligonucleotide
  Sense strand starting at position 702 of SEQ ID NO: 1503
cagggaaguaguugaagau

SEQ ID NO: 118111 - RNA, 19 nt, Artificial Sequence
  Description of Artificial Sequence: Synthetic oligonucleotide
  Antisense strand to SEQ ID NO: 118110
aucuucaacuacuucccug

SEQ ID NO: 118112 - RNA, 19 nt, Artificial Sequence
  Description of Artificial Sequence: Synthetic oligonucleotide
  Sense strand starting at position 1023 of SEQ ID NO: 1503
ucucuagcagcauaugaaa

SEQ ID NO: 118113 - RNA, 19 nt, Artificial Sequence
  Description of Artificial Sequence: Synthetic oligonucleotide
  Antisense strand to SEQ ID NO: 118112
uuucauaugcugcuagaga

SEQ ID NO: 118114 - RNA, 19 nt, Artificial Sequence
  Description of Artificial Sequence: Synthetic oligonucleotide
  Sense strand starting at position 1038 of SEQ ID NO: 1503
gaaauuucuuuagaaagug

SEQ ID NO: 118115 - RNA, 19 nt, Artificial Sequence
  Description of Artificial Sequence: Synthetic oligonucleotide
  Antisense strand to SEQ ID NO: 118114
cacuuucuaaagaaauuuc

SEQ ID NO: 118116 - RNA, 19 nt, Artificial Sequence
  Description of Artificial Sequence: Synthetic oligonucleotide
  Sense strand starting at position 1047 of SEQ ID NO: 1503
uuagaaagugguuaccuuu

SEQ ID NO: 118117 - RNA, 19 nt, Artificial Sequence
  Description of Artificial Sequence: Synthetic oligonucleotide
  Antisense strand to SEQ ID NO: 118116
aaagguaaccacuuucuaa

SEQ ID NO: 118118 - RNA, 19 nt, Artificial Sequence
  Description of Artificial Sequence: Synthetic oligonucleotide
  Sense strand starting at position 1057 of SEQ ID NO: 1503
guuaccuuuccugaggaca

SEQ ID NO: 118119 - RNA, 19 nt, Artificial Sequence
  Description of Artificial Sequence: Synthetic oligonucleotide
  Antisense strand to SEQ ID NO: 118118
uguccucaggaaagguaac

SEQ ID NO: 118120 - RNA, 19 nt, Artificial Sequence
  Description of Artificial Sequence: Synthetic oligonucleotide
  Sense strand starting at position 1120 of SEQ ID NO: 1503
uuccuaaggcuguaaauga

SEQ ID NO: 118121 - RNA, 19 nt, Artificial Sequence
  Description of Artificial Sequence: Synthetic oligonucleotide
  Antisense strand to SEQ ID NO: 118120
ucauuuacagccuuaggaa

SEQ ID NO: 118122 - RNA, 19 nt, Artificial Sequence
  Description of Artificial Sequence: Synthetic oligonucleotide
  Sense strand starting at position 1129 of SEQ ID NO: 1503
cuguaaaugaguggauuga

SEQ ID NO: 118123 - RNA, 19 nt, Artificial Sequence
  Description of Artificial Sequence: Synthetic oligonucleotide
  Antisense strand to SEQ ID NO: 118122
ucaauccacucauuuacag

SEQ ID NO: 118124 - RNA, 19 nt, Artificial Sequence
  Description of Artificial Sequence: Synthetic oligonucleotide
  Sense strand starting at position 1133 of SEQ ID NO: 1503
aaaugaguggauugagcau

SEQ ID NO: 118125 - RNA, 19 nt, Artificial Sequence
  Description of Artificial Sequence: Synthetic oligonucleotide
  Antisense strand to SEQ ID NO: 118124
augcucaauccacucauuu

SEQ ID NO: 118126 - RNA, 19 nt, Artificial Sequence
  Description of Artificial Sequence: Synthetic oligonucleotide
  Sense strand starting at position 1140 of SEQ ID NO: 1503
uggauugagcaugggagua

SEQ ID NO: 118127 - RNA, 19 nt, Artificial Sequence
  Description of Artificial Sequence: Synthetic oligonucleotide
  Antisense strand to SEQ ID NO: 118126
uacucccaugcucaaucca

SEQ ID NO: 118128 - RNA, 19 nt, Artificial Sequence
  Description of Artificial Sequence: Synthetic oligonucleotide
  Sense strand starting at position 1335 of SEQ ID NO: 1503
gagaauucuuguguaagag

SEQ ID NO: 118129 - RNA, 19 nt, Artificial Sequence
  Description of Artificial Sequence: Synthetic oligonucleotide
  Antisense strand to SEQ ID NO: 118128
cucuuacacaagaauucuc

SEQ ID NO: 118130 - RNA, 19 nt, Artificial Sequence
  Description of Artificial Sequence: Synthetic oligonucleotide
  Sense strand starting at position 1336 of SEQ ID NO: 1503
agaauucuuguguaagagc

SEQ ID NO: 118131 - RNA, 19 nt, Artificial Sequence
  Description of Artificial Sequence: Synthetic oligonucleotide
  Antisense strand to SEQ ID NO: 118130
gcucuuacacaagaauucu

SEQ ID NO: 118132 - RNA, 19 nt, Artificial Sequence
  Description of Artificial Sequence: Synthetic oligonucleotide
  Sense strand starting at position 1347 of SEQ ID NO: 1503
guaagagcccgagaugaca

SEQ ID NO: 118133 - RNA, 19 nt, Artificial Sequence
  Description of Artificial Sequence: Synthetic oligonucleotide
  Antisense strand to SEQ ID NO: 118132
ugucaucucgggcucuuac

SEQ ID NO: 118134 - RNA, 19 nt, Artificial Sequence
  Description of Artificial Sequence: Synthetic oligonucleotide
  Sense strand starting at position 1466 of SEQ ID NO: 1503
agaagaagugguugaucuc

SEQ ID NO: 118135 - RNA, 19 nt, Artificial Sequence
  Description of Artificial Sequence: Synthetic oligonucleotide
  Antisense strand to SEQ ID NO: 118134
gagaucaaccacuucuucu

SEQ ID NO: 118136 - RNA, 19 nt, Artificial Sequence
  Description of Artificial Sequence: Synthetic oligonucleotide
  Sense strand starting at position 1526 of SEQ ID NO: 1503
gcaagaaaccaucgauaga

SEQ ID NO: 118137 - RNA, 19 nt, Artificial Sequence
  Description of Artificial Sequence: Synthetic oligonucleotide
  Antisense strand to SEQ ID NO: 118136
ucuaucgaugguuucuugc

SEQ ID NO: 118138 - RNA, 19 nt, Artificial Sequence
  Description of Artificial Sequence: Synthetic oligonucleotide
  Sense strand starting at position 1635 of SEQ ID NO: 1503
gcgaucauaggacaugagu

SEQ ID NO: 118139 - RNA, 19 nt, Artificial Sequence
  Description of Artificial Sequence: Synthetic oligonucleotide
  Antisense strand to SEQ ID NO: 118138
acucauguccuaugaucgc

SEQ ID NO: 118140 - RNA, 19 nt, Artificial Sequence
  Description of Artificial Sequence: Synthetic oligonucleotide
  Sense strand starting at position 1764 of SEQ ID NO: 1503
gggcacaaugguggaaaua

SEQ ID NO: 118141 - RNA, 19 nt, Artificial Sequence
  Description of Artificial Sequence: Synthetic oligonucleotide
  Antisense strand to SEQ ID NO: 118140
uauuuccaccauugugccc

SEQ ID NO: 118142 - RNA, 19 nt, Artificial Sequence
  Description of Artificial Sequence: Synthetic oligonucleotide
  Sense strand starting at position 1784 of SEQ ID NO: 1503
acaggaugucccugaggga

SEQ ID NO: 118143 - RNA, 19 nt, Artificial Sequence
  Description of Artificial Sequence: Synthetic oligonucleotide
  Antisense strand to SEQ ID NO: 118142
ucccucagggacauccugu

SEQ ID NO: 118144 - RNA, 19 nt, Artificial Sequence
  Description of Artificial Sequence: Synthetic oligonucleotide
  Sense strand starting at position 1844 of SEQ ID NO: 1503
agucuauguggaugagaau

SEQ ID NO: 118145 - RNA, 19 nt, Artificial Sequence
  Description of Artificial Sequence: Synthetic oligonucleotide
  Antisense strand to SEQ ID NO: 118144
auucucauccacauagacu

SEQ ID NO: 118146 - RNA, 19 nt, Artificial Sequence
  Description of Artificial Sequence: Synthetic oligonucleotide
  Sense strand starting at position 1850 of SEQ ID NO: 1503
uguggaugagaaugaucuu

SEQ ID NO: 118147 - RNA, 19 nt, Artificial Sequence
  Description of Artificial Sequence: Synthetic oligonucleotide
  Antisense strand to SEQ ID NO: 118146
aagaucauucucauccaca

SEQ ID NO: 118148 - RNA, 19 nt, Artificial Sequence
  Description of Artificial Sequence: Synthetic oligonucleotide
  Sense strand starting at position 1969 of SEQ ID NO: 1503
ucggcauacacggaauaau

SEQ ID NO: 118149 - RNA, 19 nt, Artificial Sequence
  Description of Artificial Sequence: Synthetic oligonucleotide
  Antisense strand to SEQ ID NO: 118148
auuauuccguguaugccga

SEQ ID NO: 118150 - RNA, 19 nt, Artificial Sequence
  Description of Artificial Sequence: Synthetic oligonucleotide
  Sense strand starting at position 2088 of SEQ ID NO: 1503
caaggucaagucgaucuua

SEQ ID NO: 118151 - RNA, 19 nt, Artificial Sequence
  Description of Artificial Sequence: Synthetic oligonucleotide
  Antisense strand to SEQ ID NO: 118150
uaagaucgacuugaccuug

SEQ ID NO: 118152 - RNA, 19 nt, Artificial Sequence
  Description of Artificial Sequence: Synthetic oligonucleotide
  Sense strand starting at position 2148 of SEQ ID NO: 1503
aggauugugcuacaucuca

SEQ ID NO: 118153 - RNA, 19 nt, Artificial Sequence
  Description of Artificial Sequence: Synthetic oligonucleotide
  Antisense strand to SEQ ID NO: 118152
ugagauguagcacaauccu

SEQ ID NO: 118154 - RNA, 19 nt, Artificial Sequence
  Description of Artificial Sequence: Synthetic oligonucleotide
  Sense strand starting at position 2417 of SEQ ID NO: 1503
uagaauccaguuugaagau

SEQ ID NO: 118155 - RNA, 19 nt, Artificial Sequence
  Description of Artificial Sequence: Synthetic oligonucleotide
  Antisense strand to SEQ ID NO: 118154
aucuucaaacuggauucua

SEQ ID NO: 118156 - RNA, 19 nt, Artificial Sequence
  Description of Artificial Sequence: Synthetic oligonucleotide
  Sense strand starting at position 2429 of SEQ ID NO: 1503
ugaagaucaccacgaguau

SEQ ID NO: 118157 - RNA, 19 nt, Artificial Sequence
  Description of Artificial Sequence: Synthetic oligonucleotide
  Antisense strand to SEQ ID NO: 118156
auacucguggugaucuuca

SEQ ID NO: 118158 - RNA, 19 nt, Artificial Sequence
  Description of Artificial Sequence: Synthetic oligonucleotide
  Sense strand starting at position 2433 of SEQ ID NO: 1503
gaucaccacgaguauauau

SEQ ID NO: 118159 - RNA, 19 nt, Artificial Sequence
  Description of Artificial Sequence: Synthetic oligonucleotide
  Antisense strand to SEQ ID NO: 118158
auauauacucguggugauc

SEQ ID NO: 118160 - RNA, 19 nt, Artificial Sequence
  Description of Artificial Sequence: Synthetic oligonucleotide
  Sense strand starting at position 2540 of SEQ ID NO: 1503
auguaucagguggaguauu

SEQ ID NO: 118161 - RNA, 19 nt, Artificial Sequence
  Description of Artificial Sequence: Synthetic oligonucleotide
  Antisense strand to SEQ ID NO: 118160
aauacuccaccugauacau

SEQ ID NO: 118162 - RNA, 19 nt, Artificial Sequence
  Description of Artificial Sequence: Synthetic oligonucleotide
  Sense strand starting at position 2651 of SEQ ID NO: 1503
ggucaagugguguuugcuu

SEQ ID NO: 118163 - RNA, 19 nt, Artificial Sequence
  Description of Artificial Sequence: Synthetic oligonucleotide
  Antisense strand to SEQ ID NO: 118162
aagcaaacaccacuugacc

SEQ ID NO: 118164 - RNA, 19 nt, Artificial Sequence
  Description of Artificial Sequence: Synthetic oligonucleotide
  Sense strand starting at position 2703 of SEQ ID NO: 1503
cauacaacucguuaaagug

SEQ ID NO: 118165 - RNA, 19 nt, Artificial Sequence
  Description of Artificial Sequence: Synthetic oligonucleotide
  Antisense strand to SEQ ID NO: 118164
cacuuuaacgaguuguaug

SEQ ID NO: 118166 - RNA, 19 nt, Artificial Sequence
  Description of Artificial Sequence: Synthetic oligonucleotide
  Sense strand starting at position 2927 of SEQ ID NO: 1503
agccaugaggcuuaugaag

SEQ ID NO: 118167 - RNA, 19 nt, Artificial Sequence
  Description of Artificial Sequence: Synthetic oligonucleotide
  Antisense strand to SEQ ID NO: 118166
cuucauaagccucauggcu

SEQ ID NO: 118168 - RNA, 19 nt, Artificial Sequence
  Description of Artificial Sequence: Synthetic oligonucleotide
  Sense strand starting at position 2962 of SEQ ID NO: 1503
acacgacugcuccaaauca

SEQ ID NO: 118169 - RNA, 19 nt, Artificial Sequence
  Description of Artificial Sequence: Synthetic oligonucleotide
  Antisense strand to SEQ ID NO: 118168
ugauuuggagcagucgugu

SEQ ID NO: 118170 - RNA, 19 nt, Artificial Sequence
  Description of Artificial Sequence: Synthetic oligonucleotide
  Sense strand starting at position 3193 of SEQ ID NO: 1503
uagaguuaucccugagaau

SEQ ID NO: 118171 - RNA, 19 nt, Artificial Sequence
  Description of Artificial Sequence: Synthetic oligonucleotide
  Antisense strand to SEQ ID NO: 118170
auucucagggauaacucua

SEQ ID NO: 118172 - RNA, 19 nt, Artificial Sequence
  Description of Artificial Sequence: Synthetic oligonucleotide
  Sense strand starting at position 3239 of SEQ ID NO: 1503
acaaguccuccagaguuaa

SEQ ID NO: 118173 - RNA, 19 nt, Artificial Sequence
  Description of Artificial Sequence: Synthetic oligonucleotide
  Antisense strand to SEQ ID NO: 118172
uuaacucuggaggacuugu

SEQ ID NO: 118174 - RNA, 19 nt, Artificial Sequence
  Description of Artificial Sequence: Synthetic oligonucleotide
  Sense strand starting at position 3457 of SEQ ID NO: 1503
ggaggaacauuguucuuua

SEQ ID NO: 118175 - RNA, 19 nt, Artificial Sequence
  Description of Artificial Sequence: Synthetic oligonucleotide
  Antisense strand to SEQ ID NO: 118174
uaaagaacaauguuccucc

SEQ ID NO: 118176 - RNA, 19 nt, Artificial Sequence
  Description of Artificial Sequence: Synthetic oligonucleotide
  Sense strand starting at position 3458 of SEQ ID NO: 1503
gaggaacauuguucuuuaa

SEQ ID NO: 118177 - RNA, 19 nt, Artificial Sequence
  Description of Artificial Sequence: Synthetic oligonucleotide
  Antisense strand to SEQ ID NO: 118176
uuaaagaacaauguuccuc

SEQ ID NO: 118178 - RNA, 19 nt, Artificial Sequence
  Description of Artificial Sequence: Synthetic oligonucleotide
  Sense strand starting at position 3541 of SEQ ID NO: 1503
auaaauauuucucaagagg

SEQ ID NO: 118179 - RNA, 19 nt, Artificial Sequence
  Description of Artificial Sequence: Synthetic oligonucleotide
  Antisense strand to SEQ ID NO: 118178
ccucuugagaaauauuuau

SEQ ID NO: 118180 - RNA, 19 nt, Artificial Sequence
  Description of Artificial Sequence: Synthetic oligonucleotide
  Sense strand starting at position 3587 of SEQ ID NO: 1503
ucugaaaggcccugaaaga

SEQ ID NO: 118181 - RNA, 19 nt, Artificial Sequence
  Description of Artificial Sequence: Synthetic oligonucleotide
  Antisense strand to SEQ ID NO: 118180
ucuuucagggccuuucaga

SEQ ID NO: 118182 - RNA, 19 nt, Artificial Sequence
  Description of Artificial Sequence: Synthetic oligonucleotide
  Sense strand starting at position 357 of SEQ ID NO: 1504
accacauggcaguaauuau

SEQ ID NO: 118183 - RNA, 19 nt, Artificial Sequence
  Description of Artificial Sequence: Synthetic oligonucleotide
  Antisense strand to SEQ ID NO: 118182
auaauuacugccauguggu

SEQ ID NO: 118184 - RNA, 19 nt, Artificial Sequence
  Description of Artificial Sequence: Synthetic oligonucleotide
  Sense strand starting at position 393 of SEQ ID NO: 1504
acuagacgccaucagaauu

SEQ ID NO: 118185 - RNA, 19 nt, Artificial Sequence
  Description of Artificial Sequence: Synthetic oligonucleotide
  Antisense strand to SEQ ID NO: 118184
aauucugauggcgucuagu

SEQ ID NO: 118186 - RNA, 19 nt, Artificial Sequence
  Description of Artificial Sequence: Synthetic oligonucleotide
  Sense strand starting at position 466 of SEQ ID NO: 1504
cucgguaaugauuagauau

SEQ ID NO: 118187 - RNA, 19 nt, Artificial Sequence
  Description of Artificial Sequence: Synthetic oligonucleotide
  Antisense strand to SEQ ID NO: 118186
auaucuaaucauuaccgag

SEQ ID NO: 118188 - RNA, 19 nt, Artificial Sequence
  Description of Artificial Sequence: Synthetic oligonucleotide
  Sense strand starting at position 493 of SEQ ID NO: 1504
gagcaugauuucuaagaug

SEQ ID NO: 118189 - RNA, 19 nt, Artificial Sequence
  Description of Artificial Sequence: Synthetic oligonucleotide
  Antisense strand to SEQ ID NO: 118188
caucuuagaaaucaugcuc

SEQ ID NO: 118190 - RNA, 19 nt, Artificial Sequence
  Description of Artificial Sequence: Synthetic oligonucleotide
  Sense strand starting at position 893 of SEQ ID NO: 1504
guuuccacacagugaaaga

SEQ ID NO: 118191 - RNA, 19 nt, Artificial Sequence
  Description of Artificial Sequence: Synthetic oligonucleotide
  Antisense strand to SEQ ID NO: 118190
ucuuucacuguguggaaac

SEQ ID NO: 118192 - RNA, 19 nt, Artificial Sequence
  Description of Artificial Sequence: Synthetic oligonucleotide
  Sense strand starting at position 986 of SEQ ID NO: 1504
uaaguaucugauggguaga

SEQ ID NO: 118193 - RNA, 19 nt, Artificial Sequence
  Description of Artificial Sequence: Synthetic oligonucleotide
  Antisense strand to SEQ ID NO: 118192
ucuacccaucagauacuua

SEQ ID NO: 118194 - RNA, 19 nt, Artificial Sequence
  Description of Artificial Sequence: Synthetic oligonucleotide
  Sense strand starting at position 988 of SEQ ID NO: 1504
aguaucugauggguagaga

SEQ ID NO: 118195 - RNA, 19 nt, Artificial Sequence
  Description of Artificial Sequence: Synthetic oligonucleotide
  Antisense strand to SEQ ID NO: 118194
ucucuacccaucagauacu

SEQ ID NO: 118196 - RNA, 19 nt, Artificial Sequence
  Description of Artificial Sequence: Synthetic oligonucleotide
  Sense strand starting at position 1139 of SEQ ID NO: 1504
ccggagugaggaugguaua

SEQ ID NO: 118197 - RNA, 19 nt, Artificial Sequence
  Description of Artificial Sequence: Synthetic oligonucleotide
  Antisense strand to SEQ ID NO: 118196
uauaccauccucacuccgg

SEQ ID NO: 118198 - RNA, 19 nt, Artificial Sequence
  Description of Artificial Sequence: Synthetic oligonucleotide
  Sense strand starting at position 1343 of SEQ ID NO: 1504
uugaaaugaucgucacagg

SEQ ID NO: 118199 - RNA, 19 nt, Artificial Sequence
  Description of Artificial Sequence: Synthetic oligonucleotide
  Antisense strand to SEQ ID NO: 118198
ccugugacgaucauuucaa

SEQ ID NO: 118200 - RNA, 19 nt, Artificial Sequence
  Description of Artificial Sequence: Synthetic oligonucleotide
  Sense strand starting at position 1403 of SEQ ID NO: 1504
cauagagugaggugucuga

SEQ ID NO: 118201 - RNA, 19 nt, Artificial Sequence
  Description of Artificial Sequence: Synthetic oligonucleotide
  Antisense strand to SEQ ID NO: 118200
ucagacaccucacucuaug

SEQ ID NO: 118202 - RNA, 19 nt, Artificial Sequence
  Description of Artificial Sequence: Synthetic oligonucleotide
  Sense strand starting at position 1666 of SEQ ID NO: 1504
gcuagugucagauagagga

SEQ ID NO: 118203 - RNA, 19 nt, Artificial Sequence
  Description of Artificial Sequence: Synthetic oligonucleotide
  Antisense strand to SEQ ID NO: 118202
uccucuaucugacacuagc

SEQ ID NO: 118204 - RNA, 19 nt, Artificial Sequence
  Description of Artificial Sequence: Synthetic oligonucleotide
  Sense strand starting at position 1670 of SEQ ID NO: 1504
gugucagauagaggaacau

SEQ ID NO: 118205 - RNA, 19 nt, Artificial Sequence
  Description of Artificial Sequence: Synthetic oligonucleotide
  Antisense strand to SEQ ID NO: 118204
auguuccucuaucugacac

SEQ ID NO: 118206 - RNA, 19 nt, Artificial Sequence
  Description of Artificial Sequence: Synthetic oligonucleotide
  Sense strand starting at position 1907 of SEQ ID NO: 1504
uaaguagagcuggauguuu

SEQ ID NO: 118207 - RNA, 19 nt, Artificial Sequence
  Description of Artificial Sequence: Synthetic oligonucleotide
  Antisense strand to SEQ ID NO: 118206
aaacauccagcucuacuua

SEQ ID NO: 118208 - RNA, 19 nt, Artificial Sequence
  Description of Artificial Sequence: Synthetic oligonucleotide
  Sense strand starting at position 1918 of SEQ ID NO: 1504
ggauguuuggauugucuga

SEQ ID NO: 118209 - RNA, 19 nt, Artificial Sequence
  Description of Artificial Sequence: Synthetic oligonucleotide
  Antisense strand to SEQ ID NO: 118208
ucagacaauccaaacaucc

SEQ ID NO: 118210 - RNA, 19 nt, Artificial Sequence
  Description of Artificial Sequence: Synthetic oligonucleotide
  Sense strand starting at position 1920 of SEQ ID NO: 1504
auguuuggauugucugaag

SEQ ID NO: 118211 - RNA, 19 nt, Artificial Sequence
  Description of Artificial Sequence: Synthetic oligonucleotide
  Antisense strand to SEQ ID NO: 118210
cuucagacaauccaaacau

SEQ ID NO: 118212 - RNA, 19 nt, Artificial Sequence
  Description of Artificial Sequence: Synthetic oligonucleotide
  Sense strand starting at position 1940 of SEQ ID NO: 1504
gucccaugaggaugaaauc

SEQ ID NO: 118213 - RNA, 19 nt, Artificial Sequence
  Description of Artificial Sequence: Synthetic oligonucleotide
  Antisense strand to SEQ ID NO: 118212
gauuucauccucaugggac

SEQ ID NO: 118214 - RNA, 19 nt, Artificial Sequence
  Description of Artificial Sequence: Synthetic oligonucleotide
  Sense strand starting at position 1989 of SEQ ID NO: 1504
gauguuggccaugagguuu

SEQ ID NO: 118215 - RNA, 19 nt, Artificial Sequence
  Description of Artificial Sequence: Synthetic oligonucleotide
  Antisense strand to SEQ ID NO: 118214
aaaccucauggccaacauc

SEQ ID NO: 118216 - RNA, 19 nt, Artificial Sequence
  Description of Artificial Sequence: Synthetic oligonucleotide
  Sense strand starting at position 2043 of SEQ ID NO: 1504
uaacgcgucccuuuguaau

SEQ ID NO: 118217 - RNA, 19 nt, Artificial Sequence
  Description of Artificial Sequence: Synthetic oligonucleotide
  Antisense strand to SEQ ID NO: 118216
auuacaaagggacgcguua

SEQ ID NO: 118218 - RNA, 19 nt, Artificial Sequence
  Description of Artificial Sequence: Synthetic oligonucleotide
  Sense strand starting at position 2081 of SEQ ID NO: 1504
acauuuguguaugcucauu

SEQ ID NO: 118219 - RNA, 19 nt, Artificial Sequence
  Description of Artificial Sequence: Synthetic oligonucleotide
  Antisense strand to SEQ ID NO: 118218
aaugagcauacacaaaugu

SEQ ID NO: 118220 - RNA, 19 nt, Artificial Sequence
  Description of Artificial Sequence: Synthetic oligonucleotide
  Sense strand starting at position 2191 of SEQ ID NO: 1504
gccagaagaauugguaacu

SEQ ID NO: 118221 - RNA, 19 nt, Artificial Sequence
  Description of Artificial Sequence: Synthetic oligonucleotide
  Antisense strand to SEQ ID NO: 118220
aguuaccaauucuucuggc

SEQ ID NO: 118222 - RNA, 19 nt, Artificial Sequence
  Description of Artificial Sequence: Synthetic oligonucleotide
  Sense strand starting at position 2197 of SEQ ID NO: 1504
agaauugguaacugauagu

SEQ ID NO: 118223 - RNA, 19 nt, Artificial Sequence
  Description of Artificial Sequence: Synthetic oligonucleotide
  Antisense strand to SEQ ID NO: 118222
acuaucaguuaccaauucu

SEQ ID NO: 118224 - RNA, 19 nt, Artificial Sequence
  Description of Artificial Sequence: Synthetic oligonucleotide
  Sense strand starting at position 2342 of SEQ ID NO: 1504
gcaaacuccuuauuguaga

SEQ ID NO: 118225 - RNA, 19 nt, Artificial Sequence
  Description of Artificial Sequence: Synthetic oligonucleotide
  Antisense strand to SEQ ID NO: 118224
ucuacaauaaggaguuugc

SEQ ID NO: 118226 - RNA, 19 nt, Artificial Sequence
  Description of Artificial Sequence: Synthetic oligonucleotide
  Sense strand starting at position 2367 of SEQ ID NO: 1504
gucauagacagcugaauug

SEQ ID NO: 118227 - RNA, 19 nt, Artificial Sequence
  Description of Artificial Sequence: Synthetic oligonucleotide
  Antisense strand to SEQ ID NO: 118226
caauucagcugucuaugac

SEQ ID NO: 118228 - RNA, 19 nt, Artificial Sequence
  Description of Artificial Sequence: Synthetic oligonucleotide
  Sense strand starting at position 2614 of SEQ ID NO: 1504
cccuuuagacaucgagaga

SEQ ID NO: 118229 - RNA, 19 nt, Artificial Sequence
  Description of Artificial Sequence: Synthetic oligonucleotide
  Antisense strand to SEQ ID NO: 118228
ucucucgaugucuaaaggg

SEQ ID NO: 118230 - RNA, 19 nt, Artificial Sequence
  Description of Artificial Sequence: Synthetic oligonucleotide
  Sense strand starting at position 2797 of SEQ ID NO: 1504
uacaguuuccgaugaauaa

SEQ ID NO: 118231 - RNA, 19 nt, Artificial Sequence
  Description of Artificial Sequence: Synthetic oligonucleotide
  Antisense strand to SEQ ID NO: 118230
uuauucaucggaaacugua

SEQ ID NO: 118232 - RNA, 19 nt, Artificial Sequence
  Description of Artificial Sequence: Synthetic oligonucleotide
  Sense strand starting at position 2824 of SEQ ID NO: 1504
acucuuaguguagauguua

SEQ ID NO: 118233 - RNA, 19 nt, Artificial Sequence
  Description of Artificial Sequence: Synthetic oligonucleotide
  Antisense strand to SEQ ID NO: 118232
uaacaucuacacuaagagu

SEQ ID NO: 118234 - RNA, 19 nt, Artificial Sequence
  Description of Artificial Sequence: Synthetic oligonucleotide
  Sense strand starting at position 2877 of SEQ ID NO: 1504
aagagauuguugcuacuau

SEQ ID NO: 118235 - RNA, 19 nt, Artificial Sequence
  Description of Artificial Sequence: Synthetic oligonucleotide
  Antisense strand to SEQ ID NO: 118234
auaguagcaacaaucucuu

SEQ ID NO: 118236 - RNA, 19 nt, Artificial Sequence
  Description of Artificial Sequence: Synthetic oligonucleotide
  Sense strand starting at position 3166 of SEQ ID NO: 1504
uggagacuccuauguccuu

SEQ ID NO: 118237 - RNA, 19 nt, Artificial Sequence
  Description of Artificial Sequence: Synthetic oligonucleotide
  Antisense strand to SEQ ID NO: 118236
aaggacauaggagucucca

SEQ ID NO: 118238 - RNA, 19 nt, Artificial Sequence
  Description of Artificial Sequence: Synthetic oligonucleotide
  Sense strand starting at position 3244 of SEQ ID NO: 1504
cauuaaaucucagcgagga

SEQ ID NO: 118239 - RNA, 19 nt, Artificial Sequence
  Description of Artificial Sequence: Synthetic oligonucleotide
  Antisense strand to SEQ ID NO: 118238
uccucgcugagauuuaaug

SEQ ID NO: 118240 - RNA, 19 nt, Artificial Sequence
  Description of Artificial Sequence: Synthetic oligonucleotide
  Sense strand starting at position 3245 of SEQ ID NO: 1504
auuaaaucucagcgaggaa

SEQ ID NO: 118241 - RNA, 19 nt, Artificial Sequence
  Description of Artificial Sequence: Synthetic oligonucleotide
  Antisense strand to SEQ ID NO: 118240
uuccucgcugagauuuaau

SEQ ID NO: 118242 - RNA, 19 nt, Artificial Sequence
  Description of Artificial Sequence: Synthetic oligonucleotide
  Sense strand starting at position 3248 of SEQ ID NO: 1504
aaaucucagcgaggaagaa

SEQ ID NO: 118243 - RNA, 19 nt, Artificial Sequence
  Description of Artificial Sequence: Synthetic oligonucleotide
  Antisense strand to SEQ ID NO: 118242
uucuuccucgcugagauuu

SEQ ID NO: 118244 - RNA, 19 nt, Artificial Sequence
  Description of Artificial Sequence: Synthetic oligonucleotide
  Sense strand starting at position 3452 of SEQ ID NO: 1504
cuguguuauacugacgaug

SEQ ID NO: 118245 - RNA, 19 nt, Artificial Sequence
  Description of Artificial Sequence: Synthetic oligonucleotide
  Antisense strand to SEQ ID NO: 118244
caucgucaguauaacacag

SEQ ID NO: 118246 - RNA, 19 nt, Artificial Sequence
  Description of Artificial Sequence: Synthetic oligonucleotide
  Sense strand starting at position 3455 of SEQ ID NO: 1504
uguuauacugacgaugaau

SEQ ID NO: 118247 - RNA, 19 nt, Artificial Sequence
  Description of Artificial Sequence: Synthetic oligonucleotide
  Antisense strand to SEQ ID NO: 118246
auucaucgucaguauaaca

SEQ ID NO: 118248 - RNA, 19 nt, Artificial Sequence
  Description of Artificial Sequence: Synthetic oligonucleotide
  Sense strand starting at position 3526 of SEQ ID NO: 1504
cuguguuauaugcagaaga

SEQ ID NO: 118249 - RNA, 19 nt, Artificial Sequence
  Description of Artificial Sequence: Synthetic oligonucleotide
  Antisense strand to SEQ ID NO: 118248
ucuucugcauauaacacag

SEQ ID NO: 118250 - RNA, 19 nt, Artificial Sequence
  Description of Artificial Sequence: Synthetic oligonucleotide
  Sense strand starting at position 3528 of SEQ ID NO: 1504
guguuauaugcagaagaug

SEQ ID NO: 118251 - RNA, 19 nt, Artificial Sequence
  Description of Artificial Sequence: Synthetic oligonucleotide
  Antisense strand to SEQ ID NO: 118250
caucuucugcauauaacac

SEQ ID NO: 118252 - RNA, 19 nt, Artificial Sequence
  Description of Artificial Sequence: Synthetic oligonucleotide
  Sense strand starting at position 3561 of SEQ ID NO: 1504
ugaacuugagugcacuuaa

SEQ ID NO: 118253 - RNA, 19 nt, Artificial Sequence
  Description of Artificial Sequence: Synthetic oligonucleotide
  Antisense strand to SEQ ID NO: 118252
uuaagugcacucaaguuca

SEQ ID NO: 118254 - RNA, 19 nt, Artificial Sequence
  Description of Artificial Sequence: Synthetic oligonucleotide
  Sense strand starting at position 3580 of SEQ ID NO: 1504
ggaggucacagucagucua

SEQ ID NO: 118255 - RNA, 19 nt, Artificial Sequence
  Description of Artificial Sequence: Synthetic oligonucleotide
  Antisense strand to SEQ ID NO: 118254
uagacugacugugaccucc

SEQ ID NO: 118256 - RNA, 19 nt, Artificial Sequence
  Description of Artificial Sequence: Synthetic oligonucleotide
  Sense strand starting at position 3836 of SEQ ID NO: 1504
ggaagacuuuagcugugau

SEQ ID NO: 118257 - RNA, 19 nt, Artificial Sequence
  Description of Artificial Sequence: Synthetic oligonucleotide
  Antisense strand to SEQ ID NO: 118256
aucacagcuaaagucuucc

SEQ ID NO: 118258 - RNA, 19 nt, Artificial Sequence
  Description of Artificial Sequence: Synthetic oligonucleotide
  Sense strand starting at position 3852 of SEQ ID NO: 1504
gauuaugaugcagggacau

SEQ ID NO: 118259 - RNA, 19 nt, Artificial Sequence
  Description of Artificial Sequence: Synthetic oligonucleotide
  Antisense strand to SEQ ID NO: 118258
augucccugcaucauaauc

SEQ ID NO: 118260 - RNA, 19 nt, Artificial Sequence
  Description of Artificial Sequence: Synthetic oligonucleotide
  Sense strand starting at position 3973 of SEQ ID NO: 1504
ugcuucggugcuuuaauau

SEQ ID NO: 118261 - RNA, 19 nt, Artificial Sequence
  Description of Artificial Sequence: Synthetic oligonucleotide
  Antisense strand to SEQ ID NO: 118260
auauuaaagcaccgaagca

SEQ ID NO: 118262 - RNA, 19 nt, Artificial Sequence
  Description of Artificial Sequence: Synthetic oligonucleotide
  Sense strand starting at position 3959 of SEQ ID NO: 1505
ucauuuaugcgaugcaucu

SEQ ID NO: 118263 - RNA, 19 nt, Artificial Sequence
  Description of Artificial Sequence: Synthetic oligonucleotide
  Antisense strand to SEQ ID NO: 118262
agaugcaucgcauaaauga

SEQ ID NO: 118264 - RNA, 19 nt, Artificial Sequence
  Description of Artificial Sequence: Synthetic oligonucleotide
  Sense strand starting at position 3724 of SEQ ID NO: 1505
aauugagaugaguguuuau

SEQ ID NO: 118265 - RNA, 19 nt, Artificial Sequence
  Description of Artificial Sequence: Synthetic oligonucleotide
  Antisense strand to SEQ ID NO: 118264
auaaacacucaucucaauu

SEQ ID NO: 118266 - RNA, 19 nt, Artificial Sequence
  Description of Artificial Sequence: Synthetic oligonucleotide
  Sense strand starting at position 3720 of SEQ ID NO: 1505
agggaauugagaugagugu

SEQ ID NO: 118267 - RNA, 19 nt, Artificial Sequence
  Description of Artificial Sequence: Synthetic oligonucleotide
  Antisense strand to SEQ ID NO: 118266
acacucaucucaauucccu

SEQ ID NO: 118268 - RNA, 19 nt, Artificial Sequence
  Description of Artificial Sequence: Synthetic oligonucleotide
  Sense strand starting at position 3296 of SEQ ID NO: 1505
gacugaggcauguggaaau

SEQ ID NO: 118269 - RNA, 19 nt, Artificial Sequence
  Description of Artificial Sequence: Synthetic oligonucleotide
  Antisense strand to SEQ ID NO: 118268
auuuccacaugccucaguc

SEQ ID NO: 118270 - RNA, 19 nt, Artificial Sequence
  Description of Artificial Sequence: Synthetic oligonucleotide
  Sense strand starting at position 3294 of SEQ ID NO: 1505
gugacugaggcauguggaa

SEQ ID NO: 118271 - RNA, 19 nt, Artificial Sequence
  Description of Artificial Sequence: Synthetic oligonucleotide
  Antisense strand to SEQ ID NO: 118270
uuccacaugccucagucac

SEQ ID NO: 118272 - RNA, 19 nt, Artificial Sequence
  Description of Artificial Sequence: Synthetic oligonucleotide
  Sense strand starting at position 3288 of SEQ ID NO: 1505
cuaauagugacugaggcau

SEQ ID NO: 118273 - RNA, 19 nt, Artificial Sequence
  Description of Artificial Sequence: Synthetic oligonucleotide
  Antisense strand to SEQ ID NO: 118272
augccucagucacuauuag

SEQ ID NO: 118274 - RNA, 19 nt, Artificial Sequence
  Description of Artificial Sequence: Synthetic oligonucleotide
  Sense strand starting at position 3251 of SEQ ID NO: 1505
uguacugcagguuagagaa

SEQ ID NO: 118275 - RNA, 19 nt, Artificial Sequence
  Description of Artificial Sequence: Synthetic oligonucleotide
  Antisense strand to SEQ ID NO: 118274
uucucuaaccugcaguaca

SEQ ID NO: 118276 - RNA, 19 nt, Artificial Sequence
  Description of Artificial Sequence: Synthetic oligonucleotide
  Sense strand starting at position 3226 of SEQ ID NO: 1505
gagguuuggucauccucag

SEQ ID NO: 118277 - RNA, 19 nt, Artificial Sequence
  Description of Artificial Sequence: Synthetic oligonucleotide
  Antisense strand to SEQ ID NO: 118276
cugaggaugaccaaaccuc

SEQ ID NO: 118278 - RNA, 19 nt, Artificial Sequence
  Description of Artificial Sequence: Synthetic oligonucleotide
  Sense strand starting at position 3220 of SEQ ID NO: 1505
augacugagguuuggucau

SEQ ID NO: 118279 - RNA, 19 nt, Artificial Sequence
  Description of Artificial Sequence: Synthetic oligonucleotide
  Antisense strand to SEQ ID NO: 118278
augaccaaaccucagucau

SEQ ID NO: 118280 - RNA, 19 nt, Artificial Sequence
  Description of Artificial Sequence: Synthetic oligonucleotide
  Sense strand starting at position 3209 of SEQ ID NO: 1505
ucaggagcuccaugacuga

SEQ ID NO: 118281 - RNA, 19 nt, Artificial Sequence
  Description of Artificial Sequence: Synthetic oligonucleotide
  Antisense strand to SEQ ID NO: 118280
ucagucauggagcuccuga

SEQ ID NO: 118282 - RNA, 19 nt, Artificial Sequence
  Description of Artificial Sequence: Synthetic oligonucleotide
  Sense strand starting at position 2601 of SEQ ID NO: 1505
gguugcauuccauaaguag

SEQ ID NO: 118283 - RNA, 19 nt, Artificial Sequence
  Description of Artificial Sequence: Synthetic oligonucleotide
  Antisense strand to SEQ ID NO: 118282
cuacuuauggaaugcaacc

SEQ ID NO: 118284 - RNA, 19 nt, Artificial Sequence
  Description of Artificial Sequence: Synthetic oligonucleotide
  Sense strand starting at position 2551 of SEQ ID NO: 1505
guccacuuuccucacgaaa

SEQ ID NO: 118285 - RNA, 19 nt, Artificial Sequence
  Description of Artificial Sequence: Synthetic oligonucleotide
  Antisense strand to SEQ ID NO: 118284
uuucgugaggaaaguggac

SEQ ID NO: 118286 - RNA, 19 nt, Artificial Sequence
  Description of Artificial Sequence: Synthetic oligonucleotide
  Sense strand starting at position 2550 of SEQ ID NO: 1505
aguccacuuuccucacgaa

SEQ ID NO: 118287 - RNA, 19 nt, Artificial Sequence
  Description of Artificial Sequence: Synthetic oligonucleotide
  Antisense strand to SEQ ID NO: 118286
uucgugaggaaaguggacu

SEQ ID NO: 118288 - RNA, 19 nt, Artificial Sequence
  Description of Artificial Sequence: Synthetic oligonucleotide
  Sense strand starting at position 2432 of SEQ ID NO: 1505
ggcugauaagguuaauauu

SEQ ID NO: 118289 - RNA, 19 nt, Artificial Sequence
  Description of Artificial Sequence: Synthetic oligonucleotide
  Antisense strand to SEQ ID NO: 118288
aauauuaaccuuaucagcc

SEQ ID NO: 118290 - RNA, 19 nt, Artificial Sequence
  Description of Artificial Sequence: Synthetic oligonucleotide
  Sense strand starting at position 2423 of SEQ ID NO: 1505
ggaaaucacggcugauaag

SEQ ID NO: 118291 - RNA, 19 nt, Artificial Sequence
  Description of Artificial Sequence: Synthetic oligonucleotide
  Antisense strand to SEQ ID NO: 118290
cuuaucagccgugauuucc

SEQ ID NO: 118292 - RNA, 19 nt, Artificial Sequence
  Description of Artificial Sequence: Synthetic oligonucleotide
  Sense strand starting at position 2420 of SEQ ID NO: 1505
gauggaaaucacggcugau

SEQ ID NO: 118293 - RNA, 19 nt, Artificial Sequence
  Description of Artificial Sequence: Synthetic oligonucleotide
  Antisense strand to SEQ ID NO: 118292
aucagccgugauuuccauc

SEQ ID NO: 118294 - RNA, 19 nt, Artificial Sequence
  Description of Artificial Sequence: Synthetic oligonucleotide
  Sense strand starting at position 2338 of SEQ ID NO: 1505
acguuaggucuguaacaca

SEQ ID NO: 118295 - RNA, 19 nt, Artificial Sequence
  Description of Artificial Sequence: Synthetic oligonucleotide
  Antisense strand to SEQ ID NO: 118294
uguguuacagaccuaacgu

SEQ ID NO: 118296 - RNA, 19 nt, Artificial Sequence
  Description of Artificial Sequence: Synthetic oligonucleotide
  Sense strand starting at position 2311 of SEQ ID NO: 1505
augguuagagacugaagua

SEQ ID NO: 118297 - RNA, 19 nt, Artificial Sequence
  Description of Artificial Sequence: Synthetic oligonucleotide
  Antisense strand to SEQ ID NO: 118296
uacuucagucucuaaccau

SEQ ID NO: 118298 - RNA, 19 nt, Artificial Sequence
  Description of Artificial Sequence: Synthetic oligonucleotide
  Sense strand starting at position 2307 of SEQ ID NO: 1505
ugggaugguuagagacuga

SEQ ID NO: 118299 - RNA, 19 nt, Artificial Sequence
  Description of Artificial Sequence: Synthetic oligonucleotide
  Antisense strand to SEQ ID NO: 118298
ucagucucuaaccauccca

SEQ ID NO: 118300 - RNA, 19 nt, Artificial Sequence
  Description of Artificial Sequence: Synthetic oligonucleotide
  Sense strand starting at position 2249 of SEQ ID NO: 1505
agguacacucuaugucuua

SEQ ID NO: 118301 - RNA, 19 nt, Artificial Sequence
  Description of Artificial Sequence: Synthetic oligonucleotide
  Antisense strand to SEQ ID NO: 118300
uaagacauagaguguaccu

SEQ ID NO: 118302 - RNA, 19 nt, Artificial Sequence
  Description of Artificial Sequence: Synthetic oligonucleotide
  Sense strand starting at position 2183 of SEQ ID NO: 1505
gcuaaagugaacuacgaaa

SEQ ID NO: 118303 - RNA, 19 nt, Artificial Sequence
  Description of Artificial Sequence: Synthetic oligonucleotide
  Antisense strand to SEQ ID NO: 118302
uuucguaguucacuuuagc

SEQ ID NO: 118304 - RNA, 19 nt, Artificial Sequence
  Description of Artificial Sequence: Synthetic oligonucleotide
  Sense strand starting at position 2168 of SEQ ID NO: 1505
guaucuuggccacaagcua

SEQ ID NO: 118305 - RNA, 19 nt, Artificial Sequence
  Description of Artificial Sequence: Synthetic oligonucleotide
  Antisense strand to SEQ ID NO: 118304
uagcuuguggccaagauac

SEQ ID NO: 118306 - RNA, 19 nt, Artificial Sequence
  Description of Artificial Sequence: Synthetic oligonucleotide
  Sense strand starting at position 2089 of SEQ ID NO: 1505
agacaugugcuuugaauua

SEQ ID NO: 118307 - RNA, 19 nt, Artificial Sequence
  Description of Artificial Sequence: Synthetic oligonucleotide
  Antisense strand to SEQ ID NO: 118306
uaauucaaagcacaugucu

SEQ ID NO: 118308 - RNA, 19 nt, Artificial Sequence
  Description of Artificial Sequence: Synthetic oligonucleotide
  Sense strand starting at position 2087 of SEQ ID NO: 1505
uaagacaugugcuuugaau

SEQ ID NO: 118309 - RNA, 19 nt, Artificial Sequence
  Description of Artificial Sequence: Synthetic oligonucleotide
  Antisense strand to SEQ ID NO: 118308
auucaaagcacaugucuua

SEQ ID NO: 118310 - RNA, 19 nt, Artificial Sequence
  Description of Artificial Sequence: Synthetic oligonucleotide
  Sense strand starting at position 911 of SEQ ID NO: 1505
aaacgccacguauaagaaa

SEQ ID NO: 118311 - RNA, 19 nt, Artificial Sequence
  Description of Artificial Sequence: Synthetic oligonucleotide
  Antisense strand to SEQ ID NO: 118310
uuucuuauacguggcguuu

SEQ ID NO: 118312 - RNA, 19 nt, Artificial Sequence
  Description of Artificial Sequence: Synthetic oligonucleotide
  Sense strand starting at position 769 of SEQ ID NO: 1505
gcucaaugaaccugggaug

SEQ ID NO: 118313 - RNA, 19 nt, Artificial Sequence
  Description of Artificial Sequence: Synthetic oligonucleotide
  Antisense strand to SEQ ID NO: 118312
caucccagguucauugagc

SEQ ID NO: 118314 - RNA, 19 nt, Artificial Sequence
  Description of Artificial Sequence: Synthetic oligonucleotide
  Sense strand starting at position 697 of SEQ ID NO: 1505
cuaggauucuaagucuuua

SEQ ID NO: 118315 - RNA, 19 nt, Artificial Sequence
  Description of Artificial Sequence: Synthetic oligonucleotide
  Antisense strand to SEQ ID NO: 118314
uaaagacuuagaauccuag

SEQ ID NO: 118316 - RNA, 19 nt, Artificial Sequence
  Description of Artificial Sequence: Synthetic oligonucleotide
  Sense strand starting at position 637 of SEQ ID NO: 1505
cgagguuuacaauguauug

SEQ ID NO: 118317 - RNA, 19 nt, Artificial Sequence
  Description of Artificial Sequence: Synthetic oligonucleotide
  Antisense strand to SEQ ID NO: 118316
caauacauuguaaaccucg

SEQ ID NO: 118318 - RNA, 19 nt, Artificial Sequence
  Description of Artificial Sequence: Synthetic oligonucleotide
  Sense strand starting at position 530 of SEQ ID NO: 1505
guguuuacacuacaaaguu

SEQ ID NO: 118319 - RNA, 19 nt, Artificial Sequence
  Description of Artificial Sequence: Synthetic oligonucleotide
  Antisense strand to SEQ ID NO: 118318
aacuuuguaguguaaacac

SEQ ID NO: 118320 - RNA, 19 nt, Artificial Sequence
  Description of Artificial Sequence: Synthetic oligonucleotide
  Sense strand starting at position 528 of SEQ ID NO: 1505
ugguguuuacacuacaaag

SEQ ID NO: 118321 - RNA, 19 nt, Artificial Sequence
  Description of Artificial Sequence: Synthetic oligonucleotide
  Antisense strand to SEQ ID NO: 118320
cuuuguaguguaaacacca

SEQ ID NO: 118322 - RNA, 19 nt, Artificial Sequence
  Description of Artificial Sequence: Synthetic oligonucleotide
  Sense strand starting at position 504 of SEQ ID NO: 1505
uccaauggccaaugcuaaa

SEQ ID NO: 118323 - RNA, 19 nt, Artificial Sequence
  Description of Artificial Sequence: Synthetic oligonucleotide
  Antisense strand to SEQ ID NO: 118322
uuuagcauuggccauugga

SEQ ID NO: 118324 - RNA, 19 nt, Artificial Sequence
  Description of Artificial Sequence: Synthetic oligonucleotide
  Sense strand starting at position 375 of SEQ ID NO: 1505
guagaccauugucuggaau

SEQ ID NO: 118325 - RNA, 19 nt, Artificial Sequence
  Description of Artificial Sequence: Synthetic oligonucleotide
  Antisense strand to SEQ ID NO: 118324
auuccagacaauggucuac

SEQ ID NO: 118326 - RNA, 19 nt, Artificial Sequence
  Description of Artificial Sequence: Synthetic oligonucleotide
  Sense strand starting at position 374 of SEQ ID NO: 1505
aguagaccauugucuggaa

SEQ ID NO: 118327 - RNA, 19 nt, Artificial Sequence
  Description of Artificial Sequence: Synthetic oligonucleotide
  Antisense strand to SEQ ID NO: 118326
uuccagacaauggucuacu

SEQ ID NO: 118328 - RNA, 19 nt, Artificial Sequence
  Description of Artificial Sequence: Synthetic oligonucleotide
  Sense strand starting at position 214 of SEQ ID NO: 1505
accuuuguagcaugauaua

SEQ ID NO: 118329 - RNA, 19 nt, Artificial Sequence
  Description of Artificial Sequence: Synthetic oligonucleotide
  Antisense strand to SEQ ID NO: 118328
uauaucaugcuacaaaggu

SEQ ID NO: 118330 - RNA, 19 nt, Artificial Sequence
  Description of Artificial Sequence: Synthetic oligonucleotide
  Sense strand starting at position 194 of SEQ ID NO: 1505
cucauagauuuacagaagu

SEQ ID NO: 118331 - RNA, 19 nt, Artificial Sequence
  Description of Artificial Sequence: Synthetic oligonucleotide
  Antisense strand to SEQ ID NO: 118330
acuucuguaaaucuaugag

SEQ ID NO: 118332 - RNA, 19 nt, Artificial Sequence
  Description of Artificial Sequence: Synthetic oligonucleotide
  Sense strand starting at position 184 of SEQ ID NO: 1505
ugaucugaugcucauagau

SEQ ID NO: 118333 - RNA, 19 nt, Artificial Sequence
  Description of Artificial Sequence: Synthetic oligonucleotide
  Antisense strand to SEQ ID NO: 118332
aucuaugagcaucagauca

SEQ ID NO: 118334 - RNA, 19 nt, Artificial Sequence
  Description of Artificial Sequence: Synthetic oligonucleotide
  Sense strand starting at position 183 of SEQ ID NO: 1505
gugaucugaugcucauaga

SEQ ID NO: 118335 - RNA, 19 nt, Artificial Sequence
  Description of Artificial Sequence: Synthetic oligonucleotide
  Antisense strand to SEQ ID NO: 118334
ucuaugagcaucagaucac

SEQ ID NO: 118336 - RNA, 19 nt, Artificial Sequence
  Description of Artificial Sequence: Synthetic oligonucleotide
  Sense strand starting at position 177 of SEQ ID NO: 1505
augauagugaucugaugcu

SEQ ID NO: 118337 - RNA, 19 nt, Artificial Sequence
  Description of Artificial Sequence: Synthetic oligonucleotide
  Antisense strand to SEQ ID NO: 118336
agcaucagaucacuaucau

SEQ ID NO: 118338 - RNA, 19 nt, Artificial Sequence
  Description of Artificial Sequence: Synthetic oligonucleotide
  Sense strand starting at position 129 of SEQ ID NO: 1505
ucucacguuccagaaauac

SEQ ID NO: 118339 - RNA, 19 nt, Artificial Sequence
  Description of Artificial Sequence: Synthetic oligonucleotide
  Antisense strand to SEQ ID NO: 118338
guauuucuggaacgugaga

SEQ ID NO: 118340 - RNA, 19 nt, Artificial Sequence
  Description of Artificial Sequence: Synthetic oligonucleotide
  Sense strand starting at position 95 of SEQ ID NO: 1505
ugcauauuagaacaaaugu

SEQ ID NO: 118341 - RNA, 19 nt, Artificial Sequence
  Description of Artificial Sequence: Synthetic oligonucleotide
  Antisense strand to SEQ ID NO: 118340
acauuuguucuaauaugca

SEQ ID NO: 118342 - RNA, 19 nt, Artificial Sequence
  Description of Artificial Sequence: Synthetic oligonucleotide
  Sense strand starting at position 1 of SEQ ID NO: 1506
gauauccagucucugguua

SEQ ID NO: 118343 - RNA, 19 nt, Artificial Sequence
  Description of Artificial Sequence: Synthetic oligonucleotide
  Antisense strand to SEQ ID NO: 118342
uaaccagagacuggauauc

SEQ ID NO: 118344 - RNA, 19 nt, Artificial Sequence
  Description of Artificial Sequence: Synthetic oligonucleotide
  Sense strand starting at position 6 of SEQ ID NO: 1506
ccagucucugguuacaauu

SEQ ID NO: 118345 - RNA, 19 nt, Artificial Sequence
  Description of Artificial Sequence: Synthetic oligonucleotide
  Antisense strand to SEQ ID NO: 118344
aauuguaaccagagacugg

SEQ ID NO: 118346 - RNA, 19 nt, Artificial Sequence
  Description of Artificial Sequence: Synthetic oligonucleotide
  Sense strand starting at position 121 of SEQ ID NO: 1506
uuuagaaggugucccaaau

SEQ ID NO: 118347 - RNA, 19 nt, Artificial Sequence
  Description of Artificial Sequence: Synthetic oligonucleotide
  Antisense strand to SEQ ID NO: 118346
auuugggacaccuucuaaa

SEQ ID NO: 118348 - RNA, 19 nt, Artificial Sequence
  Description of Artificial Sequence: Synthetic oligonucleotide
  Sense strand starting at position 163 of SEQ ID NO: 1506
uaccuaugucuuggcagaa

SEQ ID NO: 118349 - RNA, 19 nt, Artificial Sequence
  Description of Artificial Sequence: Synthetic oligonucleotide
  Antisense strand to SEQ ID NO: 118348
uucugccaagacauaggua

SEQ ID NO: 118350 - RNA, 19 nt, Artificial Sequence
  Description of Artificial Sequence: Synthetic oligonucleotide
  Sense strand starting at position 164 of SEQ ID NO: 1506
accuaugucuuggcagaag

SEQ ID NO: 118351 - RNA, 19 nt, Artificial Sequence
  Description of Artificial Sequence: Synthetic oligonucleotide
  Antisense strand to SEQ ID NO: 118350
cuucugccaagacauaggu

SEQ ID NO: 118352 - RNA, 19 nt, Artificial Sequence
  Description of Artificial Sequence: Synthetic oligonucleotide
  Sense strand starting at position 167 of SEQ ID NO: 1506
uaugucuuggcagaaguaa

SEQ ID NO: 118353 - RNA, 19 nt, Artificial Sequence
  Description of Artificial Sequence: Synthetic oligonucleotide
  Antisense strand to SEQ ID NO: 118352
uuacuucugccaagacaua

SEQ ID NO: 118354 - RNA, 19 nt, Artificial Sequence
  Description of Artificial Sequence: Synthetic oligonucleotide
  Sense strand starting at position 323 of SEQ ID NO: 1506
ccuuaaagcagguguagaa

SEQ ID NO: 118355 - RNA, 19 nt, Artificial Sequence
  Description of Artificial Sequence: Synthetic oligonucleotide
  Antisense strand to SEQ ID NO: 118354
uucuacaccugcuuuaagg

SEQ ID NO: 118356 - RNA, 19 nt, Artificial Sequence
  Description of Artificial Sequence: Synthetic oligonucleotide
  Sense strand starting at position 342 of SEQ ID NO: 1506
aacagaacuuaguuguagu

SEQ ID NO: 118357 - RNA, 19 nt, Artificial Sequence
  Description of Artificial Sequence: Synthetic oligonucleotide
  Antisense strand to SEQ ID NO: 118356
acuacaacuaaguucuguu

SEQ ID NO: 118358 - RNA, 19 nt, Artificial Sequence
  Description of Artificial Sequence: Synthetic oligonucleotide
  Sense strand starting at position 343 of SEQ ID NO: 1506
acagaacuuaguuguaguu

SEQ ID NO: 118359 - RNA, 19 nt, Artificial Sequence
  Description of Artificial Sequence: Synthetic oligonucleotide
  Antisense strand to SEQ ID NO: 118358
aacuacaacuaaguucugu

SEQ ID NO: 118360 - RNA, 19 nt, Artificial Sequence
  Description of Artificial Sequence: Synthetic oligonucleotide
  Sense strand starting at position 692 of SEQ ID NO: 1506
uggagucacuucuuauuau

SEQ ID NO: 118361 - RNA, 19 nt, Artificial Sequence
  Description of Artificial Sequence: Synthetic oligonucleotide
  Antisense strand to SEQ ID NO: 118360
auaauaagaagugacucca

SEQ ID NO: 118362 - RNA, 19 nt, Artificial Sequence
  Description of Artificial Sequence: Synthetic oligonucleotide
  Sense strand starting at position 709 of SEQ ID NO: 1506
auuuccgugcugugugaaa

SEQ ID NO: 118363 - RNA, 19 nt, Artificial Sequence
  Description of Artificial Sequence: Synthetic oligonucleotide
  Antisense strand to SEQ ID NO: 118362
uuucacacagcacggaaau

SEQ ID NO: 118364 - RNA, 19 nt, Artificial Sequence
  Description of Artificial Sequence: Synthetic oligonucleotide
  Sense strand starting at position 718 of SEQ ID NO: 1506
cugugugaaauugggaaca

SEQ ID NO: 118365 - RNA, 19 nt, Artificial Sequence
  Description of Artificial Sequence: Synthetic oligonucleotide
  Antisense strand to SEQ ID NO: 118364
uguucccaauuucacacag

SEQ ID NO: 118366 - RNA, 19 nt, Artificial Sequence
  Description of Artificial Sequence: Synthetic oligonucleotide
  Sense strand starting at position 781 of SEQ ID NO: 1506
agauauugucaacaguacu

SEQ ID NO: 118367 - RNA, 19 nt, Artificial Sequence
  Description of Artificial Sequence: Synthetic oligonucleotide
  Antisense strand to SEQ ID NO: 118366
aguacuguugacaauaucu

SEQ ID NO: 118368 - RNA, 19 nt, Artificial Sequence
  Description of Artificial Sequence: Synthetic oligonucleotide
  Sense strand starting at position 1019 of SEQ ID NO: 1506
agacucauuugacauuaga

SEQ ID NO: 118369 - RNA, 19 nt, Artificial Sequence
  Description of Artificial Sequence: Synthetic oligonucleotide
  Antisense strand to SEQ ID NO: 118368
ucuaaugucaaaugagucu

SEQ ID NO: 118370 - RNA, 19 nt, Artificial Sequence
  Description of Artificial Sequence: Synthetic oligonucleotide
  Sense strand starting at position 1183 of SEQ ID NO: 1506
gacacaaccuugucauggu

SEQ ID NO: 118371 - RNA, 19 nt, Artificial Sequence
  Description of Artificial Sequence: Synthetic oligonucleotide
  Antisense strand to SEQ ID NO: 118370
accaugacaagguuguguc

SEQ ID NO: 118372 - RNA, 19 nt, Artificial Sequence
  Description of Artificial Sequence: Synthetic oligonucleotide
  Sense strand starting at position 1190 of SEQ ID NO: 1506
ccuugucaugguuagugga

SEQ ID NO: 118373 - RNA, 19 nt, Artificial Sequence
  Description of Artificial Sequence: Synthetic oligonucleotide
  Antisense strand to SEQ ID NO: 118372
uccacuaaccaugacaagg

SEQ ID NO: 118374 - RNA, 19 nt, Artificial Sequence
  Description of Artificial Sequence: Synthetic oligonucleotide
  Sense strand starting at position 2093 of SEQ ID NO: 1506
auacguacuggguauguua

SEQ ID NO: 118375 - RNA, 19 nt, Artificial Sequence
  Description of Artificial Sequence: Synthetic oligonucleotide
  Antisense strand to SEQ ID NO: 118374
uaacauacccaguacguau

SEQ ID NO: 118376 - RNA, 19 nt, Artificial Sequence
  Description of Artificial Sequence: Synthetic oligonucleotide
  Sense strand starting at position 2107 of SEQ ID NO: 1506
uguuaucccagguagugau

SEQ ID NO: 118377 - RNA, 19 nt, Artificial Sequence
  Description of Artificial Sequence: Synthetic oligonucleotide
  Antisense strand to SEQ ID NO: 118376
aucacuaccugggauaaca

SEQ ID NO: 118378 - RNA, 19 nt, Artificial Sequence
  Description of Artificial Sequence: Synthetic oligonucleotide
  Sense strand starting at position 2273 of SEQ ID NO: 1506
ucucaagaauuagugguaa

SEQ ID NO: 118379 - RNA, 19 nt, Artificial Sequence
  Description of Artificial Sequence: Synthetic oligonucleotide
  Antisense strand to SEQ ID NO: 118378
uuaccacuaauucuugaga

SEQ ID NO: 118380 - RNA, 19 nt, Artificial Sequence
  Description of Artificial Sequence: Synthetic oligonucleotide
  Sense strand starting at position 2275 of SEQ ID NO: 1506
ucaagaauuagugguaaag

SEQ ID NO: 118381 - RNA, 19 nt, Artificial Sequence
  Description of Artificial Sequence: Synthetic oligonucleotide
  Antisense strand to SEQ ID NO: 118380
cuuuaccacuaauucuuga

SEQ ID NO: 118382 - RNA, 19 nt, Artificial Sequence
  Description of Artificial Sequence: Synthetic oligonucleotide
  Sense strand starting at position 2517 of SEQ ID NO: 1506
uggaauaugugaguguaaa

SEQ ID NO: 118383 - RNA, 19 nt, Artificial Sequence
  Description of Artificial Sequence: Synthetic oligonucleotide
  Antisense strand to SEQ ID NO: 118382
uuuacacucacauauucca

SEQ ID NO: 118384 - RNA, 19 nt, Artificial Sequence
  Description of Artificial Sequence: Synthetic oligonucleotide
  Sense strand starting at position 2518 of SEQ ID NO: 1506
ggaauaugugaguguaaau

SEQ ID NO: 118385 - RNA, 19 nt, Artificial Sequence
  Description of Artificial Sequence: Synthetic oligonucleotide
  Antisense strand to SEQ ID NO: 118384
auuuacacucacauauucc

SEQ ID NO: 118386 - RNA, 19 nt, Artificial Sequence
  Description of Artificial Sequence: Synthetic oligonucleotide
  Sense strand starting at position 2739 of SEQ ID NO: 1506
guagacaugccucacacaa

SEQ ID NO: 118387 - RNA, 19 nt, Artificial Sequence
  Description of Artificial Sequence: Synthetic oligonucleotide
  Antisense strand to SEQ ID NO: 118386
uugugugaggcaugucuac

SEQ ID NO: 118388 - RNA, 19 nt, Artificial Sequence
  Description of Artificial Sequence: Synthetic oligonucleotide
  Sense strand starting at position 2771 of SEQ ID NO: 1506
aguauacugccauggagac

SEQ ID NO: 118389 - RNA, 19 nt, Artificial Sequence
  Description of Artificial Sequence: Synthetic oligonucleotide
  Antisense strand to SEQ ID NO: 118388
gucuccauggcaguauacu

SEQ ID NO: 118390 - RNA, 19 nt, Artificial Sequence
  Description of Artificial Sequence: Synthetic oligonucleotide
  Sense strand starting at position 2790 of SEQ ID NO: 1506
cuagaaaggcugggugaau

SEQ ID NO: 118391 - RNA, 19 nt, Artificial Sequence
  Description of Artificial Sequence: Synthetic oligonucleotide
  Antisense strand to SEQ ID NO: 118390
auucacccagccuuucuag

SEQ ID NO: 118392 - RNA, 19 nt, Artificial Sequence
  Description of Artificial Sequence: Synthetic oligonucleotide
  Sense strand starting at position 2791 of SEQ ID NO: 1506
uagaaaggcugggugaaua

SEQ ID NO: 118393 - RNA, 19 nt, Artificial Sequence
  Description of Artificial Sequence: Synthetic oligonucleotide
  Antisense strand to SEQ ID NO: 118392
uauucacccagccuuucua

SEQ ID NO: 118394 - RNA, 19 nt, Artificial Sequence
  Description of Artificial Sequence: Synthetic oligonucleotide
  Sense strand starting at position 2884 of SEQ ID NO: 1506
uaguacuucgaguaagaaa

SEQ ID NO: 118395 - RNA, 19 nt, Artificial Sequence
  Description of Artificial Sequence: Synthetic oligonucleotide
  Antisense strand to SEQ ID NO: 118394
uuucuuacucgaaguacua

SEQ ID NO: 118396 - RNA, 19 nt, Artificial Sequence
  Description of Artificial Sequence: Synthetic oligonucleotide
  Sense strand starting at position 2934 of SEQ ID NO: 1506
guugcuauuggucacagac

SEQ ID NO: 118397 - RNA, 19 nt, Artificial Sequence
  Description of Artificial Sequence: Synthetic oligonucleotide
  Antisense strand to SEQ ID NO: 118396
gucugugaccaauagcaac

SEQ ID NO: 118398 - RNA, 19 nt, Artificial Sequence
  Description of Artificial Sequence: Synthetic oligonucleotide
  Sense strand starting at position 3009 of SEQ ID NO: 1506
ugauauuuggccugucugu

SEQ ID NO: 118399 - RNA, 19 nt, Artificial Sequence
  Description of Artificial Sequence: Synthetic oligonucleotide
  Antisense strand to SEQ ID NO: 118398
acagacaggccaaauauca

SEQ ID NO: 118400 - RNA, 19 nt, Artificial Sequence
  Description of Artificial Sequence: Synthetic oligonucleotide
  Sense strand starting at position 3134 of SEQ ID NO: 1506
cagguugaggacuguuaca

SEQ ID NO: 118401 - RNA, 19 nt, Artificial Sequence
  Description of Artificial Sequence: Synthetic oligonucleotide
  Antisense strand to SEQ ID NO: 118400
uguaacaguccucaaccug

SEQ ID NO: 118402 - RNA, 19 nt, Artificial Sequence
  Description of Artificial Sequence: Synthetic oligonucleotide
  Sense strand starting at position 3372 of SEQ ID NO: 1506
agugccaaugacugguuaa

SEQ ID NO: 118403 - RNA, 19 nt, Artificial Sequence
  Description of Artificial Sequence: Synthetic oligonucleotide
  Antisense strand to SEQ ID NO: 118402
uuaaccagucauuggcacu

SEQ ID NO: 118404 - RNA, 19 nt, Artificial Sequence
  Description of Artificial Sequence: Synthetic oligonucleotide
  Sense strand starting at position 3373 of SEQ ID NO: 1506
gugccaaugacugguuaaa

SEQ ID NO: 118405 - RNA, 19 nt, Artificial Sequence
  Description of Artificial Sequence: Synthetic oligonucleotide
  Antisense strand to SEQ ID NO: 118404
uuuaaccagucauuggcac

SEQ ID NO: 118406 - RNA, 19 nt, Artificial Sequence
  Description of Artificial Sequence: Synthetic oligonucleotide
  Sense strand starting at position 3375 of SEQ ID NO: 1506
gccaaugacugguuaaauu

SEQ ID NO: 118407 - RNA, 19 nt, Artificial Sequence
  Description of Artificial Sequence: Synthetic oligonucleotide
  Antisense strand to SEQ ID NO: 118406
aauuuaaccagucauuggc

SEQ ID NO: 118408 - RNA, 19 nt, Artificial Sequence
  Description of Artificial Sequence: Synthetic oligonucleotide
  Sense strand starting at position 3468 of SEQ ID NO: 1506
uuauuuaagcauuggcuau

SEQ ID NO: 118409 - RNA, 19 nt, Artificial Sequence
  Description of Artificial Sequence: Synthetic oligonucleotide
  Antisense strand to SEQ ID NO: 118408
auagccaaugcuuaaauaa

SEQ ID NO: 118410 - RNA, 19 nt, Artificial Sequence
  Description of Artificial Sequence: Synthetic oligonucleotide
  Sense strand starting at position 3478 of SEQ ID NO: 1506
auuggcuaucagggaaaua

SEQ ID NO: 118411 - RNA, 19 nt, Artificial Sequence
  Description of Artificial Sequence: Synthetic oligonucleotide
  Antisense strand to SEQ ID NO: 118410
uauuucccugauagccaau

SEQ ID NO: 118412 - RNA, 19 nt, Artificial Sequence
  Description of Artificial Sequence: Synthetic oligonucleotide
  Sense strand starting at position 3728 of SEQ ID NO: 1506
uuuauuaaugcagaaugca

SEQ ID NO: 118413 - RNA, 19 nt, Artificial Sequence
  Description of Artificial Sequence: Synthetic oligonucleotide
  Antisense strand to SEQ ID NO: 118412
ugcauucugcauuaauaaa

SEQ ID NO: 118414 - RNA, 19 nt, Artificial Sequence
  Description of Artificial Sequence: Synthetic oligonucleotide
  Sense strand starting at position 3736 of SEQ ID NO: 1506
ugcagaaugcauggauaaa

SEQ ID NO: 118415 - RNA, 19 nt, Artificial Sequence
  Description of Artificial Sequence: Synthetic oligonucleotide
  Antisense strand to SEQ ID NO: 118414
uuuauccaugcauucugca

SEQ ID NO: 118416 - RNA, 19 nt, Artificial Sequence
  Description of Artificial Sequence: Synthetic oligonucleotide
  Sense strand starting at position 3756 of SEQ ID NO: 1506
gagggcaggacuugauauu

SEQ ID NO: 118417 - RNA, 19 nt, Artificial Sequence
  Description of Artificial Sequence: Synthetic oligonucleotide
  Antisense strand to SEQ ID NO: 118416
aauaucaaguccugcccuc

SEQ ID NO: 118418 - RNA, 19 nt, Artificial Sequence
  Description of Artificial Sequence: Synthetic oligonucleotide
  Sense strand starting at position 3810 of SEQ ID NO: 1506
ccaccaucgcgcguguaua

SEQ ID NO: 118419 - RNA, 19 nt, Artificial Sequence
  Description of Artificial Sequence: Synthetic oligonucleotide
  Antisense strand to SEQ ID NO: 118418
uauacacgcgcgauggugg

SEQ ID NO: 118420 - RNA, 19 nt, Artificial Sequence
  Description of Artificial Sequence: Synthetic oligonucleotide
  Sense strand starting at position 3820 of SEQ ID NO: 1506
gcguguauaccuguguaau

SEQ ID NO: 118421 - RNA, 19 nt, Artificial Sequence
  Description of Artificial Sequence: Synthetic oligonucleotide
  Antisense strand to SEQ ID NO: 118420
auuacacagguauacacgc

SEQ ID NO: 118422 - RNA, 19 nt, Artificial Sequence
  Description of Artificial Sequence: Synthetic oligonucleotide
  Sense strand starting at position 128 of SEQ ID NO: 1507
ucucacguuccagaaauac

SEQ ID NO: 118423 - RNA, 19 nt, Artificial Sequence
  Description of Artificial Sequence: Synthetic oligonucleotide
  Antisense strand to SEQ ID NO: 118422
guauuucuggaacgugaga

SEQ ID NO: 118424 - RNA, 19 nt, Artificial Sequence
  Description of Artificial Sequence: Synthetic oligonucleotide
  Sense strand starting at position 182 of SEQ ID NO: 1507
gugaucugaugcucauaga

SEQ ID NO: 118425 - RNA, 19 nt, Artificial Sequence
  Description of Artificial Sequence: Synthetic oligonucleotide
  Antisense strand to SEQ ID NO: 118424
ucuaugagcaucagaucac

SEQ ID NO: 118426 - RNA, 19 nt, Artificial Sequence
  Description of Artificial Sequence: Synthetic oligonucleotide
  Sense strand starting at position 183 of SEQ ID NO: 1507
ugaucugaugcucauagau

SEQ ID NO: 118427 - RNA, 19 nt, Artificial Sequence
  Description of Artificial Sequence: Synthetic oligonucleotide
  Antisense strand to SEQ ID NO: 118426
aucuaugagcaucagauca

SEQ ID NO: 118428 - RNA, 19 nt, Artificial Sequence
  Description of Artificial Sequence: Synthetic oligonucleotide
  Sense strand starting at position 193 of SEQ ID NO: 1507
cucauagauuuacagaagu

SEQ ID NO: 118429 - RNA, 19 nt, Artificial Sequence
  Description of Artificial Sequence: Synthetic oligonucleotide
  Antisense strand to SEQ ID NO: 118428
acuucuguaaaucuaugag

SEQ ID NO: 118430 - RNA, 19 nt, Artificial Sequence
  Description of Artificial Sequence: Synthetic oligonucleotide
  Sense strand starting at position 373 of SEQ ID NO: 1507
aguagaccauugucuggaa

SEQ ID NO: 118431 - RNA, 19 nt, Artificial Sequence
  Description of Artificial Sequence: Synthetic oligonucleotide
  Antisense strand to SEQ ID NO: 118430
uuccagacaauggucuacu

SEQ ID NO: 118432 - RNA, 19 nt, Artificial Sequence
  Description of Artificial Sequence: Synthetic oligonucleotide
  Sense strand starting at position 374 of SEQ ID NO: 1507
guagaccauugucuggaau

SEQ ID NO: 118433 - RNA, 19 nt, Artificial Sequence
  Description of Artificial Sequence: Synthetic oligonucleotide
  Antisense strand to SEQ ID NO: 118432
auuccagacaauggucuac

SEQ ID NO: 118434 - RNA, 19 nt, Artificial Sequence
  Description of Artificial Sequence: Synthetic oligonucleotide
  Sense strand starting at position 375 of SEQ ID NO: 1507
uagaccauugucuggaaua

SEQ ID NO: 118435 - RNA, 19 nt, Artificial Sequence
  Description of Artificial Sequence: Synthetic oligonucleotide
  Antisense strand to SEQ ID NO: 118434
uauuccagacaauggucua

SEQ ID NO: 118436 - RNA, 19 nt, Artificial Sequence
  Description of Artificial Sequence: Synthetic oligonucleotide
  Sense strand starting at position 527 of SEQ ID NO: 1507
ugguguuuacacuacaaag

SEQ ID NO: 118437 - RNA, 19 nt, Artificial Sequence
  Description of Artificial Sequence: Synthetic oligonucleotide
  Antisense strand to SEQ ID NO: 118436
cuuuguaguguaaacacca

SEQ ID NO: 118438 - RNA, 19 nt, Artificial Sequence
  Description of Artificial Sequence: Synthetic oligonucleotide
  Sense strand starting at position 529 of SEQ ID NO: 1507
guguuuacacuacaaaguu

SEQ ID NO: 118439 - RNA, 19 nt, Artificial Sequence
  Description of Artificial Sequence: Synthetic oligonucleotide
  Antisense strand to SEQ ID NO: 118438
aacuuuguaguguaaacac

SEQ ID NO: 118440 - RNA, 19 nt, Artificial Sequence
  Description of Artificial Sequence: Synthetic oligonucleotide
  Sense strand starting at position 696 of SEQ ID NO: 1507
cuaggauucuaagucuuua

SEQ ID NO: 118441 - RNA, 19 nt, Artificial Sequence
  Description of Artificial Sequence: Synthetic oligonucleotide
  Antisense strand to SEQ ID NO: 118440
uaaagacuuagaauccuag

SEQ ID NO: 118442 - RNA, 19 nt, Artificial Sequence
  Description of Artificial Sequence: Synthetic oligonucleotide
  Sense strand starting at position 768 of SEQ ID NO: 1507
gcucaaugaaccugggaug

SEQ ID NO: 118443 - RNA, 19 nt, Artificial Sequence
  Description of Artificial Sequence: Synthetic oligonucleotide
  Antisense strand to SEQ ID NO: 118442
caucccagguucauugagc

SEQ ID NO: 118444 - RNA, 19 nt, Artificial Sequence
  Description of Artificial Sequence: Synthetic oligonucleotide
  Sense strand starting at position 910 of SEQ ID NO: 1507
aaacgccacguauaagaaa

SEQ ID NO: 118445 - RNA, 19 nt, Artificial Sequence
  Description of Artificial Sequence: Synthetic oligonucleotide
  Antisense strand to SEQ ID NO: 118444
uuucuuauacguggcguuu

SEQ ID NO: 118446 - RNA, 19 nt, Artificial Sequence
  Description of Artificial Sequence: Synthetic oligonucleotide
  Sense strand starting at position 1137 of SEQ ID NO: 1507
aggagugaagaugguguaa

SEQ ID NO: 118447 - RNA, 19 nt, Artificial Sequence
  Description of Artificial Sequence: Synthetic oligonucleotide
  Antisense strand to SEQ ID NO: 118446
uuacaccaucuucacuccu

SEQ ID NO: 118448 - RNA, 19 nt, Artificial Sequence
  Description of Artificial Sequence: Synthetic oligonucleotide
  Sense strand starting at position 1319 of SEQ ID NO: 1507
gcaggaugaggguguauga

SEQ ID NO: 118449 - RNA, 19 nt, Artificial Sequence
  Description of Artificial Sequence: Synthetic oligonucleotide
  Antisense strand to SEQ ID NO: 118448
ucauacacccucauccugc

SEQ ID NO: 118450 - RNA, 19 nt, Artificial Sequence
  Description of Artificial Sequence: Synthetic oligonucleotide
  Sense strand starting at position 1330 of SEQ ID NO: 1507
guguaugagcuggagauga

SEQ ID NO: 118451 - RNA, 19 nt, Artificial Sequence
  Description of Artificial Sequence: Synthetic oligonucleotide
  Antisense strand to SEQ ID NO: 118450
ucaucuccagcucauacac

SEQ ID NO: 118452 - RNA, 19 nt, Artificial Sequence
  Description of Artificial Sequence: Synthetic oligonucleotide
  Sense strand starting at position 1358 of SEQ ID NO: 1507
gggugagaagcaugaggau

SEQ ID NO: 118453 - RNA, 19 nt, Artificial Sequence
  Description of Artificial Sequence: Synthetic oligonucleotide
  Antisense strand to SEQ ID NO: 118452
auccucaugcuucucaccc

SEQ ID NO: 118454 - RNA, 19 nt, Artificial Sequence
  Description of Artificial Sequence: Synthetic oligonucleotide
  Sense strand starting at position 1592 of SEQ ID NO: 1507
aauggagaggucugcaaac

SEQ ID NO: 118455 - RNA, 19 nt, Artificial Sequence
  Description of Artificial Sequence: Synthetic oligonucleotide
  Antisense strand to SEQ ID NO: 118454
guuugcagaccucuccauu

SEQ ID NO: 118456 - RNA, 19 nt, Artificial Sequence
  Description of Artificial Sequence: Synthetic oligonucleotide
  Sense strand starting at position 1711 of SEQ ID NO: 1507
augguaucaucuccaguga

SEQ ID NO: 118457 - RNA, 19 nt, Artificial Sequence
  Description of Artificial Sequence: Synthetic oligonucleotide
  Antisense strand to SEQ ID NO: 118456
ucacuggagaugauaccau

SEQ ID NO: 118458 - RNA, 19 nt, Artificial Sequence
  Description of Artificial Sequence: Synthetic oligonucleotide
  Sense strand starting at position 1915 of SEQ ID NO: 1507
gcaugcuugcucucagcaa

SEQ ID NO: 118459 - RNA, 19 nt, Artificial Sequence
  Description of Artificial Sequence: Synthetic oligonucleotide
  Antisense strand to SEQ ID NO: 118458
uugcugagagcaagcaugc

SEQ ID NO: 118460 - RNA, 19 nt, Artificial Sequence
  Description of Artificial Sequence: Synthetic oligonucleotide
  Sense strand starting at position 1955 of SEQ ID NO: 1507
cagugcuugcuguuugauu

SEQ ID NO: 118461 - RNA, 19 nt, Artificial Sequence
  Description of Artificial Sequence: Synthetic oligonucleotide
  Antisense strand to SEQ ID NO: 118460
aaucaaacagcaagcacug

SEQ ID NO: 118462 - RNA, 19 nt, Artificial Sequence
  Description of Artificial Sequence: Synthetic oligonucleotide
  Sense strand starting at position 1975 of SEQ ID NO: 1507
ugagaagucugauucccug

SEQ ID NO: 118463 - RNA, 19 nt, Artificial Sequence
  Description of Artificial Sequence: Synthetic oligonucleotide
  Antisense strand to SEQ ID NO: 118462
cagggaaucagacuucuca

SEQ ID NO: 118464 - RNA, 19 nt, Artificial Sequence
  Description of Artificial Sequence: Synthetic oligonucleotide
  Sense strand starting at position 1981 of SEQ ID NO: 1507
gucugauucccugagcaca

SEQ ID NO: 118465 - RNA, 19 nt, Artificial Sequence
  Description of Artificial Sequence: Synthetic oligonucleotide
  Antisense strand to SEQ ID NO: 118464
ugugcucagggaaucagac

SEQ ID NO: 118466 - RNA, 19 nt, Artificial Sequence
  Description of Artificial Sequence: Synthetic oligonucleotide
  Sense strand starting at position 2088 of SEQ ID NO: 1507
uaagacaugugcuuugaau

SEQ ID NO: 118467 - RNA, 19 nt, Artificial Sequence
  Description of Artificial Sequence: Synthetic oligonucleotide
  Antisense strand to SEQ ID NO: 118466
auucaaagcacaugucuua

SEQ ID NO: 118468 - RNA, 19 nt, Artificial Sequence
  Description of Artificial Sequence: Synthetic oligonucleotide
  Sense strand starting at position 2090 of SEQ ID NO: 1507
agacaugugcuuugaauua

SEQ ID NO: 118469 - RNA, 19 nt, Artificial Sequence
  Description of Artificial Sequence: Synthetic oligonucleotide
  Antisense strand to SEQ ID NO: 118468
uaauucaaagcacaugucu

SEQ ID NO: 118470 - RNA, 19 nt, Artificial Sequence
  Description of Artificial Sequence: Synthetic oligonucleotide
  Sense strand starting at position 2184 of SEQ ID NO: 1507
gcuaaagugaacuacgaaa

SEQ ID NO: 118471 - RNA, 19 nt, Artificial Sequence
  Description of Artificial Sequence: Synthetic oligonucleotide
  Antisense strand to SEQ ID NO: 118470
uuucguaguucacuuuagc

SEQ ID NO: 118472 - RNA, 19 nt, Artificial Sequence
  Description of Artificial Sequence: Synthetic oligonucleotide
  Sense strand starting at position 2212 of SEQ ID NO: 1507
ggaggugacuauuccugag

SEQ ID NO: 118473 - RNA, 19 nt, Artificial Sequence
  Description of Artificial Sequence: Synthetic oligonucleotide
  Antisense strand to SEQ ID NO: 118472
cucaggaauagucaccucc

SEQ ID NO: 118474 - RNA, 19 nt, Artificial Sequence
  Description of Artificial Sequence: Synthetic oligonucleotide
  Sense strand starting at position 2216 of SEQ ID NO: 1507
gugacuauuccugagcuaa

SEQ ID NO: 118475 - RNA, 19 nt, Artificial Sequence
  Description of Artificial Sequence: Synthetic oligonucleotide
  Antisense strand to SEQ ID NO: 118474
uuagcucaggaauagucac

SEQ ID NO: 118476 - RNA, 19 nt, Artificial Sequence
  Description of Artificial Sequence: Synthetic oligonucleotide
  Sense strand starting at position 2308 of SEQ ID NO: 1507
ugggaugguuagagacuga

SEQ ID NO: 118477 - RNA, 19 nt, Artificial Sequence
  Description of Artificial Sequence: Synthetic oligonucleotide
  Antisense strand to SEQ ID NO: 118476
ucagucucuaaccauccca

SEQ ID NO: 118478 - RNA, 19 nt, Artificial Sequence
  Description of Artificial Sequence: Synthetic oligonucleotide
  Sense strand starting at position 2312 of SEQ ID NO: 1507
augguuagagacugaagua

SEQ ID NO: 118479 - RNA, 19 nt, Artificial Sequence
  Description of Artificial Sequence: Synthetic oligonucleotide
  Antisense strand to SEQ ID NO: 118478
uacuucagucucuaaccau

SEQ ID NO: 118480 - RNA, 19 nt, Artificial Sequence
  Description of Artificial Sequence: Synthetic oligonucleotide
  Sense strand starting at position 2421 of SEQ ID NO: 1507
gauggaaaucauggcugau

SEQ ID NO: 118481 - RNA, 19 nt, Artificial Sequence
  Description of Artificial Sequence: Synthetic oligonucleotide
  Antisense strand to SEQ ID NO: 118480
aucagccaugauuuccauc

SEQ ID NO: 118482 - RNA, 19 nt, Artificial Sequence
  Description of Artificial Sequence: Synthetic oligonucleotide
  Sense strand starting at position 2423 of SEQ ID NO: 1507
uggaaaucauggcugauaa

SEQ ID NO: 118483 - RNA, 19 nt, Artificial Sequence
  Description of Artificial Sequence: Synthetic oligonucleotide
  Antisense strand to SEQ ID NO: 118482
uuaucagccaugauuucca

SEQ ID NO: 118484 - RNA, 19 nt, Artificial Sequence
  Description of Artificial Sequence: Synthetic oligonucleotide
  Sense strand starting at position 2433 of SEQ ID NO: 1507
ggcugauaagguuaauauu

SEQ ID NO: 118485 - RNA, 19 nt, Artificial Sequence
  Description of Artificial Sequence: Synthetic oligonucleotide
  Antisense strand to SEQ ID NO: 118484
aauauuaaccuuaucagcc

SEQ ID NO: 118486 - RNA, 19 nt, Artificial Sequence
  Description of Artificial Sequence: Synthetic oligonucleotide
  Sense strand starting at position 2602 of SEQ ID NO: 1507
gguugcauuccauaaguag

SEQ ID NO: 118487 - RNA, 19 nt, Artificial Sequence
  Description of Artificial Sequence: Synthetic oligonucleotide
  Antisense strand to SEQ ID NO: 118486
cuacuuauggaaugcaacc

SEQ ID NO: 118488 - RNA, 19 nt, Artificial Sequence
  Description of Artificial Sequence: Synthetic oligonucleotide
  Sense strand starting at position 3206 of SEQ ID NO: 1507
ucaggagcuccaugacuga

SEQ ID NO: 118489 - RNA, 19 nt, Artificial Sequence
  Description of Artificial Sequence: Synthetic oligonucleotide
  Antisense strand to SEQ ID NO: 118488
ucagucauggagcuccuga

SEQ ID NO: 118490 - RNA, 19 nt, Artificial Sequence
  Description of Artificial Sequence: Synthetic oligonucleotide
  Sense strand starting at position 3217 of SEQ ID NO: 1507
augacugagguuuggucau

SEQ ID NO: 118491 - RNA, 19 nt, Artificial Sequence
  Description of Artificial Sequence: Synthetic oligonucleotide
  Antisense strand to SEQ ID NO: 118490
augaccaaaccucagucau

SEQ ID NO: 118492 - RNA, 19 nt, Artificial Sequence
  Description of Artificial Sequence: Synthetic oligonucleotide
  Sense strand starting at position 3248 of SEQ ID NO: 1507
uguacugcagguuagagaa

SEQ ID NO: 118493 - RNA, 19 nt, Artificial Sequence
  Description of Artificial Sequence: Synthetic oligonucleotide
  Antisense strand to SEQ ID NO: 118492
uucucuaaccugcaguaca

SEQ ID NO: 118494 - RNA, 19 nt, Artificial Sequence
  Description of Artificial Sequence: Synthetic oligonucleotide
  Sense strand starting at position 3293 of SEQ ID NO: 1507
gacugaggcacguggaaau

SEQ ID NO: 118495 - RNA, 19 nt, Artificial Sequence
  Description of Artificial Sequence: Synthetic oligonucleotide
  Antisense strand to SEQ ID NO: 118494
auuuccacgugccucaguc

SEQ ID NO: 118496 - RNA, 19 nt, Artificial Sequence
  Description of Artificial Sequence: Synthetic oligonucleotide
  Sense strand starting at position 3532 of SEQ ID NO: 1507
acggguuaucaagacaccu

SEQ ID NO: 118497 - RNA, 19 nt, Artificial Sequence
  Description of Artificial Sequence: Synthetic oligonucleotide
  Antisense strand to SEQ ID NO: 118496
aggugucuugauaacccgu

SEQ ID NO: 118498 - RNA, 19 nt, Artificial Sequence
  Description of Artificial Sequence: Synthetic oligonucleotide
  Sense strand starting at position 3736 of SEQ ID NO: 1507
agggaauugagaugagugu

SEQ ID NO: 118499 - RNA, 19 nt, Artificial Sequence
  Description of Artificial Sequence: Synthetic oligonucleotide
  Antisense strand to SEQ ID NO: 118498
acacucaucucaauucccu

SEQ ID NO: 118500 - RNA, 19 nt, Artificial Sequence
  Description of Artificial Sequence: Synthetic oligonucleotide
  Sense strand starting at position 3740 of SEQ ID NO: 1507
aauugagaugaguguuuau

SEQ ID NO: 118501 - RNA, 19 nt, Artificial Sequence
  Description of Artificial Sequence: Synthetic oligonucleotide
  Antisense strand to SEQ ID NO: 118500
auaaacacucaucucaauu

SEQ ID NO: 118502 - RNA, 19 nt, Artificial Sequence
  Description of Artificial Sequence: Synthetic oligonucleotide
  Sense strand starting at position 236 of SEQ ID NO: 1508
aaaguuggucagcaauaca

SEQ ID NO: 118503 - RNA, 19 nt, Artificial Sequence
  Description of Artificial Sequence: Synthetic oligonucleotide
  Antisense strand to SEQ ID NO: 118502
uguauugcugaccaacuuu

SEQ ID NO: 118504 - RNA, 19 nt, Artificial Sequence
  Description of Artificial Sequence: Synthetic oligonucleotide
  Sense strand starting at position 593 of SEQ ID NO: 1508
augaucacacguuagcaau

SEQ ID NO: 118505 - RNA, 19 nt, Artificial Sequence
  Description of Artificial Sequence: Synthetic oligonucleotide
  Antisense strand to SEQ ID NO: 118504
auugcuaacgugugaucau

SEQ ID NO: 118506 - RNA, 19 nt, Artificial Sequence
  Description of Artificial Sequence: Synthetic oligonucleotide
  Sense strand starting at position 689 of SEQ ID NO: 1508
agggcuacuugacugagaa

SEQ ID NO: 118507 - RNA, 19 nt, Artificial Sequence
  Description of Artificial Sequence: Synthetic oligonucleotide
  Antisense strand to SEQ ID NO: 118506
uucucagucaaguagcccu

SEQ ID NO: 118508 - RNA, 19 nt, Artificial Sequence
  Description of Artificial Sequence: Synthetic oligonucleotide
  Sense strand starting at position 690 of SEQ ID NO: 1508
gggcuacuugacugagaau

SEQ ID NO: 118509 - RNA, 19 nt, Artificial Sequence
  Description of Artificial Sequence: Synthetic oligonucleotide
  Antisense strand to SEQ ID NO: 118508
auucucagucaaguagccc

SEQ ID NO: 118510 - RNA, 19 nt, Artificial Sequence
  Description of Artificial Sequence: Synthetic oligonucleotide
  Sense strand starting at position 703 of SEQ ID NO: 1508
gagaaugcccucuggaaau

SEQ ID NO: 118511 - RNA, 19 nt, Artificial Sequence
  Description of Artificial Sequence: Synthetic oligonucleotide
  Antisense strand to SEQ ID NO: 118510
auuuccagagggcauucuc

SEQ ID NO: 118512 - RNA, 19 nt, Artificial Sequence
  Description of Artificial Sequence: Synthetic oligonucleotide
  Sense strand starting at position 705 of SEQ ID NO: 1508
gaaugcccucuggaaaugu

SEQ ID NO: 118513 - RNA, 19 nt, Artificial Sequence
  Description of Artificial Sequence: Synthetic oligonucleotide
  Antisense strand to SEQ ID NO: 118512
acauuuccagagggcauuc

SEQ ID NO: 118514 - RNA, 19 nt, Artificial Sequence
  Description of Artificial Sequence: Synthetic oligonucleotide
  Sense strand starting at position 877 of SEQ ID NO: 1508
ucuguaauagcugcguuau

SEQ ID NO: 118515 - RNA, 19 nt, Artificial Sequence
  Description of Artificial Sequence: Synthetic oligonucleotide
  Antisense strand to SEQ ID NO: 118514
auaacgcagcuauuacaga

SEQ ID NO: 118516 - RNA, 19 nt, Artificial Sequence
  Description of Artificial Sequence: Synthetic oligonucleotide
  Sense strand starting at position 1056 of SEQ ID NO: 1508
ccugaugcucugggaggaa

SEQ ID NO: 118517 - RNA, 19 nt, Artificial Sequence
  Description of Artificial Sequence: Synthetic oligonucleotide
  Antisense strand to SEQ ID NO: 118516
uuccucccagagcaucagg

SEQ ID NO: 118518 - RNA, 19 nt, Artificial Sequence
  Description of Artificial Sequence: Synthetic oligonucleotide
  Sense strand starting at position 1343 of SEQ ID NO: 1508
gcguguaggacacagagau

SEQ ID NO: 118519 - RNA, 19 nt, Artificial Sequence
  Description of Artificial Sequence: Synthetic oligonucleotide
  Antisense strand to SEQ ID NO: 118518
aucucuguguccuacacgc

SEQ ID NO: 118520 - RNA, 19 nt, Artificial Sequence
  Description of Artificial Sequence: Synthetic oligonucleotide
  Sense strand starting at position 1559 of SEQ ID NO: 1508
agccgaccaccaugaauaa

SEQ ID NO: 118521 - RNA, 19 nt, Artificial Sequence
  Description of Artificial Sequence: Synthetic oligonucleotide
  Antisense strand to SEQ ID NO: 118520
uuauucaugguggucggcu

SEQ ID NO: 118522 - RNA, 19 nt, Artificial Sequence
  Description of Artificial Sequence: Synthetic oligonucleotide
  Sense strand starting at position 1778 of SEQ ID NO: 1508
uguagaugguauccaugau

SEQ ID NO: 118523 - RNA, 19 nt, Artificial Sequence
  Description of Artificial Sequence: Synthetic oligonucleotide
  Antisense strand to SEQ ID NO: 118522
aucauggauaccaucuaca

SEQ ID NO: 118524 - RNA, 19 nt, Artificial Sequence
  Description of Artificial Sequence: Synthetic oligonucleotide
  Sense strand starting at position 1779 of SEQ ID NO: 1508
guagaugguauccaugaug

SEQ ID NO: 118525 - RNA, 19 nt, Artificial Sequence
  Description of Artificial Sequence: Synthetic oligonucleotide
  Antisense strand to SEQ ID NO: 118524
caucauggauaccaucuac

SEQ ID NO: 118526 - RNA, 19 nt, Artificial Sequence
  Description of Artificial Sequence: Synthetic oligonucleotide
  Sense strand starting at position 1856 of SEQ ID NO: 1508
gcagaaucaugaccaaguu

SEQ ID NO: 118527 - RNA, 19 nt, Artificial Sequence
  Description of Artificial Sequence: Synthetic oligonucleotide
  Antisense strand to SEQ ID NO: 118526
aacuuggucaugauucugc

SEQ ID NO: 118528 - RNA, 19 nt, Artificial Sequence
  Description of Artificial Sequence: Synthetic oligonucleotide
  Sense strand starting at position 2022 of SEQ ID NO: 1508
gcuguaaaggcagaaaucu

SEQ ID NO: 118529 - RNA, 19 nt, Artificial Sequence
  Description of Artificial Sequence: Synthetic oligonucleotide
  Antisense strand to SEQ ID NO: 118528
agauuucugccuuuacagc

SEQ ID NO: 118530 - RNA, 19 nt, Artificial Sequence
  Description of Artificial Sequence: Synthetic oligonucleotide
  Sense strand starting at position 2080 of SEQ ID NO: 1508
ccaggaauaguaugucaga

SEQ ID NO: 118531 - RNA, 19 nt, Artificial Sequence
  Description of Artificial Sequence: Synthetic oligonucleotide
  Antisense strand to SEQ ID NO: 118530
ucugacauacuauuccugg

SEQ ID NO: 118532 - RNA, 19 nt, Artificial Sequence
  Description of Artificial Sequence: Synthetic oligonucleotide
  Sense strand starting at position 2081 of SEQ ID NO: 1508
caggaauaguaugucagaa

SEQ ID NO: 118533 - RNA, 19 nt, Artificial Sequence
  Description of Artificial Sequence: Synthetic oligonucleotide
  Antisense strand to SEQ ID NO: 118532
uucugacauacuauuccug

SEQ ID NO: 118534 - RNA, 19 nt, Artificial Sequence
  Description of Artificial Sequence: Synthetic oligonucleotide
  Sense strand starting at position 2170 of SEQ ID NO: 1508
cuguaugauauuggacaga

SEQ ID NO: 118535 - RNA, 19 nt, Artificial Sequence
  Description of Artificial Sequence: Synthetic oligonucleotide
  Antisense strand to SEQ ID NO: 118534
ucuguccaauaucauacag

SEQ ID NO: 118536 - RNA, 19 nt, Artificial Sequence
  Description of Artificial Sequence: Synthetic oligonucleotide
  Sense strand starting at position 2220 of SEQ ID NO: 1508
gugaaaggucaucauaguu

SEQ ID NO: 118537 - RNA, 19 nt, Artificial Sequence
  Description of Artificial Sequence: Synthetic oligonucleotide
  Antisense strand to SEQ ID NO: 118536
aacuaugaugaccuuucac

SEQ ID NO: 118538 - RNA, 19 nt, Artificial Sequence
  Description of Artificial Sequence: Synthetic oligonucleotide
  Sense strand starting at position 2230 of SEQ ID NO: 1508
aucauaguucuguacucua

SEQ ID NO: 118539 - RNA, 19 nt, Artificial Sequence
  Description of Artificial Sequence: Synthetic oligonucleotide
  Antisense strand to SEQ ID NO: 118538
uagaguacagaacuaugau

SEQ ID NO: 118540 - RNA, 19 nt, Artificial Sequence
  Description of Artificial Sequence: Synthetic oligonucleotide
  Sense strand starting at position 2253 of SEQ ID NO: 1508
cuggaugugagauguaaau

SEQ ID NO: 118541 - RNA, 19 nt, Artificial Sequence
  Description of Artificial Sequence: Synthetic oligonucleotide
  Antisense strand to SEQ ID NO: 118540
auuuacaucucacauccag

SEQ ID NO: 118542 - RNA, 19 nt, Artificial Sequence
  Description of Artificial Sequence: Synthetic oligonucleotide
  Sense strand starting at position 2280 of SEQ ID NO: 1508
uacaguaccugguuuagaa

SEQ ID NO: 118543 - RNA, 19 nt, Artificial Sequence
  Description of Artificial Sequence: Synthetic oligonucleotide
  Antisense strand to SEQ ID NO: 118542
uucuaaaccagguacugua

SEQ ID NO: 118544 - RNA, 19 nt, Artificial Sequence
  Description of Artificial Sequence: Synthetic oligonucleotide
  Sense strand starting at position 2375 of SEQ ID NO: 1508
ugguuacugugccuuauuu

SEQ ID NO: 118545 - RNA, 19 nt, Artificial Sequence
  Description of Artificial Sequence: Synthetic oligonucleotide
  Antisense strand to SEQ ID NO: 118544
aaauaaggcacaguaacca

SEQ ID NO: 118546 - RNA, 19 nt, Artificial Sequence
  Description of Artificial Sequence: Synthetic oligonucleotide
  Sense strand starting at position 2393 of SEQ ID NO: 1508
ucccauuucgccuagcgaa

SEQ ID NO: 118547 - RNA, 19 nt, Artificial Sequence
  Description of Artificial Sequence: Synthetic oligonucleotide
  Antisense strand to SEQ ID NO: 118546
uucgcuaggcgaaauggga

SEQ ID NO: 118548 - RNA, 19 nt, Artificial Sequence
  Description of Artificial Sequence: Synthetic oligonucleotide
  Sense strand starting at position 2436 of SEQ ID NO: 1508
ugcaucuccaucgagauga

SEQ ID NO: 118549 - RNA, 19 nt, Artificial Sequence
  Description of Artificial Sequence: Synthetic oligonucleotide
  Antisense strand to SEQ ID NO: 118548
ucaucucgauggagaugca

SEQ ID NO: 118550 - RNA, 19 nt, Artificial Sequence
  Description of Artificial Sequence: Synthetic oligonucleotide
  Sense strand starting at position 2441 of SEQ ID NO: 1508
cuccaucgagaugauugua

SEQ ID NO: 118551 - RNA, 19 nt, Artificial Sequence
  Description of Artificial Sequence: Synthetic oligonucleotide
  Antisense strand to SEQ ID NO: 118550
uacaaucaucucgauggag

SEQ ID NO: 118552 - RNA, 19 nt, Artificial Sequence
  Description of Artificial Sequence: Synthetic oligonucleotide
  Sense strand starting at position 2444 of SEQ ID NO: 1508
caucgagaugauuguacua

SEQ ID NO: 118553 - RNA, 19 nt, Artificial Sequence
  Description of Artificial Sequence: Synthetic oligonucleotide
  Antisense strand to SEQ ID NO: 118552
uaguacaaucaucucgaug

SEQ ID NO: 118554 - RNA, 19 nt, Artificial Sequence
  Description of Artificial Sequence: Synthetic oligonucleotide
  Sense strand starting at position 2451 of SEQ ID NO: 1508
augauuguacuagagucau

SEQ ID NO: 118555 - RNA, 19 nt, Artificial Sequence
  Description of Artificial Sequence: Synthetic oligonucleotide
  Antisense strand to SEQ ID NO: 118554
augacucuaguacaaucau

SEQ ID NO: 118556 - RNA, 19 nt, Artificial Sequence
  Description of Artificial Sequence: Synthetic oligonucleotide
  Sense strand starting at position 2457 of SEQ ID NO: 1508
guacuagagucauccacag

SEQ ID NO: 118557 - RNA, 19 nt, Artificial Sequence
  Description of Artificial Sequence: Synthetic oligonucleotide
  Antisense strand to SEQ ID NO: 118556
cuguggaugacucuaguac

SEQ ID NO: 118558 - RNA, 19 nt, Artificial Sequence
  Description of Artificial Sequence: Synthetic oligonucleotide
  Sense strand starting at position 2461 of SEQ ID NO: 1508
uagagucauccacagacgu

SEQ ID NO: 118559 - RNA, 19 nt, Artificial Sequence
  Description of Artificial Sequence: Synthetic oligonucleotide
  Antisense strand to SEQ ID NO: 118558
acgucuguggaugacucua

SEQ ID NO: 118560 - RNA, 19 nt, Artificial Sequence
  Description of Artificial Sequence: Synthetic oligonucleotide
  Sense strand starting at position 2474 of SEQ ID NO: 1508
agacgucuauuugugacuu

SEQ ID NO: 118561 - RNA, 19 nt, Artificial Sequence
  Description of Artificial Sequence: Synthetic oligonucleotide
  Antisense strand to SEQ ID NO: 118560
aagucacaaauagacgucu

SEQ ID NO: 118562 - RNA, 19 nt, Artificial Sequence
  Description of Artificial Sequence: Synthetic oligonucleotide
  Sense strand starting at position 2683 of SEQ ID NO: 1508
gugucuauuuguucucaca

SEQ ID NO: 118563 - RNA, 19 nt, Artificial Sequence
  Description of Artificial Sequence: Synthetic oligonucleotide
  Antisense strand to SEQ ID NO: 118562
ugugagaacaaauagacac

SEQ ID NO: 118564 - RNA, 19 nt, Artificial Sequence
  Description of Artificial Sequence: Synthetic oligonucleotide
  Sense strand starting at position 2789 of SEQ ID NO: 1508
uccaguugacaaugaauuc

SEQ ID NO: 118565 - RNA, 19 nt, Artificial Sequence
  Description of Artificial Sequence: Synthetic oligonucleotide
  Antisense strand to SEQ ID NO: 118564
gaauucauugucaacugga

SEQ ID NO: 118566 - RNA, 19 nt, Artificial Sequence
  Description of Artificial Sequence: Synthetic oligonucleotide
  Sense strand starting at position 3153 of SEQ ID NO: 1508
agauuaaucgggcauggug

SEQ ID NO: 118567 - RNA, 19 nt, Artificial Sequence
  Description of Artificial Sequence: Synthetic oligonucleotide
  Antisense strand to SEQ ID NO: 118566
caccaugcccgauuaaucu

SEQ ID NO: 118568 - RNA, 19 nt, Artificial Sequence
  Description of Artificial Sequence: Synthetic oligonucleotide
  Sense strand starting at position 3400 of SEQ ID NO: 1508
uggaaugaauucucaugcu

SEQ ID NO: 118569 - RNA, 19 nt, Artificial Sequence
  Description of Artificial Sequence: Synthetic oligonucleotide
  Antisense strand to SEQ ID NO: 118568
agcaugagaauucauucca

SEQ ID NO: 118570 - RNA, 19 nt, Artificial Sequence
  Description of Artificial Sequence: Synthetic oligonucleotide
  Sense strand starting at position 3592 of SEQ ID NO: 1508
uugguucuagaauagucaa

SEQ ID NO: 118571 - RNA, 19 nt, Artificial Sequence
  Description of Artificial Sequence: Synthetic oligonucleotide
  Antisense strand to SEQ ID NO: 118570
uugacuauucuagaaccaa

SEQ ID NO: 118572 - RNA, 19 nt, Artificial Sequence
  Description of Artificial Sequence: Synthetic oligonucleotide
  Sense strand starting at position 3613 of SEQ ID NO: 1508
uuuacagucccugaagcau

SEQ ID NO: 118573 - RNA, 19 nt, Artificial Sequence
  Description of Artificial Sequence: Synthetic oligonucleotide
  Antisense strand to SEQ ID NO: 118572
augcuucagggacuguaaa

SEQ ID NO: 118574 - RNA, 19 nt, Artificial Sequence
  Description of Artificial Sequence: Synthetic oligonucleotide
  Sense strand starting at position 3644 of SEQ ID NO: 1508
ucuccuuauguugaagcaa

SEQ ID NO: 118575 - RNA, 19 nt, Artificial Sequence
  Description of Artificial Sequence: Synthetic oligonucleotide
  Antisense strand to SEQ ID NO: 118574
uugcuucaacauaaggaga

SEQ ID NO: 118576 - RNA, 19 nt, Artificial Sequence
  Description of Artificial Sequence: Synthetic oligonucleotide
  Sense strand starting at position 3694 of SEQ ID NO: 1508
agugcucagagauggagau

SEQ ID NO: 118577 - RNA, 19 nt, Artificial Sequence
  Description of Artificial Sequence: Synthetic oligonucleotide
  Antisense strand to SEQ ID NO: 118576
aucuccaucucugagcacu

SEQ ID NO: 118578 - RNA, 19 nt, Artificial Sequence
  Description of Artificial Sequence: Synthetic oligonucleotide
  Sense strand starting at position 3695 of SEQ ID NO: 1508
gugcucagagauggagaua

SEQ ID NO: 118579 - RNA, 19 nt, Artificial Sequence
  Description of Artificial Sequence: Synthetic oligonucleotide
  Antisense strand to SEQ ID NO: 118578
uaucuccaucucugagcac

SEQ ID NO: 118580 - RNA, 19 nt, Artificial Sequence
  Description of Artificial Sequence: Synthetic oligonucleotide
  Sense strand starting at position 3929 of SEQ ID NO: 1508
uucgaaucaugggucaaga

SEQ ID NO: 118581 - RNA, 19 nt, Artificial Sequence
  Description of Artificial Sequence: Synthetic oligonucleotide
  Antisense strand to SEQ ID NO: 118580
ucuugacccaugauucgaa

SEQ ID NO: 118582 - RNA, 19 nt, Artificial Sequence
  Description of Artificial Sequence: Synthetic oligonucleotide
  Sense strand starting at position 3963 of SEQ ID NO: 1509
aauggaagucccugucauu

SEQ ID NO: 118583 - RNA, 19 nt, Artificial Sequence
  Description of Artificial Sequence: Synthetic oligonucleotide
  Antisense strand to SEQ ID NO: 118582
aaugacagggacuuccauu

SEQ ID NO: 118584 - RNA, 19 nt, Artificial Sequence
  Description of Artificial Sequence: Synthetic oligonucleotide
  Sense strand starting at position 3741 of SEQ ID NO: 1509
gugguuaucauacagucau

SEQ ID NO: 118585 - RNA, 19 nt, Artificial Sequence
  Description of Artificial Sequence: Synthetic oligonucleotide
  Antisense strand to SEQ ID NO: 118584
augacuguaugauaaccac

SEQ ID NO: 118586 - RNA, 19 nt, Artificial Sequence
  Description of Artificial Sequence: Synthetic oligonucleotide
  Sense strand starting at position 3734 of SEQ ID NO: 1509
uuuagcagugguuaucaua

SEQ ID NO: 118587 - RNA, 19 nt, Artificial Sequence
  Description of Artificial Sequence: Synthetic oligonucleotide
  Antisense strand to SEQ ID NO: 118586
uaugauaaccacugcuaaa

SEQ ID NO: 118588 - RNA, 19 nt, Artificial Sequence
  Description of Artificial Sequence: Synthetic oligonucleotide
  Sense strand starting at position 3665 of SEQ ID NO: 1509
ucugacauguuguuaaauu

SEQ ID NO: 118589 - RNA, 19 nt, Artificial Sequence
  Description of Artificial Sequence: Synthetic oligonucleotide
  Antisense strand to SEQ ID NO: 118588
aauuuaacaacaugucaga

SEQ ID NO: 118590 - RNA, 19 nt, Artificial Sequence
  Description of Artificial Sequence: Synthetic oligonucleotide
  Sense strand starting at position 3660 of SEQ ID NO: 1509
cgauuucugacauguuguu

SEQ ID NO: 118591 - RNA, 19 nt, Artificial Sequence
  Description of Artificial Sequence: Synthetic oligonucleotide
  Antisense strand to SEQ ID NO: 118590
aacaacaugucagaaaucg

SEQ ID NO: 118592 - RNA, 19 nt, Artificial Sequence
  Description of Artificial Sequence: Synthetic oligonucleotide
  Sense strand starting at position 3586 of SEQ ID NO: 1509
auuuaaccuuucugaagag

SEQ ID NO: 118593 - RNA, 19 nt, Artificial Sequence
  Description of Artificial Sequence: Synthetic oligonucleotide
  Antisense strand to SEQ ID NO: 118592
cucuucagaaagguuaaau

SEQ ID NO: 118594 - RNA, 19 nt, Artificial Sequence
  Description of Artificial Sequence: Synthetic oligonucleotide
  Sense strand starting at position 3545 of SEQ ID NO: 1509
agcuaugagcuacauuaac

SEQ ID NO: 118595 - RNA, 19 nt, Artificial Sequence
  Description of Artificial Sequence: Synthetic oligonucleotide
  Antisense strand to SEQ ID NO: 118594
guuaauguagcucauagcu

SEQ ID NO: 118596 - RNA, 19 nt, Artificial Sequence
  Description of Artificial Sequence: Synthetic oligonucleotide
  Sense strand starting at position 3538 of SEQ ID NO: 1509
uuagaauagcuaugagcua

SEQ ID NO: 118597 - RNA, 19 nt, Artificial Sequence
  Description of Artificial Sequence: Synthetic oligonucleotide
  Antisense strand to SEQ ID NO: 118596
uagcucauagcuauucuaa

SEQ ID NO: 118598 - RNA, 19 nt, Artificial Sequence
  Description of Artificial Sequence: Synthetic oligonucleotide
  Sense strand starting at position 3460 of SEQ ID NO: 1509
uuugauuaagcuugaggag

SEQ ID NO: 118599 - RNA, 19 nt, Artificial Sequence
  Description of Artificial Sequence: Synthetic oligonucleotide
  Antisense strand to SEQ ID NO: 118598
cuccucaagcuuaaucaaa

SEQ ID NO: 118600 - RNA, 19 nt, Artificial Sequence
  Description of Artificial Sequence: Synthetic oligonucleotide
  Sense strand starting at position 3229 of SEQ ID NO: 1509
gggcauaacugggauuuag

SEQ ID NO: 118601 - RNA, 19 nt, Artificial Sequence
  Description of Artificial Sequence: Synthetic oligonucleotide
  Antisense strand to SEQ ID NO: 118600
cuaaaucccaguuaugccc

SEQ ID NO: 118602 - RNA, 19 nt, Artificial Sequence
  Description of Artificial Sequence: Synthetic oligonucleotide
  Sense strand starting at position 3205 of SEQ ID NO: 1509
ugucauucgcauuaaaucu

SEQ ID NO: 118603 - RNA, 19 nt, Artificial Sequence
  Description of Artificial Sequence: Synthetic oligonucleotide
  Antisense strand to SEQ ID NO: 118602
agauuuaaugcgaaugaca

SEQ ID NO: 118604 - RNA, 19 nt, Artificial Sequence
  Description of Artificial Sequence: Synthetic oligonucleotide
  Sense strand starting at position 3035 of SEQ ID NO: 1509
ugugcagauuuacaaauau

SEQ ID NO: 118605 - RNA, 19 nt, Artificial Sequence
  Description of Artificial Sequence: Synthetic oligonucleotide
  Antisense strand to SEQ ID NO: 118604
auauuuguaaaucugcaca

SEQ ID NO: 118606 - RNA, 19 nt, Artificial Sequence
  Description of Artificial Sequence: Synthetic oligonucleotide
  Sense strand starting at position 2969 of SEQ ID NO: 1509
agacaacuuguauguauac

SEQ ID NO: 118607 - RNA, 19 nt, Artificial Sequence
  Description of Artificial Sequence: Synthetic oligonucleotide
  Antisense strand to SEQ ID NO: 118606
guauacauacaaguugucu

SEQ ID NO: 118608 - RNA, 19 nt, Artificial Sequence
  Description of Artificial Sequence: Synthetic oligonucleotide
  Sense strand starting at position 2736 of SEQ ID NO: 1509
ugaccucaggguugaugaa

SEQ ID NO: 118609 - RNA, 19 nt, Artificial Sequence
  Description of Artificial Sequence: Synthetic oligonucleotide
  Antisense strand to SEQ ID NO: 118608
uucaucaacccugagguca

SEQ ID NO: 118610 - RNA, 19 nt, Artificial Sequence
  Description of Artificial Sequence: Synthetic oligonucleotide
  Sense strand starting at position 2733 of SEQ ID NO: 1509
guuugaccucaggguugau

SEQ ID NO: 118611 - RNA, 19 nt, Artificial Sequence
  Description of Artificial Sequence: Synthetic oligonucleotide
  Antisense strand to SEQ ID NO: 118610
aucaacccugaggucaaac

SEQ ID NO: 118612 - RNA, 19 nt, Artificial Sequence
  Description of Artificial Sequence: Synthetic oligonucleotide
  Sense strand starting at position 2379 of SEQ ID NO: 1509
cauucucugguuuaaggau

SEQ ID NO: 118613 - RNA, 19 nt, Artificial Sequence
  Description of Artificial Sequence: Synthetic oligonucleotide
  Antisense strand to SEQ ID NO: 118612
auccuuaaaccagagaaug

SEQ ID NO: 118614 - RNA, 19 nt, Artificial Sequence
  Description of Artificial Sequence: Synthetic oligonucleotide
  Sense strand starting at position 2372 of SEQ ID NO: 1509
ugaauuacauucucugguu

SEQ ID NO: 118615 - RNA, 19 nt, Artificial Sequence
  Description of Artificial Sequence: Synthetic oligonucleotide
  Antisense strand to SEQ ID NO: 118614
aaccagagaauguaauuca

SEQ ID NO: 118616 - RNA, 19 nt, Artificial Sequence
  Description of Artificial Sequence: Synthetic oligonucleotide
  Sense strand starting at position 2283 of SEQ ID NO: 1509
cugccuuaugcagacauga

SEQ ID NO: 118617 - RNA, 19 nt, Artificial Sequence
  Description of Artificial Sequence: Synthetic oligonucleotide
  Antisense strand to SEQ ID NO: 118616
ucaugucugcauaaggcag

SEQ ID NO: 118618 - RNA, 19 nt, Artificial Sequence
  Description of Artificial Sequence: Synthetic oligonucleotide
  Sense strand starting at position 2238 of SEQ ID NO: 1509
augagagugucuguuauaa

SEQ ID NO: 118619 - RNA, 19 nt, Artificial Sequence
  Description of Artificial Sequence: Synthetic oligonucleotide
  Antisense strand to SEQ ID NO: 118618
uuauaacagacacucucau

SEQ ID NO: 118620 - RNA, 19 nt, Artificial Sequence
  Description of Artificial Sequence: Synthetic oligonucleotide
  Sense strand starting at position 2187 of SEQ ID NO: 1509
aagggugauuuguagugaa

SEQ ID NO: 118621 - RNA, 19 nt, Artificial Sequence
  Description of Artificial Sequence: Synthetic oligonucleotide
  Antisense strand to SEQ ID NO: 118620
uucacuacaaaucacccuu

SEQ ID NO: 118622 - RNA, 19 nt, Artificial Sequence
  Description of Artificial Sequence: Synthetic oligonucleotide
  Sense strand starting at position 2114 of SEQ ID NO: 1509
agauuuggguguuauaaau

SEQ ID NO: 118623 - RNA, 19 nt, Artificial Sequence
  Description of Artificial Sequence: Synthetic oligonucleotide
  Antisense strand to SEQ ID NO: 118622
auuuauaacacccaaaucu

SEQ ID NO: 118624 - RNA, 19 nt, Artificial Sequence
  Description of Artificial Sequence: Synthetic oligonucleotide
  Sense strand starting at position 2045 of SEQ ID NO: 1509
auuugagccucugaaacaa

SEQ ID NO: 118625 - RNA, 19 nt, Artificial Sequence
  Description of Artificial Sequence: Synthetic oligonucleotide
  Antisense strand to SEQ ID NO: 118624
uuguuucagaggcucaaau

SEQ ID NO: 118626 - RNA, 19 nt, Artificial Sequence
  Description of Artificial Sequence: Synthetic oligonucleotide
  Sense strand starting at position 1990 of SEQ ID NO: 1509
gauguuguccaugagguuu

SEQ ID NO: 118627 - RNA, 19 nt, Artificial Sequence
  Description of Artificial Sequence: Synthetic oligonucleotide
  Antisense strand to SEQ ID NO: 118626
aaaccucauggacaacauc

SEQ ID NO: 118628 - RNA, 19 nt, Artificial Sequence
  Description of Artificial Sequence: Synthetic oligonucleotide
  Sense strand starting at position 1986 of SEQ ID NO: 1509
aggugauguuguccaugag

SEQ ID NO: 118629 - RNA, 19 nt, Artificial Sequence
  Description of Artificial Sequence: Synthetic oligonucleotide
  Antisense strand to SEQ ID NO: 118628
cucauggacaacaucaccu

SEQ ID NO: 118630 - RNA, 19 nt, Artificial Sequence
  Description of Artificial Sequence: Synthetic oligonucleotide
  Sense strand starting at position 951 of SEQ ID NO: 1509
uggucuacuccauagcuuu

SEQ ID NO: 118631 - RNA, 19 nt, Artificial Sequence
  Description of Artificial Sequence: Synthetic oligonucleotide
  Antisense strand to SEQ ID NO: 118630
aaagcuauggaguagacca

SEQ ID NO: 118632 - RNA, 19 nt, Artificial Sequence
  Description of Artificial Sequence: Synthetic oligonucleotide
  Sense strand starting at position 899 of SEQ ID NO: 1509
acauucucauaugugaagu

SEQ ID NO: 118633 - RNA, 19 nt, Artificial Sequence
  Description of Artificial Sequence: Synthetic oligonucleotide
  Antisense strand to SEQ ID NO: 118632
acuucacauaugagaaugu

SEQ ID NO: 118634 - RNA, 19 nt, Artificial Sequence
  Description of Artificial Sequence: Synthetic oligonucleotide
  Sense strand starting at position 893 of SEQ ID NO: 1509
gguauaacauucucauaug

SEQ ID NO: 118635 - RNA, 19 nt, Artificial Sequence
  Description of Artificial Sequence: Synthetic oligonucleotide
  Antisense strand to SEQ ID NO: 118634
cauaugagaauguuauacc

SEQ ID NO: 118636 - RNA, 19 nt, Artificial Sequence
  Description of Artificial Sequence: Synthetic oligonucleotide
  Sense strand starting at position 867 of SEQ ID NO: 1509
agucuuggagucugggaaa

SEQ ID NO: 118637 - RNA, 19 nt, Artificial Sequence
  Description of Artificial Sequence: Synthetic oligonucleotide
  Antisense strand to SEQ ID NO: 118636
uuucccagacuccaagacu

SEQ ID NO: 118638 - RNA, 19 nt, Artificial Sequence
  Description of Artificial Sequence: Synthetic oligonucleotide
  Sense strand starting at position 674 of SEQ ID NO: 1509
aucauuauguauucccaga

SEQ ID NO: 118639 - RNA, 19 nt, Artificial Sequence
  Description of Artificial Sequence: Synthetic oligonucleotide
  Antisense strand to SEQ ID NO: 118638
ucugggaauacauaaugau

SEQ ID NO: 118640 - RNA, 19 nt, Artificial Sequence
  Description of Artificial Sequence: Synthetic oligonucleotide
  Sense strand starting at position 657 of SEQ ID NO: 1509
uuuauccucuaaguaguau

SEQ ID NO: 118641 - RNA, 19 nt, Artificial Sequence
  Description of Artificial Sequence: Synthetic oligonucleotide
  Antisense strand to SEQ ID NO: 118640
auacuacuuagaggauaaa

SEQ ID NO: 118642 - RNA, 19 nt, Artificial Sequence
  Description of Artificial Sequence: Synthetic oligonucleotide
  Sense strand starting at position 435 of SEQ ID NO: 1509
agcagugaauaacuacauu

SEQ ID NO: 118643 - RNA, 19 nt, Artificial Sequence
  Description of Artificial Sequence: Synthetic oligonucleotide
  Antisense strand to SEQ ID NO: 118642
aauguaguuauucacugcu

SEQ ID NO: 118644 - RNA, 19 nt, Artificial Sequence
  Description of Artificial Sequence: Synthetic oligonucleotide
  Sense strand starting at position 428 of SEQ ID NO: 1509
uugucucagcagugaauaa

SEQ ID NO: 118645 - RNA, 19 nt, Artificial Sequence
  Description of Artificial Sequence: Synthetic oligonucleotide
  Antisense strand to SEQ ID NO: 118644
uuauucacugcugagacaa

SEQ ID NO: 118646 - RNA, 19 nt, Artificial Sequence
  Description of Artificial Sequence: Synthetic oligonucleotide
  Sense strand starting at position 413 of SEQ ID NO: 1509
ggacaaauggcuggauugu

SEQ ID NO: 118647 - RNA, 19 nt, Artificial Sequence
  Description of Artificial Sequence: Synthetic oligonucleotide
  Antisense strand to SEQ ID NO: 118646
acaauccagccauuugucc

SEQ ID NO: 118648 - RNA, 19 nt, Artificial Sequence
  Description of Artificial Sequence: Synthetic oligonucleotide
  Sense strand starting at position 329 of SEQ ID NO: 1509
cuugaugaagacuguuaac

SEQ ID NO: 118649 - RNA, 19 nt, Artificial Sequence
  Description of Artificial Sequence: Synthetic oligonucleotide
  Antisense strand to SEQ ID NO: 118648
guuaacagucuucaucaag

SEQ ID NO: 118650 - RNA, 19 nt, Artificial Sequence
  Description of Artificial Sequence: Synthetic oligonucleotide
  Sense strand starting at position 243 of SEQ ID NO: 1509
ggaaaucuucucuaaagcu

SEQ ID NO: 118651 - RNA, 19 nt, Artificial Sequence
  Description of Artificial Sequence: Synthetic oligonucleotide
  Antisense strand to SEQ ID NO: 118650
agcuuuagagaagauuucc

SEQ ID NO: 118652 - RNA, 19 nt, Artificial Sequence
  Description of Artificial Sequence: Synthetic oligonucleotide
  Sense strand starting at position 242 of SEQ ID NO: 1509
uggaaaucuucucuaaagc

SEQ ID NO: 118653 - RNA, 19 nt, Artificial Sequence
  Description of Artificial Sequence: Synthetic oligonucleotide
  Antisense strand to SEQ ID NO: 118652
gcuuuagagaagauuucca

SEQ ID NO: 118654 - RNA, 19 nt, Artificial Sequence
  Description of Artificial Sequence: Synthetic oligonucleotide
  Sense strand starting at position 232 of SEQ ID NO: 1509
cacuuugugcuggaaaucu

SEQ ID NO: 118655 - RNA, 19 nt, Artificial Sequence
  Description of Artificial Sequence: Synthetic oligonucleotide
  Antisense strand to SEQ ID NO: 118654
agauuuccagcacaaagug

SEQ ID NO: 118656 - RNA, 19 nt, Artificial Sequence
  Description of Artificial Sequence: Synthetic oligonucleotide
  Sense strand starting at position 231 of SEQ ID NO: 1509
ucacuuugugcuggaaauc

SEQ ID NO: 118657 - RNA, 19 nt, Artificial Sequence
  Description of Artificial Sequence: Synthetic oligonucleotide
  Antisense strand to SEQ ID NO: 118656
gauuuccagcacaaaguga

SEQ ID NO: 118658 - RNA, 19 nt, Artificial Sequence
  Description of Artificial Sequence: Synthetic oligonucleotide
  Sense strand starting at position 161 of SEQ ID NO: 1509
uuggauauuugauacucua

SEQ ID NO: 118659 - RNA, 19 nt, Artificial Sequence
  Description of Artificial Sequence: Synthetic oligonucleotide
  Antisense strand to SEQ ID NO: 118658
uagaguaucaaauauccaa

SEQ ID NO: 118660 - RNA, 19 nt, Artificial Sequence
  Description of Artificial Sequence: Synthetic oligonucleotide
  Sense strand starting at position 66 of SEQ ID NO: 1509
gggaaagcaguauguagua

SEQ ID NO: 118661 - RNA, 19 nt, Artificial Sequence
  Description of Artificial Sequence: Synthetic oligonucleotide
  Antisense strand to SEQ ID NO: 118660
uacuacauacugcuuuccc

SEQ ID NO: 118662 - RNA, 19 nt, Artificial Sequence
  Description of Artificial Sequence: Synthetic oligonucleotide
  Sense strand starting at position 3970 of SEQ ID NO: 1510
ugcuucggugcuuuaauau

SEQ ID NO: 118663 - RNA, 19 nt, Artificial Sequence
  Description of Artificial Sequence: Synthetic oligonucleotide
  Antisense strand to SEQ ID NO: 118662
auauuaaagcaccgaagca

SEQ ID NO: 118664 - RNA, 19 nt, Artificial Sequence
  Description of Artificial Sequence: Synthetic oligonucleotide
  Sense strand starting at position 3849 of SEQ ID NO: 1510
gauuaugaugcagggacau

SEQ ID NO: 118665 - RNA, 19 nt, Artificial Sequence
  Description of Artificial Sequence: Synthetic oligonucleotide
  Antisense strand to SEQ ID NO: 118664
augucccugcaucauaauc

SEQ ID NO: 118666 - RNA, 19 nt, Artificial Sequence
  Description of Artificial Sequence: Synthetic oligonucleotide
  Sense strand starting at position 3836 of SEQ ID NO: 1510
agacuuuagcugugauuau

SEQ ID NO: 118667 - RNA, 19 nt, Artificial Sequence
  Description of Artificial Sequence: Synthetic oligonucleotide
  Antisense strand to SEQ ID NO: 118666
auaaucacagcuaaagucu

SEQ ID NO: 118668 - RNA, 19 nt, Artificial Sequence
  Description of Artificial Sequence: Synthetic oligonucleotide
  Sense strand starting at position 3833 of SEQ ID NO: 1510
ggaagacuuuagcugugau

SEQ ID NO: 118669 - RNA, 19 nt, Artificial Sequence
  Description of Artificial Sequence: Synthetic oligonucleotide
  Antisense strand to SEQ ID NO: 118668
aucacagcuaaagucuucc

SEQ ID NO: 118670 - RNA, 19 nt, Artificial Sequence
  Description of Artificial Sequence: Synthetic oligonucleotide
  Sense strand starting at position 3558 of SEQ ID NO: 1510
ugaacuugagugcacuuaa

SEQ ID NO: 118671 - RNA, 19 nt, Artificial Sequence
  Description of Artificial Sequence: Synthetic oligonucleotide
  Antisense strand to SEQ ID NO: 118670
uuaagugcacucaaguuca

SEQ ID NO: 118672 - RNA, 19 nt, Artificial Sequence
  Description of Artificial Sequence: Synthetic oligonucleotide
  Sense strand starting at position 3525 of SEQ ID NO: 1510
guguuauaugcagaagaug

SEQ ID NO: 118673 - RNA, 19 nt, Artificial Sequence
  Description of Artificial Sequence: Synthetic oligonucleotide
  Antisense strand to SEQ ID NO: 118672
caucuucugcauauaacac

SEQ ID NO: 118674 - RNA, 19 nt, Artificial Sequence
  Description of Artificial Sequence: Synthetic oligonucleotide
  Sense strand starting at position 3523 of SEQ ID NO: 1510
cuguguuauaugcagaaga

SEQ ID NO: 118675 - RNA, 19 nt, Artificial Sequence
  Description of Artificial Sequence: Synthetic oligonucleotide
  Antisense strand to SEQ ID NO: 118674
ucuucugcauauaacacag

SEQ ID NO: 118676 - RNA, 19 nt, Artificial Sequence
  Description of Artificial Sequence: Synthetic oligonucleotide
  Sense strand starting at position 3452 of SEQ ID NO: 1510
uguuauacugacgaugaau

SEQ ID NO: 118677 - RNA, 19 nt, Artificial Sequence
  Description of Artificial Sequence: Synthetic oligonucleotide
  Antisense strand to SEQ ID NO: 118676
auucaucgucaguauaaca

SEQ ID NO: 118678 - RNA, 19 nt, Artificial Sequence
  Description of Artificial Sequence: Synthetic oligonucleotide
  Sense strand starting at position 3449 of SEQ ID NO: 1510
cuguguuauacugacgaug

SEQ ID NO: 118679 - RNA, 19 nt, Artificial Sequence
  Description of Artificial Sequence: Synthetic oligonucleotide
  Antisense strand to SEQ ID NO: 118678
caucgucaguauaacacag

SEQ ID NO: 118680 - RNA, 19 nt, Artificial Sequence
  Description of Artificial Sequence: Synthetic oligonucleotide
  Sense strand starting at position 3278 of SEQ ID NO: 1510
gucacugcuguuuaucaga

SEQ ID NO: 118681 - RNA, 19 nt, Artificial Sequence
  Description of Artificial Sequence: Synthetic oligonucleotide
  Antisense strand to SEQ ID NO: 118680
ucugauaaacagcagugac

SEQ ID NO: 118682 - RNA, 19 nt, Artificial Sequence
  Description of Artificial Sequence: Synthetic oligonucleotide
  Sense strand starting at position 3245 of SEQ ID NO: 1510
aaaucucagcgaggaagaa

SEQ ID NO: 118683 - RNA, 19 nt, Artificial Sequence
  Description of Artificial Sequence: Synthetic oligonucleotide
  Antisense strand to SEQ ID NO: 118682
uucuuccucgcugagauuu

SEQ ID NO: 118684 - RNA, 19 nt, Artificial Sequence
  Description of Artificial Sequence: Synthetic oligonucleotide
  Sense strand starting at position 3242 of SEQ ID NO: 1510
auuaaaucucagcgaggaa

SEQ ID NO: 118685 - RNA, 19 nt, Artificial Sequence
  Description of Artificial Sequence: Synthetic oligonucleotide
  Antisense strand to SEQ ID NO: 118684
uuccucgcugagauuuaau

SEQ ID NO: 118686 - RNA, 19 nt, Artificial Sequence
  Description of Artificial Sequence: Synthetic oligonucleotide
  Sense strand starting at position 3241 of SEQ ID NO: 1510
cauuaaaucucagcgagga

SEQ ID NO: 118687 - RNA, 19 nt, Artificial Sequence
  Description of Artificial Sequence: Synthetic oligonucleotide
  Antisense strand to SEQ ID NO: 118686
uccucgcugagauuuaaug

SEQ ID NO: 118688 - RNA, 19 nt, Artificial Sequence
  Description of Artificial Sequence: Synthetic oligonucleotide
  Sense strand starting at position 3163 of SEQ ID NO: 1510
uggagacuccuauguccuu

SEQ ID NO: 118689 - RNA, 19 nt, Artificial Sequence
  Description of Artificial Sequence: Synthetic oligonucleotide
  Antisense strand to SEQ ID NO: 118688
aaggacauaggagucucca

SEQ ID NO: 118690 - RNA, 19 nt, Artificial Sequence
  Description of Artificial Sequence: Synthetic oligonucleotide
  Sense strand starting at position 3042 of SEQ ID NO: 1510
uguguuuauguguaaauac

SEQ ID NO: 118691 - RNA, 19 nt, Artificial Sequence
  Description of Artificial Sequence: Synthetic oligonucleotide
  Antisense strand to SEQ ID NO: 118690
guauuuacacauaaacaca

SEQ ID NO: 118692 - RNA, 19 nt, Artificial Sequence
  Description of Artificial Sequence: Synthetic oligonucleotide
  Sense strand starting at position 2874 of SEQ ID NO: 1510
aagagauuguugcuacuau

SEQ ID NO: 118693 - RNA, 19 nt, Artificial Sequence
  Description of Artificial Sequence: Synthetic oligonucleotide
  Antisense strand to SEQ ID NO: 118692
auaguagcaacaaucucuu

SEQ ID NO: 118694 - RNA, 19 nt, Artificial Sequence
  Description of Artificial Sequence: Synthetic oligonucleotide
  Sense strand starting at position 2833 of SEQ ID NO: 1510
uguagauguuaacucuuua

SEQ ID NO: 118695 - RNA, 19 nt, Artificial Sequence
  Description of Artificial Sequence: Synthetic oligonucleotide
  Antisense strand to SEQ ID NO: 118694
uaaagaguuaacaucuaca

SEQ ID NO: 118696 - RNA, 19 nt, Artificial Sequence
  Description of Artificial Sequence: Synthetic oligonucleotide
  Sense strand starting at position 2825 of SEQ ID NO: 1510
acucuuaguguagauguua

SEQ ID NO: 118697 - RNA, 19 nt, Artificial Sequence
  Description of Artificial Sequence: Synthetic oligonucleotide
  Antisense strand to SEQ ID NO: 118696
uaacaucuacacuaagagu

SEQ ID NO: 118698 - RNA, 19 nt, Artificial Sequence
  Description of Artificial Sequence: Synthetic oligonucleotide
  Sense strand starting at position 2798 of SEQ ID NO: 1510
uacaguuuccgaugaauaa

SEQ ID NO: 118699 - RNA, 19 nt, Artificial Sequence
  Description of Artificial Sequence: Synthetic oligonucleotide
  Antisense strand to SEQ ID NO: 118698
uuauucaucggaaacugua

SEQ ID NO: 118700 - RNA, 19 nt, Artificial Sequence
  Description of Artificial Sequence: Synthetic oligonucleotide
  Sense strand starting at position 2615 of SEQ ID NO: 1510
cccuuuagacaucgagaga

SEQ ID NO: 118701 - RNA, 19 nt, Artificial Sequence
  Description of Artificial Sequence: Synthetic oligonucleotide
  Antisense strand to SEQ ID NO: 118700
ucucucgaugucuaaaggg

SEQ ID NO: 118702 - RNA, 19 nt, Artificial Sequence
  Description of Artificial Sequence: Synthetic oligonucleotide
  Sense strand starting at position 2368 of SEQ ID NO: 1510
gucauagacagcugaauug

SEQ ID NO: 118703 - RNA, 19 nt, Artificial Sequence
  Description of Artificial Sequence: Synthetic oligonucleotide
  Antisense strand to SEQ ID NO: 118702
caauucagcugucuaugac

SEQ ID NO: 118704 - RNA, 19 nt, Artificial Sequence
  Description of Artificial Sequence: Synthetic oligonucleotide
  Sense strand starting at position 2343 of SEQ ID NO: 1510
gcaaacuccuuauuguaga

SEQ ID NO: 118705 - RNA, 19 nt, Artificial Sequence
  Description of Artificial Sequence: Synthetic oligonucleotide
  Antisense strand to SEQ ID NO: 118704
ucuacaauaaggaguuugc

SEQ ID NO: 118706 - RNA, 19 nt, Artificial Sequence
  Description of Artificial Sequence: Synthetic oligonucleotide
  Sense strand starting at position 2250 of SEQ ID NO: 1510
ugaugauaaugccauuuau

SEQ ID NO: 118707 - RNA, 19 nt, Artificial Sequence
  Description of Artificial Sequence: Synthetic oligonucleotide
  Antisense strand to SEQ ID NO: 118706
auaaauggcauuaucauca

SEQ ID NO: 118708 - RNA, 19 nt, Artificial Sequence
  Description of Artificial Sequence: Synthetic oligonucleotide
  Sense strand starting at position 2198 of SEQ ID NO: 1510
agaauugguaacugauagu

SEQ ID NO: 118709 - RNA, 19 nt, Artificial Sequence
  Description of Artificial Sequence: Synthetic oligonucleotide
  Antisense strand to SEQ ID NO: 118708
acuaucaguuaccaauucu

SEQ ID NO: 118710 - RNA, 19 nt, Artificial Sequence
  Description of Artificial Sequence: Synthetic oligonucleotide
  Sense strand starting at position 2192 of SEQ ID NO: 1510
gccagaagaauugguaacu

SEQ ID NO: 118711 - RNA, 19 nt, Artificial Sequence
  Description of Artificial Sequence: Synthetic oligonucleotide
  Antisense strand to SEQ ID NO: 118710
aguuaccaauucuucuggc

SEQ ID NO: 118712 - RNA, 19 nt, Artificial Sequence
  Description of Artificial Sequence: Synthetic oligonucleotide
  Sense strand starting at position 2082 of SEQ ID NO: 1510
acauuuguguaugcucauu

SEQ ID NO: 118713 - RNA, 19 nt, Artificial Sequence
  Description of Artificial Sequence: Synthetic oligonucleotide
  Antisense strand to SEQ ID NO: 118712
aaugagcauacacaaaugu

SEQ ID NO: 118714 - RNA, 19 nt, Artificial Sequence
  Description of Artificial Sequence: Synthetic oligonucleotide
  Sense strand starting at position 2051 of SEQ ID NO: 1510
ucccuuuguaaugaguguu

SEQ ID NO: 118715 - RNA, 19 nt, Artificial Sequence
  Description of Artificial Sequence: Synthetic oligonucleotide
  Antisense strand to SEQ ID NO: 118714
aacacucauuacaaaggga

SEQ ID NO: 118716 - RNA, 19 nt, Artificial Sequence
  Description of Artificial Sequence: Synthetic oligonucleotide
  Sense strand starting at position 2044 of SEQ ID NO: 1510
uaacgcgucccuuuguaau

SEQ ID NO: 118717 - RNA, 19 nt, Artificial Sequence
  Description of Artificial Sequence: Synthetic oligonucleotide
  Antisense strand to SEQ ID NO: 118716
auuacaaagggacgcguua

SEQ ID NO: 118718 - RNA, 19 nt, Artificial Sequence
  Description of Artificial Sequence: Synthetic oligonucleotide
  Sense strand starting at position 1990 of SEQ ID NO: 1510
gauguuggccaugagguuu

SEQ ID NO: 118719 - RNA, 19 nt, Artificial Sequence
  Description of Artificial Sequence: Synthetic oligonucleotide
  Antisense strand to SEQ ID NO: 118718
aaaccucauggccaacauc

SEQ ID NO: 118720 - RNA, 19 nt, Artificial Sequence
  Description of Artificial Sequence: Synthetic oligonucleotide
  Sense strand starting at position 989 of SEQ ID NO: 1510
aguaucugauggguagaga

SEQ ID NO: 118721 - RNA, 19 nt, Artificial Sequence
  Description of Artificial Sequence: Synthetic oligonucleotide
  Antisense strand to SEQ ID NO: 118720
ucucuacccaucagauacu

SEQ ID NO: 118722 - RNA, 19 nt, Artificial Sequence
  Description of Artificial Sequence: Synthetic oligonucleotide
  Sense strand starting at position 987 of SEQ ID NO: 1510
uaaguaucugauggguaga

SEQ ID NO: 118723 - RNA, 19 nt, Artificial Sequence
  Description of Artificial Sequence: Synthetic oligonucleotide
  Antisense strand to SEQ ID NO: 118722
ucuacccaucagauacuua

SEQ ID NO: 118724 - RNA, 19 nt, Artificial Sequence
  Description of Artificial Sequence: Synthetic oligonucleotide
  Sense strand starting at position 943 of SEQ ID NO: 1510
ggcaucauuguaugagagu

SEQ ID NO: 118725 - RNA, 19 nt, Artificial Sequence
  Description of Artificial Sequence: Synthetic oligonucleotide
  Antisense strand to SEQ ID NO: 118724
acucucauacaaugaugcc

SEQ ID NO: 118726 - RNA, 19 nt, Artificial Sequence
  Description of Artificial Sequence: Synthetic oligonucleotide
  Sense strand starting at position 924 of SEQ ID NO: 1510
ugagaugaauaugagauga

SEQ ID NO: 118727 - RNA, 19 nt, Artificial Sequence
  Description of Artificial Sequence: Synthetic oligonucleotide
  Antisense strand to SEQ ID NO: 118726
ucaucucauauucaucuca

SEQ ID NO: 118728 - RNA, 19 nt, Artificial Sequence
  Description of Artificial Sequence: Synthetic oligonucleotide
  Sense strand starting at position 494 of SEQ ID NO: 1510
gagcaugauuucuaagaug

SEQ ID NO: 118729 - RNA, 19 nt, Artificial Sequence
  Description of Artificial Sequence: Synthetic oligonucleotide
  Antisense strand to SEQ ID NO: 118728
caucuuagaaaucaugcuc

SEQ ID NO: 118730 - RNA, 19 nt, Artificial Sequence
  Description of Artificial Sequence: Synthetic oligonucleotide
  Sense strand starting at position 394 of SEQ ID NO: 1510
acuagacgccaucagaauu

SEQ ID NO: 118731 - RNA, 19 nt, Artificial Sequence
  Description of Artificial Sequence: Synthetic oligonucleotide
  Antisense strand to SEQ ID NO: 118730
aauucugauggcgucuagu

SEQ ID NO: 118732 - RNA, 19 nt, Artificial Sequence
  Description of Artificial Sequence: Synthetic oligonucleotide
  Sense strand starting at position 369 of SEQ ID NO: 1510
guaauuauuucggagagau

SEQ ID NO: 118733 - RNA, 19 nt, Artificial Sequence
  Description of Artificial Sequence: Synthetic oligonucleotide
  Antisense strand to SEQ ID NO: 118732
aucucuccgaaauaauuac

SEQ ID NO: 118734 - RNA, 19 nt, Artificial Sequence
  Description of Artificial Sequence: Synthetic oligonucleotide
  Sense strand starting at position 358 of SEQ ID NO: 1510
accacauggcaguaauuau

SEQ ID NO: 118735 - RNA, 19 nt, Artificial Sequence
  Description of Artificial Sequence: Synthetic oligonucleotide
  Antisense strand to SEQ ID NO: 118734
auaauuacugccauguggu

SEQ ID NO: 118736 - RNA, 19 nt, Artificial Sequence
  Description of Artificial Sequence: Synthetic oligonucleotide
  Sense strand starting at position 329 of SEQ ID NO: 1510
ucacuuaugugguccuaca

SEQ ID NO: 118737 - RNA, 19 nt, Artificial Sequence
  Description of Artificial Sequence: Synthetic oligonucleotide
  Antisense strand to SEQ ID NO: 118736
uguaggaccacauaaguga

SEQ ID NO: 118738 - RNA, 19 nt, Artificial Sequence
  Description of Artificial Sequence: Synthetic oligonucleotide
  Sense strand starting at position 59 of SEQ ID NO: 1510
ucuuacauuuguuugcaua

SEQ ID NO: 118739 - RNA, 19 nt, Artificial Sequence
  Description of Artificial Sequence: Synthetic oligonucleotide
  Antisense strand to SEQ ID NO: 118738
uaugcaaacaaauguaaga

SEQ ID NO: 118740 - RNA, 19 nt, Artificial Sequence
  Description of Artificial Sequence: Synthetic oligonucleotide
  Sense strand starting at position 58 of SEQ ID NO: 1510
uucuuacauuuguuugcau

SEQ ID NO: 118741 - RNA, 19 nt, Artificial Sequence
  Description of Artificial Sequence: Synthetic oligonucleotide
  Antisense strand to SEQ ID NO: 118740
augcaaacaaauguaagaa

SEQ ID NO: 118742 - RNA, 19 nt, Artificial Sequence
  Description of Artificial Sequence: Synthetic oligonucleotide
  Sense strand starting at position 3983 of SEQ ID NO: 1511
auugucuugugaguuauuu

SEQ ID NO: 118743 - RNA, 19 nt, Artificial Sequence
  Description of Artificial Sequence: Synthetic oligonucleotide
  Antisense strand to SEQ ID NO: 118742
aaauaacucacaagacaau

SEQ ID NO: 118744 - RNA, 19 nt, Artificial Sequence
  Description of Artificial Sequence: Synthetic oligonucleotide
  Sense strand starting at position 3979 of SEQ ID NO: 1511
gugcauugucuugugaguu

SEQ ID NO: 118745 - RNA, 19 nt, Artificial Sequence
  Description of Artificial Sequence: Synthetic oligonucleotide
  Antisense strand to SEQ ID NO: 118744
aacucacaagacaaugcac

SEQ ID NO: 118746 - RNA, 19 nt, Artificial Sequence
  Description of Artificial Sequence: Synthetic oligonucleotide
  Sense strand starting at position 3808 of SEQ ID NO: 1511
caauaucuugccgaaggca

SEQ ID NO: 118747 - RNA, 19 nt, Artificial Sequence
  Description of Artificial Sequence: Synthetic oligonucleotide
  Antisense strand to SEQ ID NO: 118746
ugccuucggcaagauauug

SEQ ID NO: 118748 - RNA, 19 nt, Artificial Sequence
  Description of Artificial Sequence: Synthetic oligonucleotide
  Sense strand starting at position 3729 of SEQ ID NO: 1511
gaccacagcugaguaaauu

SEQ ID NO: 118749 - RNA, 19 nt, Artificial Sequence
  Description of Artificial Sequence: Synthetic oligonucleotide
  Antisense strand to SEQ ID NO: 118748
aauuuacucagcugugguc

SEQ ID NO: 118750 - RNA, 19 nt, Artificial Sequence
  Description of Artificial Sequence: Synthetic oligonucleotide
  Sense strand starting at position 3699 of SEQ ID NO: 1511
augaucaaacgucauguaa

SEQ ID NO: 118751 - RNA, 19 nt, Artificial Sequence
  Description of Artificial Sequence: Synthetic oligonucleotide
  Antisense strand to SEQ ID NO: 118750
uuacaugacguuugaucau

SEQ ID NO: 118752 - RNA, 19 nt, Artificial Sequence
  Description of Artificial Sequence: Synthetic oligonucleotide
  Sense strand starting at position 3677 of SEQ ID NO: 1511
aggaaacuuacgggauguu

SEQ ID NO: 118753 - RNA, 19 nt, Artificial Sequence
  Description of Artificial Sequence: Synthetic oligonucleotide
  Antisense strand to SEQ ID NO: 118752
aacaucccguaaguuuccu

SEQ ID NO: 118754 - RNA, 19 nt, Artificial Sequence
  Description of Artificial Sequence: Synthetic oligonucleotide
  Sense strand starting at position 3471 of SEQ ID NO: 1511
cagagaggcagaugaugua

SEQ ID NO: 118755 - RNA, 19 nt, Artificial Sequence
  Description of Artificial Sequence: Synthetic oligonucleotide
  Antisense strand to SEQ ID NO: 118754
uacaucaucugccucucug

SEQ ID NO: 118756 - RNA, 19 nt, Artificial Sequence
  Description of Artificial Sequence: Synthetic oligonucleotide
  Sense strand starting at position 3220 of SEQ ID NO: 1511
ccugauuugguuggucagu

SEQ ID NO: 118757 - RNA, 19 nt, Artificial Sequence
  Description of Artificial Sequence: Synthetic oligonucleotide
  Antisense strand to SEQ ID NO: 118756
acugaccaaccaaaucagg

SEQ ID NO: 118758 - RNA, 19 nt, Artificial Sequence
  Description of Artificial Sequence: Synthetic oligonucleotide
  Sense strand starting at position 3178 of SEQ ID NO: 1511
gugcuuucuguccuaaugu

SEQ ID NO: 118759 - RNA, 19 nt, Artificial Sequence
  Description of Artificial Sequence: Synthetic oligonucleotide
  Antisense strand to SEQ ID NO: 118758
acauuaggacagaaagcac

SEQ ID NO: 118760 - RNA, 19 nt, Artificial Sequence
  Description of Artificial Sequence: Synthetic oligonucleotide
  Sense strand starting at position 3152 of SEQ ID NO: 1511
aggcuuagacugggauaga

SEQ ID NO: 118761 - RNA, 19 nt, Artificial Sequence
  Description of Artificial Sequence: Synthetic oligonucleotide
  Antisense strand to SEQ ID NO: 118760
ucuaucccagucuaagccu

SEQ ID NO: 118762 - RNA, 19 nt, Artificial Sequence
  Description of Artificial Sequence: Synthetic oligonucleotide
  Sense strand starting at position 3150 of SEQ ID NO: 1511
gaaggcuuagacugggaua

SEQ ID NO: 118763 - RNA, 19 nt, Artificial Sequence
  Description of Artificial Sequence: Synthetic oligonucleotide
  Antisense strand to SEQ ID NO: 118762
uaucccagucuaagccuuc

SEQ ID NO: 118764 - RNA, 19 nt, Artificial Sequence
  Description of Artificial Sequence: Synthetic oligonucleotide
  Sense strand starting at position 2999 of SEQ ID NO: 1511
guguuaucaguagaauuga

SEQ ID NO: 118765 - RNA, 19 nt, Artificial Sequence
  Description of Artificial Sequence: Synthetic oligonucleotide
  Antisense strand to SEQ ID NO: 118764
ucaauucuacugauaacac

SEQ ID NO: 118766 - RNA, 19 nt, Artificial Sequence
  Description of Artificial Sequence: Synthetic oligonucleotide
  Sense strand starting at position 2997 of SEQ ID NO: 1511
aaguguuaucaguagaauu

SEQ ID NO: 118767 - RNA, 19 nt, Artificial Sequence
  Description of Artificial Sequence: Synthetic oligonucleotide
  Antisense strand to SEQ ID NO: 118766
aauucuacugauaacacuu

SEQ ID NO: 118768 - RNA, 19 nt, Artificial Sequence
  Description of Artificial Sequence: Synthetic oligonucleotide
  Sense strand starting at position 2935 of SEQ ID NO: 1511
gauauuagugaucaguucu

SEQ ID NO: 118769 - RNA, 19 nt, Artificial Sequence
  Description of Artificial Sequence: Synthetic oligonucleotide
  Antisense strand to SEQ ID NO: 118768
agaacugaucacuaauauc

SEQ ID NO: 118770 - RNA, 19 nt, Artificial Sequence
  Description of Artificial Sequence: Synthetic oligonucleotide
  Sense strand starting at position 2934 of SEQ ID NO: 1511
agauauuagugaucaguuc

SEQ ID NO: 118771 - RNA, 19 nt, Artificial Sequence
  Description of Artificial Sequence: Synthetic oligonucleotide
  Antisense strand to SEQ ID NO: 118770
gaacugaucacuaauaucu

SEQ ID NO: 118772 - RNA, 19 nt, Artificial Sequence
  Description of Artificial Sequence: Synthetic oligonucleotide
  Sense strand starting at position 2845 of SEQ ID NO: 1511
augugacaucccuaaagca

SEQ ID NO: 118773 - RNA, 19 nt, Artificial Sequence
  Description of Artificial Sequence: Synthetic oligonucleotide
  Antisense strand to SEQ ID NO: 118772
ugcuuuagggaugucacau

SEQ ID NO: 118774 - RNA, 19 nt, Artificial Sequence
  Description of Artificial Sequence: Synthetic oligonucleotide
  Sense strand starting at position 2667 of SEQ ID NO: 1511
ugaaucaugugacuuacau

SEQ ID NO: 118775 - RNA, 19 nt, Artificial Sequence
  Description of Artificial Sequence: Synthetic oligonucleotide
  Antisense strand to SEQ ID NO: 118774
auguaagucacaugauuca

SEQ ID NO: 118776 - RNA, 19 nt, Artificial Sequence
  Description of Artificial Sequence: Synthetic oligonucleotide
  Sense strand starting at position 2596 of SEQ ID NO: 1511
aucuuuauuuauggagaga

SEQ ID NO: 118777 - RNA, 19 nt, Artificial Sequence
  Description of Artificial Sequence: Synthetic oligonucleotide
  Antisense strand to SEQ ID NO: 118776
ucucuccauaaauaaagau

SEQ ID NO: 118778 - RNA, 19 nt, Artificial Sequence
  Description of Artificial Sequence: Synthetic oligonucleotide
  Sense strand starting at position 2417 of SEQ ID NO: 1511
gggaauuucugugauaauu

SEQ ID NO: 118779 - RNA, 19 nt, Artificial Sequence
  Description of Artificial Sequence: Synthetic oligonucleotide
  Antisense strand to SEQ ID NO: 118778
aauuaucacagaaauuccc

SEQ ID NO: 118780 - RNA, 19 nt, Artificial Sequence
  Description of Artificial Sequence: Synthetic oligonucleotide
  Sense strand starting at position 2223 of SEQ ID NO: 1511
augaaugaauguuuggcaa

SEQ ID NO: 118781 - RNA, 19 nt, Artificial Sequence
  Description of Artificial Sequence: Synthetic oligonucleotide
  Antisense strand to SEQ ID NO: 118780
uugccaaacauucauucau

SEQ ID NO: 118782 - RNA, 19 nt, Artificial Sequence
  Description of Artificial Sequence: Synthetic oligonucleotide
  Sense strand starting at position 2143 of SEQ ID NO: 1511
guagauuuguagcuuccuu

SEQ ID NO: 118783 - RNA, 19 nt, Artificial Sequence
  Description of Artificial Sequence: Synthetic oligonucleotide
  Antisense strand to SEQ ID NO: 118782
aaggaagcuacaaaucuac

SEQ ID NO: 118784 - RNA, 19 nt, Artificial Sequence
  Description of Artificial Sequence: Synthetic oligonucleotide
  Sense strand starting at position 2139 of SEQ ID NO: 1511
ugugguagauuuguagcuu

SEQ ID NO: 118785 - RNA, 19 nt, Artificial Sequence
  Description of Artificial Sequence: Synthetic oligonucleotide
  Antisense strand to SEQ ID NO: 118784
aagcuacaaaucuaccaca

SEQ ID NO: 118786 - RNA, 19 nt, Artificial Sequence
  Description of Artificial Sequence: Synthetic oligonucleotide
  Sense strand starting at position 2081 of SEQ ID NO: 1511
cuguguaaacauuauuaga

SEQ ID NO: 118787 - RNA, 19 nt, Artificial Sequence
  Description of Artificial Sequence: Synthetic oligonucleotide
  Antisense strand to SEQ ID NO: 118786
ucuaauaauguuuacacag

SEQ ID NO: 118788 - RNA, 19 nt, Artificial Sequence
  Description of Artificial Sequence: Synthetic oligonucleotide
  Sense strand starting at position 2010 of SEQ ID NO: 1511
guuugaaauggaggcauaa

SEQ ID NO: 118789 - RNA, 19 nt, Artificial Sequence
  Description of Artificial Sequence: Synthetic oligonucleotide
  Antisense strand to SEQ ID NO: 118788
uuaugccuccauuucaaac

SEQ ID NO: 118790 - RNA, 19 nt, Artificial Sequence
  Description of Artificial Sequence: Synthetic oligonucleotide
  Sense strand starting at position 2001 of SEQ ID NO: 1511
ugguacugaguuugaaaug

SEQ ID NO: 118791 - RNA, 19 nt, Artificial Sequence
  Description of Artificial Sequence: Synthetic oligonucleotide
  Antisense strand to SEQ ID NO: 118790
cauuucaaacucaguacca

SEQ ID NO: 118792 - RNA, 19 nt, Artificial Sequence
  Description of Artificial Sequence: Synthetic oligonucleotide
  Sense strand starting at position 1003 of SEQ ID NO: 1511
cccauauaugccugaacag

SEQ ID NO: 118793 - RNA, 19 nt, Artificial Sequence
  Description of Artificial Sequence: Synthetic oligonucleotide
  Antisense strand to SEQ ID NO: 118792
cuguucaggcauauauggg

SEQ ID NO: 118794 - RNA, 19 nt, Artificial Sequence
  Description of Artificial Sequence: Synthetic oligonucleotide
  Sense strand starting at position 980 of SEQ ID NO: 1511
auccgugguauccaugaua

SEQ ID NO: 118795 - RNA, 19 nt, Artificial Sequence
  Description of Artificial Sequence: Synthetic oligonucleotide
  Antisense strand to SEQ ID NO: 118794
uaucauggauaccacggau

SEQ ID NO: 118796 - RNA, 19 nt, Artificial Sequence
  Description of Artificial Sequence: Synthetic oligonucleotide
  Sense strand starting at position 949 of SEQ ID NO: 1511
acagcugguauugaaaguu

SEQ ID NO: 118797 - RNA, 19 nt, Artificial Sequence
  Description of Artificial Sequence: Synthetic oligonucleotide
  Antisense strand to SEQ ID NO: 118796
aacuuucaauaccagcugu

SEQ ID NO: 118798 - RNA, 19 nt, Artificial Sequence
  Description of Artificial Sequence: Synthetic oligonucleotide
  Sense strand starting at position 738 of SEQ ID NO: 1511
ugggcagaauauguaauau

SEQ ID NO: 118799 - RNA, 19 nt, Artificial Sequence
  Description of Artificial Sequence: Synthetic oligonucleotide
  Antisense strand to SEQ ID NO: 118798
auauuacauauucugccca

SEQ ID NO: 118800 - RNA, 19 nt, Artificial Sequence
  Description of Artificial Sequence: Synthetic oligonucleotide
  Sense strand starting at position 737 of SEQ ID NO: 1511
augggcagaauauguaaua

SEQ ID NO: 118801 - RNA, 19 nt, Artificial Sequence
  Description of Artificial Sequence: Synthetic oligonucleotide
  Antisense strand to SEQ ID NO: 118800
uauuacauauucugcccau

SEQ ID NO: 118802 - RNA, 19 nt, Artificial Sequence
  Description of Artificial Sequence: Synthetic oligonucleotide
  Sense strand starting at position 678 of SEQ ID NO: 1511
auugauggauuguuuaaac

SEQ ID NO: 118803 - RNA, 19 nt, Artificial Sequence
  Description of Artificial Sequence: Synthetic oligonucleotide
  Antisense strand to SEQ ID NO: 118802
guuuaaacaauccaucaau

SEQ ID NO: 118804 - RNA, 19 nt, Artificial Sequence
  Description of Artificial Sequence: Synthetic oligonucleotide
  Sense strand starting at position 673 of SEQ ID NO: 1511
agccaauugauggauuguu

SEQ ID NO: 118805 - RNA, 19 nt, Artificial Sequence
  Description of Artificial Sequence: Synthetic oligonucleotide
  Antisense strand to SEQ ID NO: 118804
aacaauccaucaauuggcu

SEQ ID NO: 118806 - RNA, 19 nt, Artificial Sequence
  Description of Artificial Sequence: Synthetic oligonucleotide
  Sense strand starting at position 570 of SEQ ID NO: 1511
uaaaucuugguguaagucu

SEQ ID NO: 118807 - RNA, 19 nt, Artificial Sequence
  Description of Artificial Sequence: Synthetic oligonucleotide
  Antisense strand to SEQ ID NO: 118806
agacuuacaccaagauuua

SEQ ID NO: 118808 - RNA, 19 nt, Artificial Sequence
  Description of Artificial Sequence: Synthetic oligonucleotide
  Sense strand starting at position 567 of SEQ ID NO: 1511
uucuaaaucuugguguaag

SEQ ID NO: 118809 - RNA, 19 nt, Artificial Sequence
  Description of Artificial Sequence: Synthetic oligonucleotide
  Antisense strand to SEQ ID NO: 118808
cuuacaccaagauuuagaa

SEQ ID NO: 118810 - RNA, 19 nt, Artificial Sequence
  Description of Artificial Sequence: Synthetic oligonucleotide
  Sense strand starting at position 326 of SEQ ID NO: 1511
gcuguaaagugauuacaga

SEQ ID NO: 118811 - RNA, 19 nt, Artificial Sequence
  Description of Artificial Sequence: Synthetic oligonucleotide
  Antisense strand to SEQ ID NO: 118810
ucuguaaucacuuuacagc

SEQ ID NO: 118812 - RNA, 19 nt, Artificial Sequence
  Description of Artificial Sequence: Synthetic oligonucleotide
  Sense strand starting at position 304 of SEQ ID NO: 1511
augcuagugaauuggagaa

SEQ ID NO: 118813 - RNA, 19 nt, Artificial Sequence
  Description of Artificial Sequence: Synthetic oligonucleotide
  Antisense strand to SEQ ID NO: 118812
uucuccaauucacuagcau

SEQ ID NO: 118814 - RNA, 19 nt, Artificial Sequence
  Description of Artificial Sequence: Synthetic oligonucleotide
  Sense strand starting at position 184 of SEQ ID NO: 1511
aagccagugcuauagagaa

SEQ ID NO: 118815 - RNA, 19 nt, Artificial Sequence
  Description of Artificial Sequence: Synthetic oligonucleotide
  Antisense strand to SEQ ID NO: 118814
uucucuauagcacuggcuu

SEQ ID NO: 118816 - RNA, 19 nt, Artificial Sequence
  Description of Artificial Sequence: Synthetic oligonucleotide
  Sense strand starting at position 66 of SEQ ID NO: 1511
gguuauuucuaacuuugca

SEQ ID NO: 118817 - RNA, 19 nt, Artificial Sequence
  Description of Artificial Sequence: Synthetic oligonucleotide
  Antisense strand to SEQ ID NO: 118816
ugcaaaguuagaaauaacc

SEQ ID NO: 118818 - RNA, 19 nt, Artificial Sequence
  Description of Artificial Sequence: Synthetic oligonucleotide
  Sense strand starting at position 54 of SEQ ID NO: 1511
auuugugguccugguuauu

SEQ ID NO: 118819 - RNA, 19 nt, Artificial Sequence
  Description of Artificial Sequence: Synthetic oligonucleotide
  Antisense strand to SEQ ID NO: 118818
aauaaccaggaccacaaau

SEQ ID NO: 118820 - RNA, 19 nt, Artificial Sequence
  Description of Artificial Sequence: Synthetic oligonucleotide
  Sense strand starting at position 25 of SEQ ID NO: 1511
aaauccugacauuguggaa

SEQ ID NO: 118821 - RNA, 19 nt, Artificial Sequence
  Description of Artificial Sequence: Synthetic oligonucleotide
  Antisense strand to SEQ ID NO: 118820
uuccacaaugucaggauuu

SEQ ID NO: 118822 - RNA, 19 nt, Artificial Sequence
  Description of Artificial Sequence: Synthetic oligonucleotide
  Sense strand starting at position 3709 of SEQ ID NO: 1512
cuguacccacugugaaaua

SEQ ID NO: 118823 - RNA, 19 nt, Artificial Sequence
  Description of Artificial Sequence: Synthetic oligonucleotide
  Antisense strand to SEQ ID NO: 118822
uauuucacaguggguacag

SEQ ID NO: 118824 - RNA, 19 nt, Artificial Sequence
  Description of Artificial Sequence: Synthetic oligonucleotide
  Sense strand starting at position 3562 of SEQ ID NO: 1512
uggacaaguuucuuaaauu

SEQ ID NO: 118825 - RNA, 19 nt, Artificial Sequence
  Description of Artificial Sequence: Synthetic oligonucleotide
  Antisense strand to SEQ ID NO: 118824
aauuuaagaaacuugucca

SEQ ID NO: 118826 - RNA, 19 nt, Artificial Sequence
  Description of Artificial Sequence: Synthetic oligonucleotide
  Sense strand starting at position 3561 of SEQ ID NO: 1512
uuggacaaguuucuuaaau

SEQ ID NO: 118827 - RNA, 19 nt, Artificial Sequence
  Description of Artificial Sequence: Synthetic oligonucleotide
  Antisense strand to SEQ ID NO: 118826
auuuaagaaacuuguccaa

SEQ ID NO: 118828 - RNA, 19 nt, Artificial Sequence
  Description of Artificial Sequence: Synthetic oligonucleotide
  Sense strand starting at position 3554 of SEQ ID NO: 1512
uaggguguuggacaaguuu

SEQ ID NO: 118829 - RNA, 19 nt, Artificial Sequence
  Description of Artificial Sequence: Synthetic oligonucleotide
  Antisense strand to SEQ ID NO: 118828
aaacuuguccaacacccua

SEQ ID NO: 118830 - RNA, 19 nt, Artificial Sequence
  Description of Artificial Sequence: Synthetic oligonucleotide
  Sense strand starting at position 3234 of SEQ ID NO: 1512
auacauauguccuucuuga

SEQ ID NO: 118831 - RNA, 19 nt, Artificial Sequence
  Description of Artificial Sequence: Synthetic oligonucleotide
  Antisense strand to SEQ ID NO: 118830
ucaagaaggacauauguau

SEQ ID NO: 118832 - RNA, 19 nt, Artificial Sequence
  Description of Artificial Sequence: Synthetic oligonucleotide
  Sense strand starting at position 3149 of SEQ ID NO: 1512
gcauuacuugagcaucaua

SEQ ID NO: 118833 - RNA, 19 nt, Artificial Sequence
  Description of Artificial Sequence: Synthetic oligonucleotide
  Antisense strand to SEQ ID NO: 118832
uaugaugcucaaguaaugc

SEQ ID NO: 118834 - RNA, 19 nt, Artificial Sequence
  Description of Artificial Sequence: Synthetic oligonucleotide
  Sense strand starting at position 3141 of SEQ ID NO: 1512
accagagugcauuacuuga

SEQ ID NO: 118835 - RNA, 19 nt, Artificial Sequence
  Description of Artificial Sequence: Synthetic oligonucleotide
  Antisense strand to SEQ ID NO: 118834
ucaaguaaugcacucuggu

SEQ ID NO: 118836 - RNA, 19 nt, Artificial Sequence
  Description of Artificial Sequence: Synthetic oligonucleotide
  Sense strand starting at position 3136 of SEQ ID NO: 1512
ucaauaccagagugcauua

SEQ ID NO: 118837 - RNA, 19 nt, Artificial Sequence
  Description of Artificial Sequence: Synthetic oligonucleotide
  Antisense strand to SEQ ID NO: 118836
uaaugcacucugguauuga

SEQ ID NO: 118838 - RNA, 19 nt, Artificial Sequence
  Description of Artificial Sequence: Synthetic oligonucleotide
  Sense strand starting at position 3120 of SEQ ID NO: 1512
agugcaguugcgucaguca

SEQ ID NO: 118839 - RNA, 19 nt, Artificial Sequence
  Description of Artificial Sequence: Synthetic oligonucleotide
  Antisense strand to SEQ ID NO: 118838
ugacugacgcaacugcacu

SEQ ID NO: 118840 - RNA, 19 nt, Artificial Sequence
  Description of Artificial Sequence: Synthetic oligonucleotide
  Sense strand starting at position 2792 of SEQ ID NO: 1512
guauaaccuuuaccaggua

SEQ ID NO: 118841 - RNA, 19 nt, Artificial Sequence
  Description of Artificial Sequence: Synthetic oligonucleotide
  Antisense strand to SEQ ID NO: 118840
uaccugguaaagguuauac

SEQ ID NO: 118842 - RNA, 19 nt, Artificial Sequence
  Description of Artificial Sequence: Synthetic oligonucleotide
  Sense strand starting at position 2777 of SEQ ID NO: 1512
cucaucaguccacaaguau

SEQ ID NO: 118843 - RNA, 19 nt, Artificial Sequence
  Description of Artificial Sequence: Synthetic oligonucleotide
  Antisense strand to SEQ ID NO: 118842
auacuuguggacugaugag

SEQ ID NO: 118844 - RNA, 19 nt, Artificial Sequence
  Description of Artificial Sequence: Synthetic oligonucleotide
  Sense strand starting at position 2736 of SEQ ID NO: 1512
ucauuaacuguacaaggua

SEQ ID NO: 118845 - RNA, 19 nt, Artificial Sequence
  Description of Artificial Sequence: Synthetic oligonucleotide
  Antisense strand to SEQ ID NO: 118844
uaccuuguacaguuaauga

SEQ ID NO: 118846 - RNA, 19 nt, Artificial Sequence
  Description of Artificial Sequence: Synthetic oligonucleotide
  Sense strand starting at position 2695 of SEQ ID NO: 1512
auuucuuugcaguguaaga

SEQ ID NO: 118847 - RNA, 19 nt, Artificial Sequence
  Description of Artificial Sequence: Synthetic oligonucleotide
  Antisense strand to SEQ ID NO: 118846
ucuuacacugcaaagaaau

SEQ ID NO: 118848 - RNA, 19 nt, Artificial Sequence
  Description of Artificial Sequence: Synthetic oligonucleotide
  Sense strand starting at position 2672 of SEQ ID NO: 1512
acugaccuucuuggauauu

SEQ ID NO: 118849 - RNA, 19 nt, Artificial Sequence
  Description of Artificial Sequence: Synthetic oligonucleotide
  Antisense strand to SEQ ID NO: 118848
aauauccaagaaggucagu

SEQ ID NO: 118850 - RNA, 19 nt, Artificial Sequence
  Description of Artificial Sequence: Synthetic oligonucleotide
  Sense strand starting at position 2550 of SEQ ID NO: 1512
uucuaaagagggugacuua

SEQ ID NO: 118851 - RNA, 19 nt, Artificial Sequence
  Description of Artificial Sequence: Synthetic oligonucleotide
  Antisense strand to SEQ ID NO: 118850
uaagucacccucuuuagaa

SEQ ID NO: 118852 - RNA, 19 nt, Artificial Sequence
  Description of Artificial Sequence: Synthetic oligonucleotide
  Sense strand starting at position 2444 of SEQ ID NO: 1512
cauccuugacugugaaggu

SEQ ID NO: 118853 - RNA, 19 nt, Artificial Sequence
  Description of Artificial Sequence: Synthetic oligonucleotide
  Antisense strand to SEQ ID NO: 118852
accuucacagucaaggaug

SEQ ID NO: 118854 - RNA, 19 nt, Artificial Sequence
  Description of Artificial Sequence: Synthetic oligonucleotide
  Sense strand starting at position 2441 of SEQ ID NO: 1512
cuacauccuugacugugaa

SEQ ID NO: 118855 - RNA, 19 nt, Artificial Sequence
  Description of Artificial Sequence: Synthetic oligonucleotide
  Antisense strand to SEQ ID NO: 118854
uucacagucaaggauguag

SEQ ID NO: 118856 - RNA, 19 nt, Artificial Sequence
  Description of Artificial Sequence: Synthetic oligonucleotide
  Sense strand starting at position 2365 of SEQ ID NO: 1512
auuugugcuugaguuacau

SEQ ID NO: 118857 - RNA, 19 nt, Artificial Sequence
  Description of Artificial Sequence: Synthetic oligonucleotide
  Antisense strand to SEQ ID NO: 118856
auguaacucaagcacaaau

SEQ ID NO: 118858 - RNA, 19 nt, Artificial Sequence
  Description of Artificial Sequence: Synthetic oligonucleotide
  Sense strand starting at position 2362 of SEQ ID NO: 1512
uuuauuugugcuugaguua

SEQ ID NO: 118859 - RNA, 19 nt, Artificial Sequence
  Description of Artificial Sequence: Synthetic oligonucleotide
  Antisense strand to SEQ ID NO: 118858
uaacucaagcacaaauaaa

SEQ ID NO: 118860 - RNA, 19 nt, Artificial Sequence
  Description of Artificial Sequence: Synthetic oligonucleotide
  Sense strand starting at position 2361 of SEQ ID NO: 1512
cuuuauuugugcuugaguu

SEQ ID NO: 118861 - RNA, 19 nt, Artificial Sequence
  Description of Artificial Sequence: Synthetic oligonucleotide
  Antisense strand to SEQ ID NO: 118860
aacucaagcacaaauaaag

SEQ ID NO: 118862 - RNA, 19 nt, Artificial Sequence
  Description of Artificial Sequence: Synthetic oligonucleotide
  Sense strand starting at position 2319 of SEQ ID NO: 1512
aucauaagugagugagaau

SEQ ID NO: 118863 - RNA, 19 nt, Artificial Sequence
  Description of Artificial Sequence: Synthetic oligonucleotide
  Antisense strand to SEQ ID NO: 118862
auucucacucacuuaugau

SEQ ID NO: 118864 - RNA, 19 nt, Artificial Sequence
  Description of Artificial Sequence: Synthetic oligonucleotide
  Sense strand starting at position 2318 of SEQ ID NO: 1512
caucauaagugagugagaa

SEQ ID NO: 118865 - RNA, 19 nt, Artificial Sequence
  Description of Artificial Sequence: Synthetic oligonucleotide
  Antisense strand to SEQ ID NO: 118864
uucucacucacuuaugaug

SEQ ID NO: 118866 - RNA, 19 nt, Artificial Sequence
  Description of Artificial Sequence: Synthetic oligonucleotide
  Sense strand starting at position 2261 of SEQ ID NO: 1512
ccacguucuggauaaguug

SEQ ID NO: 118867 - RNA, 19 nt, Artificial Sequence
  Description of Artificial Sequence: Synthetic oligonucleotide
  Antisense strand to SEQ ID NO: 118866
caacuuauccagaacgugg

SEQ ID NO: 118868 - RNA, 19 nt, Artificial Sequence
  Description of Artificial Sequence: Synthetic oligonucleotide
  Sense strand starting at position 2259 of SEQ ID NO: 1512
auccacguucuggauaagu

SEQ ID NO: 118869 - RNA, 19 nt, Artificial Sequence
  Description of Artificial Sequence: Synthetic oligonucleotide
  Antisense strand to SEQ ID NO: 118868
acuuauccagaacguggau

SEQ ID NO: 118870 - RNA, 19 nt, Artificial Sequence
  Description of Artificial Sequence: Synthetic oligonucleotide
  Sense strand starting at position 2157 of SEQ ID NO: 1512
auguucuaauuugugcaua

SEQ ID NO: 118871 - RNA, 19 nt, Artificial Sequence
  Description of Artificial Sequence: Synthetic oligonucleotide
  Antisense strand to SEQ ID NO: 118870
uaugcacaaauuagaacau

SEQ ID NO: 118872 - RNA, 19 nt, Artificial Sequence
  Description of Artificial Sequence: Synthetic oligonucleotide
  Sense strand starting at position 2116 of SEQ ID NO: 1512
cgaugaaaccuaugucaaa

SEQ ID NO: 118873 - RNA, 19 nt, Artificial Sequence
  Description of Artificial Sequence: Synthetic oligonucleotide
  Antisense strand to SEQ ID NO: 118872
uuugacauagguuucaucg

SEQ ID NO: 118874 - RNA, 19 nt, Artificial Sequence
  Description of Artificial Sequence: Synthetic oligonucleotide
  Sense strand starting at position 2114 of SEQ ID NO: 1512
agcgaugaaaccuauguca

SEQ ID NO: 118875 - RNA, 19 nt, Artificial Sequence
  Description of Artificial Sequence: Synthetic oligonucleotide
  Antisense strand to SEQ ID NO: 118874
ugacauagguuucaucgcu

SEQ ID NO: 118876 - RNA, 19 nt, Artificial Sequence
  Description of Artificial Sequence: Synthetic oligonucleotide
  Sense strand starting at position 2105 of SEQ ID NO: 1512
uugugugaaagcgaugaaa

SEQ ID NO: 118877 - RNA, 19 nt, Artificial Sequence
  Description of Artificial Sequence: Synthetic oligonucleotide
  Antisense strand to SEQ ID NO: 118876
uuucaucgcuuucacacaa

SEQ ID NO: 118878 - RNA, 19 nt, Artificial Sequence
  Description of Artificial Sequence: Synthetic oligonucleotide
  Sense strand starting at position 884 of SEQ ID NO: 1512
aaugauagcugaguaaaug

SEQ ID NO: 118879 - RNA, 19 nt, Artificial Sequence
  Description of Artificial Sequence: Synthetic oligonucleotide
  Antisense strand to SEQ ID NO: 118878
cauuuacucagcuaucauu

SEQ ID NO: 118880 - RNA, 19 nt, Artificial Sequence
  Description of Artificial Sequence: Synthetic oligonucleotide
  Sense strand starting at position 881 of SEQ ID NO: 1512
gguaaugauagcugaguaa

SEQ ID NO: 118881 - RNA, 19 nt, Artificial Sequence
  Description of Artificial Sequence: Synthetic oligonucleotide
  Antisense strand to SEQ ID NO: 118880
uuacucagcuaucauuacc

SEQ ID NO: 118882 - RNA, 19 nt, Artificial Sequence
  Description of Artificial Sequence: Synthetic oligonucleotide
  Sense strand starting at position 880 of SEQ ID NO: 1512
ggguaaugauagcugagua

SEQ ID NO: 118883 - RNA, 19 nt, Artificial Sequence
  Description of Artificial Sequence: Synthetic oligonucleotide
  Antisense strand to SEQ ID NO: 118882
uacucagcuaucauuaccc

SEQ ID NO: 118884 - RNA, 19 nt, Artificial Sequence
  Description of Artificial Sequence: Synthetic oligonucleotide
  Sense strand starting at position 801 of SEQ ID NO: 1512
auuauugugagguaugaug

SEQ ID NO: 118885 - RNA, 19 nt, Artificial Sequence
  Description of Artificial Sequence: Synthetic oligonucleotide
  Antisense strand to SEQ ID NO: 118884
caucauaccucacaauaau

SEQ ID NO: 118886 - RNA, 19 nt, Artificial Sequence
  Description of Artificial Sequence: Synthetic oligonucleotide
  Sense strand starting at position 648 of SEQ ID NO: 1512
gugaauuaccaggguagau

SEQ ID NO: 118887 - RNA, 19 nt, Artificial Sequence
  Description of Artificial Sequence: Synthetic oligonucleotide
  Antisense strand to SEQ ID NO: 118886
aucuacccugguaauucac

SEQ ID NO: 118888 - RNA, 19 nt, Artificial Sequence
  Description of Artificial Sequence: Synthetic oligonucleotide
  Sense strand starting at position 647 of SEQ ID NO: 1512
ggugaauuaccaggguaga

SEQ ID NO: 118889 - RNA, 19 nt, Artificial Sequence
  Description of Artificial Sequence: Synthetic oligonucleotide
  Antisense strand to SEQ ID NO: 118888
ucuacccugguaauucacc

SEQ ID NO: 118890 - RNA, 19 nt, Artificial Sequence
  Description of Artificial Sequence: Synthetic oligonucleotide
  Sense strand starting at position 637 of SEQ ID NO: 1512
cuuccuaaugggugaauua

SEQ ID NO: 118891 - RNA, 19 nt, Artificial Sequence
  Description of Artificial Sequence: Synthetic oligonucleotide
  Antisense strand to SEQ ID NO: 118890
uaauucacccauuaggaag

SEQ ID NO: 118892 - RNA, 19 nt, Artificial Sequence
  Description of Artificial Sequence: Synthetic oligonucleotide
  Sense strand starting at position 636 of SEQ ID NO: 1512
ucuuccuaaugggugaauu

SEQ ID NO: 118893 - RNA, 19 nt, Artificial Sequence
  Description of Artificial Sequence: Synthetic oligonucleotide
  Antisense strand to SEQ ID NO: 118892
aauucacccauuaggaaga

SEQ ID NO: 118894 - RNA, 19 nt, Artificial Sequence
  Description of Artificial Sequence: Synthetic oligonucleotide
  Sense strand starting at position 609 of SEQ ID NO: 1512
ccuuucugagguggugaaa

SEQ ID NO: 118895 - RNA, 19 nt, Artificial Sequence
  Description of Artificial Sequence: Synthetic oligonucleotide
  Antisense strand to SEQ ID NO: 118894
uuucaccaccucagaaagg

SEQ ID NO: 118896 - RNA, 19 nt, Artificial Sequence
  Description of Artificial Sequence: Synthetic oligonucleotide
  Sense strand starting at position 608 of SEQ ID NO: 1512
accuuucugagguggugaa

SEQ ID NO: 118897 - RNA, 19 nt, Artificial Sequence
  Description of Artificial Sequence: Synthetic oligonucleotide
  Antisense strand to SEQ ID NO: 118896
uucaccaccucagaaaggu

SEQ ID NO: 118898 - RNA, 19 nt, Artificial Sequence
  Description of Artificial Sequence: Synthetic oligonucleotide
  Sense strand starting at position 494 of SEQ ID NO: 1512
auuuguuuccuuugaugug

SEQ ID NO: 118899 - RNA, 19 nt, Artificial Sequence
  Description of Artificial Sequence: Synthetic oligonucleotide
  Antisense strand to SEQ ID NO: 118898
cacaucaaaggaaacaaau

SEQ ID NO: 118900 - RNA, 19 nt, Artificial Sequence
  Description of Artificial Sequence: Synthetic oligonucleotide
  Sense strand starting at position 14 of SEQ ID NO: 1512
aguuuacaucaauaggcaa

SEQ ID NO: 118901 - RNA, 19 nt, Artificial Sequence
  Description of Artificial Sequence: Synthetic oligonucleotide
  Antisense strand to SEQ ID NO: 118900
uugccuauugauguaaacu

SEQ ID NO: 118902 - RNA, 19 nt, Artificial Sequence
  Description of Artificial Sequence: Synthetic oligonucleotide
  Sense strand starting at position 3608 of SEQ ID NO: 1513
caugcaaucucgcugauug

SEQ ID NO: 118903 - RNA, 19 nt, Artificial Sequence
  Description of Artificial Sequence: Synthetic oligonucleotide
  Antisense strand to SEQ ID NO: 118902
caaucagcgagauugcaug

SEQ ID NO: 118904 - RNA, 19 nt, Artificial Sequence
  Description of Artificial Sequence: Synthetic oligonucleotide
  Sense strand starting at position 3188 of SEQ ID NO: 1513
aauccauacguggagguaa

SEQ ID NO: 118905 - RNA, 19 nt, Artificial Sequence
  Description of Artificial Sequence: Synthetic oligonucleotide
  Antisense strand to SEQ ID NO: 118904
uuaccuccacguauggauu

SEQ ID NO: 118906 - RNA, 19 nt, Artificial Sequence
  Description of Artificial Sequence: Synthetic oligonucleotide
  Sense strand starting at position 2974 of SEQ ID NO: 1513
uagauauaagcauguaugu

SEQ ID NO: 118907 - RNA, 19 nt, Artificial Sequence
  Description of Artificial Sequence: Synthetic oligonucleotide
  Antisense strand to SEQ ID NO: 118906
acauacaugcuuauaucua

SEQ ID NO: 118908 - RNA, 19 nt, Artificial Sequence
  Description of Artificial Sequence: Synthetic oligonucleotide
  Sense strand starting at position 2915 of SEQ ID NO: 1513
agacuucgccacugugcaa

SEQ ID NO: 118909 - RNA, 19 nt, Artificial Sequence
  Description of Artificial Sequence: Synthetic oligonucleotide
  Antisense strand to SEQ ID NO: 118908
uugcacaguggcgaagucu

SEQ ID NO: 118910 - RNA, 19 nt, Artificial Sequence
  Description of Artificial Sequence: Synthetic oligonucleotide
  Sense strand starting at position 2883 of SEQ ID NO: 1513
ugguguuugggugauggau

SEQ ID NO: 118911 - RNA, 19 nt, Artificial Sequence
  Description of Artificial Sequence: Synthetic oligonucleotide
  Antisense strand to SEQ ID NO: 118910
auccaucacccaaacacca

SEQ ID NO: 118912 - RNA, 19 nt, Artificial Sequence
  Description of Artificial Sequence: Synthetic oligonucleotide
  Sense strand starting at position 2882 of SEQ ID NO: 1513
cugguguuugggugaugga

SEQ ID NO: 118913 - RNA, 19 nt, Artificial Sequence
  Description of Artificial Sequence: Synthetic oligonucleotide
  Antisense strand to SEQ ID NO: 118912
uccaucacccaaacaccag

SEQ ID NO: 118914 - RNA, 19 nt, Artificial Sequence
  Description of Artificial Sequence: Synthetic oligonucleotide
  Sense strand starting at position 2846 of SEQ ID NO: 1513
agucuuacagauggauaua

SEQ ID NO: 118915 - RNA, 19 nt, Artificial Sequence
  Description of Artificial Sequence: Synthetic oligonucleotide
  Antisense strand to SEQ ID NO: 118914
uauauccaucuguaagacu

SEQ ID NO: 118916 - RNA, 19 nt, Artificial Sequence
  Description of Artificial Sequence: Synthetic oligonucleotide
  Sense strand starting at position 2688 of SEQ ID NO: 1513
uauacugcuugagaggaua

SEQ ID NO: 118917 - RNA, 19 nt, Artificial Sequence
  Description of Artificial Sequence: Synthetic oligonucleotide
  Antisense strand to SEQ ID NO: 118916
uauccucucaagcaguaua

SEQ ID NO: 118918 - RNA, 19 nt, Artificial Sequence
  Description of Artificial Sequence: Synthetic oligonucleotide
  Sense strand starting at position 2684 of SEQ ID NO: 1513
acuauauacugcuugagag

SEQ ID NO: 118919 - RNA, 19 nt, Artificial Sequence
  Description of Artificial Sequence: Synthetic oligonucleotide
  Antisense strand to SEQ ID NO: 118918
cucucaagcaguauauagu

SEQ ID NO: 118920 - RNA, 19 nt, Artificial Sequence
  Description of Artificial Sequence: Synthetic oligonucleotide
  Sense strand starting at position 2451 of SEQ ID NO: 1513
agaguacuuuaucuauuac

SEQ ID NO: 118921 - RNA, 19 nt, Artificial Sequence
  Description of Artificial Sequence: Synthetic oligonucleotide
  Antisense strand to SEQ ID NO: 118920
guaauagauaaaguacucu

SEQ ID NO: 118922 - RNA, 19 nt, Artificial Sequence
  Description of Artificial Sequence: Synthetic oligonucleotide
  Sense strand starting at position 2247 of SEQ ID NO: 1513
cggcaauguagcugagagu

SEQ ID NO: 118923 - RNA, 19 nt, Artificial Sequence
  Description of Artificial Sequence: Synthetic oligonucleotide
  Antisense strand to SEQ ID NO: 118922
acucucagcuacauugccg

SEQ ID NO: 118924 - RNA, 19 nt, Artificial Sequence
  Description of Artificial Sequence: Synthetic oligonucleotide
  Sense strand starting at position 2209 of SEQ ID NO: 1513
ugugauauguaggaagaca

SEQ ID NO: 118925 - RNA, 19 nt, Artificial Sequence
  Description of Artificial Sequence: Synthetic oligonucleotide
  Antisense strand to SEQ ID NO: 118924
ugucuuccuacauaucaca

SEQ ID NO: 118926 - RNA, 19 nt, Artificial Sequence
  Description of Artificial Sequence: Synthetic oligonucleotide
  Sense strand starting at position 2208 of SEQ ID NO: 1513
cugugauauguaggaagac

SEQ ID NO: 118927 - RNA, 19 nt, Artificial Sequence
  Description of Artificial Sequence: Synthetic oligonucleotide
  Antisense strand to SEQ ID NO: 118926
gucuuccuacauaucacag

SEQ ID NO: 118928 - RNA, 19 nt, Artificial Sequence
  Description of Artificial Sequence: Synthetic oligonucleotide
  Sense strand starting at position 2197 of SEQ ID NO: 1513
uguugagcaaacugugaua

SEQ ID NO: 118929 - RNA, 19 nt, Artificial Sequence
  Description of Artificial Sequence: Synthetic oligonucleotide
  Antisense strand to SEQ ID NO: 118928
uaucacaguuugcucaaca

SEQ ID NO: 118930 - RNA, 19 nt, Artificial Sequence
  Description of Artificial Sequence: Synthetic oligonucleotide
  Sense strand starting at position 2131 of SEQ ID NO: 1513
guuauauggaguugcacua

SEQ ID NO: 118931 - RNA, 19 nt, Artificial Sequence
  Description of Artificial Sequence: Synthetic oligonucleotide
  Antisense strand to SEQ ID NO: 118930
uagugcaacuccauauaac

SEQ ID NO: 118932 - RNA, 19 nt, Artificial Sequence
  Description of Artificial Sequence: Synthetic oligonucleotide
  Sense strand starting at position 1034 of SEQ ID NO: 1513
agugaagucagguggagau

SEQ ID NO: 118933 - RNA, 19 nt, Artificial Sequence
  Description of Artificial Sequence: Synthetic oligonucleotide
  Antisense strand to SEQ ID NO: 118932
aucuccaccugacuucacu

SEQ ID NO: 118934 - RNA, 19 nt, Artificial Sequence
  Description of Artificial Sequence: Synthetic oligonucleotide
  Sense strand starting at position 980 of SEQ ID NO: 1513
cuaauaucagcuggaauuc

SEQ ID NO: 118935 - RNA, 19 nt, Artificial Sequence
  Description of Artificial Sequence: Synthetic oligonucleotide
  Antisense strand to SEQ ID NO: 118934
gaauuccagcugauauuag

SEQ ID NO: 118936 - RNA, 19 nt, Artificial Sequence
  Description of Artificial Sequence: Synthetic oligonucleotide
  Sense strand starting at position 977 of SEQ ID NO: 1513
gggcuaauaucagcuggaa

SEQ ID NO: 118937 - RNA, 19 nt, Artificial Sequence
  Description of Artificial Sequence: Synthetic oligonucleotide
  Antisense strand to SEQ ID NO: 118936
uuccagcugauauuagccc

SEQ ID NO: 118938 - RNA, 19 nt, Artificial Sequence
  Description of Artificial Sequence: Synthetic oligonucleotide
  Sense strand starting at position 969 of SEQ ID NO: 1513
ggagucgugggcuaauauc

SEQ ID NO: 118939 - RNA, 19 nt, Artificial Sequence
  Description of Artificial Sequence: Synthetic oligonucleotide
  Antisense strand to SEQ ID NO: 118938
gauauuagcccacgacucc

SEQ ID NO: 118940 - RNA, 19 nt, Artificial Sequence
  Description of Artificial Sequence: Synthetic oligonucleotide
  Sense strand starting at position 967 of SEQ ID NO: 1513
ugggagucgugggcuaaua

SEQ ID NO: 118941 - RNA, 19 nt, Artificial Sequence
  Description of Artificial Sequence: Synthetic oligonucleotide
  Antisense strand to SEQ ID NO: 118940
uauuagcccacgacuccca

SEQ ID NO: 118942 - RNA, 19 nt, Artificial Sequence
  Description of Artificial Sequence: Synthetic oligonucleotide
  Sense strand starting at position 966 of SEQ ID NO: 1513
uugggagucgugggcuaau

SEQ ID NO: 118943 - RNA, 19 nt, Artificial Sequence
  Description of Artificial Sequence: Synthetic oligonucleotide
  Antisense strand to SEQ ID NO: 118942
auuagcccacgacucccaa

SEQ ID NO: 118944 - RNA, 19 nt, Artificial Sequence
  Description of Artificial Sequence: Synthetic oligonucleotide
  Sense strand starting at position 965 of SEQ ID NO: 1513
guugggagucgugggcuaa

SEQ ID NO: 118945 - RNA, 19 nt, Artificial Sequence
  Description of Artificial Sequence: Synthetic oligonucleotide
  Antisense strand to SEQ ID NO: 118944
uuagcccacgacucccaac

SEQ ID NO: 118946 - RNA, 19 nt, Artificial Sequence
  Description of Artificial Sequence: Synthetic oligonucleotide
  Sense strand starting at position 823 of SEQ ID NO: 1513
ccaauagucgaaggagcua

SEQ ID NO: 118947 - RNA, 19 nt, Artificial Sequence
  Description of Artificial Sequence: Synthetic oligonucleotide
  Antisense strand to SEQ ID NO: 118946
uagcuccuucgacuauugg

SEQ ID NO: 118948 - RNA, 19 nt, Artificial Sequence
  Description of Artificial Sequence: Synthetic oligonucleotide
  Sense strand starting at position 560 of SEQ ID NO: 1513
gaugauuuguguuauauag

SEQ ID NO: 118949 - RNA, 19 nt, Artificial Sequence
  Description of Artificial Sequence: Synthetic oligonucleotide
  Antisense strand to SEQ ID NO: 118948
cuauauaacacaaaucauc

SEQ ID NO: 118950 - RNA, 19 nt, Artificial Sequence
  Description of Artificial Sequence: Synthetic oligonucleotide
  Sense strand starting at position 532 of SEQ ID NO: 1513
ugcuuuacagaucaugaug

SEQ ID NO: 118951 - RNA, 19 nt, Artificial Sequence
  Description of Artificial Sequence: Synthetic oligonucleotide
  Antisense strand to SEQ ID NO: 118950
caucaugaucuguaaagca

SEQ ID NO: 118952 - RNA, 19 nt, Artificial Sequence
  Description of Artificial Sequence: Synthetic oligonucleotide
  Sense strand starting at position 483 of SEQ ID NO: 1513
gguggaaacucaucuuuac

SEQ ID NO: 118953 - RNA, 19 nt, Artificial Sequence
  Description of Artificial Sequence: Synthetic oligonucleotide
  Antisense strand to SEQ ID NO: 118952
guaaagaugaguuuccacc

SEQ ID NO: 118954 - RNA, 19 nt, Artificial Sequence
  Description of Artificial Sequence: Synthetic oligonucleotide
  Sense strand starting at position 474 of SEQ ID NO: 1513
guauaaguagguggaaacu

SEQ ID NO: 118955 - RNA, 19 nt, Artificial Sequence
  Description of Artificial Sequence: Synthetic oligonucleotide
  Antisense strand to SEQ ID NO: 118954
aguuuccaccuacuuauac

SEQ ID NO: 118956 - RNA, 19 nt, Artificial Sequence
  Description of Artificial Sequence: Synthetic oligonucleotide
  Sense strand starting at position 473 of SEQ ID NO: 1513
gguauaaguagguggaaac

SEQ ID NO: 118957 - RNA, 19 nt, Artificial Sequence
  Description of Artificial Sequence: Synthetic oligonucleotide
  Antisense strand to SEQ ID NO: 118956
guuuccaccuacuuauacc

SEQ ID NO: 118958 - RNA, 19 nt, Artificial Sequence
  Description of Artificial Sequence: Synthetic oligonucleotide
  Sense strand starting at position 472 of SEQ ID NO: 1513
ugguauaaguagguggaaa

SEQ ID NO: 118959 - RNA, 19 nt, Artificial Sequence
  Description of Artificial Sequence: Synthetic oligonucleotide
  Antisense strand to SEQ ID NO: 118958
uuuccaccuacuuauacca

SEQ ID NO: 118960 - RNA, 19 nt, Artificial Sequence
  Description of Artificial Sequence: Synthetic oligonucleotide
  Sense strand starting at position 460 of SEQ ID NO: 1513
cucuuagcacucugguaua

SEQ ID NO: 118961 - RNA, 19 nt, Artificial Sequence
  Description of Artificial Sequence: Synthetic oligonucleotide
  Antisense strand to SEQ ID NO: 118960
uauaccagagugcuaagag

SEQ ID NO: 118962 - RNA, 19 nt, Artificial Sequence
  Description of Artificial Sequence: Synthetic oligonucleotide
  Sense strand starting at position 449 of SEQ ID NO: 1513
agaguuauuuccucuuagc

SEQ ID NO: 118963 - RNA, 19 nt, Artificial Sequence
  Description of Artificial Sequence: Synthetic oligonucleotide
  Antisense strand to SEQ ID NO: 118962
gcuaagaggaaauaacucu

SEQ ID NO: 118964 - RNA, 19 nt, Artificial Sequence
  Description of Artificial Sequence: Synthetic oligonucleotide
  Sense strand starting at position 432 of SEQ ID NO: 1513
caaagcucugauugagaag

SEQ ID NO: 118965 - RNA, 19 nt, Artificial Sequence
  Description of Artificial Sequence: Synthetic oligonucleotide
  Antisense strand to SEQ ID NO: 118964
cuucucaaucagagcuuug

SEQ ID NO: 118966 - RNA, 19 nt, Artificial Sequence
  Description of Artificial Sequence: Synthetic oligonucleotide
  Sense strand starting at position 396 of SEQ ID NO: 1513
uguguuagacuuuaaagca

SEQ ID NO: 118967 - RNA, 19 nt, Artificial Sequence
  Description of Artificial Sequence: Synthetic oligonucleotide
  Antisense strand to SEQ ID NO: 118966
ugcuuuaaagucuaacaca

SEQ ID NO: 118968 - RNA, 19 nt, Artificial Sequence
  Description of Artificial Sequence: Synthetic oligonucleotide
  Sense strand starting at position 386 of SEQ ID NO: 1513
acaugucagguguguuaga

SEQ ID NO: 118969 - RNA, 19 nt, Artificial Sequence
  Description of Artificial Sequence: Synthetic oligonucleotide
  Antisense strand to SEQ ID NO: 118968
ucuaacacaccugacaugu

SEQ ID NO: 118970 - RNA, 19 nt, Artificial Sequence
  Description of Artificial Sequence: Synthetic oligonucleotide
  Sense strand starting at position 370 of SEQ ID NO: 1513
ggucauucugacugaaaca

SEQ ID NO: 118971 - RNA, 19 nt, Artificial Sequence
  Description of Artificial Sequence: Synthetic oligonucleotide
  Antisense strand to SEQ ID NO: 118970
uguuucagucagaaugacc

SEQ ID NO: 118972 - RNA, 19 nt, Artificial Sequence
  Description of Artificial Sequence: Synthetic oligonucleotide
  Sense strand starting at position 369 of SEQ ID NO: 1513
gggucauucugacugaaac

SEQ ID NO: 118973 - RNA, 19 nt, Artificial Sequence
  Description of Artificial Sequence: Synthetic oligonucleotide
  Antisense strand to SEQ ID NO: 118972
guuucagucagaaugaccc

SEQ ID NO: 118974 - RNA, 19 nt, Artificial Sequence
  Description of Artificial Sequence: Synthetic oligonucleotide
  Sense strand starting at position 349 of SEQ ID NO: 1513
ggagaacagugaugcauuu

SEQ ID NO: 118975 - RNA, 19 nt, Artificial Sequence
  Description of Artificial Sequence: Synthetic oligonucleotide
  Antisense strand to SEQ ID NO: 118974
aaaugcaucacuguucucc

SEQ ID NO: 118976 - RNA, 19 nt, Artificial Sequence
  Description of Artificial Sequence: Synthetic oligonucleotide
  Sense strand starting at position 195 of SEQ ID NO: 1513
uugguuuaugcagaaucuu

SEQ ID NO: 118977 - RNA, 19 nt, Artificial Sequence
  Description of Artificial Sequence: Synthetic oligonucleotide
  Antisense strand to SEQ ID NO: 118976
aagauucugcauaaaccaa

SEQ ID NO: 118978 - RNA, 19 nt, Artificial Sequence
  Description of Artificial Sequence: Synthetic oligonucleotide
  Sense strand starting at position 94 of SEQ ID NO: 1513
augucagguucuucuuacu

SEQ ID NO: 118979 - RNA, 19 nt, Artificial Sequence
  Description of Artificial Sequence: Synthetic oligonucleotide
  Antisense strand to SEQ ID NO: 118978
aguaagaagaaccugacau

SEQ ID NO: 118980 - RNA, 19 nt, Artificial Sequence
  Description of Artificial Sequence: Synthetic oligonucleotide
  Sense strand starting at position 7 of SEQ ID NO: 1513
ugggaauaaugauaaucau

SEQ ID NO: 118981 - RNA, 19 nt, Artificial Sequence
  Description of Artificial Sequence: Synthetic oligonucleotide
  Antisense strand to SEQ ID NO: 118980
augauuaucauuauuccca

SEQ ID NO: 118982 - RNA, 19 nt, Artificial Sequence
  Description of Artificial Sequence: Synthetic oligonucleotide
  Sense strand starting at position 3940 of SEQ ID NO: 1514
uuagaaucuccauguuaga

SEQ ID NO: 118983 - RNA, 19 nt, Artificial Sequence
  Description of Artificial Sequence: Synthetic oligonucleotide
  Antisense strand to SEQ ID NO: 118982
ucuaacauggagauucuaa

SEQ ID NO: 118984 - RNA, 19 nt, Artificial Sequence
  Description of Artificial Sequence: Synthetic oligonucleotide
  Sense strand starting at position 3849 of SEQ ID NO: 1514
cacauuagcguacauuaga

SEQ ID NO: 118985 - RNA, 19 nt, Artificial Sequence
  Description of Artificial Sequence: Synthetic oligonucleotide
  Antisense strand to SEQ ID NO: 118984
ucuaauguacgcuaaugug

SEQ ID NO: 118986 - RNA, 19 nt, Artificial Sequence
  Description of Artificial Sequence: Synthetic oligonucleotide
  Sense strand starting at position 3671 of SEQ ID NO: 1514
ucugaauuggguugauucu

SEQ ID NO: 118987 - RNA, 19 nt, Artificial Sequence
  Description of Artificial Sequence: Synthetic oligonucleotide
  Antisense strand to SEQ ID NO: 118986
agaaucaacccaauucaga

SEQ ID NO: 118988 - RNA, 19 nt, Artificial Sequence
  Description of Artificial Sequence: Synthetic oligonucleotide
  Sense strand starting at position 3603 of SEQ ID NO: 1514
ccuuuaauaguuuaguuga

SEQ ID NO: 118989 - RNA, 19 nt, Artificial Sequence
  Description of Artificial Sequence: Synthetic oligonucleotide
  Antisense strand to SEQ ID NO: 118988
ucaacuaaacuauuaaagg

SEQ ID NO: 118990 - RNA, 19 nt, Artificial Sequence
  Description of Artificial Sequence: Synthetic oligonucleotide
  Sense strand starting at position 3369 of SEQ ID NO: 1514
gcaaauuuaccuuguaguc

SEQ ID NO: 118991 - RNA, 19 nt, Artificial Sequence
  Description of Artificial Sequence: Synthetic oligonucleotide
  Antisense strand to SEQ ID NO: 118990
gacuacaagguaaauuugc

SEQ ID NO: 118992 - RNA, 19 nt, Artificial Sequence
  Description of Artificial Sequence: Synthetic oligonucleotide
  Sense strand starting at position 3345 of SEQ ID NO: 1514
gggucugacuccuuaacca

SEQ ID NO: 118993 - RNA, 19 nt, Artificial Sequence
  Description of Artificial Sequence: Synthetic oligonucleotide
  Antisense strand to SEQ ID NO: 118992
ugguuaaggagucagaccc

SEQ ID NO: 118994 - RNA, 19 nt, Artificial Sequence
  Description of Artificial Sequence: Synthetic oligonucleotide
  Sense strand starting at position 3317 of SEQ ID NO: 1514
gggugaucucagcaaaguu

SEQ ID NO: 118995 - RNA, 19 nt, Artificial Sequence
  Description of Artificial Sequence: Synthetic oligonucleotide
  Antisense strand to SEQ ID NO: 118994
aacuuugcugagaucaccc

SEQ ID NO: 118996 - RNA, 19 nt, Artificial Sequence
  Description of Artificial Sequence: Synthetic oligonucleotide
  Sense strand starting at position 3309 of SEQ ID NO: 1514
aucacuuugggugaucuca

SEQ ID NO: 118997 - RNA, 19 nt, Artificial Sequence
  Description of Artificial Sequence: Synthetic oligonucleotide
  Antisense strand to SEQ ID NO: 118996
ugagaucacccaaagugau

SEQ ID NO: 118998 - RNA, 19 nt, Artificial Sequence
  Description of Artificial Sequence: Synthetic oligonucleotide
  Sense strand starting at position 3284 of SEQ ID NO: 1514
uaucacuuugggugauaaa

SEQ ID NO: 118999 - RNA, 19 nt, Artificial Sequence
  Description of Artificial Sequence: Synthetic oligonucleotide
  Antisense strand to SEQ ID NO: 118998
uuuaucacccaaagugaua

SEQ ID NO: 119000 - RNA, 19 nt, Artificial Sequence
  Description of Artificial Sequence: Synthetic oligonucleotide
  Sense strand starting at position 3283 of SEQ ID NO: 1514
uuaucacuuugggugauaa

SEQ ID NO: 119001 - RNA, 19 nt, Artificial Sequence
  Description of Artificial Sequence: Synthetic oligonucleotide
  Antisense strand to SEQ ID NO: 119000
uuaucacccaaagugauaa

SEQ ID NO: 119002 - RNA, 19 nt, Artificial Sequence
  Description of Artificial Sequence: Synthetic oligonucleotide
  Sense strand starting at position 3280 of SEQ ID NO: 1514
acuuuaucacuuuggguga

SEQ ID NO: 119003 - RNA, 19 nt, Artificial Sequence
  Description of Artificial Sequence: Synthetic oligonucleotide
  Antisense strand to SEQ ID NO: 119002
ucacccaaagugauaaagu

SEQ ID NO: 119004 - RNA, 19 nt, Artificial Sequence
  Description of Artificial Sequence: Synthetic oligonucleotide
  Sense strand starting at position 3038 of SEQ ID NO: 1514
agcccuaugaaaggguaaa

SEQ ID NO: 119005 - RNA, 19 nt, Artificial Sequence
  Description of Artificial Sequence: Synthetic oligonucleotide
  Antisense strand to SEQ ID NO: 119004
uuuacccuuucauagggcu

SEQ ID NO: 119006 - RNA, 19 nt, Artificial Sequence
  Description of Artificial Sequence: Synthetic oligonucleotide
  Sense strand starting at position 3031 of SEQ ID NO: 1514
ucugcaaagcccuaugaaa

SEQ ID NO: 119007 - RNA, 19 nt, Artificial Sequence
  Description of Artificial Sequence: Synthetic oligonucleotide
  Antisense strand to SEQ ID NO: 119006
uuucauagggcuuugcaga

SEQ ID NO: 119008 - RNA, 19 nt, Artificial Sequence
  Description of Artificial Sequence: Synthetic oligonucleotide
  Sense strand starting at position 2780 of SEQ ID NO: 1514
gggacucugccuuauacag

SEQ ID NO: 119009 - RNA, 19 nt, Artificial Sequence
  Description of Artificial Sequence: Synthetic oligonucleotide
  Antisense strand to SEQ ID NO: 119008
cuguauaaggcagaguccc

SEQ ID NO: 119010 - RNA, 19 nt, Artificial Sequence
  Description of Artificial Sequence: Synthetic oligonucleotide
  Sense strand starting at position 2716 of SEQ ID NO: 1514
aguauauacccugagcacu

SEQ ID NO: 119011 - RNA, 19 nt, Artificial Sequence
  Description of Artificial Sequence: Synthetic oligonucleotide
  Antisense strand to SEQ ID NO: 119010
agugcucaggguauauacu

SEQ ID NO: 119012 - RNA, 19 nt, Artificial Sequence
  Description of Artificial Sequence: Synthetic oligonucleotide
  Sense strand starting at position 2705 of SEQ ID NO: 1514
uggugacacugaguauaua

SEQ ID NO: 119013 - RNA, 19 nt, Artificial Sequence
  Description of Artificial Sequence: Synthetic oligonucleotide
  Antisense strand to SEQ ID NO: 119012
uauauacucagugucacca

SEQ ID NO: 119014 - RNA, 19 nt, Artificial Sequence
  Description of Artificial Sequence: Synthetic oligonucleotide
  Sense strand starting at position 2685 of SEQ ID NO: 1514
accucacaugucuauguaa

SEQ ID NO: 119015 - RNA, 19 nt, Artificial Sequence
  Description of Artificial Sequence: Synthetic oligonucleotide
  Antisense strand to SEQ ID NO: 119014
uuacauagacaugugaggu

SEQ ID NO: 119016 - RNA, 19 nt, Artificial Sequence
  Description of Artificial Sequence: Synthetic oligonucleotide
  Sense strand starting at position 2635 of SEQ ID NO: 1514
ccuugugcaacaugggaaa

SEQ ID NO: 119017 - RNA, 19 nt, Artificial Sequence
  Description of Artificial Sequence: Synthetic oligonucleotide
  Antisense strand to SEQ ID NO: 119016
uuucccauguugcacaagg

SEQ ID NO: 119018 - RNA, 19 nt, Artificial Sequence
  Description of Artificial Sequence: Synthetic oligonucleotide
  Sense strand starting at position 2543 of SEQ ID NO: 1514
cugugaugauagguuuaau

SEQ ID NO: 119019 - RNA, 19 nt, Artificial Sequence
  Description of Artificial Sequence: Synthetic oligonucleotide
  Antisense strand to SEQ ID NO: 119018
auuaaaccuaucaucacag

SEQ ID NO: 119020 - RNA, 19 nt, Artificial Sequence
  Description of Artificial Sequence: Synthetic oligonucleotide
  Sense strand starting at position 2368 of SEQ ID NO: 1514
ggcagauugagcuaaauau

SEQ ID NO: 119021 - RNA, 19 nt, Artificial Sequence
  Description of Artificial Sequence: Synthetic oligonucleotide
  Antisense strand to SEQ ID NO: 119020
auauuuagcucaaucugcc

SEQ ID NO: 119022 - RNA, 19 nt, Artificial Sequence
  Description of Artificial Sequence: Synthetic oligonucleotide
  Sense strand starting at position 2349 of SEQ ID NO: 1514
aaguaagaauuugacaugu

SEQ ID NO: 119023 - RNA, 19 nt, Artificial Sequence
  Description of Artificial Sequence: Synthetic oligonucleotide
  Antisense strand to SEQ ID NO: 119022
acaugucaaauucuuacuu

SEQ ID NO: 119024 - RNA, 19 nt, Artificial Sequence
  Description of Artificial Sequence: Synthetic oligonucleotide
  Sense strand starting at position 2292 of SEQ ID NO: 1514
guuuguauuaagggagacu

SEQ ID NO: 119025 - RNA, 19 nt, Artificial Sequence
  Description of Artificial Sequence: Synthetic oligonucleotide
  Antisense strand to SEQ ID NO: 119024
agucucccuuaauacaaac

SEQ ID NO: 119026 - RNA, 19 nt, Artificial Sequence
  Description of Artificial Sequence: Synthetic oligonucleotide
  Sense strand starting at position 2242 of SEQ ID NO: 1514
gaguauuaugcagaucacu

SEQ ID NO: 119027 - RNA, 19 nt, Artificial Sequence
  Description of Artificial Sequence: Synthetic oligonucleotide
  Antisense strand to SEQ ID NO: 119026
agugaucugcauaauacuc

SEQ ID NO: 119028 - RNA, 19 nt, Artificial Sequence
  Description of Artificial Sequence: Synthetic oligonucleotide
  Sense strand starting at position 2167 of SEQ ID NO: 1514
gugaauaauguguaugaau

SEQ ID NO: 119029 - RNA, 19 nt, Artificial Sequence
  Description of Artificial Sequence: Synthetic oligonucleotide
  Antisense strand to SEQ ID NO: 119028
auucauacacauuauucac

SEQ ID NO: 119030 - RNA, 19 nt, Artificial Sequence
  Description of Artificial Sequence: Synthetic oligonucleotide
  Sense strand starting at position 2166 of SEQ ID NO: 1514
ggugaauaauguguaugaa

SEQ ID NO: 119031 - RNA, 19 nt, Artificial Sequence
  Description of Artificial Sequence: Synthetic oligonucleotide
  Antisense strand to SEQ ID NO: 119030
uucauacacauuauucacc

SEQ ID NO: 119032 - RNA, 19 nt, Artificial Sequence
  Description of Artificial Sequence: Synthetic oligonucleotide
  Sense strand starting at position 2165 of SEQ ID NO: 1514
uggugaauaauguguauga

SEQ ID NO: 119033 - RNA, 19 nt, Artificial Sequence
  Description of Artificial Sequence: Synthetic oligonucleotide
  Antisense strand to SEQ ID NO: 119032
ucauacacauuauucacca

SEQ ID NO: 119034 - RNA, 19 nt, Artificial Sequence
  Description of Artificial Sequence: Synthetic oligonucleotide
  Sense strand starting at position 2157 of SEQ ID NO: 1514
ucccuccuuggugaauaau

SEQ ID NO: 119035 - RNA, 19 nt, Artificial Sequence
  Description of Artificial Sequence: Synthetic oligonucleotide
  Antisense strand to SEQ ID NO: 119034
auuauucaccaaggaggga

SEQ ID NO: 119036 - RNA, 19 nt, Artificial Sequence
  Description of Artificial Sequence: Synthetic oligonucleotide
  Sense strand starting at position 2138 of SEQ ID NO: 1514
augaauugacucuggagcu

SEQ ID NO: 119037 - RNA, 19 nt, Artificial Sequence
  Description of Artificial Sequence: Synthetic oligonucleotide
  Antisense strand to SEQ ID NO: 119036
agcuccagagucaauucau

SEQ ID NO: 119038 - RNA, 19 nt, Artificial Sequence
  Description of Artificial Sequence: Synthetic oligonucleotide
  Sense strand starting at position 485 of SEQ ID NO: 1514
ugcaaauaacucugagcaa

SEQ ID NO: 119039 - RNA, 19 nt, Artificial Sequence
  Description of Artificial Sequence: Synthetic oligonucleotide
  Antisense strand to SEQ ID NO: 119038
uugcucagaguuauuugca

SEQ ID NO: 119040 - RNA, 19 nt, Artificial Sequence
  Description of Artificial Sequence: Synthetic oligonucleotide
  Sense strand starting at position 383 of SEQ ID NO: 1514
ggauguguaucauuugcuc

SEQ ID NO: 119041 - RNA, 19 nt, Artificial Sequence
  Description of Artificial Sequence: Synthetic oligonucleotide
  Antisense strand to SEQ ID NO: 119040
gagcaaaugauacacaucc

SEQ ID NO: 119042 - RNA, 19 nt, Artificial Sequence
  Description of Artificial Sequence: Synthetic oligonucleotide
  Sense strand starting at position 255 of SEQ ID NO: 1514
uaagauuggucaucagagu

SEQ ID NO: 119043 - RNA, 19 nt, Artificial Sequence
  Description of Artificial Sequence: Synthetic oligonucleotide
  Antisense strand to SEQ ID NO: 119042
acucugaugaccaaucuua

SEQ ID NO: 119044 - RNA, 19 nt, Artificial Sequence
  Description of Artificial Sequence: Synthetic oligonucleotide
  Sense strand starting at position 252 of SEQ ID NO: 1514
uuauaagauuggucaucag

SEQ ID NO: 119045 - RNA, 19 nt, Artificial Sequence
  Description of Artificial Sequence: Synthetic oligonucleotide
  Antisense strand to SEQ ID NO: 119044
cugaugaccaaucuuauaa

SEQ ID NO: 119046 - RNA, 19 nt, Artificial Sequence
  Description of Artificial Sequence: Synthetic oligonucleotide
  Sense strand starting at position 251 of SEQ ID NO: 1514
uuuauaagauuggucauca

SEQ ID NO: 119047 - RNA, 19 nt, Artificial Sequence
  Description of Artificial Sequence: Synthetic oligonucleotide
  Antisense strand to SEQ ID NO: 119046
ugaugaccaaucuuauaaa

SEQ ID NO: 119048 - RNA, 19 nt, Artificial Sequence
  Description of Artificial Sequence: Synthetic oligonucleotide
  Sense strand starting at position 173 of SEQ ID NO: 1514
gugccuuaagcguucugau

SEQ ID NO: 119049 - RNA, 19 nt, Artificial Sequence
  Description of Artificial Sequence: Synthetic oligonucleotide
  Antisense strand to SEQ ID NO: 119048
aucagaacgcuuaaggcac

SEQ ID NO: 119050 - RNA, 19 nt, Artificial Sequence
  Description of Artificial Sequence: Synthetic oligonucleotide
  Sense strand starting at position 167 of SEQ ID NO: 1514
aaauuugugccuuaagcgu

SEQ ID NO: 119051 - RNA, 19 nt, Artificial Sequence
  Description of Artificial Sequence: Synthetic oligonucleotide
  Antisense strand to SEQ ID NO: 119050
acgcuuaaggcacaaauuu

SEQ ID NO: 119052 - RNA, 19 nt, Artificial Sequence
  Description of Artificial Sequence: Synthetic oligonucleotide
  Sense strand starting at position 165 of SEQ ID NO: 1514
ggaaauuugugccuuaagc

SEQ ID NO: 119053 - RNA, 19 nt, Artificial Sequence
  Description of Artificial Sequence: Synthetic oligonucleotide
  Antisense strand to SEQ ID NO: 119052
gcuuaaggcacaaauuucc

SEQ ID NO: 119054 - RNA, 19 nt, Artificial Sequence
  Description of Artificial Sequence: Synthetic oligonucleotide
  Sense strand starting at position 153 of SEQ ID NO: 1514
uggagaguucuuggaaauu

SEQ ID NO: 119055 - RNA, 19 nt, Artificial Sequence
  Description of Artificial Sequence: Synthetic oligonucleotide
  Antisense strand to SEQ ID NO: 119054
aauuuccaagaacucucca

SEQ ID NO: 119056 - RNA, 19 nt, Artificial Sequence
  Description of Artificial Sequence: Synthetic oligonucleotide
  Sense strand starting at position 151 of SEQ ID NO: 1514
uuuggagaguucuuggaaa

SEQ ID NO: 119057 - RNA, 19 nt, Artificial Sequence
  Description of Artificial Sequence: Synthetic oligonucleotide
  Antisense strand to SEQ ID NO: 119056
uuuccaagaacucuccaaa

SEQ ID NO: 119058 - RNA, 19 nt, Artificial Sequence
  Description of Artificial Sequence: Synthetic oligonucleotide
  Sense strand starting at position 143 of SEQ ID NO: 1514
ucaggaaauuuggagaguu

SEQ ID NO: 119059 - RNA, 19 nt, Artificial Sequence
  Description of Artificial Sequence: Synthetic oligonucleotide
  Antisense strand to SEQ ID NO: 119058
aacucuccaaauuuccuga

SEQ ID NO: 119060 - RNA, 19 nt, Artificial Sequence
  Description of Artificial Sequence: Synthetic oligonucleotide
  Sense strand starting at position 9 of SEQ ID NO: 1514
ggaagaguccuggguaaug

SEQ ID NO: 119061 - RNA, 19 nt, Artificial Sequence
  Description of Artificial Sequence: Synthetic oligonucleotide
  Antisense strand to SEQ ID NO: 119060
cauuacccaggacucuucc

SEQ ID NO: 119062 - RNA, 19 nt, Artificial Sequence
  Description of Artificial Sequence: Synthetic oligonucleotide
  Sense strand starting at position 2464 of SEQ ID NO: 1516
guaagaggugccugggaca

SEQ ID NO: 119063 - RNA, 19 nt, Artificial Sequence
  Description of Artificial Sequence: Synthetic oligonucleotide
  Antisense strand to SEQ ID NO: 119062
ugucccaggcaccucuuac

SEQ ID NO: 119064 - RNA, 19 nt, Artificial Sequence
  Description of Artificial Sequence: Synthetic oligonucleotide
  Sense strand starting at position 2479 of SEQ ID NO: 1516
gacagacuuaguugaggua

SEQ ID NO: 119065 - RNA, 19 nt, Artificial Sequence
  Description of Artificial Sequence: Synthetic oligonucleotide
  Antisense strand to SEQ ID NO: 119064
uaccucaacuaagucuguc

SEQ ID NO: 119066 - RNA, 19 nt, Artificial Sequence
  Description of Artificial Sequence: Synthetic oligonucleotide
  Sense strand starting at position 2464 of SEQ ID NO: 1516
guaagaggugccugggaca

SEQ ID NO: 119067 - RNA, 19 nt, Artificial Sequence
  Description of Artificial Sequence: Synthetic oligonucleotide
  Antisense strand to SEQ ID NO: 119066
ugucccaggcaccucuuac

SEQ ID NO: 119068 - RNA, 19 nt, Artificial Sequence
  Description of Artificial Sequence: Synthetic oligonucleotide
  Sense strand starting at position 2479 of SEQ ID NO: 1516
gacagacuuaguugaggua

SEQ ID NO: 119069 - RNA, 19 nt, Artificial Sequence
  Description of Artificial Sequence: Synthetic oligonucleotide
  Antisense strand to SEQ ID NO: 119068
uaccucaacuaagucuguc

SEQ ID NO: 119070 - RNA, 19 nt, Artificial Sequence
  Description of Artificial Sequence: Synthetic oligonucleotide
  Sense strand starting at position 2464 of SEQ ID NO: 1516
guaagaggugccugggaca

SEQ ID NO: 119071 - RNA, 19 nt, Artificial Sequence
  Description of Artificial Sequence: Synthetic oligonucleotide
  Antisense strand to SEQ ID NO: 119070
ugucccaggcaccucuuac

SEQ ID NO: 119072 - RNA, 19 nt, Artificial Sequence
  Description of Artificial Sequence: Synthetic oligonucleotide
  Sense strand starting at position 2479 of SEQ ID NO: 1516
gacagacuuaguugaggua

SEQ ID NO: 119073 - RNA, 19 nt, Artificial Sequence
  Description of Artificial Sequence: Synthetic oligonucleotide
  Antisense strand to SEQ ID NO: 119072
uaccucaacuaagucuguc

SEQ ID NO: 119074 - RNA, 19 nt, Artificial Sequence
  Description of Artificial Sequence: Synthetic oligonucleotide
  Sense strand starting at position 3862 of SEQ ID NO: 1517
uuagcacgguaauaaauau

SEQ ID NO: 119075 - RNA, 19 nt, Artificial Sequence
  Description of Artificial Sequence: Synthetic oligonucleotide
  Antisense strand to SEQ ID NO: 119074
auauuuauuaccgugcuaa

SEQ ID NO: 119076 - RNA, 19 nt, Artificial Sequence
  Description of Artificial Sequence: Synthetic oligonucleotide
  Sense strand starting at position 3859 of SEQ ID NO: 1517
ugcuuagcacgguaauaaa

SEQ ID NO: 119077 - RNA, 19 nt, Artificial Sequence
  Description of Artificial Sequence: Synthetic oligonucleotide
  Antisense strand to SEQ ID NO: 119076
uuuauuaccgugcuaagca

SEQ ID NO: 119078 - RNA, 19 nt, Artificial Sequence
  Description of Artificial Sequence: Synthetic oligonucleotide
  Sense strand starting at position 3857 of SEQ ID NO: 1517
ucugcuuagcacgguaaua

SEQ ID NO: 119079 - RNA, 19 nt, Artificial Sequence
  Description of Artificial Sequence: Synthetic oligonucleotide
  Antisense strand to SEQ ID NO: 119078
uauuaccgugcuaagcaga

SEQ ID NO: 119080 - RNA, 19 nt, Artificial Sequence
  Description of Artificial Sequence: Synthetic oligonucleotide
  Sense strand starting at position 3856 of SEQ ID NO: 1517
uucugcuuagcacgguaau

SEQ ID NO: 119081 - RNA, 19 nt, Artificial Sequence
  Description of Artificial Sequence: Synthetic oligonucleotide
  Antisense strand to SEQ ID NO: 119080
auuaccgugcuaagcagaa

SEQ ID NO: 119082 - RNA, 19 nt, Artificial Sequence
  Description of Artificial Sequence: Synthetic oligonucleotide
  Sense strand starting at position 3471 of SEQ ID NO: 1517
guguccugaaagugagaca

SEQ ID NO: 119083 - RNA, 19 nt, Artificial Sequence
  Description of Artificial Sequence: Synthetic oligonucleotide
  Antisense strand to SEQ ID NO: 119082
ugucucacuuucaggacac

SEQ ID NO: 119084 - RNA, 19 nt, Artificial Sequence
  Description of Artificial Sequence: Synthetic oligonucleotide
  Sense strand starting at position 971 of SEQ ID NO: 1517
acuaaauuauaugggaaug

SEQ ID NO: 119085 - RNA, 19 nt, Artificial Sequence
  Description of Artificial Sequence: Synthetic oligonucleotide
  Antisense strand to SEQ ID NO: 119084
cauucccauauaauuuagu

SEQ ID NO: 119086 - RNA, 19 nt, Artificial Sequence
  Description of Artificial Sequence: Synthetic oligonucleotide
  Sense strand starting at position 472 of SEQ ID NO: 1517
gcaguuauaccacagacgu

SEQ ID NO: 119087 - RNA, 19 nt, Artificial Sequence
  Description of Artificial Sequence: Synthetic oligonucleotide
  Antisense strand to SEQ ID NO: 119086
acgucugugguauaacugc

SEQ ID NO: 119088 - RNA, 19 nt, Artificial Sequence
  Description of Artificial Sequence: Synthetic oligonucleotide
  Sense strand starting at position 112 of SEQ ID NO: 1518
agacuacuuugucuacuuu

SEQ ID NO: 119089 - RNA, 19 nt, Artificial Sequence
  Description of Artificial Sequence: Synthetic oligonucleotide
  Antisense strand to SEQ ID NO: 119088
aaaguagacaaaguagucu

SEQ ID NO: 119090 - RNA, 19 nt, Artificial Sequence
  Description of Artificial Sequence: Synthetic oligonucleotide
  Sense strand starting at position 131 of SEQ ID NO: 1518
guacacaugugagucaaua

SEQ ID NO: 119091 - RNA, 19 nt, Artificial Sequence
  Description of Artificial Sequence: Synthetic oligonucleotide
  Antisense strand to SEQ ID NO: 119090
uauugacucacauguguac

SEQ ID NO: 119092 - RNA, 19 nt, Artificial Sequence
  Description of Artificial Sequence: Synthetic oligonucleotide
  Sense strand starting at position 141 of SEQ ID NO: 1518
gagucaauaugaguaagac

SEQ ID NO: 119093 - RNA, 19 nt, Artificial Sequence
  Description of Artificial Sequence: Synthetic oligonucleotide
  Antisense strand to SEQ ID NO: 119092
gucuuacucauauugacuc

SEQ ID NO: 119094 - RNA, 19 nt, Artificial Sequence
  Description of Artificial Sequence: Synthetic oligonucleotide
  Sense strand starting at position 164 of SEQ ID NO: 1518
agaauaucccuguagccua

SEQ ID NO: 119095 - RNA, 19 nt, Artificial Sequence
  Description of Artificial Sequence: Synthetic oligonucleotide
  Antisense strand to SEQ ID NO: 119094
uaggcuacagggauauucu

SEQ ID NO: 119096 - RNA, 19 nt, Artificial Sequence
  Description of Artificial Sequence: Synthetic oligonucleotide
  Sense strand starting at position 245 of SEQ ID NO: 1518
ggaccuaucauguguugau

SEQ ID NO: 119097 - RNA, 19 nt, Artificial Sequence
  Description of Artificial Sequence: Synthetic oligonucleotide
  Antisense strand to SEQ ID NO: 119096
aucaacacaugauaggucc

SEQ ID NO: 119098 - RNA, 19 nt, Artificial Sequence
  Description of Artificial Sequence: Synthetic oligonucleotide
  Sense strand starting at position 246 of SEQ ID NO: 1518
gaccuaucauguguugaug

SEQ ID NO: 119099 - RNA, 19 nt, Artificial Sequence
  Description of Artificial Sequence: Synthetic oligonucleotide
  Antisense strand to SEQ ID NO: 119098
caucaacacaugauagguc

SEQ ID NO: 119100 - RNA, 19 nt, Artificial Sequence
  Description of Artificial Sequence: Synthetic oligonucleotide
  Sense strand starting at position 249 of SEQ ID NO: 1518
cuaucauguguugaugguu

SEQ ID NO: 119101 - RNA, 19 nt, Artificial Sequence
  Description of Artificial Sequence: Synthetic oligonucleotide
  Antisense strand to SEQ ID NO: 119100
aaccaucaacacaugauag

SEQ ID NO: 119102 - RNA, 19 nt, Artificial Sequence
  Description of Artificial Sequence: Synthetic oligonucleotide
  Sense strand starting at position 252 of SEQ ID NO: 1518
ucauguguugaugguugaa

SEQ ID NO: 119103 - RNA, 19 nt, Artificial Sequence
  Description of Artificial Sequence: Synthetic oligonucleotide
  Antisense strand to SEQ ID NO: 119102
uucaaccaucaacacauga

SEQ ID NO: 119104 - RNA, 19 nt, Artificial Sequence
  Description of Artificial Sequence: Synthetic oligonucleotide
  Sense strand starting at position 291 of SEQ ID NO: 1518
uguggaaugcaguacuuua

SEQ ID NO: 119105 - RNA, 19 nt, Artificial Sequence
  Description of Artificial Sequence: Synthetic oligonucleotide
  Antisense strand to SEQ ID NO: 119104
uaaaguacugcauuccaca

SEQ ID NO: 119106 - RNA, 19 nt, Artificial Sequence
  Description of Artificial Sequence: Synthetic oligonucleotide
  Sense strand starting at position 389 of SEQ ID NO: 1518
cugacuugccaauggaauc

SEQ ID NO: 119107 - RNA, 19 nt, Artificial Sequence
  Description of Artificial Sequence: Synthetic oligonucleotide
  Antisense strand to SEQ ID NO: 119106
gauuccauuggcaagucag

SEQ ID NO: 119108 - RNA, 19 nt, Artificial Sequence
  Description of Artificial Sequence: Synthetic oligonucleotide
  Sense strand starting at position 433 of SEQ ID NO: 1518
caauguuguuaugcaagaa

SEQ ID NO: 119109 - RNA, 19 nt, Artificial Sequence
  Description of Artificial Sequence: Synthetic oligonucleotide
  Antisense strand to SEQ ID NO: 119108
uucuugcauaacaacauug

SEQ ID NO: 119110 - RNA, 19 nt, Artificial Sequence
  Description of Artificial Sequence: Synthetic oligonucleotide
  Sense strand starting at position 437 of SEQ ID NO: 1518
guuguuaugcaagaaacuu

SEQ ID NO: 119111 - RNA, 19 nt, Artificial Sequence
  Description of Artificial Sequence: Synthetic oligonucleotide
  Antisense strand to SEQ ID NO: 119110
aaguuucuugcauaacaac

SEQ ID NO: 119112 - RNA, 19 nt, Artificial Sequence
  Description of Artificial Sequence: Synthetic oligonucleotide
  Sense strand starting at position 572 of SEQ ID NO: 1518
guucuaauuccauaucugu

SEQ ID NO: 119113 - RNA, 19 nt, Artificial Sequence
  Description of Artificial Sequence: Synthetic oligonucleotide
  Antisense strand to SEQ ID NO: 119112
acagauauggaauuagaac

SEQ ID NO: 119114 - RNA, 19 nt, Artificial Sequence
  Description of Artificial Sequence: Synthetic oligonucleotide
  Sense strand starting at position 583 of SEQ ID NO: 1518
auaucugucuguuugacua

SEQ ID NO: 119115 - RNA, 19 nt, Artificial Sequence
  Description of Artificial Sequence: Synthetic oligonucleotide
  Antisense strand to SEQ ID NO: 119114
uagucaaacagacagauau

SEQ ID NO: 119116 - RNA, 19 nt, Artificial Sequence
  Description of Artificial Sequence: Synthetic oligonucleotide
  Sense strand starting at position 590 of SEQ ID NO: 1518
ucuguuugacuauaccuua

SEQ ID NO: 119117 - RNA, 19 nt, Artificial Sequence
  Description of Artificial Sequence: Synthetic oligonucleotide
  Antisense strand to SEQ ID NO: 119116
uaagguauagucaaacaga

SEQ ID NO: 119118 - RNA, 19 nt, Artificial Sequence
  Description of Artificial Sequence: Synthetic oligonucleotide
  Sense strand starting at position 593 of SEQ ID NO: 1518
guuugacuauaccuuauca

SEQ ID NO: 119119 - RNA, 19 nt, Artificial Sequence
  Description of Artificial Sequence: Synthetic oligonucleotide
  Antisense strand to SEQ ID NO: 119118
ugauaagguauagucaaac

SEQ ID NO: 119120 - RNA, 19 nt, Artificial Sequence
  Description of Artificial Sequence: Synthetic oligonucleotide
  Sense strand starting at position 704 of SEQ ID NO: 1518
ccacaaauguaguucucaa

SEQ ID NO: 119121 - RNA, 19 nt, Artificial Sequence
  Description of Artificial Sequence: Synthetic oligonucleotide
  Antisense strand to SEQ ID NO: 119120
uugagaacuacauuugugg

SEQ ID NO: 119122 - RNA, 19 nt, Artificial Sequence
  Description of Artificial Sequence: Synthetic oligonucleotide
  Sense strand starting at position 1013 of SEQ ID NO: 1518
cuuggaaccucuguauaga

SEQ ID NO: 119123 - RNA, 19 nt, Artificial Sequence
  Description of Artificial Sequence: Synthetic oligonucleotide
  Antisense strand to SEQ ID NO: 119122
ucuauacagagguuccaag

SEQ ID NO: 119124 - RNA, 19 nt, Artificial Sequence
  Description of Artificial Sequence: Synthetic oligonucleotide
  Sense strand starting at position 1118 of SEQ ID NO: 1518
uauuacgaagcguauagau

SEQ ID NO: 119125 - RNA, 19 nt, Artificial Sequence
  Description of Artificial Sequence: Synthetic oligonucleotide
  Antisense strand to SEQ ID NO: 119124
aucuauacgcuucguaaua

SEQ ID NO: 119126 - RNA, 19 nt, Artificial Sequence
  Description of Artificial Sequence: Synthetic oligonucleotide
  Sense strand starting at position 1120 of SEQ ID NO: 1518
uuacgaagcguauagauga

SEQ ID NO: 119127 - RNA, 19 nt, Artificial Sequence
  Description of Artificial Sequence: Synthetic oligonucleotide
  Antisense strand to SEQ ID NO: 119126
ucaucuauacgcuucguaa

SEQ ID NO: 119128 - RNA, 19 nt, Artificial Sequence
  Description of Artificial Sequence: Synthetic oligonucleotide
  Sense strand starting at position 1580 of SEQ ID NO: 1518
agagcaggcuacucaugau

SEQ ID NO: 119129 - RNA, 19 nt, Artificial Sequence
  Description of Artificial Sequence: Synthetic oligonucleotide
  Antisense strand to SEQ ID NO: 119128
aucaugaguagccugcucu

SEQ ID NO: 119130 - RNA, 19 nt, Artificial Sequence
  Description of Artificial Sequence: Synthetic oligonucleotide
  Sense strand starting at position 1659 of SEQ ID NO: 1518
gaggaaguacucugugcag

SEQ ID NO: 119131 - RNA, 19 nt, Artificial Sequence
  Description of Artificial Sequence: Synthetic oligonucleotide
  Antisense strand to SEQ ID NO: 119130
cugcacagaguacuuccuc

SEQ ID NO: 119132 - RNA, 19 nt, Artificial Sequence
  Description of Artificial Sequence: Synthetic oligonucleotide
  Sense strand starting at position 1720 of SEQ ID NO: 1518
aaugauauggucugacuuc

SEQ ID NO: 119133 - RNA, 19 nt, Artificial Sequence
  Description of Artificial Sequence: Synthetic oligonucleotide
  Antisense strand to SEQ ID NO: 119132
gaagucagaccauaucauu

SEQ ID NO: 119134 - RNA, 19 nt, Artificial Sequence
  Description of Artificial Sequence: Synthetic oligonucleotide
  Sense strand starting at position 1799 of SEQ ID NO: 1518
aggagagguugcucagaaa

SEQ ID NO: 119135 - RNA, 19 nt, Artificial Sequence
  Description of Artificial Sequence: Synthetic oligonucleotide
  Antisense strand to SEQ ID NO: 119134
uuucugagcaaccucuccu

SEQ ID NO: 119136 - RNA, 19 nt, Artificial Sequence
  Description of Artificial Sequence: Synthetic oligonucleotide
  Sense strand starting at position 1877 of SEQ ID NO: 1518
uaccacuaacugugaggau

SEQ ID NO: 119137 - RNA, 19 nt, Artificial Sequence
  Description of Artificial Sequence: Synthetic oligonucleotide
  Antisense strand to SEQ ID NO: 119136
auccucacaguuaguggua

SEQ ID NO: 119138 - RNA, 19 nt, Artificial Sequence
  Description of Artificial Sequence: Synthetic oligonucleotide
  Sense strand starting at position 2352 of SEQ ID NO: 1518
agcucagucccagauuaca

SEQ ID NO: 119139 - RNA, 19 nt, Artificial Sequence
  Description of Artificial Sequence: Synthetic oligonucleotide
  Antisense strand to SEQ ID NO: 119138
uguaaucugggacugagcu

SEQ ID NO: 119140 - RNA, 19 nt, Artificial Sequence
  Description of Artificial Sequence: Synthetic oligonucleotide
  Sense strand starting at position 2378 of SEQ ID NO: 1518
ccagaaagcgcugacugaa

SEQ ID NO: 119141 - RNA, 19 nt, Artificial Sequence
  Description of Artificial Sequence: Synthetic oligonucleotide
  Antisense strand to SEQ ID NO: 119140
uucagucagcgcuuucugg

SEQ ID NO: 119142 - RNA, 19 nt, Artificial Sequence
  Description of Artificial Sequence: Synthetic oligonucleotide
  Sense strand starting at position 2458 of SEQ ID NO: 1518
uuuagaaauuggcccagua

SEQ ID NO: 119143 - RNA, 19 nt, Artificial Sequence
  Description of Artificial Sequence: Synthetic oligonucleotide
  Antisense strand to SEQ ID NO: 119142
uacugggccaauuucuaaa

SEQ ID NO: 119144 - RNA, 19 nt, Artificial Sequence
  Description of Artificial Sequence: Synthetic oligonucleotide
  Sense strand starting at position 2608 of SEQ ID NO: 1518
uugucuucucuugaugauu

SEQ ID NO: 119145 - RNA, 19 nt, Artificial Sequence
  Description of Artificial Sequence: Synthetic oligonucleotide
  Antisense strand to SEQ ID NO: 119144
aaucaucaagagaagacaa

SEQ ID NO: 119146 - RNA, 19 nt, Artificial Sequence
  Description of Artificial Sequence: Synthetic oligonucleotide
  Sense strand starting at position 2700 of SEQ ID NO: 1518
gcuaacagucuaggaaauc

SEQ ID NO: 119147 - RNA, 19 nt, Artificial Sequence
  Description of Artificial Sequence: Synthetic oligonucleotide
  Antisense strand to SEQ ID NO: 119146
gauuuccuagacuguuagc

SEQ ID NO: 119148 - RNA, 19 nt, Artificial Sequence
  Description of Artificial Sequence: Synthetic oligonucleotide
  Sense strand starting at position 2825 of SEQ ID NO: 1518
gagaauagagucuguaaau

SEQ ID NO: 119149 - RNA, 19 nt, Artificial Sequence
  Description of Artificial Sequence: Synthetic oligonucleotide
  Antisense strand to SEQ ID NO: 119148
auuuacagacucuauucuc

SEQ ID NO: 119150 - RNA, 19 nt, Artificial Sequence
  Description of Artificial Sequence: Synthetic oligonucleotide
  Sense strand starting at position 2826 of SEQ ID NO: 1518
agaauagagucuguaaauu

SEQ ID NO: 119151 - RNA, 19 nt, Artificial Sequence
  Description of Artificial Sequence: Synthetic oligonucleotide
  Antisense strand to SEQ ID NO: 119150
aauuuacagacucuauucu

SEQ ID NO: 119152 - RNA, 19 nt, Artificial Sequence
  Description of Artificial Sequence: Synthetic oligonucleotide
  Sense strand starting at position 2837 of SEQ ID NO: 1518
uguaaauucgaaggucaau

SEQ ID NO: 119153 - RNA, 19 nt, Artificial Sequence
  Description of Artificial Sequence: Synthetic oligonucleotide
  Antisense strand to SEQ ID NO: 119152
auugaccuucgaauuuaca

SEQ ID NO: 119154 - RNA, 19 nt, Artificial Sequence
  Description of Artificial Sequence: Synthetic oligonucleotide
  Sense strand starting at position 3126 of SEQ ID NO: 1518
uuggcuuuaccucauugau

SEQ ID NO: 119155 - RNA, 19 nt, Artificial Sequence
  Description of Artificial Sequence: Synthetic oligonucleotide
  Antisense strand to SEQ ID NO: 119154
aucaaugagguaaagccaa

SEQ ID NO: 119156 - RNA, 19 nt, Artificial Sequence
  Description of Artificial Sequence: Synthetic oligonucleotide
  Sense strand starting at position 3364 of SEQ ID NO: 1518
uugcuugacuggguaauga

SEQ ID NO: 119157 - RNA, 19 nt, Artificial Sequence
  Description of Artificial Sequence: Synthetic oligonucleotide
  Antisense strand to SEQ ID NO: 119156
ucauuacccagucaagcaa

SEQ ID NO: 119158 - RNA, 19 nt, Artificial Sequence
  Description of Artificial Sequence: Synthetic oligonucleotide
  Sense strand starting at position 3550 of SEQ ID NO: 1518
agggucuuaucauccuaga

SEQ ID NO: 119159 - RNA, 19 nt, Artificial Sequence
  Description of Artificial Sequence: Synthetic oligonucleotide
  Antisense strand to SEQ ID NO: 119158
ucuaggaugauaagacccu

SEQ ID NO: 119160 - RNA, 19 nt, Artificial Sequence
  Description of Artificial Sequence: Synthetic oligonucleotide
  Sense strand starting at position 3688 of SEQ ID NO: 1518
gucgcuucucuacaaauuu

SEQ ID NO: 119161 - RNA, 19 nt, Artificial Sequence
  Description of Artificial Sequence: Synthetic oligonucleotide
  Antisense strand to SEQ ID NO: 119160
aaauuuguagagaagcgac

SEQ ID NO: 119162 - RNA, 19 nt, Artificial Sequence
  Description of Artificial Sequence: Synthetic oligonucleotide
  Sense strand starting at position 3797 of SEQ ID NO: 1518
cgcacuugucaauaaacuu

SEQ ID NO: 119163 - RNA, 19 nt, Artificial Sequence
  Description of Artificial Sequence: Synthetic oligonucleotide
  Antisense strand to SEQ ID NO: 119162
aaguuuauugacaagugcg

SEQ ID NO: 119164 - RNA, 19 nt, Artificial Sequence
  Description of Artificial Sequence: Synthetic oligonucleotide
  Sense strand starting at position 3830 of SEQ ID NO: 1518
cuuauaugucuuuggugag

SEQ ID NO: 119165 - RNA, 19 nt, Artificial Sequence
  Description of Artificial Sequence: Synthetic oligonucleotide
  Antisense strand to SEQ ID NO: 119164
cucaccaaagacauauaag

SEQ ID NO: 119166 - RNA, 19 nt, Artificial Sequence
  Description of Artificial Sequence: Synthetic oligonucleotide
  Sense strand starting at position 3834 of SEQ ID NO: 1518
uaugucuuuggugagucua

SEQ ID NO: 119167 - RNA, 19 nt, Artificial Sequence
  Description of Artificial Sequence: Synthetic oligonucleotide
  Antisense strand to SEQ ID NO: 119166
uagacucaccaaagacaua

SEQ ID NO: 119168 - RNA, 19 nt, Artificial Sequence
  Description of Artificial Sequence: Synthetic oligonucleotide
  Sense strand starting at position 123 of SEQ ID NO: 1519
uaaugaaaggauuguggca

SEQ ID NO: 119169 - RNA, 19 nt, Artificial Sequence
  Description of Artificial Sequence: Synthetic oligonucleotide
  Antisense strand to SEQ ID NO: 119168
ugccacaauccuuucauua

SEQ ID NO: 119170 - RNA, 19 nt, Artificial Sequence
  Description of Artificial Sequence: Synthetic oligonucleotide
  Sense strand starting at position 252 of SEQ ID NO: 1519
aaucaugagcccuggagaa

SEQ ID NO: 119171 - RNA, 19 nt, Artificial Sequence
  Description of Artificial Sequence: Synthetic oligonucleotide
  Antisense strand to SEQ ID NO: 119170
uucuccagggcucaugauu

SEQ ID NO: 119172 - RNA, 19 nt, Artificial Sequence
  Description of Artificial Sequence: Synthetic oligonucleotide
  Sense strand starting at position 288 of SEQ ID NO: 1519
gcauguaugacaugaagac

SEQ ID NO: 119173 - RNA, 19 nt, Artificial Sequence
  Description of Artificial Sequence: Synthetic oligonucleotide
  Antisense strand to SEQ ID NO: 119172
gucuucaugucauacaugc

SEQ ID NO: 119174 - RNA, 19 nt, Artificial Sequence
  Description of Artificial Sequence: Synthetic oligonucleotide
  Sense strand starting at position 323 of SEQ ID NO: 1519
gcgucaaugagguaggaua

SEQ ID NO: 119175 - RNA, 19 nt, Artificial Sequence
  Description of Artificial Sequence: Synthetic oligonucleotide
  Antisense strand to SEQ ID NO: 119174
uauccuaccucauugacgc

SEQ ID NO: 119176 - RNA, 19 nt, Artificial Sequence
  Description of Artificial Sequence: Synthetic oligonucleotide
  Sense strand starting at position 591 of SEQ ID NO: 1519
ugaucaauacuuggauacu

SEQ ID NO: 119177 - RNA, 19 nt, Artificial Sequence
  Description of Artificial Sequence: Synthetic oligonucleotide
  Antisense strand to SEQ ID NO: 119176
aguauccaaguauugauca

SEQ ID NO: 119178 - RNA, 19 nt, Artificial Sequence
  Description of Artificial Sequence: Synthetic oligonucleotide
  Sense strand starting at position 670 of SEQ ID NO: 1519
uagucuuaugaaggauacu

SEQ ID NO: 119179 - RNA, 19 nt, Artificial Sequence
  Description of Artificial Sequence: Synthetic oligonucleotide
  Antisense strand to SEQ ID NO: 119178
aguauccuucauaagacua

SEQ ID NO: 119180 - RNA, 19 nt, Artificial Sequence
  Description of Artificial Sequence: Synthetic oligonucleotide
  Sense strand starting at position 784 of SEQ ID NO: 1519
gaauaacuugaguggcaga

SEQ ID NO: 119181 - RNA, 19 nt, Artificial Sequence
  Description of Artificial Sequence: Synthetic oligonucleotide
  Antisense strand to SEQ ID NO: 119180
ucugccacucaaguuauuc

SEQ ID NO: 119182 - RNA, 19 nt, Artificial Sequence
  Description of Artificial Sequence: Synthetic oligonucleotide
  Sense strand starting at position 834 of SEQ ID NO: 1519
augucuaauugaguaauga

SEQ ID NO: 119183 - RNA, 19 nt, Artificial Sequence
  Description of Artificial Sequence: Synthetic oligonucleotide
  Antisense strand to SEQ ID NO: 119182
ucauuacucaauuagacau

SEQ ID NO: 119184 - RNA, 19 nt, Artificial Sequence
  Description of Artificial Sequence: Synthetic oligonucleotide
  Sense strand starting at position 835 of SEQ ID NO: 1519
ugucuaauugaguaaugau

SEQ ID NO: 119185 - RNA, 19 nt, Artificial Sequence
  Description of Artificial Sequence: Synthetic oligonucleotide
  Antisense strand to SEQ ID NO: 119184
aucauuacucaauuagaca

SEQ ID NO: 119186 - RNA, 19 nt, Artificial Sequence
  Description of Artificial Sequence: Synthetic oligonucleotide
  Sense strand starting at position 857 of SEQ ID NO: 1519
auagaaguuauugacguua

SEQ ID NO: 119187 - RNA, 19 nt, Artificial Sequence
  Description of Artificial Sequence: Synthetic oligonucleotide
  Antisense strand to SEQ ID NO: 119186
uaacgucaauaacuucuau

SEQ ID NO: 119188 - RNA, 19 nt, Artificial Sequence
  Description of Artificial Sequence: Synthetic oligonucleotide
  Sense strand starting at position 881 of SEQ ID NO: 1519
ugcugaauuuguuuccuuu

SEQ ID NO: 119189 - RNA, 19 nt, Artificial Sequence
  Description of Artificial Sequence: Synthetic oligonucleotide
  Antisense strand to SEQ ID NO: 119188
aaaggaaacaaauucagca

SEQ ID NO: 119190 - RNA, 19 nt, Artificial Sequence
  Description of Artificial Sequence: Synthetic oligonucleotide
  Sense strand starting at position 944 of SEQ ID NO: 1519
guuugaauagaagguugau

SEQ ID NO: 119191 - RNA, 19 nt, Artificial Sequence
  Description of Artificial Sequence: Synthetic oligonucleotide
  Antisense strand to SEQ ID NO: 119190
aucaaccuucuauucaaac

SEQ ID NO: 119192 - RNA, 19 nt, Artificial Sequence
  Description of Artificial Sequence: Synthetic oligonucleotide
  Sense strand starting at position 1117 of SEQ ID NO: 1519
uuccucaggcuauagauaa

SEQ ID NO: 119193 - RNA, 19 nt, Artificial Sequence
  Description of Artificial Sequence: Synthetic oligonucleotide
  Antisense strand to SEQ ID NO: 119192
uuaucuauagccugaggaa

SEQ ID NO: 119194 - RNA, 19 nt, Artificial Sequence
  Description of Artificial Sequence: Synthetic oligonucleotide
  Sense strand starting at position 1307 of SEQ ID NO: 1519
cugaaugaauacguagaau

SEQ ID NO: 119195 - RNA, 19 nt, Artificial Sequence
  Description of Artificial Sequence: Synthetic oligonucleotide
  Antisense strand to SEQ ID NO: 119194
auucuacguauucauucag

SEQ ID NO: 119196 - RNA, 19 nt, Artificial Sequence
  Description of Artificial Sequence: Synthetic oligonucleotide
  Sense strand starting at position 1507 of SEQ ID NO: 1519
aguguagagauccaggcaa

SEQ ID NO: 119197 - RNA, 19 nt, Artificial Sequence
  Description of Artificial Sequence: Synthetic oligonucleotide
  Antisense strand to SEQ ID NO: 119196
uugccuggaucucuacacu

SEQ ID NO: 119198 - RNA, 19 nt, Artificial Sequence
  Description of Artificial Sequence: Synthetic oligonucleotide
  Sense strand starting at position 1592 of SEQ ID NO: 1519
gggucaugauagagggaua

SEQ ID NO: 119199 - RNA, 19 nt, Artificial Sequence
  Description of Artificial Sequence: Synthetic oligonucleotide
  Antisense strand to SEQ ID NO: 119198
uaucccucuaucaugaccc

SEQ ID NO: 119200 - RNA, 19 nt, Artificial Sequence
  Description of Artificial Sequence: Synthetic oligonucleotide
  Sense strand starting at position 1610 of SEQ ID NO: 1519
aaugaagagggcugcauau

SEQ ID NO: 119201 - RNA, 19 nt, Artificial Sequence
  Description of Artificial Sequence: Synthetic oligonucleotide
  Antisense strand to SEQ ID NO: 119200
auaugcagcccucuucauu

SEQ ID NO: 119202 - RNA, 19 nt, Artificial Sequence
  Description of Artificial Sequence: Synthetic oligonucleotide
  Sense strand starting at position 1640 of SEQ ID NO: 1519
ggucaaaggccauaacugu

SEQ ID NO: 119203 - RNA, 19 nt, Artificial Sequence
  Description of Artificial Sequence: Synthetic oligonucleotide
  Antisense strand to SEQ ID NO: 119202
acaguuauggccuuugacc

SEQ ID NO: 119204 - RNA, 19 nt, Artificial Sequence
  Description of Artificial Sequence: Synthetic oligonucleotide
  Sense strand starting at position 1751 of SEQ ID NO: 1519
uagacagcaucuuugggau

SEQ ID NO: 119205 - RNA, 19 nt, Artificial Sequence
  Description of Artificial Sequence: Synthetic oligonucleotide
  Antisense strand to SEQ ID NO: 119204
aucccaaagaugcugucua

SEQ ID NO: 119206 - RNA, 19 nt, Artificial Sequence
  Description of Artificial Sequence: Synthetic oligonucleotide
  Sense strand starting at position 1816 of SEQ ID NO: 1519
aaaguauacaugggagugu

SEQ ID NO: 119207 - RNA, 19 nt, Artificial Sequence
  Description of Artificial Sequence: Synthetic oligonucleotide
  Antisense strand to SEQ ID NO: 119206
acacucccauguauacuuu

SEQ ID NO: 119208 - RNA, 19 nt, Artificial Sequence
  Description of Artificial Sequence: Synthetic oligonucleotide
  Sense strand starting at position 1829 of SEQ ID NO: 1519
gaguguggaggugaguauu

SEQ ID NO: 119209 - RNA, 19 nt, Artificial Sequence
  Description of Artificial Sequence: Synthetic oligonucleotide
  Antisense strand to SEQ ID NO: 119208
aauacucaccuccacacuc

SEQ ID NO: 119210 - RNA, 19 nt, Artificial Sequence
  Description of Artificial Sequence: Synthetic oligonucleotide
  Sense strand starting at position 1832 of SEQ ID NO: 1519
uguggaggugaguauucaa

SEQ ID NO: 119211 - RNA, 19 nt, Artificial Sequence
  Description of Artificial Sequence: Synthetic oligonucleotide
  Antisense strand to SEQ ID NO: 119210
uugaauacucaccuccaca

SEQ ID NO: 119212 - RNA, 19 nt, Artificial Sequence
  Description of Artificial Sequence: Synthetic oligonucleotide
  Sense strand starting at position 1835 of SEQ ID NO: 1519
ggaggugaguauucaacug

SEQ ID NO: 119213 - RNA, 19 nt, Artificial Sequence
  Description of Artificial Sequence: Synthetic oligonucleotide
  Antisense strand to SEQ ID NO: 119212
caguugaauacucaccucc

SEQ ID NO: 119214 - RNA, 19 nt, Artificial Sequence
  Description of Artificial Sequence: Synthetic oligonucleotide
  Sense strand starting at position 1850 of SEQ ID NO: 1519
acuggaccacugugaugau

SEQ ID NO: 119215 - RNA, 19 nt, Artificial Sequence
  Description of Artificial Sequence: Synthetic oligonucleotide
  Antisense strand to SEQ ID NO: 119214
aucaucacagugguccagu

SEQ ID NO: 119216 - RNA, 19 nt, Artificial Sequence
  Description of Artificial Sequence: Synthetic oligonucleotide
  Sense strand starting at position 2003 of SEQ ID NO: 1519
ccaaguugaaagugagagu

SEQ ID NO: 119217 - RNA, 19 nt, Artificial Sequence
  Description of Artificial Sequence: Synthetic oligonucleotide
  Antisense strand to SEQ ID NO: 119216
acucucacuuucaacuugg

SEQ ID NO: 119218 - RNA, 19 nt, Artificial Sequence
  Description of Artificial Sequence: Synthetic oligonucleotide
  Sense strand starting at position 2004 of SEQ ID NO: 1519
caaguugaaagugagaguu

SEQ ID NO: 119219 - RNA, 19 nt, Artificial Sequence
  Description of Artificial Sequence: Synthetic oligonucleotide
  Antisense strand to SEQ ID NO: 119218
aacucucacuuucaacuug

SEQ ID NO: 119220 - RNA, 19 nt, Artificial Sequence
  Description of Artificial Sequence: Synthetic oligonucleotide
  Sense strand starting at position 2300 of SEQ ID NO: 1519
gguccucauacugagaguu

SEQ ID NO: 119221 - RNA, 19 nt, Artificial Sequence
  Description of Artificial Sequence: Synthetic oligonucleotide
  Antisense strand to SEQ ID NO: 119220
aacucucaguaugaggacc

SEQ ID NO: 119222 - RNA, 19 nt, Artificial Sequence
  Description of Artificial Sequence: Synthetic oligonucleotide
  Sense strand starting at position 2426 of SEQ ID NO: 1519
uguuuaggcgaauauagaa

SEQ ID NO: 119223 - RNA, 19 nt, Artificial Sequence
  Description of Artificial Sequence: Synthetic oligonucleotide
  Antisense strand to SEQ ID NO: 119222
uucuauauucgccuaaaca

SEQ ID NO: 119224 - RNA, 19 nt, Artificial Sequence
  Description of Artificial Sequence: Synthetic oligonucleotide
  Sense strand starting at position 2570 of SEQ ID NO: 1519
auuggauucuuggcauaug

SEQ ID NO: 119225 - RNA, 19 nt, Artificial Sequence
  Description of Artificial Sequence: Synthetic oligonucleotide
  Antisense strand to SEQ ID NO: 119224
cauaugccaagaauccaau

SEQ ID NO: 119226 - RNA, 19 nt, Artificial Sequence
  Description of Artificial Sequence: Synthetic oligonucleotide
  Sense strand starting at position 2573 of SEQ ID NO: 1519
ggauucuuggcauaugauu

SEQ ID NO: 119227 - RNA, 19 nt, Artificial Sequence
  Description of Artificial Sequence: Synthetic oligonucleotide
  Antisense strand to SEQ ID NO: 119226
aaucauaugccaagaaucc

SEQ ID NO: 119228 - RNA, 19 nt, Artificial Sequence
  Description of Artificial Sequence: Synthetic oligonucleotide
  Sense strand starting at position 2622 of SEQ ID NO: 1519
accauuacuggugaauucu

SEQ ID NO: 119229 - RNA, 19 nt, Artificial Sequence
  Description of Artificial Sequence: Synthetic oligonucleotide
  Antisense strand to SEQ ID NO: 119228
agaauucaccaguaauggu

SEQ ID NO: 119230 - RNA, 19 nt, Artificial Sequence
  Description of Artificial Sequence: Synthetic oligonucleotide
  Sense strand starting at position 2701 of SEQ ID NO: 1519
cagagaauauuuggagaag

SEQ ID NO: 119231 - RNA, 19 nt, Artificial Sequence
  Description of Artificial Sequence: Synthetic oligonucleotide
  Antisense strand to SEQ ID NO: 119230
cuucuccaaauauucucug

SEQ ID NO: 119232 - RNA, 19 nt, Artificial Sequence
  Description of Artificial Sequence: Synthetic oligonucleotide
  Sense strand starting at position 2842 of SEQ ID NO: 1519
agaagccuuuggucaaaug

SEQ ID NO: 119233 - RNA, 19 nt, Artificial Sequence
  Description of Artificial Sequence: Synthetic oligonucleotide
  Antisense strand to SEQ ID NO: 119232
cauuugaccaaaggcuucu

SEQ ID NO: 119234 - RNA, 19 nt, Artificial Sequence
  Description of Artificial Sequence: Synthetic oligonucleotide
  Sense strand starting at position 2970 of SEQ ID NO: 1519
ugcccuguagaauacaauu

SEQ ID NO: 119235 - RNA, 19 nt, Artificial Sequence
  Description of Artificial Sequence: Synthetic oligonucleotide
  Antisense strand to SEQ ID NO: 119234
aauuguauucuacagggca

SEQ ID NO: 119236 - RNA, 19 nt, Artificial Sequence
  Description of Artificial Sequence: Synthetic oligonucleotide
  Sense strand starting at position 3004 of SEQ ID NO: 1519
auaggaaauuguccuauua

SEQ ID NO: 119237 - RNA, 19 nt, Artificial Sequence
  Description of Artificial Sequence: Synthetic oligonucleotide
  Antisense strand to SEQ ID NO: 119236
uaauaggacaauuuccuau

SEQ ID NO: 119238 - RNA, 19 nt, Artificial Sequence
  Description of Artificial Sequence: Synthetic oligonucleotide
  Sense strand starting at position 3090 of SEQ ID NO: 1519
ucuucuuaucuugggagaa

SEQ ID NO: 119239 - RNA, 19 nt, Artificial Sequence
  Description of Artificial Sequence: Synthetic oligonucleotide
  Antisense strand to SEQ ID NO: 119238
uucucccaagauaagaaga

SEQ ID NO: 119240 - RNA, 19 nt, Artificial Sequence
  Description of Artificial Sequence: Synthetic oligonucleotide
  Sense strand starting at position 3515 of SEQ ID NO: 1519
gauuauuuaucagcucgua

SEQ ID NO: 119241 - RNA, 19 nt, Artificial Sequence
  Description of Artificial Sequence: Synthetic oligonucleotide
  Antisense strand to SEQ ID NO: 119240
uacgagcugauaaauaauc

SEQ ID NO: 119242 - RNA, 19 nt, Artificial Sequence
  Description of Artificial Sequence: Synthetic oligonucleotide
  Sense strand starting at position 3518 of SEQ ID NO: 1519
uauuuaucagcucguauug

SEQ ID NO: 119243 - RNA, 19 nt, Artificial Sequence
  Description of Artificial Sequence: Synthetic oligonucleotide
  Antisense strand to SEQ ID NO: 119242
caauacgagcugauaaaua

SEQ ID NO: 119244 - RNA, 19 nt, Artificial Sequence
  Description of Artificial Sequence: Synthetic oligonucleotide
  Sense strand starting at position 3527 of SEQ ID NO: 1519
gcucguauuggccuucuau

SEQ ID NO: 119245 - RNA, 19 nt, Artificial Sequence
  Description of Artificial Sequence: Synthetic oligonucleotide
  Antisense strand to SEQ ID NO: 119244
auagaaggccaauacgagc

SEQ ID NO: 119246 - RNA, 19 nt, Artificial Sequence
  Description of Artificial Sequence: Synthetic oligonucleotide
  Sense strand starting at position 3552 of SEQ ID NO: 1519
ugguuauuaugacuccaga

SEQ ID NO: 119247 - RNA, 19 nt, Artificial Sequence
  Description of Artificial Sequence: Synthetic oligonucleotide
  Antisense strand to SEQ ID NO: 119246
ucuggagucauaauaacca

SEQ ID NO: 119248 - RNA, 19 nt, Artificial Sequence
  Description of Artificial Sequence: Synthetic oligonucleotide
  Sense strand starting at position 21 of SEQ ID NO: 1520
cuaaaugaaucaucugugu

SEQ ID NO: 119249 - RNA, 19 nt, Artificial Sequence
  Description of Artificial Sequence: Synthetic oligonucleotide
  Antisense strand to SEQ ID NO: 119248
acacagaugauucauuuag

SEQ ID NO: 119250 - RNA, 19 nt, Artificial Sequence
  Description of Artificial Sequence: Synthetic oligonucleotide
  Sense strand starting at position 94 of SEQ ID NO: 1520
aagugaagauguuuaaccu

SEQ ID NO: 119251 - RNA, 19 nt, Artificial Sequence
  Description of Artificial Sequence: Synthetic oligonucleotide
  Antisense strand to SEQ ID NO: 119250
agguuaaacaucuucacuu

SEQ ID NO: 119252 - RNA, 19 nt, Artificial Sequence
  Description of Artificial Sequence: Synthetic oligonucleotide
  Sense strand starting at position 95 of SEQ ID NO: 1520
agugaagauguuuaaccuu

SEQ ID NO: 119253 - RNA, 19 nt, Artificial Sequence
  Description of Artificial Sequence: Synthetic oligonucleotide
  Antisense strand to SEQ ID NO: 119252
aagguuaaacaucuucacu

SEQ ID NO: 119254 - RNA, 19 nt, Artificial Sequence
  Description of Artificial Sequence: Synthetic oligonucleotide
  Sense strand starting at position 98 of SEQ ID NO: 1520
gaagauguuuaaccuugga

SEQ ID NO: 119255 - RNA, 19 nt, Artificial Sequence
  Description of Artificial Sequence: Synthetic oligonucleotide
  Antisense strand to SEQ ID NO: 119254
uccaagguuaaacaucuuc

SEQ ID NO: 119256 - RNA, 19 nt, Artificial Sequence
  Description of Artificial Sequence: Synthetic oligonucleotide
  Sense strand starting at position 349 of SEQ ID NO: 1520
ugagguaauccaugacuca

SEQ ID NO: 119257 - RNA, 19 nt, Artificial Sequence
  Description of Artificial Sequence: Synthetic oligonucleotide
  Antisense strand to SEQ ID NO: 119256
ugagucauggauuaccuca

SEQ ID NO: 119258 - RNA, 19 nt, Artificial Sequence
  Description of Artificial Sequence: Synthetic oligonucleotide
  Sense strand starting at position 352 of SEQ ID NO: 1520
gguaauccaugacucauaa

SEQ ID NO: 119259 - RNA, 19 nt, Artificial Sequence
  Description of Artificial Sequence: Synthetic oligonucleotide
  Antisense strand to SEQ ID NO: 119258
uuaugagucauggauuacc

SEQ ID NO: 119260 - RNA, 19 nt, Artificial Sequence
  Description of Artificial Sequence: Synthetic oligonucleotide
  Sense strand starting at position 462 of SEQ ID NO: 1520
guucuaacccucuaaagug

SEQ ID NO: 119261 - RNA, 19 nt, Artificial Sequence
  Description of Artificial Sequence: Synthetic oligonucleotide
  Antisense strand to SEQ ID NO: 119260
cacuuuagaggguuagaac

SEQ ID NO: 119262 - RNA, 19 nt, Artificial Sequence
  Description of Artificial Sequence: Synthetic oligonucleotide
  Sense strand starting at position 542 of SEQ ID NO: 1520
auaauaagguuccucauga

SEQ ID NO: 119263 - RNA, 19 nt, Artificial Sequence
  Description of Artificial Sequence: Synthetic oligonucleotide
  Antisense strand to SEQ ID NO: 119262
ucaugaggaaccuuauuau

SEQ ID NO: 119264 - RNA, 19 nt, Artificial Sequence
  Description of Artificial Sequence: Synthetic oligonucleotide
  Sense strand starting at position 651 of SEQ ID NO: 1520
gugacaaagcacuagguau

SEQ ID NO: 119265 - RNA, 19 nt, Artificial Sequence
  Description of Artificial Sequence: Synthetic oligonucleotide
  Antisense strand to SEQ ID NO: 119264
auaccuagugcuuugucac

SEQ ID NO: 119266 - RNA, 19 nt, Artificial Sequence
  Description of Artificial Sequence: Synthetic oligonucleotide
  Sense strand starting at position 659 of SEQ ID NO: 1520
gcacuagguauagaguaau

SEQ ID NO: 119267 - RNA, 19 nt, Artificial Sequence
  Description of Artificial Sequence: Synthetic oligonucleotide
  Antisense strand to SEQ ID NO: 119266
auuacucuauaccuagugc

SEQ ID NO: 119268 - RNA, 19 nt, Artificial Sequence
  Description of Artificial Sequence: Synthetic oligonucleotide
  Sense strand starting at position 665 of SEQ ID NO: 1520
gguauagaguaaucucaug

SEQ ID NO: 119269 - RNA, 19 nt, Artificial Sequence
  Description of Artificial Sequence: Synthetic oligonucleotide
  Antisense strand to SEQ ID NO: 119268
caugagauuacucuauacc

SEQ ID NO: 119270 - RNA, 19 nt, Artificial Sequence
  Description of Artificial Sequence: Synthetic oligonucleotide
  Sense strand starting at position 673 of SEQ ID NO: 1520
guaaucucauguucuaaua

SEQ ID NO: 119271 - RNA, 19 nt, Artificial Sequence
  Description of Artificial Sequence: Synthetic oligonucleotide
  Antisense strand to SEQ ID NO: 119270
uauuagaacaugagauuac

SEQ ID NO: 119272 - RNA, 19 nt, Artificial Sequence
  Description of Artificial Sequence: Synthetic oligonucleotide
  Sense strand starting at position 765 of SEQ ID NO: 1520
ggcagaggaguuuggauca

SEQ ID NO: 119273 - RNA, 19 nt, Artificial Sequence
  Description of Artificial Sequence: Synthetic oligonucleotide
  Antisense strand to SEQ ID NO: 119272
ugauccaaacuccucugcc

SEQ ID NO: 119274 - RNA, 19 nt, Artificial Sequence
  Description of Artificial Sequence: Synthetic oligonucleotide
  Sense strand starting at position 877 of SEQ ID NO: 1520
ccuguaaucgcggcuacua

SEQ ID NO: 119275 - RNA, 19 nt, Artificial Sequence
  Description of Artificial Sequence: Synthetic oligonucleotide
  Antisense strand to SEQ ID NO: 119274
uaguagccgcgauuacagg

SEQ ID NO: 119276 - RNA, 19 nt, Artificial Sequence
  Description of Artificial Sequence: Synthetic oligonucleotide
  Sense strand starting at position 1049 of SEQ ID NO: 1520
uguauuaaccuccaggcuu

SEQ ID NO: 119277 - RNA, 19 nt, Artificial Sequence
  Description of Artificial Sequence: Synthetic oligonucleotide
  Antisense strand to SEQ ID NO: 119276
aagccuggagguuaauaca

SEQ ID NO: 119278 - RNA, 19 nt, Artificial Sequence
  Description of Artificial Sequence: Synthetic oligonucleotide
  Sense strand starting at position 1121 of SEQ ID NO: 1520
uguuucucaggcuauaaau

SEQ ID NO: 119279 - RNA, 19 nt, Artificial Sequence
  Description of Artificial Sequence: Synthetic oligonucleotide
  Antisense strand to SEQ ID NO: 119278
auuuauagccugagaaaca

SEQ ID NO: 119280 - RNA, 19 nt, Artificial Sequence
  Description of Artificial Sequence: Synthetic oligonucleotide
  Sense strand starting at position 1157 of SEQ ID NO: 1520
gagcaaguacaguaaacau

SEQ ID NO: 119281 - RNA, 19 nt, Artificial Sequence
  Description of Artificial Sequence: Synthetic oligonucleotide
  Antisense strand to SEQ ID NO: 119280
auguuuacuguacuugcuc

SEQ ID NO: 119282 - RNA, 19 nt, Artificial Sequence
  Description of Artificial Sequence: Synthetic oligonucleotide
  Sense strand starting at position 1167 of SEQ ID NO: 1520
aguaaacaucagugcaaug

SEQ ID NO: 119283 - RNA, 19 nt, Artificial Sequence
  Description of Artificial Sequence: Synthetic oligonucleotide
  Antisense strand to SEQ ID NO: 119282
cauugcacugauguuuacu

SEQ ID NO: 119284 - RNA, 19 nt, Artificial Sequence
  Description of Artificial Sequence: Synthetic oligonucleotide
  Sense strand starting at position 1221 of SEQ ID NO: 1520
acgcaaguacaugagugau

SEQ ID NO: 119285 - RNA, 19 nt, Artificial Sequence
  Description of Artificial Sequence: Synthetic oligonucleotide
  Antisense strand to SEQ ID NO: 119284
aucacucauguacuugcgu

SEQ ID NO: 119286 - RNA, 19 nt, Artificial Sequence
  Description of Artificial Sequence: Synthetic oligonucleotide
  Sense strand starting at position 1224 of SEQ ID NO: 1520
caaguacaugagugauaca

SEQ ID NO: 119287 - RNA, 19 nt, Artificial Sequence
  Description of Artificial Sequence: Synthetic oligonucleotide
  Antisense strand to SEQ ID NO: 119286
uguaucacucauguacuug

SEQ ID NO: 119288 - RNA, 19 nt, Artificial Sequence
  Description of Artificial Sequence: Synthetic oligonucleotide
  Sense strand starting at position 2032 of SEQ ID NO: 1520
ggcauaguccagcacauga

SEQ ID NO: 119289 - RNA, 19 nt, Artificial Sequence
  Description of Artificial Sequence: Synthetic oligonucleotide
  Antisense strand to SEQ ID NO: 119288
ucaugugcuggacuaugcc

SEQ ID NO: 119290 - RNA, 19 nt, Artificial Sequence
  Description of Artificial Sequence: Synthetic oligonucleotide
  Sense strand starting at position 2082 of SEQ ID NO: 1520
agcuaaacaucuuugagaa

SEQ ID NO: 119291 - RNA, 19 nt, Artificial Sequence
  Description of Artificial Sequence: Synthetic oligonucleotide
  Antisense strand to SEQ ID NO: 119290
uucucaaagauguuuagcu

SEQ ID NO: 119292 - RNA, 19 nt, Artificial Sequence
  Description of Artificial Sequence: Synthetic oligonucleotide
  Sense strand starting at position 2083 of SEQ ID NO: 1520
gcuaaacaucuuugagaag

SEQ ID NO: 119293 - RNA, 19 nt, Artificial Sequence
  Description of Artificial Sequence: Synthetic oligonucleotide
  Antisense strand to SEQ ID NO: 119292
cuucucaaagauguuuagc

SEQ ID NO: 119294 - RNA, 19 nt, Artificial Sequence
  Description of Artificial Sequence: Synthetic oligonucleotide
  Sense strand starting at position 2153 of SEQ ID NO: 1520
guacauauuguccaauguu

SEQ ID NO: 119295 - RNA, 19 nt, Artificial Sequence
  Description of Artificial Sequence: Synthetic oligonucleotide
  Antisense strand to SEQ ID NO: 119294
aacauuggacaauauguac

SEQ ID NO: 119296 - RNA, 19 nt, Artificial Sequence
  Description of Artificial Sequence: Synthetic oligonucleotide
  Sense strand starting at position 2617 of SEQ ID NO: 1520
ugaaguugacauugaaauc

SEQ ID NO: 119297 - RNA, 19 nt, Artificial Sequence
  Description of Artificial Sequence: Synthetic oligonucleotide
  Antisense strand to SEQ ID NO: 119296
gauuucaaugucaacuuca

SEQ ID NO: 119298 - RNA, 19 nt, Artificial Sequence
  Description of Artificial Sequence: Synthetic oligonucleotide
  Sense strand starting at position 2751 of SEQ ID NO: 1520
uuuaguaaauacuugcaga

SEQ ID NO: 119299 - RNA, 19 nt, Artificial Sequence
  Description of Artificial Sequence: Synthetic oligonucleotide
  Antisense strand to SEQ ID NO: 119298
ucugcaaguauuuacuaaa

SEQ ID NO: 119300 - RNA, 19 nt, Artificial Sequence
  Description of Artificial Sequence: Synthetic oligonucleotide
  Sense strand starting at position 2774 of SEQ ID NO: 1520
uuuggacaguguuuaauag

SEQ ID NO: 119301 - RNA, 19 nt, Artificial Sequence
  Description of Artificial Sequence: Synthetic oligonucleotide
  Antisense strand to SEQ ID NO: 119300
cuauuaaacacuguccaaa

SEQ ID NO: 119302 - RNA, 19 nt, Artificial Sequence
  Description of Artificial Sequence: Synthetic oligonucleotide
  Sense strand starting at position 2871 of SEQ ID NO: 1520
gagcauuaugcugauacua

SEQ ID NO: 119303 - RNA, 19 nt, Artificial Sequence
  Description of Artificial Sequence: Synthetic oligonucleotide
  Antisense strand to SEQ ID NO: 119302
uaguaucagcauaaugcuc

SEQ ID NO: 119304 - RNA, 19 nt, Artificial Sequence
  Description of Artificial Sequence: Synthetic oligonucleotide
  Sense strand starting at position 2884 of SEQ ID NO: 1520
auacuauacugaucacguu

SEQ ID NO: 119305 - RNA, 19 nt, Artificial Sequence
  Description of Artificial Sequence: Synthetic oligonucleotide
  Antisense strand to SEQ ID NO: 119304
aacgugaucaguauaguau

SEQ ID NO: 119306 - RNA, 19 nt, Artificial Sequence
  Description of Artificial Sequence: Synthetic oligonucleotide
  Sense strand starting at position 3129 of SEQ ID NO: 1520
gcuuguguugucuuucuua

SEQ ID NO: 119307 - RNA, 19 nt, Artificial Sequence
  Description of Artificial Sequence: Synthetic oligonucleotide
  Antisense strand to SEQ ID NO: 119306
uaagaaagacaacacaagc

SEQ ID NO: 119308 - RNA, 19 nt, Artificial Sequence
  Description of Artificial Sequence: Synthetic oligonucleotide
  Sense strand starting at position 3494 of SEQ ID NO: 1520
auauauacugcugguuaaa

SEQ ID NO: 119309 - RNA, 19 nt, Artificial Sequence
  Description of Artificial Sequence: Synthetic oligonucleotide
  Antisense strand to SEQ ID NO: 119308
uuuaaccagcaguauauau

SEQ ID NO: 119310 - RNA, 19 nt, Artificial Sequence
  Description of Artificial Sequence: Synthetic oligonucleotide
  Sense strand starting at position 3695 of SEQ ID NO: 1520
agaauuguacaguauagua

SEQ ID NO: 119311 - RNA, 19 nt, Artificial Sequence
  Description of Artificial Sequence: Synthetic oligonucleotide
  Antisense strand to SEQ ID NO: 119310
uacuauacuguacaauucu

SEQ ID NO: 119312 - RNA, 19 nt, Artificial Sequence
  Description of Artificial Sequence: Synthetic oligonucleotide
  Sense strand starting at position 3718 of SEQ ID NO: 1520
guauuauuacgucacuaau

SEQ ID NO: 119313 - RNA, 19 nt, Artificial Sequence
  Description of Artificial Sequence: Synthetic oligonucleotide
  Antisense strand to SEQ ID NO: 119312
auuagugacguaauaauac

SEQ ID NO: 119314 - RNA, 19 nt, Artificial Sequence
  Description of Artificial Sequence: Synthetic oligonucleotide
  Sense strand starting at position 3781 of SEQ ID NO: 1520
cucuuaaugcucuaaugag

SEQ ID NO: 119315 - RNA, 19 nt, Artificial Sequence
  Description of Artificial Sequence: Synthetic oligonucleotide
  Antisense strand to SEQ ID NO: 119314
cucauuagagcauuaagag

SEQ ID NO: 119316 - RNA, 19 nt, Artificial Sequence
  Description of Artificial Sequence: Synthetic oligonucleotide
  Sense strand starting at position 3789 of SEQ ID NO: 1520
gcucuaaugaggugaaaug

SEQ ID NO: 119317 - RNA, 19 nt, Artificial Sequence
  Description of Artificial Sequence: Synthetic oligonucleotide
  Antisense strand to SEQ ID NO: 119316
cauuucaccucauuagagc

SEQ ID NO: 119318 - RNA, 19 nt, Artificial Sequence
  Description of Artificial Sequence: Synthetic oligonucleotide
  Sense strand starting at position 3855 of SEQ ID NO: 1520
guucuuuguccagaaauuc

SEQ ID NO: 119319 - RNA, 19 nt, Artificial Sequence
  Description of Artificial Sequence: Synthetic oligonucleotide
  Antisense strand to SEQ ID NO: 119318
gaauuucuggacaaagaac

SEQ ID NO: 119320 - RNA, 19 nt, Artificial Sequence
  Description of Artificial Sequence: Synthetic oligonucleotide
  Sense strand starting at position 3865 of SEQ ID NO: 1520
cagaaauucucggcuaaug

SEQ ID NO: 119321 - RNA, 19 nt, Artificial Sequence
  Description of Artificial Sequence: Synthetic oligonucleotide
  Antisense strand to SEQ ID NO: 119320
cauuagccgagaauuucug

SEQ ID NO: 119322 - RNA, 19 nt, Artificial Sequence
  Description of Artificial Sequence: Synthetic oligonucleotide
  Sense strand starting at position 3867 of SEQ ID NO: 1520
gaaauucucggcuaaugca

SEQ ID NO: 119323 - RNA, 19 nt, Artificial Sequence
  Description of Artificial Sequence: Synthetic oligonucleotide
  Antisense strand to SEQ ID NO: 119322
ugcauuagccgagaauuuc

SEQ ID NO: 119324 - RNA, 19 nt, Artificial Sequence
  Description of Artificial Sequence: Synthetic oligonucleotide
  Sense strand starting at position 3885 of SEQ ID NO: 1520
agggcaaagucagaauuua

SEQ ID NO: 119325 - RNA, 19 nt, Artificial Sequence
  Description of Artificial Sequence: Synthetic oligonucleotide
  Antisense strand to SEQ ID NO: 119324
uaaauucugacuuugcccu

SEQ ID NO: 119326 - RNA, 19 nt, Artificial Sequence
  Description of Artificial Sequence: Synthetic oligonucleotide
  Sense strand starting at position 3949 of SEQ ID NO: 1520
guugacugccucuaccaau

SEQ ID NO: 119327 - RNA, 19 nt, Artificial Sequence
  Description of Artificial Sequence: Synthetic oligonucleotide
  Antisense strand to SEQ ID NO: 119326
auugguagaggcagucaac

SEQ ID NO: 119328 - RNA, 19 nt, Artificial Sequence
  Description of Artificial Sequence: Synthetic oligonucleotide
  Sense strand starting at position 3943 of SEQ ID NO: 1521
uaguuaacaugguuaagau

SEQ ID NO: 119329 - RNA, 19 nt, Artificial Sequence
  Description of Artificial Sequence: Synthetic oligonucleotide
  Antisense strand to SEQ ID NO: 119328
aucuuaaccauguuaacua

SEQ ID NO: 119330 - RNA, 19 nt, Artificial Sequence
  Description of Artificial Sequence: Synthetic oligonucleotide
  Sense strand starting at position 3941 of SEQ ID NO: 1521
aauaguuaacaugguuaag

SEQ ID NO: 119331 - RNA, 19 nt, Artificial Sequence
  Description of Artificial Sequence: Synthetic oligonucleotide
  Antisense strand to SEQ ID NO: 119330
cuuaaccauguuaacuauu

SEQ ID NO: 119332 - RNA, 19 nt, Artificial Sequence
  Description of Artificial Sequence: Synthetic oligonucleotide
  Sense strand starting at position 3839 of SEQ ID NO: 1521
ucuauucccucuguugaua

SEQ ID NO: 119333 - RNA, 19 nt, Artificial Sequence
  Description of Artificial Sequence: Synthetic oligonucleotide
  Antisense strand to SEQ ID NO: 119332
uaucaacagagggaauaga

SEQ ID NO: 119334 - RNA, 19 nt, Artificial Sequence
  Description of Artificial Sequence: Synthetic oligonucleotide
  Sense strand starting at position 3735 of SEQ ID NO: 1521
agcuguggcagucagaaua

SEQ ID NO: 119335 - RNA, 19 nt, Artificial Sequence
  Description of Artificial Sequence: Synthetic oligonucleotide
  Antisense strand to SEQ ID NO: 119334
uauucugacugccacagcu

SEQ ID NO: 119336 - RNA, 19 nt, Artificial Sequence
  Description of Artificial Sequence: Synthetic oligonucleotide
  Sense strand starting at position 3625 of SEQ ID NO: 1521
gcuacauaguaauuagaca

SEQ ID NO: 119337 - RNA, 19 nt, Artificial Sequence
  Description of Artificial Sequence: Synthetic oligonucleotide
  Antisense strand to SEQ ID NO: 119336
ugucuaauuacuauguagc

SEQ ID NO: 119338 - RNA, 19 nt, Artificial Sequence
  Description of Artificial Sequence: Synthetic oligonucleotide
  Sense strand starting at position 3546 of SEQ ID NO: 1521
uucucuuuggaugaugcaa

SEQ ID NO: 119339 - RNA, 19 nt, Artificial Sequence
  Description of Artificial Sequence: Synthetic oligonucleotide
  Antisense strand to SEQ ID NO: 119338
uugcaucauccaaagagaa

SEQ ID NO: 119340 - RNA, 19 nt, Artificial Sequence
  Description of Artificial Sequence: Synthetic oligonucleotide
  Sense strand starting at position 3541 of SEQ ID NO: 1521
ggaguuucucuuuggauga

SEQ ID NO: 119341 - RNA, 19 nt, Artificial Sequence
  Description of Artificial Sequence: Synthetic oligonucleotide
  Antisense strand to SEQ ID NO: 119340
ucauccaaagagaaacucc

SEQ ID NO: 119342 - RNA, 19 nt, Artificial Sequence
  Description of Artificial Sequence: Synthetic oligonucleotide
  Sense strand starting at position 3540 of SEQ ID NO: 1521
gggaguuucucuuuggaug

SEQ ID NO: 119343 - RNA, 19 nt, Artificial Sequence
  Description of Artificial Sequence: Synthetic oligonucleotide
  Antisense strand to SEQ ID NO: 119342
cauccaaagagaaacuccc

SEQ ID NO: 119344 - RNA, 19 nt, Artificial Sequence
  Description of Artificial Sequence: Synthetic oligonucleotide
  Sense strand starting at position 3528 of SEQ ID NO: 1521
auggucuuuccugggaguu

SEQ ID NO: 119345 - RNA, 19 nt, Artificial Sequence
  Description of Artificial Sequence: Synthetic oligonucleotide
  Antisense strand to SEQ ID NO: 119344
aacucccaggaaagaccau

SEQ ID NO: 119346 - RNA, 19 nt, Artificial Sequence
  Description of Artificial Sequence: Synthetic oligonucleotide
  Sense strand starting at position 3497 of SEQ ID NO: 1521
agccucuuccaggaauaac

SEQ ID NO: 119347 - RNA, 19 nt, Artificial Sequence
  Description of Artificial Sequence: Synthetic oligonucleotide
  Antisense strand to SEQ ID NO: 119346
guuauuccuggaagaggcu

SEQ ID NO: 119348 - RNA, 19 nt, Artificial Sequence
  Description of Artificial Sequence: Synthetic oligonucleotide
  Sense strand starting at position 3481 of SEQ ID NO: 1521
guacaaaugucucugaagc

SEQ ID NO: 119349 - RNA, 19 nt, Artificial Sequence
  Description of Artificial Sequence: Synthetic oligonucleotide
  Antisense strand to SEQ ID NO: 119348
gcuucagagacauuuguac

SEQ ID NO: 119350 - RNA, 19 nt, Artificial Sequence
  Description of Artificial Sequence: Synthetic oligonucleotide
  Sense strand starting at position 3479 of SEQ ID NO: 1521
ggguacaaaugucucugaa

SEQ ID NO: 119351 - RNA, 19 nt, Artificial Sequence
  Description of Artificial Sequence: Synthetic oligonucleotide
  Antisense strand to SEQ ID NO: 119350
uucagagacauuuguaccc

SEQ ID NO: 119352 - RNA, 19 nt, Artificial Sequence
  Description of Artificial Sequence: Synthetic oligonucleotide
  Sense strand starting at position 3422 of SEQ ID NO: 1521
ccaugagaaugcuccucaa

SEQ ID NO: 119353 - RNA, 19 nt, Artificial Sequence
  Description of Artificial Sequence: Synthetic oligonucleotide
  Antisense strand to SEQ ID NO: 119352
uugaggagcauucucaugg

SEQ ID NO: 119354 - RNA, 19 nt, Artificial Sequence
  Description of Artificial Sequence: Synthetic oligonucleotide
  Sense strand starting at position 3279 of SEQ ID NO: 1521
acaguuugccgugaaacag

SEQ ID NO: 119355 - RNA, 19 nt, Artificial Sequence
  Description of Artificial Sequence: Synthetic oligonucleotide
  Antisense strand to SEQ ID NO: 119354
cuguuucacggcaaacugu

SEQ ID NO: 119356 - RNA, 19 nt, Artificial Sequence
  Description of Artificial Sequence: Synthetic oligonucleotide
  Sense strand starting at position 3208 of SEQ ID NO: 1521
uguuaucccuucccgauuu

SEQ ID NO: 119357 - RNA, 19 nt, Artificial Sequence
  Description of Artificial Sequence: Synthetic oligonucleotide
  Antisense strand to SEQ ID NO: 119356
aaaucgggaagggauaaca

SEQ ID NO: 119358 - RNA, 19 nt, Artificial Sequence
  Description of Artificial Sequence: Synthetic oligonucleotide
  Sense strand starting at position 3087 of SEQ ID NO: 1521
aguaacuuucucugugacu

SEQ ID NO: 119359 - RNA, 19 nt, Artificial Sequence
  Description of Artificial Sequence: Synthetic oligonucleotide
  Antisense strand to SEQ ID NO: 119358
agucacagagaaaguuacu

SEQ ID NO: 119360 - RNA, 19 nt, Artificial Sequence
  Description of Artificial Sequence: Synthetic oligonucleotide
  Sense strand starting at position 3065 of SEQ ID NO: 1521
agacuugacuuugaagaaa

SEQ ID NO: 119361 - RNA, 19 nt, Artificial Sequence
  Description of Artificial Sequence: Synthetic oligonucleotide
  Antisense strand to SEQ ID NO: 119360
uuucuucaaagucaagucu

SEQ ID NO: 119362 - RNA, 19 nt, Artificial Sequence
  Description of Artificial Sequence: Synthetic oligonucleotide
  Sense strand starting at position 3032 of SEQ ID NO: 1521
ucuuguaugacguaaagac

SEQ ID NO: 119363 - RNA, 19 nt, Artificial Sequence
  Description of Artificial Sequence: Synthetic oligonucleotide
  Antisense strand to SEQ ID NO: 119362
gucuuuacgucauacaaga

SEQ ID NO: 119364 - RNA, 19 nt, Artificial Sequence
  Description of Artificial Sequence: Synthetic oligonucleotide
  Sense strand starting at position 3027 of SEQ ID NO: 1521
auauuucuuguaugacgua

SEQ ID NO: 119365 - RNA, 19 nt, Artificial Sequence
  Description of Artificial Sequence: Synthetic oligonucleotide
  Antisense strand to SEQ ID NO: 119364
uacgucauacaagaaauau

SEQ ID NO: 119366 - RNA, 19 nt, Artificial Sequence
  Description of Artificial Sequence: Synthetic oligonucleotide
  Sense strand starting at position 2935 of SEQ ID NO: 1521
auauuauucuuguuccuga

SEQ ID NO: 119367 - RNA, 19 nt, Artificial Sequence
  Description of Artificial Sequence: Synthetic oligonucleotide
  Antisense strand to SEQ ID NO: 119366
ucaggaacaagaauaauau

SEQ ID NO: 119368 - RNA, 19 nt, Artificial Sequence
  Description of Artificial Sequence: Synthetic oligonucleotide
  Sense strand starting at position 2914 of SEQ ID NO: 1521
gggcuauauaaagguaaau

SEQ ID NO: 119369 - RNA, 19 nt, Artificial Sequence
  Description of Artificial Sequence: Synthetic oligonucleotide
  Antisense strand to SEQ ID NO: 119368
auuuaccuuuauauagccc

SEQ ID NO: 119370 - RNA, 19 nt, Artificial Sequence
  Description of Artificial Sequence: Synthetic oligonucleotide
  Sense strand starting at position 2864 of SEQ ID NO: 1521
ucauauaucgauugaucuu

SEQ ID NO: 119371 - RNA, 19 nt, Artificial Sequence
  Description of Artificial Sequence: Synthetic oligonucleotide
  Antisense strand to SEQ ID NO: 119370
aagaucaaucgauauauga

SEQ ID NO: 119372 - RNA, 19 nt, Artificial Sequence
  Description of Artificial Sequence: Synthetic oligonucleotide
  Sense strand starting at position 2813 of SEQ ID NO: 1521
guaguaaagcugcaucauu

SEQ ID NO: 119373 - RNA, 19 nt, Artificial Sequence
  Description of Artificial Sequence: Synthetic oligonucleotide
  Antisense strand to SEQ ID NO: 119372
aaugaugcagcuuuacuac

SEQ ID NO: 119374 - RNA, 19 nt, Artificial Sequence
  Description of Artificial Sequence: Synthetic oligonucleotide
  Sense strand starting at position 2802 of SEQ ID NO: 1521
ggcccuucucaguaguaaa

SEQ ID NO: 119375 - RNA, 19 nt, Artificial Sequence
  Description of Artificial Sequence: Synthetic oligonucleotide
  Antisense strand to SEQ ID NO: 119374
uuuacuacugagaagggcc

SEQ ID NO: 119376 - RNA, 19 nt, Artificial Sequence
  Description of Artificial Sequence: Synthetic oligonucleotide
  Sense strand starting at position 2745 of SEQ ID NO: 1521
gugcuaaguggcuaauaaa

SEQ ID NO: 119377 - RNA, 19 nt, Artificial Sequence
  Description of Artificial Sequence: Synthetic oligonucleotide
  Antisense strand to SEQ ID NO: 119376
uuuauuagccacuuagcac

SEQ ID NO: 119378 - RNA, 19 nt, Artificial Sequence
  Description of Artificial Sequence: Synthetic oligonucleotide
  Sense strand starting at position 2661 of SEQ ID NO: 1521
aauaaucgugcugaguagu

SEQ ID NO: 119379 - RNA, 19 nt, Artificial Sequence
  Description of Artificial Sequence: Synthetic oligonucleotide
  Antisense strand to SEQ ID NO: 119378
acuacucagcacgauuauu

SEQ ID NO: 119380 - RNA, 19 nt, Artificial Sequence
  Description of Artificial Sequence: Synthetic oligonucleotide
  Sense strand starting at position 2582 of SEQ ID NO: 1521
guguaagauauuggaguuu

SEQ ID NO: 119381 - RNA, 19 nt, Artificial Sequence
  Description of Artificial Sequence: Synthetic oligonucleotide
  Antisense strand to SEQ ID NO: 119380
aaacuccaauaucuuacac

SEQ ID NO: 119382 - RNA, 19 nt, Artificial Sequence
  Description of Artificial Sequence: Synthetic oligonucleotide
  Sense strand starting at position 2486 of SEQ ID NO: 1521
caccuuaaacugugaggaa

SEQ ID NO: 119383 - RNA, 19 nt, Artificial Sequence
  Description of Artificial Sequence: Synthetic oligonucleotide
  Antisense strand to SEQ ID NO: 119382
uuccucacaguuuaaggug

SEQ ID NO: 119384 - RNA, 19 nt, Artificial Sequence
  Description of Artificial Sequence: Synthetic oligonucleotide
  Sense strand starting at position 2243 of SEQ ID NO: 1521
ccgggugugaggugagaaa

SEQ ID NO: 119385 - RNA, 19 nt, Artificial Sequence
  Description of Artificial Sequence: Synthetic oligonucleotide
  Antisense strand to SEQ ID NO: 119384
uuucucaccucacacccgg

SEQ ID NO: 119386 - RNA, 19 nt, Artificial Sequence
  Description of Artificial Sequence: Synthetic oligonucleotide
  Sense strand starting at position 2207 of SEQ ID NO: 1521
ucuguagguuuggucauuu

SEQ ID NO: 119387 - RNA, 19 nt, Artificial Sequence
  Description of Artificial Sequence: Synthetic oligonucleotide
  Antisense strand to SEQ ID NO: 119386
aaaugaccaaaccuacaga

SEQ ID NO: 119388 - RNA, 19 nt, Artificial Sequence
  Description of Artificial Sequence: Synthetic oligonucleotide
  Sense strand starting at position 780 of SEQ ID NO: 1521
gguagaggcauugauguaa

SEQ ID NO: 119389 - RNA, 19 nt, Artificial Sequence
  Description of Artificial Sequence: Synthetic oligonucleotide
  Antisense strand to SEQ ID NO: 119388
uuacaucaaugccucuacc

SEQ ID NO: 119390 - RNA, 19 nt, Artificial Sequence
  Description of Artificial Sequence: Synthetic oligonucleotide
  Sense strand starting at position 744 of SEQ ID NO: 1521
agaguugaucuauacugcu

SEQ ID NO: 119391 - RNA, 19 nt, Artificial Sequence
  Description of Artificial Sequence: Synthetic oligonucleotide
  Antisense strand to SEQ ID NO: 119390
agcaguauagaucaacucu

SEQ ID NO: 119392 - RNA, 19 nt, Artificial Sequence
  Description of Artificial Sequence: Synthetic oligonucleotide
  Sense strand starting at position 719 of SEQ ID NO: 1521
gaagccaaccuguguuaaa

SEQ ID NO: 119393 - RNA, 19 nt, Artificial Sequence
  Description of Artificial Sequence: Synthetic oligonucleotide
  Antisense strand to SEQ ID NO: 119392
uuuaacacagguuggcuuc

SEQ ID NO: 119394 - RNA, 19 nt, Artificial Sequence
  Description of Artificial Sequence: Synthetic oligonucleotide
  Sense strand starting at position 613 of SEQ ID NO: 1521
agaacuuucuugucuguca

SEQ ID NO: 119395 - RNA, 19 nt, Artificial Sequence
  Description of Artificial Sequence: Synthetic oligonucleotide
  Antisense strand to SEQ ID NO: 119394
ugacagacaagaaaguucu

SEQ ID NO: 119396 - RNA, 19 nt, Artificial Sequence
  Description of Artificial Sequence: Synthetic oligonucleotide
  Sense strand starting at position 590 of SEQ ID NO: 1521
ggaaguuagcaguagcaau

SEQ ID NO: 119397 - RNA, 19 nt, Artificial Sequence
  Description of Artificial Sequence: Synthetic oligonucleotide
  Antisense strand to SEQ ID NO: 119396
auugcuacugcuaacuucc

SEQ ID NO: 119398 - RNA, 19 nt, Artificial Sequence
  Description of Artificial Sequence: Synthetic oligonucleotide
  Sense strand starting at position 380 of SEQ ID NO: 1521
aguggacuguuauuguuau

SEQ ID NO: 119399 - RNA, 19 nt, Artificial Sequence
  Description of Artificial Sequence: Synthetic oligonucleotide
  Antisense strand to SEQ ID NO: 119398
auaacaauaacaguccacu

SEQ ID NO: 119400 - RNA, 19 nt, Artificial Sequence
  Description of Artificial Sequence: Synthetic oligonucleotide
  Sense strand starting at position 375 of SEQ ID NO: 1521
cauauaguggacuguuauu

SEQ ID NO: 119401 - RNA, 19 nt, Artificial Sequence
  Description of Artificial Sequence: Synthetic oligonucleotide
  Antisense strand to SEQ ID NO: 119400
aauaacaguccacuauaug

SEQ ID NO: 119402 - RNA, 19 nt, Artificial Sequence
  Description of Artificial Sequence: Synthetic oligonucleotide
  Sense strand starting at position 358 of SEQ ID NO: 1521
uaguaaugugcucaagaca

SEQ ID NO: 119403 - RNA, 19 nt, Artificial Sequence
  Description of Artificial Sequence: Synthetic oligonucleotide
  Antisense strand to SEQ ID NO: 119402
ugucuugagcacauuacua

SEQ ID NO: 119404 - RNA, 19 nt, Artificial Sequence
  Description of Artificial Sequence: Synthetic oligonucleotide
  Sense strand starting at position 357 of SEQ ID NO: 1521
auaguaaugugcucaagac

SEQ ID NO: 119405 - RNA, 19 nt, Artificial Sequence
  Description of Artificial Sequence: Synthetic oligonucleotide
  Antisense strand to SEQ ID NO: 119404
gucuugagcacauuacuau

SEQ ID NO: 119406 - RNA, 19 nt, Artificial Sequence
  Description of Artificial Sequence: Synthetic oligonucleotide
  Sense strand starting at position 235 of SEQ ID NO: 1521
uuaggccagucuuuaacuu

SEQ ID NO: 119407 - RNA, 19 nt, Artificial Sequence
  Description of Artificial Sequence: Synthetic oligonucleotide
  Antisense strand to SEQ ID NO: 119406
aaguuaaagacuggccuaa

SEQ ID NO: 119408 - RNA, 19 nt, Artificial Sequence
  Description of Artificial Sequence: Synthetic oligonucleotide
  Sense strand starting at position 76 of SEQ ID NO: 1522
aaagaaaugguucgaugua

SEQ ID NO: 119409 - RNA, 19 nt, Artificial Sequence
  Description of Artificial Sequence: Synthetic oligonucleotide
  Antisense strand to SEQ ID NO: 119408
uacaucgaaccauuucuuu

SEQ ID NO: 119410 - RNA, 19 nt, Artificial Sequence
  Description of Artificial Sequence: Synthetic oligonucleotide
  Sense strand starting at position 145 of SEQ ID NO: 1522
uuauacuggccauagauau

SEQ ID NO: 119411 - RNA, 19 nt, Artificial Sequence
  Description of Artificial Sequence: Synthetic oligonucleotide
  Antisense strand to SEQ ID NO: 119410
auaucuauggccaguauaa

SEQ ID NO: 119412 - RNA, 19 nt, Artificial Sequence
  Description of Artificial Sequence: Synthetic oligonucleotide
  Sense strand starting at position 238 of SEQ ID NO: 1522
acuuguauacuauacaagu

SEQ ID NO: 119413 - RNA, 19 nt, Artificial Sequence
  Description of Artificial Sequence: Synthetic oligonucleotide
  Antisense strand to SEQ ID NO: 119412
acuuguauaguauacaagu

SEQ ID NO: 119414 - RNA, 19 nt, Artificial Sequence
  Description of Artificial Sequence: Synthetic oligonucleotide
  Sense strand starting at position 329 of SEQ ID NO: 1522
acuagauauuguucuaaga

SEQ ID NO: 119415 - RNA, 19 nt, Artificial Sequence
  Description of Artificial Sequence: Synthetic oligonucleotide
  Antisense strand to SEQ ID NO: 119414
ucuuagaacaauaucuagu

SEQ ID NO: 119416 - RNA, 19 nt, Artificial Sequence
  Description of Artificial Sequence: Synthetic oligonucleotide
  Sense strand starting at position 351 of SEQ ID NO: 1522
agaguaaugaugugaaguc

SEQ ID NO: 119417 - RNA, 19 nt, Artificial Sequence
  Description of Artificial Sequence: Synthetic oligonucleotide
  Antisense strand to SEQ ID NO: 119416
gacuucacaucauuacucu

SEQ ID NO: 119418 - RNA, 19 nt, Artificial Sequence
  Description of Artificial Sequence: Synthetic oligonucleotide
  Sense strand starting at position 364 of SEQ ID NO: 1522
gaagucuucgcagaauaaa

SEQ ID NO: 119419 - RNA, 19 nt, Artificial Sequence
  Description of Artificial Sequence: Synthetic oligonucleotide
  Antisense strand to SEQ ID NO: 119418
uuuauucugcgaagacuuc

SEQ ID NO: 119420 - RNA, 19 nt, Artificial Sequence
  Description of Artificial Sequence: Synthetic oligonucleotide
  Sense strand starting at position 436 of SEQ ID NO: 1522
ugcacugugguuuacaaau

SEQ ID NO: 119421 - RNA, 19 nt, Artificial Sequence
  Description of Artificial Sequence: Synthetic oligonucleotide
  Antisense strand to SEQ ID NO: 119420
auuuguaaaccacagugca

SEQ ID NO: 119422 - RNA, 19 nt, Artificial Sequence
  Description of Artificial Sequence: Synthetic oligonucleotide
  Sense strand starting at position 550 of SEQ ID NO: 1522
guaauuagcaagugacuga

SEQ ID NO: 119423 - RNA, 19 nt, Artificial Sequence
  Description of Artificial Sequence: Synthetic oligonucleotide
  Antisense strand to SEQ ID NO: 119422
ucagucacuugcuaauuac

SEQ ID NO: 119424 - RNA, 19 nt, Artificial Sequence
  Description of Artificial Sequence: Synthetic oligonucleotide
  Sense strand starting at position 553 of SEQ ID NO: 1522
auuagcaagugacugaaua

SEQ ID NO: 119425 - RNA, 19 nt, Artificial Sequence
  Description of Artificial Sequence: Synthetic oligonucleotide
  Antisense strand to SEQ ID NO: 119424
uauucagucacuugcuaau

SEQ ID NO: 119426 - RNA, 19 nt, Artificial Sequence
  Description of Artificial Sequence: Synthetic oligonucleotide
  Sense strand starting at position 554 of SEQ ID NO: 1522
uuagcaagugacugaauaa

SEQ ID NO: 119427 - RNA, 19 nt, Artificial Sequence
  Description of Artificial Sequence: Synthetic oligonucleotide
  Antisense strand to SEQ ID NO: 119426
uuauucagucacuugcuaa

SEQ ID NO: 119428 - RNA, 19 nt, Artificial Sequence
  Description of Artificial Sequence: Synthetic oligonucleotide
  Sense strand starting at position 629 of SEQ ID NO: 1522
accagucuucuccacauga

SEQ ID NO: 119429 - RNA, 19 nt, Artificial Sequence
  Description of Artificial Sequence: Synthetic oligonucleotide
  Antisense strand to SEQ ID NO: 119428
ucauguggagaagacuggu

SEQ ID NO: 119430 - RNA, 19 nt, Artificial Sequence
  Description of Artificial Sequence: Synthetic oligonucleotide
  Sense strand starting at position 642 of SEQ ID NO: 1522
acaugaaaugauugcaagu

SEQ ID NO: 119431 - RNA, 19 nt, Artificial Sequence
  Description of Artificial Sequence: Synthetic oligonucleotide
  Antisense strand to SEQ ID NO: 119430
acuugcaaucauuucaugu

SEQ ID NO: 119432 - RNA, 19 nt, Artificial Sequence
  Description of Artificial Sequence: Synthetic oligonucleotide
  Sense strand starting at position 692 of SEQ ID NO: 1522
uuaggacaugccugacuau

SEQ ID NO: 119433 - RNA, 19 nt, Artificial Sequence
  Description of Artificial Sequence: Synthetic oligonucleotide
  Antisense strand to SEQ ID NO: 119432
auagucaggcauguccuaa

SEQ ID NO: 119434 - RNA, 19 nt, Artificial Sequence
  Description of Artificial Sequence: Synthetic oligonucleotide
  Sense strand starting at position 695 of SEQ ID NO: 1522
ggacaugccugacuauauu

SEQ ID NO: 119435 - RNA, 19 nt, Artificial Sequence
  Description of Artificial Sequence: Synthetic oligonucleotide
  Antisense strand to SEQ ID NO: 119434
aauauagucaggcaugucc

SEQ ID NO: 119436 - RNA, 19 nt, Artificial Sequence
  Description of Artificial Sequence: Synthetic oligonucleotide
  Sense strand starting at position 901 of SEQ ID NO: 1522
uaugaaggucgcuauaaca

SEQ ID NO: 119437 - RNA, 19 nt, Artificial Sequence
  Description of Artificial Sequence: Synthetic oligonucleotide
  Antisense strand to SEQ ID NO: 119436
uguuauagcgaccuucaua

SEQ ID NO: 119438 - RNA, 19 nt, Artificial Sequence
  Description of Artificial Sequence: Synthetic oligonucleotide
  Sense strand starting at position 911 of SEQ ID NO: 1522
gcuauaacacuggaaguca

SEQ ID NO: 119439 - RNA, 19 nt, Artificial Sequence
  Description of Artificial Sequence: Synthetic oligonucleotide
  Antisense strand to SEQ ID NO: 119438
ugacuuccaguguuauagc

SEQ ID NO: 119440 - RNA, 19 nt, Artificial Sequence
  Description of Artificial Sequence: Synthetic oligonucleotide
  Sense strand starting at position 1313 of SEQ ID NO: 1522
agggaauucugagcacugu

SEQ ID NO: 119441 - RNA, 19 nt, Artificial Sequence
  Description of Artificial Sequence: Synthetic oligonucleotide
  Antisense strand to SEQ ID NO: 119440
acagugcucagaauucccu

SEQ ID NO: 119442 - RNA, 19 nt, Artificial Sequence
  Description of Artificial Sequence: Synthetic oligonucleotide
  Sense strand starting at position 1495 of SEQ ID NO: 1522
cagaaugggaggcgugaaa

SEQ ID NO: 119443 - RNA, 19 nt, Artificial Sequence
  Description of Artificial Sequence: Synthetic oligonucleotide
  Antisense strand to SEQ ID NO: 119442
uuucacgccucccauucug

SEQ ID NO: 119444 - RNA, 19 nt, Artificial Sequence
  Description of Artificial Sequence: Synthetic oligonucleotide
  Sense strand starting at position 1506 of SEQ ID NO: 1522
gcgugaaaucaaggaaauu

SEQ ID NO: 119445 - RNA, 19 nt, Artificial Sequence
  Description of Artificial Sequence: Synthetic oligonucleotide
  Antisense strand to SEQ ID NO: 119444
aauuuccuugauuucacgc

SEQ ID NO: 119446 - RNA, 19 nt, Artificial Sequence
  Description of Artificial Sequence: Synthetic oligonucleotide
  Sense strand starting at position 1564 of SEQ ID NO: 1522
auggcaaucucugcacaaa

SEQ ID NO: 119447 - RNA, 19 nt, Artificial Sequence
  Description of Artificial Sequence: Synthetic oligonucleotide
  Antisense strand to SEQ ID NO: 119446
uuugugcagagauugccau

SEQ ID NO: 119448 - RNA, 19 nt, Artificial Sequence
  Description of Artificial Sequence: Synthetic oligonucleotide
  Sense strand starting at position 1850 of SEQ ID NO: 1522
ggcagaccaccaggaauau

SEQ ID NO: 119449 - RNA, 19 nt, Artificial Sequence
  Description of Artificial Sequence: Synthetic oligonucleotide
  Antisense strand to SEQ ID NO: 119448
auauuccugguggucugcc

SEQ ID NO: 119450 - RNA, 19 nt, Artificial Sequence
  Description of Artificial Sequence: Synthetic oligonucleotide
  Sense strand starting at position 1859 of SEQ ID NO: 1522
ccaggaauaucagcagguu

SEQ ID NO: 119451 - RNA, 19 nt, Artificial Sequence
  Description of Artificial Sequence: Synthetic oligonucleotide
  Antisense strand to SEQ ID NO: 119450
aaccugcugauauuccugg

SEQ ID NO: 119452 - RNA, 19 nt, Artificial Sequence
  Description of Artificial Sequence: Synthetic oligonucleotide
  Sense strand starting at position 1860 of SEQ ID NO: 1522
caggaauaucagcagguuu

SEQ ID NO: 119453 - RNA, 19 nt, Artificial Sequence
  Description of Artificial Sequence: Synthetic oligonucleotide
  Antisense strand to SEQ ID NO: 119452
aaaccugcugauauuccug

SEQ ID NO: 119454 - RNA, 19 nt, Artificial Sequence
  Description of Artificial Sequence: Synthetic oligonucleotide
  Sense strand starting at position 2019 of SEQ ID NO: 1522
cuagaugugaaguguggaa

SEQ ID NO: 119455 - RNA, 19 nt, Artificial Sequence
  Description of Artificial Sequence: Synthetic oligonucleotide
  Antisense strand to SEQ ID NO: 119454
uuccacacuucacaucuag

SEQ ID NO: 119456 - RNA, 19 nt, Artificial Sequence
  Description of Artificial Sequence: Synthetic oligonucleotide
  Sense strand starting at position 2024 of SEQ ID NO: 1522
ugugaaguguggaaggaua

SEQ ID NO: 119457 - RNA, 19 nt, Artificial Sequence
  Description of Artificial Sequence: Synthetic oligonucleotide
  Antisense strand to SEQ ID NO: 119456
uauccuuccacacuucaca

SEQ ID NO: 119458 - RNA, 19 nt, Artificial Sequence
  Description of Artificial Sequence: Synthetic oligonucleotide
  Sense strand starting at position 2107 of SEQ ID NO: 1522
uucucucaccuccagagua

SEQ ID NO: 119459 - RNA, 19 nt, Artificial Sequence
  Description of Artificial Sequence: Synthetic oligonucleotide
  Antisense strand to SEQ ID NO: 119458
uacucuggaggugagagaa

SEQ ID NO: 119460 - RNA, 19 nt, Artificial Sequence
  Description of Artificial Sequence: Synthetic oligonucleotide
  Sense strand starting at position 2122 of SEQ ID NO: 1522
aguaaagcccucuaaguaa

SEQ ID NO: 119461 - RNA, 19 nt, Artificial Sequence
  Description of Artificial Sequence: Synthetic oligonucleotide
  Antisense strand to SEQ ID NO: 119460
uuacuuagagggcuuuacu

SEQ ID NO: 119462 - RNA, 19 nt, Artificial Sequence
  Description of Artificial Sequence: Synthetic oligonucleotide
  Sense strand starting at position 2133 of SEQ ID NO: 1522
cuaaguaaaugcuuugaga

SEQ ID NO: 119463 - RNA, 19 nt, Artificial Sequence
  Description of Artificial Sequence: Synthetic oligonucleotide
  Antisense strand to SEQ ID NO: 119462
ucucaaagcauuuacuuag

SEQ ID NO: 119464 - RNA, 19 nt, Artificial Sequence
  Description of Artificial Sequence: Synthetic oligonucleotide
  Sense strand starting at position 2413 of SEQ ID NO: 1522
accguacuggaccaaauau

SEQ ID NO: 119465 - RNA, 19 nt, Artificial Sequence
  Description of Artificial Sequence: Synthetic oligonucleotide
  Antisense strand to SEQ ID NO: 119464
auauuugguccaguacggu

SEQ ID NO: 119466 - RNA, 19 nt, Artificial Sequence
  Description of Artificial Sequence: Synthetic oligonucleotide
  Sense strand starting at position 2573 of SEQ ID NO: 1522
gggcauguaggucagaauu

SEQ ID NO: 119467 - RNA, 19 nt, Artificial Sequence
  Description of Artificial Sequence: Synthetic oligonucleotide
  Antisense strand to SEQ ID NO: 119466
aauucugaccuacaugccc

SEQ ID NO: 119468 - RNA, 19 nt, Artificial Sequence
  Description of Artificial Sequence: Synthetic oligonucleotide
  Sense strand starting at position 2610 of SEQ ID NO: 1522
uggugagagcuccagucaa

SEQ ID NO: 119469 - RNA, 19 nt, Artificial Sequence
  Description of Artificial Sequence: Synthetic oligonucleotide
  Antisense strand to SEQ ID NO: 119468
uugacuggagcucucacca

SEQ ID NO: 119470 - RNA, 19 nt, Artificial Sequence
  Description of Artificial Sequence: Synthetic oligonucleotide
  Sense strand starting at position 2847 of SEQ ID NO: 1522
caguacucugggcauuaua

SEQ ID NO: 119471 - RNA, 19 nt, Artificial Sequence
  Description of Artificial Sequence: Synthetic oligonucleotide
  Antisense strand to SEQ ID NO: 119470
uauaaugcccagaguacug

SEQ ID NO: 119472 - RNA, 19 nt, Artificial Sequence
  Description of Artificial Sequence: Synthetic oligonucleotide
  Sense strand starting at position 2855 of SEQ ID NO: 1522
ugggcauuauacuuagaac

SEQ ID NO: 119473 - RNA, 19 nt, Artificial Sequence
  Description of Artificial Sequence: Synthetic oligonucleotide
  Antisense strand to SEQ ID NO: 119472
guucuaaguauaaugccca

SEQ ID NO: 119474 - RNA, 19 nt, Artificial Sequence
  Description of Artificial Sequence: Synthetic oligonucleotide
  Sense strand starting at position 3281 of SEQ ID NO: 1522
uggacuaucuguuucuuga

SEQ ID NO: 119475 - RNA, 19 nt, Artificial Sequence
  Description of Artificial Sequence: Synthetic oligonucleotide
  Antisense strand to SEQ ID NO: 119474
ucaagaaacagauagucca

SEQ ID NO: 119476 - RNA, 19 nt, Artificial Sequence
  Description of Artificial Sequence: Synthetic oligonucleotide
  Sense strand starting at position 3291 of SEQ ID NO: 1522
guuucuugacaguauugau

SEQ ID NO: 119477 - RNA, 19 nt, Artificial Sequence
  Description of Artificial Sequence: Synthetic oligonucleotide
  Antisense strand to SEQ ID NO: 119476
aucaauacugucaagaaac

SEQ ID NO: 119478 - RNA, 19 nt, Artificial Sequence
  Description of Artificial Sequence: Synthetic oligonucleotide
  Sense strand starting at position 3771 of SEQ ID NO: 1522
cucauauauccaggaacug

SEQ ID NO: 119479 - RNA, 19 nt, Artificial Sequence
  Description of Artificial Sequence: Synthetic oligonucleotide
  Antisense strand to SEQ ID NO: 119478
caguuccuggauauaugag

SEQ ID NO: 119480 - RNA, 19 nt, Artificial Sequence
  Description of Artificial Sequence: Synthetic oligonucleotide
  Sense strand starting at position 3782 of SEQ ID NO: 1522
aggaacugacuauguuuga

SEQ ID NO: 119481 - RNA, 19 nt, Artificial Sequence
  Description of Artificial Sequence: Synthetic oligonucleotide
  Antisense strand to SEQ ID NO: 119480
ucaaacauagucaguuccu

SEQ ID NO: 119482 - RNA, 19 nt, Artificial Sequence
  Description of Artificial Sequence: Synthetic oligonucleotide
  Sense strand starting at position 3901 of SEQ ID NO: 1522
acaccagagugauccuguu

SEQ ID NO: 119483 - RNA, 19 nt, Artificial Sequence
  Description of Artificial Sequence: Synthetic oligonucleotide
  Antisense strand to SEQ ID NO: 119482
aacaggaucacucuggugu

SEQ ID NO: 119484 - RNA, 19 nt, Artificial Sequence
  Description of Artificial Sequence: Synthetic oligonucleotide
  Sense strand starting at position 3930 of SEQ ID NO: 1522
uuagguucugcguuuccau

SEQ ID NO: 119485 - RNA, 19 nt, Artificial Sequence
  Description of Artificial Sequence: Synthetic oligonucleotide
  Antisense strand to SEQ ID NO: 119484
auggaaacgcagaaccuaa

SEQ ID NO: 119486 - RNA, 19 nt, Artificial Sequence
  Description of Artificial Sequence: Synthetic oligonucleotide
  Sense strand starting at position 3941 of SEQ ID NO: 1522
guuuccaucgaucaaaugu

SEQ ID NO: 119487 - RNA, 19 nt, Artificial Sequence
  Description of Artificial Sequence: Synthetic oligonucleotide
  Antisense strand to SEQ ID NO: 119486
acauuugaucgauggaaac

SEQ ID NO: 119488 - RNA, 19 nt, Artificial Sequence
  Description of Artificial Sequence: Synthetic oligonucleotide
  Sense strand starting at position 23 of SEQ ID NO: 1523
ccaauugagagauguuggu

SEQ ID NO: 119489 - RNA, 19 nt, Artificial Sequence
  Description of Artificial Sequence: Synthetic oligonucleotide
  Antisense strand to SEQ ID NO: 119488
accaacaucucucaauugg

SEQ ID NO: 119490 - RNA, 19 nt, Artificial Sequence
  Description of Artificial Sequence: Synthetic oligonucleotide
  Sense strand starting at position 27 of SEQ ID NO: 1523
uugagagauguugguaauu

SEQ ID NO: 119491 - RNA, 19 nt, Artificial Sequence
  Description of Artificial Sequence: Synthetic oligonucleotide
  Antisense strand to SEQ ID NO: 119490
aauuaccaacaucucucaa

SEQ ID NO: 119492 - RNA, 19 nt, Artificial Sequence
  Description of Artificial Sequence: Synthetic oligonucleotide
  Sense strand starting at position 116 of SEQ ID NO: 1523
guuggcauacauuaauaau

SEQ ID NO: 119493 - RNA, 19 nt, Artificial Sequence
  Description of Artificial Sequence: Synthetic oligonucleotide
  Antisense strand to SEQ ID NO: 119492
auuauuaauguaugccaac

SEQ ID NO: 119494 - RNA, 19 nt, Artificial Sequence
  Description of Artificial Sequence: Synthetic oligonucleotide
  Sense strand starting at position 138 of SEQ ID NO: 1523
uuggaauuaugguuguaag

SEQ ID NO: 119495 - RNA, 19 nt, Artificial Sequence
  Description of Artificial Sequence: Synthetic oligonucleotide
  Antisense strand to SEQ ID NO: 119494
cuuacaaccauaauuccaa

SEQ ID NO: 119496 - RNA, 19 nt, Artificial Sequence
  Description of Artificial Sequence: Synthetic oligonucleotide
  Sense strand starting at position 139 of SEQ ID NO: 1523
uggaauuaugguuguaaga

SEQ ID NO: 119497 - RNA, 19 nt, Artificial Sequence
  Description of Artificial Sequence: Synthetic oligonucleotide
  Antisense strand to SEQ ID NO: 119496
ucuuacaaccauaauucca

SEQ ID NO: 119498 - RNA, 19 nt, Artificial Sequence
  Description of Artificial Sequence: Synthetic oligonucleotide
  Sense strand starting at position 296 of SEQ ID NO: 1523
caguguugauaaguaggaa

SEQ ID NO: 119499 - RNA, 19 nt, Artificial Sequence
  Description of Artificial Sequence: Synthetic oligonucleotide
  Antisense strand to SEQ ID NO: 119498
uuccuacuuaucaacacug

SEQ ID NO: 119500 - RNA, 19 nt, Artificial Sequence
  Description of Artificial Sequence: Synthetic oligonucleotide
  Sense strand starting at position 375 of SEQ ID NO: 1523
ggccuugugauagagauca

SEQ ID NO: 119501 - RNA, 19 nt, Artificial Sequence
  Description of Artificial Sequence: Synthetic oligonucleotide
  Antisense strand to SEQ ID NO: 119500
ugaucucuaucacaaggcc

SEQ ID NO: 119502 - RNA, 19 nt, Artificial Sequence
  Description of Artificial Sequence: Synthetic oligonucleotide
  Sense strand starting at position 621 of SEQ ID NO: 1523
cagcauugaggucaauaau

SEQ ID NO: 119503 - RNA, 19 nt, Artificial Sequence
  Description of Artificial Sequence: Synthetic oligonucleotide
  Antisense strand to SEQ ID NO: 119502
auuauugaccucaaugcug

SEQ ID NO: 119504 - RNA, 19 nt, Artificial Sequence
  Description of Artificial Sequence: Synthetic oligonucleotide
  Sense strand starting at position 690 of SEQ ID NO: 1523
uggguugagaaguggauau

SEQ ID NO: 119505 - RNA, 19 nt, Artificial Sequence
  Description of Artificial Sequence: Synthetic oligonucleotide
  Antisense strand to SEQ ID NO: 119504
auauccacuucucaaccca

SEQ ID NO: 119506 - RNA, 19 nt, Artificial Sequence
  Description of Artificial Sequence: Synthetic oligonucleotide
  Sense strand starting at position 723 of SEQ ID NO: 1523
gaaauaugguguguugaga

SEQ ID NO: 119507 - RNA, 19 nt, Artificial Sequence
  Description of Artificial Sequence: Synthetic oligonucleotide
  Antisense strand to SEQ ID NO: 119506
ucucaacacaccauauuuc

SEQ ID NO: 119508 - RNA, 19 nt, Artificial Sequence
  Description of Artificial Sequence: Synthetic oligonucleotide
  Sense strand starting at position 774 of SEQ ID NO: 1523
ucucuagcuggauggaaau

SEQ ID NO: 119509 - RNA, 19 nt, Artificial Sequence
  Description of Artificial Sequence: Synthetic oligonucleotide
  Antisense strand to SEQ ID NO: 119508
auuuccauccagcuagaga

SEQ ID NO: 119510 - RNA, 19 nt, Artificial Sequence
  Description of Artificial Sequence: Synthetic oligonucleotide
  Sense strand starting at position 784 of SEQ ID NO: 1523
gauggaaauguguggaccu

SEQ ID NO: 119511 - RNA, 19 nt, Artificial Sequence
  Description of Artificial Sequence: Synthetic oligonucleotide
  Antisense strand to SEQ ID NO: 119510
agguccacacauuuccauc

SEQ ID NO: 119512 - RNA, 19 nt, Artificial Sequence
  Description of Artificial Sequence: Synthetic oligonucleotide
  Sense strand starting at position 867 of SEQ ID NO: 1523
gacauaagugaucgaguaa

SEQ ID NO: 119513 - RNA, 19 nt, Artificial Sequence
  Description of Artificial Sequence: Synthetic oligonucleotide
  Antisense strand to SEQ ID NO: 119512
uuacucgaucacuuauguc

SEQ ID NO: 119514 - RNA, 19 nt, Artificial Sequence
  Description of Artificial Sequence: Synthetic oligonucleotide
  Sense strand starting at position 933 of SEQ ID NO: 1523
agucuuugaagaggugaaa

SEQ ID NO: 119515 - RNA, 19 nt, Artificial Sequence
  Description of Artificial Sequence: Synthetic oligonucleotide
  Antisense strand to SEQ ID NO: 119514
uuucaccucuucaaagacu

SEQ ID NO: 119516 - RNA, 19 nt, Artificial Sequence
  Description of Artificial Sequence: Synthetic oligonucleotide
  Sense strand starting at position 970 of SEQ ID NO: 1523
augugugaugaugggaaga

SEQ ID NO: 119517 - RNA, 19 nt, Artificial Sequence
  Description of Artificial Sequence: Synthetic oligonucleotide
  Antisense strand to SEQ ID NO: 119516
ucuucccaucaucacacau

SEQ ID NO: 119518 - RNA, 19 nt, Artificial Sequence
  Description of Artificial Sequence: Synthetic oligonucleotide
  Sense strand starting at position 1082 of SEQ ID NO: 1523
ggaagaugguccucuugau

SEQ ID NO: 119519 - RNA, 19 nt, Artificial Sequence
  Description of Artificial Sequence: Synthetic oligonucleotide
  Antisense strand to SEQ ID NO: 119518
aucaagaggaccaucuucc

SEQ ID NO: 119520 - RNA, 19 nt, Artificial Sequence
  Description of Artificial Sequence: Synthetic oligonucleotide
  Sense strand starting at position 1094 of SEQ ID NO: 1523
ucuugauagcuuuaaugau

SEQ ID NO: 119521 - RNA, 19 nt, Artificial Sequence
  Description of Artificial Sequence: Synthetic oligonucleotide
  Antisense strand to SEQ ID NO: 119520
aucauuaaagcuaucaaga

SEQ ID NO: 119522 - RNA, 19 nt, Artificial Sequence
  Description of Artificial Sequence: Synthetic oligonucleotide
  Sense strand starting at position 1127 of SEQ ID NO: 1523
gacuguagauaauuggauu

SEQ ID NO: 119523 - RNA, 19 nt, Artificial Sequence
  Description of Artificial Sequence: Synthetic oligonucleotide
  Antisense strand to SEQ ID NO: 119522
aauccaauuaucuacaguc

SEQ ID NO: 119524 - RNA, 19 nt, Artificial Sequence
  Description of Artificial Sequence: Synthetic oligonucleotide
  Sense strand starting at position 1156 of SEQ ID NO: 1523
guuaguacggaguaaacua

SEQ ID NO: 119525 - RNA, 19 nt, Artificial Sequence
  Description of Artificial Sequence: Synthetic oligonucleotide
  Antisense strand to SEQ ID NO: 119524
uaguuuacuccguacuaac

SEQ ID NO: 119526 - RNA, 19 nt, Artificial Sequence
  Description of Artificial Sequence: Synthetic oligonucleotide
  Sense strand starting at position 1229 of SEQ ID NO: 1523
ugaagaugaugcucccaaa

SEQ ID NO: 119527 - RNA, 19 nt, Artificial Sequence
  Description of Artificial Sequence: Synthetic oligonucleotide
  Antisense strand to SEQ ID NO: 119526
uuugggagcaucaucuuca

SEQ ID NO: 119528 - RNA, 19 nt, Artificial Sequence
  Description of Artificial Sequence: Synthetic oligonucleotide
  Sense strand starting at position 1408 of SEQ ID NO: 1523
accagaauguuagcagaug

SEQ ID NO: 119529 - RNA, 19 nt, Artificial Sequence
  Description of Artificial Sequence: Synthetic oligonucleotide
  Antisense strand to SEQ ID NO: 119528
caucugcuaacauucuggu

SEQ ID NO: 119530 - RNA, 19 nt, Artificial Sequence
  Description of Artificial Sequence: Synthetic oligonucleotide
  Sense strand starting at position 1617 of SEQ ID NO: 1523
ccgacaaauggccagguau

SEQ ID NO: 119531 - RNA, 19 nt, Artificial Sequence
  Description of Artificial Sequence: Synthetic oligonucleotide
  Antisense strand to SEQ ID NO: 119530
auaccuggccauuugucgg

SEQ ID NO: 119532 - RNA, 19 nt, Artificial Sequence
  Description of Artificial Sequence: Synthetic oligonucleotide
  Sense strand starting at position 1643 of SEQ ID NO: 1523
aggccauggcuguaagaag

SEQ ID NO: 119533 - RNA, 19 nt, Artificial Sequence
  Description of Artificial Sequence: Synthetic oligonucleotide
  Antisense strand to SEQ ID NO: 119532
cuucuuacagccauggccu

SEQ ID NO: 119534 - RNA, 19 nt, Artificial Sequence
  Description of Artificial Sequence: Synthetic oligonucleotide
  Sense strand starting at position 1986 of SEQ ID NO: 1523
guuguauugauccauggga

SEQ ID NO: 119535 - RNA, 19 nt, Artificial Sequence
  Description of Artificial Sequence: Synthetic oligonucleotide
  Antisense strand to SEQ ID NO: 119534
ucccauggaucaauacaac

SEQ ID NO: 119536 - RNA, 19 nt, Artificial Sequence
  Description of Artificial Sequence: Synthetic oligonucleotide
  Sense strand starting at position 2038 of SEQ ID NO: 1523
gauugagaugacugcugaa

SEQ ID NO: 119537 - RNA, 19 nt, Artificial Sequence
  Description of Artificial Sequence: Synthetic oligonucleotide
  Antisense strand to SEQ ID NO: 119536
uucagcagucaucucaauc

SEQ ID NO: 119538 - RNA, 19 nt, Artificial Sequence
  Description of Artificial Sequence: Synthetic oligonucleotide
  Sense strand starting at position 2244 of SEQ ID NO: 1523
ugagauaagcaccauuguu

SEQ ID NO: 119539 - RNA, 19 nt, Artificial Sequence
  Description of Artificial Sequence: Synthetic oligonucleotide
  Antisense strand to SEQ ID NO: 119538
aacaauggugcuuaucuca

SEQ ID NO: 119540 - RNA, 19 nt, Artificial Sequence
  Description of Artificial Sequence: Synthetic oligonucleotide
  Sense strand starting at position 2546 of SEQ ID NO: 1523
auaugugucaggcagaaag

SEQ ID NO: 119541 - RNA, 19 nt, Artificial Sequence
  Description of Artificial Sequence: Synthetic oligonucleotide
  Antisense strand to SEQ ID NO: 119540
cuuucugccugacacauau

SEQ ID NO: 119542 - RNA, 19 nt, Artificial Sequence
  Description of Artificial Sequence: Synthetic oligonucleotide
  Sense strand starting at position 2721 of SEQ ID NO: 1523
agaggaagcccguaagaug

SEQ ID NO: 119543 - RNA, 19 nt, Artificial Sequence
  Description of Artificial Sequence: Synthetic oligonucleotide
  Antisense strand to SEQ ID NO: 119542
caucuuacgggcuuccucu

SEQ ID NO: 119544 - RNA, 19 nt, Artificial Sequence
  Description of Artificial Sequence: Synthetic oligonucleotide
  Sense strand starting at position 2869 of SEQ ID NO: 1523
ugggaaagcucacucaaug

SEQ ID NO: 119545 - RNA, 19 nt, Artificial Sequence
  Description of Artificial Sequence: Synthetic oligonucleotide
  Antisense strand to SEQ ID NO: 119544
cauugagugagcuuuccca

SEQ ID NO: 119546 - RNA, 19 nt, Artificial Sequence
  Description of Artificial Sequence: Synthetic oligonucleotide
  Sense strand starting at position 2893 of SEQ ID NO: 1523
agaccuuagcuccauagau

SEQ ID NO: 119547 - RNA, 19 nt, Artificial Sequence
  Description of Artificial Sequence: Synthetic oligonucleotide
  Antisense strand to SEQ ID NO: 119546
aucuauggagcuaaggucu

SEQ ID NO: 119548 - RNA, 19 nt, Artificial Sequence
  Description of Artificial Sequence: Synthetic oligonucleotide
  Sense strand starting at position 2916 of SEQ ID NO: 1523
ggcaucacugaagaauguu

SEQ ID NO: 119549 - RNA, 19 nt, Artificial Sequence
  Description of Artificial Sequence: Synthetic oligonucleotide
  Antisense strand to SEQ ID NO: 119548
aacauucuucagugaugcc

SEQ ID NO: 119550 - RNA, 19 nt, Artificial Sequence
  Description of Artificial Sequence: Synthetic oligonucleotide
  Sense strand starting at position 2925 of SEQ ID NO: 1523
gaagaauguuugcuagaug

SEQ ID NO: 119551 - RNA, 19 nt, Artificial Sequence
  Description of Artificial Sequence: Synthetic oligonucleotide
  Antisense strand to SEQ ID NO: 119550
caucuagcaaacauucuuc

SEQ ID NO: 119552 - RNA, 19 nt, Artificial Sequence
  Description of Artificial Sequence: Synthetic oligonucleotide
  Sense strand starting at position 2939 of SEQ ID NO: 1523
agaugagugacuggucaga

SEQ ID NO: 119553 - RNA, 19 nt, Artificial Sequence
  Description of Artificial Sequence: Synthetic oligonucleotide
  Antisense strand to SEQ ID NO: 119552
ucugaccagucacucaucu

SEQ ID NO: 119554 - RNA, 19 nt, Artificial Sequence
  Description of Artificial Sequence: Synthetic oligonucleotide
  Sense strand starting at position 2941 of SEQ ID NO: 1523
augagugacuggucagaug

SEQ ID NO: 119555 - RNA, 19 nt, Artificial Sequence
  Description of Artificial Sequence: Synthetic oligonucleotide
  Antisense strand to SEQ ID NO: 119554
caucugaccagucacucau

SEQ ID NO: 119556 - RNA, 19 nt, Artificial Sequence
  Description of Artificial Sequence: Synthetic oligonucleotide
  Sense strand starting at position 2948 of SEQ ID NO: 1523
acuggucagauguagacuu

SEQ ID NO: 119557 - RNA, 19 nt, Artificial Sequence
  Description of Artificial Sequence: Synthetic oligonucleotide
  Antisense strand to SEQ ID NO: 119556
aagucuacaucugaccagu

SEQ ID NO: 119558 - RNA, 19 nt, Artificial Sequence
  Description of Artificial Sequence: Synthetic oligonucleotide
  Sense strand starting at position 3007 of SEQ ID NO: 1523
cggagaugaaggugugaau

SEQ ID NO: 119559 - RNA, 19 nt, Artificial Sequence
  Description of Artificial Sequence: Synthetic oligonucleotide
  Antisense strand to SEQ ID NO: 119558
auucacaccuucaucuccg

SEQ ID NO: 119560 - RNA, 19 nt, Artificial Sequence
  Description of Artificial Sequence: Synthetic oligonucleotide
  Sense strand starting at position 3418 of SEQ ID NO: 1523
acaugauagaguggcaaua

SEQ ID NO: 119561 - RNA, 19 nt, Artificial Sequence
  Description of Artificial Sequence: Synthetic oligonucleotide
  Antisense strand to SEQ ID NO: 119560
uauugccacucuaucaugu

SEQ ID NO: 119562 - RNA, 19 nt, Artificial Sequence
  Description of Artificial Sequence: Synthetic oligonucleotide
  Sense strand starting at position 3643 of SEQ ID NO: 1523
auacccuguguagaucaua

SEQ ID NO: 119563 - RNA, 19 nt, Artificial Sequence
  Description of Artificial Sequence: Synthetic oligonucleotide
  Antisense strand to SEQ ID NO: 119562
uaugaucuacacaggguau

SEQ ID NO: 119564 - RNA, 19 nt, Artificial Sequence
  Description of Artificial Sequence: Synthetic oligonucleotide
  Sense strand starting at position 3906 of SEQ ID NO: 1523
aaugaacuucuggguuuga

SEQ ID NO: 119565 - RNA, 19 nt, Artificial Sequence
  Description of Artificial Sequence: Synthetic oligonucleotide
  Antisense strand to SEQ ID NO: 119564
ucaaacccagaaguucauu

SEQ ID NO: 119566 - RNA, 19 nt, Artificial Sequence
  Description of Artificial Sequence: Synthetic oligonucleotide
  Sense strand starting at position 3907 of SEQ ID NO: 1523
augaacuucuggguuugau

SEQ ID NO: 119567 - RNA, 19 nt, Artificial Sequence
  Description of Artificial Sequence: Synthetic oligonucleotide
  Antisense strand to SEQ ID NO: 119566
aucaaacccagaaguucau

SEQ ID NO: 119568 - RNA, 19 nt, Artificial Sequence
  Description of Artificial Sequence: Synthetic oligonucleotide
  Sense strand starting at position 7 of SEQ ID NO: 1524
uguaaaugagccuagauuc

SEQ ID NO: 119569 - RNA, 19 nt, Artificial Sequence
  Description of Artificial Sequence: Synthetic oligonucleotide
  Antisense strand to SEQ ID NO: 119568
gaaucuaggcucauuuaca

SEQ ID NO: 119570 - RNA, 19 nt, Artificial Sequence
  Description of Artificial Sequence: Synthetic oligonucleotide
  Sense strand starting at position 82 of SEQ ID NO: 1524
uugcuagaauaccuaugau

SEQ ID NO: 119571 - RNA, 19 nt, Artificial Sequence
  Description of Artificial Sequence: Synthetic oligonucleotide
  Antisense strand to SEQ ID NO: 119570
aucauagguauucuagcaa

SEQ ID NO: 119572 - RNA, 19 nt, Artificial Sequence
  Description of Artificial Sequence: Synthetic oligonucleotide
  Sense strand starting at position 103 of SEQ ID NO: 1524
aggcuaugaaccugagaca

SEQ ID NO: 119573 - RNA, 19 nt, Artificial Sequence
  Description of Artificial Sequence: Synthetic oligonucleotide
  Antisense strand to SEQ ID NO: 119572
ugucucagguucauagccu

SEQ ID NO: 119574 - RNA, 19 nt, Artificial Sequence
  Description of Artificial Sequence: Synthetic oligonucleotide
  Sense strand starting at position 122 of SEQ ID NO: 1524
ucccaauugccauagagau

SEQ ID NO: 119575 - RNA, 19 nt, Artificial Sequence
  Description of Artificial Sequence: Synthetic oligonucleotide
  Antisense strand to SEQ ID NO: 119574
aucucuauggcaauuggga

SEQ ID NO: 119576 - RNA, 19 nt, Artificial Sequence
  Description of Artificial Sequence: Synthetic oligonucleotide
  Sense strand starting at position 400 of SEQ ID NO: 1524
agaggauaguuagccauau

SEQ ID NO: 119577 - RNA, 19 nt, Artificial Sequence
  Description of Artificial Sequence: Synthetic oligonucleotide
  Antisense strand to SEQ ID NO: 119576
auauggcuaacuauccucu

SEQ ID NO: 119578 - RNA, 19 nt, Artificial Sequence
  Description of Artificial Sequence: Synthetic oligonucleotide
  Sense strand starting at position 402 of SEQ ID NO: 1524
aggauaguuagccauauug

SEQ ID NO: 119579 - RNA, 19 nt, Artificial Sequence
  Description of Artificial Sequence: Synthetic oligonucleotide
  Antisense strand to SEQ ID NO: 119578
caauauggcuaacuauccu

SEQ ID NO: 119580 - RNA, 19 nt, Artificial Sequence
  Description of Artificial Sequence: Synthetic oligonucleotide
  Sense strand starting at position 404 of SEQ ID NO: 1524
gauaguuagccauauugag

SEQ ID NO: 119581 - RNA, 19 nt, Artificial Sequence
  Description of Artificial Sequence: Synthetic oligonucleotide
  Antisense strand to SEQ ID NO: 119580
cucaauauggcuaacuauc

SEQ ID NO: 119582 - RNA, 19 nt, Artificial Sequence
  Description of Artificial Sequence: Synthetic oligonucleotide
  Sense strand starting at position 426 of SEQ ID NO: 1524
agaauauauggcugaauau

SEQ ID NO: 119583 - RNA, 19 nt, Artificial Sequence
  Description of Artificial Sequence: Synthetic oligonucleotide
  Antisense strand to SEQ ID NO: 119582
auauucagccauauauucu

SEQ ID NO: 119584 - RNA, 19 nt, Artificial Sequence
  Description of Artificial Sequence: Synthetic oligonucleotide
  Sense strand starting at position 544 of SEQ ID NO: 1524
uucuuaugaaagugggauu

SEQ ID NO: 119585 - RNA, 19 nt, Artificial Sequence
  Description of Artificial Sequence: Synthetic oligonucleotide
  Antisense strand to SEQ ID NO: 119584
aaucccacuuucauaagaa

SEQ ID NO: 119586 - RNA, 19 nt, Artificial Sequence
  Description of Artificial Sequence: Synthetic oligonucleotide
  Sense strand starting at position 547 of SEQ ID NO: 1524
uuaugaaagugggauuuga

SEQ ID NO: 119587 - RNA, 19 nt, Artificial Sequence
  Description of Artificial Sequence: Synthetic oligonucleotide
  Antisense strand to SEQ ID NO: 119586
ucaaaucccacuuucauaa

SEQ ID NO: 119588 - RNA, 19 nt, Artificial Sequence
  Description of Artificial Sequence: Synthetic oligonucleotide
  Sense strand starting at position 677 of SEQ ID NO: 1524
augggcuuggucuagacua

SEQ ID NO: 119589 - RNA, 19 nt, Artificial Sequence
  Description of Artificial Sequence: Synthetic oligonucleotide
  Antisense strand to SEQ ID NO: 119588
uagucuagaccaagcccau

SEQ ID NO: 119590 - RNA, 19 nt, Artificial Sequence
  Description of Artificial Sequence: Synthetic oligonucleotide
  Sense strand starting at position 720 of SEQ ID NO: 1524
uaggaauucccaggaaguu

SEQ ID NO: 119591 - RNA, 19 nt, Artificial Sequence
  Description of Artificial Sequence: Synthetic oligonucleotide
  Antisense strand to SEQ ID NO: 119590
aacuuccugggaauuccua

SEQ ID NO: 119592 - RNA, 19 nt, Artificial Sequence
  Description of Artificial Sequence: Synthetic oligonucleotide
  Sense strand starting at position 978 of SEQ ID NO: 1524
uauucugauuccuugagga

SEQ ID NO: 119593 - RNA, 19 nt, Artificial Sequence
  Description of Artificial Sequence: Synthetic oligonucleotide
  Antisense strand to SEQ ID NO: 119592
uccucaaggaaucagaaua

SEQ ID NO: 119594 - RNA, 19 nt, Artificial Sequence
  Description of Artificial Sequence: Synthetic oligonucleotide
  Sense strand starting at position 1051 of SEQ ID NO: 1524
uccugaacaucccuaggau

SEQ ID NO: 119595 - RNA, 19 nt, Artificial Sequence
  Description of Artificial Sequence: Synthetic oligonucleotide
  Antisense strand to SEQ ID NO: 119594
auccuagggauguucagga

SEQ ID NO: 119596 - RNA, 19 nt, Artificial Sequence
  Description of Artificial Sequence: Synthetic oligonucleotide
  Sense strand starting at position 1054 of SEQ ID NO: 1524
ugaacaucccuaggauagu

SEQ ID NO: 119597 - RNA, 19 nt, Artificial Sequence
  Description of Artificial Sequence: Synthetic oligonucleotide
  Antisense strand to SEQ ID NO: 119596
acuauccuagggauguuca

SEQ ID NO: 119598 - RNA, 19 nt, Artificial Sequence
  Description of Artificial Sequence: Synthetic oligonucleotide
  Sense strand starting at position 1140 of SEQ ID NO: 1524
uggguugaagaaugguaca

SEQ ID NO: 119599 - RNA, 19 nt, Artificial Sequence
  Description of Artificial Sequence: Synthetic oligonucleotide
  Antisense strand to SEQ ID NO: 119598
uguaccauucuucaaccca

SEQ ID NO: 119600 - RNA, 19 nt, Artificial Sequence
  Description of Artificial Sequence: Synthetic oligonucleotide
  Sense strand starting at position 1322 of SEQ ID NO: 1524
ucaggauggcugcaaugau

SEQ ID NO: 119601 - RNA, 19 nt, Artificial Sequence
  Description of Artificial Sequence: Synthetic oligonucleotide
  Antisense strand to SEQ ID NO: 119600
aucauugcagccauccuga

SEQ ID NO: 119602 - RNA, 19 nt, Artificial Sequence
  Description of Artificial Sequence: Synthetic oligonucleotide
  Sense strand starting at position 1728 of SEQ ID NO: 1524
ucuaccauccuggguaaga

SEQ ID NO: 119603 - RNA, 19 nt, Artificial Sequence
  Description of Artificial Sequence: Synthetic oligonucleotide
  Antisense strand to SEQ ID NO: 119602
ucuuacccaggaugguaga

SEQ ID NO: 119604 - RNA, 19 nt, Artificial Sequence
  Description of Artificial Sequence: Synthetic oligonucleotide
  Sense strand starting at position 1729 of SEQ ID NO: 1524
cuaccauccuggguaagaa

SEQ ID NO: 119605 - RNA, 19 nt, Artificial Sequence
  Description of Artificial Sequence: Synthetic oligonucleotide
  Antisense strand to SEQ ID NO: 119604
uucuuacccaggaugguag

SEQ ID NO: 119606 - RNA, 19 nt, Artificial Sequence
  Description of Artificial Sequence: Synthetic oligonucleotide
  Sense strand starting at position 1782 of SEQ ID NO: 1524
guaccauagcuccaggaaa

SEQ ID NO: 119607 - RNA, 19 nt, Artificial Sequence
  Description of Artificial Sequence: Synthetic oligonucleotide
  Antisense strand to SEQ ID NO: 119606
uuuccuggagcuaugguac

SEQ ID NO: 119608 - RNA, 19 nt, Artificial Sequence
  Description of Artificial Sequence: Synthetic oligonucleotide
  Sense strand starting at position 1784 of SEQ ID NO: 1524
accauagcuccaggaaaga

SEQ ID NO: 119609 - RNA, 19 nt, Artificial Sequence
  Description of Artificial Sequence: Synthetic oligonucleotide
  Antisense strand to SEQ ID NO: 119608
ucuuuccuggagcuauggu

SEQ ID NO: 119610 - RNA, 19 nt, Artificial Sequence
  Description of Artificial Sequence: Synthetic oligonucleotide
  Sense strand starting at position 1961 of SEQ ID NO: 1524
agacaaacuccucgacaug

SEQ ID NO: 119611 - RNA, 19 nt, Artificial Sequence
  Description of Artificial Sequence: Synthetic oligonucleotide
  Antisense strand to SEQ ID NO: 119610
caugucgaggaguuugucu

SEQ ID NO: 119612 - RNA, 19 nt, Artificial Sequence
  Description of Artificial Sequence: Synthetic oligonucleotide
  Sense strand starting at position 2191 of SEQ ID NO: 1524
agaccugaguacucaauua

SEQ ID NO: 119613 - RNA, 19 nt, Artificial Sequence
  Description of Artificial Sequence: Synthetic oligonucleotide
  Antisense strand to SEQ ID NO: 119612
uaauugaguacucaggucu

SEQ ID NO: 119614 - RNA, 19 nt, Artificial Sequence
  Description of Artificial Sequence: Synthetic oligonucleotide
  Sense strand starting at position 2239 of SEQ ID NO: 1524
gauaaauacuuucugagug

SEQ ID NO: 119615 - RNA, 19 nt, Artificial Sequence
  Description of Artificial Sequence: Synthetic oligonucleotide
  Antisense strand to SEQ ID NO: 119614
cacucagaaaguauuuauc

SEQ ID NO: 119616 - RNA, 19 nt, Artificial Sequence
  Description of Artificial Sequence: Synthetic oligonucleotide
  Sense strand starting at position 2261 of SEQ ID NO: 1524
ucagaacugcuuggcauuu

SEQ ID NO: 119617 - RNA, 19 nt, Artificial Sequence
  Description of Artificial Sequence: Synthetic oligonucleotide
  Antisense strand to SEQ ID NO: 119616
aaaugccaagcaguucuga

SEQ ID NO: 119618 - RNA, 19 nt, Artificial Sequence
  Description of Artificial Sequence: Synthetic oligonucleotide
  Sense strand starting at position 2366 of SEQ ID NO: 1524
ucaguaucuguugaaugag

SEQ ID NO: 119619 - RNA, 19 nt, Artificial Sequence
  Description of Artificial Sequence: Synthetic oligonucleotide
  Antisense strand to SEQ ID NO: 119618
cucauucaacagauacuga

SEQ ID NO: 119620 - RNA, 19 nt, Artificial Sequence
  Description of Artificial Sequence: Synthetic oligonucleotide
  Sense strand starting at position 2369 of SEQ ID NO: 1524
guaucuguugaaugaggga

SEQ ID NO: 119621 - RNA, 19 nt, Artificial Sequence
  Description of Artificial Sequence: Synthetic oligonucleotide
  Antisense strand to SEQ ID NO: 119620
ucccucauucaacagauac

SEQ ID NO: 119622 - RNA, 19 nt, Artificial Sequence
  Description of Artificial Sequence: Synthetic oligonucleotide
  Sense strand starting at position 2467 of SEQ ID NO: 1524
caaggagauugcuugaacu

SEQ ID NO: 119623 - RNA, 19 nt, Artificial Sequence
  Description of Artificial Sequence: Synthetic oligonucleotide
  Antisense strand to SEQ ID NO: 119622
aguucaagcaaucuccuug

SEQ ID NO: 119624 - RNA, 19 nt, Artificial Sequence
  Description of Artificial Sequence: Synthetic oligonucleotide
  Sense strand starting at position 2574 of SEQ ID NO: 1524
gaaguucugcuccagagaa

SEQ ID NO: 119625 - RNA, 19 nt, Artificial Sequence
  Description of Artificial Sequence: Synthetic oligonucleotide
  Antisense strand to SEQ ID NO: 119624
uucucuggagcagaacuuc

SEQ ID NO: 119626 - RNA, 19 nt, Artificial Sequence
  Description of Artificial Sequence: Synthetic oligonucleotide
  Sense strand starting at position 2576 of SEQ ID NO: 1524
aguucugcuccagagaaua

SEQ ID NO: 119627 - RNA, 19 nt, Artificial Sequence
  Description of Artificial Sequence: Synthetic oligonucleotide
  Antisense strand to SEQ ID NO: 119626
uauucucuggagcagaacu

SEQ ID NO: 119628 - RNA, 19 nt, Artificial Sequence
  Description of Artificial Sequence: Synthetic oligonucleotide
  Sense strand starting at position 2711 of SEQ ID NO: 1524
augucuuaauuccuggaau

SEQ ID NO: 119629 - RNA, 19 nt, Artificial Sequence
  Description of Artificial Sequence: Synthetic oligonucleotide
  Antisense strand to SEQ ID NO: 119628
auuccaggaauuaagacau

SEQ ID NO: 119630 - RNA, 19 nt, Artificial Sequence
  Description of Artificial Sequence: Synthetic oligonucleotide
  Sense strand starting at position 2784 of SEQ ID NO: 1524
cuuugagauggagggcuua

SEQ ID NO: 119631 - RNA, 19 nt, Artificial Sequence
  Description of Artificial Sequence: Synthetic oligonucleotide
  Antisense strand to SEQ ID NO: 119630
uaagcccuccaucucaaag

SEQ ID NO: 119632 - RNA, 19 nt, Artificial Sequence
  Description of Artificial Sequence: Synthetic oligonucleotide
  Sense strand starting at position 3017 of SEQ ID NO: 1524
agaagaauuucucaagagc

SEQ ID NO: 119633 - RNA, 19 nt, Artificial Sequence
  Description of Artificial Sequence: Synthetic oligonucleotide
  Antisense strand to SEQ ID NO: 119632
gcucuugagaaauucuucu

SEQ ID NO: 119634 - RNA, 19 nt, Artificial Sequence
  Description of Artificial Sequence: Synthetic oligonucleotide
  Sense strand starting at position 3065 of SEQ ID NO: 1524
cuugaauugagccaaguga

SEQ ID NO: 119635 - RNA, 19 nt, Artificial Sequence
  Description of Artificial Sequence: Synthetic oligonucleotide
  Antisense strand to SEQ ID NO: 119634
ucacuuggcucaauucaag

SEQ ID NO: 119636 - RNA, 19 nt, Artificial Sequence
  Description of Artificial Sequence: Synthetic oligonucleotide
  Sense strand starting at position 3310 of SEQ ID NO: 1524
uuacaagucugacuugaga

SEQ ID NO: 119637 - RNA, 19 nt, Artificial Sequence
  Description of Artificial Sequence: Synthetic oligonucleotide
  Antisense strand to SEQ ID NO: 119636
ucucaagucagacuuguaa

SEQ ID NO: 119638 - RNA, 19 nt, Artificial Sequence
  Description of Artificial Sequence: Synthetic oligonucleotide
  Sense strand starting at position 3318 of SEQ ID NO: 1524
cugacuugagauuggguga

SEQ ID NO: 119639 - RNA, 19 nt, Artificial Sequence
  Description of Artificial Sequence: Synthetic oligonucleotide
  Antisense strand to SEQ ID NO: 119638
ucacccaaucucaagucag

SEQ ID NO: 119640 - RNA, 19 nt, Artificial Sequence
  Description of Artificial Sequence: Synthetic oligonucleotide
  Sense strand starting at position 3321 of SEQ ID NO: 1524
acuugagauugggugacau

SEQ ID NO: 119641 - RNA, 19 nt, Artificial Sequence
  Description of Artificial Sequence: Synthetic oligonucleotide
  Antisense strand to SEQ ID NO: 119640
augucacccaaucucaagu

SEQ ID NO: 119642 - RNA, 19 nt, Artificial Sequence
  Description of Artificial Sequence: Synthetic oligonucleotide
  Sense strand starting at position 3323 of SEQ ID NO: 1524
uugagauugggugacaugu

SEQ ID NO: 119643 - RNA, 19 nt, Artificial Sequence
  Description of Artificial Sequence: Synthetic oligonucleotide
  Antisense strand to SEQ ID NO: 119642
acaugucacccaaucucaa

SEQ ID NO: 119644 - RNA, 19 nt, Artificial Sequence
  Description of Artificial Sequence: Synthetic oligonucleotide
  Sense strand starting at position 3373 of SEQ ID NO: 1524
aguaccugucuuuaaacau

SEQ ID NO: 119645 - RNA, 19 nt, Artificial Sequence
  Description of Artificial Sequence: Synthetic oligonucleotide
  Antisense strand to SEQ ID NO: 119644
auguuuaaagacagguacu

SEQ ID NO: 119646 - RNA, 19 nt, Artificial Sequence
  Description of Artificial Sequence: Synthetic oligonucleotide
  Sense strand starting at position 3725 of SEQ ID NO: 1524
ugguaaugauauccacuga

SEQ ID NO: 119647 - RNA, 19 nt, Artificial Sequence
  Description of Artificial Sequence: Synthetic oligonucleotide
  Antisense strand to SEQ ID NO: 119646
ucaguggauaucauuacca

SEQ ID NO: 119648 - RNA, 19 nt, Artificial Sequence
  Description of Artificial Sequence: Synthetic oligonucleotide
  Sense strand starting at position 190 of SEQ ID NO: 1525
gggacauaacuuugcccau

SEQ ID NO: 119649 - RNA, 19 nt, Artificial Sequence
  Description of Artificial Sequence: Synthetic oligonucleotide
  Antisense strand to SEQ ID NO: 119648
augggcaaaguuauguccc

SEQ ID NO: 119650 - RNA, 19 nt, Artificial Sequence
  Description of Artificial Sequence: Synthetic oligonucleotide
  Sense strand starting at position 191 of SEQ ID NO: 1525
ggacauaacuuugcccaua

SEQ ID NO: 119651 - RNA, 19 nt, Artificial Sequence
  Description of Artificial Sequence: Synthetic oligonucleotide
  Antisense strand to SEQ ID NO: 119650
uaugggcaaaguuaugucc

SEQ ID NO: 119652 - RNA, 19 nt, Artificial Sequence
  Description of Artificial Sequence: Synthetic oligonucleotide
  Sense strand starting at position 360 of SEQ ID NO: 1525
ucacuuuguuauuugguau

SEQ ID NO: 119653 - RNA, 19 nt, Artificial Sequence
  Description of Artificial Sequence: Synthetic oligonucleotide
  Antisense strand to SEQ ID NO: 119652
auaccaaauaacaaaguga

SEQ ID NO: 119654 - RNA, 19 nt, Artificial Sequence
  Description of Artificial Sequence: Synthetic oligonucleotide
  Sense strand starting at position 422 of SEQ ID NO: 1525
uuauguuauuuggagggaa

SEQ ID NO: 119655 - RNA, 19 nt, Artificial Sequence
  Description of Artificial Sequence: Synthetic oligonucleotide
  Antisense strand to SEQ ID NO: 119654
uucccuccaaauaacauaa

SEQ ID NO: 119656 - RNA, 19 nt, Artificial Sequence
  Description of Artificial Sequence: Synthetic oligonucleotide
  Sense strand starting at position 692 of SEQ ID NO: 1525
uugauaaguuguguggaaa

SEQ ID NO: 119657 - RNA, 19 nt, Artificial Sequence
  Description of Artificial Sequence: Synthetic oligonucleotide
  Antisense strand to SEQ ID NO: 119656
uuuccacacaacuuaucaa

SEQ ID NO: 119658 - RNA, 19 nt, Artificial Sequence
  Description of Artificial Sequence: Synthetic oligonucleotide
  Sense strand starting at position 768 of SEQ ID NO: 1525
cuguguuucuuccugauuu

SEQ ID NO: 119659 - RNA, 19 nt, Artificial Sequence
  Description of Artificial Sequence: Synthetic oligonucleotide
  Antisense strand to SEQ ID NO: 119658
aaaucaggaagaaacacag

SEQ ID NO: 119660 - RNA, 19 nt, Artificial Sequence
  Description of Artificial Sequence: Synthetic oligonucleotide
  Sense strand starting at position 831 of SEQ ID NO: 1525
accagagguuacuucuuga

SEQ ID NO: 119661 - RNA, 19 nt, Artificial Sequence
  Description of Artificial Sequence: Synthetic oligonucleotide
  Antisense strand to SEQ ID NO: 119660
ucaagaaguaaccucuggu

SEQ ID NO: 119662 - RNA, 19 nt, Artificial Sequence
  Description of Artificial Sequence: Synthetic oligonucleotide
  Sense strand starting at position 834 of SEQ ID NO: 1525
agagguuacuucuugagaa

SEQ ID NO: 119663 - RNA, 19 nt, Artificial Sequence
  Description of Artificial Sequence: Synthetic oligonucleotide
  Antisense strand to SEQ ID NO: 119662
uucucaagaaguaaccucu

SEQ ID NO: 119664 - RNA, 19 nt, Artificial Sequence
  Description of Artificial Sequence: Synthetic oligonucleotide
  Sense strand starting at position 841 of SEQ ID NO: 1525
acuucuugagaacauguuu

SEQ ID NO: 119665 - RNA, 19 nt, Artificial Sequence
  Description of Artificial Sequence: Synthetic oligonucleotide
  Antisense strand to SEQ ID NO: 119664
aaacauguucucaagaagu

SEQ ID NO: 119666 - RNA, 19 nt, Artificial Sequence
  Description of Artificial Sequence: Synthetic oligonucleotide
  Sense strand starting at position 846 of SEQ ID NO: 1525
uugagaacauguuucucca

SEQ ID NO: 119667 - RNA, 19 nt, Artificial Sequence
  Description of Artificial Sequence: Synthetic oligonucleotide
  Antisense strand to SEQ ID NO: 119666
uggagaaacauguucucaa

SEQ ID NO: 119668 - RNA, 19 nt, Artificial Sequence
  Description of Artificial Sequence: Synthetic oligonucleotide
  Sense strand starting at position 920 of SEQ ID NO: 1525
uguuacaguacuggagauu

SEQ ID NO: 119669 - RNA, 19 nt, Artificial Sequence
  Description of Artificial Sequence: Synthetic oligonucleotide
  Antisense strand to SEQ ID NO: 119668
aaucuccaguacuguaaca

SEQ ID NO: 119670 - RNA, 19 nt, Artificial Sequence
  Description of Artificial Sequence: Synthetic oligonucleotide
  Sense strand starting at position 1162 of SEQ ID NO: 1525
gauaccacuuuguuggaau

SEQ ID NO: 119671 - RNA, 19 nt, Artificial Sequence
  Description of Artificial Sequence: Synthetic oligonucleotide
  Antisense strand to SEQ ID NO: 119670
auuccaacaaagugguauc

SEQ ID NO: 119672 - RNA, 19 nt, Artificial Sequence
  Description of Artificial Sequence: Synthetic oligonucleotide
  Sense strand starting at position 1174 of SEQ ID NO: 1525
uuggaauuguaggcauaca

SEQ ID NO: 119673 - RNA, 19 nt, Artificial Sequence
  Description of Artificial Sequence: Synthetic oligonucleotide
  Antisense strand to SEQ ID NO: 119672
uguaugccuacaauuccaa

SEQ ID NO: 119674 - RNA, 19 nt, Artificial Sequence
  Description of Artificial Sequence: Synthetic oligonucleotide
  Sense strand starting at position 1175 of SEQ ID NO: 1525
uggaauuguaggcauacau

SEQ ID NO: 119675 - RNA, 19 nt, Artificial Sequence
  Description of Artificial Sequence: Synthetic oligonucleotide
  Antisense strand to SEQ ID NO: 119674
auguaugccuacaauucca

SEQ ID NO: 119676 - RNA, 19 nt, Artificial Sequence
  Description of Artificial Sequence: Synthetic oligonucleotide
  Sense strand starting at position 1569 of SEQ ID NO: 1525
cugguuggucaugaugacu

SEQ ID NO: 119677 - RNA, 19 nt, Artificial Sequence
  Description of Artificial Sequence: Synthetic oligonucleotide
  Antisense strand to SEQ ID NO: 119676
agucaucaugaccaaccag

SEQ ID NO: 119678 - RNA, 19 nt, Artificial Sequence
  Description of Artificial Sequence: Synthetic oligonucleotide
  Sense strand starting at position 1592 of SEQ ID NO: 1525
agcguaguggauuacaaau

SEQ ID NO: 119679 - RNA, 19 nt, Artificial Sequence
  Description of Artificial Sequence: Synthetic oligonucleotide
  Antisense strand to SEQ ID NO: 119678
auuuguaauccacuacgcu

SEQ ID NO: 119680 - RNA, 19 nt, Artificial Sequence
  Description of Artificial Sequence: Synthetic oligonucleotide
  Sense strand starting at position 1643 of SEQ ID NO: 1525
gaaggauguacucagugca

SEQ ID NO: 119681 - RNA, 19 nt, Artificial Sequence
  Description of Artificial Sequence: Synthetic oligonucleotide
  Antisense strand to SEQ ID NO: 119680
ugcacugaguacauccuuc

SEQ ID NO: 119682 - RNA, 19 nt, Artificial Sequence
  Description of Artificial Sequence: Synthetic oligonucleotide
  Sense strand starting at position 1715 of SEQ ID NO: 1525
ucuugucaugacugaggaa

SEQ ID NO: 119683 - RNA, 19 nt, Artificial Sequence
  Description of Artificial Sequence: Synthetic oligonucleotide
  Antisense strand to SEQ ID NO: 119682
uuccucagucaugacaaga

SEQ ID NO: 119684 - RNA, 19 nt, Artificial Sequence
  Description of Artificial Sequence: Synthetic oligonucleotide
  Sense strand starting at position 1800 of SEQ ID NO: 1525
gaagaaguacaugggcuua

SEQ ID NO: 119685 - RNA, 19 nt, Artificial Sequence
  Description of Artificial Sequence: Synthetic oligonucleotide
  Antisense strand to SEQ ID NO: 119684
uaagcccauguacuucuuc

SEQ ID NO: 119686 - RNA, 19 nt, Artificial Sequence
  Description of Artificial Sequence: Synthetic oligonucleotide
  Sense strand starting at position 1832 of SEQ ID NO: 1525
cacuguggauagcuaagau

SEQ ID NO: 119687 - RNA, 19 nt, Artificial Sequence
  Description of Artificial Sequence: Synthetic oligonucleotide
  Antisense strand to SEQ ID NO: 119686
aucuuagcuauccacagug

SEQ ID NO: 119688 - RNA, 19 nt, Artificial Sequence
  Description of Artificial Sequence: Synthetic oligonucleotide
  Sense strand starting at position 1963 of SEQ ID NO: 1525
acuguaugauuaucuacuu

SEQ ID NO: 119689 - RNA, 19 nt, Artificial Sequence
  Description of Artificial Sequence: Synthetic oligonucleotide
  Antisense strand to SEQ ID NO: 119688
aaguagauaaucauacagu

SEQ ID NO: 119690 - RNA, 19 nt, Artificial Sequence
  Description of Artificial Sequence: Synthetic oligonucleotide
  Sense strand starting at position 1983 of SEQ ID NO: 1525
cagaauuaugguggucaug

SEQ ID NO: 119691 - RNA, 19 nt, Artificial Sequence
  Description of Artificial Sequence: Synthetic oligonucleotide
  Antisense strand to SEQ ID NO: 119690
caugaccaccauaauucug

SEQ ID NO: 119692 - RNA, 19 nt, Artificial Sequence
  Description of Artificial Sequence: Synthetic oligonucleotide
  Sense strand starting at position 1985 of SEQ ID NO: 1525
gaauuaugguggucaugac

SEQ ID NO: 119693 - RNA, 19 nt, Artificial Sequence
  Description of Artificial Sequence: Synthetic oligonucleotide
  Antisense strand to SEQ ID NO: 119692
gucaugaccaccauaauuc

SEQ ID NO: 119694 - RNA, 19 nt, Artificial Sequence
  Description of Artificial Sequence: Synthetic oligonucleotide
  Sense strand starting at position 2051 of SEQ ID NO: 1525
agucuaugguuauuuguau

SEQ ID NO: 119695 - RNA, 19 nt, Artificial Sequence
  Description of Artificial Sequence: Synthetic oligonucleotide
  Antisense strand to SEQ ID NO: 119694
auacaaauaaccauagacu

SEQ ID NO: 119696 - RNA, 19 nt, Artificial Sequence
  Description of Artificial Sequence: Synthetic oligonucleotide
  Sense strand starting at position 2052 of SEQ ID NO: 1525
gucuaugguuauuuguauu

SEQ ID NO: 119697 - RNA, 19 nt, Artificial Sequence
  Description of Artificial Sequence: Synthetic oligonucleotide
  Antisense strand to SEQ ID NO: 119696
aauacaaauaaccauagac

SEQ ID NO: 119698 - RNA, 19 nt, Artificial Sequence
  Description of Artificial Sequence: Synthetic oligonucleotide
  Sense strand starting at position 2088 of SEQ ID NO: 1525
gcaaauuuaucacaauagg

SEQ ID NO: 119699 - RNA, 19 nt, Artificial Sequence
  Description of Artificial Sequence: Synthetic oligonucleotide
  Antisense strand to SEQ ID NO: 119698
ccuauugugauaaauuugc

SEQ ID NO: 119700 - RNA, 19 nt, Artificial Sequence
  Description of Artificial Sequence: Synthetic oligonucleotide
  Sense strand starting at position 2491 of SEQ ID NO: 1525
gugcuuaagcuugaaugaa

SEQ ID NO: 119701 - RNA, 19 nt, Artificial Sequence
  Description of Artificial Sequence: Synthetic oligonucleotide
  Antisense strand to SEQ ID NO: 119700
uucauucaagcuuaagcac

SEQ ID NO: 119702 - RNA, 19 nt, Artificial Sequence
  Description of Artificial Sequence: Synthetic oligonucleotide
  Sense strand starting at position 2499 of SEQ ID NO: 1525
gcuugaaugaagcaauagu

SEQ ID NO: 119703 - RNA, 19 nt, Artificial Sequence
  Description of Artificial Sequence: Synthetic oligonucleotide
  Antisense strand to SEQ ID NO: 119702
acuauugcuucauucaagc

SEQ ID NO: 119704 - RNA, 19 nt, Artificial Sequence
  Description of Artificial Sequence: Synthetic oligonucleotide
  Sense strand starting at position 2507 of SEQ ID NO: 1525
gaagcaauaguugagcaua

SEQ ID NO: 119705 - RNA, 19 nt, Artificial Sequence
  Description of Artificial Sequence: Synthetic oligonucleotide
  Antisense strand to SEQ ID NO: 119704
uaugcucaacuauugcuuc

SEQ ID NO: 119706 - RNA, 19 nt, Artificial Sequence
  Description of Artificial Sequence: Synthetic oligonucleotide
  Sense strand starting at position 2649 of SEQ ID NO: 1525
ugcuuaggaguuugacaaa

SEQ ID NO: 119707 - RNA, 19 nt, Artificial Sequence
  Description of Artificial Sequence: Synthetic oligonucleotide
  Antisense strand to SEQ ID NO: 119706
uuugucaaacuccuaagca

SEQ ID NO: 119708 - RNA, 19 nt, Artificial Sequence
  Description of Artificial Sequence: Synthetic oligonucleotide
  Sense strand starting at position 2826 of SEQ ID NO: 1525
ugauauuugcugugaccuu

SEQ ID NO: 119709 - RNA, 19 nt, Artificial Sequence
  Description of Artificial Sequence: Synthetic oligonucleotide
  Antisense strand to SEQ ID NO: 119708
aaggucacagcaaauauca

SEQ ID NO: 119710 - RNA, 19 nt, Artificial Sequence
  Description of Artificial Sequence: Synthetic oligonucleotide
  Sense strand starting at position 3019 of SEQ ID NO: 1525
uuccaaggguaauaaauuu

SEQ ID NO: 119711 - RNA, 19 nt, Artificial Sequence
  Description of Artificial Sequence: Synthetic oligonucleotide
  Antisense strand to SEQ ID NO: 119710
aaauuuauuacccuuggaa

SEQ ID NO: 119712 - RNA, 19 nt, Artificial Sequence
  Description of Artificial Sequence: Synthetic oligonucleotide
  Sense strand starting at position 3048 of SEQ ID NO: 1525
aucuguugggaguaauauc

SEQ ID NO: 119713 - RNA, 19 nt, Artificial Sequence
  Description of Artificial Sequence: Synthetic oligonucleotide
  Antisense strand to SEQ ID NO: 119712
gauauuacucccaacagau

SEQ ID NO: 119714 - RNA, 19 nt, Artificial Sequence
  Description of Artificial Sequence: Synthetic oligonucleotide
  Sense strand starting at position 3153 of SEQ ID NO: 1525
ggcugauaaucauucccaa

SEQ ID NO: 119715 - RNA, 19 nt, Artificial Sequence
  Description of Artificial Sequence: Synthetic oligonucleotide
  Antisense strand to SEQ ID NO: 119714
uugggaaugauuaucagcc

SEQ ID NO: 119716 - RNA, 19 nt, Artificial Sequence
  Description of Artificial Sequence: Synthetic oligonucleotide
  Sense strand starting at position 3421 of SEQ ID NO: 1525
agcuuuagauuccugaaag

SEQ ID NO: 119717 - RNA, 19 nt, Artificial Sequence
  Description of Artificial Sequence: Synthetic oligonucleotide
  Antisense strand to SEQ ID NO: 119716
cuuucaggaaucuaaagcu

SEQ ID NO: 119718 - RNA, 19 nt, Artificial Sequence
  Description of Artificial Sequence: Synthetic oligonucleotide
  Sense strand starting at position 3458 of SEQ ID NO: 1525
caggauuauuccuucugag

SEQ ID NO: 119719 - RNA, 19 nt, Artificial Sequence
  Description of Artificial Sequence: Synthetic oligonucleotide
  Antisense strand to SEQ ID NO: 119718
cucagaaggaauaauccug

SEQ ID NO: 119720 - RNA, 19 nt, Artificial Sequence
  Description of Artificial Sequence: Synthetic oligonucleotide
  Sense strand starting at position 3553 of SEQ ID NO: 1525
guuggaauauaguuccuga

SEQ ID NO: 119721 - RNA, 19 nt, Artificial Sequence
  Description of Artificial Sequence: Synthetic oligonucleotide
  Antisense strand to SEQ ID NO: 119720
ucaggaacuauauuccaac

SEQ ID NO: 119722 - RNA, 19 nt, Artificial Sequence
  Description of Artificial Sequence: Synthetic oligonucleotide
  Sense strand starting at position 3625 of SEQ ID NO: 1525
gcucauugcagcuugguau

SEQ ID NO: 119723 - RNA, 19 nt, Artificial Sequence
  Description of Artificial Sequence: Synthetic oligonucleotide
  Antisense strand to SEQ ID NO: 119722
auaccaagcugcaaugagc

SEQ ID NO: 119724 - RNA, 19 nt, Artificial Sequence
  Description of Artificial Sequence: Synthetic oligonucleotide
  Sense strand starting at position 3859 of SEQ ID NO: 1525
agcuauugaggguaguauu

SEQ ID NO: 119725 - RNA, 19 nt, Artificial Sequence
  Description of Artificial Sequence: Synthetic oligonucleotide
  Antisense strand to SEQ ID NO: 119724
aauacuacccucaauagcu

SEQ ID NO: 119726 - RNA, 19 nt, Artificial Sequence
  Description of Artificial Sequence: Synthetic oligonucleotide
  Sense strand starting at position 3871 of SEQ ID NO: 1525
uaguauuacuguuugggag

SEQ ID NO: 119727 - RNA, 19 nt, Artificial Sequence
  Description of Artificial Sequence: Synthetic oligonucleotide
  Antisense strand to SEQ ID NO: 119726
cucccaaacaguaauacua

SEQ ID NO: 119728 - RNA, 19 nt, Artificial Sequence
  Description of Artificial Sequence: Synthetic oligonucleotide
  Sense strand starting at position 63 of SEQ ID NO: 1526
ggcagaacaauagguguaa

SEQ ID NO: 119729 - RNA, 19 nt, Artificial Sequence
  Description of Artificial Sequence: Synthetic oligonucleotide
  Antisense strand to SEQ ID NO: 119728
uuacaccuauuguucugcc

SEQ ID NO: 119730 - RNA, 19 nt, Artificial Sequence
  Description of Artificial Sequence: Synthetic oligonucleotide
  Sense strand starting at position 64 of SEQ ID NO: 1526
gcagaacaauagguguaaa

SEQ ID NO: 119731 - RNA, 19 nt, Artificial Sequence
  Description of Artificial Sequence: Synthetic oligonucleotide
  Antisense strand to SEQ ID NO: 119730
uuuacaccuauuguucugc

SEQ ID NO: 119732 - RNA, 19 nt, Artificial Sequence
  Description of Artificial Sequence: Synthetic oligonucleotide
  Sense strand starting at position 466 of SEQ ID NO: 1526
ggugauaacuuauccuauc

SEQ ID NO: 119733 - RNA, 19 nt, Artificial Sequence
  Description of Artificial Sequence: Synthetic oligonucleotide
  Antisense strand to SEQ ID NO: 119732
gauaggauaaguuaucacc

SEQ ID NO: 119734 - RNA, 19 nt, Artificial Sequence
  Description of Artificial Sequence: Synthetic oligonucleotide
  Sense strand starting at position 571 of SEQ ID NO: 1526
cugugugaaacuggauaau

SEQ ID NO: 119735 - RNA, 19 nt, Artificial Sequence
  Description of Artificial Sequence: Synthetic oligonucleotide
  Antisense strand to SEQ ID NO: 119734
auuauccaguuucacacag

SEQ ID NO: 119736 - RNA, 19 nt, Artificial Sequence
  Description of Artificial Sequence: Synthetic oligonucleotide
  Sense strand starting at position 654 of SEQ ID NO: 1526
cugacugaacauuguggau

SEQ ID NO: 119737 - RNA, 19 nt, Artificial Sequence
  Description of Artificial Sequence: Synthetic oligonucleotide
  Antisense strand to SEQ ID NO: 119736
auccacaauguucagucag

SEQ ID NO: 119738 - RNA, 19 nt, Artificial Sequence
  Description of Artificial Sequence: Synthetic oligonucleotide
  Sense strand starting at position 708 of SEQ ID NO: 1526
auagaaucuuccguuuauu

SEQ ID NO: 119739 - RNA, 19 nt, Artificial Sequence
  Description of Artificial Sequence: Synthetic oligonucleotide
  Antisense strand to SEQ ID NO: 119738
aauaaacggaagauucuau

SEQ ID NO: 119740 - RNA, 19 nt, Artificial Sequence
  Description of Artificial Sequence: Synthetic oligonucleotide
  Sense strand starting at position 839 of SEQ ID NO: 1526
ugcauuuauuuguaaggua

SEQ ID NO: 119741 - RNA, 19 nt, Artificial Sequence
  Description of Artificial Sequence: Synthetic oligonucleotide
  Antisense strand to SEQ ID NO: 119740
uaccuuacaaauaaaugca

SEQ ID NO: 119742 - RNA, 19 nt, Artificial Sequence
  Description of Artificial Sequence: Synthetic oligonucleotide
  Sense strand starting at position 1025 of SEQ ID NO: 1526
auuggaaacuccuuuggca

SEQ ID NO: 119743 - RNA, 19 nt, Artificial Sequence
  Description of Artificial Sequence: Synthetic oligonucleotide
  Antisense strand to SEQ ID NO: 119742
ugccaaaggaguuuccaau

SEQ ID NO: 119744 - RNA, 19 nt, Artificial Sequence
  Description of Artificial Sequence: Synthetic oligonucleotide
  Sense strand starting at position 1027 of SEQ ID NO: 1526
uggaaacuccuuuggcauu

SEQ ID NO: 119745 - RNA, 19 nt, Artificial Sequence
  Description of Artificial Sequence: Synthetic oligonucleotide
  Antisense strand to SEQ ID NO: 119744
aaugccaaaggaguuucca

SEQ ID NO: 119746 - RNA, 19 nt, Artificial Sequence
  Description of Artificial Sequence: Synthetic oligonucleotide
  Sense strand starting at position 1440 of SEQ ID NO: 1526
aaacaaguagagugcuuua

SEQ ID NO: 119747 - RNA, 19 nt, Artificial Sequence
  Description of Artificial Sequence: Synthetic oligonucleotide
  Antisense strand to SEQ ID NO: 119746
uaaagcacucuacuuguuu

SEQ ID NO: 119748 - RNA, 19 nt, Artificial Sequence
  Description of Artificial Sequence: Synthetic oligonucleotide
  Sense strand starting at position 1443 of SEQ ID NO: 1526
caaguagagugcuuuacaa

SEQ ID NO: 119749 - RNA, 19 nt, Artificial Sequence
  Description of Artificial Sequence: Synthetic oligonucleotide
  Antisense strand to SEQ ID NO: 119748
uuguaaagcacucuacuug

SEQ ID NO: 119750 - RNA, 19 nt, Artificial Sequence
  Description of Artificial Sequence: Synthetic oligonucleotide
  Sense strand starting at position 1445 of SEQ ID NO: 1526
aguagagugcuuuacaaau

SEQ ID NO: 119751 - RNA, 19 nt, Artificial Sequence
  Description of Artificial Sequence: Synthetic oligonucleotide
  Antisense strand to SEQ ID NO: 119750
auuuguaaagcacucuacu

SEQ ID NO: 119752 - RNA, 19 nt, Artificial Sequence
  Description of Artificial Sequence: Synthetic oligonucleotide
  Sense strand starting at position 1475 of SEQ ID NO: 1526
gaaagucaucacugagcau

SEQ ID NO: 119753 - RNA, 19 nt, Artificial Sequence
  Description of Artificial Sequence: Synthetic oligonucleotide
  Antisense strand to SEQ ID NO: 119752
augcucagugaugacuuuc

SEQ ID NO: 119754 - RNA, 19 nt, Artificial Sequence
  Description of Artificial Sequence: Synthetic oligonucleotide
  Sense strand starting at position 1588 of SEQ ID NO: 1526
uaggaaucggaguguggaa

SEQ ID NO: 119755 - RNA, 19 nt, Artificial Sequence
  Description of Artificial Sequence: Synthetic oligonucleotide
  Antisense strand to SEQ ID NO: 119754
uuccacacuccgauuccua

SEQ ID NO: 119756 - RNA, 19 nt, Artificial Sequence
  Description of Artificial Sequence: Synthetic oligonucleotide
  Sense strand starting at position 1680 of SEQ ID NO: 1526
aucaaugacugagucuaca

SEQ ID NO: 119757 - RNA, 19 nt, Artificial Sequence
  Description of Artificial Sequence: Synthetic oligonucleotide
  Antisense strand to SEQ ID NO: 119756
uguagacucagucauugau

SEQ ID NO: 119758 - RNA, 19 nt, Artificial Sequence
  Description of Artificial Sequence: Synthetic oligonucleotide
  Sense strand starting at position 1919 of SEQ ID NO: 1526
ugugucucacuagaaauga

SEQ ID NO: 119759 - RNA, 19 nt, Artificial Sequence
  Description of Artificial Sequence: Synthetic oligonucleotide
  Antisense strand to SEQ ID NO: 119758
ucauuucuagugagacaca

SEQ ID NO: 119760 - RNA, 19 nt, Artificial Sequence
  Description of Artificial Sequence: Synthetic oligonucleotide
  Sense strand starting at position 2396 of SEQ ID NO: 1526
uuuggacuuacagguaagu

SEQ ID NO: 119761 - RNA, 19 nt, Artificial Sequence
  Description of Artificial Sequence: Synthetic oligonucleotide
  Antisense strand to SEQ ID NO: 119760
acuuaccuguaaguccaaa

SEQ ID NO: 119762 - RNA, 19 nt, Artificial Sequence
  Description of Artificial Sequence: Synthetic oligonucleotide
  Sense strand starting at position 2558 of SEQ ID NO: 1526
ccucgucuuguguugagua

SEQ ID NO: 119763 - RNA, 19 nt, Artificial Sequence
  Description of Artificial Sequence: Synthetic oligonucleotide
  Antisense strand to SEQ ID NO: 119762
uacucaacacaagacgagg

SEQ ID NO: 119764 - RNA, 19 nt, Artificial Sequence
  Description of Artificial Sequence: Synthetic oligonucleotide
  Sense strand starting at position 2563 of SEQ ID NO: 1526
ucuuguguugaguauuaga

SEQ ID NO: 119765 - RNA, 19 nt, Artificial Sequence
  Description of Artificial Sequence: Synthetic oligonucleotide
  Antisense strand to SEQ ID NO: 119764
ucuaauacucaacacaaga

SEQ ID NO: 119766 - RNA, 19 nt, Artificial Sequence
  Description of Artificial Sequence: Synthetic oligonucleotide
  Sense strand starting at position 2627 of SEQ ID NO: 1526
uuggguguugugaguuauu

SEQ ID NO: 119767 - RNA, 19 nt, Artificial Sequence
  Description of Artificial Sequence: Synthetic oligonucleotide
  Antisense strand to SEQ ID NO: 119766
aauaacucacaacacccaa

SEQ ID NO: 119768 - RNA, 19 nt, Artificial Sequence
  Description of Artificial Sequence: Synthetic oligonucleotide
  Sense strand starting at position 2636 of SEQ ID NO: 1526
gugaguuauuccguauuua

SEQ ID NO: 119769 - RNA, 19 nt, Artificial Sequence
  Description of Artificial Sequence: Synthetic oligonucleotide
  Antisense strand to SEQ ID NO: 119768
uaaauacggaauaacucac

SEQ ID NO: 119770 - RNA, 19 nt, Artificial Sequence
  Description of Artificial Sequence: Synthetic oligonucleotide
  Sense strand starting at position 2640 of SEQ ID NO: 1526
guuauuccguauuuaauga

SEQ ID NO: 119771 - RNA, 19 nt, Artificial Sequence
  Description of Artificial Sequence: Synthetic oligonucleotide
  Antisense strand to SEQ ID NO: 119770
ucauuaaauacggaauaac

SEQ ID NO: 119772 - RNA, 19 nt, Artificial Sequence
  Description of Artificial Sequence: Synthetic oligonucleotide
  Sense strand starting at position 2677 of SEQ ID NO: 1526
caguguuaagcucagggau

SEQ ID NO: 119773 - RNA, 19 nt, Artificial Sequence
  Description of Artificial Sequence: Synthetic oligonucleotide
  Antisense strand to SEQ ID NO: 119772
aucccugagcuuaacacug

SEQ ID NO: 119774 - RNA, 19 nt, Artificial Sequence
  Description of Artificial Sequence: Synthetic oligonucleotide
  Sense strand starting at position 2685 of SEQ ID NO: 1526
agcucagggauccggauau

SEQ ID NO: 119775 - RNA, 19 nt, Artificial Sequence
  Description of Artificial Sequence: Synthetic oligonucleotide
  Antisense strand to SEQ ID NO: 119774
auauccggaucccugagcu

SEQ ID NO: 119776 - RNA, 19 nt, Artificial Sequence
  Description of Artificial Sequence: Synthetic oligonucleotide
  Sense strand starting at position 2721 of SEQ ID NO: 1526
uguugaaggucuuuaagga

SEQ ID NO: 119777 - RNA, 19 nt, Artificial Sequence
  Description of Artificial Sequence: Synthetic oligonucleotide
  Antisense strand to SEQ ID NO: 119776
uccuuaaagaccuucaaca

SEQ ID NO: 119778 - RNA, 19 nt, Artificial Sequence
  Description of Artificial Sequence: Synthetic oligonucleotide
  Sense strand starting at position 2722 of SEQ ID NO: 1526
guugaaggucuuuaaggac

SEQ ID NO: 119779 - RNA, 19 nt, Artificial Sequence
  Description of Artificial Sequence: Synthetic oligonucleotide
  Antisense strand to SEQ ID NO: 119778
guccuuaaagaccuucaac

SEQ ID NO: 119780 - RNA, 19 nt, Artificial Sequence
  Description of Artificial Sequence: Synthetic oligonucleotide
  Sense strand starting at position 2746 of SEQ ID NO: 1526
guuaauaugccugaaacca

SEQ ID NO: 119781 - RNA, 19 nt, Artificial Sequence
  Description of Artificial Sequence: Synthetic oligonucleotide
  Antisense strand to SEQ ID NO: 119780
ugguuucaggcauauuaac

SEQ ID NO: 119782 - RNA, 19 nt, Artificial Sequence
  Description of Artificial Sequence: Synthetic oligonucleotide
  Sense strand starting at position 2830 of SEQ ID NO: 1526
agaagucuuccagguaauc

SEQ ID NO: 119783 - RNA, 19 nt, Artificial Sequence
  Description of Artificial Sequence: Synthetic oligonucleotide
  Antisense strand to SEQ ID NO: 119782
gauuaccuggaagacuucu

SEQ ID NO: 119784 - RNA, 19 nt, Artificial Sequence
  Description of Artificial Sequence: Synthetic oligonucleotide
  Sense strand starting at position 2873 of SEQ ID NO: 1526
auccauguccugugacaau

SEQ ID NO: 119785 - RNA, 19 nt, Artificial Sequence
  Description of Artificial Sequence: Synthetic oligonucleotide
  Antisense strand to SEQ ID NO: 119784
auugucacaggacauggau

SEQ ID NO: 119786 - RNA, 19 nt, Artificial Sequence
  Description of Artificial Sequence: Synthetic oligonucleotide
  Sense strand starting at position 2890 of SEQ ID NO: 1526
aucuguggaccuugagcaa

SEQ ID NO: 119787 - RNA, 19 nt, Artificial Sequence
  Description of Artificial Sequence: Synthetic oligonucleotide
  Antisense strand to SEQ ID NO: 119786
uugcucaagguccacagau

SEQ ID NO: 119788 - RNA, 19 nt, Artificial Sequence
  Description of Artificial Sequence: Synthetic oligonucleotide
  Sense strand starting at position 3052 of SEQ ID NO: 1526
guauauuagcuguugucgu

SEQ ID NO: 119789 - RNA, 19 nt, Artificial Sequence
  Description of Artificial Sequence: Synthetic oligonucleotide
  Antisense strand to SEQ ID NO: 119788
acgacaacagcuaauauac

SEQ ID NO: 119790 - RNA, 19 nt, Artificial Sequence
  Description of Artificial Sequence: Synthetic oligonucleotide
  Sense strand starting at position 3054 of SEQ ID NO: 1526
auauuagcuguugucguua

SEQ ID NO: 119791 - RNA, 19 nt, Artificial Sequence
  Description of Artificial Sequence: Synthetic oligonucleotide
  Antisense strand to SEQ ID NO: 119790
uaacgacaacagcuaauau

SEQ ID NO: 119792 - RNA, 19 nt, Artificial Sequence
  Description of Artificial Sequence: Synthetic oligonucleotide
  Sense strand starting at position 3063 of SEQ ID NO: 1526
guugucguuacuguuauua

SEQ ID NO: 119793 - RNA, 19 nt, Artificial Sequence
  Description of Artificial Sequence: Synthetic oligonucleotide
  Antisense strand to SEQ ID NO: 119792
uaauaacaguaacgacaac

SEQ ID NO: 119794 - RNA, 19 nt, Artificial Sequence
  Description of Artificial Sequence: Synthetic oligonucleotide
  Sense strand starting at position 3114 of SEQ ID NO: 1526
gauguauauuuaggagaac

SEQ ID NO: 119795 - RNA, 19 nt, Artificial Sequence
  Description of Artificial Sequence: Synthetic oligonucleotide
  Antisense strand to SEQ ID NO: 119794
guucuccuaaauauacauc

SEQ ID NO: 119796 - RNA, 19 nt, Artificial Sequence
  Description of Artificial Sequence: Synthetic oligonucleotide
  Sense strand starting at position 3162 of SEQ ID NO: 1526
ggaagagcuuagcccuaau

SEQ ID NO: 119797 - RNA, 19 nt, Artificial Sequence
  Description of Artificial Sequence: Synthetic oligonucleotide
  Antisense strand to SEQ ID NO: 119796
auuagggcuaagcucuucc

SEQ ID NO: 119798 - RNA, 19 nt, Artificial Sequence
  Description of Artificial Sequence: Synthetic oligonucleotide
  Sense strand starting at position 3165 of SEQ ID NO: 1526
agagcuuagcccuaauaug

SEQ ID NO: 119799 - RNA, 19 nt, Artificial Sequence
  Description of Artificial Sequence: Synthetic oligonucleotide
  Antisense strand to SEQ ID NO: 119798
cauauuagggcuaagcucu

SEQ ID NO: 119800 - RNA, 19 nt, Artificial Sequence
  Description of Artificial Sequence: Synthetic oligonucleotide
  Sense strand starting at position 3419 of SEQ ID NO: 1526
agaauugggcuuugguuaa

SEQ ID NO: 119801 - RNA, 19 nt, Artificial Sequence
  Description of Artificial Sequence: Synthetic oligonucleotide
  Antisense strand to SEQ ID NO: 119800
uuaaccaaagcccaauucu

SEQ ID NO: 119802 - RNA, 19 nt, Artificial Sequence
  Description of Artificial Sequence: Synthetic oligonucleotide
  Sense strand starting at position 3454 of SEQ ID NO: 1526
guaucucauuucuagagag

SEQ ID NO: 119803 - RNA, 19 nt, Artificial Sequence
  Description of Artificial Sequence: Synthetic oligonucleotide
  Antisense strand to SEQ ID NO: 119802
cucucuagaaaugagauac

SEQ ID NO: 119804 - RNA, 19 nt, Artificial Sequence
  Description of Artificial Sequence: Synthetic oligonucleotide
  Sense strand starting at position 3497 of SEQ ID NO: 1526
agcccuugaguuuguauuu

SEQ ID NO: 119805 - RNA, 19 nt, Artificial Sequence
  Description of Artificial Sequence: Synthetic oligonucleotide
  Antisense strand to SEQ ID NO: 119804
aaauacaaacucaagggcu

SEQ ID NO: 119806 - RNA, 19 nt, Artificial Sequence
  Description of Artificial Sequence: Synthetic oligonucleotide
  Sense strand starting at position 3934 of SEQ ID NO: 1526
aagugagugccugauaugu

SEQ ID NO: 119807 - RNA, 19 nt, Artificial Sequence
  Description of Artificial Sequence: Synthetic oligonucleotide
  Antisense strand to SEQ ID NO: 119806
acauaucaggcacucacuu

SEQ ID NO: 119808 - RNA, 19 nt, Artificial Sequence
  Description of Artificial Sequence: Synthetic oligonucleotide
  Sense strand starting at position 3924 of SEQ ID NO: 1528
gcucaaagcuuaguacuua

SEQ ID NO: 119809 - RNA, 19 nt, Artificial Sequence
  Description of Artificial Sequence: Synthetic oligonucleotide
  Antisense strand to SEQ ID NO: 119808
uaaguacuaagcuuugagc

SEQ ID NO: 119810 - RNA, 19 nt, Artificial Sequence
  Description of Artificial Sequence: Synthetic oligonucleotide
  Sense strand starting at position 3902 of SEQ ID NO: 1528
uucuacuucuaguugagga

SEQ ID NO: 119811 - RNA, 19 nt, Artificial Sequence
  Description of Artificial Sequence: Synthetic oligonucleotide
  Antisense strand to SEQ ID NO: 119810
uccucaacuagaaguagaa

SEQ ID NO: 119812 - RNA, 19 nt, Artificial Sequence
  Description of Artificial Sequence: Synthetic oligonucleotide
  Sense strand starting at position 3896 of SEQ ID NO: 1528
cggaguuucuacuucuagu

SEQ ID NO: 119813 - RNA, 19 nt, Artificial Sequence
  Description of Artificial Sequence: Synthetic oligonucleotide
  Antisense strand to SEQ ID NO: 119812
acuagaaguagaaacuccg

SEQ ID NO: 119814 - RNA, 19 nt, Artificial Sequence
  Description of Artificial Sequence: Synthetic oligonucleotide
  Sense strand starting at position 3546 of SEQ ID NO: 1528
ucaguaguuagaugguaua

SEQ ID NO: 119815 - RNA, 19 nt, Artificial Sequence
  Description of Artificial Sequence: Synthetic oligonucleotide
  Antisense strand to SEQ ID NO: 119814
uauaccaucuaacuacuga

SEQ ID NO: 119816 - RNA, 19 nt, Artificial Sequence
  Description of Artificial Sequence: Synthetic oligonucleotide
  Sense strand starting at position 3541 of SEQ ID NO: 1528
guggaucaguaguuagaug

SEQ ID NO: 119817 - RNA, 19 nt, Artificial Sequence
  Description of Artificial Sequence: Synthetic oligonucleotide
  Antisense strand to SEQ ID NO: 119816
caucuaacuacugauccac

SEQ ID NO: 119818 - RNA, 19 nt, Artificial Sequence
  Description of Artificial Sequence: Synthetic oligonucleotide
  Sense strand starting at position 3537 of SEQ ID NO: 1528
gccaguggaucaguaguua

SEQ ID NO: 119819 - RNA, 19 nt, Artificial Sequence
  Description of Artificial Sequence: Synthetic oligonucleotide
  Antisense strand to SEQ ID NO: 119818
uaacuacugauccacuggc

SEQ ID NO: 119820 - RNA, 19 nt, Artificial Sequence
  Description of Artificial Sequence: Synthetic oligonucleotide
  Sense strand starting at position 3280 of SEQ ID NO: 1528
agaauauuacuuugcugau

SEQ ID NO: 119821 - RNA, 19 nt, Artificial Sequence
  Description of Artificial Sequence: Synthetic oligonucleotide
  Antisense strand to SEQ ID NO: 119820
aucagcaaaguaauauucu

SEQ ID NO: 119822 - RNA, 19 nt, Artificial Sequence
  Description of Artificial Sequence: Synthetic oligonucleotide
  Sense strand starting at position 3116 of SEQ ID NO: 1528
aaacuuagauauggaggau

SEQ ID NO: 119823 - RNA, 19 nt, Artificial Sequence
  Description of Artificial Sequence: Synthetic oligonucleotide
  Antisense strand to SEQ ID NO: 119822
auccuccauaucuaaguuu

SEQ ID NO: 119824 - RNA, 19 nt, Artificial Sequence
  Description of Artificial Sequence: Synthetic oligonucleotide
  Sense strand starting at position 2957 of SEQ ID NO: 1528
aaauucuguggugaaagca

SEQ ID NO: 119825 - RNA, 19 nt, Artificial Sequence
  Description of Artificial Sequence: Synthetic oligonucleotide
  Antisense strand to SEQ ID NO: 119824
ugcuuucaccacagaauuu

SEQ ID NO: 119826 - RNA, 19 nt, Artificial Sequence
  Description of Artificial Sequence: Synthetic oligonucleotide
  Sense strand starting at position 2953 of SEQ ID NO: 1528
gcuuaaauucuguggugaa

SEQ ID NO: 119827 - RNA, 19 nt, Artificial Sequence
  Description of Artificial Sequence: Synthetic oligonucleotide
  Antisense strand to SEQ ID NO: 119826
uucaccacagaauuuaagc

SEQ ID NO: 119828 - RNA, 19 nt, Artificial Sequence
  Description of Artificial Sequence: Synthetic oligonucleotide
  Sense strand starting at position 2952 of SEQ ID NO: 1528
agcuuaaauucugugguga

SEQ ID NO: 119829 - RNA, 19 nt, Artificial Sequence
  Description of Artificial Sequence: Synthetic oligonucleotide
  Antisense strand to SEQ ID NO: 119828
ucaccacagaauuuaagcu

SEQ ID NO: 119830 - RNA, 19 nt, Artificial Sequence
  Description of Artificial Sequence: Synthetic oligonucleotide
  Sense strand starting at position 2910 of SEQ ID NO: 1528
guuggagguccugggaaua

SEQ ID NO: 119831 - RNA, 19 nt, Artificial Sequence
  Description of Artificial Sequence: Synthetic oligonucleotide
  Antisense strand to SEQ ID NO: 119830
uauucccaggaccuccaac

SEQ ID NO: 119832 - RNA, 19 nt, Artificial Sequence
  Description of Artificial Sequence: Synthetic oligonucleotide
  Sense strand starting at position 2755 of SEQ ID NO: 1528
cuagcugaggcacaagaau

SEQ ID NO: 119833 - RNA, 19 nt, Artificial Sequence
  Description of Artificial Sequence: Synthetic oligonucleotide
  Antisense strand to SEQ ID NO: 119832
auucuugugccucagcuag

SEQ ID NO: 119834 - RNA, 19 nt, Artificial Sequence
  Description of Artificial Sequence: Synthetic oligonucleotide
  Sense strand starting at position 2459 of SEQ ID NO: 1528
uggcaucuugagggaucaa

SEQ ID NO: 119835 - RNA, 19 nt, Artificial Sequence
  Description of Artificial Sequence: Synthetic oligonucleotide
  Antisense strand to SEQ ID NO: 119834
uugaucccucaagaugcca

SEQ ID NO: 119836 - RNA, 19 nt, Artificial Sequence
  Description of Artificial Sequence: Synthetic oligonucleotide
  Sense strand starting at position 2258 of SEQ ID NO: 1528
ucauaaaugcuauggagaa

SEQ ID NO: 119837 - RNA, 19 nt, Artificial Sequence
  Description of Artificial Sequence: Synthetic oligonucleotide
  Antisense strand to SEQ ID NO: 119836
uucuccauagcauuuauga

SEQ ID NO: 119838 - RNA, 19 nt, Artificial Sequence
  Description of Artificial Sequence: Synthetic oligonucleotide
  Sense strand starting at position 2164 of SEQ ID NO: 1528
ggcauucuucuagacauug

SEQ ID NO: 119839 - RNA, 19 nt, Artificial Sequence
  Description of Artificial Sequence: Synthetic oligonucleotide
  Antisense strand to SEQ ID NO: 119838
caaugucuagaagaaugcc

SEQ ID NO: 119840 - RNA, 19 nt, Artificial Sequence
  Description of Artificial Sequence: Synthetic oligonucleotide
  Sense strand starting at position 2002 of SEQ ID NO: 1528
cugucaugggauuagagua

SEQ ID NO: 119841 - RNA, 19 nt, Artificial Sequence
  Description of Artificial Sequence: Synthetic oligonucleotide
  Antisense strand to SEQ ID NO: 119840
uacucuaaucccaugacag

SEQ ID NO: 119842 - RNA, 19 nt, Artificial Sequence
  Description of Artificial Sequence: Synthetic oligonucleotide
  Sense strand starting at position 1644 of SEQ ID NO: 1528
aaggacucaccguguagua

SEQ ID NO: 119843 - RNA, 19 nt, Artificial Sequence
  Description of Artificial Sequence: Synthetic oligonucleotide
  Antisense strand to SEQ ID NO: 119842
uacuacacggugaguccuu

SEQ ID NO: 119844 - RNA, 19 nt, Artificial Sequence
  Description of Artificial Sequence: Synthetic oligonucleotide
  Sense strand starting at position 1490 of SEQ ID NO: 1528
uuggcuauccgagacguaa

SEQ ID NO: 119845 - RNA, 19 nt, Artificial Sequence
  Description of Artificial Sequence: Synthetic oligonucleotide
  Antisense strand to SEQ ID NO: 119844
uuacgucucggauagccaa

SEQ ID NO: 119846 - RNA, 19 nt, Artificial Sequence
  Description of Artificial Sequence: Synthetic oligonucleotide
  Sense strand starting at position 1442 of SEQ ID NO: 1528
acagcuaguuucuauuuau

SEQ ID NO: 119847 - RNA, 19 nt, Artificial Sequence
  Description of Artificial Sequence: Synthetic oligonucleotide
  Antisense strand to SEQ ID NO: 119846
auaaauagaaacuagcugu

SEQ ID NO: 119848 - RNA, 19 nt, Artificial Sequence
  Description of Artificial Sequence: Synthetic oligonucleotide
  Sense strand starting at position 1438 of SEQ ID NO: 1528
ucagacagcuaguuucuau

SEQ ID NO: 119849 - RNA, 19 nt, Artificial Sequence
  Description of Artificial Sequence: Synthetic oligonucleotide
  Antisense strand to SEQ ID NO: 119848
auagaaacuagcugucuga

SEQ ID NO: 119850 - RNA, 19 nt, Artificial Sequence
  Description of Artificial Sequence: Synthetic oligonucleotide
  Sense strand starting at position 1276 of SEQ ID NO: 1528
guguaaaguccaugacaac

SEQ ID NO: 119851 - RNA, 19 nt, Artificial Sequence
  Description of Artificial Sequence: Synthetic oligonucleotide
  Antisense strand to SEQ ID NO: 119850
guugucauggacuuuacac

SEQ ID NO: 119852 - RNA, 19 nt, Artificial Sequence
  Description of Artificial Sequence: Synthetic oligonucleotide
  Sense strand starting at position 1274 of SEQ ID NO: 1528
caguguaaaguccaugaca

SEQ ID NO: 119853 - RNA, 19 nt, Artificial Sequence
  Description of Artificial Sequence: Synthetic oligonucleotide
  Antisense strand to SEQ ID NO: 119852
ugucauggacuuuacacug

SEQ ID NO: 119854 - RNA, 19 nt, Artificial Sequence
  Description of Artificial Sequence: Synthetic oligonucleotide
  Sense strand starting at position 1191 of SEQ ID NO: 1528
uggccacuccuccgaggaa

SEQ ID NO: 119855 - RNA, 19 nt, Artificial Sequence
  Description of Artificial Sequence: Synthetic oligonucleotide
  Antisense strand to SEQ ID NO: 119854
uuccucggaggaguggcca

SEQ ID NO: 119856 - RNA, 19 nt, Artificial Sequence
  Description of Artificial Sequence: Synthetic oligonucleotide
  Sense strand starting at position 1089 of SEQ ID NO: 1528
gcgucccuugaaugagaca

SEQ ID NO: 119857 - RNA, 19 nt, Artificial Sequence
  Description of Artificial Sequence: Synthetic oligonucleotide
  Antisense strand to SEQ ID NO: 119856
ugucucauucaagggacgc

SEQ ID NO: 119858 - RNA, 19 nt, Artificial Sequence
  Description of Artificial Sequence: Synthetic oligonucleotide
  Sense strand starting at position 1085 of SEQ ID NO: 1528
gggugcgucccuugaauga

SEQ ID NO: 119859 - RNA, 19 nt, Artificial Sequence
  Description of Artificial Sequence: Synthetic oligonucleotide
  Antisense strand to SEQ ID NO: 119858
ucauucaagggacgcaccc

SEQ ID NO: 119860 - RNA, 19 nt, Artificial Sequence
  Description of Artificial Sequence: Synthetic oligonucleotide
  Sense strand starting at position 1063 of SEQ ID NO: 1528
gcucgccucccgcuaaaua

SEQ ID NO: 119861 - RNA, 19 nt, Artificial Sequence
  Description of Artificial Sequence: Synthetic oligonucleotide
  Antisense strand to SEQ ID NO: 119860
uauuuagcgggaggcgagc

SEQ ID NO: 119862 - RNA, 19 nt, Artificial Sequence
  Description of Artificial Sequence: Synthetic oligonucleotide
  Sense strand starting at position 1025 of SEQ ID NO: 1528
ggaaauccuuggcucucaa

SEQ ID NO: 119863 - RNA, 19 nt, Artificial Sequence
  Description of Artificial Sequence: Synthetic oligonucleotide
  Antisense strand to SEQ ID NO: 119862
uugagagccaaggauuucc

SEQ ID NO: 119864 - RNA, 19 nt, Artificial Sequence
  Description of Artificial Sequence: Synthetic oligonucleotide
  Sense strand starting at position 1024 of SEQ ID NO: 1528
aggaaauccuuggcucuca

SEQ ID NO: 119865 - RNA, 19 nt, Artificial Sequence
  Description of Artificial Sequence: Synthetic oligonucleotide
  Antisense strand to SEQ ID NO: 119864
ugagagccaaggauuuccu

SEQ ID NO: 119866 - RNA, 19 nt, Artificial Sequence
  Description of Artificial Sequence: Synthetic oligonucleotide
  Sense strand starting at position 1022 of SEQ ID NO: 1528
guaggaaauccuuggcucu

SEQ ID NO: 119867 - RNA, 19 nt, Artificial Sequence
  Description of Artificial Sequence: Synthetic oligonucleotide
  Antisense strand to SEQ ID NO: 119866
agagccaaggauuuccuac

SEQ ID NO: 119868 - RNA, 19 nt, Artificial Sequence
  Description of Artificial Sequence: Synthetic oligonucleotide
  Sense strand starting at position 1011 of SEQ ID NO: 1528
gagucucgcguguaggaaa

SEQ ID NO: 119869 - RNA, 19 nt, Artificial Sequence
  Description of Artificial Sequence: Synthetic oligonucleotide
  Antisense strand to SEQ ID NO: 119868
uuuccuacacgcgagacuc

SEQ ID NO: 119870 - RNA, 19 nt, Artificial Sequence
  Description of Artificial Sequence: Synthetic oligonucleotide
  Sense strand starting at position 994 of SEQ ID NO: 1528
ucucucuucgcugacaaga

SEQ ID NO: 119871 - RNA, 19 nt, Artificial Sequence
  Description of Artificial Sequence: Synthetic oligonucleotide
  Antisense strand to SEQ ID NO: 119870
ucuugucagcgaagagaga

SEQ ID NO: 119872 - RNA, 19 nt, Artificial Sequence
  Description of Artificial Sequence: Synthetic oligonucleotide
  Sense strand starting at position 993 of SEQ ID NO: 1528
gucucucuucgcugacaag

SEQ ID NO: 119873 - RNA, 19 nt, Artificial Sequence
  Description of Artificial Sequence: Synthetic oligonucleotide
  Antisense strand to SEQ ID NO: 119872
cuugucagcgaagagagac

SEQ ID NO: 119874 - RNA, 19 nt, Artificial Sequence
  Description of Artificial Sequence: Synthetic oligonucleotide
  Sense strand starting at position 992 of SEQ ID NO: 1528
ugucucucuucgcugacaa

SEQ ID NO: 119875 - RNA, 19 nt, Artificial Sequence
  Description of Artificial Sequence: Synthetic oligonucleotide
  Antisense strand to SEQ ID NO: 119874
uugucagcgaagagagaca

SEQ ID NO: 119876 - RNA, 19 nt, Artificial Sequence
  Description of Artificial Sequence: Synthetic oligonucleotide
  Sense strand starting at position 464 of SEQ ID NO: 1528
guaccuuucuaaguaaguu

SEQ ID NO: 119877 - RNA, 19 nt, Artificial Sequence
  Description of Artificial Sequence: Synthetic oligonucleotide
  Antisense strand to SEQ ID NO: 119876
aacuuacuuagaaagguac

SEQ ID NO: 119878 - RNA, 19 nt, Artificial Sequence
  Description of Artificial Sequence: Synthetic oligonucleotide
  Sense strand starting at position 429 of SEQ ID NO: 1528
aucggcuaucgucaacuau

SEQ ID NO: 119879 - RNA, 19 nt, Artificial Sequence
  Description of Artificial Sequence: Synthetic oligonucleotide
  Antisense strand to SEQ ID NO: 119878
auaguugacgauagccgau

SEQ ID NO: 119880 - RNA, 19 nt, Artificial Sequence
  Description of Artificial Sequence: Synthetic oligonucleotide
  Sense strand starting at position 148 of SEQ ID NO: 1528
aguuauuaggagugaaaug

SEQ ID NO: 119881 - RNA, 19 nt, Artificial Sequence
  Description of Artificial Sequence: Synthetic oligonucleotide
  Antisense strand to SEQ ID NO: 119880
cauuucacuccuaauaacu

SEQ ID NO: 119882 - RNA, 19 nt, Artificial Sequence
  Description of Artificial Sequence: Synthetic oligonucleotide
  Sense strand starting at position 58 of SEQ ID NO: 1528
uugagcaaauugcuuuaaa

SEQ ID NO: 119883 - RNA, 19 nt, Artificial Sequence
  Description of Artificial Sequence: Synthetic oligonucleotide
  Antisense strand to SEQ ID NO: 119882
uuuaaagcaauuugcucaa

SEQ ID NO: 119884 - RNA, 19 nt, Artificial Sequence
  Description of Artificial Sequence: Synthetic oligonucleotide
  Sense strand starting at position 50 of SEQ ID NO: 1528
augugauguugagcaaauu

SEQ ID NO: 119885 - RNA, 19 nt, Artificial Sequence
  Description of Artificial Sequence: Synthetic oligonucleotide
  Antisense strand to SEQ ID NO: 119884
aauuugcucaacaucacau

SEQ ID NO: 119886 - RNA, 19 nt, Artificial Sequence
  Description of Artificial Sequence: Synthetic oligonucleotide
  Sense strand starting at position 39 of SEQ ID NO: 1528
cacuuagugcuaugugaug

SEQ ID NO: 119887 - RNA, 19 nt, Artificial Sequence
  Description of Artificial Sequence: Synthetic oligonucleotide
  Antisense strand to SEQ ID NO: 119886
caucacauagcacuaagug

SEQ ID NO: 119888 - RNA, 19 nt, Artificial Sequence
  Description of Artificial Sequence: Synthetic oligonucleotide
  Sense strand starting at position 3978 of SEQ ID NO: 1527
gagacaaagucucacaggu

SEQ ID NO: 119889 - RNA, 19 nt, Artificial Sequence
  Description of Artificial Sequence: Synthetic oligonucleotide
  Antisense strand to SEQ ID NO: 119888
accugugagacuuugucuc

SEQ ID NO: 119890 - RNA, 19 nt, Artificial Sequence
  Description of Artificial Sequence: Synthetic oligonucleotide
  Sense strand starting at position 3905 of SEQ ID NO: 1527
guaacucuccuuuguagaa

SEQ ID NO: 119891 - RNA, 19 nt, Artificial Sequence
  Description of Artificial Sequence: Synthetic oligonucleotide
  Antisense strand to SEQ ID NO: 119890
uucuacaaaggagaguuac

SEQ ID NO: 119892 - RNA, 19 nt, Artificial Sequence
  Description of Artificial Sequence: Synthetic oligonucleotide
  Sense strand starting at position 3901 of SEQ ID NO: 1527
ccauguaacucuccuuugu

SEQ ID NO: 119893 - RNA, 19 nt, Artificial Sequence
  Description of Artificial Sequence: Synthetic oligonucleotide
  Antisense strand to SEQ ID NO: 119892
acaaaggagaguuacaugg

SEQ ID NO: 119894 - RNA, 19 nt, Artificial Sequence
  Description of Artificial Sequence: Synthetic oligonucleotide
  Sense strand starting at position 3892 of SEQ ID NO: 1527
cgucauagcccauguaacu

SEQ ID NO: 119895 - RNA, 19 nt, Artificial Sequence
  Description of Artificial Sequence: Synthetic oligonucleotide
  Antisense strand to SEQ ID NO: 119894
aguuacaugggcuaugacg

SEQ ID NO: 119896 - RNA, 19 nt, Artificial Sequence
  Description of Artificial Sequence: Synthetic oligonucleotide
  Sense strand starting at position 3890 of SEQ ID NO: 1527
aucgucauagcccauguaa

SEQ ID NO: 119897 - RNA, 19 nt, Artificial Sequence
  Description of Artificial Sequence: Synthetic oligonucleotide
  Antisense strand to SEQ ID NO: 119896
uuacaugggcuaugacgau

SEQ ID NO: 119898 - RNA, 19 nt, Artificial Sequence
  Description of Artificial Sequence: Synthetic oligonucleotide
  Sense strand starting at position 3880 of SEQ ID NO: 1527
gcuaucuuacaucgucaua

SEQ ID NO: 119899 - RNA, 19 nt, Artificial Sequence
  Description of Artificial Sequence: Synthetic oligonucleotide
  Antisense strand to SEQ ID NO: 119898
uaugacgauguaagauagc

SEQ ID NO: 119900 - RNA, 19 nt, Artificial Sequence
  Description of Artificial Sequence: Synthetic oligonucleotide
  Sense strand starting at position 3873 of SEQ ID NO: 1527
aguucuugcuaucuuacau

SEQ ID NO: 119901 - RNA, 19 nt, Artificial Sequence
  Description of Artificial Sequence: Synthetic oligonucleotide
  Antisense strand to SEQ ID NO: 119900
auguaagauagcaagaacu

SEQ ID NO: 119902 - RNA, 19 nt, Artificial Sequence
  Description of Artificial Sequence: Synthetic oligonucleotide
  Sense strand starting at position 3609 of SEQ ID NO: 1527
uugugcuuaggauacaauu

SEQ ID NO: 119903 - RNA, 19 nt, Artificial Sequence
  Description of Artificial Sequence: Synthetic oligonucleotide
  Antisense strand to SEQ ID NO: 119902
aauuguauccuaagcacaa

SEQ ID NO: 119904 - RNA, 19 nt, Artificial Sequence
  Description of Artificial Sequence: Synthetic oligonucleotide
  Sense strand starting at position 3607 of SEQ ID NO: 1527
aguugugcuuaggauacaa

SEQ ID NO: 119905 - RNA, 19 nt, Artificial Sequence
  Description of Artificial Sequence: Synthetic oligonucleotide
  Antisense strand to SEQ ID NO: 119904
uuguauccuaagcacaacu

SEQ ID NO: 119906 - RNA, 19 nt, Artificial Sequence
  Description of Artificial Sequence: Synthetic oligonucleotide
  Sense strand starting at position 3604 of SEQ ID NO: 1527
cugaguugugcuuaggaua

SEQ ID NO: 119907 - RNA, 19 nt, Artificial Sequence
  Description of Artificial Sequence: Synthetic oligonucleotide
  Antisense strand to SEQ ID NO: 119906
uauccuaagcacaacucag

SEQ ID NO: 119908 - RNA, 19 nt, Artificial Sequence
  Description of Artificial Sequence: Synthetic oligonucleotide
  Sense strand starting at position 3593 of SEQ ID NO: 1527
acugcuuuccacugaguug

SEQ ID NO: 119909 - RNA, 19 nt, Artificial Sequence
  Description of Artificial Sequence: Synthetic oligonucleotide
  Antisense strand to SEQ ID NO: 119908
caacucaguggaaagcagu

SEQ ID NO: 119910 - RNA, 19 nt, Artificial Sequence
  Description of Artificial Sequence: Synthetic oligonucleotide
  Sense strand starting at position 3450 of SEQ ID NO: 1527
ccuggccuguuggaauaau

SEQ ID NO: 119911 - RNA, 19 nt, Artificial Sequence
  Description of Artificial Sequence: Synthetic oligonucleotide
  Antisense strand to SEQ ID NO: 119910
auuauuccaacaggccagg

SEQ ID NO: 119912 - RNA, 19 nt, Artificial Sequence
  Description of Artificial Sequence: Synthetic oligonucleotide
  Sense strand starting at position 3173 of SEQ ID NO: 1527
guuuguuguauguaaauca

SEQ ID NO: 119913 - RNA, 19 nt, Artificial Sequence
  Description of Artificial Sequence: Synthetic oligonucleotide
  Antisense strand to SEQ ID NO: 119912
ugauuuacauacaacaaac

SEQ ID NO: 119914 - RNA, 19 nt, Artificial Sequence
  Description of Artificial Sequence: Synthetic oligonucleotide
  Sense strand starting at position 3147 of SEQ ID NO: 1527
uggacucaguguuaaagau

SEQ ID NO: 119915 - RNA, 19 nt, Artificial Sequence
  Description of Artificial Sequence: Synthetic oligonucleotide
  Antisense strand to SEQ ID NO: 119914
aucuuuaacacugagucca

SEQ ID NO: 119916 - RNA, 19 nt, Artificial Sequence
  Description of Artificial Sequence: Synthetic oligonucleotide
  Sense strand starting at position 3118 of SEQ ID NO: 1527
augcuugcugaauaaauau

SEQ ID NO: 119917 - RNA, 19 nt, Artificial Sequence
  Description of Artificial Sequence: Synthetic oligonucleotide
  Antisense strand to SEQ ID NO: 119916
auauuuauucagcaagcau

SEQ ID NO: 119918 - RNA, 19 nt, Artificial Sequence
  Description of Artificial Sequence: Synthetic oligonucleotide
  Sense strand starting at position 3113 of SEQ ID NO: 1527
gugcaaugcuugcugaaua

SEQ ID NO: 119919 - RNA, 19 nt, Artificial Sequence
  Description of Artificial Sequence: Synthetic oligonucleotide
  Antisense strand to SEQ ID NO: 119918
uauucagcaagcauugcac

SEQ ID NO: 119920 - RNA, 19 nt, Artificial Sequence
  Description of Artificial Sequence: Synthetic oligonucleotide
  Sense strand starting at position 3111 of SEQ ID NO: 1527
aggugcaaugcuugcugaa

SEQ ID NO: 119921 - RNA, 19 nt, Artificial Sequence
  Description of Artificial Sequence: Synthetic oligonucleotide
  Antisense strand to SEQ ID NO: 119920
uucagcaagcauugcaccu

SEQ ID NO: 119922 - RNA, 19 nt, Artificial Sequence
  Description of Artificial Sequence: Synthetic oligonucleotide
  Sense strand starting at position 2887 of SEQ ID NO: 1527
ucaggacucuacuaaacgu

SEQ ID NO: 119923 - RNA, 19 nt, Artificial Sequence
  Description of Artificial Sequence: Synthetic oligonucleotide
  Antisense strand to SEQ ID NO: 119922
acguuuaguagaguccuga

SEQ ID NO: 119924 - RNA, 19 nt, Artificial Sequence
  Description of Artificial Sequence: Synthetic oligonucleotide
  Sense strand starting at position 2856 of SEQ ID NO: 1527
augguuagguaucuuccua

SEQ ID NO: 119925 - RNA, 19 nt, Artificial Sequence
  Description of Artificial Sequence: Synthetic oligonucleotide
  Antisense strand to SEQ ID NO: 119924
uaggaagauaccuaaccau

SEQ ID NO: 119926 - RNA, 19 nt, Artificial Sequence
  Description of Artificial Sequence: Synthetic oligonucleotide
  Sense strand starting at position 2805 of SEQ ID NO: 1527
acuuauugaucuggaggac

SEQ ID NO: 119927 - RNA, 19 nt, Artificial Sequence
  Description of Artificial Sequence: Synthetic oligonucleotide
  Antisense strand to SEQ ID NO: 119926
guccuccagaucaauaagu

SEQ ID NO: 119928 - RNA, 19 nt, Artificial Sequence
  Description of Artificial Sequence: Synthetic oligonucleotide
  Sense strand starting at position 2799 of SEQ ID NO: 1527
ugauuaacuuauugaucug

SEQ ID NO: 119929 - RNA, 19 nt, Artificial Sequence
  Description of Artificial Sequence: Synthetic oligonucleotide
  Antisense strand to SEQ ID NO: 119928
cagaucaauaaguuaauca

SEQ ID NO: 119930 - RNA, 19 nt, Artificial Sequence
  Description of Artificial Sequence: Synthetic oligonucleotide
  Sense strand starting at position 2798 of SEQ ID NO: 1527
gugauuaacuuauugaucu

SEQ ID NO: 119931 - RNA, 19 nt, Artificial Sequence
  Description of Artificial Sequence: Synthetic oligonucleotide
  Antisense strand to SEQ ID NO: 119930
agaucaauaaguuaaucac

SEQ ID NO: 119932 - RNA, 19 nt, Artificial Sequence
  Description of Artificial Sequence: Synthetic oligonucleotide
  Sense strand starting at position 2712 of SEQ ID NO: 1527
gcgcaaacugcagauuaua

SEQ ID NO: 119933 - RNA, 19 nt, Artificial Sequence
  Description of Artificial Sequence: Synthetic oligonucleotide
  Antisense strand to SEQ ID NO: 119932
uauaaucugcaguuugcgc

SEQ ID NO: 119934 - RNA, 19 nt, Artificial Sequence
  Description of Artificial Sequence: Synthetic oligonucleotide
  Sense strand starting at position 2671 of SEQ ID NO: 1527
gaauguagguggcuuguaa

SEQ ID NO: 119935 - RNA, 19 nt, Artificial Sequence
  Description of Artificial Sequence: Synthetic oligonucleotide
  Antisense strand to SEQ ID NO: 119934
uuacaagccaccuacauuc

SEQ ID NO: 119936 - RNA, 19 nt, Artificial Sequence
  Description of Artificial Sequence: Synthetic oligonucleotide
  Sense strand starting at position 2655 of SEQ ID NO: 1527
gccacagcuccauaaggaa

SEQ ID NO: 119937 - RNA, 19 nt, Artificial Sequence
  Description of Artificial Sequence: Synthetic oligonucleotide
  Antisense strand to SEQ ID NO: 119936
uuccuuauggagcuguggc

SEQ ID NO: 119938 - RNA, 19 nt, Artificial Sequence
  Description of Artificial Sequence: Synthetic oligonucleotide
  Sense strand starting at position 2619 of SEQ ID NO: 1527
uauuaauccggugagacau

SEQ ID NO: 119939 - RNA, 19 nt, Artificial Sequence
  Description of Artificial Sequence: Synthetic oligonucleotide
  Antisense strand to SEQ ID NO: 119938
augucucaccggauuaaua

SEQ ID NO: 119940 - RNA, 19 nt, Artificial Sequence
  Description of Artificial Sequence: Synthetic oligonucleotide
  Sense strand starting at position 2618 of SEQ ID NO: 1527
uuauuaauccggugagaca

SEQ ID NO: 119941 - RNA, 19 nt, Artificial Sequence
  Description of Artificial Sequence: Synthetic oligonucleotide
  Antisense strand to SEQ ID NO: 119940
ugucucaccggauuaauaa

SEQ ID NO: 119942 - RNA, 19 nt, Artificial Sequence
  Description of Artificial Sequence: Synthetic oligonucleotide
  Sense strand starting at position 2598 of SEQ ID NO: 1527
aagcgugagcgccuauauu

SEQ ID NO: 119943 - RNA, 19 nt, Artificial Sequence
  Description of Artificial Sequence: Synthetic oligonucleotide
  Antisense strand to SEQ ID NO: 119942
aauauaggcgcucacgcuu

SEQ ID NO: 119944 - RNA, 19 nt, Artificial Sequence
  Description of Artificial Sequence: Synthetic oligonucleotide
  Sense strand starting at position 2578 of SEQ ID NO: 1527
gauacuauaucgguaaaca

SEQ ID NO: 119945 - RNA, 19 nt, Artificial Sequence
  Description of Artificial Sequence: Synthetic oligonucleotide
  Antisense strand to SEQ ID NO: 119944
uguuuaccgauauaguauc

SEQ ID NO: 119946 - RNA, 19 nt, Artificial Sequence
  Description of Artificial Sequence: Synthetic oligonucleotide
  Sense strand starting at position 2576 of SEQ ID NO: 1527
gagauacuauaucgguaaa

SEQ ID NO: 119947 - RNA, 19 nt, Artificial Sequence
  Description of Artificial Sequence: Synthetic oligonucleotide
  Antisense strand to SEQ ID NO: 119946
uuuaccgauauaguaucuc

SEQ ID NO: 119948 - RNA, 19 nt, Artificial Sequence
  Description of Artificial Sequence: Synthetic oligonucleotide
  Sense strand starting at position 2522 of SEQ ID NO: 1527
ugcuuacuuccggaaaguu

SEQ ID NO: 119949 - RNA, 19 nt, Artificial Sequence
  Description of Artificial Sequence: Synthetic oligonucleotide
  Antisense strand to SEQ ID NO: 119948
aacuuuccggaaguaagca

SEQ ID NO: 119950 - RNA, 19 nt, Artificial Sequence
  Description of Artificial Sequence: Synthetic oligonucleotide
  Sense strand starting at position 2086 of SEQ ID NO: 1527
ggcgauuggccauggguca

SEQ ID NO: 119951 - RNA, 19 nt, Artificial Sequence
  Description of Artificial Sequence: Synthetic oligonucleotide
  Antisense strand to SEQ ID NO: 119950
ugacccauggccaaucgcc

SEQ ID NO: 119952 - RNA, 19 nt, Artificial Sequence
  Description of Artificial Sequence: Synthetic oligonucleotide
  Sense strand starting at position 1485 of SEQ ID NO: 1527
aucauauucugagacagcu

SEQ ID NO: 119953 - RNA, 19 nt, Artificial Sequence
  Description of Artificial Sequence: Synthetic oligonucleotide
  Antisense strand to SEQ ID NO: 119952
agcugucucagaauaugau

SEQ ID NO: 119954 - RNA, 19 nt, Artificial Sequence
  Description of Artificial Sequence: Synthetic oligonucleotide
  Sense strand starting at position 1414 of SEQ ID NO: 1527
agauucuauuaaugggcaa

SEQ ID NO: 119955 - RNA, 19 nt, Artificial Sequence
  Description of Artificial Sequence: Synthetic oligonucleotide
  Antisense strand to SEQ ID NO: 119954
uugcccauuaauagaaucu

SEQ ID NO: 119956 - RNA, 19 nt, Artificial Sequence
  Description of Artificial Sequence: Synthetic oligonucleotide
  Sense strand starting at position 1311 of SEQ ID NO: 1527
acaauagcauccguaauua

SEQ ID NO: 119957 - RNA, 19 nt, Artificial Sequence
  Description of Artificial Sequence: Synthetic oligonucleotide
  Antisense strand to SEQ ID NO: 119956
uaauuacggaugcuauugu

SEQ ID NO: 119958 - RNA, 19 nt, Artificial Sequence
  Description of Artificial Sequence: Synthetic oligonucleotide
  Sense strand starting at position 1128 of SEQ ID NO: 1527
caguaugaaugucagcaaa

SEQ ID NO: 119959 - RNA, 19 nt, Artificial Sequence
  Description of Artificial Sequence: Synthetic oligonucleotide
  Antisense strand to SEQ ID NO: 119958
uuugcugacauucauacug

SEQ ID NO: 119960 - RNA, 19 nt, Artificial Sequence
  Description of Artificial Sequence: Synthetic oligonucleotide
  Sense strand starting at position 880 of SEQ ID NO: 1527
auaauuaacuacgugagaa

SEQ ID NO: 119961 - RNA, 19 nt, Artificial Sequence
  Description of Artificial Sequence: Synthetic oligonucleotide
  Antisense strand to SEQ ID NO: 119960
uucucacguaguuaauuau

SEQ ID NO: 119962 - RNA, 19 nt, Artificial Sequence
  Description of Artificial Sequence: Synthetic oligonucleotide
  Sense strand starting at position 879 of SEQ ID NO: 1527
cauaauuaacuacgugaga

SEQ ID NO: 119963 - RNA, 19 nt, Artificial Sequence
  Description of Artificial Sequence: Synthetic oligonucleotide
  Antisense strand to SEQ ID NO: 119962
ucucacguaguuaauuaug

SEQ ID NO: 119964 - RNA, 19 nt, Artificial Sequence
  Description of Artificial Sequence: Synthetic oligonucleotide
  Sense strand starting at position 856 of SEQ ID NO: 1527
ggcaguguucaagagagau

SEQ ID NO: 119965 - RNA, 19 nt, Artificial Sequence
  Description of Artificial Sequence: Synthetic oligonucleotide
  Antisense strand to SEQ ID NO: 119964
aucucucuugaacacugcc

SEQ ID NO: 119966 - RNA, 19 nt, Artificial Sequence
  Description of Artificial Sequence: Synthetic oligonucleotide
  Sense strand starting at position 853 of SEQ ID NO: 1527
acaggcaguguucaagaga

SEQ ID NO: 119967 - RNA, 19 nt, Artificial Sequence
  Description of Artificial Sequence: Synthetic oligonucleotide
  Antisense strand to SEQ ID NO: 119966
ucucuugaacacugccugu

SEQ ID NO: 119968 - RNA, 19 nt, Artificial Sequence
  Description of Artificial Sequence: Synthetic oligonucleotide
  Sense strand starting at position 14 of SEQ ID NO: 1529
gacaaucaagcgggagaua

SEQ ID NO: 119969 - RNA, 19 nt, Artificial Sequence
  Description of Artificial Sequence: Synthetic oligonucleotide
  Antisense strand to SEQ ID NO: 119968
uaucucccgcuugauuguc

SEQ ID NO: 119970 - RNA, 19 nt, Artificial Sequence
  Description of Artificial Sequence: Synthetic oligonucleotide
  Sense strand starting at position 171 of SEQ ID NO: 1529
gaugauucuuaagccgaau

SEQ ID NO: 119971 - RNA, 19 nt, Artificial Sequence
  Description of Artificial Sequence: Synthetic oligonucleotide
  Antisense strand to SEQ ID NO: 119970
auucggcuuaagaaucauc

SEQ ID NO: 119972 - RNA, 19 nt, Artificial Sequence
  Description of Artificial Sequence: Synthetic oligonucleotide
  Sense strand starting at position 182 of SEQ ID NO: 1529
agccgaauaaugcaggauu

SEQ ID NO: 119973 - RNA, 19 nt, Artificial Sequence
  Description of Artificial Sequence: Synthetic oligonucleotide
  Antisense strand to SEQ ID NO: 119972
aauccugcauuauucggcu

SEQ ID NO: 119974 - RNA, 19 nt, Artificial Sequence
  Description of Artificial Sequence: Synthetic oligonucleotide
  Sense strand starting at position 184 of SEQ ID NO: 1529
ccgaauaaugcaggauuga

SEQ ID NO: 119975 - RNA, 19 nt, Artificial Sequence
  Description of Artificial Sequence: Synthetic oligonucleotide
  Antisense strand to SEQ ID NO: 119974
ucaauccugcauuauucgg

SEQ ID NO: 119976 - RNA, 19 nt, Artificial Sequence
  Description of Artificial Sequence: Synthetic oligonucleotide
  Sense strand starting at position 255 of SEQ ID NO: 1529
gguuuaagcggagaucuau

SEQ ID NO: 119977 - RNA, 19 nt, Artificial Sequence
  Description of Artificial Sequence: Synthetic oligonucleotide
  Antisense strand to SEQ ID NO: 119976
auagaucuccgcuuaaacc

SEQ ID NO: 119978 - RNA, 19 nt, Artificial Sequence
  Description of Artificial Sequence: Synthetic oligonucleotide
  Sense strand starting at position 264 of SEQ ID NO: 1529
ggagaucuaugagcaguuu

SEQ ID NO: 119979 - RNA, 19 nt, Artificial Sequence
  Description of Artificial Sequence: Synthetic oligonucleotide
  Antisense strand to SEQ ID NO: 119978
aaacugcucauagaucucc

SEQ ID NO: 119980 - RNA, 19 nt, Artificial Sequence
  Description of Artificial Sequence: Synthetic oligonucleotide
  Sense strand starting at position 272 of SEQ ID NO: 1529
augagcaguuugguauuau

SEQ ID NO: 119981 - RNA, 19 nt, Artificial Sequence
  Description of Artificial Sequence: Synthetic oligonucleotide
  Antisense strand to SEQ ID NO: 119980
auaauaccaaacugcucau

SEQ ID NO: 119982 - RNA, 19 nt, Artificial Sequence
  Description of Artificial Sequence: Synthetic oligonucleotide
  Sense strand starting at position 280 of SEQ ID NO: 1529
uuugguauuauugggaaac

SEQ ID NO: 119983 - RNA, 19 nt, Artificial Sequence
  Description of Artificial Sequence: Synthetic oligonucleotide
  Antisense strand to SEQ ID NO: 119982
guuucccaauaauaccaaa

SEQ ID NO: 119984 - RNA, 19 nt, Artificial Sequence
  Description of Artificial Sequence: Synthetic oligonucleotide
  Sense strand starting at position 387 of SEQ ID NO: 1529
ggucuuaacccagauggca

SEQ ID NO: 119985 - RNA, 19 nt, Artificial Sequence
  Description of Artificial Sequence: Synthetic oligonucleotide
  Antisense strand to SEQ ID NO: 119984
ugccaucuggguuaagacc

SEQ ID NO: 119986 - RNA, 19 nt, Artificial Sequence
  Description of Artificial Sequence: Synthetic oligonucleotide
  Sense strand starting at position 476 of SEQ ID NO: 1529
cggcaaugugcagaaugaa

SEQ ID NO: 119987 - RNA, 19 nt, Artificial Sequence
  Description of Artificial Sequence: Synthetic oligonucleotide
  Antisense strand to SEQ ID NO: 119986
uucauucugcacauugccg

SEQ ID NO: 119988 - RNA, 19 nt, Artificial Sequence
  Description of Artificial Sequence: Synthetic oligonucleotide
  Sense strand starting at position 501 of SEQ ID NO: 1529
ggguauguuauagggaguu

SEQ ID NO: 119989 - RNA, 19 nt, Artificial Sequence
  Description of Artificial Sequence: Synthetic oligonucleotide
  Antisense strand to SEQ ID NO: 119988
aacucccuauaacauaccc

SEQ ID NO: 119990 - RNA, 19 nt, Artificial Sequence
  Description of Artificial Sequence: Synthetic oligonucleotide
  Sense strand starting at position 503 of SEQ ID NO: 1529
guauguuauagggaguuau

SEQ ID NO: 119991 - RNA, 19 nt, Artificial Sequence
  Description of Artificial Sequence: Synthetic oligonucleotide
  Antisense strand to SEQ ID NO: 119990
auaacucccuauaacauac

SEQ ID NO: 119992 - RNA, 19 nt, Artificial Sequence
  Description of Artificial Sequence: Synthetic oligonucleotide
  Sense strand starting at position 580 of SEQ ID NO: 1529
gaauauguaugcuuagcau

SEQ ID NO: 119993 - RNA, 19 nt, Artificial Sequence
  Description of Artificial Sequence: Synthetic oligonucleotide
  Antisense strand to SEQ ID NO: 119992
augcuaagcauacauauuc

SEQ ID NO: 119994 - RNA, 19 nt, Artificial Sequence
  Description of Artificial Sequence: Synthetic oligonucleotide
  Sense strand starting at position 592 of SEQ ID NO: 1529
uuagcaucugaauauguau

SEQ ID NO: 119995 - RNA, 19 nt, Artificial Sequence
  Description of Artificial Sequence: Synthetic oligonucleotide
  Antisense strand to SEQ ID NO: 119994
auacauauucagaugcuaa

SEQ ID NO: 119996 - RNA, 19 nt, Artificial Sequence
  Description of Artificial Sequence: Synthetic oligonucleotide
  Sense strand starting at position 598 of SEQ ID NO: 1529
ucugaauauguauguugaa

SEQ ID NO: 119997 - RNA, 19 nt, Artificial Sequence
  Description of Artificial Sequence: Synthetic oligonucleotide
  Antisense strand to SEQ ID NO: 119996
uucaacauacauauucaga

SEQ ID NO: 119998 - RNA, 19 nt, Artificial Sequence
  Description of Artificial Sequence: Synthetic oligonucleotide
  Sense strand starting at position 599 of SEQ ID NO: 1529
cugaauauguauguugaac

SEQ ID NO: 119999 - RNA, 19 nt, Artificial Sequence
  Description of Artificial Sequence: Synthetic oligonucleotide
  Antisense strand to SEQ ID NO: 119998
guucaacauacauauucag

SEQ ID NO: 120000 - RNA, 19 nt, Artificial Sequence
  Description of Artificial Sequence: Synthetic oligonucleotide
  Sense strand starting at position 605 of SEQ ID NO: 1529
auguauguugaacaucaau

SEQ ID NO: 120001 - RNA, 19 nt, Artificial Sequence
  Description of Artificial Sequence: Synthetic oligonucleotide
  Antisense strand to SEQ ID NO: 120000
auugauguucaacauacau

SEQ ID NO: 120002 - RNA, 19 nt, Artificial Sequence
  Description of Artificial Sequence: Synthetic oligonucleotide
  Sense strand starting at position 735 of SEQ ID NO: 1529
uaggaaauuugguauaagc

SEQ ID NO: 120003 - RNA, 19 nt, Artificial Sequence
  Description of Artificial Sequence: Synthetic oligonucleotide
  Antisense strand to SEQ ID NO: 120002
gcuuauaccaaauuuccua

SEQ ID NO: 120004 - RNA, 19 nt, Artificial Sequence
  Description of Artificial Sequence: Synthetic oligonucleotide
  Sense strand starting at position 756 of SEQ ID NO: 1529
guuguuugccgagaaggga

SEQ ID NO: 120005 - RNA, 19 nt, Artificial Sequence
  Description of Artificial Sequence: Synthetic oligonucleotide
  Antisense strand to SEQ ID NO: 120004
ucccuucucggcaaacaac

SEQ ID NO: 120006 - RNA, 19 nt, Artificial Sequence
  Description of Artificial Sequence: Synthetic oligonucleotide
  Sense strand starting at position 920 of SEQ ID NO: 1529
ugaggagauuuauaacuuu

SEQ ID NO: 120007 - RNA, 19 nt, Artificial Sequence
  Description of Artificial Sequence: Synthetic oligonucleotide
  Antisense strand to SEQ ID NO: 120006
aaaguuauaaaucuccuca

SEQ ID NO: 120008 - RNA, 19 nt, Artificial Sequence
  Description of Artificial Sequence: Synthetic oligonucleotide
  Sense strand starting at position 987 of SEQ ID NO: 1529
agaaauacuucugagauga

SEQ ID NO: 120009 - RNA, 19 nt, Artificial Sequence
  Description of Artificial Sequence: Synthetic oligonucleotide
  Antisense strand to SEQ ID NO: 120008
ucaucucagaaguauuucu

SEQ ID NO: 120010 - RNA, 19 nt, Artificial Sequence
  Description of Artificial Sequence: Synthetic oligonucleotide
  Sense strand starting at position 1019 of SEQ ID NO: 1529
ccagcuuaugugggaagau

SEQ ID NO: 120011 - RNA, 19 nt, Artificial Sequence
  Description of Artificial Sequence: Synthetic oligonucleotide
  Antisense strand to SEQ ID NO: 120010
aucuucccacauaagcugg

SEQ ID NO: 120012 - RNA, 19 nt, Artificial Sequence
  Description of Artificial Sequence: Synthetic oligonucleotide
  Sense strand starting at position 1031 of SEQ ID NO: 1529
ggaagauacuaccauaaag

SEQ ID NO: 120013 - RNA, 19 nt, Artificial Sequence
  Description of Artificial Sequence: Synthetic oligonucleotide
  Antisense strand to SEQ ID NO: 120012
cuuuaugguaguaucuucc

SEQ ID NO: 120014 - RNA, 19 nt, Artificial Sequence
  Description of Artificial Sequence: Synthetic oligonucleotide
  Sense strand starting at position 1132 of SEQ ID NO: 1529
guuugaguccaggaauuga

SEQ ID NO: 120015 - RNA, 19 nt, Artificial Sequence
  Description of Artificial Sequence: Synthetic oligonucleotide
  Antisense strand to SEQ ID NO: 120014
ucaauuccuggacucaaac

SEQ ID NO: 120016 - RNA, 19 nt, Artificial Sequence
  Description of Artificial Sequence: Synthetic oligonucleotide
  Sense strand starting at position 1469 of SEQ ID NO: 1529
uuuggaaggcacugauuga

SEQ ID NO: 120017 - RNA, 19 nt, Artificial Sequence
  Description of Artificial Sequence: Synthetic oligonucleotide
  Antisense strand to SEQ ID NO: 120016
ucaaucagugccuuccaaa

SEQ ID NO: 120018 - RNA, 19 nt, Artificial Sequence
  Description of Artificial Sequence: Synthetic oligonucleotide
  Sense strand starting at position 1631 of SEQ ID NO: 1529
auggauguggcuuguaaga

SEQ ID NO: 120019 - RNA, 19 nt, Artificial Sequence
  Description of Artificial Sequence: Synthetic oligonucleotide
  Antisense strand to SEQ ID NO: 120018
ucuuacaagccacauccau

SEQ ID NO: 120020 - RNA, 19 nt, Artificial Sequence
  Description of Artificial Sequence: Synthetic oligonucleotide
  Sense strand starting at position 1645 of SEQ ID NO: 1529
uaagaaaggucccugguua

SEQ ID NO: 120021 - RNA, 19 nt, Artificial Sequence
  Description of Artificial Sequence: Synthetic oligonucleotide
  Antisense strand to SEQ ID NO: 120020
uaaccagggaccuuucuua

SEQ ID NO: 120022 - RNA, 19 nt, Artificial Sequence
  Description of Artificial Sequence: Synthetic oligonucleotide
  Sense strand starting at position 1646 of SEQ ID NO: 1529
aagaaaggucccugguuau

SEQ ID NO: 120023 - RNA, 19 nt, Artificial Sequence
  Description of Artificial Sequence: Synthetic oligonucleotide
  Antisense strand to SEQ ID NO: 120022
auaaccagggaccuuucuu

SEQ ID NO: 120024 - RNA, 19 nt, Artificial Sequence
  Description of Artificial Sequence: Synthetic oligonucleotide
  Sense strand starting at position 1649 of SEQ ID NO: 1529
aaaggucccugguuauaag

SEQ ID NO: 120025 - RNA, 19 nt, Artificial Sequence
  Description of Artificial Sequence: Synthetic oligonucleotide
  Antisense strand to SEQ ID NO: 120024
cuuauaaccagggaccuuu

SEQ ID NO: 120026 - RNA, 19 nt, Artificial Sequence
  Description of Artificial Sequence: Synthetic oligonucleotide
  Sense strand starting at position 1658 of SEQ ID NO: 1529
ugguuauaagagugaagug

SEQ ID NO: 120027 - RNA, 19 nt, Artificial Sequence
  Description of Artificial Sequence: Synthetic oligonucleotide
  Antisense strand to SEQ ID NO: 120026
cacuucacucuuauaacca

SEQ ID NO: 120028 - RNA, 19 nt, Artificial Sequence
  Description of Artificial Sequence: Synthetic oligonucleotide
  Sense strand starting at position 1659 of SEQ ID NO: 1529
gguuauaagagugaagugu

SEQ ID NO: 120029 - RNA, 19 nt, Artificial Sequence
  Description of Artificial Sequence: Synthetic oligonucleotide
  Antisense strand to SEQ ID NO: 120028
acacuucacucuuauaacc

SEQ ID NO: 120030 - RNA, 19 nt, Artificial Sequence
  Description of Artificial Sequence: Synthetic oligonucleotide
  Sense strand starting at position 1813 of SEQ ID NO: 1529
ccguuggucgaggauguaa

SEQ ID NO: 120031 - RNA, 19 nt, Artificial Sequence
  Description of Artificial Sequence: Synthetic oligonucleotide
  Antisense strand to SEQ ID NO: 120030
uuacauccucgaccaacgg

SEQ ID NO: 120032 - RNA, 19 nt, Artificial Sequence
  Description of Artificial Sequence: Synthetic oligonucleotide
  Sense strand starting at position 2047 of SEQ ID NO: 1529
ggagcuaauuggucugggu

SEQ ID NO: 120033 - RNA, 19 nt, Artificial Sequence
  Description of Artificial Sequence: Synthetic oligonucleotide
  Antisense strand to SEQ ID NO: 120032
acccagaccaauuagcucc

SEQ ID NO: 120034 - RNA, 19 nt, Artificial Sequence
  Description of Artificial Sequence: Synthetic oligonucleotide
  Sense strand starting at position 2142 of SEQ ID NO: 1529
gagaguagguuucccucga

SEQ ID NO: 120035 - RNA, 19 nt, Artificial Sequence
  Description of Artificial Sequence: Synthetic oligonucleotide
  Antisense strand to SEQ ID NO: 120034
ucgagggaaaccuacucuc

SEQ ID NO: 120036 - RNA, 19 nt, Artificial Sequence
  Description of Artificial Sequence: Synthetic oligonucleotide
  Sense strand starting at position 2143 of SEQ ID NO: 1529
agaguagguuucccucgaa

SEQ ID NO: 120037 - RNA, 19 nt, Artificial Sequence
  Description of Artificial Sequence: Synthetic oligonucleotide
  Antisense strand to SEQ ID NO: 120036
uucgagggaaaccuacucu

SEQ ID NO: 120038 - RNA, 19 nt, Artificial Sequence
  Description of Artificial Sequence: Synthetic oligonucleotide
  Sense strand starting at position 2146 of SEQ ID NO: 1529
guagguuucccucgaaagg

SEQ ID NO: 120039 - RNA, 19 nt, Artificial Sequence
  Description of Artificial Sequence: Synthetic oligonucleotide
  Antisense strand to SEQ ID NO: 120038
ccuuucgagggaaaccuac

SEQ ID NO: 120040 - RNA, 19 nt, Artificial Sequence
  Description of Artificial Sequence: Synthetic oligonucleotide
  Sense strand starting at position 2332 of SEQ ID NO: 1529
gauuucuugcugugugacu

SEQ ID NO: 120041 - RNA, 19 nt, Artificial Sequence
  Description of Artificial Sequence: Synthetic oligonucleotide
  Antisense strand to SEQ ID NO: 120040
agucacacagcaagaaauc

SEQ ID NO: 120042 - RNA, 19 nt, Artificial Sequence
  Description of Artificial Sequence: Synthetic oligonucleotide
  Sense strand starting at position 2503 of SEQ ID NO: 1529
aucagaaguccugagucgu

SEQ ID NO: 120043 - RNA, 19 nt, Artificial Sequence
  Description of Artificial Sequence: Synthetic oligonucleotide
  Antisense strand to SEQ ID NO: 120042
acgacucaggacuucugau

SEQ ID NO: 120044 - RNA, 19 nt, Artificial Sequence
  Description of Artificial Sequence: Synthetic oligonucleotide
  Sense strand starting at position 3063 of SEQ ID NO: 1529
ugccaucugcuguauauuu

SEQ ID NO: 120045 - RNA, 19 nt, Artificial Sequence
  Description of Artificial Sequence: Synthetic oligonucleotide
  Antisense strand to SEQ ID NO: 120044
aaauauacagcagauggca

SEQ ID NO: 120046 - RNA, 19 nt, Artificial Sequence
  Description of Artificial Sequence: Synthetic oligonucleotide
  Sense strand starting at position 3901 of SEQ ID NO: 1529
uccuuaguuguugggauuu

SEQ ID NO: 120047 - RNA, 19 nt, Artificial Sequence
  Description of Artificial Sequence: Synthetic oligonucleotide
  Antisense strand to SEQ ID NO: 120046
aaaucccaacaacuaagga

SEQ ID NO: 120048 - RNA, 19 nt, Artificial Sequence
  Description of Artificial Sequence: Synthetic oligonucleotide
  Sense strand starting at position 3933 of SEQ ID NO: 1530
gaagaaagguuucucacca

SEQ ID NO: 120049 - RNA, 19 nt, Artificial Sequence
  Description of Artificial Sequence: Synthetic oligonucleotide
  Antisense strand to SEQ ID NO: 120048
uggugagaaaccuuucuuc

SEQ ID NO: 120050 - RNA, 19 nt, Artificial Sequence
  Description of Artificial Sequence: Synthetic oligonucleotide
  Sense strand starting at position 3872 of SEQ ID NO: 1530
aucaguucucuggaaaucu

SEQ ID NO: 120051 - RNA, 19 nt, Artificial Sequence
  Description of Artificial Sequence: Synthetic oligonucleotide
  Antisense strand to SEQ ID NO: 120050
agauuuccagagaacugau

SEQ ID NO: 120052 - RNA, 19 nt, Artificial Sequence
  Description of Artificial Sequence: Synthetic oligonucleotide
  Sense strand starting at position 3870 of SEQ ID NO: 1530
gaaucaguucucuggaaau

SEQ ID NO: 120053 - RNA, 19 nt, Artificial Sequence
  Description of Artificial Sequence: Synthetic oligonucleotide
  Antisense strand to SEQ ID NO: 120052
auuuccagagaacugauuc

SEQ ID NO: 120054 - RNA, 19 nt, Artificial Sequence
  Description of Artificial Sequence: Synthetic oligonucleotide
  Sense strand starting at position 3869 of SEQ ID NO: 1530
ugaaucaguucucuggaaa

SEQ ID NO: 120055 - RNA, 19 nt, Artificial Sequence
  Description of Artificial Sequence: Synthetic oligonucleotide
  Antisense strand to SEQ ID NO: 120054
uuuccagagaacugauuca

SEQ ID NO: 120056 - RNA, 19 nt, Artificial Sequence
  Description of Artificial Sequence: Synthetic oligonucleotide
  Sense strand starting at position 3868 of SEQ ID NO: 1530
uugaaucaguucucuggaa

SEQ ID NO: 120057 - RNA, 19 nt, Artificial Sequence
  Description of Artificial Sequence: Synthetic oligonucleotide
  Antisense strand to SEQ ID NO: 120056
uuccagagaacugauucaa

SEQ ID NO: 120058 - RNA, 19 nt, Artificial Sequence
  Description of Artificial Sequence: Synthetic oligonucleotide
  Sense strand starting at position 3862 of SEQ ID NO: 1530
aguuguuugaaucaguucu

SEQ ID NO: 120059 - RNA, 19 nt, Artificial Sequence
  Description of Artificial Sequence: Synthetic oligonucleotide
  Antisense strand to SEQ ID NO: 120058
agaacugauucaaacaacu

SEQ ID NO: 120060 - RNA, 19 nt, Artificial Sequence
  Description of Artificial Sequence: Synthetic oligonucleotide
  Sense strand starting at position 3856 of SEQ ID NO: 1530
uaaugaaguuguuugaauc

SEQ ID NO: 120061 - RNA, 19 nt, Artificial Sequence
  Description of Artificial Sequence: Synthetic oligonucleotide
  Antisense strand to SEQ ID NO: 120060
gauucaaacaacuucauua

SEQ ID NO: 120062 - RNA, 19 nt, Artificial Sequence
  Description of Artificial Sequence: Synthetic oligonucleotide
  Sense strand starting at position 3847 of SEQ ID NO: 1530
guaccuauuuaaugaaguu

SEQ ID NO: 120063 - RNA, 19 nt, Artificial Sequence
  Description of Artificial Sequence: Synthetic oligonucleotide
  Antisense strand to SEQ ID NO: 120062
aacuucauuaaauagguac

SEQ ID NO: 120064 - RNA, 19 nt, Artificial Sequence
  Description of Artificial Sequence: Synthetic oligonucleotide
  Sense strand starting at position 3346 of SEQ ID NO: 1530
ccucuuccuggacaugauu

SEQ ID NO: 120065 - RNA, 19 nt, Artificial Sequence
  Description of Artificial Sequence: Synthetic oligonucleotide
  Antisense strand to SEQ ID NO: 120064
aaucauguccaggaagagg

SEQ ID NO: 120066 - RNA, 19 nt, Artificial Sequence
  Description of Artificial Sequence: Synthetic oligonucleotide
  Sense strand starting at position 3256 of SEQ ID NO: 1530
cuuauaagaacgugcagua

SEQ ID NO: 120067 - RNA, 19 nt, Artificial Sequence
  Description of Artificial Sequence: Synthetic oligonucleotide
  Antisense strand to SEQ ID NO: 120066
uacugcacguucuuauaag

SEQ ID NO: 120068 - RNA, 19 nt, Artificial Sequence
  Description of Artificial Sequence: Synthetic oligonucleotide
  Sense strand starting at position 3084 of SEQ ID NO: 1530
gaggcugagguuuggagua

SEQ ID NO: 120069 - RNA, 19 nt, Artificial Sequence
  Description of Artificial Sequence: Synthetic oligonucleotide
  Antisense strand to SEQ ID NO: 120068
uacuccaaaccucagccuc

SEQ ID NO: 120070 - RNA, 19 nt, Artificial Sequence
  Description of Artificial Sequence: Synthetic oligonucleotide
  Sense strand starting at position 2567 of SEQ ID NO: 1530
uagguuugccuggacuaga

SEQ ID NO: 120071 - RNA, 19 nt, Artificial Sequence
  Description of Artificial Sequence: Synthetic oligonucleotide
  Antisense strand to SEQ ID NO: 120070
ucuaguccaggcaaaccua

SEQ ID NO: 120072 - RNA, 19 nt, Artificial Sequence
  Description of Artificial Sequence: Synthetic oligonucleotide
  Sense strand starting at position 2521 of SEQ ID NO: 1530
guccaagaccacuggaaau

SEQ ID NO: 120073 - RNA, 19 nt, Artificial Sequence
  Description of Artificial Sequence: Synthetic oligonucleotide
  Antisense strand to SEQ ID NO: 120072
auuuccaguggucuuggac

SEQ ID NO: 120074 - RNA, 19 nt, Artificial Sequence
  Description of Artificial Sequence: Synthetic oligonucleotide
  Sense strand starting at position 2445 of SEQ ID NO: 1530
ccgcauacuuguuuauuua

SEQ ID NO: 120075 - RNA, 19 nt, Artificial Sequence
  Description of Artificial Sequence: Synthetic oligonucleotide
  Antisense strand to SEQ ID NO: 120074
uaaauaaacaaguaugcgg

SEQ ID NO: 120076 - RNA, 19 nt, Artificial Sequence
  Description of Artificial Sequence: Synthetic oligonucleotide
  Sense strand starting at position 2444 of SEQ ID NO: 1530
cccgcauacuuguuuauuu

SEQ ID NO: 120077 - RNA, 19 nt, Artificial Sequence
  Description of Artificial Sequence: Synthetic oligonucleotide
  Antisense strand to SEQ ID NO: 120076
aaauaaacaaguaugcggg

SEQ ID NO: 120078 - RNA, 19 nt, Artificial Sequence
  Description of Artificial Sequence: Synthetic oligonucleotide
  Sense strand starting at position 2443 of SEQ ID NO: 1530
gcccgcauacuuguuuauu

SEQ ID NO: 120079 - RNA, 19 nt, Artificial Sequence
  Description of Artificial Sequence: Synthetic oligonucleotide
  Antisense strand to SEQ ID NO: 120078
aauaaacaaguaugcgggc

SEQ ID NO: 120080 - RNA, 19 nt, Artificial Sequence
  Description of Artificial Sequence: Synthetic oligonucleotide
  Sense strand starting at position 2376 of SEQ ID NO: 1530
gaaucugagugguuaaaua

SEQ ID NO: 120081 - RNA, 19 nt, Artificial Sequence
  Description of Artificial Sequence: Synthetic oligonucleotide
  Antisense strand to SEQ ID NO: 120080
uauuuaaccacucagauuc

SEQ ID NO: 120082 - RNA, 19 nt, Artificial Sequence
  Description of Artificial Sequence: Synthetic oligonucleotide
  Sense strand starting at position 2374 of SEQ ID NO: 1530
cugaaucugagugguuaaa

SEQ ID NO: 120083 - RNA, 19 nt, Artificial Sequence
  Description of Artificial Sequence: Synthetic oligonucleotide
  Antisense strand to SEQ ID NO: 120082
uuuaaccacucagauucag

SEQ ID NO: 120084 - RNA, 19 nt, Artificial Sequence
  Description of Artificial Sequence: Synthetic oligonucleotide
  Sense strand starting at position 2373 of SEQ ID NO: 1530
acugaaucugagugguuaa

SEQ ID NO: 120085 - RNA, 19 nt, Artificial Sequence
  Description of Artificial Sequence: Synthetic oligonucleotide
  Antisense strand to SEQ ID NO: 120084
uuaaccacucagauucagu

SEQ ID NO: 120086 - RNA, 19 nt, Artificial Sequence
  Description of Artificial Sequence: Synthetic oligonucleotide
  Sense strand starting at position 2372 of SEQ ID NO: 1530
aacugaaucugagugguua

SEQ ID NO: 120087 - RNA, 19 nt, Artificial Sequence
  Description of Artificial Sequence: Synthetic oligonucleotide
  Antisense strand to SEQ ID NO: 120086
uaaccacucagauucaguu

SEQ ID NO: 120088 - RNA, 19 nt, Artificial Sequence
  Description of Artificial Sequence: Synthetic oligonucleotide
  Sense strand starting at position 2336 of SEQ ID NO: 1530
ggcucauucuuguuuaauu

SEQ ID NO: 120089 - RNA, 19 nt, Artificial Sequence
  Description of Artificial Sequence: Synthetic oligonucleotide
  Antisense strand to SEQ ID NO: 120088
aauuaaacaagaaugagcc

SEQ ID NO: 120090 - RNA, 19 nt, Artificial Sequence
  Description of Artificial Sequence: Synthetic oligonucleotide
  Sense strand starting at position 2140 of SEQ ID NO: 1530
gaugguacucaacgugagu

SEQ ID NO: 120091 - RNA, 19 nt, Artificial Sequence
  Description of Artificial Sequence: Synthetic oligonucleotide
  Antisense strand to SEQ ID NO: 120090
acucacguugaguaccauc

SEQ ID NO: 120092 - RNA, 19 nt, Artificial Sequence
  Description of Artificial Sequence: Synthetic oligonucleotide
  Sense strand starting at position 2104 of SEQ ID NO: 1530
ccaucuugguuuguucuau

SEQ ID NO: 120093 - RNA, 19 nt, Artificial Sequence
  Description of Artificial Sequence: Synthetic oligonucleotide
  Antisense strand to SEQ ID NO: 120092
auagaacaaaccaagaugg

SEQ ID NO: 120094 - RNA, 19 nt, Artificial Sequence
  Description of Artificial Sequence: Synthetic oligonucleotide
  Sense strand starting at position 1343 of SEQ ID NO: 1530
aaaugucaccuuugagaga

SEQ ID NO: 120095 - RNA, 19 nt, Artificial Sequence
  Description of Artificial Sequence: Synthetic oligonucleotide
  Antisense strand to SEQ ID NO: 120094
ucucucaaaggugacauuu

SEQ ID NO: 120096 - RNA, 19 nt, Artificial Sequence
  Description of Artificial Sequence: Synthetic oligonucleotide
  Sense strand starting at position 1278 of SEQ ID NO: 1530
ucuuaucgucaugauaacu

SEQ ID NO: 120097 - RNA, 19 nt, Artificial Sequence
  Description of Artificial Sequence: Synthetic oligonucleotide
  Antisense strand to SEQ ID NO: 120096
aguuaucaugacgauaaga

SEQ ID NO: 120098 - RNA, 19 nt, Artificial Sequence
  Description of Artificial Sequence: Synthetic oligonucleotide
  Sense strand starting at position 1275 of SEQ ID NO: 1530
uggucuuaucgucaugaua

SEQ ID NO: 120099 - RNA, 19 nt, Artificial Sequence
  Description of Artificial Sequence: Synthetic oligonucleotide
  Antisense strand to SEQ ID NO: 120098
uaucaugacgauaagacca

SEQ ID NO: 120100 - RNA, 19 nt, Artificial Sequence
  Description of Artificial Sequence: Synthetic oligonucleotide
  Sense strand starting at position 1274 of SEQ ID NO: 1530
cuggucuuaucgucaugau

SEQ ID NO: 120101 - RNA, 19 nt, Artificial Sequence
  Description of Artificial Sequence: Synthetic oligonucleotide
  Antisense strand to SEQ ID NO: 120100
aucaugacgauaagaccag

SEQ ID NO: 120102 - RNA, 19 nt, Artificial Sequence
  Description of Artificial Sequence: Synthetic oligonucleotide
  Sense strand starting at position 1035 of SEQ ID NO: 1530
cuccgcguucccuaaagaa

SEQ ID NO: 120103 - RNA, 19 nt, Artificial Sequence
  Description of Artificial Sequence: Synthetic oligonucleotide
  Antisense strand to SEQ ID NO: 120102
uucuuuagggaacgcggag

SEQ ID NO: 120104 - RNA, 19 nt, Artificial Sequence
  Description of Artificial Sequence: Synthetic oligonucleotide
  Sense strand starting at position 803 of SEQ ID NO: 1530
gcaggaucugagcacucaa

SEQ ID NO: 120105 - RNA, 19 nt, Artificial Sequence
  Description of Artificial Sequence: Synthetic oligonucleotide
  Antisense strand to SEQ ID NO: 120104
uugagugcucagauccugc

SEQ ID NO: 120106 - RNA, 19 nt, Artificial Sequence
  Description of Artificial Sequence: Synthetic oligonucleotide
  Sense strand starting at position 790 of SEQ ID NO: 1530
uagucuucccucugcagga

SEQ ID NO: 120107 - RNA, 19 nt, Artificial Sequence
  Description of Artificial Sequence: Synthetic oligonucleotide
  Antisense strand to SEQ ID NO: 120106
uccugcagagggaagacua

SEQ ID NO: 120108 - RNA, 19 nt, Artificial Sequence
  Description of Artificial Sequence: Synthetic oligonucleotide
  Sense strand starting at position 579 of SEQ ID NO: 1530
acaccuuauucugcaguua

SEQ ID NO: 120109 - RNA, 19 nt, Artificial Sequence
  Description of Artificial Sequence: Synthetic oligonucleotide
  Antisense strand to SEQ ID NO: 120108
uaacugcagaauaaggugu

SEQ ID NO: 120110 - RNA, 19 nt, Artificial Sequence
  Description of Artificial Sequence: Synthetic oligonucleotide
  Sense strand starting at position 543 of SEQ ID NO: 1530
aucaauaagcugcaaugua

SEQ ID NO: 120111 - RNA, 19 nt, Artificial Sequence
  Description of Artificial Sequence: Synthetic oligonucleotide
  Antisense strand to SEQ ID NO: 120110
uacauugcagcuuauugau

SEQ ID NO: 120112 - RNA, 19 nt, Artificial Sequence
  Description of Artificial Sequence: Synthetic oligonucleotide
  Sense strand starting at position 470 of SEQ ID NO: 1530
uccaaucugccugaagcaa

SEQ ID NO: 120113 - RNA, 19 nt, Artificial Sequence
  Description of Artificial Sequence: Synthetic oligonucleotide
  Antisense strand to SEQ ID NO: 120112
uugcuucaggcagauugga

SEQ ID NO: 120114 - RNA, 19 nt, Artificial Sequence
  Description of Artificial Sequence: Synthetic oligonucleotide
  Sense strand starting at position 469 of SEQ ID NO: 1530
auccaaucugccugaagca

SEQ ID NO: 120115 - RNA, 19 nt, Artificial Sequence
  Description of Artificial Sequence: Synthetic oligonucleotide
  Antisense strand to SEQ ID NO: 120114
ugcuucaggcagauuggau

SEQ ID NO: 120116 - RNA, 19 nt, Artificial Sequence
  Description of Artificial Sequence: Synthetic oligonucleotide
  Sense strand starting at position 443 of SEQ ID NO: 1530
ggugaacucuuugugagca

SEQ ID NO: 120117 - RNA, 19 nt, Artificial Sequence
  Description of Artificial Sequence: Synthetic oligonucleotide
  Antisense strand to SEQ ID NO: 120116
ugcucacaaagaguucacc

SEQ ID NO: 120118 - RNA, 19 nt, Artificial Sequence
  Description of Artificial Sequence: Synthetic oligonucleotide
  Sense strand starting at position 442 of SEQ ID NO: 1530
uggugaacucuuugugagc

SEQ ID NO: 120119 - RNA, 19 nt, Artificial Sequence
  Description of Artificial Sequence: Synthetic oligonucleotide
  Antisense strand to SEQ ID NO: 120118
gcucacaaagaguucacca

SEQ ID NO: 120120 - RNA, 19 nt, Artificial Sequence
  Description of Artificial Sequence: Synthetic oligonucleotide
  Sense strand starting at position 368 of SEQ ID NO: 1530
uugccagaugauggugaau

SEQ ID NO: 120121 - RNA, 19 nt, Artificial Sequence
  Description of Artificial Sequence: Synthetic oligonucleotide
  Antisense strand to SEQ ID NO: 120120
auucaccaucaucuggcaa

SEQ ID NO: 120122 - RNA, 19 nt, Artificial Sequence
  Description of Artificial Sequence: Synthetic oligonucleotide
  Sense strand starting at position 276 of SEQ ID NO: 1530
ugggcuuaugcuuaggcua

SEQ ID NO: 120123 - RNA, 19 nt, Artificial Sequence
  Description of Artificial Sequence: Synthetic oligonucleotide
  Antisense strand to SEQ ID NO: 120122
uagccuaagcauaagccca

SEQ ID NO: 120124 - RNA, 19 nt, Artificial Sequence
  Description of Artificial Sequence: Synthetic oligonucleotide
  Sense strand starting at position 191 of SEQ ID NO: 1530
uccaaucauuugcaaggaa

SEQ ID NO: 120125 - RNA, 19 nt, Artificial Sequence
  Description of Artificial Sequence: Synthetic oligonucleotide
  Antisense strand to SEQ ID NO: 120124
uuccuugcaaaugauugga

SEQ ID NO: 120126 - RNA, 19 nt, Artificial Sequence
  Description of Artificial Sequence: Synthetic oligonucleotide
  Sense strand starting at position 143 of SEQ ID NO: 1530
gcacccugacauugagaau

SEQ ID NO: 120127 - RNA, 19 nt, Artificial Sequence
  Description of Artificial Sequence: Synthetic oligonucleotide
  Antisense strand to SEQ ID NO: 120126
auucucaaugucagggugc

SEQ ID NO: 120128 - RNA, 19 nt, Artificial Sequence
  Description of Artificial Sequence: Synthetic oligonucleotide
  Sense strand starting at position 189 of SEQ ID NO: 1531
ugggucaauaguggaaauu

SEQ ID NO: 120129 - RNA, 19 nt, Artificial Sequence
  Description of Artificial Sequence: Synthetic oligonucleotide
  Antisense strand to SEQ ID NO: 120128
aauuuccacuauugaccca

SEQ ID NO: 120130 - RNA, 19 nt, Artificial Sequence
  Description of Artificial Sequence: Synthetic oligonucleotide
  Sense strand starting at position 348 of SEQ ID NO: 1531
gaagacaaagcguauaauu

SEQ ID NO: 120131 - RNA, 19 nt, Artificial Sequence
  Description of Artificial Sequence: Synthetic oligonucleotide
  Antisense strand to SEQ ID NO: 120130
aauuauacgcuuugucuuc

SEQ ID NO: 120132 - RNA, 19 nt, Artificial Sequence
  Description of Artificial Sequence: Synthetic oligonucleotide
  Sense strand starting at position 383 of SEQ ID NO: 1531
cgcauaauguauuuguaag

SEQ ID NO: 120133 - RNA, 19 nt, Artificial Sequence
  Description of Artificial Sequence: Synthetic oligonucleotide
  Antisense strand to SEQ ID NO: 120132
cuuacaaauacauuaugcg

SEQ ID NO: 120134 - RNA, 19 nt, Artificial Sequence
  Description of Artificial Sequence: Synthetic oligonucleotide
  Sense strand starting at position 490 of SEQ ID NO: 1531
cucauuuaguaggaagaaa

SEQ ID NO: 120135 - RNA, 19 nt, Artificial Sequence
  Description of Artificial Sequence: Synthetic oligonucleotide
  Antisense strand to SEQ ID NO: 120134
uuucuuccuacuaaaugag

SEQ ID NO: 120136 - RNA, 19 nt, Artificial Sequence
  Description of Artificial Sequence: Synthetic oligonucleotide
  Sense strand starting at position 720 of SEQ ID NO: 1531
gcaugugaauuucuaagca

SEQ ID NO: 120137 - RNA, 19 nt, Artificial Sequence
  Description of Artificial Sequence: Synthetic oligonucleotide
  Antisense strand to SEQ ID NO: 120136
ugcuuagaaauucacaugc

SEQ ID NO: 120138 - RNA, 19 nt, Artificial Sequence
  Description of Artificial Sequence: Synthetic oligonucleotide
  Sense strand starting at position 739 of SEQ ID NO: 1531
aagcguuacguaguacgua

SEQ ID NO: 120139 - RNA, 19 nt, Artificial Sequence
  Description of Artificial Sequence: Synthetic oligonucleotide
  Antisense strand to SEQ ID NO: 120138
uacguacuacguaacgcuu

SEQ ID NO: 120140 - RNA, 19 nt, Artificial Sequence
  Description of Artificial Sequence: Synthetic oligonucleotide
  Sense strand starting at position 894 of SEQ ID NO: 1531
cuuuauugugcccagagaa

SEQ ID NO: 120141 - RNA, 19 nt, Artificial Sequence
  Description of Artificial Sequence: Synthetic oligonucleotide
  Antisense strand to SEQ ID NO: 120140
uucucugggcacaauaaag

SEQ ID NO: 120142 - RNA, 19 nt, Artificial Sequence
  Description of Artificial Sequence: Synthetic oligonucleotide
  Sense strand starting at position 1157 of SEQ ID NO: 1531
ucuuaagacugcccuagaa

SEQ ID NO: 120143 - RNA, 19 nt, Artificial Sequence
  Description of Artificial Sequence: Synthetic oligonucleotide
  Antisense strand to SEQ ID NO: 120142
uucuagggcagucuuaaga

SEQ ID NO: 120144 - RNA, 19 nt, Artificial Sequence
  Description of Artificial Sequence: Synthetic oligonucleotide
  Sense strand starting at position 1159 of SEQ ID NO: 1531
uuaagacugcccuagaauc

SEQ ID NO: 120145 - RNA, 19 nt, Artificial Sequence
  Description of Artificial Sequence: Synthetic oligonucleotide
  Antisense strand to SEQ ID NO: 120144
gauucuagggcagucuuaa

SEQ ID NO: 120146 - RNA, 19 nt, Artificial Sequence
  Description of Artificial Sequence: Synthetic oligonucleotide
  Sense strand starting at position 1358 of SEQ ID NO: 1531
gggauaauacacugcaucu

SEQ ID NO: 120147 - RNA, 19 nt, Artificial Sequence
  Description of Artificial Sequence: Synthetic oligonucleotide
  Antisense strand to SEQ ID NO: 120146
agaugcaguguauuauccc

SEQ ID NO: 120148 - RNA, 19 nt, Artificial Sequence
  Description of Artificial Sequence: Synthetic oligonucleotide
  Sense strand starting at position 1995 of SEQ ID NO: 1531
ucugcuguccggccggaaa

SEQ ID NO: 120149 - RNA, 19 nt, Artificial Sequence
  Description of Artificial Sequence: Synthetic oligonucleotide
  Antisense strand to SEQ ID NO: 120148
uuuccggccggacagcaga

SEQ ID NO: 120150 - RNA, 19 nt, Artificial Sequence
  Description of Artificial Sequence: Synthetic oligonucleotide
  Sense strand starting at position 2193 of SEQ ID NO: 1531
ucuggagcauucuugaaca

SEQ ID NO: 120151 - RNA, 19 nt, Artificial Sequence
  Description of Artificial Sequence: Synthetic oligonucleotide
  Antisense strand to SEQ ID NO: 120150
uguucaagaaugcuccaga

SEQ ID NO: 120152 - RNA, 19 nt, Artificial Sequence
  Description of Artificial Sequence: Synthetic oligonucleotide
  Sense strand starting at position 2198 of SEQ ID NO: 1531
agcauucuugaacaggagu

SEQ ID NO: 120153 - RNA, 19 nt, Artificial Sequence
  Description of Artificial Sequence: Synthetic oligonucleotide
  Antisense strand to SEQ ID NO: 120152
acuccuguucaagaaugcu

SEQ ID NO: 120154 - RNA, 19 nt, Artificial Sequence
  Description of Artificial Sequence: Synthetic oligonucleotide
  Sense strand starting at position 2297 of SEQ ID NO: 1531
ggaguaguuguagaaaggu

SEQ ID NO: 120155 - RNA, 19 nt, Artificial Sequence
  Description of Artificial Sequence: Synthetic oligonucleotide
  Antisense strand to SEQ ID NO: 120154
accuuucuacaacuacucc

SEQ ID NO: 120156 - RNA, 19 nt, Artificial Sequence
  Description of Artificial Sequence: Synthetic oligonucleotide
  Sense strand starting at position 2303 of SEQ ID NO: 1531
guuguagaaaggugagaga

SEQ ID NO: 120157 - RNA, 19 nt, Artificial Sequence
  Description of Artificial Sequence: Synthetic oligonucleotide
  Antisense strand to SEQ ID NO: 120156
ucucucaccuuucuacaac

SEQ ID NO: 120158 - RNA, 19 nt, Artificial Sequence
  Description of Artificial Sequence: Synthetic oligonucleotide
  Sense strand starting at position 2389 of SEQ ID NO: 1531
ggaggaagauuagcuucuu

SEQ ID NO: 120159 - RNA, 19 nt, Artificial Sequence
  Description of Artificial Sequence: Synthetic oligonucleotide
  Antisense strand to SEQ ID NO: 120158
aagaagcuaaucuuccucc

SEQ ID NO: 120160 - RNA, 19 nt, Artificial Sequence
  Description of Artificial Sequence: Synthetic oligonucleotide
  Sense strand starting at position 2523 of SEQ ID NO: 1531
ugauacaucugcuuuagac

SEQ ID NO: 120161 - RNA, 19 nt, Artificial Sequence
  Description of Artificial Sequence: Synthetic oligonucleotide
  Antisense strand to SEQ ID NO: 120160
gucuaaagcagauguauca

SEQ ID NO: 120162 - RNA, 19 nt, Artificial Sequence
  Description of Artificial Sequence: Synthetic oligonucleotide
  Sense strand starting at position 2561 of SEQ ID NO: 1531
uuacauagugcguuuguua

SEQ ID NO: 120163 - RNA, 19 nt, Artificial Sequence
  Description of Artificial Sequence: Synthetic oligonucleotide
  Antisense strand to SEQ ID NO: 120162
uaacaaacgcacuauguaa

SEQ ID NO: 120164 - RNA, 19 nt, Artificial Sequence
  Description of Artificial Sequence: Synthetic oligonucleotide
  Sense strand starting at position 2562 of SEQ ID NO: 1531
uacauagugcguuuguuau

SEQ ID NO: 120165 - RNA, 19 nt, Artificial Sequence
  Description of Artificial Sequence: Synthetic oligonucleotide
  Antisense strand to SEQ ID NO: 120164
auaacaaacgcacuaugua

SEQ ID NO: 120166 - RNA, 19 nt, Artificial Sequence
  Description of Artificial Sequence: Synthetic oligonucleotide
  Sense strand starting at position 2570 of SEQ ID NO: 1531
gcguuuguuaugucuucua

SEQ ID NO: 120167 - RNA, 19 nt, Artificial Sequence
  Description of Artificial Sequence: Synthetic oligonucleotide
  Antisense strand to SEQ ID NO: 120166
uagaagacauaacaaacgc

SEQ ID NO: 120168 - RNA, 19 nt, Artificial Sequence
  Description of Artificial Sequence: Synthetic oligonucleotide
  Sense strand starting at position 2582 of SEQ ID NO: 1531
ucuucuagugcguuuguua

SEQ ID NO: 120169 - RNA, 19 nt, Artificial Sequence
  Description of Artificial Sequence: Synthetic oligonucleotide
  Antisense strand to SEQ ID NO: 120168
uaacaaacgcacuagaaga

SEQ ID NO: 120170 - RNA, 19 nt, Artificial Sequence
  Description of Artificial Sequence: Synthetic oligonucleotide
  Sense strand starting at position 2583 of SEQ ID NO: 1531
cuucuagugcguuuguuau

SEQ ID NO: 120171 - RNA, 19 nt, Artificial Sequence
  Description of Artificial Sequence: Synthetic oligonucleotide
  Antisense strand to SEQ ID NO: 120170
auaacaaacgcacuagaag

SEQ ID NO: 120172 - RNA, 19 nt, Artificial Sequence
  Description of Artificial Sequence: Synthetic oligonucleotide
  Sense strand starting at position 2777 of SEQ ID NO: 1531
uguccuaccugagugacaa

SEQ ID NO: 120173 - RNA, 19 nt, Artificial Sequence
  Description of Artificial Sequence: Synthetic oligonucleotide
  Antisense strand to SEQ ID NO: 120172
uugucacucagguaggaca

SEQ ID NO: 120174 - RNA, 19 nt, Artificial Sequence
  Description of Artificial Sequence: Synthetic oligonucleotide
  Sense strand starting at position 2778 of SEQ ID NO: 1531
guccuaccugagugacaau

SEQ ID NO: 120175 - RNA, 19 nt, Artificial Sequence
  Description of Artificial Sequence: Synthetic oligonucleotide
  Antisense strand to SEQ ID NO: 120174
auugucacucagguaggac

SEQ ID NO: 120176 - RNA, 19 nt, Artificial Sequence
  Description of Artificial Sequence: Synthetic oligonucleotide
  Sense strand starting at position 2785 of SEQ ID NO: 1531
cugagugacaaugagcuau

SEQ ID NO: 120177 - RNA, 19 nt, Artificial Sequence
  Description of Artificial Sequence: Synthetic oligonucleotide
  Antisense strand to SEQ ID NO: 120176
auagcucauugucacucag

SEQ ID NO: 120178 - RNA, 19 nt, Artificial Sequence
  Description of Artificial Sequence: Synthetic oligonucleotide
  Sense strand starting at position 2789 of SEQ ID NO: 1531
gugacaaugagcuauggcu

SEQ ID NO: 120179 - RNA, 19 nt, Artificial Sequence
  Description of Artificial Sequence: Synthetic oligonucleotide
  Antisense strand to SEQ ID NO: 120178
agccauagcucauugucac

SEQ ID NO: 120180 - RNA, 19 nt, Artificial Sequence
  Description of Artificial Sequence: Synthetic oligonucleotide
  Sense strand starting at position 2791 of SEQ ID NO: 1531
gacaaugagcuauggcuau

SEQ ID NO: 120181 - RNA, 19 nt, Artificial Sequence
  Description of Artificial Sequence: Synthetic oligonucleotide
  Antisense strand to SEQ ID NO: 120180
auagccauagcucauuguc

SEQ ID NO: 120182 - RNA, 19 nt, Artificial Sequence
  Description of Artificial Sequence: Synthetic oligonucleotide
  Sense strand starting at position 2797 of SEQ ID NO: 1531
gagcuauggcuaugagaac

SEQ ID NO: 120183 - RNA, 19 nt, Artificial Sequence
  Description of Artificial Sequence: Synthetic oligonucleotide
  Antisense strand to SEQ ID NO: 120182
guucucauagccauagcuc

SEQ ID NO: 120184 - RNA, 19 nt, Artificial Sequence
  Description of Artificial Sequence: Synthetic oligonucleotide
  Sense strand starting at position 2958 of SEQ ID NO: 1531
ccggcuauacucuaacaaa

SEQ ID NO: 120185 - RNA, 19 nt, Artificial Sequence
  Description of Artificial Sequence: Synthetic oligonucleotide
  Antisense strand to SEQ ID NO: 120184
uuuguuagaguauagccgg

SEQ ID NO: 120186 - RNA, 19 nt, Artificial Sequence
  Description of Artificial Sequence: Synthetic oligonucleotide
  Sense strand starting at position 3048 of SEQ ID NO: 1531
ccuaauugugcccauuaug

SEQ ID NO: 120187 - RNA, 19 nt, Artificial Sequence
  Description of Artificial Sequence: Synthetic oligonucleotide
  Antisense strand to SEQ ID NO: 120186
cauaaugggcacaauuagg

SEQ ID NO: 120188 - RNA, 19 nt, Artificial Sequence
  Description of Artificial Sequence: Synthetic oligonucleotide
  Sense strand starting at position 3154 of SEQ ID NO: 1531
uuuagaauugucuagcuca

SEQ ID NO: 120189 - RNA, 19 nt, Artificial Sequence
  Description of Artificial Sequence: Synthetic oligonucleotide
  Antisense strand to SEQ ID NO: 120188
ugagcuagacaauucuaaa

SEQ ID NO: 120190 - RNA, 19 nt, Artificial Sequence
  Description of Artificial Sequence: Synthetic oligonucleotide
  Sense strand starting at position 3157 of SEQ ID NO: 1531
agaauugucuagcucagaa

SEQ ID NO: 120191 - RNA, 19 nt, Artificial Sequence
  Description of Artificial Sequence: Synthetic oligonucleotide
  Antisense strand to SEQ ID NO: 120190
uucugagcuagacaauucu

SEQ ID NO: 120192 - RNA, 19 nt, Artificial Sequence
  Description of Artificial Sequence: Synthetic oligonucleotide
  Sense strand starting at position 3227 of SEQ ID NO: 1531
agggauacaccuggguuua

SEQ ID NO: 120193 - RNA, 19 nt, Artificial Sequence
  Description of Artificial Sequence: Synthetic oligonucleotide
  Antisense strand to SEQ ID NO: 120192
uaaacccagguguaucccu

SEQ ID NO: 120194 - RNA, 19 nt, Artificial Sequence
  Description of Artificial Sequence: Synthetic oligonucleotide
  Sense strand starting at position 3229 of SEQ ID NO: 1531
ggauacaccuggguuuaca

SEQ ID NO: 120195 - RNA, 19 nt, Artificial Sequence
  Description of Artificial Sequence: Synthetic oligonucleotide
  Antisense strand to SEQ ID NO: 120194
uguaaacccagguguaucc

SEQ ID NO: 120196 - RNA, 19 nt, Artificial Sequence
  Description of Artificial Sequence: Synthetic oligonucleotide
  Sense strand starting at position 3344 of SEQ ID NO: 1531
gagguugacaaguaaaguc

SEQ ID NO: 120197 - RNA, 19 nt, Artificial Sequence
  Description of Artificial Sequence: Synthetic oligonucleotide
  Antisense strand to SEQ ID NO: 120196
gacuuuacuugucaaccuc

SEQ ID NO: 120198 - RNA, 19 nt, Artificial Sequence
  Description of Artificial Sequence: Synthetic oligonucleotide
  Sense strand starting at position 3576 of SEQ ID NO: 1531
ucguucuagaaaggugaga

SEQ ID NO: 120199 - RNA, 19 nt, Artificial Sequence
  Description of Artificial Sequence: Synthetic oligonucleotide
  Antisense strand to SEQ ID NO: 120198
ucucaccuuucuagaacga

SEQ ID NO: 120200 - RNA, 19 nt, Artificial Sequence
  Description of Artificial Sequence: Synthetic oligonucleotide
  Sense strand starting at position 3696 of SEQ ID NO: 1531
gcuaguuaaaucugagaug

SEQ ID NO: 120201 - RNA, 19 nt, Artificial Sequence
  Description of Artificial Sequence: Synthetic oligonucleotide
  Antisense strand to SEQ ID NO: 120200
caucucagauuuaacuagc

SEQ ID NO: 120202 - RNA, 19 nt, Artificial Sequence
  Description of Artificial Sequence: Synthetic oligonucleotide
  Sense strand starting at position 3715 of SEQ ID NO: 1531
ggagcacagaucuguagaa

SEQ ID NO: 120203 - RNA, 19 nt, Artificial Sequence
  Description of Artificial Sequence: Synthetic oligonucleotide
  Antisense strand to SEQ ID NO: 120202
uucuacagaucugugcucc

SEQ ID NO: 120204 - RNA, 19 nt, Artificial Sequence
  Description of Artificial Sequence: Synthetic oligonucleotide
  Sense strand starting at position 3776 of SEQ ID NO: 1531
uguccagaaccagguuaua

SEQ ID NO: 120205 - RNA, 19 nt, Artificial Sequence
  Description of Artificial Sequence: Synthetic oligonucleotide
  Antisense strand to SEQ ID NO: 120204
uauaaccugguucuggaca

SEQ ID NO: 120206 - RNA, 19 nt, Artificial Sequence
  Description of Artificial Sequence: Synthetic oligonucleotide
  Sense strand starting at position 3910 of SEQ ID NO: 1531
cauagaaggucuccagauu

SEQ ID NO: 120207 - RNA, 19 nt, Artificial Sequence
  Description of Artificial Sequence: Synthetic oligonucleotide
  Antisense strand to SEQ ID NO: 120206
aaucuggagaccuucuaug

SEQ ID NO: 120208 - RNA, 19 nt, Artificial Sequence
  Description of Artificial Sequence: Synthetic oligonucleotide
  Sense strand starting at position 80 of SEQ ID NO: 1532
aaucuaguggcauagaacu

SEQ ID NO: 120209 - RNA, 19 nt, Artificial Sequence
  Description of Artificial Sequence: Synthetic oligonucleotide
  Antisense strand to SEQ ID NO: 120208
aguucuaugccacuagauu

SEQ ID NO: 120210 - RNA, 19 nt, Artificial Sequence
  Description of Artificial Sequence: Synthetic oligonucleotide
  Sense strand starting at position 119 of SEQ ID NO: 1532
ccauuaaugcaguaacaag

SEQ ID NO: 120211 - RNA, 19 nt, Artificial Sequence
  Description of Artificial Sequence: Synthetic oligonucleotide
  Antisense strand to SEQ ID NO: 120210
cuuguuacugcauuaaugg

SEQ ID NO: 120212 - RNA, 19 nt, Artificial Sequence
  Description of Artificial Sequence: Synthetic oligonucleotide
  Sense strand starting at position 673 of SEQ ID NO: 1532
uguugaacucuggguagag

SEQ ID NO: 120213 - RNA, 19 nt, Artificial Sequence
  Description of Artificial Sequence: Synthetic oligonucleotide
  Antisense strand to SEQ ID NO: 120212
cucuacccagaguucaaca

SEQ ID NO: 120214 - RNA, 19 nt, Artificial Sequence
  Description of Artificial Sequence: Synthetic oligonucleotide
  Sense strand starting at position 674 of SEQ ID NO: 1532
guugaacucuggguagaga

SEQ ID NO: 120215 - RNA, 19 nt, Artificial Sequence
  Description of Artificial Sequence: Synthetic oligonucleotide
  Antisense strand to SEQ ID NO: 120214
ucucuacccagaguucaac

SEQ ID NO: 120216 - RNA, 19 nt, Artificial Sequence
  Description of Artificial Sequence: Synthetic oligonucleotide
  Sense strand starting at position 703 of SEQ ID NO: 1532
ccuggagauccuuagcaac

SEQ ID NO: 120217 - RNA, 19 nt, Artificial Sequence
  Description of Artificial Sequence: Synthetic oligonucleotide
  Antisense strand to SEQ ID NO: 120216
guugcuaaggaucuccagg

SEQ ID NO: 120218 - RNA, 19 nt, Artificial Sequence
  Description of Artificial Sequence: Synthetic oligonucleotide
  Sense strand starting at position 705 of SEQ ID NO: 1532
uggagauccuuagcaacaa

SEQ ID NO: 120219 - RNA, 19 nt, Artificial Sequence
  Description of Artificial Sequence: Synthetic oligonucleotide
  Antisense strand to SEQ ID NO: 120218
uuguugcuaaggaucucca

SEQ ID NO: 120220 - RNA, 19 nt, Artificial Sequence
  Description of Artificial Sequence: Synthetic oligonucleotide
  Sense strand starting at position 824 of SEQ ID NO: 1532
ugcccaguuggugaaauaa

SEQ ID NO: 120221 - RNA, 19 nt, Artificial Sequence
  Description of Artificial Sequence: Synthetic oligonucleotide
  Antisense strand to SEQ ID NO: 120220
uuauuucaccaacugggca

SEQ ID NO: 120222 - RNA, 19 nt, Artificial Sequence
  Description of Artificial Sequence: Synthetic oligonucleotide
  Sense strand starting at position 924 of SEQ ID NO: 1532
uccagaaagcaaugugaac

SEQ ID NO: 120223 - RNA, 19 nt, Artificial Sequence
  Description of Artificial Sequence: Synthetic oligonucleotide
  Antisense strand to SEQ ID NO: 120222
guucacauugcuuucugga

SEQ ID NO: 120224 - RNA, 19 nt, Artificial Sequence
  Description of Artificial Sequence: Synthetic oligonucleotide
  Sense strand starting at position 1002 of SEQ ID NO: 1532
ucagaacuacacugagguu

SEQ ID NO: 120225 - RNA, 19 nt, Artificial Sequence
  Description of Artificial Sequence: Synthetic oligonucleotide
  Antisense strand to SEQ ID NO: 120224
aaccucaguguaguucuga

SEQ ID NO: 120226 - RNA, 19 nt, Artificial Sequence
  Description of Artificial Sequence: Synthetic oligonucleotide
  Sense strand starting at position 1065 of SEQ ID NO: 1532
uugugaaauccuggucaga

SEQ ID NO: 120227 - RNA, 19 nt, Artificial Sequence
  Description of Artificial Sequence: Synthetic oligonucleotide
  Antisense strand to SEQ ID NO: 120226
ucugaccaggauuucacaa

SEQ ID NO: 120228 - RNA, 19 nt, Artificial Sequence
  Description of Artificial Sequence: Synthetic oligonucleotide
  Sense strand starting at position 1067 of SEQ ID NO: 1532
gugaaauccuggucagaac

SEQ ID NO: 120229 - RNA, 19 nt, Artificial Sequence
  Description of Artificial Sequence: Synthetic oligonucleotide
  Antisense strand to SEQ ID NO: 120228
guucugaccaggauuucac

SEQ ID NO: 120230 - RNA, 19 nt, Artificial Sequence
  Description of Artificial Sequence: Synthetic oligonucleotide
  Sense strand starting at position 1150 of SEQ ID NO: 1532
cugagaaacuguguuggau

SEQ ID NO: 120231 - RNA, 19 nt, Artificial Sequence
  Description of Artificial Sequence: Synthetic oligonucleotide
  Antisense strand to SEQ ID NO: 120230
auccaacacaguuucucag

SEQ ID NO: 120232 - RNA, 19 nt, Artificial Sequence
  Description of Artificial Sequence: Synthetic oligonucleotide
  Sense strand starting at position 1153 of SEQ ID NO: 1532
agaaacuguguuggaucaa

SEQ ID NO: 120233 - RNA, 19 nt, Artificial Sequence
  Description of Artificial Sequence: Synthetic oligonucleotide
  Antisense strand to SEQ ID NO: 120232
uugauccaacacaguuucu

SEQ ID NO: 120234 - RNA, 19 nt, Artificial Sequence
  Description of Artificial Sequence: Synthetic oligonucleotide
  Sense strand starting at position 1226 of SEQ ID NO: 1532
gaggacuucucagccagag

SEQ ID NO: 120235 - RNA, 19 nt, Artificial Sequence
  Description of Artificial Sequence: Synthetic oligonucleotide
  Antisense strand to SEQ ID NO: 120234
cucuggcugagaaguccuc

SEQ ID NO: 120236 - RNA, 19 nt, Artificial Sequence
  Description of Artificial Sequence: Synthetic oligonucleotide
  Sense strand starting at position 1306 of SEQ ID NO: 1532
gaaccagcccugugagaaa

SEQ ID NO: 120237 - RNA, 19 nt, Artificial Sequence
  Description of Artificial Sequence: Synthetic oligonucleotide
  Antisense strand to SEQ ID NO: 120236
uuucucacagggcugguuc

SEQ ID NO: 120238 - RNA, 19 nt, Artificial Sequence
  Description of Artificial Sequence: Synthetic oligonucleotide
  Sense strand starting at position 1456 of SEQ ID NO: 1532
accauuuacucguuuccua

SEQ ID NO: 120239 - RNA, 19 nt, Artificial Sequence
  Description of Artificial Sequence: Synthetic oligonucleotide
  Antisense strand to SEQ ID NO: 120238
uaggaaacgaguaaauggu

SEQ ID NO: 120240 - RNA, 19 nt, Artificial Sequence
  Description of Artificial Sequence: Synthetic oligonucleotide
  Sense strand starting at position 1492 of SEQ ID NO: 1532
aguggagcuagauauaagu

SEQ ID NO: 120241 - RNA, 19 nt, Artificial Sequence
  Description of Artificial Sequence: Synthetic oligonucleotide
  Antisense strand to SEQ ID NO: 120240
acuuauaucuagcuccacu

SEQ ID NO: 120242 - RNA, 19 nt, Artificial Sequence
  Description of Artificial Sequence: Synthetic oligonucleotide
  Sense strand starting at position 1523 of SEQ ID NO: 1532
ugauaaacauguguauaug

SEQ ID NO: 120243 - RNA, 19 nt, Artificial Sequence
  Description of Artificial Sequence: Synthetic oligonucleotide
  Antisense strand to SEQ ID NO: 120242
cauauacacauguuuauca

SEQ ID NO: 120244 - RNA, 19 nt, Artificial Sequence
  Description of Artificial Sequence: Synthetic oligonucleotide
  Sense strand starting at position 1649 of SEQ ID NO: 1532
uggucaugcagagauucua

SEQ ID NO: 120245 - RNA, 19 nt, Artificial Sequence
  Description of Artificial Sequence: Synthetic oligonucleotide
  Antisense strand to SEQ ID NO: 120244
uagaaucucugcaugacca

SEQ ID NO: 120246 - RNA, 19 nt, Artificial Sequence
  Description of Artificial Sequence: Synthetic oligonucleotide
  Sense strand starting at position 1941 of SEQ ID NO: 1532
acaucucaauggucugaua

SEQ ID NO: 120247 - RNA, 19 nt, Artificial Sequence
  Description of Artificial Sequence: Synthetic oligonucleotide
  Antisense strand to SEQ ID NO: 120246
uaucagaccauugagaugu

SEQ ID NO: 120248 - RNA, 19 nt, Artificial Sequence
  Description of Artificial Sequence: Synthetic oligonucleotide
  Sense strand starting at position 1974 of SEQ ID NO: 1532
gaugcagcccuuuauagga

SEQ ID NO: 120249 - RNA, 19 nt, Artificial Sequence
  Description of Artificial Sequence: Synthetic oligonucleotide
  Antisense strand to SEQ ID NO: 120248
uccuauaaagggcugcauc

SEQ ID NO: 120250 - RNA, 19 nt, Artificial Sequence
  Description of Artificial Sequence: Synthetic oligonucleotide
  Sense strand starting at position 2274 of SEQ ID NO: 1532
gauuauuggcugggaagca

SEQ ID NO: 120251 - RNA, 19 nt, Artificial Sequence
  Description of Artificial Sequence: Synthetic oligonucleotide
  Antisense strand to SEQ ID NO: 120250
ugcuucccagccaauaauc

SEQ ID NO: 120252 - RNA, 19 nt, Artificial Sequence
  Description of Artificial Sequence: Synthetic oligonucleotide
  Sense strand starting at position 2337 of SEQ ID NO: 1532
cuuugaauccaagguuuga

SEQ ID NO: 120253 - RNA, 19 nt, Artificial Sequence
  Description of Artificial Sequence: Synthetic oligonucleotide
  Antisense strand to SEQ ID NO: 120252
ucaaaccuuggauucaaag

SEQ ID NO: 120254 - RNA, 19 nt, Artificial Sequence
  Description of Artificial Sequence: Synthetic oligonucleotide
  Sense strand starting at position 2374 of SEQ ID NO: 1532
agugucaccacuuagaagu

SEQ ID NO: 120255 - RNA, 19 nt, Artificial Sequence
  Description of Artificial Sequence: Synthetic oligonucleotide
  Antisense strand to SEQ ID NO: 120254
acuucuaaguggugacacu

SEQ ID NO: 120256 - RNA, 19 nt, Artificial Sequence
  Description of Artificial Sequence: Synthetic oligonucleotide
  Sense strand starting at position 2521 of SEQ ID NO: 1532
aguuucgugcucgcauaua

SEQ ID NO: 120257 - RNA, 19 nt, Artificial Sequence
  Description of Artificial Sequence: Synthetic oligonucleotide
  Antisense strand to SEQ ID NO: 120256
uauaugcgagcacgaaacu

SEQ ID NO: 120258 - RNA, 19 nt, Artificial Sequence
  Description of Artificial Sequence: Synthetic oligonucleotide
  Sense strand starting at position 2561 of SEQ ID NO: 1532
gcuauuauuagggauguca

SEQ ID NO: 120259 - RNA, 19 nt, Artificial Sequence
  Description of Artificial Sequence: Synthetic oligonucleotide
  Antisense strand to SEQ ID NO: 120258
ugacaucccuaauaauagc

SEQ ID NO: 120260 - RNA, 19 nt, Artificial Sequence
  Description of Artificial Sequence: Synthetic oligonucleotide
  Sense strand starting at position 2563 of SEQ ID NO: 1532
uauuauuagggaugucaaa

SEQ ID NO: 120261 - RNA, 19 nt, Artificial Sequence
  Description of Artificial Sequence: Synthetic oligonucleotide
  Antisense strand to SEQ ID NO: 120260
uuugacaucccuaauaaua

SEQ ID NO: 120262 - RNA, 19 nt, Artificial Sequence
  Description of Artificial Sequence: Synthetic oligonucleotide
  Sense strand starting at position 2595 of SEQ ID NO: 1532
agagcagaguucucaaacu

SEQ ID NO: 120263 - RNA, 19 nt, Artificial Sequence
  Description of Artificial Sequence: Synthetic oligonucleotide
  Antisense strand to SEQ ID NO: 120262
aguuugagaacucugcucu

SEQ ID NO: 120264 - RNA, 19 nt, Artificial Sequence
  Description of Artificial Sequence: Synthetic oligonucleotide
  Sense strand starting at position 2637 of SEQ ID NO: 1532
aauguaaauggauggugua

SEQ ID NO: 120265 - RNA, 19 nt, Artificial Sequence
  Description of Artificial Sequence: Synthetic oligonucleotide
  Antisense strand to SEQ ID NO: 120264
uacaccauccauuuacauu

SEQ ID NO: 120266 - RNA, 19 nt, Artificial Sequence
  Description of Artificial Sequence: Synthetic oligonucleotide
  Sense strand starting at position 2797 of SEQ ID NO: 1532
augguuucccugcagggaa

SEQ ID NO: 120267 - RNA, 19 nt, Artificial Sequence
  Description of Artificial Sequence: Synthetic oligonucleotide
  Antisense strand to SEQ ID NO: 120266
uucccugcagggaaaccau

SEQ ID NO: 120268 - RNA, 19 nt, Artificial Sequence
  Description of Artificial Sequence: Synthetic oligonucleotide
  Sense strand starting at position 3158 of SEQ ID NO: 1532
acugaugcugcucaucuaa

SEQ ID NO: 120269 - RNA, 19 nt, Artificial Sequence
  Description of Artificial Sequence: Synthetic oligonucleotide
  Antisense strand to SEQ ID NO: 120268
uuagaugagcagcaucagu

SEQ ID NO: 120270 - RNA, 19 nt, Artificial Sequence
  Description of Artificial Sequence: Synthetic oligonucleotide
  Sense strand starting at position 3183 of SEQ ID NO: 1532
ugaacuacucacgagguau

SEQ ID NO: 120271 - RNA, 19 nt, Artificial Sequence
  Description of Artificial Sequence: Synthetic oligonucleotide
  Antisense strand to SEQ ID NO: 120270
auaccucgugaguaguuca

SEQ ID NO: 120272 - RNA, 19 nt, Artificial Sequence
  Description of Artificial Sequence: Synthetic oligonucleotide
  Sense strand starting at position 3185 of SEQ ID NO: 1532
aacuacucacgagguauua

SEQ ID NO: 120273 - RNA, 19 nt, Artificial Sequence
  Description of Artificial Sequence: Synthetic oligonucleotide
  Antisense strand to SEQ ID NO: 120272
uaauaccucgugaguaguu

SEQ ID NO: 120274 - RNA, 19 nt, Artificial Sequence
  Description of Artificial Sequence: Synthetic oligonucleotide
  Sense strand starting at position 3194 of SEQ ID NO: 1532
cgagguauuaaccagaugu

SEQ ID NO: 120275 - RNA, 19 nt, Artificial Sequence
  Description of Artificial Sequence: Synthetic oligonucleotide
  Antisense strand to SEQ ID NO: 120274
acaucugguuaauaccucg

SEQ ID NO: 120276 - RNA, 19 nt, Artificial Sequence
  Description of Artificial Sequence: Synthetic oligonucleotide
  Sense strand starting at position 3239 of SEQ ID NO: 1532
aaugacuaguggucaaauu

SEQ ID NO: 120277 - RNA, 19 nt, Artificial Sequence
  Description of Artificial Sequence: Synthetic oligonucleotide
  Antisense strand to SEQ ID NO: 120276
aauuugaccacuagucauu

SEQ ID NO: 120278 - RNA, 19 nt, Artificial Sequence
  Description of Artificial Sequence: Synthetic oligonucleotide
  Sense strand starting at position 3240 of SEQ ID NO: 1532
augacuaguggucaaauuc

SEQ ID NO: 120279 - RNA, 19 nt, Artificial Sequence
  Description of Artificial Sequence: Synthetic oligonucleotide
  Antisense strand to SEQ ID NO: 120278
gaauuugaccacuagucau

SEQ ID NO: 120280 - RNA, 19 nt, Artificial Sequence
  Description of Artificial Sequence: Synthetic oligonucleotide
  Sense strand starting at position 3549 of SEQ ID NO: 1532
agugaacagauugaucgua

SEQ ID NO: 120281 - RNA, 19 nt, Artificial Sequence
  Description of Artificial Sequence: Synthetic oligonucleotide
  Antisense strand to SEQ ID NO: 120280
uacgaucaaucuguucacu

SEQ ID NO: 120282 - RNA, 19 nt, Artificial Sequence
  Description of Artificial Sequence: Synthetic oligonucleotide
  Sense strand starting at position 3551 of SEQ ID NO: 1532
ugaacagauugaucguauc

SEQ ID NO: 120283 - RNA, 19 nt, Artificial Sequence
  Description of Artificial Sequence: Synthetic oligonucleotide
  Antisense strand to SEQ ID NO: 120282
gauacgaucaaucuguuca

SEQ ID NO: 120284 - RNA, 19 nt, Artificial Sequence
  Description of Artificial Sequence: Synthetic oligonucleotide
  Sense strand starting at position 3599 of SEQ ID NO: 1532
ggagaaguagcaugaugag

SEQ ID NO: 120285 - RNA, 19 nt, Artificial Sequence
  Description of Artificial Sequence: Synthetic oligonucleotide
  Antisense strand to SEQ ID NO: 120284
cucaucaugcuacuucucc

SEQ ID NO: 120286 - RNA, 19 nt, Artificial Sequence
  Description of Artificial Sequence: Synthetic oligonucleotide
  Sense strand starting at position 3811 of SEQ ID NO: 1532
uguaccauugguuagacua

SEQ ID NO: 120287 - RNA, 19 nt, Artificial Sequence
  Description of Artificial Sequence: Synthetic oligonucleotide
  Antisense strand to SEQ ID NO: 120286
uagucuaaccaaugguaca

SEQ ID NO: 120288 - RNA, 19 nt, Artificial Sequence
  Description of Artificial Sequence: Synthetic oligonucleotide
  Sense strand starting at position 76 of SEQ ID NO: 1533
gcacgcucuguguaaacau

SEQ ID NO: 120289 - RNA, 19 nt, Artificial Sequence
  Description of Artificial Sequence: Synthetic oligonucleotide
  Antisense strand to SEQ ID NO: 120288
auguuuacacagagcgugc

SEQ ID NO: 120290 - RNA, 19 nt, Artificial Sequence
  Description of Artificial Sequence: Synthetic oligonucleotide
  Sense strand starting at position 140 of SEQ ID NO: 1533
ccuugcagugcucgagaaa

SEQ ID NO: 120291 - RNA, 19 nt, Artificial Sequence
  Description of Artificial Sequence: Synthetic oligonucleotide
  Antisense strand to SEQ ID NO: 120290
uuucucgagcacugcaagg

SEQ ID NO: 120292 - RNA, 19 nt, Artificial Sequence
  Description of Artificial Sequence: Synthetic oligonucleotide
  Sense strand starting at position 141 of SEQ ID NO: 1533
cuugcagugcucgagaaac

SEQ ID NO: 120293 - RNA, 19 nt, Artificial Sequence
  Description of Artificial Sequence: Synthetic oligonucleotide
  Antisense strand to SEQ ID NO: 120292
guuucucgagcacugcaag

SEQ ID NO: 120294 - RNA, 19 nt, Artificial Sequence
  Description of Artificial Sequence: Synthetic oligonucleotide
  Sense strand starting at position 143 of SEQ ID NO: 1533
ugcagugcucgagaaacac

SEQ ID NO: 120295 - RNA, 19 nt, Artificial Sequence
  Description of Artificial Sequence: Synthetic oligonucleotide
  Antisense strand to SEQ ID NO: 120294
guguuucucgagcacugca

SEQ ID NO: 120296 - RNA, 19 nt, Artificial Sequence
  Description of Artificial Sequence: Synthetic oligonucleotide
  Sense strand starting at position 493 of SEQ ID NO: 1533
acggccuucucggugauga

SEQ ID NO: 120297 - RNA, 19 nt, Artificial Sequence
  Description of Artificial Sequence: Synthetic oligonucleotide
  Antisense strand to SEQ ID NO: 120296
ucaucaccgagaaggccgu

SEQ ID NO: 120298 - RNA, 19 nt, Artificial Sequence
  Description of Artificial Sequence: Synthetic oligonucleotide
  Sense strand starting at position 495 of SEQ ID NO: 1533
ggccuucucggugaugaug

SEQ ID NO: 120299 - RNA, 19 nt, Artificial Sequence
  Description of Artificial Sequence: Synthetic oligonucleotide
  Antisense strand to SEQ ID NO: 120298
caucaucaccgagaaggcc

SEQ ID NO: 120300 - RNA, 19 nt, Artificial Sequence
  Description of Artificial Sequence: Synthetic oligonucleotide
  Sense strand starting at position 545 of SEQ ID NO: 1533
uggugcauuucuccaugau

SEQ ID NO: 120301 - RNA, 19 nt, Artificial Sequence
  Description of Artificial Sequence: Synthetic oligonucleotide
  Antisense strand to SEQ ID NO: 120300
aucauggagaaaugcacca

SEQ ID NO: 120302 - RNA, 19 nt, Artificial Sequence
  Description of Artificial Sequence: Synthetic oligonucleotide
  Sense strand starting at position 569 of SEQ ID NO: 1533
ggguguuguccuuugugca

SEQ ID NO: 120303 - RNA, 19 nt, Artificial Sequence
  Description of Artificial Sequence: Synthetic oligonucleotide
  Antisense strand to SEQ ID NO: 120302
ugcacaaaggacaacaccc

SEQ ID NO: 120304 - RNA, 19 nt, Artificial Sequence
  Description of Artificial Sequence: Synthetic oligonucleotide
  Sense strand starting at position 610 of SEQ ID NO: 1533
cuggucuucugacuggaca

SEQ ID NO: 120305 - RNA, 19 nt, Artificial Sequence
  Description of Artificial Sequence: Synthetic oligonucleotide
  Antisense strand to SEQ ID NO: 120304
uguccagucagaagaccag

SEQ ID NO: 120306 - RNA, 19 nt, Artificial Sequence
  Description of Artificial Sequence: Synthetic oligonucleotide
  Sense strand starting at position 658 of SEQ ID NO: 1533
accuucuugccagggauca

SEQ ID NO: 120307 - RNA, 19 nt, Artificial Sequence
  Description of Artificial Sequence: Synthetic oligonucleotide
  Antisense strand to SEQ ID NO: 120306
ugaucccuggcaagaaggu

SEQ ID NO: 120308 - RNA, 19 nt, Artificial Sequence
  Description of Artificial Sequence: Synthetic oligonucleotide
  Sense strand starting at position 659 of SEQ ID NO: 1533
ccuucuugccagggaucau

SEQ ID NO: 120309 - RNA, 19 nt, Artificial Sequence
  Description of Artificial Sequence: Synthetic oligonucleotide
  Antisense strand to SEQ ID NO: 120308
augaucccuggcaagaagg

SEQ ID NO: 120310 - RNA, 19 nt, Artificial Sequence
  Description of Artificial Sequence: Synthetic oligonucleotide
  Sense strand starting at position 763 of SEQ ID NO: 1533
gagucgucgcuggcgaaga

SEQ ID NO: 120311 - RNA, 19 nt, Artificial Sequence
  Description of Artificial Sequence: Synthetic oligonucleotide
  Antisense strand to SEQ ID NO: 120310
ucuucgccagcgacgacuc

SEQ ID NO: 120312 - RNA, 19 nt, Artificial Sequence
  Description of Artificial Sequence: Synthetic oligonucleotide
  Sense strand starting at position 809 of SEQ ID NO: 1533
ucugcuugccugcauugau

SEQ ID NO: 120313 - RNA, 19 nt, Artificial Sequence
  Description of Artificial Sequence: Synthetic oligonucleotide
  Antisense strand to SEQ ID NO: 120312
aucaaugcaggcaagcaga

SEQ ID NO: 120314 - RNA, 19 nt, Artificial Sequence
  Description of Artificial Sequence: Synthetic oligonucleotide
  Sense strand starting at position 841 of SEQ ID NO: 1533
accucaucuuccgugggaa

SEQ ID NO: 120315 - RNA, 19 nt, Artificial Sequence
  Description of Artificial Sequence: Synthetic oligonucleotide
  Antisense strand to SEQ ID NO: 120314
uucccacggaagaugaggu

SEQ ID NO: 120316 - RNA, 19 nt, Artificial Sequence
  Description of Artificial Sequence: Synthetic oligonucleotide
  Sense strand starting at position 842 of SEQ ID NO: 1533
ccucaucuuccgugggaaa

SEQ ID NO: 120317 - RNA, 19 nt, Artificial Sequence
  Description of Artificial Sequence: Synthetic oligonucleotide
  Antisense strand to SEQ ID NO: 120316
uuucccacggaagaugagg

SEQ ID NO: 120318 - RNA, 19 nt, Artificial Sequence
  Description of Artificial Sequence: Synthetic oligonucleotide
  Sense strand starting at position 843 of SEQ ID NO: 1533
cucaucuuccgugggaaac

SEQ ID NO: 120319 - RNA, 19 nt, Artificial Sequence
  Description of Artificial Sequence: Synthetic oligonucleotide
  Antisense strand to SEQ ID NO: 120318
guuucccacggaagaugag

SEQ ID NO: 120320 - RNA, 19 nt, Artificial Sequence
  Description of Artificial Sequence: Synthetic oligonucleotide
  Sense strand starting at position 878 of SEQ ID NO: 1533
ucccguucucacugugaag

SEQ ID NO: 120321 - RNA, 19 nt, Artificial Sequence
  Description of Artificial Sequence: Synthetic oligonucleotide
  Antisense strand to SEQ ID NO: 120320
cuucacagugagaacggga

SEQ ID NO: 120322 - RNA, 19 nt, Artificial Sequence
  Description of Artificial Sequence: Synthetic oligonucleotide
  Sense strand starting at position 880 of SEQ ID NO: 1533
ccguucucacugugaagau

SEQ ID NO: 120323 - RNA, 19 nt, Artificial Sequence
  Description of Artificial Sequence: Synthetic oligonucleotide
  Antisense strand to SEQ ID NO: 120322
aucuucacagugagaacgg

SEQ ID NO: 120324 - RNA, 19 nt, Artificial Sequence
  Description of Artificial Sequence: Synthetic oligonucleotide
  Sense strand starting at position 905 of SEQ ID NO: 1533
ucaugcugggacugaugaa

SEQ ID NO: 120325 - RNA, 19 nt, Artificial Sequence
  Description of Artificial Sequence: Synthetic oligonucleotide
  Antisense strand to SEQ ID NO: 120324
uucaucagucccagcauga

SEQ ID NO: 120326 - RNA, 19 nt, Artificial Sequence
  Description of Artificial Sequence: Synthetic oligonucleotide
  Sense strand starting at position 1056 of SEQ ID NO: 1533
gaucguuaagcgcucaauu

SEQ ID NO: 120327 - RNA, 19 nt, Artificial Sequence
  Description of Artificial Sequence: Synthetic oligonucleotide
  Antisense strand to SEQ ID NO: 120326
aauugagcgcuuaacgauc

SEQ ID NO: 120328 - RNA, 19 nt, Artificial Sequence
  Description of Artificial Sequence: Synthetic oligonucleotide
  Sense strand starting at position 1057 of SEQ ID NO: 1533
aucguuaagcgcucaauuc

SEQ ID NO: 120329 - RNA, 19 nt, Artificial Sequence
  Description of Artificial Sequence: Synthetic oligonucleotide
  Antisense strand to SEQ ID NO: 120328
gaauugagcgcuuaacgau

SEQ ID NO: 120330 - RNA, 19 nt, Artificial Sequence
  Description of Artificial Sequence: Synthetic oligonucleotide
  Sense strand starting at position 1067 of SEQ ID NO: 1533
gcucaauucguuucucgua

SEQ ID NO: 120331 - RNA, 19 nt, Artificial Sequence
  Description of Artificial Sequence: Synthetic oligonucleotide
  Antisense strand to SEQ ID NO: 120330
uacgagaaacgaauugagc

SEQ ID NO: 120332 - RNA, 19 nt, Artificial Sequence
  Description of Artificial Sequence: Synthetic oligonucleotide
  Sense strand starting at position 1094 of SEQ ID NO: 1533
ccuuuaucacgcgaucuac

SEQ ID NO: 120333 - RNA, 19 nt, Artificial Sequence
  Description of Artificial Sequence: Synthetic oligonucleotide
  Antisense strand to SEQ ID NO: 120332
guagaucgcgugauaaagg

SEQ ID NO: 120334 - RNA, 19 nt, Artificial Sequence
  Description of Artificial Sequence: Synthetic oligonucleotide
  Sense strand starting at position 1100 of SEQ ID NO: 1533
ucacgcgaucuacauaaau

SEQ ID NO: 120335 - RNA, 19 nt, Artificial Sequence
  Description of Artificial Sequence: Synthetic oligonucleotide
  Antisense strand to SEQ ID NO: 120334
auuuauguagaucgcguga

SEQ ID NO: 120336 - RNA, 19 nt, Artificial Sequence
  Description of Artificial Sequence: Synthetic oligonucleotide
  Sense strand starting at position 1102 of SEQ ID NO: 1533
acgcgaucuacauaaaugu

SEQ ID NO: 120337 - RNA, 19 nt, Artificial Sequence
  Description of Artificial Sequence: Synthetic oligonucleotide
  Antisense strand to SEQ ID NO: 120336
acauuuauguagaucgcgu

SEQ ID NO: 120338 - RNA, 19 nt, Artificial Sequence
  Description of Artificial Sequence: Synthetic oligonucleotide
  Sense strand starting at position 1547 of SEQ ID NO: 1533
ggguguucucgcccacgua

SEQ ID NO: 120339 - RNA, 19 nt, Artificial Sequence
  Description of Artificial Sequence: Synthetic oligonucleotide
  Antisense strand to SEQ ID NO: 120338
uacgugggcgagaacaccc

SEQ ID NO: 120340 - RNA, 19 nt, Artificial Sequence
  Description of Artificial Sequence: Synthetic oligonucleotide
  Sense strand starting at position 2556 of SEQ ID NO: 1533
cuccaacuugugcggaauu

SEQ ID NO: 120341 - RNA, 19 nt, Artificial Sequence
  Description of Artificial Sequence: Synthetic oligonucleotide
  Antisense strand to SEQ ID NO: 120340
aauuccgcacaaguuggag

SEQ ID NO: 120342 - RNA, 19 nt, Artificial Sequence
  Description of Artificial Sequence: Synthetic oligonucleotide
  Sense strand starting at position 2774 of SEQ ID NO: 1533
cccacacuccacggauauu

SEQ ID NO: 120343 - RNA, 19 nt, Artificial Sequence
  Description of Artificial Sequence: Synthetic oligonucleotide
  Antisense strand to SEQ ID NO: 120342
aauauccguggaguguggg

SEQ ID NO: 120344 - RNA, 19 nt, Artificial Sequence
  Description of Artificial Sequence: Synthetic oligonucleotide
  Sense strand starting at position 2783 of SEQ ID NO: 1533
cacggauauuuaggucauc

SEQ ID NO: 120345 - RNA, 19 nt, Artificial Sequence
  Description of Artificial Sequence: Synthetic oligonucleotide
  Antisense strand to SEQ ID NO: 120344
gaugaccuaaauauccgug

SEQ ID NO: 120346 - RNA, 19 nt, Artificial Sequence
  Description of Artificial Sequence: Synthetic oligonucleotide
  Sense strand starting at position 2986 of SEQ ID NO: 1533
uugugaggucucuggaugu

SEQ ID NO: 120347 - RNA, 19 nt, Artificial Sequence
  Description of Artificial Sequence: Synthetic oligonucleotide
  Antisense strand to SEQ ID NO: 120346
acauccagagaccucacaa

SEQ ID NO: 120348 - RNA, 19 nt, Artificial Sequence
  Description of Artificial Sequence: Synthetic oligonucleotide
  Sense strand starting at position 2990 of SEQ ID NO: 1533
gaggucucuggauguugga

SEQ ID NO: 120349 - RNA, 19 nt, Artificial Sequence
  Description of Artificial Sequence: Synthetic oligonucleotide
  Antisense strand to SEQ ID NO: 120348
uccaacauccagagaccuc

SEQ ID NO: 120350 - RNA, 19 nt, Artificial Sequence
  Description of Artificial Sequence: Synthetic oligonucleotide
  Sense strand starting at position 3074 of SEQ ID NO: 1533
ggucccaucccaugcuuua

SEQ ID NO: 120351 - RNA, 19 nt, Artificial Sequence
  Description of Artificial Sequence: Synthetic oligonucleotide
  Antisense strand to SEQ ID NO: 120350
uaaagcaugggaugggacc

SEQ ID NO: 120352 - RNA, 19 nt, Artificial Sequence
  Description of Artificial Sequence: Synthetic oligonucleotide
  Sense strand starting at position 3165 of SEQ ID NO: 1533
gaggaccagugaucucagu

SEQ ID NO: 120353 - RNA, 19 nt, Artificial Sequence
  Description of Artificial Sequence: Synthetic oligonucleotide
  Antisense strand to SEQ ID NO: 120352
acugagaucacugguccuc

SEQ ID NO: 120354 - RNA, 19 nt, Artificial Sequence
  Description of Artificial Sequence: Synthetic oligonucleotide
  Sense strand starting at position 3356 of SEQ ID NO: 1533
cuauaagcauguccugaca

SEQ ID NO: 120355 - RNA, 19 nt, Artificial Sequence
  Description of Artificial Sequence: Synthetic oligonucleotide
  Antisense strand to SEQ ID NO: 120354
ugucaggacaugcuuauag

SEQ ID NO: 120356 - RNA, 19 nt, Artificial Sequence
  Description of Artificial Sequence: Synthetic oligonucleotide
  Sense strand starting at position 3491 of SEQ ID NO: 1533
gucugcucucuccacugaa

SEQ ID NO: 120357 - RNA, 19 nt, Artificial Sequence
  Description of Artificial Sequence: Synthetic oligonucleotide
  Antisense strand to SEQ ID NO: 120356
uucaguggagagagcagac

SEQ ID NO: 120358 - RNA, 19 nt, Artificial Sequence
  Description of Artificial Sequence: Synthetic oligonucleotide
  Sense strand starting at position 3740 of SEQ ID NO: 1533
gacccaguuuccucuggga

SEQ ID NO: 120359 - RNA, 19 nt, Artificial Sequence
  Description of Artificial Sequence: Synthetic oligonucleotide
  Antisense strand to SEQ ID NO: 120358
ucccagaggaaacuggguc

SEQ ID NO: 120360 - RNA, 19 nt, Artificial Sequence
  Description of Artificial Sequence: Synthetic oligonucleotide
  Sense strand starting at position 3742 of SEQ ID NO: 1533
cccaguuuccucugggaaa

SEQ ID NO: 120361 - RNA, 19 nt, Artificial Sequence
  Description of Artificial Sequence: Synthetic oligonucleotide
  Antisense strand to SEQ ID NO: 120360
uuucccagaggaaacuggg

SEQ ID NO: 120362 - RNA, 19 nt, Artificial Sequence
  Description of Artificial Sequence: Synthetic oligonucleotide
  Sense strand starting at position 3744 of SEQ ID NO: 1533
caguuuccucugggaaaug

SEQ ID NO: 120363 - RNA, 19 nt, Artificial Sequence
  Description of Artificial Sequence: Synthetic oligonucleotide
  Antisense strand to SEQ ID NO: 120362
cauuucccagaggaaacug

SEQ ID NO: 120364 - RNA, 19 nt, Artificial Sequence
  Description of Artificial Sequence: Synthetic oligonucleotide
  Sense strand starting at position 3781 of SEQ ID NO: 1533
aggguaccuuucucauaac

SEQ ID NO: 120365 - RNA, 19 nt, Artificial Sequence
  Description of Artificial Sequence: Synthetic oligonucleotide
  Antisense strand to SEQ ID NO: 120364
guuaugagaaagguacccu

SEQ ID NO: 120366 - RNA, 19 nt, Artificial Sequence
  Description of Artificial Sequence: Synthetic oligonucleotide
  Sense strand starting at position 3829 of SEQ ID NO: 1533
aaguaaacaccaugaucga

SEQ ID NO: 120367 - RNA, 19 nt, Artificial Sequence
  Description of Artificial Sequence: Synthetic oligonucleotide
  Antisense strand to SEQ ID NO: 120366
ucgaucaugguguuuacuu

SEQ ID NO: 120368 - RNA, 19 nt, Artificial Sequence
  Description of Artificial Sequence: Synthetic oligonucleotide
  Sense strand starting at position 83 of SEQ ID NO: 1534
guccuaacuuggcuuccaa

SEQ ID NO: 120369 - RNA, 19 nt, Artificial Sequence
  Description of Artificial Sequence: Synthetic oligonucleotide
  Antisense strand to SEQ ID NO: 120368
uuggaagccaaguuaggac

SEQ ID NO: 120370 - RNA, 19 nt, Artificial Sequence
  Description of Artificial Sequence: Synthetic oligonucleotide
  Sense strand starting at position 366 of SEQ ID NO: 1534
accuaagucucugcgaaag

SEQ ID NO: 120371 - RNA, 19 nt, Artificial Sequence
  Description of Artificial Sequence: Synthetic oligonucleotide
  Antisense strand to SEQ ID NO: 120370
cuuucgcagagacuuaggu

SEQ ID NO: 120372 - RNA, 19 nt, Artificial Sequence
  Description of Artificial Sequence: Synthetic oligonucleotide
  Sense strand starting at position 420 of SEQ ID NO: 1534
ugcccugacugauccuuua

SEQ ID NO: 120373 - RNA, 19 nt, Artificial Sequence
  Description of Artificial Sequence: Synthetic oligonucleotide
  Antisense strand to SEQ ID NO: 120372
uaaaggaucagucagggca

SEQ ID NO: 120374 - RNA, 19 nt, Artificial Sequence
  Description of Artificial Sequence: Synthetic oligonucleotide
  Sense strand starting at position 450 of SEQ ID NO: 1534
ucagguagucaagguuagu

SEQ ID NO: 120375 - RNA, 19 nt, Artificial Sequence
  Description of Artificial Sequence: Synthetic oligonucleotide
  Antisense strand to SEQ ID NO: 120374
acuaaccuugacuaccuga

SEQ ID NO: 120376 - RNA, 19 nt, Artificial Sequence
  Description of Artificial Sequence: Synthetic oligonucleotide
  Sense strand starting at position 453 of SEQ ID NO: 1534
gguagucaagguuaguaaa

SEQ ID NO: 120377 - RNA, 19 nt, Artificial Sequence
  Description of Artificial Sequence: Synthetic oligonucleotide
  Antisense strand to SEQ ID NO: 120376
uuuacuaaccuugacuacc

SEQ ID NO: 120378 - RNA, 19 nt, Artificial Sequence
  Description of Artificial Sequence: Synthetic oligonucleotide
  Sense strand starting at position 708 of SEQ ID NO: 1534
ccaguuagcaagugguaga

SEQ ID NO: 120379 - RNA, 19 nt, Artificial Sequence
  Description of Artificial Sequence: Synthetic oligonucleotide
  Antisense strand to SEQ ID NO: 120378
ucuaccacuugcuaacugg

SEQ ID NO: 120380 - RNA, 19 nt, Artificial Sequence
  Description of Artificial Sequence: Synthetic oligonucleotide
  Sense strand starting at position 709 of SEQ ID NO: 1534
caguuagcaagugguagaa

SEQ ID NO: 120381 - RNA, 19 nt, Artificial Sequence
  Description of Artificial Sequence: Synthetic oligonucleotide
  Antisense strand to SEQ ID NO: 120380
uucuaccacuugcuaacug

SEQ ID NO: 120382 - RNA, 19 nt, Artificial Sequence
  Description of Artificial Sequence: Synthetic oligonucleotide
  Sense strand starting at position 735 of SEQ ID NO: 1534
ugaaacucgagucaucuga

SEQ ID NO: 120383 - RNA, 19 nt, Artificial Sequence
  Description of Artificial Sequence: Synthetic oligonucleotide
  Antisense strand to SEQ ID NO: 120382
ucagaugacucgaguuuca

SEQ ID NO: 120384 - RNA, 19 nt, Artificial Sequence
  Description of Artificial Sequence: Synthetic oligonucleotide
  Sense strand starting at position 1792 of SEQ ID NO: 1534
gcggguucuccgaggauuc

SEQ ID NO: 120385 - RNA, 19 nt, Artificial Sequence
  Description of Artificial Sequence: Synthetic oligonucleotide
  Antisense strand to SEQ ID NO: 120384
gaauccucggagaacccgc

SEQ ID NO: 120386 - RNA, 19 nt, Artificial Sequence
  Description of Artificial Sequence: Synthetic oligonucleotide
  Sense strand starting at position 1794 of SEQ ID NO: 1534
ggguucuccgaggauucgu

SEQ ID NO: 120387 - RNA, 19 nt, Artificial Sequence
  Description of Artificial Sequence: Synthetic oligonucleotide
  Antisense strand to SEQ ID NO: 120386
acgaauccucggagaaccc

SEQ ID NO: 120388 - RNA, 19 nt, Artificial Sequence
  Description of Artificial Sequence: Synthetic oligonucleotide
  Sense strand starting at position 1952 of SEQ ID NO: 1534
gagccaccgcuccauuuau

SEQ ID NO: 120389 - RNA, 19 nt, Artificial Sequence
  Description of Artificial Sequence: Synthetic oligonucleotide
  Antisense strand to SEQ ID NO: 120388
auaaauggagcgguggcuc

SEQ ID NO: 120390 - RNA, 19 nt, Artificial Sequence
  Description of Artificial Sequence: Synthetic oligonucleotide
  Sense strand starting at position 2569 of SEQ ID NO: 1534
auuaaaugguaugccaaau

SEQ ID NO: 120391 - RNA, 19 nt, Artificial Sequence
  Description of Artificial Sequence: Synthetic oligonucleotide
  Antisense strand to SEQ ID NO: 120390
auuuggcauaccauuuaau

SEQ ID NO: 120392 - RNA, 19 nt, Artificial Sequence
  Description of Artificial Sequence: Synthetic oligonucleotide
  Sense strand starting at position 2587 of SEQ ID NO: 1534
uugugaaaugaaggugaca

SEQ ID NO: 120393 - RNA, 19 nt, Artificial Sequence
  Description of Artificial Sequence: Synthetic oligonucleotide
  Antisense strand to SEQ ID NO: 120392
ugucaccuucauuucacaa

SEQ ID NO: 120394 - RNA, 19 nt, Artificial Sequence
  Description of Artificial Sequence: Synthetic oligonucleotide
  Sense strand starting at position 2624 of SEQ ID NO: 1534
aauaauaggugguccaaua

SEQ ID NO: 120395 - RNA, 19 nt, Artificial Sequence
  Description of Artificial Sequence: Synthetic oligonucleotide
  Antisense strand to SEQ ID NO: 120394
uauuggaccaccuauuauu

SEQ ID NO: 120396 - RNA, 19 nt, Artificial Sequence
  Description of Artificial Sequence: Synthetic oligonucleotide
  Sense strand starting at position 2631 of SEQ ID NO: 1534
ggugguccaauagguaaau

SEQ ID NO: 120397 - RNA, 19 nt, Artificial Sequence
  Description of Artificial Sequence: Synthetic oligonucleotide
  Antisense strand to SEQ ID NO: 120396
auuuaccuauuggaccacc

SEQ ID NO: 120398 - RNA, 19 nt, Artificial Sequence
  Description of Artificial Sequence: Synthetic oligonucleotide
  Sense strand starting at position 2643 of SEQ ID NO: 1534
gguaaaugucuggguccaa

SEQ ID NO: 120399 - RNA, 19 nt, Artificial Sequence
  Description of Artificial Sequence: Synthetic oligonucleotide
  Antisense strand to SEQ ID NO: 120398
uuggacccagacauuuacc

SEQ ID NO: 120400 - RNA, 19 nt, Artificial Sequence
  Description of Artificial Sequence: Synthetic oligonucleotide
  Sense strand starting at position 2644 of SEQ ID NO: 1534
guaaaugucuggguccaaa

SEQ ID NO: 120401 - RNA, 19 nt, Artificial Sequence
  Description of Artificial Sequence: Synthetic oligonucleotide
  Antisense strand to SEQ ID NO: 120400
uuuggacccagacauuuac

SEQ ID NO: 120402 - RNA, 19 nt, Artificial Sequence
  Description of Artificial Sequence: Synthetic oligonucleotide
  Sense strand starting at position 2686 of SEQ ID NO: 1534
ucaggauaccguugaccua

SEQ ID NO: 120403 - RNA, 19 nt, Artificial Sequence
  Description of Artificial Sequence: Synthetic oligonucleotide
  Antisense strand to SEQ ID NO: 120402
uaggucaacgguauccuga

SEQ ID NO: 120404 - RNA, 19 nt, Artificial Sequence
  Description of Artificial Sequence: Synthetic oligonucleotide
  Sense strand starting at position 2695 of SEQ ID NO: 1534
cguugaccuagagguagaa

SEQ ID NO: 120405 - RNA, 19 nt, Artificial Sequence
  Description of Artificial Sequence: Synthetic oligonucleotide
  Antisense strand to SEQ ID NO: 120404
uucuaccucuaggucaacg

SEQ ID NO: 120406 - RNA, 19 nt, Artificial Sequence
  Description of Artificial Sequence: Synthetic oligonucleotide
  Sense strand starting at position 2705 of SEQ ID NO: 1534
gagguagaaucgucaggaa

SEQ ID NO: 120407 - RNA, 19 nt, Artificial Sequence
  Description of Artificial Sequence: Synthetic oligonucleotide
  Antisense strand to SEQ ID NO: 120406
uuccugacgauucuaccuc

SEQ ID NO: 120408 - RNA, 19 nt, Artificial Sequence
  Description of Artificial Sequence: Synthetic oligonucleotide
  Sense strand starting at position 2735 of SEQ ID NO: 1534
agcaguauccaugggugau

SEQ ID NO: 120409 - RNA, 19 nt, Artificial Sequence
  Description of Artificial Sequence: Synthetic oligonucleotide
  Antisense strand to SEQ ID NO: 120408
aucacccauggauacugcu

SEQ ID NO: 120410 - RNA, 19 nt, Artificial Sequence
  Description of Artificial Sequence: Synthetic oligonucleotide
  Sense strand starting at position 2736 of SEQ ID NO: 1534
gcaguauccaugggugaug

SEQ ID NO: 120411 - RNA, 19 nt, Artificial Sequence
  Description of Artificial Sequence: Synthetic oligonucleotide
  Antisense strand to SEQ ID NO: 120410
caucacccauggauacugc

SEQ ID NO: 120412 - RNA, 19 nt, Artificial Sequence
  Description of Artificial Sequence: Synthetic oligonucleotide
  Sense strand starting at position 2845 of SEQ ID NO: 1534
ggacauuuaguuuguguuu

SEQ ID NO: 120413 - RNA, 19 nt, Artificial Sequence
  Description of Artificial Sequence: Synthetic oligonucleotide
  Antisense strand to SEQ ID NO: 120412
aaacacaaacuaaaugucc

SEQ ID NO: 120414 - RNA, 19 nt, Artificial Sequence
  Description of Artificial Sequence: Synthetic oligonucleotide
  Sense strand starting at position 2846 of SEQ ID NO: 1534
gacauuuaguuuguguuua

SEQ ID NO: 120415 - RNA, 19 nt, Artificial Sequence
  Description of Artificial Sequence: Synthetic oligonucleotide
  Antisense strand to SEQ ID NO: 120414
uaaacacaaacuaaauguc

SEQ ID NO: 120416 - RNA, 19 nt, Artificial Sequence
  Description of Artificial Sequence: Synthetic oligonucleotide
  Sense strand starting at position 2848 of SEQ ID NO: 1534
cauuuaguuuguguuuaag

SEQ ID NO: 120417 - RNA, 19 nt, Artificial Sequence
  Description of Artificial Sequence: Synthetic oligonucleotide
  Antisense strand to SEQ ID NO: 120416
cuuaaacacaaacuaaaug

SEQ ID NO: 120418 - RNA, 19 nt, Artificial Sequence
  Description of Artificial Sequence: Synthetic oligonucleotide
  Sense strand starting at position 2857 of SEQ ID NO: 1534
uguguuuaagggcacagaa

SEQ ID NO: 120419 - RNA, 19 nt, Artificial Sequence
  Description of Artificial Sequence: Synthetic oligonucleotide
  Antisense strand to SEQ ID NO: 120418
uucugugcccuuaaacaca

SEQ ID NO: 120420 - RNA, 19 nt, Artificial Sequence
  Description of Artificial Sequence: Synthetic oligonucleotide
  Sense strand starting at position 2881 of SEQ ID NO: 1534
uucuguuccuauguuuaaa

SEQ ID NO: 120421 - RNA, 19 nt, Artificial Sequence
  Description of Artificial Sequence: Synthetic oligonucleotide
  Antisense strand to SEQ ID NO: 120420
uuuaaacauaggaacagaa

SEQ ID NO: 120422 - RNA, 19 nt, Artificial Sequence
  Description of Artificial Sequence: Synthetic oligonucleotide
  Sense strand starting at position 2884 of SEQ ID NO: 1534
uguuccuauguuuaaaguu

SEQ ID NO: 120423 - RNA, 19 nt, Artificial Sequence
  Description of Artificial Sequence: Synthetic oligonucleotide
  Antisense strand to SEQ ID NO: 120422
aacuuuaaacauaggaaca

SEQ ID NO: 120424 - RNA, 19 nt, Artificial Sequence
  Description of Artificial Sequence: Synthetic oligonucleotide
  Sense strand starting at position 2902 of SEQ ID NO: 1534
uucuucuaggcuuggauaa

SEQ ID NO: 120425 - RNA, 19 nt, Artificial Sequence
  Description of Artificial Sequence: Synthetic oligonucleotide
  Antisense strand to SEQ ID NO: 120424
uuauccaagccuagaagaa

SEQ ID NO: 120426 - RNA, 19 nt, Artificial Sequence
  Description of Artificial Sequence: Synthetic oligonucleotide
  Sense strand starting at position 2903 of SEQ ID NO: 1534
ucuucuaggcuuggauaau

SEQ ID NO: 120427 - RNA, 19 nt, Artificial Sequence
  Description of Artificial Sequence: Synthetic oligonucleotide
  Antisense strand to SEQ ID NO: 120426
auuauccaagccuagaaga

SEQ ID NO: 120428 - RNA, 19 nt, Artificial Sequence
  Description of Artificial Sequence: Synthetic oligonucleotide
  Sense strand starting at position 2946 of SEQ ID NO: 1534
gagagucuggcaggucauu

SEQ ID NO: 120429 - RNA, 19 nt, Artificial Sequence
  Description of Artificial Sequence: Synthetic oligonucleotide
  Antisense strand to SEQ ID NO: 120428
aaugaccugccagacucuc

SEQ ID NO: 120430 - RNA, 19 nt, Artificial Sequence
  Description of Artificial Sequence: Synthetic oligonucleotide
  Sense strand starting at position 3039 of SEQ ID NO: 1534
gaucacugaggucgagagu

SEQ ID NO: 120431 - RNA, 19 nt, Artificial Sequence
  Description of Artificial Sequence: Synthetic oligonucleotide
  Antisense strand to SEQ ID NO: 120430
acucucgaccucagugauc

SEQ ID NO: 120432 - RNA, 19 nt, Artificial Sequence
  Description of Artificial Sequence: Synthetic oligonucleotide
  Sense strand starting at position 3158 of SEQ ID NO: 1534
gcggcuaaagcagaagaau

SEQ ID NO: 120433 - RNA, 19 nt, Artificial Sequence
  Description of Artificial Sequence: Synthetic oligonucleotide
  Antisense strand to SEQ ID NO: 120432
auucuucugcuuuagccgc

SEQ ID NO: 120434 - RNA, 19 nt, Artificial Sequence
  Description of Artificial Sequence: Synthetic oligonucleotide
  Sense strand starting at position 3295 of SEQ ID NO: 1534
cuauguuauaugggacugu

SEQ ID NO: 120435 - RNA, 19 nt, Artificial Sequence
  Description of Artificial Sequence: Synthetic oligonucleotide
  Antisense strand to SEQ ID NO: 120434
acagucccauauaacauag

SEQ ID NO: 120436 - RNA, 19 nt, Artificial Sequence
  Description of Artificial Sequence: Synthetic oligonucleotide
  Sense strand starting at position 3369 of SEQ ID NO: 1534
cuuugccaucacugugaaa

SEQ ID NO: 120437 - RNA, 19 nt, Artificial Sequence
  Description of Artificial Sequence: Synthetic oligonucleotide
  Antisense strand to SEQ ID NO: 120436
uuucacagugauggcaaag

SEQ ID NO: 120438 - RNA, 19 nt, Artificial Sequence
  Description of Artificial Sequence: Synthetic oligonucleotide
  Sense strand starting at position 3497 of SEQ ID NO: 1534
ugguuaaucugagccuacu

SEQ ID NO: 120439 - RNA, 19 nt, Artificial Sequence
  Description of Artificial Sequence: Synthetic oligonucleotide
  Antisense strand to SEQ ID NO: 120438
aguaggcucagauuaacca

SEQ ID NO: 120440 - RNA, 19 nt, Artificial Sequence
  Description of Artificial Sequence: Synthetic oligonucleotide
  Sense strand starting at position 3910 of SEQ ID NO: 1534
aaggaacauuuaugggagu

SEQ ID NO: 120441 - RNA, 19 nt, Artificial Sequence
  Description of Artificial Sequence: Synthetic oligonucleotide
  Antisense strand to SEQ ID NO: 120440
acucccauaaauguuccuu

SEQ ID NO: 120442 - RNA, 19 nt, Artificial Sequence
  Description of Artificial Sequence: Synthetic oligonucleotide
  Sense strand starting at position 3927 of SEQ ID NO: 1534
gugcuccuucuauagauuc

SEQ ID NO: 120443 - RNA, 19 nt, Artificial Sequence
  Description of Artificial Sequence: Synthetic oligonucleotide
  Antisense strand to SEQ ID NO: 120442
gaaucuauagaaggagcac

SEQ ID NO: 120444 - RNA, 19 nt, Artificial Sequence
  Description of Artificial Sequence: Synthetic oligonucleotide
  Sense strand starting at position 3970 of SEQ ID NO: 1534
ccuccuguggucuaaagua

SEQ ID NO: 120445 - RNA, 19 nt, Artificial Sequence
  Description of Artificial Sequence: Synthetic oligonucleotide
  Antisense strand to SEQ ID NO: 120444
uacuuuagaccacaggagg

SEQ ID NO: 120446 - RNA, 19 nt, Artificial Sequence
  Description of Artificial Sequence: Synthetic oligonucleotide
  Sense strand starting at position 3982 of SEQ ID NO: 1534
uaaaguagccgucaacauu

SEQ ID NO: 120447 - RNA, 19 nt, Artificial Sequence
  Description of Artificial Sequence: Synthetic oligonucleotide
  Antisense strand to SEQ ID NO: 120446
aauguugacggcuacuuua

SEQ ID NO: 120448 - RNA, 19 nt, Artificial Sequence
  Description of Artificial Sequence: Synthetic oligonucleotide
  Sense strand starting at position 3979 of SEQ ID NO: 1535
guguguucccauuagagaa

SEQ ID NO: 120449 - RNA, 19 nt, Artificial Sequence
  Description of Artificial Sequence: Synthetic oligonucleotide
  Antisense strand to SEQ ID NO: 120448
uucucuaaugggaacacac

SEQ ID NO: 120450 - RNA, 19 nt, Artificial Sequence
  Description of Artificial Sequence: Synthetic oligonucleotide
  Sense strand starting at position 3739 of SEQ ID NO: 1535
guuauugaucugcaaaguu

SEQ ID NO: 120451 - RNA, 19 nt, Artificial Sequence
  Description of Artificial Sequence: Synthetic oligonucleotide
  Antisense strand to SEQ ID NO: 120450
aacuuugcagaucaauaac

SEQ ID NO: 120452 - RNA, 19 nt, Artificial Sequence
  Description of Artificial Sequence: Synthetic oligonucleotide
  Sense strand starting at position 3302 of SEQ ID NO: 1535
acaugagaugucuguuaga

SEQ ID NO: 120453 - RNA, 19 nt, Artificial Sequence
  Description of Artificial Sequence: Synthetic oligonucleotide
  Antisense strand to SEQ ID NO: 120452
ucuaacagacaucucaugu

SEQ ID NO: 120454 - RNA, 19 nt, Artificial Sequence
  Description of Artificial Sequence: Synthetic oligonucleotide
  Sense strand starting at position 3293 of SEQ ID NO: 1535
acuuguucgacaugagaug

SEQ ID NO: 120455 - RNA, 19 nt, Artificial Sequence
  Description of Artificial Sequence: Synthetic oligonucleotide
  Antisense strand to SEQ ID NO: 120454
caucucaugucgaacaagu

SEQ ID NO: 120456 - RNA, 19 nt, Artificial Sequence
  Description of Artificial Sequence: Synthetic oligonucleotide
  Sense strand starting at position 3291 of SEQ ID NO: 1535
ggacuuguucgacaugaga

SEQ ID NO: 120457 - RNA, 19 nt, Artificial Sequence
  Description of Artificial Sequence: Synthetic oligonucleotide
  Antisense strand to SEQ ID NO: 120456
ucucaugucgaacaagucc

SEQ ID NO: 120458 - RNA, 19 nt, Artificial Sequence
  Description of Artificial Sequence: Synthetic oligonucleotide
  Sense strand starting at position 3186 of SEQ ID NO: 1535
uggaguauuugggacccga

SEQ ID NO: 120459 - RNA, 19 nt, Artificial Sequence
  Description of Artificial Sequence: Synthetic oligonucleotide
  Antisense strand to SEQ ID NO: 120458
ucgggucccaaauacucca

SEQ ID NO: 120460 - RNA, 19 nt, Artificial Sequence
  Description of Artificial Sequence: Synthetic oligonucleotide
  Sense strand starting at position 3176 of SEQ ID NO: 1535
caacgaucacuggaguauu

SEQ ID NO: 120461 - RNA, 19 nt, Artificial Sequence
  Description of Artificial Sequence: Synthetic oligonucleotide
  Antisense strand to SEQ ID NO: 120460
aauacuccagugaucguug

SEQ ID NO: 120462 - RNA, 19 nt, Artificial Sequence
  Description of Artificial Sequence: Synthetic oligonucleotide
  Sense strand starting at position 3174 of SEQ ID NO: 1535
gucaacgaucacuggagua

SEQ ID NO: 120463 - RNA, 19 nt, Artificial Sequence
  Description of Artificial Sequence: Synthetic oligonucleotide
  Antisense strand to SEQ ID NO: 120462
uacuccagugaucguugac

SEQ ID NO: 120464 - RNA, 19 nt, Artificial Sequence
  Description of Artificial Sequence: Synthetic oligonucleotide
  Sense strand starting at position 3129 of SEQ ID NO: 1535
cgaugagguuugcugauga

SEQ ID NO: 120465 - RNA, 19 nt, Artificial Sequence
  Description of Artificial Sequence: Synthetic oligonucleotide
  Antisense strand to SEQ ID NO: 120464
ucaucagcaaaccucaucg

SEQ ID NO: 120466 - RNA, 19 nt, Artificial Sequence
  Description of Artificial Sequence: Synthetic oligonucleotide
  Sense strand starting at position 3103 of SEQ ID NO: 1535
uccugaauguaucuugaag

SEQ ID NO: 120467 - RNA, 19 nt, Artificial Sequence
  Description of Artificial Sequence: Synthetic oligonucleotide
  Antisense strand to SEQ ID NO: 120466
cuucaagauacauucagga

SEQ ID NO: 120468 - RNA, 19 nt, Artificial Sequence
  Description of Artificial Sequence: Synthetic oligonucleotide
  Sense strand starting at position 3033 of SEQ ID NO: 1535
ccauuaucuaagcgaggga

SEQ ID NO: 120469 - RNA, 19 nt, Artificial Sequence
  Description of Artificial Sequence: Synthetic oligonucleotide
  Antisense strand to SEQ ID NO: 120468
ucccucgcuuagauaaugg

SEQ ID NO: 120470 - RNA, 19 nt, Artificial Sequence
  Description of Artificial Sequence: Synthetic oligonucleotide
  Sense strand starting at position 2990 of SEQ ID NO: 1535
gaguaaaguguguaugaca

SEQ ID NO: 120471 - RNA, 19 nt, Artificial Sequence
  Description of Artificial Sequence: Synthetic oligonucleotide
  Antisense strand to SEQ ID NO: 120470
ugucauacacacuuuacuc

SEQ ID NO: 120472 - RNA, 19 nt, Artificial Sequence
  Description of Artificial Sequence: Synthetic oligonucleotide
  Sense strand starting at position 2988 of SEQ ID NO: 1535
augaguaaaguguguauga

SEQ ID NO: 120473 - RNA, 19 nt, Artificial Sequence
  Description of Artificial Sequence: Synthetic oligonucleotide
  Antisense strand to SEQ ID NO: 120472
ucauacacacuuuacucau

SEQ ID NO: 120474 - RNA, 19 nt, Artificial Sequence
  Description of Artificial Sequence: Synthetic oligonucleotide
  Sense strand starting at position 2980 of SEQ ID NO: 1535
gaaguuaaaugaguaaagu

SEQ ID NO: 120475 - RNA, 19 nt, Artificial Sequence
  Description of Artificial Sequence: Synthetic oligonucleotide
  Antisense strand to SEQ ID NO: 120474
acuuuacucauuuaacuuc

SEQ ID NO: 120476 - RNA, 19 nt, Artificial Sequence
  Description of Artificial Sequence: Synthetic oligonucleotide
  Sense strand starting at position 2977 of SEQ ID NO: 1535
ggugaaguuaaaugaguaa

SEQ ID NO: 120477 - RNA, 19 nt, Artificial Sequence
  Description of Artificial Sequence: Synthetic oligonucleotide
  Antisense strand to SEQ ID NO: 120476
uuacucauuuaacuucacc

SEQ ID NO: 120478 - RNA, 19 nt, Artificial Sequence
  Description of Artificial Sequence: Synthetic oligonucleotide
  Sense strand starting at position 2888 of SEQ ID NO: 1535
ucauuuaggugauagggau

SEQ ID NO: 120479 - RNA, 19 nt, Artificial Sequence
  Description of Artificial Sequence: Synthetic oligonucleotide
  Antisense strand to SEQ ID NO: 120478
aucccuaucaccuaaauga

SEQ ID NO: 120480 - RNA, 19 nt, Artificial Sequence
  Description of Artificial Sequence: Synthetic oligonucleotide
  Sense strand starting at position 2849 of SEQ ID NO: 1535
ugacaaguguuuguuaauc

SEQ ID NO: 120481 - RNA, 19 nt, Artificial Sequence
  Description of Artificial Sequence: Synthetic oligonucleotide
  Antisense strand to SEQ ID NO: 120480
gauuaacaaacacuuguca

SEQ ID NO: 120482 - RNA, 19 nt, Artificial Sequence
  Description of Artificial Sequence: Synthetic oligonucleotide
  Sense strand starting at position 2848 of SEQ ID NO: 1535
uugacaaguguuuguuaau

SEQ ID NO: 120483 - RNA, 19 nt, Artificial Sequence
  Description of Artificial Sequence: Synthetic oligonucleotide
  Antisense strand to SEQ ID NO: 120482
auuaacaaacacuugucaa

SEQ ID NO: 120484 - RNA, 19 nt, Artificial Sequence
  Description of Artificial Sequence: Synthetic oligonucleotide
  Sense strand starting at position 2847 of SEQ ID NO: 1535
uuugacaaguguuuguuaa

SEQ ID NO: 120485 - RNA, 19 nt, Artificial Sequence
  Description of Artificial Sequence: Synthetic oligonucleotide
  Antisense strand to SEQ ID NO: 120484
uuaacaaacacuugucaaa

SEQ ID NO: 120486 - RNA, 19 nt, Artificial Sequence
  Description of Artificial Sequence: Synthetic oligonucleotide
  Sense strand starting at position 2567 of SEQ ID NO: 1535
uaguaagugguagaguuau

SEQ ID NO: 120487 - RNA, 19 nt, Artificial Sequence
  Description of Artificial Sequence: Synthetic oligonucleotide
  Antisense strand to SEQ ID NO: 120486
auaacucuaccacuuacua

SEQ ID NO: 120488 - RNA, 19 nt, Artificial Sequence
  Description of Artificial Sequence: Synthetic oligonucleotide
  Sense strand starting at position 2456 of SEQ ID NO: 1535
guguaagaagauuagcaca

SEQ ID NO: 120489 - RNA, 19 nt, Artificial Sequence
  Description of Artificial Sequence: Synthetic oligonucleotide
  Antisense strand to SEQ ID NO: 120488
ugugcuaaucuucuuacac

SEQ ID NO: 120490 - RNA, 19 nt, Artificial Sequence
  Description of Artificial Sequence: Synthetic oligonucleotide
  Sense strand starting at position 2445 of SEQ ID NO: 1535
acaugaguuauguguaaga

SEQ ID NO: 120491 - RNA, 19 nt, Artificial Sequence
  Description of Artificial Sequence: Synthetic oligonucleotide
  Antisense strand to SEQ ID NO: 120490
ucuuacacauaacucaugu

SEQ ID NO: 120492 - RNA, 19 nt, Artificial Sequence
  Description of Artificial Sequence: Synthetic oligonucleotide
  Sense strand starting at position 2436 of SEQ ID NO: 1535
gugggaaagacaugaguua

SEQ ID NO: 120493 - RNA, 19 nt, Artificial Sequence
  Description of Artificial Sequence: Synthetic oligonucleotide
  Antisense strand to SEQ ID NO: 120492
uaacucaugucuuucccac

SEQ ID NO: 120494 - RNA, 19 nt, Artificial Sequence
  Description of Artificial Sequence: Synthetic oligonucleotide
  Sense strand starting at position 2427 of SEQ ID NO: 1535
uguguugaugugggaaaga

SEQ ID NO: 120495 - RNA, 19 nt, Artificial Sequence
  Description of Artificial Sequence: Synthetic oligonucleotide
  Antisense strand to SEQ ID NO: 120494
ucuuucccacaucaacaca

SEQ ID NO: 120496 - RNA, 19 nt, Artificial Sequence
  Description of Artificial Sequence: Synthetic oligonucleotide
  Sense strand starting at position 2389 of SEQ ID NO: 1535
guguaaguuggcagcugua

SEQ ID NO: 120497 - RNA, 19 nt, Artificial Sequence
  Description of Artificial Sequence: Synthetic oligonucleotide
  Antisense strand to SEQ ID NO: 120496
uacagcugccaacuuacac

SEQ ID NO: 120498 - RNA, 19 nt, Artificial Sequence
  Description of Artificial Sequence: Synthetic oligonucleotide
  Sense strand starting at position 2093 of SEQ ID NO: 1535
cucacucagggcugucaau

SEQ ID NO: 120499 - RNA, 19 nt, Artificial Sequence
  Description of Artificial Sequence: Synthetic oligonucleotide
  Antisense strand to SEQ ID NO: 120498
auugacagcccugagugag

SEQ ID NO: 120500 - RNA, 19 nt, Artificial Sequence
  Description of Artificial Sequence: Synthetic oligonucleotide
  Sense strand starting at position 1657 of SEQ ID NO: 1535
cuaguuccuuccuuccaga

SEQ ID NO: 120501 - RNA, 19 nt, Artificial Sequence
  Description of Artificial Sequence: Synthetic oligonucleotide
  Antisense strand to SEQ ID NO: 120500
ucuggaaggaaggaacuag

SEQ ID NO: 120502 - RNA, 19 nt, Artificial Sequence
  Description of Artificial Sequence: Synthetic oligonucleotide
  Sense strand starting at position 1494 of SEQ ID NO: 1535
acaaguucuaccuaggugu

SEQ ID NO: 120503 - RNA, 19 nt, Artificial Sequence
  Description of Artificial Sequence: Synthetic oligonucleotide
  Antisense strand to SEQ ID NO: 120502
acaccuagguagaacuugu

SEQ ID NO: 120504 - RNA, 19 nt, Artificial Sequence
  Description of Artificial Sequence: Synthetic oligonucleotide
  Sense strand starting at position 1481 of SEQ ID NO: 1535
ucugauguuccacacaagu

SEQ ID NO: 120505 - RNA, 19 nt, Artificial Sequence
  Description of Artificial Sequence: Synthetic oligonucleotide
  Antisense strand to SEQ ID NO: 120504
acuuguguggaacaucaga

SEQ ID NO: 120506 - RNA, 19 nt, Artificial Sequence
  Description of Artificial Sequence: Synthetic oligonucleotide
  Sense strand starting at position 1334 of SEQ ID NO: 1535
acucccuccugauuggaau

SEQ ID NO: 120507 - RNA, 19 nt, Artificial Sequence
  Description of Artificial Sequence: Synthetic oligonucleotide
  Antisense strand to SEQ ID NO: 120506
auuccaaucaggagggagu

SEQ ID NO: 120508 - RNA, 19 nt, Artificial Sequence
  Description of Artificial Sequence: Synthetic oligonucleotide
  Sense strand starting at position 1130 of SEQ ID NO: 1535
aggaaagauuugggucaac

SEQ ID NO: 120509 - RNA, 19 nt, Artificial Sequence
  Description of Artificial Sequence: Synthetic oligonucleotide
  Antisense strand to SEQ ID NO: 120508
guugacccaaaucuuuccu

SEQ ID NO: 120510 - RNA, 19 nt, Artificial Sequence
  Description of Artificial Sequence: Synthetic oligonucleotide
  Sense strand starting at position 1129 of SEQ ID NO: 1535
caggaaagauuugggucaa

SEQ ID NO: 120511 - RNA, 19 nt, Artificial Sequence
  Description of Artificial Sequence: Synthetic oligonucleotide
  Antisense strand to SEQ ID NO: 120510
uugacccaaaucuuuccug

SEQ ID NO: 120512 - RNA, 19 nt, Artificial Sequence
  Description of Artificial Sequence: Synthetic oligonucleotide
  Sense strand starting at position 1019 of SEQ ID NO: 1535
gccucucagaguuggaaau

SEQ ID NO: 120513 - RNA, 19 nt, Artificial Sequence
  Description of Artificial Sequence: Synthetic oligonucleotide
  Antisense strand to SEQ ID NO: 120512
auuuccaacucugagaggc

SEQ ID NO: 120514 - RNA, 19 nt, Artificial Sequence
  Description of Artificial Sequence: Synthetic oligonucleotide
  Sense strand starting at position 780 of SEQ ID NO: 1535
gggcuucucgagcagagga

SEQ ID NO: 120515 - RNA, 19 nt, Artificial Sequence
  Description of Artificial Sequence: Synthetic oligonucleotide
  Antisense strand to SEQ ID NO: 120514
uccucugcucgagaagccc

SEQ ID NO: 120516 - RNA, 19 nt, Artificial Sequence
  Description of Artificial Sequence: Synthetic oligonucleotide
  Sense strand starting at position 683 of SEQ ID NO: 1535
gcaacuuagagucaagguu

SEQ ID NO: 120517 - RNA, 19 nt, Artificial Sequence
  Description of Artificial Sequence: Synthetic oligonucleotide
  Antisense strand to SEQ ID NO: 120516
aaccuugacucuaaguugc

SEQ ID NO: 120518 - RNA, 19 nt, Artificial Sequence
  Description of Artificial Sequence: Synthetic oligonucleotide
  Sense strand starting at position 598 of SEQ ID NO: 1535
cuauguuaacagggcaaga

SEQ ID NO: 120519 - RNA, 19 nt, Artificial Sequence
  Description of Artificial Sequence: Synthetic oligonucleotide
  Antisense strand to SEQ ID NO: 120518
ucuugcccuguuaacauag

SEQ ID NO: 120520 - RNA, 19 nt, Artificial Sequence
  Description of Artificial Sequence: Synthetic oligonucleotide
  Sense strand starting at position 117 of SEQ ID NO: 1535
ugggaugccuaguuagauu

SEQ ID NO: 120521 - RNA, 19 nt, Artificial Sequence
  Description of Artificial Sequence: Synthetic oligonucleotide
  Antisense strand to SEQ ID NO: 120520
aaucuaacuaggcauccca

SEQ ID NO: 120522 - RNA, 19 nt, Artificial Sequence
  Description of Artificial Sequence: Synthetic oligonucleotide
  Sense strand starting at position 77 of SEQ ID NO: 1535
uuccuacucuuggugugaa

SEQ ID NO: 120523 - RNA, 19 nt, Artificial Sequence
  Description of Artificial Sequence: Synthetic oligonucleotide
  Antisense strand to SEQ ID NO: 120522
uucacaccaagaguaggaa

SEQ ID NO: 120524 - RNA, 19 nt, Artificial Sequence
  Description of Artificial Sequence: Synthetic oligonucleotide
  Sense strand starting at position 30 of SEQ ID NO: 1535
agagcagaagccugaaaua

SEQ ID NO: 120525 - RNA, 19 nt, Artificial Sequence
  Description of Artificial Sequence: Synthetic oligonucleotide
  Antisense strand to SEQ ID NO: 120524
uauuucaggcuucugcucu

SEQ ID NO: 120526 - RNA, 19 nt, Artificial Sequence
  Description of Artificial Sequence: Synthetic oligonucleotide
  Sense strand starting at position 12 of SEQ ID NO: 1535
cagccaugcccucagauga

SEQ ID NO: 120527 - RNA, 19 nt, Artificial Sequence
  Description of Artificial Sequence: Synthetic oligonucleotide
  Antisense strand to SEQ ID NO: 120526
ucaucugagggcauggcug

SEQ ID NO: 120528 - RNA, 19 nt, Artificial Sequence
  Description of Artificial Sequence: Synthetic oligonucleotide
  Sense strand starting at position 78 of SEQ ID NO: 1536
cuuuguggucguugagaca

SEQ ID NO: 120529 - RNA, 19 nt, Artificial Sequence
  Description of Artificial Sequence: Synthetic oligonucleotide
  Antisense strand to SEQ ID NO: 120528
ugucucaacgaccacaaag

SEQ ID NO: 120530 - RNA, 19 nt, Artificial Sequence
  Description of Artificial Sequence: Synthetic oligonucleotide
  Sense strand starting at position 186 of SEQ ID NO: 1536
cucucuuugccaggauaga

SEQ ID NO: 120531 - RNA, 19 nt, Artificial Sequence
  Description of Artificial Sequence: Synthetic oligonucleotide
  Antisense strand to SEQ ID NO: 120530
ucuauccuggcaaagagag

SEQ ID NO: 120532 - RNA, 19 nt, Artificial Sequence
  Description of Artificial Sequence: Synthetic oligonucleotide
  Sense strand starting at position 187 of SEQ ID NO: 1536
ucucuuugccaggauagag

SEQ ID NO: 120533 - RNA, 19 nt, Artificial Sequence
  Description of Artificial Sequence: Synthetic oligonucleotide
  Antisense strand to SEQ ID NO: 120532
cucuauccuggcaaagaga

SEQ ID NO: 120534 - RNA, 19 nt, Artificial Sequence
  Description of Artificial Sequence: Synthetic oligonucleotide
  Sense strand starting at position 453 of SEQ ID NO: 1536
ugcuguguucuuguucuca

SEQ ID NO: 120535 - RNA, 19 nt, Artificial Sequence
  Description of Artificial Sequence: Synthetic oligonucleotide
  Antisense strand to SEQ ID NO: 120534
ugagaacaagaacacagca

SEQ ID NO: 120536 - RNA, 19 nt, Artificial Sequence
  Description of Artificial Sequence: Synthetic oligonucleotide
  Sense strand starting at position 457 of SEQ ID NO: 1536
guguucuuguucucagaga

SEQ ID NO: 120537 - RNA, 19 nt, Artificial Sequence
  Description of Artificial Sequence: Synthetic oligonucleotide
  Antisense strand to SEQ ID NO: 120536
ucucugagaacaagaacac

SEQ ID NO: 120538 - RNA, 19 nt, Artificial Sequence
  Description of Artificial Sequence: Synthetic oligonucleotide
  Sense strand starting at position 768 of SEQ ID NO: 1536
gugaguucagcuugaggca

SEQ ID NO: 120539 - RNA, 19 nt, Artificial Sequence
  Description of Artificial Sequence: Synthetic oligonucleotide
  Antisense strand to SEQ ID NO: 120538
ugccucaagcugaacucac

SEQ ID NO: 120540 - RNA, 19 nt, Artificial Sequence
  Description of Artificial Sequence: Synthetic oligonucleotide
  Sense strand starting at position 892 of SEQ ID NO: 1536
uuuaaaugcuuggaauaga

SEQ ID NO: 120541 - RNA, 19 nt, Artificial Sequence
  Description of Artificial Sequence: Synthetic oligonucleotide
  Antisense strand to SEQ ID NO: 120540
ucuauuccaagcauuuaaa

SEQ ID NO: 120542 - RNA, 19 nt, Artificial Sequence
  Description of Artificial Sequence: Synthetic oligonucleotide
  Sense strand starting at position 1087 of SEQ ID NO: 1536
uaccaaguucuuggacaga

SEQ ID NO: 120543 - RNA, 19 nt, Artificial Sequence
  Description of Artificial Sequence: Synthetic oligonucleotide
  Antisense strand to SEQ ID NO: 120542
ucuguccaagaacuuggua

SEQ ID NO: 120544 - RNA, 19 nt, Artificial Sequence
  Description of Artificial Sequence: Synthetic oligonucleotide
  Sense strand starting at position 1117 of SEQ ID NO: 1536
ggagcagaacucugaauca

SEQ ID NO: 120545 - RNA, 19 nt, Artificial Sequence
  Description of Artificial Sequence: Synthetic oligonucleotide
  Antisense strand to SEQ ID NO: 120544
ugauucagaguucugcucc

SEQ ID NO: 120546 - RNA, 19 nt, Artificial Sequence
  Description of Artificial Sequence: Synthetic oligonucleotide
  Sense strand starting at position 1181 of SEQ ID NO: 1536
gucgucagcuggguagaau

SEQ ID NO: 120547 - RNA, 19 nt, Artificial Sequence
  Description of Artificial Sequence: Synthetic oligonucleotide
  Antisense strand to SEQ ID NO: 120546
auucuacccagcugacgac

SEQ ID NO: 120548 - RNA, 19 nt, Artificial Sequence
  Description of Artificial Sequence: Synthetic oligonucleotide
  Sense strand starting at position 1182 of SEQ ID NO: 1536
ucgucagcuggguagaaua

SEQ ID NO: 120549 - RNA, 19 nt, Artificial Sequence
  Description of Artificial Sequence: Synthetic oligonucleotide
  Antisense strand to SEQ ID NO: 120548
uauucuacccagcugacga

SEQ ID NO: 120550 - RNA, 19 nt, Artificial Sequence
  Description of Artificial Sequence: Synthetic oligonucleotide
  Sense strand starting at position 1184 of SEQ ID NO: 1536
gucagcuggguagaauauu

SEQ ID NO: 120551 - RNA, 19 nt, Artificial Sequence
  Description of Artificial Sequence: Synthetic oligonucleotide
  Antisense strand to SEQ ID NO: 120550
aauauucuacccagcugac

SEQ ID NO: 120552 - RNA, 19 nt, Artificial Sequence
  Description of Artificial Sequence: Synthetic oligonucleotide
  Sense strand starting at position 1192 of SEQ ID NO: 1536
gguagaauauugucccucu

SEQ ID NO: 120553 - RNA, 19 nt, Artificial Sequence
  Description of Artificial Sequence: Synthetic oligonucleotide
  Antisense strand to SEQ ID NO: 120552
agagggacaauauucuacc

SEQ ID NO: 120554 - RNA, 19 nt, Artificial Sequence
  Description of Artificial Sequence: Synthetic oligonucleotide
  Sense strand starting at position 1306 of SEQ ID NO: 1536
gaaaucggagccugaguaa

SEQ ID NO: 120555 - RNA, 19 nt, Artificial Sequence
  Description of Artificial Sequence: Synthetic oligonucleotide
  Antisense strand to SEQ ID NO: 120554
uuacucaggcuccgauuuc

SEQ ID NO: 120556 - RNA, 19 nt, Artificial Sequence
  Description of Artificial Sequence: Synthetic oligonucleotide
  Sense strand starting at position 1668 of SEQ ID NO: 1536
cagguuucuggaugagauu

SEQ ID NO: 120557 - RNA, 19 nt, Artificial Sequence
  Description of Artificial Sequence: Synthetic oligonucleotide
  Antisense strand to SEQ ID NO: 120556
aaucucauccagaaaccug

SEQ ID NO: 120558 - RNA, 19 nt, Artificial Sequence
  Description of Artificial Sequence: Synthetic oligonucleotide
  Sense strand starting at position 1677 of SEQ ID NO: 1536
ggaugagauucuuaggauu

SEQ ID NO: 120559 - RNA, 19 nt, Artificial Sequence
  Description of Artificial Sequence: Synthetic oligonucleotide
  Antisense strand to SEQ ID NO: 120558
aauccuaagaaucucaucc

SEQ ID NO: 120560 - RNA, 19 nt, Artificial Sequence
  Description of Artificial Sequence: Synthetic oligonucleotide
  Sense strand starting at position 1679 of SEQ ID NO: 1536
augagauucuuaggauuuc

SEQ ID NO: 120561 - RNA, 19 nt, Artificial Sequence
  Description of Artificial Sequence: Synthetic oligonucleotide
  Antisense strand to SEQ ID NO: 120560
gaaauccuaagaaucucau

SEQ ID NO: 120562 - RNA, 19 nt, Artificial Sequence
  Description of Artificial Sequence: Synthetic oligonucleotide
  Sense strand starting at position 1680 of SEQ ID NO: 1536
ugagauucuuaggauuucu

SEQ ID NO: 120563 - RNA, 19 nt, Artificial Sequence
  Description of Artificial Sequence: Synthetic oligonucleotide
  Antisense strand to SEQ ID NO: 120562
agaaauccuaagaaucuca

SEQ ID NO: 120564 - RNA, 19 nt, Artificial Sequence
  Description of Artificial Sequence: Synthetic oligonucleotide
  Sense strand starting at position 1818 of SEQ ID NO: 1536
ccggcucaccuguagacau

SEQ ID NO: 120565 - RNA, 19 nt, Artificial Sequence
  Description of Artificial Sequence: Synthetic oligonucleotide
  Antisense strand to SEQ ID NO: 120564
augucuacaggugagccgg

SEQ ID NO: 120566 - RNA, 19 nt, Artificial Sequence
  Description of Artificial Sequence: Synthetic oligonucleotide
  Sense strand starting at position 2129 of SEQ ID NO: 1536
gaggucguggcgaagucau

SEQ ID NO: 120567 - RNA, 19 nt, Artificial Sequence
  Description of Artificial Sequence: Synthetic oligonucleotide
  Antisense strand to SEQ ID NO: 120566
augacuucgccacgaccuc

SEQ ID NO: 120568 - RNA, 19 nt, Artificial Sequence
  Description of Artificial Sequence: Synthetic oligonucleotide
  Sense strand starting at position 2135 of SEQ ID NO: 1536
guggcgaagucaucaggga

SEQ ID NO: 120569 - RNA, 19 nt, Artificial Sequence
  Description of Artificial Sequence: Synthetic oligonucleotide
  Antisense strand to SEQ ID NO: 120568
ucccugaugacuucgccac

SEQ ID NO: 120570 - RNA, 19 nt, Artificial Sequence
  Description of Artificial Sequence: Synthetic oligonucleotide
  Sense strand starting at position 2161 of SEQ ID NO: 1536
ugugcuuuccaugguugga

SEQ ID NO: 120571 - RNA, 19 nt, Artificial Sequence
  Description of Artificial Sequence: Synthetic oligonucleotide
  Antisense strand to SEQ ID NO: 120570
uccaaccauggaaagcaca

SEQ ID NO: 120572 - RNA, 19 nt, Artificial Sequence
  Description of Artificial Sequence: Synthetic oligonucleotide
  Sense strand starting at position 2174 of SEQ ID NO: 1536
guuggauugucauucuuuc

SEQ ID NO: 120573 - RNA, 19 nt, Artificial Sequence
  Description of Artificial Sequence: Synthetic oligonucleotide
  Antisense strand to SEQ ID NO: 120572
gaaagaaugacaauccaac

SEQ ID NO: 120574 - RNA, 19 nt, Artificial Sequence
  Description of Artificial Sequence: Synthetic oligonucleotide
  Sense strand starting at position 2349 of SEQ ID NO: 1536
cuggaaccuucuuaaagga

SEQ ID NO: 120575 - RNA, 19 nt, Artificial Sequence
  Description of Artificial Sequence: Synthetic oligonucleotide
  Antisense strand to SEQ ID NO: 120574
uccuuuaagaagguuccag

SEQ ID NO: 120576 - RNA, 19 nt, Artificial Sequence
  Description of Artificial Sequence: Synthetic oligonucleotide
  Sense strand starting at position 2362 of SEQ ID NO: 1536
aaaggaggcguuugcaaau

SEQ ID NO: 120577 - RNA, 19 nt, Artificial Sequence
  Description of Artificial Sequence: Synthetic oligonucleotide
  Antisense strand to SEQ ID NO: 120576
auuugcaaacgccuccuuu

SEQ ID NO: 120578 - RNA, 19 nt, Artificial Sequence
  Description of Artificial Sequence: Synthetic oligonucleotide
  Sense strand starting at position 2586 of SEQ ID NO: 1536
ucgggugugcucgugaaau

SEQ ID NO: 120579 - RNA, 19 nt, Artificial Sequence
  Description of Artificial Sequence: Synthetic oligonucleotide
  Antisense strand to SEQ ID NO: 120578
auuucacgagcacacccga

SEQ ID NO: 120580 - RNA, 19 nt, Artificial Sequence
  Description of Artificial Sequence: Synthetic oligonucleotide
  Sense strand starting at position 2588 of SEQ ID NO: 1536
gggugugcucgugaaaugg

SEQ ID NO: 120581 - RNA, 19 nt, Artificial Sequence
  Description of Artificial Sequence: Synthetic oligonucleotide
  Antisense strand to SEQ ID NO: 120580
ccauuucacgagcacaccc

SEQ ID NO: 120582 - RNA, 19 nt, Artificial Sequence
  Description of Artificial Sequence: Synthetic oligonucleotide
  Sense strand starting at position 2594 of SEQ ID NO: 1536
gcucgugaaaugggucauu

SEQ ID NO: 120583 - RNA, 19 nt, Artificial Sequence
  Description of Artificial Sequence: Synthetic oligonucleotide
  Antisense strand to SEQ ID NO: 120582
aaugacccauuucacgagc

SEQ ID NO: 120584 - RNA, 19 nt, Artificial Sequence
  Description of Artificial Sequence: Synthetic oligonucleotide
  Sense strand starting at position 2597 of SEQ ID NO: 1536
cgugaaaugggucauucug

SEQ ID NO: 120585 - RNA, 19 nt, Artificial Sequence
  Description of Artificial Sequence: Synthetic oligonucleotide
  Antisense strand to SEQ ID NO: 120584
cagaaugacccauuucacg

SEQ ID NO: 120586 - RNA, 19 nt, Artificial Sequence
  Description of Artificial Sequence: Synthetic oligonucleotide
  Sense strand starting at position 2812 of SEQ ID NO: 1536
gaggucaucgugugucuca

SEQ ID NO: 120587 - RNA, 19 nt, Artificial Sequence
  Description of Artificial Sequence: Synthetic oligonucleotide
  Antisense strand to SEQ ID NO: 120586
ugagacacacgaugaccuc

SEQ ID NO: 120588 - RNA, 19 nt, Artificial Sequence
  Description of Artificial Sequence: Synthetic oligonucleotide
  Sense strand starting at position 2932 of SEQ ID NO: 1536
auacaucagcccuguguga

SEQ ID NO: 120589 - RNA, 19 nt, Artificial Sequence
  Description of Artificial Sequence: Synthetic oligonucleotide
  Antisense strand to SEQ ID NO: 120588
ucacacagggcugauguau

SEQ ID NO: 120590 - RNA, 19 nt, Artificial Sequence
  Description of Artificial Sequence: Synthetic oligonucleotide
  Sense strand starting at position 2945 of SEQ ID NO: 1536
gugugaggaaguggucuuu

SEQ ID NO: 120591 - RNA, 19 nt, Artificial Sequence
  Description of Artificial Sequence: Synthetic oligonucleotide
  Antisense strand to SEQ ID NO: 120590
aaagaccacuuccucacac

SEQ ID NO: 120592 - RNA, 19 nt, Artificial Sequence
  Description of Artificial Sequence: Synthetic oligonucleotide
  Sense strand starting at position 2957 of SEQ ID NO: 1536
ggucuuugguaggugagga

SEQ ID NO: 120593 - RNA, 19 nt, Artificial Sequence
  Description of Artificial Sequence: Synthetic oligonucleotide
  Antisense strand to SEQ ID NO: 120592
uccucaccuaccaaagacc

SEQ ID NO: 120594 - RNA, 19 nt, Artificial Sequence
  Description of Artificial Sequence: Synthetic oligonucleotide
  Sense strand starting at position 3030 of SEQ ID NO: 1536
gggauguguguuugggaag

SEQ ID NO: 120595 - RNA, 19 nt, Artificial Sequence
  Description of Artificial Sequence: Synthetic oligonucleotide
  Antisense strand to SEQ ID NO: 120594
cuucccaaacacacauccc

SEQ ID NO: 120596 - RNA, 19 nt, Artificial Sequence
  Description of Artificial Sequence: Synthetic oligonucleotide
  Sense strand starting at position 3047 of SEQ ID NO: 1536
aggaguuagagcugaugga

SEQ ID NO: 120597 - RNA, 19 nt, Artificial Sequence
  Description of Artificial Sequence: Synthetic oligonucleotide
  Antisense strand to SEQ ID NO: 120596
uccaucagcucuaacuccu

SEQ ID NO: 120598 - RNA, 19 nt, Artificial Sequence
  Description of Artificial Sequence: Synthetic oligonucleotide
  Sense strand starting at position 3631 of SEQ ID NO: 1536
ccaguaacuucugaugaac

SEQ ID NO: 120599 - RNA, 19 nt, Artificial Sequence
  Description of Artificial Sequence: Synthetic oligonucleotide
  Antisense strand to SEQ ID NO: 120598
guucaucagaaguuacugg

SEQ ID NO: 120600 - RNA, 19 nt, Artificial Sequence
  Description of Artificial Sequence: Synthetic oligonucleotide
  Sense strand starting at position 3805 of SEQ ID NO: 1536
gagcccuuacugugugaca

SEQ ID NO: 120601 - RNA, 19 nt, Artificial Sequence
  Description of Artificial Sequence: Synthetic oligonucleotide
  Antisense strand to SEQ ID NO: 120600
ugucacacaguaagggcuc

SEQ ID NO: 120602 - RNA, 19 nt, Artificial Sequence
  Description of Artificial Sequence: Synthetic oligonucleotide
  Sense strand starting at position 3807 of SEQ ID NO: 1536
gcccuuacugugugacaga

SEQ ID NO: 120603 - RNA, 19 nt, Artificial Sequence
  Description of Artificial Sequence: Synthetic oligonucleotide
  Antisense strand to SEQ ID NO: 120602
ucugucacacaguaagggc

SEQ ID NO: 120604 - RNA, 19 nt, Artificial Sequence
  Description of Artificial Sequence: Synthetic oligonucleotide
  Sense strand starting at position 3965 of SEQ ID NO: 1536
gcaagauagugauaacauc

SEQ ID NO: 120605 - RNA, 19 nt, Artificial Sequence
  Description of Artificial Sequence: Synthetic oligonucleotide
  Antisense strand to SEQ ID NO: 120604
gauguuaucacuaucuugc

SEQ ID NO: 120606 - RNA, 19 nt, Artificial Sequence
  Description of Artificial Sequence: Synthetic oligonucleotide
  Sense strand starting at position 3976 of SEQ ID NO: 1536
auaacaucagaccgcaaua

SEQ ID NO: 120607 - RNA, 19 nt, Artificial Sequence
  Description of Artificial Sequence: Synthetic oligonucleotide
  Antisense strand to SEQ ID NO: 120606
uauugcggucugauguuau

SEQ ID NO: 120608 - RNA, 19 nt, Artificial Sequence
  Description of Artificial Sequence: Synthetic oligonucleotide
  Sense strand starting at position 3968 of SEQ ID NO: 1537
ccuucuugugagcacagau

SEQ ID NO: 120609 - RNA, 19 nt, Artificial Sequence
  Description of Artificial Sequence: Synthetic oligonucleotide
  Antisense strand to SEQ ID NO: 120608
aucugugcucacaagaagg

SEQ ID NO: 120610 - RNA, 19 nt, Artificial Sequence
  Description of Artificial Sequence: Synthetic oligonucleotide
  Sense strand starting at position 3967 of SEQ ID NO: 1537
gccuucuugugagcacaga

SEQ ID NO: 120611 - RNA, 19 nt, Artificial Sequence
  Description of Artificial Sequence: Synthetic oligonucleotide
  Antisense strand to SEQ ID NO: 120610
ucugugcucacaagaaggc

SEQ ID NO: 120612 - RNA, 19 nt, Artificial Sequence
  Description of Artificial Sequence: Synthetic oligonucleotide
  Sense strand starting at position 3893 of SEQ ID NO: 1537
uggcuugauggcugaguca

SEQ ID NO: 120613 - RNA, 19 nt, Artificial Sequence
  Description of Artificial Sequence: Synthetic oligonucleotide
  Antisense strand to SEQ ID NO: 120612
ugacucagccaucaagcca

SEQ ID NO: 120614 - RNA, 19 nt, Artificial Sequence
  Description of Artificial Sequence: Synthetic oligonucleotide
  Sense strand starting at position 3792 of SEQ ID NO: 1537
uugucauucccaugucuca

SEQ ID NO: 120615 - RNA, 19 nt, Artificial Sequence
  Description of Artificial Sequence: Synthetic oligonucleotide
  Antisense strand to SEQ ID NO: 120614
ugagacaugggaaugacaa

SEQ ID NO: 120616 - RNA, 19 nt, Artificial Sequence
  Description of Artificial Sequence: Synthetic oligonucleotide
  Sense strand starting at position 3786 of SEQ ID NO: 1537
cugagauugucauucccau

SEQ ID NO: 120617 - RNA, 19 nt, Artificial Sequence
  Description of Artificial Sequence: Synthetic oligonucleotide
  Antisense strand to SEQ ID NO: 120616
augggaaugacaaucucag

SEQ ID NO: 120618 - RNA, 19 nt, Artificial Sequence
  Description of Artificial Sequence: Synthetic oligonucleotide
  Sense strand starting at position 3781 of SEQ ID NO: 1537
ggacccugagauugucauu

SEQ ID NO: 120619 - RNA, 19 nt, Artificial Sequence
  Description of Artificial Sequence: Synthetic oligonucleotide
  Antisense strand to SEQ ID NO: 120618
aaugacaaucucagggucc

SEQ ID NO: 120620 - RNA, 19 nt, Artificial Sequence
  Description of Artificial Sequence: Synthetic oligonucleotide
  Sense strand starting at position 3603 of SEQ ID NO: 1537
ggcccuggcggagauaaua

SEQ ID NO: 120621 - RNA, 19 nt, Artificial Sequence
  Description of Artificial Sequence: Synthetic oligonucleotide
  Antisense strand to SEQ ID NO: 120620
uauuaucuccgccagggcc

SEQ ID NO: 120622 - RNA, 19 nt, Artificial Sequence
  Description of Artificial Sequence: Synthetic oligonucleotide
  Sense strand starting at position 3410 of SEQ ID NO: 1537
ucagucgucaggugggaaa

SEQ ID NO: 120623 - RNA, 19 nt, Artificial Sequence
  Description of Artificial Sequence: Synthetic oligonucleotide
  Antisense strand to SEQ ID NO: 120622
uuucccaccugacgacuga

SEQ ID NO: 120624 - RNA, 19 nt, Artificial Sequence
  Description of Artificial Sequence: Synthetic oligonucleotide
  Sense strand starting at position 3401 of SEQ ID NO: 1537
uaggaaagcucagucguca

SEQ ID NO: 120625 - RNA, 19 nt, Artificial Sequence
  Description of Artificial Sequence: Synthetic oligonucleotide
  Antisense strand to SEQ ID NO: 120624
ugacgacugagcuuuccua

SEQ ID NO: 120626 - RNA, 19 nt, Artificial Sequence
  Description of Artificial Sequence: Synthetic oligonucleotide
  Sense strand starting at position 3381 of SEQ ID NO: 1537
gggagcuuggcaugucaga

SEQ ID NO: 120627 - RNA, 19 nt, Artificial Sequence
  Description of Artificial Sequence: Synthetic oligonucleotide
  Antisense strand to SEQ ID NO: 120626
ucugacaugccaagcuccc

SEQ ID NO: 120628 - RNA, 19 nt, Artificial Sequence
  Description of Artificial Sequence: Synthetic oligonucleotide
  Sense strand starting at position 3335 of SEQ ID NO: 1537
cucugaaagcgguaaauga

SEQ ID NO: 120629 - RNA, 19 nt, Artificial Sequence
  Description of Artificial Sequence: Synthetic oligonucleotide
  Antisense strand to SEQ ID NO: 120628
ucauuuaccgcuuucagag

SEQ ID NO: 120630 - RNA, 19 nt, Artificial Sequence
  Description of Artificial Sequence: Synthetic oligonucleotide
  Sense strand starting at position 3333 of SEQ ID NO: 1537
accucugaaagcgguaaau

SEQ ID NO: 120631 - RNA, 19 nt, Artificial Sequence
  Description of Artificial Sequence: Synthetic oligonucleotide
  Antisense strand to SEQ ID NO: 120630
auuuaccgcuuucagaggu

SEQ ID NO: 120632 - RNA, 19 nt, Artificial Sequence
  Description of Artificial Sequence: Synthetic oligonucleotide
  Sense strand starting at position 3282 of SEQ ID NO: 1537
uggagcuuggcguuauugu

SEQ ID NO: 120633 - RNA, 19 nt, Artificial Sequence
  Description of Artificial Sequence: Synthetic oligonucleotide
  Antisense strand to SEQ ID NO: 120632
acaauaacgccaagcucca

SEQ ID NO: 120634 - RNA, 19 nt, Artificial Sequence
  Description of Artificial Sequence: Synthetic oligonucleotide
  Sense strand starting at position 3265 of SEQ ID NO: 1537
uugguagagcucugguaug

SEQ ID NO: 120635 - RNA, 19 nt, Artificial Sequence
  Description of Artificial Sequence: Synthetic oligonucleotide
  Antisense strand to SEQ ID NO: 120634
cauaccagagcucuaccaa

SEQ ID NO: 120636 - RNA, 19 nt, Artificial Sequence
  Description of Artificial Sequence: Synthetic oligonucleotide
  Sense strand starting at position 3188 of SEQ ID NO: 1537
cgggcaacuuucuuaauug

SEQ ID NO: 120637 - RNA, 19 nt, Artificial Sequence
  Description of Artificial Sequence: Synthetic oligonucleotide
  Antisense strand to SEQ ID NO: 120636
caauuaagaaaguugcccg

SEQ ID NO: 120638 - RNA, 19 nt, Artificial Sequence
  Description of Artificial Sequence: Synthetic oligonucleotide
  Sense strand starting at position 3187 of SEQ ID NO: 1537
ccgggcaacuuucuuaauu

SEQ ID NO: 120639 - RNA, 19 nt, Artificial Sequence
  Description of Artificial Sequence: Synthetic oligonucleotide
  Antisense strand to SEQ ID NO: 120638
aauuaagaaaguugcccgg

SEQ ID NO: 120640 - RNA, 19 nt, Artificial Sequence
  Description of Artificial Sequence: Synthetic oligonucleotide
  Sense strand starting at position 2279 of SEQ ID NO: 1537
gauauugaucucggacgcu

SEQ ID NO: 120641 - RNA, 19 nt, Artificial Sequence
  Description of Artificial Sequence: Synthetic oligonucleotide
  Antisense strand to SEQ ID NO: 120640
agcguccgagaucaauauc

SEQ ID NO: 120642 - RNA, 19 nt, Artificial Sequence
  Description of Artificial Sequence: Synthetic oligonucleotide
  Sense strand starting at position 2275 of SEQ ID NO: 1537
auaugauauugaucucgga

SEQ ID NO: 120643 - RNA, 19 nt, Artificial Sequence
  Description of Artificial Sequence: Synthetic oligonucleotide
  Antisense strand to SEQ ID NO: 120642
uccgagaucaauaucauau

SEQ ID NO: 120644 - RNA, 19 nt, Artificial Sequence
  Description of Artificial Sequence: Synthetic oligonucleotide
  Sense strand starting at position 2187 of SEQ ID NO: 1537
uuaauuucuugggaagcaa

SEQ ID NO: 120645 - RNA, 19 nt, Artificial Sequence
  Description of Artificial Sequence: Synthetic oligonucleotide
  Antisense strand to SEQ ID NO: 120644
uugcuucccaagaaauuaa

SEQ ID NO: 120646 - RNA, 19 nt, Artificial Sequence
  Description of Artificial Sequence: Synthetic oligonucleotide
  Sense strand starting at position 2184 of SEQ ID NO: 1537
aaguuaauuucuugggaag

SEQ ID NO: 120647 - RNA, 19 nt, Artificial Sequence
  Description of Artificial Sequence: Synthetic oligonucleotide
  Antisense strand to SEQ ID NO: 120646
cuucccaagaaauuaacuu

SEQ ID NO: 120648 - RNA, 19 nt, Artificial Sequence
  Description of Artificial Sequence: Synthetic oligonucleotide
  Sense strand starting at position 1771 of SEQ ID NO: 1537
gggagugggcccugaagaa

SEQ ID NO: 120649 - RNA, 19 nt, Artificial Sequence
  Description of Artificial Sequence: Synthetic oligonucleotide
  Antisense strand to SEQ ID NO: 120648
uucuucagggcccacuccc

SEQ ID NO: 120650 - RNA, 19 nt, Artificial Sequence
  Description of Artificial Sequence: Synthetic oligonucleotide
  Sense strand starting at position 1562 of SEQ ID NO: 1537
gcagcaucccuuggacaua

SEQ ID NO: 120651 - RNA, 19 nt, Artificial Sequence
  Description of Artificial Sequence: Synthetic oligonucleotide
  Antisense strand to SEQ ID NO: 120650
uauguccaagggaugcugc

SEQ ID NO: 120652 - RNA, 19 nt, Artificial Sequence
  Description of Artificial Sequence: Synthetic oligonucleotide
  Sense strand starting at position 1561 of SEQ ID NO: 1537
ugcagcaucccuuggacau

SEQ ID NO: 120653 - RNA, 19 nt, Artificial Sequence
  Description of Artificial Sequence: Synthetic oligonucleotide
  Antisense strand to SEQ ID NO: 120652
auguccaagggaugcugca

SEQ ID NO: 120654 - RNA, 19 nt, Artificial Sequence
  Description of Artificial Sequence: Synthetic oligonucleotide
  Sense strand starting at position 1509 of SEQ ID NO: 1537
auaucugccuguuccuauu

SEQ ID NO: 120655 - RNA, 19 nt, Artificial Sequence
  Description of Artificial Sequence: Synthetic oligonucleotide
  Antisense strand to SEQ ID NO: 120654
aauaggaacaggcagauau

SEQ ID NO: 120656 - RNA, 19 nt, Artificial Sequence
  Description of Artificial Sequence: Synthetic oligonucleotide
  Sense strand starting at position 1470 of SEQ ID NO: 1537
cucuguuucuaggcucaua

SEQ ID NO: 120657 - RNA, 19 nt, Artificial Sequence
  Description of Artificial Sequence: Synthetic oligonucleotide
  Antisense strand to SEQ ID NO: 120656
uaugagccuagaaacagag

SEQ ID NO: 120658 - RNA, 19 nt, Artificial Sequence
  Description of Artificial Sequence: Synthetic oligonucleotide
  Sense strand starting at position 1426 of SEQ ID NO: 1537
ugguaagugcuauguauua

SEQ ID NO: 120659 - RNA, 19 nt, Artificial Sequence
  Description of Artificial Sequence: Synthetic oligonucleotide
  Antisense strand to SEQ ID NO: 120658
uaauacauagcacuuacca

SEQ ID NO: 120660 - RNA, 19 nt, Artificial Sequence
  Description of Artificial Sequence: Synthetic oligonucleotide
  Sense strand starting at position 1344 of SEQ ID NO: 1537
uguuguaaggguuaaauuc

SEQ ID NO: 120661 - RNA, 19 nt, Artificial Sequence
  Description of Artificial Sequence: Synthetic oligonucleotide
  Antisense strand to SEQ ID NO: 120660
gaauuuaacccuuacaaca

SEQ ID NO: 120662 - RNA, 19 nt, Artificial Sequence
  Description of Artificial Sequence: Synthetic oligonucleotide
  Sense strand starting at position 1310 of SEQ ID NO: 1537
agaugaugcuaauaauaag

SEQ ID NO: 120663 - RNA, 19 nt, Artificial Sequence
  Description of Artificial Sequence: Synthetic oligonucleotide
  Antisense strand to SEQ ID NO: 120662
cuuauuauuagcaucaucu

SEQ ID NO: 120664 - RNA, 19 nt, Artificial Sequence
  Description of Artificial Sequence: Synthetic oligonucleotide
  Sense strand starting at position 1302 of SEQ ID NO: 1537
gucugaugagaugaugcua

SEQ ID NO: 120665 - RNA, 19 nt, Artificial Sequence
  Description of Artificial Sequence: Synthetic oligonucleotide
  Antisense strand to SEQ ID NO: 120664
uagcaucaucucaucagac

SEQ ID NO: 120666 - RNA, 19 nt, Artificial Sequence
  Description of Artificial Sequence: Synthetic oligonucleotide
  Sense strand starting at position 1296 of SEQ ID NO: 1537
ucauuugucugaugagaug

SEQ ID NO: 120667 - RNA, 19 nt, Artificial Sequence
  Description of Artificial Sequence: Synthetic oligonucleotide
  Antisense strand to SEQ ID NO: 120666
caucucaucagacaaauga

SEQ ID NO: 120668 - RNA, 19 nt, Artificial Sequence
  Description of Artificial Sequence: Synthetic oligonucleotide
  Sense strand starting at position 1294 of SEQ ID NO: 1537
ucucauuugucugaugaga

SEQ ID NO: 120669 - RNA, 19 nt, Artificial Sequence
  Description of Artificial Sequence: Synthetic oligonucleotide
  Antisense strand to SEQ ID NO: 120668
ucucaucagacaaaugaga

SEQ ID NO: 120670 - RNA, 19 nt, Artificial Sequence
  Description of Artificial Sequence: Synthetic oligonucleotide
  Sense strand starting at position 1220 of SEQ ID NO: 1537
ggguuuaaacccuggcuuu

SEQ ID NO: 120671 - RNA, 19 nt, Artificial Sequence
  Description of Artificial Sequence: Synthetic oligonucleotide
  Antisense strand to SEQ ID NO: 120670
aaagccaggguuuaaaccc

SEQ ID NO: 120672 - RNA, 19 nt, Artificial Sequence
  Description of Artificial Sequence: Synthetic oligonucleotide
  Sense strand starting at position 1170 of SEQ ID NO: 1537
caaguaucagagcagcuaa

SEQ ID NO: 120673 - RNA, 19 nt, Artificial Sequence
  Description of Artificial Sequence: Synthetic oligonucleotide
  Antisense strand to SEQ ID NO: 120672
uuagcugcucugauacuug

SEQ ID NO: 120674 - RNA, 19 nt, Artificial Sequence
  Description of Artificial Sequence: Synthetic oligonucleotide
  Sense strand starting at position 1112 of SEQ ID NO: 1537
agcauaaugcaugggcauu

SEQ ID NO: 120675 - RNA, 19 nt, Artificial Sequence
  Description of Artificial Sequence: Synthetic oligonucleotide
  Antisense strand to SEQ ID NO: 120674
aaugcccaugcauuaugcu

SEQ ID NO: 120676 - RNA, 19 nt, Artificial Sequence
  Description of Artificial Sequence: Synthetic oligonucleotide
  Sense strand starting at position 1111 of SEQ ID NO: 1537
gagcauaaugcaugggcau

SEQ ID NO: 120677 - RNA, 19 nt, Artificial Sequence
  Description of Artificial Sequence: Synthetic oligonucleotide
  Antisense strand to SEQ ID NO: 120676
augcccaugcauuaugcuc

SEQ ID NO: 120678 - RNA, 19 nt, Artificial Sequence
  Description of Artificial Sequence: Synthetic oligonucleotide
  Sense strand starting at position 640 of SEQ ID NO: 1537
cuuggagacucguucucaa

SEQ ID NO: 120679 - RNA, 19 nt, Artificial Sequence
  Description of Artificial Sequence: Synthetic oligonucleotide
  Antisense strand to SEQ ID NO: 120678
uugagaacgagucuccaag

SEQ ID NO: 120680 - RNA, 19 nt, Artificial Sequence
  Description of Artificial Sequence: Synthetic oligonucleotide
  Sense strand starting at position 631 of SEQ ID NO: 1537
agucuuagucuuggagacu

SEQ ID NO: 120681 - RNA, 19 nt, Artificial Sequence
  Description of Artificial Sequence: Synthetic oligonucleotide
  Antisense strand to SEQ ID NO: 120680
agucuccaagacuaagacu

SEQ ID NO: 120682 - RNA, 19 nt, Artificial Sequence
  Description of Artificial Sequence: Synthetic oligonucleotide
  Sense strand starting at position 572 of SEQ ID NO: 1537
auccaaugcccuggaucaa

SEQ ID NO: 120683 - RNA, 19 nt, Artificial Sequence
  Description of Artificial Sequence: Synthetic oligonucleotide
  Antisense strand to SEQ ID NO: 120682
uugauccagggcauuggau

SEQ ID NO: 120684 - RNA, 19 nt, Artificial Sequence
  Description of Artificial Sequence: Synthetic oligonucleotide
  Sense strand starting at position 267 of SEQ ID NO: 1537
cuuccugggacaggucaaa

SEQ ID NO: 120685 - RNA, 19 nt, Artificial Sequence
  Description of Artificial Sequence: Synthetic oligonucleotide
  Antisense strand to SEQ ID NO: 120684
uuugaccugucccaggaag

SEQ ID NO: 120686 - RNA, 19 nt, Artificial Sequence
  Description of Artificial Sequence: Synthetic oligonucleotide
  Sense strand starting at position 9 of SEQ ID NO: 1537
ugaagaauaugugaaugaa

SEQ ID NO: 120687 - RNA, 19 nt, Artificial Sequence
  Description of Artificial Sequence: Synthetic oligonucleotide
  Antisense strand to SEQ ID NO: 120686
uucauucacauauucuuca

SEQ ID NO: 120688 - RNA, 19 nt, Artificial Sequence
  Description of Artificial Sequence: Synthetic oligonucleotide
  Sense strand starting at position 3594 of SEQ ID NO: 1538
gagggagcuguccauuguu

SEQ ID NO: 120689 - RNA, 19 nt, Artificial Sequence
  Description of Artificial Sequence: Synthetic oligonucleotide
  Antisense strand to SEQ ID NO: 120688
aacaauggacagcucccuc

SEQ ID NO: 120690 - RNA, 19 nt, Artificial Sequence
  Description of Artificial Sequence: Synthetic oligonucleotide
  Sense strand starting at position 3570 of SEQ ID NO: 1538
ugagcuucuacugggaagu

SEQ ID NO: 120691 - RNA, 19 nt, Artificial Sequence
  Description of Artificial Sequence: Synthetic oligonucleotide
  Antisense strand to SEQ ID NO: 120690
acuucccaguagaagcuca

SEQ ID NO: 120692 - RNA, 19 nt, Artificial Sequence
  Description of Artificial Sequence: Synthetic oligonucleotide
  Sense strand starting at position 3561 of SEQ ID NO: 1538
gaacuaguuugagcuucua

SEQ ID NO: 120693 - RNA, 19 nt, Artificial Sequence
  Description of Artificial Sequence: Synthetic oligonucleotide
  Antisense strand to SEQ ID NO: 120692
uagaagcucaaacuaguuc

SEQ ID NO: 120694 - RNA, 19 nt, Artificial Sequence
  Description of Artificial Sequence: Synthetic oligonucleotide
  Sense strand starting at position 3558 of SEQ ID NO: 1538
uuagaacuaguuugagcuu

SEQ ID NO: 120695 - RNA, 19 nt, Artificial Sequence
  Description of Artificial Sequence: Synthetic oligonucleotide
  Antisense strand to SEQ ID NO: 120694
aagcucaaacuaguucuaa

SEQ ID NO: 120696 - RNA, 19 nt, Artificial Sequence
  Description of Artificial Sequence: Synthetic oligonucleotide
  Sense strand starting at position 3544 of SEQ ID NO: 1538
ggcugaccgcaugauuaga

SEQ ID NO: 120697 - RNA, 19 nt, Artificial Sequence
  Description of Artificial Sequence: Synthetic oligonucleotide
  Antisense strand to SEQ ID NO: 120696
ucuaaucaugcggucagcc

SEQ ID NO: 120698 - RNA, 19 nt, Artificial Sequence
  Description of Artificial Sequence: Synthetic oligonucleotide
  Sense strand starting at position 3484 of SEQ ID NO: 1538
cgacguucugacgcaucua

SEQ ID NO: 120699 - RNA, 19 nt, Artificial Sequence
  Description of Artificial Sequence: Synthetic oligonucleotide
  Antisense strand to SEQ ID NO: 120698
uagaugcgucagaacgucg

SEQ ID NO: 120700 - RNA, 19 nt, Artificial Sequence
  Description of Artificial Sequence: Synthetic oligonucleotide
  Sense strand starting at position 3332 of SEQ ID NO: 1538
ugcccauguguagaugaga

SEQ ID NO: 120701 - RNA, 19 nt, Artificial Sequence
  Description of Artificial Sequence: Synthetic oligonucleotide
  Antisense strand to SEQ ID NO: 120700
ucucaucuacacaugggca

SEQ ID NO: 120702 - RNA, 19 nt, Artificial Sequence
  Description of Artificial Sequence: Synthetic oligonucleotide
  Sense strand starting at position 3168 of SEQ ID NO: 1538
gcguuucguggguuggaua

SEQ ID NO: 120703 - RNA, 19 nt, Artificial Sequence
  Description of Artificial Sequence: Synthetic oligonucleotide
  Antisense strand to SEQ ID NO: 120702
uauccaacccacgaaacgc

SEQ ID NO: 120704 - RNA, 19 nt, Artificial Sequence
  Description of Artificial Sequence: Synthetic oligonucleotide
  Sense strand starting at position 3147 of SEQ ID NO: 1538
ggagucuggcgugaacaua

SEQ ID NO: 120705 - RNA, 19 nt, Artificial Sequence
  Description of Artificial Sequence: Synthetic oligonucleotide
  Antisense strand to SEQ ID NO: 120704
uauguucacgccagacucc

SEQ ID NO: 120706 - RNA, 19 nt, Artificial Sequence
  Description of Artificial Sequence: Synthetic oligonucleotide
  Sense strand starting at position 2935 of SEQ ID NO: 1538
cucugcaugcuccaggaua

SEQ ID NO: 120707 - RNA, 19 nt, Artificial Sequence
  Description of Artificial Sequence: Synthetic oligonucleotide
  Antisense strand to SEQ ID NO: 120706
uauccuggagcaugcagag

SEQ ID NO: 120708 - RNA, 19 nt, Artificial Sequence
  Description of Artificial Sequence: Synthetic oligonucleotide
  Sense strand starting at position 2785 of SEQ ID NO: 1538
uguauaugggcuuauuauu

SEQ ID NO: 120709 - RNA, 19 nt, Artificial Sequence
  Description of Artificial Sequence: Synthetic oligonucleotide
  Antisense strand to SEQ ID NO: 120708
aauaauaagcccauauaca

SEQ ID NO: 120710 - RNA, 19 nt, Artificial Sequence
  Description of Artificial Sequence: Synthetic oligonucleotide
  Sense strand starting at position 2771 of SEQ ID NO: 1538
gcuacaauacaagguguau

SEQ ID NO: 120711 - RNA, 19 nt, Artificial Sequence
  Description of Artificial Sequence: Synthetic oligonucleotide
  Antisense strand to SEQ ID NO: 120710
auacaccuuguauuguagc

SEQ ID NO: 120712 - RNA, 19 nt, Artificial Sequence
  Description of Artificial Sequence: Synthetic oligonucleotide
  Sense strand starting at position 2695 of SEQ ID NO: 1538
aguuccagagugugagauu

SEQ ID NO: 120713 - RNA, 19 nt, Artificial Sequence
  Description of Artificial Sequence: Synthetic oligonucleotide
  Antisense strand to SEQ ID NO: 120712
aaucucacacucuggaacu

SEQ ID NO: 120714 - RNA, 19 nt, Artificial Sequence
  Description of Artificial Sequence: Synthetic oligonucleotide
  Sense strand starting at position 2693 of SEQ ID NO: 1538
ccaguuccagagugugaga

SEQ ID NO: 120715 - RNA, 19 nt, Artificial Sequence
  Description of Artificial Sequence: Synthetic oligonucleotide
  Antisense strand to SEQ ID NO: 120714
ucucacacucuggaacugg

SEQ ID NO: 120716 - RNA, 19 nt, Artificial Sequence
  Description of Artificial Sequence: Synthetic oligonucleotide
  Sense strand starting at position 2535 of SEQ ID NO: 1538
acccgugaacuagaucaua

SEQ ID NO: 120717 - RNA, 19 nt, Artificial Sequence
  Description of Artificial Sequence: Synthetic oligonucleotide
  Antisense strand to SEQ ID NO: 120716
uaugaucuaguucacgggu

SEQ ID NO: 120718 - RNA, 19 nt, Artificial Sequence
  Description of Artificial Sequence: Synthetic oligonucleotide
  Sense strand starting at position 2528 of SEQ ID NO: 1538
acgacaaacccgugaacua

SEQ ID NO: 120719 - RNA, 19 nt, Artificial Sequence
  Description of Artificial Sequence: Synthetic oligonucleotide
  Antisense strand to SEQ ID NO: 120718
uaguucacggguuugucgu

SEQ ID NO: 120720 - RNA, 19 nt, Artificial Sequence
  Description of Artificial Sequence: Synthetic oligonucleotide
  Sense strand starting at position 2515 of SEQ ID NO: 1538
agaauagcucauuacgaca

SEQ ID NO: 120721 - RNA, 19 nt, Artificial Sequence
  Description of Artificial Sequence: Synthetic oligonucleotide
  Antisense strand to SEQ ID NO: 120720
ugucguaaugagcuauucu

SEQ ID NO: 120722 - RNA, 19 nt, Artificial Sequence
  Description of Artificial Sequence: Synthetic oligonucleotide
  Sense strand starting at position 2200 of SEQ ID NO: 1538
guuucuugggaaggaugga

SEQ ID NO: 120723 - RNA, 19 nt, Artificial Sequence
  Description of Artificial Sequence: Synthetic oligonucleotide
  Antisense strand to SEQ ID NO: 120722
uccauccuucccaagaaac

SEQ ID NO: 120724 - RNA, 19 nt, Artificial Sequence
  Description of Artificial Sequence: Synthetic oligonucleotide
  Sense strand starting at position 2151 of SEQ ID NO: 1538
ccucuagaugggugucaau

SEQ ID NO: 120725 - RNA, 19 nt, Artificial Sequence
  Description of Artificial Sequence: Synthetic oligonucleotide
  Antisense strand to SEQ ID NO: 120724
auugacacccaucuagagg

SEQ ID NO: 120726 - RNA, 19 nt, Artificial Sequence
  Description of Artificial Sequence: Synthetic oligonucleotide
  Sense strand starting at position 1814 of SEQ ID NO: 1538
gucaguagaacugggucau

SEQ ID NO: 120727 - RNA, 19 nt, Artificial Sequence
  Description of Artificial Sequence: Synthetic oligonucleotide
  Antisense strand to SEQ ID NO: 120726
augacccaguucuacugac

SEQ ID NO: 120728 - RNA, 19 nt, Artificial Sequence
  Description of Artificial Sequence: Synthetic oligonucleotide
  Sense strand starting at position 1641 of SEQ ID NO: 1538
aauaauuuaucugucgugu

SEQ ID NO: 120729 - RNA, 19 nt, Artificial Sequence
  Description of Artificial Sequence: Synthetic oligonucleotide
  Antisense strand to SEQ ID NO: 120728
acacgacagauaaauuauu

SEQ ID NO: 120730 - RNA, 19 nt, Artificial Sequence
  Description of Artificial Sequence: Synthetic oligonucleotide
  Sense strand starting at position 1589 of SEQ ID NO: 1538
gcuucuguugccucgauga

SEQ ID NO: 120731 - RNA, 19 nt, Artificial Sequence
  Description of Artificial Sequence: Synthetic oligonucleotide
  Antisense strand to SEQ ID NO: 120730
ucaucgaggcaacagaagc

SEQ ID NO: 120732 - RNA, 19 nt, Artificial Sequence
  Description of Artificial Sequence: Synthetic oligonucleotide
  Sense strand starting at position 1574 of SEQ ID NO: 1538
acagacucucuguaagcuu

SEQ ID NO: 120733 - RNA, 19 nt, Artificial Sequence
  Description of Artificial Sequence: Synthetic oligonucleotide
  Antisense strand to SEQ ID NO: 120732
aagcuuacagagagucugu

SEQ ID NO: 120734 - RNA, 19 nt, Artificial Sequence
  Description of Artificial Sequence: Synthetic oligonucleotide
  Sense strand starting at position 1464 of SEQ ID NO: 1538
gagggaggcuuagcuaaga

SEQ ID NO: 120735 - RNA, 19 nt, Artificial Sequence
  Description of Artificial Sequence: Synthetic oligonucleotide
  Antisense strand to SEQ ID NO: 120734
ucuuagcuaagccucccuc

SEQ ID NO: 120736 - RNA, 19 nt, Artificial Sequence
  Description of Artificial Sequence: Synthetic oligonucleotide
  Sense strand starting at position 1303 of SEQ ID NO: 1538
ccaugaugugaguauuauc

SEQ ID NO: 120737 - RNA, 19 nt, Artificial Sequence
  Description of Artificial Sequence: Synthetic oligonucleotide
  Antisense strand to SEQ ID NO: 120736
gauaauacucacaucaugg

SEQ ID NO: 120738 - RNA, 19 nt, Artificial Sequence
  Description of Artificial Sequence: Synthetic oligonucleotide
  Sense strand starting at position 923 of SEQ ID NO: 1538
ucuuuacaaugccuggaaa

SEQ ID NO: 120739 - RNA, 19 nt, Artificial Sequence
  Description of Artificial Sequence: Synthetic oligonucleotide
  Antisense strand to SEQ ID NO: 120738
uuuccaggcauuguaaaga

SEQ ID NO: 120740 - RNA, 19 nt, Artificial Sequence
  Description of Artificial Sequence: Synthetic oligonucleotide
  Sense strand starting at position 780 of SEQ ID NO: 1538
gcauauuauagaggcaaga

SEQ ID NO: 120741 - RNA, 19 nt, Artificial Sequence
  Description of Artificial Sequence: Synthetic oligonucleotide
  Antisense strand to SEQ ID NO: 120740
ucuugccucuauaauaugc

SEQ ID NO: 120742 - RNA, 19 nt, Artificial Sequence
  Description of Artificial Sequence: Synthetic oligonucleotide
  Sense strand starting at position 497 of SEQ ID NO: 1538
ggcaguagcaaagaaaugu

SEQ ID NO: 120743 - RNA, 19 nt, Artificial Sequence
  Description of Artificial Sequence: Synthetic oligonucleotide
  Antisense strand to SEQ ID NO: 120742
acauuucuuugcuacugcc

SEQ ID NO: 120744 - RNA, 19 nt, Artificial Sequence
  Description of Artificial Sequence: Synthetic oligonucleotide
  Sense strand starting at position 347 of SEQ ID NO: 1538
cccauucucagaggaguug

SEQ ID NO: 120745 - RNA, 19 nt, Artificial Sequence
  Description of Artificial Sequence: Synthetic oligonucleotide
  Antisense strand to SEQ ID NO: 120744
caacuccucugagaauggg

SEQ ID NO: 120746 - RNA, 19 nt, Artificial Sequence
  Description of Artificial Sequence: Synthetic oligonucleotide
  Sense strand starting at position 253 of SEQ ID NO: 1538
cuugauuacuacucaugga

SEQ ID NO: 120747 - RNA, 19 nt, Artificial Sequence
  Description of Artificial Sequence: Synthetic oligonucleotide
  Antisense strand to SEQ ID NO: 120746
uccaugaguaguaaucaag

SEQ ID NO: 120748 - RNA, 19 nt, Artificial Sequence
  Description of Artificial Sequence: Synthetic oligonucleotide
  Sense strand starting at position 247 of SEQ ID NO: 1538
ugugaucuugauuacuacu

SEQ ID NO: 120749 - RNA, 19 nt, Artificial Sequence
  Description of Artificial Sequence: Synthetic oligonucleotide
  Antisense strand to SEQ ID NO: 120748
aguaguaaucaagaucaca

SEQ ID NO: 120750 - RNA, 19 nt, Artificial Sequence
  Description of Artificial Sequence: Synthetic oligonucleotide
  Sense strand starting at position 246 of SEQ ID NO: 1538
uugugaucuugauuacuac

SEQ ID NO: 120751 - RNA, 19 nt, Artificial Sequence
  Description of Artificial Sequence: Synthetic oligonucleotide
  Antisense strand to SEQ ID NO: 120750
guaguaaucaagaucacaa

SEQ ID NO: 120752 - RNA, 19 nt, Artificial Sequence
  Description of Artificial Sequence: Synthetic oligonucleotide
  Sense strand starting at position 244 of SEQ ID NO: 1538
acuugugaucuugauuacu

SEQ ID NO: 120753 - RNA, 19 nt, Artificial Sequence
  Description of Artificial Sequence: Synthetic oligonucleotide
  Antisense strand to SEQ ID NO: 120752
aguaaucaagaucacaagu

SEQ ID NO: 120754 - RNA, 19 nt, Artificial Sequence
  Description of Artificial Sequence: Synthetic oligonucleotide
  Sense strand starting at position 240 of SEQ ID NO: 1538
aagcacuugugaucuugau

SEQ ID NO: 120755 - RNA, 19 nt, Artificial Sequence
  Description of Artificial Sequence: Synthetic oligonucleotide
  Antisense strand to SEQ ID NO: 120754
aucaagaucacaagugcuu

SEQ ID NO: 120756 - RNA, 19 nt, Artificial Sequence
  Description of Artificial Sequence: Synthetic oligonucleotide
  Sense strand starting at position 235 of SEQ ID NO: 1538
agaggaagcacuugugauc

SEQ ID NO: 120757 - RNA, 19 nt, Artificial Sequence
  Description of Artificial Sequence: Synthetic oligonucleotide
  Antisense strand to SEQ ID NO: 120756
gaucacaagugcuuccucu

SEQ ID NO: 120758 - RNA, 19 nt, Artificial Sequence
  Description of Artificial Sequence: Synthetic oligonucleotide
  Sense strand starting at position 36 of SEQ ID NO: 1538
gugugauguaaauauuagc

SEQ ID NO: 120759 - RNA, 19 nt, Artificial Sequence
  Description of Artificial Sequence: Synthetic oligonucleotide
  Antisense strand to SEQ ID NO: 120758
gcuaauauuuacaucacac

SEQ ID NO: 120760 - RNA, 19 nt, Artificial Sequence
  Description of Artificial Sequence: Synthetic oligonucleotide
  Sense strand starting at position 32 of SEQ ID NO: 1538
ggaagugugauguaaauau

SEQ ID NO: 120761 - RNA, 19 nt, Artificial Sequence
  Description of Artificial Sequence: Synthetic oligonucleotide
  Antisense strand to SEQ ID NO: 120760
auauuuacaucacacuucc

SEQ ID NO: 120762 - RNA, 19 nt, Artificial Sequence
  Description of Artificial Sequence: Synthetic oligonucleotide
  Sense strand starting at position 25 of SEQ ID NO: 1538
gaauguaggaagugugaug

SEQ ID NO: 120763 - RNA, 19 nt, Artificial Sequence
  Description of Artificial Sequence: Synthetic oligonucleotide
  Antisense strand to SEQ ID NO: 120762
caucacacuuccuacauuc

SEQ ID NO: 120764 - RNA, 19 nt, Artificial Sequence
  Description of Artificial Sequence: Synthetic oligonucleotide
  Sense strand starting at position 16 of SEQ ID NO: 1538
gaaugaguugaauguagga

SEQ ID NO: 120765 - RNA, 19 nt, Artificial Sequence
  Description of Artificial Sequence: Synthetic oligonucleotide
  Antisense strand to SEQ ID NO: 120764
uccuacauucaacucauuc

SEQ ID NO: 120766 - RNA, 19 nt, Artificial Sequence
  Description of Artificial Sequence: Synthetic oligonucleotide
  Sense strand starting at position 10 of SEQ ID NO: 1538
gccauugaaugaguugaau

SEQ ID NO: 120767 - RNA, 19 nt, Artificial Sequence
  Description of Artificial Sequence: Synthetic oligonucleotide
  Antisense strand to SEQ ID NO: 120766
auucaacucauucaauggc

SEQ ID NO: 120768 - RNA, 19 nt, Artificial Sequence
  Description of Artificial Sequence: Synthetic oligonucleotide
  Sense strand starting at position 3982 of SEQ ID NO: 1539
uuuguacagcuguguauuu

SEQ ID NO: 120769 - RNA, 19 nt, Artificial Sequence
  Description of Artificial Sequence: Synthetic oligonucleotide
  Antisense strand to SEQ ID NO: 120768
aaauacacagcuguacaaa

SEQ ID NO: 120770 - RNA, 19 nt, Artificial Sequence
  Description of Artificial Sequence: Synthetic oligonucleotide
  Sense strand starting at position 3939 of SEQ ID NO: 1539
agagaaguucuuuguauca

SEQ ID NO: 120771 - RNA, 19 nt, Artificial Sequence
  Description of Artificial Sequence: Synthetic oligonucleotide
  Antisense strand to SEQ ID NO: 120770
ugauacaaagaacuucucu

SEQ ID NO: 120772 - RNA, 19 nt, Artificial Sequence
  Description of Artificial Sequence: Synthetic oligonucleotide
  Sense strand starting at position 3938 of SEQ ID NO: 1539
gagagaaguucuuuguauc

SEQ ID NO: 120773 - RNA, 19 nt, Artificial Sequence
  Description of Artificial Sequence: Synthetic oligonucleotide
  Antisense strand to SEQ ID NO: 120772
gauacaaagaacuucucuc

SEQ ID NO: 120774 - RNA, 19 nt, Artificial Sequence
  Description of Artificial Sequence: Synthetic oligonucleotide
  Sense strand starting at position 3884 of SEQ ID NO: 1539
guaugugccacccaguauu

SEQ ID NO: 120775 - RNA, 19 nt, Artificial Sequence
  Description of Artificial Sequence: Synthetic oligonucleotide
  Antisense strand to SEQ ID NO: 120774
aauacuggguggcacauac

SEQ ID NO: 120776 - RNA, 19 nt, Artificial Sequence
  Description of Artificial Sequence: Synthetic oligonucleotide
  Sense strand starting at position 3795 of SEQ ID NO: 1539
ccacuagaauugcugaaca

SEQ ID NO: 120777 - RNA, 19 nt, Artificial Sequence
  Description of Artificial Sequence: Synthetic oligonucleotide
  Antisense strand to SEQ ID NO: 120776
uguucagcaauucuagugg

SEQ ID NO: 120778 - RNA, 19 nt, Artificial Sequence
  Description of Artificial Sequence: Synthetic oligonucleotide
  Sense strand starting at position 3782 of SEQ ID NO: 1539
uuagucauuugcuccacua

SEQ ID NO: 120779 - RNA, 19 nt, Artificial Sequence
  Description of Artificial Sequence: Synthetic oligonucleotide
  Antisense strand to SEQ ID NO: 120778
uaguggagcaaaugacuaa

SEQ ID NO: 120780 - RNA, 19 nt, Artificial Sequence
  Description of Artificial Sequence: Synthetic oligonucleotide
  Sense strand starting at position 3739 of SEQ ID NO: 1539
agcccauuggguuaucuuu

SEQ ID NO: 120781 - RNA, 19 nt, Artificial Sequence
  Description of Artificial Sequence: Synthetic oligonucleotide
  Antisense strand to SEQ ID NO: 120780
aaagauaacccaaugggcu

SEQ ID NO: 120782 - RNA, 19 nt, Artificial Sequence
  Description of Artificial Sequence: Synthetic oligonucleotide
  Sense strand starting at position 3638 of SEQ ID NO: 1539
guuacaucucgagacuaaa

SEQ ID NO: 120783 - RNA, 19 nt, Artificial Sequence
  Description of Artificial Sequence: Synthetic oligonucleotide
  Antisense strand to SEQ ID NO: 120782
uuuagucucgagauguaac

SEQ ID NO: 120784 - RNA, 19 nt, Artificial Sequence
  Description of Artificial Sequence: Synthetic oligonucleotide
  Sense strand starting at position 3636 of SEQ ID NO: 1539
agguuacaucucgagacua

SEQ ID NO: 120785 - RNA, 19 nt, Artificial Sequence
  Description of Artificial Sequence: Synthetic oligonucleotide
  Antisense strand to SEQ ID NO: 120784
uagucucgagauguaaccu

SEQ ID NO: 120786 - RNA, 19 nt, Artificial Sequence
  Description of Artificial Sequence: Synthetic oligonucleotide
  Sense strand starting at position 3625 of SEQ ID NO: 1539
agguuccuucgagguuaca

SEQ ID NO: 120787 - RNA, 19 nt, Artificial Sequence
  Description of Artificial Sequence: Synthetic oligonucleotide
  Antisense strand to SEQ ID NO: 120786
uguaaccucgaaggaaccu

SEQ ID NO: 120788 - RNA, 19 nt, Artificial Sequence
  Description of Artificial Sequence: Synthetic oligonucleotide
  Sense strand starting at position 3469 of SEQ ID NO: 1539
uguuaugcaugaccaagua

SEQ ID NO: 120789 - RNA, 19 nt, Artificial Sequence
  Description of Artificial Sequence: Synthetic oligonucleotide
  Antisense strand to SEQ ID NO: 120788
uacuuggucaugcauaaca

SEQ ID NO: 120790 - RNA, 19 nt, Artificial Sequence
  Description of Artificial Sequence: Synthetic oligonucleotide
  Sense strand starting at position 3332 of SEQ ID NO: 1539
ggucaugcuuacuccugaa

SEQ ID NO: 120791 - RNA, 19 nt, Artificial Sequence
  Description of Artificial Sequence: Synthetic oligonucleotide
  Antisense strand to SEQ ID NO: 120790
uucaggaguaagcaugacc

SEQ ID NO: 120792 - RNA, 19 nt, Artificial Sequence
  Description of Artificial Sequence: Synthetic oligonucleotide
  Sense strand starting at position 3331 of SEQ ID NO: 1539
gggucaugcuuacuccuga

SEQ ID NO: 120793 - RNA, 19 nt, Artificial Sequence
  Description of Artificial Sequence: Synthetic oligonucleotide
  Antisense strand to SEQ ID NO: 120792
ucaggaguaagcaugaccc

SEQ ID NO: 120794 - RNA, 19 nt, Artificial Sequence
  Description of Artificial Sequence: Synthetic oligonucleotide
  Sense strand starting at position 3096 of SEQ ID NO: 1539
ucuuaagcuuggguugagu

SEQ ID NO: 120795 - RNA, 19 nt, Artificial Sequence
  Description of Artificial Sequence: Synthetic oligonucleotide
  Antisense strand to SEQ ID NO: 120794
acucaacccaagcuuaaga

SEQ ID NO: 120796 - RNA, 19 nt, Artificial Sequence
  Description of Artificial Sequence: Synthetic oligonucleotide
  Sense strand starting at position 2957 of SEQ ID NO: 1539
guguuaguggaaugaauac

SEQ ID NO: 120797 - RNA, 19 nt, Artificial Sequence
  Description of Artificial Sequence: Synthetic oligonucleotide
  Antisense strand to SEQ ID NO: 120796
guauucauuccacuaacac

SEQ ID NO: 120798 - RNA, 19 nt, Artificial Sequence
  Description of Artificial Sequence: Synthetic oligonucleotide
  Sense strand starting at position 2953 of SEQ ID NO: 1539
gcaaguguuaguggaauga

SEQ ID NO: 120799 - RNA, 19 nt, Artificial Sequence
  Description of Artificial Sequence: Synthetic oligonucleotide
  Antisense strand to SEQ ID NO: 120798
ucauuccacuaacacuugc

SEQ ID NO: 120800 - RNA, 19 nt, Artificial Sequence
  Description of Artificial Sequence: Synthetic oligonucleotide
  Sense strand starting at position 2951 of SEQ ID NO: 1539
cagcaaguguuaguggaau

SEQ ID NO: 120801 - RNA, 19 nt, Artificial Sequence
  Description of Artificial Sequence: Synthetic oligonucleotide
  Antisense strand to SEQ ID NO: 120800
auuccacuaacacuugcug

SEQ ID NO: 120802 - RNA, 19 nt, Artificial Sequence
  Description of Artificial Sequence: Synthetic oligonucleotide
  Sense strand starting at position 2901 of SEQ ID NO: 1539
ugauuaaggugagcucuuu

SEQ ID NO: 120803 - RNA, 19 nt, Artificial Sequence
  Description of Artificial Sequence: Synthetic oligonucleotide
  Antisense strand to SEQ ID NO: 120802
aaagagcucaccuuaauca

SEQ ID NO: 120804 - RNA, 19 nt, Artificial Sequence
  Description of Artificial Sequence: Synthetic oligonucleotide
  Sense strand starting at position 2898 of SEQ ID NO: 1539
cagugauuaaggugagcuc

SEQ ID NO: 120805 - RNA, 19 nt, Artificial Sequence
  Description of Artificial Sequence: Synthetic oligonucleotide
  Antisense strand to SEQ ID NO: 120804
gagcucaccuuaaucacug

SEQ ID NO: 120806 - RNA, 19 nt, Artificial Sequence
  Description of Artificial Sequence: Synthetic oligonucleotide
  Sense strand starting at position 2840 of SEQ ID NO: 1539
gcaaauuccugggcccaga

SEQ ID NO: 120807 - RNA, 19 nt, Artificial Sequence
  Description of Artificial Sequence: Synthetic oligonucleotide
  Antisense strand to SEQ ID NO: 120806
ucugggcccaggaauuugc

SEQ ID NO: 120808 - RNA, 19 nt, Artificial Sequence
  Description of Artificial Sequence: Synthetic oligonucleotide
  Sense strand starting at position 2827 of SEQ ID NO: 1539
gcuuguuaacauugcaaau

SEQ ID NO: 120809 - RNA, 19 nt, Artificial Sequence
  Description of Artificial Sequence: Synthetic oligonucleotide
  Antisense strand to SEQ ID NO: 120808
auuugcaauguuaacaagc

SEQ ID NO: 120810 - RNA, 19 nt, Artificial Sequence
  Description of Artificial Sequence: Synthetic oligonucleotide
  Sense strand starting at position 2817 of SEQ ID NO: 1539
uaucaagggugcuuguuaa

SEQ ID NO: 120811 - RNA, 19 nt, Artificial Sequence
  Description of Artificial Sequence: Synthetic oligonucleotide
  Antisense strand to SEQ ID NO: 120810
uuaacaagcacccuugaua

SEQ ID NO: 120812 - RNA, 19 nt, Artificial Sequence
  Description of Artificial Sequence: Synthetic oligonucleotide
  Sense strand starting at position 2777 of SEQ ID NO: 1539
uagacuaggugguuauuaa

SEQ ID NO: 120813 - RNA, 19 nt, Artificial Sequence
  Description of Artificial Sequence: Synthetic oligonucleotide
  Antisense strand to SEQ ID NO: 120812
uuaauaaccaccuagucua

SEQ ID NO: 120814 - RNA, 19 nt, Artificial Sequence
  Description of Artificial Sequence: Synthetic oligonucleotide
  Sense strand starting at position 2775 of SEQ ID NO: 1539
ccuagacuaggugguuauu

SEQ ID NO: 120815 - RNA, 19 nt, Artificial Sequence
  Description of Artificial Sequence: Synthetic oligonucleotide
  Antisense strand to SEQ ID NO: 120814
aauaaccaccuagucuagg

SEQ ID NO: 120816 - RNA, 19 nt, Artificial Sequence
  Description of Artificial Sequence: Synthetic oligonucleotide
  Sense strand starting at position 2697 of SEQ ID NO: 1539
cgaacuucuugaucccaga

SEQ ID NO: 120817 - RNA, 19 nt, Artificial Sequence
  Description of Artificial Sequence: Synthetic oligonucleotide
  Antisense strand to SEQ ID NO: 120816
ucugggaucaagaaguucg

SEQ ID NO: 120818 - RNA, 19 nt, Artificial Sequence
  Description of Artificial Sequence: Synthetic oligonucleotide
  Sense strand starting at position 2514 of SEQ ID NO: 1539
ggucucuacccaugcuaga

SEQ ID NO: 120819 - RNA, 19 nt, Artificial Sequence
  Description of Artificial Sequence: Synthetic oligonucleotide
  Antisense strand to SEQ ID NO: 120818
ucuagcauggguagagacc

SEQ ID NO: 120820 - RNA, 19 nt, Artificial Sequence
  Description of Artificial Sequence: Synthetic oligonucleotide
  Sense strand starting at position 2440 of SEQ ID NO: 1539
gugugucuccuggaaauug

SEQ ID NO: 120821 - RNA, 19 nt, Artificial Sequence
  Description of Artificial Sequence: Synthetic oligonucleotide
  Antisense strand to SEQ ID NO: 120820
caauuuccaggagacacac

SEQ ID NO: 120822 - RNA, 19 nt, Artificial Sequence
  Description of Artificial Sequence: Synthetic oligonucleotide
  Sense strand starting at position 2282 of SEQ ID NO: 1539
gugccuuggagugaucaac

SEQ ID NO: 120823 - RNA, 19 nt, Artificial Sequence
  Description of Artificial Sequence: Synthetic oligonucleotide
  Antisense strand to SEQ ID NO: 120822
guugaucacuccaaggcac

SEQ ID NO: 120824 - RNA, 19 nt, Artificial Sequence
  Description of Artificial Sequence: Synthetic oligonucleotide
  Sense strand starting at position 2281 of SEQ ID NO: 1539
ggugccuuggagugaucaa

SEQ ID NO: 120825 - RNA, 19 nt, Artificial Sequence
  Description of Artificial Sequence: Synthetic oligonucleotide
  Antisense strand to SEQ ID NO: 120824
uugaucacuccaaggcacc

SEQ ID NO: 120826 - RNA, 19 nt, Artificial Sequence
  Description of Artificial Sequence: Synthetic oligonucleotide
  Sense strand starting at position 2243 of SEQ ID NO: 1539
uggccuucagcugggaaga

SEQ ID NO: 120827 - RNA, 19 nt, Artificial Sequence
  Description of Artificial Sequence: Synthetic oligonucleotide
  Antisense strand to SEQ ID NO: 120826
ucuucccagcugaaggcca

SEQ ID NO: 120828 - RNA, 19 nt, Artificial Sequence
  Description of Artificial Sequence: Synthetic oligonucleotide
  Sense strand starting at position 1650 of SEQ ID NO: 1539
ggauuuaagucagaauucu

SEQ ID NO: 120829 - RNA, 19 nt, Artificial Sequence
  Description of Artificial Sequence: Synthetic oligonucleotide
  Antisense strand to SEQ ID NO: 120828
agaauucugacuuaaaucc

SEQ ID NO: 120830 - RNA, 19 nt, Artificial Sequence
  Description of Artificial Sequence: Synthetic oligonucleotide
  Sense strand starting at position 1143 of SEQ ID NO: 1539
ugguuugcccgguaagaga

SEQ ID NO: 120831 - RNA, 19 nt, Artificial Sequence
  Description of Artificial Sequence: Synthetic oligonucleotide
  Antisense strand to SEQ ID NO: 120830
ucucuuaccgggcaaacca

SEQ ID NO: 120832 - RNA, 19 nt, Artificial Sequence
  Description of Artificial Sequence: Synthetic oligonucleotide
  Sense strand starting at position 663 of SEQ ID NO: 1539
gggcaaugagcgugagacu

SEQ ID NO: 120833 - RNA, 19 nt, Artificial Sequence
  Description of Artificial Sequence: Synthetic oligonucleotide
  Antisense strand to SEQ ID NO: 120832
agucucacgcucauugccc

SEQ ID NO: 120834 - RNA, 19 nt, Artificial Sequence
  Description of Artificial Sequence: Synthetic oligonucleotide
  Sense strand starting at position 386 of SEQ ID NO: 1539
ucauauguaaagugauggu

SEQ ID NO: 120835 - RNA, 19 nt, Artificial Sequence
  Description of Artificial Sequence: Synthetic oligonucleotide
  Antisense strand to SEQ ID NO: 120834
accaucacuuuacauauga

SEQ ID NO: 120836 - RNA, 19 nt, Artificial Sequence
  Description of Artificial Sequence: Synthetic oligonucleotide
  Sense strand starting at position 365 of SEQ ID NO: 1539
gcacucugugccuuaguuu

SEQ ID NO: 120837 - RNA, 19 nt, Artificial Sequence
  Description of Artificial Sequence: Synthetic oligonucleotide
  Antisense strand to SEQ ID NO: 120836
aaacuaaggcacagagugc

SEQ ID NO: 120838 - RNA, 19 nt, Artificial Sequence
  Description of Artificial Sequence: Synthetic oligonucleotide
  Sense strand starting at position 342 of SEQ ID NO: 1539
uaggcuacuuagguuuaga

SEQ ID NO: 120839 - RNA, 19 nt, Artificial Sequence
  Description of Artificial Sequence: Synthetic oligonucleotide
  Antisense strand to SEQ ID NO: 120838
ucuaaaccuaaguagccua

SEQ ID NO: 120840 - RNA, 19 nt, Artificial Sequence
  Description of Artificial Sequence: Synthetic oligonucleotide
  Sense strand starting at position 312 of SEQ ID NO: 1539
gcucaaauccugggucuau

SEQ ID NO: 120841 - RNA, 19 nt, Artificial Sequence
  Description of Artificial Sequence: Synthetic oligonucleotide
  Antisense strand to SEQ ID NO: 120840
auagacccaggauuugagc

SEQ ID NO: 120842 - RNA, 19 nt, Artificial Sequence
  Description of Artificial Sequence: Synthetic oligonucleotide
  Sense strand starting at position 311 of SEQ ID NO: 1539
agcucaaauccugggucua

SEQ ID NO: 120843 - RNA, 19 nt, Artificial Sequence
  Description of Artificial Sequence: Synthetic oligonucleotide
  Antisense strand to SEQ ID NO: 120842
uagacccaggauuugagcu

SEQ ID NO: 120844 - RNA, 19 nt, Artificial Sequence
  Description of Artificial Sequence: Synthetic oligonucleotide
  Sense strand starting at position 201 of SEQ ID NO: 1539
acacuccugcccugaauga

SEQ ID NO: 120845 - RNA, 19 nt, Artificial Sequence
  Description of Artificial Sequence: Synthetic oligonucleotide
  Antisense strand to SEQ ID NO: 120844
ucauucagggcaggagugu

SEQ ID NO: 120846 - RNA, 19 nt, Artificial Sequence
  Description of Artificial Sequence: Synthetic oligonucleotide
  Sense strand starting at position 88 of SEQ ID NO: 1539
ggauccuagcccugagguu

SEQ ID NO: 120847 - RNA, 19 nt, Artificial Sequence
  Description of Artificial Sequence: Synthetic oligonucleotide
  Antisense strand to SEQ ID NO: 120846
aaccucagggcuaggaucc

SEQ ID NO: 120848 - RNA, 19 nt, Artificial Sequence
  Description of Artificial Sequence: Synthetic oligonucleotide
  Sense strand starting at position 500 of SEQ ID NO: 1540
guaacuacucacgagauug

SEQ ID NO: 120849 - RNA, 19 nt, Artificial Sequence
  Description of Artificial Sequence: Synthetic oligonucleotide
  Antisense strand to SEQ ID NO: 120848
caaucucgugaguaguuac

SEQ ID NO: 120850 - RNA, 19 nt, Artificial Sequence
  Description of Artificial Sequence: Synthetic oligonucleotide
  Sense strand starting at position 502 of SEQ ID NO: 1540
aacuacucacgagauuguu

SEQ ID NO: 120851 - RNA, 19 nt, Artificial Sequence
  Description of Artificial Sequence: Synthetic oligonucleotide
  Antisense strand to SEQ ID NO: 120850
aacaaucucgugaguaguu

SEQ ID NO: 120852 - RNA, 19 nt, Artificial Sequence
  Description of Artificial Sequence: Synthetic oligonucleotide
  Sense strand starting at position 505 of SEQ ID NO: 1540
uacucacgagauuguugau

SEQ ID NO: 120853 - RNA, 19 nt, Artificial Sequence
  Description of Artificial Sequence: Synthetic oligonucleotide
  Antisense strand to SEQ ID NO: 120852
aucaacaaucucgugagua

SEQ ID NO: 120854 - RNA, 19 nt, Artificial Sequence
  Description of Artificial Sequence: Synthetic oligonucleotide
  Sense strand starting at position 540 of SEQ ID NO: 1540
auguaaagcacucgaugga

SEQ ID NO: 120855 - RNA, 19 nt, Artificial Sequence
  Description of Artificial Sequence: Synthetic oligonucleotide
  Antisense strand to SEQ ID NO: 120854
uccaucgagugcuuuacau

SEQ ID NO: 120856 - RNA, 19 nt, Artificial Sequence
  Description of Artificial Sequence: Synthetic oligonucleotide
  Sense strand starting at position 541 of SEQ ID NO: 1540
uguaaagcacucgauggau

SEQ ID NO: 120857 - RNA, 19 nt, Artificial Sequence
  Description of Artificial Sequence: Synthetic oligonucleotide
  Antisense strand to SEQ ID NO: 120856
auccaucgagugcuuuaca

SEQ ID NO: 120858 - RNA, 19 nt, Artificial Sequence
  Description of Artificial Sequence: Synthetic oligonucleotide
  Sense strand starting at position 544 of SEQ ID NO: 1540
aaagcacucgauggauaga

SEQ ID NO: 120859 - RNA, 19 nt, Artificial Sequence
  Description of Artificial Sequence: Synthetic oligonucleotide
  Antisense strand to SEQ ID NO: 120858
ucuauccaucgagugcuuu

SEQ ID NO: 120860 - RNA, 19 nt, Artificial Sequence
  Description of Artificial Sequence: Synthetic oligonucleotide
  Sense strand starting at position 632 of SEQ ID NO: 1540
aauggauacuucguaagug

SEQ ID NO: 120861 - RNA, 19 nt, Artificial Sequence
  Description of Artificial Sequence: Synthetic oligonucleotide
  Antisense strand to SEQ ID NO: 120860
cacuuacgaaguauccauu

SEQ ID NO: 120862 - RNA, 19 nt, Artificial Sequence
  Description of Artificial Sequence: Synthetic oligonucleotide
  Sense strand starting at position 907 of SEQ ID NO: 1540
ccuguuucuggugagcaga

SEQ ID NO: 120863 - RNA, 19 nt, Artificial Sequence
  Description of Artificial Sequence: Synthetic oligonucleotide
  Antisense strand to SEQ ID NO: 120862
ucugcucaccagaaacagg

SEQ ID NO: 120864 - RNA, 19 nt, Artificial Sequence
  Description of Artificial Sequence: Synthetic oligonucleotide
  Sense strand starting at position 1054 of SEQ ID NO: 1540
accuuuggucucuggagga

SEQ ID NO: 120865 - RNA, 19 nt, Artificial Sequence
  Description of Artificial Sequence: Synthetic oligonucleotide
  Antisense strand to SEQ ID NO: 120864
uccuccagagaccaaaggu

SEQ ID NO: 120866 - RNA, 19 nt, Artificial Sequence
  Description of Artificial Sequence: Synthetic oligonucleotide
  Sense strand starting at position 1116 of SEQ ID NO: 1540
gcacucgagggaugagauu

SEQ ID NO: 120867 - RNA, 19 nt, Artificial Sequence
  Description of Artificial Sequence: Synthetic oligonucleotide
  Antisense strand to SEQ ID NO: 120866
aaucucaucccucgagugc

SEQ ID NO: 120868 - RNA, 19 nt, Artificial Sequence
  Description of Artificial Sequence: Synthetic oligonucleotide
  Sense strand starting at position 1168 of SEQ ID NO: 1540
ugauaagaguguuccagag

SEQ ID NO: 120869 - RNA, 19 nt, Artificial Sequence
  Description of Artificial Sequence: Synthetic oligonucleotide
  Antisense strand to SEQ ID NO: 120868
cucuggaacacucuuauca

SEQ ID NO: 120870 - RNA, 19 nt, Artificial Sequence
  Description of Artificial Sequence: Synthetic oligonucleotide
  Sense strand starting at position 1172 of SEQ ID NO: 1540
aagaguguuccagagcauu

SEQ ID NO: 120871 - RNA, 19 nt, Artificial Sequence
  Description of Artificial Sequence: Synthetic oligonucleotide
  Antisense strand to SEQ ID NO: 120870
aaugcucuggaacacucuu

SEQ ID NO: 120872 - RNA, 19 nt, Artificial Sequence
  Description of Artificial Sequence: Synthetic oligonucleotide
  Sense strand starting at position 1175 of SEQ ID NO: 1540
aguguuccagagcauuaau

SEQ ID NO: 120873 - RNA, 19 nt, Artificial Sequence
  Description of Artificial Sequence: Synthetic oligonucleotide
  Antisense strand to SEQ ID NO: 120872
auuaaugcucuggaacacu

SEQ ID NO: 120874 - RNA, 19 nt, Artificial Sequence
  Description of Artificial Sequence: Synthetic oligonucleotide
  Sense strand starting at position 1178 of SEQ ID NO: 1540
guuccagagcauuaauaau

SEQ ID NO: 120875 - RNA, 19 nt, Artificial Sequence
  Description of Artificial Sequence: Synthetic oligonucleotide
  Antisense strand to SEQ ID NO: 120874
auuauuaaugcucuggaac

SEQ ID NO: 120876 - RNA, 19 nt, Artificial Sequence
  Description of Artificial Sequence: Synthetic oligonucleotide
  Sense strand starting at position 1184 of SEQ ID NO: 1540
gagcauuaauaauugugau

SEQ ID NO: 120877 - RNA, 19 nt, Artificial Sequence
  Description of Artificial Sequence: Synthetic oligonucleotide
  Antisense strand to SEQ ID NO: 120876
aucacaauuauuaaugcuc

SEQ ID NO: 120878 - RNA, 19 nt, Artificial Sequence
  Description of Artificial Sequence: Synthetic oligonucleotide
  Sense strand starting at position 1336 of SEQ ID NO: 1540
aacugagucccagaguugu

SEQ ID NO: 120879 - RNA, 19 nt, Artificial Sequence
  Description of Artificial Sequence: Synthetic oligonucleotide
  Antisense strand to SEQ ID NO: 120878
acaacucugggacucaguu

SEQ ID NO: 120880 - RNA, 19 nt, Artificial Sequence
  Description of Artificial Sequence: Synthetic oligonucleotide
  Sense strand starting at position 1340 of SEQ ID NO: 1540
gagucccagaguuguauga

SEQ ID NO: 120881 - RNA, 19 nt, Artificial Sequence
  Description of Artificial Sequence: Synthetic oligonucleotide
  Antisense strand to SEQ ID NO: 120880
ucauacaacucugggacuc

SEQ ID NO: 120882 - RNA, 19 nt, Artificial Sequence
  Description of Artificial Sequence: Synthetic oligonucleotide
  Sense strand starting at position 1750 of SEQ ID NO: 1540
cgaagauuaaugugcaauu

SEQ ID NO: 120883 - RNA, 19 nt, Artificial Sequence
  Description of Artificial Sequence: Synthetic oligonucleotide
  Antisense strand to SEQ ID NO: 120882
aauugcacauuaaucuucg

SEQ ID NO: 120884 - RNA, 19 nt, Artificial Sequence
  Description of Artificial Sequence: Synthetic oligonucleotide
  Sense strand starting at position 1761 of SEQ ID NO: 1540
gugcaauuccuaugacuga

SEQ ID NO: 120885 - RNA, 19 nt, Artificial Sequence
  Description of Artificial Sequence: Synthetic oligonucleotide
  Antisense strand to SEQ ID NO: 120884
ucagucauaggaauugcac

SEQ ID NO: 120886 - RNA, 19 nt, Artificial Sequence
  Description of Artificial Sequence: Synthetic oligonucleotide
  Sense strand starting at position 1828 of SEQ ID NO: 1540
gcucaauugagauauaggu

SEQ ID NO: 120887 - RNA, 19 nt, Artificial Sequence
  Description of Artificial Sequence: Synthetic oligonucleotide
  Antisense strand to SEQ ID NO: 120886
accuauaucucaauugagc

SEQ ID NO: 120888 - RNA, 19 nt, Artificial Sequence
  Description of Artificial Sequence: Synthetic oligonucleotide
  Sense strand starting at position 1900 of SEQ ID NO: 1540
gacguuuaacucgacggaa

SEQ ID NO: 120889 - RNA, 19 nt, Artificial Sequence
  Description of Artificial Sequence: Synthetic oligonucleotide
  Antisense strand to SEQ ID NO: 120888
uuccgucgaguuaaacguc

SEQ ID NO: 120890 - RNA, 19 nt, Artificial Sequence
  Description of Artificial Sequence: Synthetic oligonucleotide
  Sense strand starting at position 1903 of SEQ ID NO: 1540
guuuaacucgacggaaaug

SEQ ID NO: 120891 - RNA, 19 nt, Artificial Sequence
  Description of Artificial Sequence: Synthetic oligonucleotide
  Antisense strand to SEQ ID NO: 120890
cauuuccgucgaguuaaac

SEQ ID NO: 120892 - RNA, 19 nt, Artificial Sequence
  Description of Artificial Sequence: Synthetic oligonucleotide
  Sense strand starting at position 2015 of SEQ ID NO: 1540
acuacaauucccgauguac

SEQ ID NO: 120893 - RNA, 19 nt, Artificial Sequence
  Description of Artificial Sequence: Synthetic oligonucleotide
  Antisense strand to SEQ ID NO: 120892
guacaucgggaauuguagu

SEQ ID NO: 120894 - RNA, 19 nt, Artificial Sequence
  Description of Artificial Sequence: Synthetic oligonucleotide
  Sense strand starting at position 2017 of SEQ ID NO: 1540
uacaauucccgauguacag

SEQ ID NO: 120895 - RNA, 19 nt, Artificial Sequence
  Description of Artificial Sequence: Synthetic oligonucleotide
  Antisense strand to SEQ ID NO: 120894
cuguacaucgggaauugua

SEQ ID NO: 120896 - RNA, 19 nt, Artificial Sequence
  Description of Artificial Sequence: Synthetic oligonucleotide
  Sense strand starting at position 2041 of SEQ ID NO: 1540
gagauugcgcauuacaacu

SEQ ID NO: 120897 - RNA, 19 nt, Artificial Sequence
  Description of Artificial Sequence: Synthetic oligonucleotide
  Antisense strand to SEQ ID NO: 120896
aguuguaaugcgcaaucuc

SEQ ID NO: 120898 - RNA, 19 nt, Artificial Sequence
  Description of Artificial Sequence: Synthetic oligonucleotide
  Sense strand starting at position 2342 of SEQ ID NO: 1540
cuuugcuuccuguaagaau

SEQ ID NO: 120899 - RNA, 19 nt, Artificial Sequence
  Description of Artificial Sequence: Synthetic oligonucleotide
  Antisense strand to SEQ ID NO: 120898
auucuuacaggaagcaaag

SEQ ID NO: 120900 - RNA, 19 nt, Artificial Sequence
  Description of Artificial Sequence: Synthetic oligonucleotide
  Sense strand starting at position 2520 of SEQ ID NO: 1540
gguucuuagcgacacugau

SEQ ID NO: 120901 - RNA, 19 nt, Artificial Sequence
  Description of Artificial Sequence: Synthetic oligonucleotide
  Antisense strand to SEQ ID NO: 120900
aucagugucgcuaagaacc

SEQ ID NO: 120902 - RNA, 19 nt, Artificial Sequence
  Description of Artificial Sequence: Synthetic oligonucleotide
  Sense strand starting at position 2571 of SEQ ID NO: 1540
cacagucuagcagagaauu

SEQ ID NO: 120903 - RNA, 19 nt, Artificial Sequence
  Description of Artificial Sequence: Synthetic oligonucleotide
  Antisense strand to SEQ ID NO: 120902
aauucucugcuagacugug

SEQ ID NO: 120904 - RNA, 19 nt, Artificial Sequence
  Description of Artificial Sequence: Synthetic oligonucleotide
  Sense strand starting at position 2711 of SEQ ID NO: 1540
uuuagagggagugauguuu

SEQ ID NO: 120905 - RNA, 19 nt, Artificial Sequence
  Description of Artificial Sequence: Synthetic oligonucleotide
  Antisense strand to SEQ ID NO: 120904
aaacaucacucccucuaaa

SEQ ID NO: 120906 - RNA, 19 nt, Artificial Sequence
  Description of Artificial Sequence: Synthetic oligonucleotide
  Sense strand starting at position 2726 of SEQ ID NO: 1540
guuuguuaacauugagacc

SEQ ID NO: 120907 - RNA, 19 nt, Artificial Sequence
  Description of Artificial Sequence: Synthetic oligonucleotide
  Antisense strand to SEQ ID NO: 120906
ggucucaauguuaacaaac

SEQ ID NO: 120908 - RNA, 19 nt, Artificial Sequence
  Description of Artificial Sequence: Synthetic oligonucleotide
  Sense strand starting at position 2789 of SEQ ID NO: 1540
gacguuucagaguauggca

SEQ ID NO: 120909 - RNA, 19 nt, Artificial Sequence
  Description of Artificial Sequence: Synthetic oligonucleotide
  Antisense strand to SEQ ID NO: 120908
ugccauacucugaaacguc

SEQ ID NO: 120910 - RNA, 19 nt, Artificial Sequence
  Description of Artificial Sequence: Synthetic oligonucleotide
  Sense strand starting at position 2797 of SEQ ID NO: 1540
agaguauggcauuaaguuc

SEQ ID NO: 120911 - RNA, 19 nt, Artificial Sequence
  Description of Artificial Sequence: Synthetic oligonucleotide
  Antisense strand to SEQ ID NO: 120910
gaacuuaaugccauacucu

SEQ ID NO: 120912 - RNA, 19 nt, Artificial Sequence
  Description of Artificial Sequence: Synthetic oligonucleotide
  Sense strand starting at position 2892 of SEQ ID NO: 1540
ucaggaguucuguaaacuu

SEQ ID NO: 120913 - RNA, 19 nt, Artificial Sequence
  Description of Artificial Sequence: Synthetic oligonucleotide
  Antisense strand to SEQ ID NO: 120912
aaguuuacagaacuccuga

SEQ ID NO: 120914 - RNA, 19 nt, Artificial Sequence
  Description of Artificial Sequence: Synthetic oligonucleotide
  Sense strand starting at position 2913 of SEQ ID NO: 1540
auaggaaauuuggaucguu

SEQ ID NO: 120915 - RNA, 19 nt, Artificial Sequence
  Description of Artificial Sequence: Synthetic oligonucleotide
  Antisense strand to SEQ ID NO: 120914
aacgauccaaauuuccuau

SEQ ID NO: 120916 - RNA, 19 nt, Artificial Sequence
  Description of Artificial Sequence: Synthetic oligonucleotide
  Sense strand starting at position 3146 of SEQ ID NO: 1540
ggguaucuccuguauuaga

SEQ ID NO: 120917 - RNA, 19 nt, Artificial Sequence
  Description of Artificial Sequence: Synthetic oligonucleotide
  Antisense strand to SEQ ID NO: 120916
ucuaauacaggagauaccc

SEQ ID NO: 120918 - RNA, 19 nt, Artificial Sequence
  Description of Artificial Sequence: Synthetic oligonucleotide
  Sense strand starting at position 3396 of SEQ ID NO: 1540
cucggaucucauuaaaucu

SEQ ID NO: 120919 - RNA, 19 nt, Artificial Sequence
  Description of Artificial Sequence: Synthetic oligonucleotide
  Antisense strand to SEQ ID NO: 120918
agauuuaaugagauccgag

SEQ ID NO: 120920 - RNA, 19 nt, Artificial Sequence
  Description of Artificial Sequence: Synthetic oligonucleotide
  Sense strand starting at position 3404 of SEQ ID NO: 1540
ucauuaaaucuguggcuga

SEQ ID NO: 120921 - RNA, 19 nt, Artificial Sequence
  Description of Artificial Sequence: Synthetic oligonucleotide
  Antisense strand to SEQ ID NO: 120920
ucagccacagauuuaauga

SEQ ID NO: 120922 - RNA, 19 nt, Artificial Sequence
  Description of Artificial Sequence: Synthetic oligonucleotide
  Sense strand starting at position 3483 of SEQ ID NO: 1540
cauuaauccgugcugugca

SEQ ID NO: 120923 - RNA, 19 nt, Artificial Sequence
  Description of Artificial Sequence: Synthetic oligonucleotide
  Antisense strand to SEQ ID NO: 120922
ugcacagcacggauuaaug

SEQ ID NO: 120924 - RNA, 19 nt, Artificial Sequence
  Description of Artificial Sequence: Synthetic oligonucleotide
  Sense strand starting at position 3529 of SEQ ID NO: 1540
gagguccuuggucaugaga

SEQ ID NO: 120925 - RNA, 19 nt, Artificial Sequence
  Description of Artificial Sequence: Synthetic oligonucleotide
  Antisense strand to SEQ ID NO: 120924
ucucaugaccaaggaccuc

SEQ ID NO: 120926 - RNA, 19 nt, Artificial Sequence
  Description of Artificial Sequence: Synthetic oligonucleotide
  Sense strand starting at position 3736 of SEQ ID NO: 1540
aguugaguuuaacuauacu

SEQ ID NO: 120927 - RNA, 19 nt, Artificial Sequence
  Description of Artificial Sequence: Synthetic oligonucleotide
  Antisense strand to SEQ ID NO: 120926
aguauaguuaaacucaacu

SEQ ID NO: 120928 - RNA, 19 nt, Artificial Sequence
  Description of Artificial Sequence: Synthetic oligonucleotide
  Sense strand starting at position 3567 of SEQ ID NO: 1541
auuauuagucuggaucuuu

SEQ ID NO: 120929 - RNA, 19 nt, Artificial Sequence
  Description of Artificial Sequence: Synthetic oligonucleotide
  Antisense strand to SEQ ID NO: 120928
aaagauccagacuaauaau

SEQ ID NO: 120930 - RNA, 19 nt, Artificial Sequence
  Description of Artificial Sequence: Synthetic oligonucleotide
  Sense strand starting at position 3563 of SEQ ID NO: 1541
uccaauuauuagucuggau

SEQ ID NO: 120931 - RNA, 19 nt, Artificial Sequence
  Description of Artificial Sequence: Synthetic oligonucleotide
  Antisense strand to SEQ ID NO: 120930
auccagacuaauaauugga

SEQ ID NO: 120932 - RNA, 19 nt, Artificial Sequence
  Description of Artificial Sequence: Synthetic oligonucleotide
  Sense strand starting at position 3468 of SEQ ID NO: 1541
uguagauccuggcugaaau

SEQ ID NO: 120933 - RNA, 19 nt, Artificial Sequence
  Description of Artificial Sequence: Synthetic oligonucleotide
  Antisense strand to SEQ ID NO: 120932
auuucagccaggaucuaca

SEQ ID NO: 120934 - RNA, 19 nt, Artificial Sequence
  Description of Artificial Sequence: Synthetic oligonucleotide
  Sense strand starting at position 3398 of SEQ ID NO: 1541
uugauuacuguuggaaaca

SEQ ID NO: 120935 - RNA, 19 nt, Artificial Sequence
  Description of Artificial Sequence: Synthetic oligonucleotide
  Antisense strand to SEQ ID NO: 120934
uguuuccaacaguaaucaa

SEQ ID NO: 120936 - RNA, 19 nt, Artificial Sequence
  Description of Artificial Sequence: Synthetic oligonucleotide
  Sense strand starting at position 3370 of SEQ ID NO: 1541
gggaggauuguuuggaugu

SEQ ID NO: 120937 - RNA, 19 nt, Artificial Sequence
  Description of Artificial Sequence: Synthetic oligonucleotide
  Antisense strand to SEQ ID NO: 120936
acauccaaacaauccuccc

SEQ ID NO: 120938 - RNA, 19 nt, Artificial Sequence
  Description of Artificial Sequence: Synthetic oligonucleotide
  Sense strand starting at position 3368 of SEQ ID NO: 1541
augggaggauuguuuggau

SEQ ID NO: 120939 - RNA, 19 nt, Artificial Sequence
  Description of Artificial Sequence: Synthetic oligonucleotide
  Antisense strand to SEQ ID NO: 120938
auccaaacaauccucccau

SEQ ID NO: 120940 - RNA, 19 nt, Artificial Sequence
  Description of Artificial Sequence: Synthetic oligonucleotide
  Sense strand starting at position 3215 of SEQ ID NO: 1541
ccacauuguugacuggagu

SEQ ID NO: 120941 - RNA, 19 nt, Artificial Sequence
  Description of Artificial Sequence: Synthetic oligonucleotide
  Antisense strand to SEQ ID NO: 120940
acuccagucaacaaugugg

SEQ ID NO: 120942 - RNA, 19 nt, Artificial Sequence
  Description of Artificial Sequence: Synthetic oligonucleotide
  Sense strand starting at position 3171 of SEQ ID NO: 1541
gggaauguccucuggagaa

SEQ ID NO: 120943 - RNA, 19 nt, Artificial Sequence
  Description of Artificial Sequence: Synthetic oligonucleotide
  Antisense strand to SEQ ID NO: 120942
uucuccagaggacauuccc

SEQ ID NO: 120944 - RNA, 19 nt, Artificial Sequence
  Description of Artificial Sequence: Synthetic oligonucleotide
  Sense strand starting at position 3169 of SEQ ID NO: 1541
gugggaauguccucuggag

SEQ ID NO: 120945 - RNA, 19 nt, Artificial Sequence
  Description of Artificial Sequence: Synthetic oligonucleotide
  Antisense strand to SEQ ID NO: 120944
cuccagaggacauucccac

SEQ ID NO: 120946 - RNA, 19 nt, Artificial Sequence
  Description of Artificial Sequence: Synthetic oligonucleotide
  Sense strand starting at position 3070 of SEQ ID NO: 1541
uaagucagucuuuaugaga

SEQ ID NO: 120947 - RNA, 19 nt, Artificial Sequence
  Description of Artificial Sequence: Synthetic oligonucleotide
  Antisense strand to SEQ ID NO: 120946
ucucauaaagacugacuua

SEQ ID NO: 120948 - RNA, 19 nt, Artificial Sequence
  Description of Artificial Sequence: Synthetic oligonucleotide
  Sense strand starting at position 3069 of SEQ ID NO: 1541
uuaagucagucuuuaugag

SEQ ID NO: 120949 - RNA, 19 nt, Artificial Sequence
  Description of Artificial Sequence: Synthetic oligonucleotide
  Antisense strand to SEQ ID NO: 120948
cucauaaagacugacuuaa

SEQ ID NO: 120950 - RNA, 19 nt, Artificial Sequence
  Description of Artificial Sequence: Synthetic oligonucleotide
  Sense strand starting at position 2889 of SEQ ID NO: 1541
cugagagauaagugcuaua

SEQ ID NO: 120951 - RNA, 19 nt, Artificial Sequence
  Description of Artificial Sequence: Synthetic oligonucleotide
  Antisense strand to SEQ ID NO: 120950
uauagcacuuaucucucag

SEQ ID NO: 120952 - RNA, 19 nt, Artificial Sequence
  Description of Artificial Sequence: Synthetic oligonucleotide
  Sense strand starting at position 2879 of SEQ ID NO: 1541
uugcaaagugcugagagau

SEQ ID NO: 120953 - RNA, 19 nt, Artificial Sequence
  Description of Artificial Sequence: Synthetic oligonucleotide
  Antisense strand to SEQ ID NO: 120952
aucucucagcacuuugcaa

SEQ ID NO: 120954 - RNA, 19 nt, Artificial Sequence
  Description of Artificial Sequence: Synthetic oligonucleotide
  Sense strand starting at position 2852 of SEQ ID NO: 1541
gcauucuuucuacagguaa

SEQ ID NO: 120955 - RNA, 19 nt, Artificial Sequence
  Description of Artificial Sequence: Synthetic oligonucleotide
  Antisense strand to SEQ ID NO: 120954
uuaccuguagaaagaaugc

SEQ ID NO: 120956 - RNA, 19 nt, Artificial Sequence
  Description of Artificial Sequence: Synthetic oligonucleotide
  Sense strand starting at position 2838 of SEQ ID NO: 1541
agcuaauauuuguugcauu

SEQ ID NO: 120957 - RNA, 19 nt, Artificial Sequence
  Description of Artificial Sequence: Synthetic oligonucleotide
  Antisense strand to SEQ ID NO: 120956
aaugcaacaaauauuagcu

SEQ ID NO: 120958 - RNA, 19 nt, Artificial Sequence
  Description of Artificial Sequence: Synthetic oligonucleotide
  Sense strand starting at position 2797 of SEQ ID NO: 1541
gguuuaauuuccuuugcag

SEQ ID NO: 120959 - RNA, 19 nt, Artificial Sequence
  Description of Artificial Sequence: Synthetic oligonucleotide
  Antisense strand to SEQ ID NO: 120958
cugcaaaggaaauuaaacc

SEQ ID NO: 120960 - RNA, 19 nt, Artificial Sequence
  Description of Artificial Sequence: Synthetic oligonucleotide
  Sense strand starting at position 2796 of SEQ ID NO: 1541
ugguuuaauuuccuuugca

SEQ ID NO: 120961 - RNA, 19 nt, Artificial Sequence
  Description of Artificial Sequence: Synthetic oligonucleotide
  Antisense strand to SEQ ID NO: 120960
ugcaaaggaaauuaaacca

SEQ ID NO: 120962 - RNA, 19 nt, Artificial Sequence
  Description of Artificial Sequence: Synthetic oligonucleotide
  Sense strand starting at position 2592 of SEQ ID NO: 1541
agacucuuaggucaaagca

SEQ ID NO: 120963 - RNA, 19 nt, Artificial Sequence
  Description of Artificial Sequence: Synthetic oligonucleotide
  Antisense strand to SEQ ID NO: 120962
ugcuuugaccuaagagucu

SEQ ID NO: 120964 - RNA, 19 nt, Artificial Sequence
  Description of Artificial Sequence: Synthetic oligonucleotide
  Sense strand starting at position 2411 of SEQ ID NO: 1541
uuggacgcuguucagaaau

SEQ ID NO: 120965 - RNA, 19 nt, Artificial Sequence
  Description of Artificial Sequence: Synthetic oligonucleotide
  Antisense strand to SEQ ID NO: 120964
auuucugaacagcguccaa

SEQ ID NO: 120966 - RNA, 19 nt, Artificial Sequence
  Description of Artificial Sequence: Synthetic oligonucleotide
  Sense strand starting at position 2329 of SEQ ID NO: 1541
agguauuuaguguggcuua

SEQ ID NO: 120967 - RNA, 19 nt, Artificial Sequence
  Description of Artificial Sequence: Synthetic oligonucleotide
  Antisense strand to SEQ ID NO: 120966
uaagccacacuaaauaccu

SEQ ID NO: 120968 - RNA, 19 nt, Artificial Sequence
  Description of Artificial Sequence: Synthetic oligonucleotide
  Sense strand starting at position 2268 of SEQ ID NO: 1541
ucuuuaggucauggagaaa

SEQ ID NO: 120969 - RNA, 19 nt, Artificial Sequence
  Description of Artificial Sequence: Synthetic oligonucleotide
  Antisense strand to SEQ ID NO: 120968
uuucuccaugaccuaaaga

SEQ ID NO: 120970 - RNA, 19 nt, Artificial Sequence
  Description of Artificial Sequence: Synthetic oligonucleotide
  Sense strand starting at position 2129 of SEQ ID NO: 1541
cugauuggauuugauaaua

SEQ ID NO: 120971 - RNA, 19 nt, Artificial Sequence
  Description of Artificial Sequence: Synthetic oligonucleotide
  Antisense strand to SEQ ID NO: 120970
uauuaucaaauccaaucag

SEQ ID NO: 120972 - RNA, 19 nt, Artificial Sequence
  Description of Artificial Sequence: Synthetic oligonucleotide
  Sense strand starting at position 2073 of SEQ ID NO: 1541
agagccuuaccuugacuga

SEQ ID NO: 120973 - RNA, 19 nt, Artificial Sequence
  Description of Artificial Sequence: Synthetic oligonucleotide
  Antisense strand to SEQ ID NO: 120972
ucagucaagguaaggcucu

SEQ ID NO: 120974 - RNA, 19 nt, Artificial Sequence
  Description of Artificial Sequence: Synthetic oligonucleotide
  Sense strand starting at position 1489 of SEQ ID NO: 1541
gaguuauaacuguaugcag

SEQ ID NO: 120975 - RNA, 19 nt, Artificial Sequence
  Description of Artificial Sequence: Synthetic oligonucleotide
  Antisense strand to SEQ ID NO: 120974
cugcauacaguuauaacuc

SEQ ID NO: 120976 - RNA, 19 nt, Artificial Sequence
  Description of Artificial Sequence: Synthetic oligonucleotide
  Sense strand starting at position 1479 of SEQ ID NO: 1541
caacguuaaugaguuauaa

SEQ ID NO: 120977 - RNA, 19 nt, Artificial Sequence
  Description of Artificial Sequence: Synthetic oligonucleotide
  Antisense strand to SEQ ID NO: 120976
uuauaacucauuaacguug

SEQ ID NO: 120978 - RNA, 19 nt, Artificial Sequence
  Description of Artificial Sequence: Synthetic oligonucleotide
  Sense strand starting at position 1381 of SEQ ID NO: 1541
aacagagacucguccauga

SEQ ID NO: 120979 - RNA, 19 nt, Artificial Sequence
  Description of Artificial Sequence: Synthetic oligonucleotide
  Antisense strand to SEQ ID NO: 120978
ucauggacgagucucuguu

SEQ ID NO: 120980 - RNA, 19 nt, Artificial Sequence
  Description of Artificial Sequence: Synthetic oligonucleotide
  Sense strand starting at position 1347 of SEQ ID NO: 1541
cagaguuacagagggucau

SEQ ID NO: 120981 - RNA, 19 nt, Artificial Sequence
  Description of Artificial Sequence: Synthetic oligonucleotide
  Antisense strand to SEQ ID NO: 120980
augacccucuguaacucug

SEQ ID NO: 120982 - RNA, 19 nt, Artificial Sequence
  Description of Artificial Sequence: Synthetic oligonucleotide
  Sense strand starting at position 1234 of SEQ ID NO: 1541
ugugaaagauaguuaauca

SEQ ID NO: 120983 - RNA, 19 nt, Artificial Sequence
  Description of Artificial Sequence: Synthetic oligonucleotide
  Antisense strand to SEQ ID NO: 120982
ugauuaacuaucuuucaca

SEQ ID NO: 120984 - RNA, 19 nt, Artificial Sequence
  Description of Artificial Sequence: Synthetic oligonucleotide
  Sense strand starting at position 1229 of SEQ ID NO: 1541
cagagugugaaagauaguu

SEQ ID NO: 120985 - RNA, 19 nt, Artificial Sequence
  Description of Artificial Sequence: Synthetic oligonucleotide
  Antisense strand to SEQ ID NO: 120984
aacuaucuuucacacucug

SEQ ID NO: 120986 - RNA, 19 nt, Artificial Sequence
  Description of Artificial Sequence: Synthetic oligonucleotide
  Sense strand starting at position 683 of SEQ ID NO: 1541
aaguuauagcuagggauaa

SEQ ID NO: 120987 - RNA, 19 nt, Artificial Sequence
  Description of Artificial Sequence: Synthetic oligonucleotide
  Antisense strand to SEQ ID NO: 120986
uuaucccuagcuauaacuu

SEQ ID NO: 120988 - RNA, 19 nt, Artificial Sequence
  Description of Artificial Sequence: Synthetic oligonucleotide
  Sense strand starting at position 635 of SEQ ID NO: 1541
ggauauugcuuuccaaaga

SEQ ID NO: 120989 - RNA, 19 nt, Artificial Sequence
  Description of Artificial Sequence: Synthetic oligonucleotide
  Antisense strand to SEQ ID NO: 120988
ucuuuggaaagcaauaucc

SEQ ID NO: 120990 - RNA, 19 nt, Artificial Sequence
  Description of Artificial Sequence: Synthetic oligonucleotide
  Sense strand starting at position 632 of SEQ ID NO: 1541
uugggauauugcuuuccaa

SEQ ID NO: 120991 - RNA, 19 nt, Artificial Sequence
  Description of Artificial Sequence: Synthetic oligonucleotide
  Antisense strand to SEQ ID NO: 120990
uuggaaagcaauaucccaa

SEQ ID NO: 120992 - RNA, 19 nt, Artificial Sequence
  Description of Artificial Sequence: Synthetic oligonucleotide
  Sense strand starting at position 622 of SEQ ID NO: 1541
ugcugagaaauugggauau

SEQ ID NO: 120993 - RNA, 19 nt, Artificial Sequence
  Description of Artificial Sequence: Synthetic oligonucleotide
  Antisense strand to SEQ ID NO: 120992
auaucccaauuucucagca

SEQ ID NO: 120994 - RNA, 19 nt, Artificial Sequence
  Description of Artificial Sequence: Synthetic oligonucleotide
  Sense strand starting at position 501 of SEQ ID NO: 1541
ggauuagcauaauuaguua

SEQ ID NO: 120995 - RNA, 19 nt, Artificial Sequence
  Description of Artificial Sequence: Synthetic oligonucleotide
  Antisense strand to SEQ ID NO: 120994
uaacuaauuaugcuaaucc

SEQ ID NO: 120996 - RNA, 19 nt, Artificial Sequence
  Description of Artificial Sequence: Synthetic oligonucleotide
  Sense strand starting at position 448 of SEQ ID NO: 1541
uguuuccugggugaaacua

SEQ ID NO: 120997 - RNA, 19 nt, Artificial Sequence
  Description of Artificial Sequence: Synthetic oligonucleotide
  Antisense strand to SEQ ID NO: 120996
uaguuucacccaggaaaca

SEQ ID NO: 120998 - RNA, 19 nt, Artificial Sequence
  Description of Artificial Sequence: Synthetic oligonucleotide
  Sense strand starting at position 446 of SEQ ID NO: 1541
aauguuuccugggugaaac

SEQ ID NO: 120999 - RNA, 19 nt, Artificial Sequence
  Description of Artificial Sequence: Synthetic oligonucleotide
  Antisense strand to SEQ ID NO: 120998
guuucacccaggaaacauu

SEQ ID NO: 121000 - RNA, 19 nt, Artificial Sequence
  Description of Artificial Sequence: Synthetic oligonucleotide
  Sense strand starting at position 445 of SEQ ID NO: 1541
gaauguuuccugggugaaa

SEQ ID NO: 121001 - RNA, 19 nt, Artificial Sequence
  Description of Artificial Sequence: Synthetic oligonucleotide
  Antisense strand to SEQ ID NO: 121000
uuucacccaggaaacauuc

SEQ ID NO: 121002 - RNA, 19 nt, Artificial Sequence
  Description of Artificial Sequence: Synthetic oligonucleotide
  Sense strand starting at position 410 of SEQ ID NO: 1541
ucuuacuauuggcuaagaa

SEQ ID NO: 121003 - RNA, 19 nt, Artificial Sequence
  Description of Artificial Sequence: Synthetic oligonucleotide
  Antisense strand to SEQ ID NO: 121002
uucuuagccaauaguaaga

SEQ ID NO: 121004 - RNA, 19 nt, Artificial Sequence
  Description of Artificial Sequence: Synthetic oligonucleotide
  Sense strand starting at position 167 of SEQ ID NO: 1541
agacaacagcuguaaugua

SEQ ID NO: 121005 - RNA, 19 nt, Artificial Sequence
  Description of Artificial Sequence: Synthetic oligonucleotide
  Antisense strand to SEQ ID NO: 121004
uacauuacagcuguugucu

SEQ ID NO: 121006 - RNA, 19 nt, Artificial Sequence
  Description of Artificial Sequence: Synthetic oligonucleotide
  Sense strand starting at position 139 of SEQ ID NO: 1541
acucacgcagucuaauaaa

SEQ ID NO: 121007 - RNA, 19 nt, Artificial Sequence
  Description of Artificial Sequence: Synthetic oligonucleotide
  Antisense strand to SEQ ID NO: 121006
uuuauuagacugcgugagu

SEQ ID NO: 121008 - RNA, 19 nt, Artificial Sequence
  Description of Artificial Sequence: Synthetic oligonucleotide
  Sense strand starting at position 124 of SEQ ID NO: 1542
gugacuuaugcaggucaac

SEQ ID NO: 121009 - RNA, 19 nt, Artificial Sequence
  Description of Artificial Sequence: Synthetic oligonucleotide
  Antisense strand to SEQ ID NO: 121008
guugaccugcauaagucac

SEQ ID NO: 121010 - RNA, 19 nt, Artificial Sequence
  Description of Artificial Sequence: Synthetic oligonucleotide
  Sense strand starting at position 174 of SEQ ID NO: 1542
acuugcuuccaguaacaga

SEQ ID NO: 121011 - RNA, 19 nt, Artificial Sequence
  Description of Artificial Sequence: Synthetic oligonucleotide
  Antisense strand to SEQ ID NO: 121010
ucuguuacuggaagcaagu

SEQ ID NO: 121012 - RNA, 19 nt, Artificial Sequence
  Description of Artificial Sequence: Synthetic oligonucleotide
  Sense strand starting at position 372 of SEQ ID NO: 1542
aucagcggucccuaaagau

SEQ ID NO: 121013 - RNA, 19 nt, Artificial Sequence
  Description of Artificial Sequence: Synthetic oligonucleotide
  Antisense strand to SEQ ID NO: 121012
aucuuuagggaccgcugau

SEQ ID NO: 121014 - RNA, 19 nt, Artificial Sequence
  Description of Artificial Sequence: Synthetic oligonucleotide
  Sense strand starting at position 448 of SEQ ID NO: 1542
cccauaagcucacugaaag

SEQ ID NO: 121015 - RNA, 19 nt, Artificial Sequence
  Description of Artificial Sequence: Synthetic oligonucleotide
  Antisense strand to SEQ ID NO: 121014
cuuucagugagcuuauggg

SEQ ID NO: 121016 - RNA, 19 nt, Artificial Sequence
  Description of Artificial Sequence: Synthetic oligonucleotide
  Sense strand starting at position 538 of SEQ ID NO: 1542
cuggacaucucagagagau

SEQ ID NO: 121017 - RNA, 19 nt, Artificial Sequence
  Description of Artificial Sequence: Synthetic oligonucleotide
  Antisense strand to SEQ ID NO: 121016
aucucucugagauguccag

SEQ ID NO: 121018 - RNA, 19 nt, Artificial Sequence
  Description of Artificial Sequence: Synthetic oligonucleotide
  Sense strand starting at position 706 of SEQ ID NO: 1542
guauuuacugggcggcaaa

SEQ ID NO: 121019 - RNA, 19 nt, Artificial Sequence
  Description of Artificial Sequence: Synthetic oligonucleotide
  Antisense strand to SEQ ID NO: 121018
uuugccgcccaguaaauac

SEQ ID NO: 121020 - RNA, 19 nt, Artificial Sequence
  Description of Artificial Sequence: Synthetic oligonucleotide
  Sense strand starting at position 812 of SEQ ID NO: 1542
gaccgagaugagugcuaag

SEQ ID NO: 121021 - RNA, 19 nt, Artificial Sequence
  Description of Artificial Sequence: Synthetic oligonucleotide
  Antisense strand to SEQ ID NO: 121020
cuuagcacucaucucgguc

SEQ ID NO: 121022 - RNA, 19 nt, Artificial Sequence
  Description of Artificial Sequence: Synthetic oligonucleotide
  Sense strand starting at position 870 of SEQ ID NO: 1542
gguuucuccaggugaagcu

SEQ ID NO: 121023 - RNA, 19 nt, Artificial Sequence
  Description of Artificial Sequence: Synthetic oligonucleotide
  Antisense strand to SEQ ID NO: 121022
agcuucaccuggagaaacc

SEQ ID NO: 121024 - RNA, 19 nt, Artificial Sequence
  Description of Artificial Sequence: Synthetic oligonucleotide
  Sense strand starting at position 899 of SEQ ID NO: 1542
agcccucaugccugaaaca

SEQ ID NO: 121025 - RNA, 19 nt, Artificial Sequence
  Description of Artificial Sequence: Synthetic oligonucleotide
  Antisense strand to SEQ ID NO: 121024
uguuucaggcaugagggcu

SEQ ID NO: 121026 - RNA, 19 nt, Artificial Sequence
  Description of Artificial Sequence: Synthetic oligonucleotide
  Sense strand starting at position 900 of SEQ ID NO: 1542
gcccucaugccugaaacau

SEQ ID NO: 121027 - RNA, 19 nt, Artificial Sequence
  Description of Artificial Sequence: Synthetic oligonucleotide
  Antisense strand to SEQ ID NO: 121026
auguuucaggcaugagggc

SEQ ID NO: 121028 - RNA, 19 nt, Artificial Sequence
  Description of Artificial Sequence: Synthetic oligonucleotide
  Sense strand starting at position 937 of SEQ ID NO: 1542
gggaguggcugguucaaau

SEQ ID NO: 121029 - RNA, 19 nt, Artificial Sequence
  Description of Artificial Sequence: Synthetic oligonucleotide
  Antisense strand to SEQ ID NO: 121028
auuugaaccagccacuccc

SEQ ID NO: 121030 - RNA, 19 nt, Artificial Sequence
  Description of Artificial Sequence: Synthetic oligonucleotide
  Sense strand starting at position 979 of SEQ ID NO: 1542
cgaugacccugggcaaauu

SEQ ID NO: 121031 - RNA, 19 nt, Artificial Sequence
  Description of Artificial Sequence: Synthetic oligonucleotide
  Antisense strand to SEQ ID NO: 121030
aauuugcccagggucaucg

SEQ ID NO: 121032 - RNA, 19 nt, Artificial Sequence
  Description of Artificial Sequence: Synthetic oligonucleotide
  Sense strand starting at position 1016 of SEQ ID NO: 1542
uugguauccucaucugcga

SEQ ID NO: 121033 - RNA, 19 nt, Artificial Sequence
  Description of Artificial Sequence: Synthetic oligonucleotide
  Antisense strand to SEQ ID NO: 121032
ucgcagaugaggauaccaa

SEQ ID NO: 121034 - RNA, 19 nt, Artificial Sequence
  Description of Artificial Sequence: Synthetic oligonucleotide
  Sense strand starting at position 1018 of SEQ ID NO: 1542
gguauccucaucugcgaaa

SEQ ID NO: 121035 - RNA, 19 nt, Artificial Sequence
  Description of Artificial Sequence: Synthetic oligonucleotide
  Antisense strand to SEQ ID NO: 121034
uuucgcagaugaggauacc

SEQ ID NO: 121036 - RNA, 19 nt, Artificial Sequence
  Description of Artificial Sequence: Synthetic oligonucleotide
  Sense strand starting at position 1039 of SEQ ID NO: 1542
ggaguaauucgcguuccuc

SEQ ID NO: 121037 - RNA, 19 nt, Artificial Sequence
  Description of Artificial Sequence: Synthetic oligonucleotide
  Antisense strand to SEQ ID NO: 121036
gaggaacgcgaauuacucc

SEQ ID NO: 121038 - RNA, 19 nt, Artificial Sequence
  Description of Artificial Sequence: Synthetic oligonucleotide
  Sense strand starting at position 1072 of SEQ ID NO: 1542
gggagguguccgggaguca

SEQ ID NO: 121039 - RNA, 19 nt, Artificial Sequence
  Description of Artificial Sequence: Synthetic oligonucleotide
  Antisense strand to SEQ ID NO: 121038
ugacucccggacaccuccc

SEQ ID NO: 121040 - RNA, 19 nt, Artificial Sequence
  Description of Artificial Sequence: Synthetic oligonucleotide
  Sense strand starting at position 1128 of SEQ ID NO: 1542
gccgucauuacugagagca

SEQ ID NO: 121041 - RNA, 19 nt, Artificial Sequence
  Description of Artificial Sequence: Synthetic oligonucleotide
  Antisense strand to SEQ ID NO: 121040
ugcucucaguaaugacggc

SEQ ID NO: 121042 - RNA, 19 nt, Artificial Sequence
  Description of Artificial Sequence: Synthetic oligonucleotide
  Sense strand starting at position 1427 of SEQ ID NO: 1542
ucgucucgaccagaacuaa

SEQ ID NO: 121043 - RNA, 19 nt, Artificial Sequence
  Description of Artificial Sequence: Synthetic oligonucleotide
  Antisense strand to SEQ ID NO: 121042
uuaguucuggucgagacga

SEQ ID NO: 121044 - RNA, 19 nt, Artificial Sequence
  Description of Artificial Sequence: Synthetic oligonucleotide
  Sense strand starting at position 1865 of SEQ ID NO: 1542
uaccuaugucgauggcgaa

SEQ ID NO: 121045 - RNA, 19 nt, Artificial Sequence
  Description of Artificial Sequence: Synthetic oligonucleotide
  Antisense strand to SEQ ID NO: 121044
uucgccaucgacauaggua

SEQ ID NO: 121046 - RNA, 19 nt, Artificial Sequence
  Description of Artificial Sequence: Synthetic oligonucleotide
  Sense strand starting at position 2010 of SEQ ID NO: 1542
gcucaucagccauggagau

SEQ ID NO: 121047 - RNA, 19 nt, Artificial Sequence
  Description of Artificial Sequence: Synthetic oligonucleotide
  Antisense strand to SEQ ID NO: 121046
aucuccauggcugaugagc

SEQ ID NO: 121048 - RNA, 19 nt, Artificial Sequence
  Description of Artificial Sequence: Synthetic oligonucleotide
  Sense strand starting at position 2011 of SEQ ID NO: 1542
cucaucagccauggagaua

SEQ ID NO: 121049 - RNA, 19 nt, Artificial Sequence
  Description of Artificial Sequence: Synthetic oligonucleotide
  Antisense strand to SEQ ID NO: 121048
uaucuccauggcugaugag

SEQ ID NO: 121050 - RNA, 19 nt, Artificial Sequence
  Description of Artificial Sequence: Synthetic oligonucleotide
  Sense strand starting at position 2022 of SEQ ID NO: 1542
uggagauauaugcgcauau

SEQ ID NO: 121051 - RNA, 19 nt, Artificial Sequence
  Description of Artificial Sequence: Synthetic oligonucleotide
  Antisense strand to SEQ ID NO: 121050
auaugcgcauauaucucca

SEQ ID NO: 121052 - RNA, 19 nt, Artificial Sequence
  Description of Artificial Sequence: Synthetic oligonucleotide
  Sense strand starting at position 2023 of SEQ ID NO: 1542
ggagauauaugcgcauaua

SEQ ID NO: 121053 - RNA, 19 nt, Artificial Sequence
  Description of Artificial Sequence: Synthetic oligonucleotide
  Antisense strand to SEQ ID NO: 121052
uauaugcgcauauaucucc

SEQ ID NO: 121054 - RNA, 19 nt, Artificial Sequence
  Description of Artificial Sequence: Synthetic oligonucleotide
  Sense strand starting at position 2024 of SEQ ID NO: 1542
gagauauaugcgcauauau

SEQ ID NO: 121055 - RNA, 19 nt, Artificial Sequence
  Description of Artificial Sequence: Synthetic oligonucleotide
  Antisense strand to SEQ ID NO: 121054
auauaugcgcauauaucuc

SEQ ID NO: 121056 - RNA, 19 nt, Artificial Sequence
  Description of Artificial Sequence: Synthetic oligonucleotide
  Sense strand starting at position 2060 of SEQ ID NO: 1542
ccucgcauagauuauguua

SEQ ID NO: 121057 - RNA, 19 nt, Artificial Sequence
  Description of Artificial Sequence: Synthetic oligonucleotide
  Antisense strand to SEQ ID NO: 121056
uaacauaaucuaugcgagg

SEQ ID NO: 121058 - RNA, 19 nt, Artificial Sequence
  Description of Artificial Sequence: Synthetic oligonucleotide
  Sense strand starting at position 2063 of SEQ ID NO: 1542
cgcauagauuauguuaaug

SEQ ID NO: 121059 - RNA, 19 nt, Artificial Sequence
  Description of Artificial Sequence: Synthetic oligonucleotide
  Antisense strand to SEQ ID NO: 121058
cauuaacauaaucuaugcg

SEQ ID NO: 121060 - RNA, 19 nt, Artificial Sequence
  Description of Artificial Sequence: Synthetic oligonucleotide
  Sense strand starting at position 2202 of SEQ ID NO: 1542
gcgguuauccuccagagau

SEQ ID NO: 121061 - RNA, 19 nt, Artificial Sequence
  Description of Artificial Sequence: Synthetic oligonucleotide
  Antisense strand to SEQ ID NO: 121060
aucucuggaggauaaccgc

SEQ ID NO: 121062 - RNA, 19 nt, Artificial Sequence
  Description of Artificial Sequence: Synthetic oligonucleotide
  Sense strand starting at position 2235 of SEQ ID NO: 1542
gaacaucuggacugauguu

SEQ ID NO: 121063 - RNA, 19 nt, Artificial Sequence
  Description of Artificial Sequence: Synthetic oligonucleotide
  Antisense strand to SEQ ID NO: 121062
aacaucaguccagauguuc

SEQ ID NO: 121064 - RNA, 19 nt, Artificial Sequence
  Description of Artificial Sequence: Synthetic oligonucleotide
  Sense strand starting at position 2380 of SEQ ID NO: 1542
cagcgagugccugcuguaa

SEQ ID NO: 121065 - RNA, 19 nt, Artificial Sequence
  Description of Artificial Sequence: Synthetic oligonucleotide
  Antisense strand to SEQ ID NO: 121064
uuacagcaggcacucgcug

SEQ ID NO: 121066 - RNA, 19 nt, Artificial Sequence
  Description of Artificial Sequence: Synthetic oligonucleotide
  Sense strand starting at position 2424 of SEQ ID NO: 1542
ugugaugcgcucuuugcua

SEQ ID NO: 121067 - RNA, 19 nt, Artificial Sequence
  Description of Artificial Sequence: Synthetic oligonucleotide
  Antisense strand to SEQ ID NO: 121066
uagcaaagagcgcaucaca

SEQ ID NO: 121068 - RNA, 19 nt, Artificial Sequence
  Description of Artificial Sequence: Synthetic oligonucleotide
  Sense strand starting at position 2430 of SEQ ID NO: 1542
gcgcucuuugcuaggguga

SEQ ID NO: 121069 - RNA, 19 nt, Artificial Sequence
  Description of Artificial Sequence: Synthetic oligonucleotide
  Antisense strand to SEQ ID NO: 121068
ucacccuagcaaagagcgc

SEQ ID NO: 121070 - RNA, 19 nt, Artificial Sequence
  Description of Artificial Sequence: Synthetic oligonucleotide
  Sense strand starting at position 2568 of SEQ ID NO: 1542
agggaagaugugugcugua

SEQ ID NO: 121071 - RNA, 19 nt, Artificial Sequence
  Description of Artificial Sequence: Synthetic oligonucleotide
  Antisense strand to SEQ ID NO: 121070
uacagcacacaucuucccu

SEQ ID NO: 121072 - RNA, 19 nt, Artificial Sequence
  Description of Artificial Sequence: Synthetic oligonucleotide
  Sense strand starting at position 2852 of SEQ ID NO: 1542
gggucauuacugcaugucu

SEQ ID NO: 121073 - RNA, 19 nt, Artificial Sequence
  Description of Artificial Sequence: Synthetic oligonucleotide
  Antisense strand to SEQ ID NO: 121072
agacaugcaguaaugaccc

SEQ ID NO: 121074 - RNA, 19 nt, Artificial Sequence
  Description of Artificial Sequence: Synthetic oligonucleotide
  Sense strand starting at position 2884 of SEQ ID NO: 1542
ucugucugcacguggagaa

SEQ ID NO: 121075 - RNA, 19 nt, Artificial Sequence
  Description of Artificial Sequence: Synthetic oligonucleotide
  Antisense strand to SEQ ID NO: 121074
uucuccacgugcagacaga

SEQ ID NO: 121076 - RNA, 19 nt, Artificial Sequence
  Description of Artificial Sequence: Synthetic oligonucleotide
  Sense strand starting at position 2885 of SEQ ID NO: 1542
cugucugcacguggagaau

SEQ ID NO: 121077 - RNA, 19 nt, Artificial Sequence
  Description of Artificial Sequence: Synthetic oligonucleotide
  Antisense strand to SEQ ID NO: 121076
auucuccacgugcagacag

SEQ ID NO: 121078 - RNA, 19 nt, Artificial Sequence
  Description of Artificial Sequence: Synthetic oligonucleotide
  Sense strand starting at position 2952 of SEQ ID NO: 1542
gcacaaacuccagggauaa

SEQ ID NO: 121079 - RNA, 19 nt, Artificial Sequence
  Description of Artificial Sequence: Synthetic oligonucleotide
  Antisense strand to SEQ ID NO: 121078
uuaucccuggaguuugugc

SEQ ID NO: 121080 - RNA, 19 nt, Artificial Sequence
  Description of Artificial Sequence: Synthetic oligonucleotide
  Sense strand starting at position 3196 of SEQ ID NO: 1542
cugugugcccacugaacau

SEQ ID NO: 121081 - RNA, 19 nt, Artificial Sequence
  Description of Artificial Sequence: Synthetic oligonucleotide
  Antisense strand to SEQ ID NO: 121080
auguucagugggcacacag

SEQ ID NO: 121082 - RNA, 19 nt, Artificial Sequence
  Description of Artificial Sequence: Synthetic oligonucleotide
  Sense strand starting at position 3217 of SEQ ID NO: 1542
gggaaacaugcaggugaau

SEQ ID NO: 121083 - RNA, 19 nt, Artificial Sequence
  Description of Artificial Sequence: Synthetic oligonucleotide
  Antisense strand to SEQ ID NO: 121082
auucaccugcauguuuccc

SEQ ID NO: 121084 - RNA, 19 nt, Artificial Sequence
  Description of Artificial Sequence: Synthetic oligonucleotide
  Sense strand starting at position 3326 of SEQ ID NO: 1542
cuagacugccuguggagua

SEQ ID NO: 121085 - RNA, 19 nt, Artificial Sequence
  Description of Artificial Sequence: Synthetic oligonucleotide
  Antisense strand to SEQ ID NO: 121084
uacuccacaggcagucuag

SEQ ID NO: 121086 - RNA, 19 nt, Artificial Sequence
  Description of Artificial Sequence: Synthetic oligonucleotide
  Sense strand starting at position 3516 of SEQ ID NO: 1542
aggccucaguucuugcaga

SEQ ID NO: 121087 - RNA, 19 nt, Artificial Sequence
  Description of Artificial Sequence: Synthetic oligonucleotide
  Antisense strand to SEQ ID NO: 121086
ucugcaagaacugaggccu

SEQ ID NO: 121088 - RNA, 19 nt, Artificial Sequence
  Description of Artificial Sequence: Synthetic oligonucleotide
  Sense strand starting at position 3808 of SEQ ID NO: 1543
uuguguccucaauaucuau

SEQ ID NO: 121089 - RNA, 19 nt, Artificial Sequence
  Description of Artificial Sequence: Synthetic oligonucleotide
  Antisense strand to SEQ ID NO: 121088
auagauauugaggacacaa

SEQ ID NO: 121090 - RNA, 19 nt, Artificial Sequence
  Description of Artificial Sequence: Synthetic oligonucleotide
  Sense strand starting at position 3558 of SEQ ID NO: 1543
gguaaaucugucugauaga

SEQ ID NO: 121091 - RNA, 19 nt, Artificial Sequence
  Description of Artificial Sequence: Synthetic oligonucleotide
  Antisense strand to SEQ ID NO: 121090
ucuaucagacagauuuacc

SEQ ID NO: 121092 - RNA, 19 nt, Artificial Sequence
  Description of Artificial Sequence: Synthetic oligonucleotide
  Sense strand starting at position 3557 of SEQ ID NO: 1543
ugguaaaucugucugauag

SEQ ID NO: 121093 - RNA, 19 nt, Artificial Sequence
  Description of Artificial Sequence: Synthetic oligonucleotide
  Antisense strand to SEQ ID NO: 121092
cuaucagacagauuuacca

SEQ ID NO: 121094 - RNA, 19 nt, Artificial Sequence
  Description of Artificial Sequence: Synthetic oligonucleotide
  Sense strand starting at position 3546 of SEQ ID NO: 1543
augacugguguugguaaau

SEQ ID NO: 121095 - RNA, 19 nt, Artificial Sequence
  Description of Artificial Sequence: Synthetic oligonucleotide
  Antisense strand to SEQ ID NO: 121094
auuuaccaacaccagucau

SEQ ID NO: 121096 - RNA, 19 nt, Artificial Sequence
  Description of Artificial Sequence: Synthetic oligonucleotide
  Sense strand starting at position 3539 of SEQ ID NO: 1543
cugagagaugacugguguu

SEQ ID NO: 121097 - RNA, 19 nt, Artificial Sequence
  Description of Artificial Sequence: Synthetic oligonucleotide
  Antisense strand to SEQ ID NO: 121096
aacaccagucaucucucag

SEQ ID NO: 121098 - RNA, 19 nt, Artificial Sequence
  Description of Artificial Sequence: Synthetic oligonucleotide
  Sense strand starting at position 3491 of SEQ ID NO: 1543
ggacccauacccuagucau

SEQ ID NO: 121099 - RNA, 19 nt, Artificial Sequence
  Description of Artificial Sequence: Synthetic oligonucleotide
  Antisense strand to SEQ ID NO: 121098
augacuaggguaugggucc

SEQ ID NO: 121100 - RNA, 19 nt, Artificial Sequence
  Description of Artificial Sequence: Synthetic oligonucleotide
  Sense strand starting at position 3305 of SEQ ID NO: 1543
caacaaguguuauugagca

SEQ ID NO: 121101 - RNA, 19 nt, Artificial Sequence
  Description of Artificial Sequence: Synthetic oligonucleotide
  Antisense strand to SEQ ID NO: 121100
ugcucaauaacacuuguug

SEQ ID NO: 121102 - RNA, 19 nt, Artificial Sequence
  Description of Artificial Sequence: Synthetic oligonucleotide
  Sense strand starting at position 3281 of SEQ ID NO: 1543
uugaauagcugacucaauu

SEQ ID NO: 121103 - RNA, 19 nt, Artificial Sequence
  Description of Artificial Sequence: Synthetic oligonucleotide
  Antisense strand to SEQ ID NO: 121102
aauugagucagcuauucaa

SEQ ID NO: 121104 - RNA, 19 nt, Artificial Sequence
  Description of Artificial Sequence: Synthetic oligonucleotide
  Sense strand starting at position 3279 of SEQ ID NO: 1543
ccuugaauagcugacucaa

SEQ ID NO: 121105 - RNA, 19 nt, Artificial Sequence
  Description of Artificial Sequence: Synthetic oligonucleotide
  Antisense strand to SEQ ID NO: 121104
uugagucagcuauucaagg

SEQ ID NO: 121106 - RNA, 19 nt, Artificial Sequence
  Description of Artificial Sequence: Synthetic oligonucleotide
  Sense strand starting at position 3190 of SEQ ID NO: 1543
uuugguuuggaaugagauu

SEQ ID NO: 121107 - RNA, 19 nt, Artificial Sequence
  Description of Artificial Sequence: Synthetic oligonucleotide
  Antisense strand to SEQ ID NO: 121106
aaucucauuccaaaccaaa

SEQ ID NO: 121108 - RNA, 19 nt, Artificial Sequence
  Description of Artificial Sequence: Synthetic oligonucleotide
  Sense strand starting at position 2965 of SEQ ID NO: 1543
guguaaguauuucucaauu

SEQ ID NO: 121109 - RNA, 19 nt, Artificial Sequence
  Description of Artificial Sequence: Synthetic oligonucleotide
  Antisense strand to SEQ ID NO: 121108
aauugagaaauacuuacac

SEQ ID NO: 121110 - RNA, 19 nt, Artificial Sequence
  Description of Artificial Sequence: Synthetic oligonucleotide
  Sense strand starting at position 2956 of SEQ ID NO: 1543
ugaggcuagguguaaguau

SEQ ID NO: 121111 - RNA, 19 nt, Artificial Sequence
  Description of Artificial Sequence: Synthetic oligonucleotide
  Antisense strand to SEQ ID NO: 121110
auacuuacaccuagccuca

SEQ ID NO: 121112 - RNA, 19 nt, Artificial Sequence
  Description of Artificial Sequence: Synthetic oligonucleotide
  Sense strand starting at position 2860 of SEQ ID NO: 1543
cuuacccauggucagaauu

SEQ ID NO: 121113 - RNA, 19 nt, Artificial Sequence
  Description of Artificial Sequence: Synthetic oligonucleotide
  Antisense strand to SEQ ID NO: 121112
aauucugaccauggguaag

SEQ ID NO: 121114 - RNA, 19 nt, Artificial Sequence
  Description of Artificial Sequence: Synthetic oligonucleotide
  Sense strand starting at position 2859 of SEQ ID NO: 1543
acuuacccauggucagaau

SEQ ID NO: 121115 - RNA, 19 nt, Artificial Sequence
  Description of Artificial Sequence: Synthetic oligonucleotide
  Antisense strand to SEQ ID NO: 121114
auucugaccauggguaagu

SEQ ID NO: 121116 - RNA, 19 nt, Artificial Sequence
  Description of Artificial Sequence: Synthetic oligonucleotide
  Sense strand starting at position 2857 of SEQ ID NO: 1543
uuacuuacccauggucaga

SEQ ID NO: 121117 - RNA, 19 nt, Artificial Sequence
  Description of Artificial Sequence: Synthetic oligonucleotide
  Antisense strand to SEQ ID NO: 121116
ucugaccauggguaaguaa

SEQ ID NO: 121118 - RNA, 19 nt, Artificial Sequence
  Description of Artificial Sequence: Synthetic oligonucleotide
  Sense strand starting at position 2677 of SEQ ID NO: 1543
agaucaagccugcagagau

SEQ ID NO: 121119 - RNA, 19 nt, Artificial Sequence
  Description of Artificial Sequence: Synthetic oligonucleotide
  Antisense strand to SEQ ID NO: 121118
aucucugcaggcuugaucu

SEQ ID NO: 121120 - RNA, 19 nt, Artificial Sequence
  Description of Artificial Sequence: Synthetic oligonucleotide
  Sense strand starting at position 2378 of SEQ ID NO: 1543
ccacuugguccuuacaaga

SEQ ID NO: 121121 - RNA, 19 nt, Artificial Sequence
  Description of Artificial Sequence: Synthetic oligonucleotide
  Antisense strand to SEQ ID NO: 121120
ucuuguaaggaccaagugg

SEQ ID NO: 121122 - RNA, 19 nt, Artificial Sequence
  Description of Artificial Sequence: Synthetic oligonucleotide
  Sense strand starting at position 2198 of SEQ ID NO: 1543
aggugaaacccaugucaaa

SEQ ID NO: 121123 - RNA, 19 nt, Artificial Sequence
  Description of Artificial Sequence: Synthetic oligonucleotide
  Antisense strand to SEQ ID NO: 121122
uuugacauggguuucaccu

SEQ ID NO: 121124 - RNA, 19 nt, Artificial Sequence
  Description of Artificial Sequence: Synthetic oligonucleotide
  Sense strand starting at position 2157 of SEQ ID NO: 1543
gugugugauuuaguaaguu

SEQ ID NO: 121125 - RNA, 19 nt, Artificial Sequence
  Description of Artificial Sequence: Synthetic oligonucleotide
  Antisense strand to SEQ ID NO: 121124
aacuuacuaaaucacacac

SEQ ID NO: 121126 - RNA, 19 nt, Artificial Sequence
  Description of Artificial Sequence: Synthetic oligonucleotide
  Sense strand starting at position 2029 of SEQ ID NO: 1543
gaguuucuuuaacuaagag

SEQ ID NO: 121127 - RNA, 19 nt, Artificial Sequence
  Description of Artificial Sequence: Synthetic oligonucleotide
  Antisense strand to SEQ ID NO: 121126
cucuuaguuaaagaaacuc

SEQ ID NO: 121128 - RNA, 19 nt, Artificial Sequence
  Description of Artificial Sequence: Synthetic oligonucleotide
  Sense strand starting at position 2014 of SEQ ID NO: 1543
gguuuccaucuuuaugagu

SEQ ID NO: 121129 - RNA, 19 nt, Artificial Sequence
  Description of Artificial Sequence: Synthetic oligonucleotide
  Antisense strand to SEQ ID NO: 121128
acucauaaagauggaaacc

SEQ ID NO: 121130 - RNA, 19 nt, Artificial Sequence
  Description of Artificial Sequence: Synthetic oligonucleotide
  Sense strand starting at position 2013 of SEQ ID NO: 1543
ggguuuccaucuuuaugag

SEQ ID NO: 121131 - RNA, 19 nt, Artificial Sequence
  Description of Artificial Sequence: Synthetic oligonucleotide
  Antisense strand to SEQ ID NO: 121130
cucauaaagauggaaaccc

SEQ ID NO: 121132 - RNA, 19 nt, Artificial Sequence
  Description of Artificial Sequence: Synthetic oligonucleotide
  Sense strand starting at position 1530 of SEQ ID NO: 1543
uggagaaacugagccauua

SEQ ID NO: 121133 - RNA, 19 nt, Artificial Sequence
  Description of Artificial Sequence: Synthetic oligonucleotide
  Antisense strand to SEQ ID NO: 121132
uaauggcucaguuucucca

SEQ ID NO: 121134 - RNA, 19 nt, Artificial Sequence
  Description of Artificial Sequence: Synthetic oligonucleotide
  Sense strand starting at position 1512 of SEQ ID NO: 1543
uguuacaaguuauuagacu

SEQ ID NO: 121135 - RNA, 19 nt, Artificial Sequence
  Description of Artificial Sequence: Synthetic oligonucleotide
  Antisense strand to SEQ ID NO: 121134
agucuaauaacuuguaaca

SEQ ID NO: 121136 - RNA, 19 nt, Artificial Sequence
  Description of Artificial Sequence: Synthetic oligonucleotide
  Sense strand starting at position 1503 of SEQ ID NO: 1543
gagacaauuuguuacaagu

SEQ ID NO: 121137 - RNA, 19 nt, Artificial Sequence
  Description of Artificial Sequence: Synthetic oligonucleotide
  Antisense strand to SEQ ID NO: 121136
acuuguaacaaauugucuc

SEQ ID NO: 121138 - RNA, 19 nt, Artificial Sequence
  Description of Artificial Sequence: Synthetic oligonucleotide
  Sense strand starting at position 1479 of SEQ ID NO: 1543
gguugucacuuaucaaaga

SEQ ID NO: 121139 - RNA, 19 nt, Artificial Sequence
  Description of Artificial Sequence: Synthetic oligonucleotide
  Antisense strand to SEQ ID NO: 121138
ucuuugauaagugacaacc

SEQ ID NO: 121140 - RNA, 19 nt, Artificial Sequence
  Description of Artificial Sequence: Synthetic oligonucleotide
  Sense strand starting at position 1351 of SEQ ID NO: 1543
ggaugugaauaacccucau

SEQ ID NO: 121141 - RNA, 19 nt, Artificial Sequence
  Description of Artificial Sequence: Synthetic oligonucleotide
  Antisense strand to SEQ ID NO: 121140
augaggguuauucacaucc

SEQ ID NO: 121142 - RNA, 19 nt, Artificial Sequence
  Description of Artificial Sequence: Synthetic oligonucleotide
  Sense strand starting at position 1332 of SEQ ID NO: 1543
augagaaggugucugcaga

SEQ ID NO: 121143 - RNA, 19 nt, Artificial Sequence
  Description of Artificial Sequence: Synthetic oligonucleotide
  Antisense strand to SEQ ID NO: 121142
ucugcagacaccuucucau

SEQ ID NO: 121144 - RNA, 19 nt, Artificial Sequence
  Description of Artificial Sequence: Synthetic oligonucleotide
  Sense strand starting at position 1099 of SEQ ID NO: 1543
acaugaucagugcaucuau

SEQ ID NO: 121145 - RNA, 19 nt, Artificial Sequence
  Description of Artificial Sequence: Synthetic oligonucleotide
  Antisense strand to SEQ ID NO: 121144
auagaugcacugaucaugu

SEQ ID NO: 121146 - RNA, 19 nt, Artificial Sequence
  Description of Artificial Sequence: Synthetic oligonucleotide
  Sense strand starting at position 910 of SEQ ID NO: 1543
ucuguacuccuagagguua

SEQ ID NO: 121147 - RNA, 19 nt, Artificial Sequence
  Description of Artificial Sequence: Synthetic oligonucleotide
  Antisense strand to SEQ ID NO: 121146
uaaccucuaggaguacaga

SEQ ID NO: 121148 - RNA, 19 nt, Artificial Sequence
  Description of Artificial Sequence: Synthetic oligonucleotide
  Sense strand starting at position 891 of SEQ ID NO: 1543
uuugaaauuaugggagugu

SEQ ID NO: 121149 - RNA, 19 nt, Artificial Sequence
  Description of Artificial Sequence: Synthetic oligonucleotide
  Antisense strand to SEQ ID NO: 121148
acacucccauaauuucaaa

SEQ ID NO: 121150 - RNA, 19 nt, Artificial Sequence
  Description of Artificial Sequence: Synthetic oligonucleotide
  Sense strand starting at position 882 of SEQ ID NO: 1543
ucagcaagauuugaaauua

SEQ ID NO: 121151 - RNA, 19 nt, Artificial Sequence
  Description of Artificial Sequence: Synthetic oligonucleotide
  Antisense strand to SEQ ID NO: 121150
uaauuucaaaucuugcuga

SEQ ID NO: 121152 - RNA, 19 nt, Artificial Sequence
  Description of Artificial Sequence: Synthetic oligonucleotide
  Sense strand starting at position 763 of SEQ ID NO: 1543
caugaagugggccauacau

SEQ ID NO: 121153 - RNA, 19 nt, Artificial Sequence
  Description of Artificial Sequence: Synthetic oligonucleotide
  Antisense strand to SEQ ID NO: 121152
auguauggcccacuucaug

SEQ ID NO: 121154 - RNA, 19 nt, Artificial Sequence
  Description of Artificial Sequence: Synthetic oligonucleotide
  Sense strand starting at position 687 of SEQ ID NO: 1543
auguuaacagugcauugaa

SEQ ID NO: 121155 - RNA, 19 nt, Artificial Sequence
  Description of Artificial Sequence: Synthetic oligonucleotide
  Antisense strand to SEQ ID NO: 121154
uucaaugcacuguuaacau

SEQ ID NO: 121156 - RNA, 19 nt, Artificial Sequence
  Description of Artificial Sequence: Synthetic oligonucleotide
  Sense strand starting at position 652 of SEQ ID NO: 1543
gaacuucuuguuugagaaa

SEQ ID NO: 121157 - RNA, 19 nt, Artificial Sequence
  Description of Artificial Sequence: Synthetic oligonucleotide
  Antisense strand to SEQ ID NO: 121156
uuucucaaacaagaaguuc

SEQ ID NO: 121158 - RNA, 19 nt, Artificial Sequence
  Description of Artificial Sequence: Synthetic oligonucleotide
  Sense strand starting at position 651 of SEQ ID NO: 1543
agaacuucuuguuugagaa

SEQ ID NO: 121159 - RNA, 19 nt, Artificial Sequence
  Description of Artificial Sequence: Synthetic oligonucleotide
  Antisense strand to SEQ ID NO: 121158
uucucaaacaagaaguucu

SEQ ID NO: 121160 - RNA, 19 nt, Artificial Sequence
  Description of Artificial Sequence: Synthetic oligonucleotide
  Sense strand starting at position 650 of SEQ ID NO: 1543
cagaacuucuuguuugaga

SEQ ID NO: 121161 - RNA, 19 nt, Artificial Sequence
  Description of Artificial Sequence: Synthetic oligonucleotide
  Antisense strand to SEQ ID NO: 121160
ucucaaacaagaaguucug

SEQ ID NO: 121162 - RNA, 19 nt, Artificial Sequence
  Description of Artificial Sequence: Synthetic oligonucleotide
  Sense strand starting at position 467 of SEQ ID NO: 1543
gcagauaacuaugcggaga

SEQ ID NO: 121163 - RNA, 19 nt, Artificial Sequence
  Description of Artificial Sequence: Synthetic oligonucleotide
  Antisense strand to SEQ ID NO: 121162
ucuccgcauaguuaucugc

SEQ ID NO: 121164 - RNA, 19 nt, Artificial Sequence
  Description of Artificial Sequence: Synthetic oligonucleotide
  Sense strand starting at position 458 of SEQ ID NO: 1543
caguguuuagcagauaacu

SEQ ID NO: 121165 - RNA, 19 nt, Artificial Sequence
  Description of Artificial Sequence: Synthetic oligonucleotide
  Antisense strand to SEQ ID NO: 121164
aguuaucugcuaaacacug

SEQ ID NO: 121166 - RNA, 19 nt, Artificial Sequence
  Description of Artificial Sequence: Synthetic oligonucleotide
  Sense strand starting at position 265 of SEQ ID NO: 1543
ggugauaaccacugcauau

SEQ ID NO: 121167 - RNA, 19 nt, Artificial Sequence
  Description of Artificial Sequence: Synthetic oligonucleotide
  Antisense strand to SEQ ID NO: 121166
auaugcagugguuaucacc

SEQ ID NO: 121168 - RNA, 19 nt, Artificial Sequence
  Description of Artificial Sequence: Synthetic oligonucleotide
  Sense strand starting at position 40 of SEQ ID NO: 1544
ucucguuggucaucuggaa

SEQ ID NO: 121169 - RNA, 19 nt, Artificial Sequence
  Description of Artificial Sequence: Synthetic oligonucleotide
  Antisense strand to SEQ ID NO: 121168
uuccagaugaccaacgaga

SEQ ID NO: 121170 - RNA, 19 nt, Artificial Sequence
  Description of Artificial Sequence: Synthetic oligonucleotide
  Sense strand starting at position 98 of SEQ ID NO: 1544
gcgguagccagacaugaug

SEQ ID NO: 121171 - RNA, 19 nt, Artificial Sequence
  Description of Artificial Sequence: Synthetic oligonucleotide
  Antisense strand to SEQ ID NO: 121170
caucaugucuggcuaccgc

SEQ ID NO: 121172 - RNA, 19 nt, Artificial Sequence
  Description of Artificial Sequence: Synthetic oligonucleotide
  Sense strand starting at position 399 of SEQ ID NO: 1544
caagcuuguuccucagaga

SEQ ID NO: 121173 - RNA, 19 nt, Artificial Sequence
  Description of Artificial Sequence: Synthetic oligonucleotide
  Antisense strand to SEQ ID NO: 121172
ucucugaggaacaagcuug

SEQ ID NO: 121174 - RNA, 19 nt, Artificial Sequence
  Description of Artificial Sequence: Synthetic oligonucleotide
  Sense strand starting at position 400 of SEQ ID NO: 1544
aagcuuguuccucagagaa

SEQ ID NO: 121175 - RNA, 19 nt, Artificial Sequence
  Description of Artificial Sequence: Synthetic oligonucleotide
  Antisense strand to SEQ ID NO: 121174
uucucugaggaacaagcuu

SEQ ID NO: 121176 - RNA, 19 nt, Artificial Sequence
  Description of Artificial Sequence: Synthetic oligonucleotide
  Sense strand starting at position 402 of SEQ ID NO: 1544
gcuuguuccucagagaaca

SEQ ID NO: 121177 - RNA, 19 nt, Artificial Sequence
  Description of Artificial Sequence: Synthetic oligonucleotide
  Antisense strand to SEQ ID NO: 121176
uguucucugaggaacaagc

SEQ ID NO: 121178 - RNA, 19 nt, Artificial Sequence
  Description of Artificial Sequence: Synthetic oligonucleotide
  Sense strand starting at position 423 of SEQ ID NO: 1544
ggaagagucucacacugga

SEQ ID NO: 121179 - RNA, 19 nt, Artificial Sequence
  Description of Artificial Sequence: Synthetic oligonucleotide
  Antisense strand to SEQ ID NO: 121178
uccagugugagacucuucc

SEQ ID NO: 121180 - RNA, 19 nt, Artificial Sequence
  Description of Artificial Sequence: Synthetic oligonucleotide
  Sense strand starting at position 448 of SEQ ID NO: 1544
ggguaagaguucgccugca

SEQ ID NO: 121181 - RNA, 19 nt, Artificial Sequence
  Description of Artificial Sequence: Synthetic oligonucleotide
  Antisense strand to SEQ ID NO: 121180
ugcaggcgaacucuuaccc

SEQ ID NO: 121182 - RNA, 19 nt, Artificial Sequence
  Description of Artificial Sequence: Synthetic oligonucleotide
  Sense strand starting at position 510 of SEQ ID NO: 1544
uagucaguccucuagggaa

SEQ ID NO: 121183 - RNA, 19 nt, Artificial Sequence
  Description of Artificial Sequence: Synthetic oligonucleotide
  Antisense strand to SEQ ID NO: 121182
uucccuagaggacugacua

SEQ ID NO: 121184 - RNA, 19 nt, Artificial Sequence
  Description of Artificial Sequence: Synthetic oligonucleotide
  Sense strand starting at position 512 of SEQ ID NO: 1544
gucaguccucuagggaaug

SEQ ID NO: 121185 - RNA, 19 nt, Artificial Sequence
  Description of Artificial Sequence: Synthetic oligonucleotide
  Antisense strand to SEQ ID NO: 121184
cauucccuagaggacugac

SEQ ID NO: 121186 - RNA, 19 nt, Artificial Sequence
  Description of Artificial Sequence: Synthetic oligonucleotide
  Sense strand starting at position 911 of SEQ ID NO: 1544
ccgggaggcugccucaaau

SEQ ID NO: 121187 - RNA, 19 nt, Artificial Sequence
  Description of Artificial Sequence: Synthetic oligonucleotide
  Antisense strand to SEQ ID NO: 121186
auuugaggcagccucccgg

SEQ ID NO: 121188 - RNA, 19 nt, Artificial Sequence
  Description of Artificial Sequence: Synthetic oligonucleotide
  Sense strand starting at position 917 of SEQ ID NO: 1544
ggcugccucaaauagugau

SEQ ID NO: 121189 - RNA, 19 nt, Artificial Sequence
  Description of Artificial Sequence: Synthetic oligonucleotide
  Antisense strand to SEQ ID NO: 121188
aucacuauuugaggcagcc

SEQ ID NO: 121190 - RNA, 19 nt, Artificial Sequence
  Description of Artificial Sequence: Synthetic oligonucleotide
  Sense strand starting at position 1080 of SEQ ID NO: 1544
cuccgaaucucuggagaag

SEQ ID NO: 121191 - RNA, 19 nt, Artificial Sequence
  Description of Artificial Sequence: Synthetic oligonucleotide
  Antisense strand to SEQ ID NO: 121190
cuucuccagagauucggag

SEQ ID NO: 121192 - RNA, 19 nt, Artificial Sequence
  Description of Artificial Sequence: Synthetic oligonucleotide
  Sense strand starting at position 1280 of SEQ ID NO: 1544
ggcacauuccuuggcacaa

SEQ ID NO: 121193 - RNA, 19 nt, Artificial Sequence
  Description of Artificial Sequence: Synthetic oligonucleotide
  Antisense strand to SEQ ID NO: 121192
uugugccaaggaaugugcc

SEQ ID NO: 121194 - RNA, 19 nt, Artificial Sequence
  Description of Artificial Sequence: Synthetic oligonucleotide
  Sense strand starting at position 1636 of SEQ ID NO: 1544
cugagugcugcccaucuau

SEQ ID NO: 121195 - RNA, 19 nt, Artificial Sequence
  Description of Artificial Sequence: Synthetic oligonucleotide
  Antisense strand to SEQ ID NO: 121194
auagaugggcagcacucag

SEQ ID NO: 121196 - RNA, 19 nt, Artificial Sequence
  Description of Artificial Sequence: Synthetic oligonucleotide
  Sense strand starting at position 1699 of SEQ ID NO: 1544
ggugccuucccuuaguagu

SEQ ID NO: 121197 - RNA, 19 nt, Artificial Sequence
  Description of Artificial Sequence: Synthetic oligonucleotide
  Antisense strand to SEQ ID NO: 121196
acuacuaagggaaggcacc

SEQ ID NO: 121198 - RNA, 19 nt, Artificial Sequence
  Description of Artificial Sequence: Synthetic oligonucleotide
  Sense strand starting at position 1712 of SEQ ID NO: 1544
aguaguaggguuuggagau

SEQ ID NO: 121199 - RNA, 19 nt, Artificial Sequence
  Description of Artificial Sequence: Synthetic oligonucleotide
  Antisense strand to SEQ ID NO: 121198
aucuccaaacccuacuacu

SEQ ID NO: 121200 - RNA, 19 nt, Artificial Sequence
  Description of Artificial Sequence: Synthetic oligonucleotide
  Sense strand starting at position 1725 of SEQ ID NO: 1544
ggagaucucuggaguggag

SEQ ID NO: 121201 - RNA, 19 nt, Artificial Sequence
  Description of Artificial Sequence: Synthetic oligonucleotide
  Antisense strand to SEQ ID NO: 121200
cuccacuccagagaucucc

SEQ ID NO: 121202 - RNA, 19 nt, Artificial Sequence
  Description of Artificial Sequence: Synthetic oligonucleotide
  Sense strand starting at position 1745 of SEQ ID NO: 1544
gugugcaguugcuauggaa

SEQ ID NO: 121203 - RNA, 19 nt, Artificial Sequence
  Description of Artificial Sequence: Synthetic oligonucleotide
  Antisense strand to SEQ ID NO: 121202
uuccauagcaacugcacac

SEQ ID NO: 121204 - RNA, 19 nt, Artificial Sequence
  Description of Artificial Sequence: Synthetic oligonucleotide
  Sense strand starting at position 1748 of SEQ ID NO: 1544
ugcaguugcuauggaaaug

SEQ ID NO: 121205 - RNA, 19 nt, Artificial Sequence
  Description of Artificial Sequence: Synthetic oligonucleotide
  Antisense strand to SEQ ID NO: 121204
cauuuccauagcaacugca

SEQ ID NO: 121206 - RNA, 19 nt, Artificial Sequence
  Description of Artificial Sequence: Synthetic oligonucleotide
  Sense strand starting at position 1781 of SEQ ID NO: 1544
ggagcaagaugcuuuaccu

SEQ ID NO: 121207 - RNA, 19 nt, Artificial Sequence
  Description of Artificial Sequence: Synthetic oligonucleotide
  Antisense strand to SEQ ID NO: 121206
agguaaagcaucuugcucc

SEQ ID NO: 121208 - RNA, 19 nt, Artificial Sequence
  Description of Artificial Sequence: Synthetic oligonucleotide
  Sense strand starting at position 1824 of SEQ ID NO: 1544
aggugagcuuccuuaccca

SEQ ID NO: 121209 - RNA, 19 nt, Artificial Sequence
  Description of Artificial Sequence: Synthetic oligonucleotide
  Antisense strand to SEQ ID NO: 121208
uggguaaggaagcucaccu

SEQ ID NO: 121210 - RNA, 19 nt, Artificial Sequence
  Description of Artificial Sequence: Synthetic oligonucleotide
  Sense strand starting at position 2350 of SEQ ID NO: 1544
gcaaacugccuuugguaaa

SEQ ID NO: 121211 - RNA, 19 nt, Artificial Sequence
  Description of Artificial Sequence: Synthetic oligonucleotide
  Antisense strand to SEQ ID NO: 121210
uuuaccaaaggcaguuugc

SEQ ID NO: 121212 - RNA, 19 nt, Artificial Sequence
  Description of Artificial Sequence: Synthetic oligonucleotide
  Sense strand starting at position 2361 of SEQ ID NO: 1544
uugguaaauguugguucua

SEQ ID NO: 121213 - RNA, 19 nt, Artificial Sequence
  Description of Artificial Sequence: Synthetic oligonucleotide
  Antisense strand to SEQ ID NO: 121212
uagaaccaacauuuaccaa

SEQ ID NO: 121214 - RNA, 19 nt, Artificial Sequence
  Description of Artificial Sequence: Synthetic oligonucleotide
  Sense strand starting at position 2362 of SEQ ID NO: 1544
ugguaaauguugguucuau

SEQ ID NO: 121215 - RNA, 19 nt, Artificial Sequence
  Description of Artificial Sequence: Synthetic oligonucleotide
  Antisense strand to SEQ ID NO: 121214
auagaaccaacauuuacca

SEQ ID NO: 121216 - RNA, 19 nt, Artificial Sequence
  Description of Artificial Sequence: Synthetic oligonucleotide
  Sense strand starting at position 2363 of SEQ ID NO: 1544
gguaaauguugguucuauc

SEQ ID NO: 121217 - RNA, 19 nt, Artificial Sequence
  Description of Artificial Sequence: Synthetic oligonucleotide
  Antisense strand to SEQ ID NO: 121216
gauagaaccaacauuuacc

SEQ ID NO: 121218 - RNA, 19 nt, Artificial Sequence
  Description of Artificial Sequence: Synthetic oligonucleotide
  Sense strand starting at position 2366 of SEQ ID NO: 1544
aaauguugguucuaucaug

SEQ ID NO: 121219 - RNA, 19 nt, Artificial Sequence
  Description of Artificial Sequence: Synthetic oligonucleotide
  Antisense strand to SEQ ID NO: 121218
caugauagaaccaacauuu

SEQ ID NO: 121220 - RNA, 19 nt, Artificial Sequence
  Description of Artificial Sequence: Synthetic oligonucleotide
  Sense strand starting at position 2786 of SEQ ID NO: 1544
gccagaggcugguuucaag

SEQ ID NO: 121221 - RNA, 19 nt, Artificial Sequence
  Description of Artificial Sequence: Synthetic oligonucleotide
  Antisense strand to SEQ ID NO: 121220
cuugaaaccagccucuggc

SEQ ID NO: 121222 - RNA, 19 nt, Artificial Sequence
  Description of Artificial Sequence: Synthetic oligonucleotide
  Sense strand starting at position 2867 of SEQ ID NO: 1544
agcgauguugcuggcaaga

SEQ ID NO: 121223 - RNA, 19 nt, Artificial Sequence
  Description of Artificial Sequence: Synthetic oligonucleotide
  Antisense strand to SEQ ID NO: 121222
ucuugccagcaacaucgcu

SEQ ID NO: 121224 - RNA, 19 nt, Artificial Sequence
  Description of Artificial Sequence: Synthetic oligonucleotide
  Sense strand starting at position 2869 of SEQ ID NO: 1544
cgauguugcuggcaagaga

SEQ ID NO: 121225 - RNA, 19 nt, Artificial Sequence
  Description of Artificial Sequence: Synthetic oligonucleotide
  Antisense strand to SEQ ID NO: 121224
ucucuugccagcaacaucg

SEQ ID NO: 121226 - RNA, 19 nt, Artificial Sequence
  Description of Artificial Sequence: Synthetic oligonucleotide
  Sense strand starting at position 2937 of SEQ ID NO: 1544
acuugacagugccuaucaa

SEQ ID NO: 121227 - RNA, 19 nt, Artificial Sequence
  Description of Artificial Sequence: Synthetic oligonucleotide
  Antisense strand to SEQ ID NO: 121226
uugauaggcacugucaagu

SEQ ID NO: 121228 - RNA, 19 nt, Artificial Sequence
  Description of Artificial Sequence: Synthetic oligonucleotide
  Sense strand starting at position 2938 of SEQ ID NO: 1544
cuugacagugccuaucaaa

SEQ ID NO: 121229 - RNA, 19 nt, Artificial Sequence
  Description of Artificial Sequence: Synthetic oligonucleotide
  Antisense strand to SEQ ID NO: 121228
uuugauaggcacugucaag

SEQ ID NO: 121230 - RNA, 19 nt, Artificial Sequence
  Description of Artificial Sequence: Synthetic oligonucleotide
  Sense strand starting at position 3118 of SEQ ID NO: 1544
ggguuuauuaagugaugcu

SEQ ID NO: 121231 - RNA, 19 nt, Artificial Sequence
  Description of Artificial Sequence: Synthetic oligonucleotide
  Antisense strand to SEQ ID NO: 121230
agcaucacuuaauaaaccc

SEQ ID NO: 121232 - RNA, 19 nt, Artificial Sequence
  Description of Artificial Sequence: Synthetic oligonucleotide
  Sense strand starting at position 3119 of SEQ ID NO: 1544
gguuuauuaagugaugcuu

SEQ ID NO: 121233 - RNA, 19 nt, Artificial Sequence
  Description of Artificial Sequence: Synthetic oligonucleotide
  Antisense strand to SEQ ID NO: 121232
aagcaucacuuaauaaacc

SEQ ID NO: 121234 - RNA, 19 nt, Artificial Sequence
  Description of Artificial Sequence: Synthetic oligonucleotide
  Sense strand starting at position 3480 of SEQ ID NO: 1544
ggucuucaguccugcggaa

SEQ ID NO: 121235 - RNA, 19 nt, Artificial Sequence
  Description of Artificial Sequence: Synthetic oligonucleotide
  Antisense strand to SEQ ID NO: 121234
uuccgcaggacugaagacc

SEQ ID NO: 121236 - RNA, 19 nt, Artificial Sequence
  Description of Artificial Sequence: Synthetic oligonucleotide
  Sense strand starting at position 3896 of SEQ ID NO: 1544
aggccuugcuucucuaaca

SEQ ID NO: 121237 - RNA, 19 nt, Artificial Sequence
  Description of Artificial Sequence: Synthetic oligonucleotide
  Antisense strand to SEQ ID NO: 121236
uguuagagaagcaaggccu

SEQ ID NO: 121238 - RNA, 19 nt, Artificial Sequence
  Description of Artificial Sequence: Synthetic oligonucleotide
  Sense strand starting at position 3967 of SEQ ID NO: 1544
gaggaugggugauccuuga

SEQ ID NO: 121239 - RNA, 19 nt, Artificial Sequence
  Description of Artificial Sequence: Synthetic oligonucleotide
  Antisense strand to SEQ ID NO: 121238
ucaaggaucacccauccuc

SEQ ID NO: 121240 - RNA, 19 nt, Artificial Sequence
  Description of Artificial Sequence: Synthetic oligonucleotide
  Sense strand starting at position 3971 of SEQ ID NO: 1544
augggugauccuugaggag

SEQ ID NO: 121241 - RNA, 19 nt, Artificial Sequence
  Description of Artificial Sequence: Synthetic oligonucleotide
  Antisense strand to SEQ ID NO: 121240
cuccucaaggaucacccau

SEQ ID NO: 121242 - RNA, 19 nt, Artificial Sequence
  Description of Artificial Sequence: Synthetic oligonucleotide
  Sense strand starting at position 395 of SEQ ID NO: 1545
ccaggacugggcuguagau

SEQ ID NO: 121243 - RNA, 19 nt, Artificial Sequence
  Description of Artificial Sequence: Synthetic oligonucleotide
  Antisense strand to SEQ ID NO: 121242
aucuacagcccaguccugg

SEQ ID NO: 121244 - RNA, 19 nt, Artificial Sequence
  Description of Artificial Sequence: Synthetic oligonucleotide
  Sense strand starting at position 453 of SEQ ID NO: 1545
gucugcauccuacagaaca

SEQ ID NO: 121245 - RNA, 19 nt, Artificial Sequence
  Description of Artificial Sequence: Synthetic oligonucleotide
  Antisense strand to SEQ ID NO: 121244
uguucuguaggaugcagac

SEQ ID NO: 121246 - RNA, 19 nt, Artificial Sequence
  Description of Artificial Sequence: Synthetic oligonucleotide
  Sense strand starting at position 579 of SEQ ID NO: 1545
accugaucuucuccaggga

SEQ ID NO: 121247 - RNA, 19 nt, Artificial Sequence
  Description of Artificial Sequence: Synthetic oligonucleotide
  Antisense strand to SEQ ID NO: 121246
ucccuggagaagaucaggu

SEQ ID NO: 121248 - RNA, 19 nt, Artificial Sequence
  Description of Artificial Sequence: Synthetic oligonucleotide
  Sense strand starting at position 626 of SEQ ID NO: 1545
gagugacagcgcucgcuua

SEQ ID NO: 121249 - RNA, 19 nt, Artificial Sequence
  Description of Artificial Sequence: Synthetic oligonucleotide
  Antisense strand to SEQ ID NO: 121248
uaagcgagcgcugucacuc

SEQ ID NO: 121250 - RNA, 19 nt, Artificial Sequence
  Description of Artificial Sequence: Synthetic oligonucleotide
  Sense strand starting at position 628 of SEQ ID NO: 1545
gugacagcgcucgcuuaua

SEQ ID NO: 121251 - RNA, 19 nt, Artificial Sequence
  Description of Artificial Sequence: Synthetic oligonucleotide
  Antisense strand to SEQ ID NO: 121250
uauaagcgagcgcugucac

SEQ ID NO: 121252 - RNA, 19 nt, Artificial Sequence
  Description of Artificial Sequence: Synthetic oligonucleotide
  Sense strand starting at position 1055 of SEQ ID NO: 1545
gcuggugaccucuacuaug

SEQ ID NO: 121253 - RNA, 19 nt, Artificial Sequence
  Description of Artificial Sequence: Synthetic oligonucleotide
  Antisense strand to SEQ ID NO: 121252
cauaguagaggucaccagc

SEQ ID NO: 121254 - RNA, 19 nt, Artificial Sequence
  Description of Artificial Sequence: Synthetic oligonucleotide
  Sense strand starting at position 1230 of SEQ ID NO: 1545
aguggugaaauccaugcua

SEQ ID NO: 121255 - RNA, 19 nt, Artificial Sequence
  Description of Artificial Sequence: Synthetic oligonucleotide
  Antisense strand to SEQ ID NO: 121254
uagcauggauuucaccacu

SEQ ID NO: 121256 - RNA, 19 nt, Artificial Sequence
  Description of Artificial Sequence: Synthetic oligonucleotide
  Sense strand starting at position 1232 of SEQ ID NO: 1545
uggugaaauccaugcuaaa

SEQ ID NO: 121257 - RNA, 19 nt, Artificial Sequence
  Description of Artificial Sequence: Synthetic oligonucleotide
  Antisense strand to SEQ ID NO: 121256
uuuagcauggauuucacca

SEQ ID NO: 121258 - RNA, 19 nt, Artificial Sequence
  Description of Artificial Sequence: Synthetic oligonucleotide
  Sense strand starting at position 1299 of SEQ ID NO: 1545
ucaccucugcaugagacuu

SEQ ID NO: 121259 - RNA, 19 nt, Artificial Sequence
  Description of Artificial Sequence: Synthetic oligonucleotide
  Antisense strand to SEQ ID NO: 121258
aagucucaugcagagguga

SEQ ID NO: 121260 - RNA, 19 nt, Artificial Sequence
  Description of Artificial Sequence: Synthetic oligonucleotide
  Sense strand starting at position 1391 of SEQ ID NO: 1545
ugacuagggccugguugau

SEQ ID NO: 121261 - RNA, 19 nt, Artificial Sequence
  Description of Artificial Sequence: Synthetic oligonucleotide
  Antisense strand to SEQ ID NO: 121260
aucaaccaggcccuaguca

SEQ ID NO: 121262 - RNA, 19 nt, Artificial Sequence
  Description of Artificial Sequence: Synthetic oligonucleotide
  Sense strand starting at position 1407 of SEQ ID NO: 1545
gauggugucaggcaaacuu

SEQ ID NO: 121263 - RNA, 19 nt, Artificial Sequence
  Description of Artificial Sequence: Synthetic oligonucleotide
  Antisense strand to SEQ ID NO: 121262
aaguuugccugacaccauc

SEQ ID NO: 121264 - RNA, 19 nt, Artificial Sequence
  Description of Artificial Sequence: Synthetic oligonucleotide
  Sense strand starting at position 1437 of SEQ ID NO: 1545
guccacuacucagugggaa

SEQ ID NO: 121265 - RNA, 19 nt, Artificial Sequence
  Description of Artificial Sequence: Synthetic oligonucleotide
  Antisense strand to SEQ ID NO: 121264
uucccacugaguaguggac

SEQ ID NO: 121266 - RNA, 19 nt, Artificial Sequence
  Description of Artificial Sequence: Synthetic oligonucleotide
  Sense strand starting at position 1438 of SEQ ID NO: 1545
uccacuacucagugggaau

SEQ ID NO: 121267 - RNA, 19 nt, Artificial Sequence
  Description of Artificial Sequence: Synthetic oligonucleotide
  Antisense strand to SEQ ID NO: 121266
auucccacugaguagugga

SEQ ID NO: 121268 - RNA, 19 nt, Artificial Sequence
  Description of Artificial Sequence: Synthetic oligonucleotide
  Sense strand starting at position 1464 of SEQ ID NO: 1545
gaagaagguuaggaauaaa

SEQ ID NO: 121269 - RNA, 19 nt, Artificial Sequence
  Description of Artificial Sequence: Synthetic oligonucleotide
  Antisense strand to SEQ ID NO: 121268
uuuauuccuaaccuucuuc

SEQ ID NO: 121270 - RNA, 19 nt, Artificial Sequence
  Description of Artificial Sequence: Synthetic oligonucleotide
  Sense strand starting at position 1545 of SEQ ID NO: 1545
uuugacuccugauugcaua

SEQ ID NO: 121271 - RNA, 19 nt, Artificial Sequence
  Description of Artificial Sequence: Synthetic oligonucleotide
  Antisense strand to SEQ ID NO: 121270
uaugcaaucaggagucaaa

SEQ ID NO: 121272 - RNA, 19 nt, Artificial Sequence
  Description of Artificial Sequence: Synthetic oligonucleotide
  Sense strand starting at position 1546 of SEQ ID NO: 1545
uugacuccugauugcauaa

SEQ ID NO: 121273 - RNA, 19 nt, Artificial Sequence
  Description of Artificial Sequence: Synthetic oligonucleotide
  Antisense strand to SEQ ID NO: 121272
uuaugcaaucaggagucaa

SEQ ID NO: 121274 - RNA, 19 nt, Artificial Sequence
  Description of Artificial Sequence: Synthetic oligonucleotide
  Sense strand starting at position 1645 of SEQ ID NO: 1545
ccucauagguugcuguaaa

SEQ ID NO: 121275 - RNA, 19 nt, Artificial Sequence
  Description of Artificial Sequence: Synthetic oligonucleotide
  Antisense strand to SEQ ID NO: 121274
uuuacagcaaccuaugagg

SEQ ID NO: 121276 - RNA, 19 nt, Artificial Sequence
  Description of Artificial Sequence: Synthetic oligonucleotide
  Sense strand starting at position 1739 of SEQ ID NO: 1545
aguaguagucuuugaaaua

SEQ ID NO: 121277 - RNA, 19 nt, Artificial Sequence
  Description of Artificial Sequence: Synthetic oligonucleotide
  Antisense strand to SEQ ID NO: 121276
uauuucaaagacuacuacu

SEQ ID NO: 121278 - RNA, 19 nt, Artificial Sequence
  Description of Artificial Sequence: Synthetic oligonucleotide
  Sense strand starting at position 1769 of SEQ ID NO: 1545
agagauuugcuucgaguuu

SEQ ID NO: 121279 - RNA, 19 nt, Artificial Sequence
  Description of Artificial Sequence: Synthetic oligonucleotide
  Antisense strand to SEQ ID NO: 121278
aaacucgaagcaaaucucu

SEQ ID NO: 121280 - RNA, 19 nt, Artificial Sequence
  Description of Artificial Sequence: Synthetic oligonucleotide
  Sense strand starting at position 1889 of SEQ ID NO: 1545
ggguguagaccagggaaau

SEQ ID NO: 121281 - RNA, 19 nt, Artificial Sequence
  Description of Artificial Sequence: Synthetic oligonucleotide
  Antisense strand to SEQ ID NO: 121280
auuucccuggucuacaccc

SEQ ID NO: 121282 - RNA, 19 nt, Artificial Sequence
  Description of Artificial Sequence: Synthetic oligonucleotide
  Sense strand starting at position 1890 of SEQ ID NO: 1545
gguguagaccagggaaauc

SEQ ID NO: 121283 - RNA, 19 nt, Artificial Sequence
  Description of Artificial Sequence: Synthetic oligonucleotide
  Antisense strand to SEQ ID NO: 121282
gauuucccuggucuacacc

SEQ ID NO: 121284 - RNA, 19 nt, Artificial Sequence
  Description of Artificial Sequence: Synthetic oligonucleotide
  Sense strand starting at position 1900 of SEQ ID NO: 1545
agggaaaucuggcuagagu

SEQ ID NO: 121285 - RNA, 19 nt, Artificial Sequence
  Description of Artificial Sequence: Synthetic oligonucleotide
  Antisense strand to SEQ ID NO: 121284
acucuagccagauuucccu

SEQ ID NO: 121286 - RNA, 19 nt, Artificial Sequence
  Description of Artificial Sequence: Synthetic oligonucleotide
  Sense strand starting at position 1901 of SEQ ID NO: 1545
gggaaaucuggcuagaguu

SEQ ID NO: 121287 - RNA, 19 nt, Artificial Sequence
  Description of Artificial Sequence: Synthetic oligonucleotide
  Antisense strand to SEQ ID NO: 121286
aacucuagccagauuuccc

SEQ ID NO: 121288 - RNA, 19 nt, Artificial Sequence
  Description of Artificial Sequence: Synthetic oligonucleotide
  Sense strand starting at position 1999 of SEQ ID NO: 1545
cacagagcccuguaaauug

SEQ ID NO: 121289 - RNA, 19 nt, Artificial Sequence
  Description of Artificial Sequence: Synthetic oligonucleotide
  Antisense strand to SEQ ID NO: 121288
caauuuacagggcucugug

SEQ ID NO: 121290 - RNA, 19 nt, Artificial Sequence
  Description of Artificial Sequence: Synthetic oligonucleotide
  Sense strand starting at position 2032 of SEQ ID NO: 1545
gcccaagagauguggcuaa

SEQ ID NO: 121291 - RNA, 19 nt, Artificial Sequence
  Description of Artificial Sequence: Synthetic oligonucleotide
  Antisense strand to SEQ ID NO: 121290
uuagccacaucucuugggc

SEQ ID NO: 121292 - RNA, 19 nt, Artificial Sequence
  Description of Artificial Sequence: Synthetic oligonucleotide
  Sense strand starting at position 2130 of SEQ ID NO: 1545
accaaauuagcaggugauc

SEQ ID NO: 121293 - RNA, 19 nt, Artificial Sequence
  Description of Artificial Sequence: Synthetic oligonucleotide
  Antisense strand to SEQ ID NO: 121292
gaucaccugcuaauuuggu

SEQ ID NO: 121294 - RNA, 19 nt, Artificial Sequence
  Description of Artificial Sequence: Synthetic oligonucleotide
  Sense strand starting at position 2135 of SEQ ID NO: 1545
auuagcaggugauccaaau

SEQ ID NO: 121295 - RNA, 19 nt, Artificial Sequence
  Description of Artificial Sequence: Synthetic oligonucleotide
  Antisense strand to SEQ ID NO: 121294
auuuggaucaccugcuaau

SEQ ID NO: 121296 - RNA, 19 nt, Artificial Sequence
  Description of Artificial Sequence: Synthetic oligonucleotide
  Sense strand starting at position 2141 of SEQ ID NO: 1545
aggugauccaaauggcaua

SEQ ID NO: 121297 - RNA, 19 nt, Artificial Sequence
  Description of Artificial Sequence: Synthetic oligonucleotide
  Antisense strand to SEQ ID NO: 121296
uaugccauuuggaucaccu

SEQ ID NO: 121298 - RNA, 19 nt, Artificial Sequence
  Description of Artificial Sequence: Synthetic oligonucleotide
  Sense strand starting at position 2158 of SEQ ID NO: 1545
uauggucuggccuggacau

SEQ ID NO: 121299 - RNA, 19 nt, Artificial Sequence
  Description of Artificial Sequence: Synthetic oligonucleotide
  Antisense strand to SEQ ID NO: 121298
auguccaggccagaccaua

SEQ ID NO: 121300 - RNA, 19 nt, Artificial Sequence
  Description of Artificial Sequence: Synthetic oligonucleotide
  Sense strand starting at position 2173 of SEQ ID NO: 1545
acaugucuugcagaagguu

SEQ ID NO: 121301 - RNA, 19 nt, Artificial Sequence
  Description of Artificial Sequence: Synthetic oligonucleotide
  Antisense strand to SEQ ID NO: 121300
aaccuucugcaagacaugu

SEQ ID NO: 121302 - RNA, 19 nt, Artificial Sequence
  Description of Artificial Sequence: Synthetic oligonucleotide
  Sense strand starting at position 2384 of SEQ ID NO: 1545
ccugcucuccaaggauaca

SEQ ID NO: 121303 - RNA, 19 nt, Artificial Sequence
  Description of Artificial Sequence: Synthetic oligonucleotide
  Antisense strand to SEQ ID NO: 121302
uguauccuuggagagcagg

SEQ ID NO: 121304 - RNA, 19 nt, Artificial Sequence
  Description of Artificial Sequence: Synthetic oligonucleotide
  Sense strand starting at position 2518 of SEQ ID NO: 1545
ucacucagugcuuauacua

SEQ ID NO: 121305 - RNA, 19 nt, Artificial Sequence
  Description of Artificial Sequence: Synthetic oligonucleotide
  Antisense strand to SEQ ID NO: 121304
uaguauaagcacugaguga

SEQ ID NO: 121306 - RNA, 19 nt, Artificial Sequence
  Description of Artificial Sequence: Synthetic oligonucleotide
  Sense strand starting at position 2525 of SEQ ID NO: 1545
gugcuuauacuauaugcca

SEQ ID NO: 121307 - RNA, 19 nt, Artificial Sequence
  Description of Artificial Sequence: Synthetic oligonucleotide
  Antisense strand to SEQ ID NO: 121306
uggcauauaguauaagcac

SEQ ID NO: 121308 - RNA, 19 nt, Artificial Sequence
  Description of Artificial Sequence: Synthetic oligonucleotide
  Sense strand starting at position 2721 of SEQ ID NO: 1545
guggacauccuccacuaau

SEQ ID NO: 121309 - RNA, 19 nt, Artificial Sequence
  Description of Artificial Sequence: Synthetic oligonucleotide
  Antisense strand to SEQ ID NO: 121308
auuaguggaggauguccac

SEQ ID NO: 121310 - RNA, 19 nt, Artificial Sequence
  Description of Artificial Sequence: Synthetic oligonucleotide
  Sense strand starting at position 3007 of SEQ ID NO: 1545
ccacucaaucccuguguga

SEQ ID NO: 121311 - RNA, 19 nt, Artificial Sequence
  Description of Artificial Sequence: Synthetic oligonucleotide
  Antisense strand to SEQ ID NO: 121310
ucacacagggauugagugg

SEQ ID NO: 121312 - RNA, 19 nt, Artificial Sequence
  Description of Artificial Sequence: Synthetic oligonucleotide
  Sense strand starting at position 3169 of SEQ ID NO: 1545
cagcuuccucagugacaga

SEQ ID NO: 121313 - RNA, 19 nt, Artificial Sequence
  Description of Artificial Sequence: Synthetic oligonucleotide
  Antisense strand to SEQ ID NO: 121312
ucugucacugaggaagcug

SEQ ID NO: 121314 - RNA, 19 nt, Artificial Sequence
  Description of Artificial Sequence: Synthetic oligonucleotide
  Sense strand starting at position 3381 of SEQ ID NO: 1545
ucuugaguaguugggaauc

SEQ ID NO: 121315 - RNA, 19 nt, Artificial Sequence
  Description of Artificial Sequence: Synthetic oligonucleotide
  Antisense strand to SEQ ID NO: 121314
gauucccaacuacucaaga

SEQ ID NO: 121316 - RNA, 19 nt, Artificial Sequence
  Description of Artificial Sequence: Synthetic oligonucleotide
  Sense strand starting at position 3787 of SEQ ID NO: 1545
aggccagaccaauguuaau

SEQ ID NO: 121317 - RNA, 19 nt, Artificial Sequence
  Description of Artificial Sequence: Synthetic oligonucleotide
  Antisense strand to SEQ ID NO: 121316
auuaacauuggucuggccu

SEQ ID NO: 121318 - RNA, 19 nt, Artificial Sequence
  Description of Artificial Sequence: Synthetic oligonucleotide
  Sense strand starting at position 3831 of SEQ ID NO: 1545
cuugaagggucuuuaguga

SEQ ID NO: 121319 - RNA, 19 nt, Artificial Sequence
  Description of Artificial Sequence: Synthetic oligonucleotide
  Antisense strand to SEQ ID NO: 121318
ucacuaaagacccuucaag

SEQ ID NO: 121320 - RNA, 19 nt, Artificial Sequence
  Description of Artificial Sequence: Synthetic oligonucleotide
  Sense strand starting at position 3922 of SEQ ID NO: 1545
gguguuuaccaagaacuuu

SEQ ID NO: 121321 - RNA, 19 nt, Artificial Sequence
  Description of Artificial Sequence: Synthetic oligonucleotide
  Antisense strand to SEQ ID NO: 121320
aaaguucuugguaaacacc

SEQ ID NO: 121322 - RNA, 19 nt, Artificial Sequence
  Description of Artificial Sequence: Synthetic oligonucleotide
  Sense strand starting at position 3919 of SEQ ID NO: 1546
aucauaugguaguuaugau

SEQ ID NO: 121323 - RNA, 19 nt, Artificial Sequence
  Description of Artificial Sequence: Synthetic oligonucleotide
  Antisense strand to SEQ ID NO: 121322
aucauaacuaccauaugau

SEQ ID NO: 121324 - RNA, 19 nt, Artificial Sequence
  Description of Artificial Sequence: Synthetic oligonucleotide
  Sense strand starting at position 3694 of SEQ ID NO: 1546
cagucuuucgaguagcuga

SEQ ID NO: 121325 - RNA, 19 nt, Artificial Sequence
  Description of Artificial Sequence: Synthetic oligonucleotide
  Antisense strand to SEQ ID NO: 121324
ucagcuacucgaaagacug

SEQ ID NO: 121326 - RNA, 19 nt, Artificial Sequence
  Description of Artificial Sequence: Synthetic oligonucleotide
  Sense strand starting at position 3664 of SEQ ID NO: 1546
ugccucuguguugaaacaa

SEQ ID NO: 121327 - RNA, 19 nt, Artificial Sequence
  Description of Artificial Sequence: Synthetic oligonucleotide
  Antisense strand to SEQ ID NO: 121326
uuguuucaacacagaggca

SEQ ID NO: 121328 - RNA, 19 nt, Artificial Sequence
  Description of Artificial Sequence: Synthetic oligonucleotide
  Sense strand starting at position 3538 of SEQ ID NO: 1546
agcauaggagugcaaauau

SEQ ID NO: 121329 - RNA, 19 nt, Artificial Sequence
  Description of Artificial Sequence: Synthetic oligonucleotide
  Antisense strand to SEQ ID NO: 121328
auauuugcacuccuaugcu

SEQ ID NO: 121330 - RNA, 19 nt, Artificial Sequence
  Description of Artificial Sequence: Synthetic oligonucleotide
  Sense strand starting at position 3323 of SEQ ID NO: 1546
agugaaaucaugugaugcu

SEQ ID NO: 121331 - RNA, 19 nt, Artificial Sequence
  Description of Artificial Sequence: Synthetic oligonucleotide
  Antisense strand to SEQ ID NO: 121330
agcaucacaugauuucacu

SEQ ID NO: 121332 - RNA, 19 nt, Artificial Sequence
  Description of Artificial Sequence: Synthetic oligonucleotide
  Sense strand starting at position 3127 of SEQ ID NO: 1546
gucgauaaauucuucuuac

SEQ ID NO: 121333 - RNA, 19 nt, Artificial Sequence
  Description of Artificial Sequence: Synthetic oligonucleotide
  Antisense strand to SEQ ID NO: 121332
guaagaagaauuuaucgac

SEQ ID NO: 121334 - RNA, 19 nt, Artificial Sequence
  Description of Artificial Sequence: Synthetic oligonucleotide
  Sense strand starting at position 3120 of SEQ ID NO: 1546
uauuguugucgauaaauuc

SEQ ID NO: 121335 - RNA, 19 nt, Artificial Sequence
  Description of Artificial Sequence: Synthetic oligonucleotide
  Antisense strand to SEQ ID NO: 121334
gaauuuaucgacaacaaua

SEQ ID NO: 121336 - RNA, 19 nt, Artificial Sequence
  Description of Artificial Sequence: Synthetic oligonucleotide
  Sense strand starting at position 3116 of SEQ ID NO: 1546
ccuauauuguugucgauaa

SEQ ID NO: 121337 - RNA, 19 nt, Artificial Sequence
  Description of Artificial Sequence: Synthetic oligonucleotide
  Antisense strand to SEQ ID NO: 121336
uuaucgacaacaauauagg

SEQ ID NO: 121338 - RNA, 19 nt, Artificial Sequence
  Description of Artificial Sequence: Synthetic oligonucleotide
  Sense strand starting at position 3078 of SEQ ID NO: 1546
ucuucugcagcguucuaau

SEQ ID NO: 121339 - RNA, 19 nt, Artificial Sequence
  Description of Artificial Sequence: Synthetic oligonucleotide
  Antisense strand to SEQ ID NO: 121338
auuagaacgcugcagaaga

SEQ ID NO: 121340 - RNA, 19 nt, Artificial Sequence
  Description of Artificial Sequence: Synthetic oligonucleotide
  Sense strand starting at position 2961 of SEQ ID NO: 1546
gaaggauccuggcuaaaug

SEQ ID NO: 121341 - RNA, 19 nt, Artificial Sequence
  Description of Artificial Sequence: Synthetic oligonucleotide
  Antisense strand to SEQ ID NO: 121340
cauuuagccaggauccuuc

SEQ ID NO: 121342 - RNA, 19 nt, Artificial Sequence
  Description of Artificial Sequence: Synthetic oligonucleotide
  Sense strand starting at position 2944 of SEQ ID NO: 1546
auucuugaaugagcuuaga

SEQ ID NO: 121343 - RNA, 19 nt, Artificial Sequence
  Description of Artificial Sequence: Synthetic oligonucleotide
  Antisense strand to SEQ ID NO: 121342
ucuaagcucauucaagaau

SEQ ID NO: 121344 - RNA, 19 nt, Artificial Sequence
  Description of Artificial Sequence: Synthetic oligonucleotide
  Sense strand starting at position 2686 of SEQ ID NO: 1546
gucuuuauacugggaacau

SEQ ID NO: 121345 - RNA, 19 nt, Artificial Sequence
  Description of Artificial Sequence: Synthetic oligonucleotide
  Antisense strand to SEQ ID NO: 121344
auguucccaguauaaagac

SEQ ID NO: 121346 - RNA, 19 nt, Artificial Sequence
  Description of Artificial Sequence: Synthetic oligonucleotide
  Sense strand starting at position 2578 of SEQ ID NO: 1546
auguaagagacguaugugu

SEQ ID NO: 121347 - RNA, 19 nt, Artificial Sequence
  Description of Artificial Sequence: Synthetic oligonucleotide
  Antisense strand to SEQ ID NO: 121346
acacauacgucucuuacau

SEQ ID NO: 121348 - RNA, 19 nt, Artificial Sequence
  Description of Artificial Sequence: Synthetic oligonucleotide
  Sense strand starting at position 2576 of SEQ ID NO: 1546
auauguaagagacguaugu

SEQ ID NO: 121349 - RNA, 19 nt, Artificial Sequence
  Description of Artificial Sequence: Synthetic oligonucleotide
  Antisense strand to SEQ ID NO: 121348
acauacgucucuuacauau

SEQ ID NO: 121350 - RNA, 19 nt, Artificial Sequence
  Description of Artificial Sequence: Synthetic oligonucleotide
  Sense strand starting at position 2574 of SEQ ID NO: 1546
ugauauguaagagacguau

SEQ ID NO: 121351 - RNA, 19 nt, Artificial Sequence
  Description of Artificial Sequence: Synthetic oligonucleotide
  Antisense strand to SEQ ID NO: 121350
auacgucucuuacauauca

SEQ ID NO: 121352 - RNA, 19 nt, Artificial Sequence
  Description of Artificial Sequence: Synthetic oligonucleotide
  Sense strand starting at position 2524 of SEQ ID NO: 1546
guaccaaguuggucagaug

SEQ ID NO: 121353 - RNA, 19 nt, Artificial Sequence
  Description of Artificial Sequence: Synthetic oligonucleotide
  Antisense strand to SEQ ID NO: 121352
caucugaccaacuugguac

SEQ ID NO: 121354 - RNA, 19 nt, Artificial Sequence
  Description of Artificial Sequence: Synthetic oligonucleotide
  Sense strand starting at position 2506 of SEQ ID NO: 1546
cgcacauaagucuaauaag

SEQ ID NO: 121355 - RNA, 19 nt, Artificial Sequence
  Description of Artificial Sequence: Synthetic oligonucleotide
  Antisense strand to SEQ ID NO: 121354
cuuauuagacuuaugugcg

SEQ ID NO: 121356 - RNA, 19 nt, Artificial Sequence
  Description of Artificial Sequence: Synthetic oligonucleotide
  Sense strand starting at position 2386 of SEQ ID NO: 1546
gcgacucugccgcauuuau

SEQ ID NO: 121357 - RNA, 19 nt, Artificial Sequence
  Description of Artificial Sequence: Synthetic oligonucleotide
  Antisense strand to SEQ ID NO: 121356
auaaaugcggcagagucgc

SEQ ID NO: 121358 - RNA, 19 nt, Artificial Sequence
  Description of Artificial Sequence: Synthetic oligonucleotide
  Sense strand starting at position 2072 of SEQ ID NO: 1546
ggaguuucuagcuggacag

SEQ ID NO: 121359 - RNA, 19 nt, Artificial Sequence
  Description of Artificial Sequence: Synthetic oligonucleotide
  Antisense strand to SEQ ID NO: 121358
cuguccagcuagaaacucc

SEQ ID NO: 121360 - RNA, 19 nt, Artificial Sequence
  Description of Artificial Sequence: Synthetic oligonucleotide
  Sense strand starting at position 2071 of SEQ ID NO: 1546
gggaguuucuagcuggaca

SEQ ID NO: 121361 - RNA, 19 nt, Artificial Sequence
  Description of Artificial Sequence: Synthetic oligonucleotide
  Antisense strand to SEQ ID NO: 121360
uguccagcuagaaacuccc

SEQ ID NO: 121362 - RNA, 19 nt, Artificial Sequence
  Description of Artificial Sequence: Synthetic oligonucleotide
  Sense strand starting at position 1554 of SEQ ID NO: 1546
agauuaucuggaggguuua

SEQ ID NO: 121363 - RNA, 19 nt, Artificial Sequence
  Description of Artificial Sequence: Synthetic oligonucleotide
  Antisense strand to SEQ ID NO: 121362
uaaacccuccagauaaucu

SEQ ID NO: 121364 - RNA, 19 nt, Artificial Sequence
  Description of Artificial Sequence: Synthetic oligonucleotide
  Sense strand starting at position 1491 of SEQ ID NO: 1546
cggaguucucacugccaac

SEQ ID NO: 121365 - RNA, 19 nt, Artificial Sequence
  Description of Artificial Sequence: Synthetic oligonucleotide
  Antisense strand to SEQ ID NO: 121364
guuggcagugagaacuccg

SEQ ID NO: 121366 - RNA, 19 nt, Artificial Sequence
  Description of Artificial Sequence: Synthetic oligonucleotide
  Sense strand starting at position 1401 of SEQ ID NO: 1546
aguguuaaaugucugaaca

SEQ ID NO: 121367 - RNA, 19 nt, Artificial Sequence
  Description of Artificial Sequence: Synthetic oligonucleotide
  Antisense strand to SEQ ID NO: 121366
uguucagacauuuaacacu

SEQ ID NO: 121368 - RNA, 19 nt, Artificial Sequence
  Description of Artificial Sequence: Synthetic oligonucleotide
  Sense strand starting at position 1316 of SEQ ID NO: 1546
uuucgcaauuaacuuguaa

SEQ ID NO: 121369 - RNA, 19 nt, Artificial Sequence
  Description of Artificial Sequence: Synthetic oligonucleotide
  Antisense strand to SEQ ID NO: 121368
uuacaaguuaauugcgaaa

SEQ ID NO: 121370 - RNA, 19 nt, Artificial Sequence
  Description of Artificial Sequence: Synthetic oligonucleotide
  Sense strand starting at position 1174 of SEQ ID NO: 1546
guauguugcaaauggguuu

SEQ ID NO: 121371 - RNA, 19 nt, Artificial Sequence
  Description of Artificial Sequence: Synthetic oligonucleotide
  Antisense strand to SEQ ID NO: 121370
aaacccauuugcaacauac

SEQ ID NO: 121372 - RNA, 19 nt, Artificial Sequence
  Description of Artificial Sequence: Synthetic oligonucleotide
  Sense strand starting at position 1165 of SEQ ID NO: 1546
acuuuaauaguauguugca

SEQ ID NO: 121373 - RNA, 19 nt, Artificial Sequence
  Description of Artificial Sequence: Synthetic oligonucleotide
  Antisense strand to SEQ ID NO: 121372
ugcaacauacuauuaaagu

SEQ ID NO: 121374 - RNA, 19 nt, Artificial Sequence
  Description of Artificial Sequence: Synthetic oligonucleotide
  Sense strand starting at position 1118 of SEQ ID NO: 1546
gguguaguauugcuuagau

SEQ ID NO: 121375 - RNA, 19 nt, Artificial Sequence
  Description of Artificial Sequence: Synthetic oligonucleotide
  Antisense strand to SEQ ID NO: 121374
aucuaagcaauacuacacc

SEQ ID NO: 121376 - RNA, 19 nt, Artificial Sequence
  Description of Artificial Sequence: Synthetic oligonucleotide
  Sense strand starting at position 1098 of SEQ ID NO: 1546
acauaaugagggugcuaaa

SEQ ID NO: 121377 - RNA, 19 nt, Artificial Sequence
  Description of Artificial Sequence: Synthetic oligonucleotide
  Antisense strand to SEQ ID NO: 121376
uuuagcacccucauuaugu

SEQ ID NO: 121378 - RNA, 19 nt, Artificial Sequence
  Description of Artificial Sequence: Synthetic oligonucleotide
  Sense strand starting at position 1058 of SEQ ID NO: 1546
cguugauuuguauagcagu

SEQ ID NO: 121379 - RNA, 19 nt, Artificial Sequence
  Description of Artificial Sequence: Synthetic oligonucleotide
  Antisense strand to SEQ ID NO: 121378
acugcuauacaaaucaacg

SEQ ID NO: 121380 - RNA, 19 nt, Artificial Sequence
  Description of Artificial Sequence: Synthetic oligonucleotide
  Sense strand starting at position 1052 of SEQ ID NO: 1546
ucuuaacguugauuuguau

SEQ ID NO: 121381 - RNA, 19 nt, Artificial Sequence
  Description of Artificial Sequence: Synthetic oligonucleotide
  Antisense strand to SEQ ID NO: 121380
auacaaaucaacguuaaga

SEQ ID NO: 121382 - RNA, 19 nt, Artificial Sequence
  Description of Artificial Sequence: Synthetic oligonucleotide
  Sense strand starting at position 1040 of SEQ ID NO: 1546
gcaguuuaguuaucuuaac

SEQ ID NO: 121383 - RNA, 19 nt, Artificial Sequence
  Description of Artificial Sequence: Synthetic oligonucleotide
  Antisense strand to SEQ ID NO: 121382
guuaagauaacuaaacugc

SEQ ID NO: 121384 - RNA, 19 nt, Artificial Sequence
  Description of Artificial Sequence: Synthetic oligonucleotide
  Sense strand starting at position 988 of SEQ ID NO: 1546
aaguacuuccuagggaaac

SEQ ID NO: 121385 - RNA, 19 nt, Artificial Sequence
  Description of Artificial Sequence: Synthetic oligonucleotide
  Antisense strand to SEQ ID NO: 121384
guuucccuaggaaguacuu

SEQ ID NO: 121386 - RNA, 19 nt, Artificial Sequence
  Description of Artificial Sequence: Synthetic oligonucleotide
  Sense strand starting at position 956 of SEQ ID NO: 1546
auuuaaaguuuaggagcau

SEQ ID NO: 121387 - RNA, 19 nt, Artificial Sequence
  Description of Artificial Sequence: Synthetic oligonucleotide
  Antisense strand to SEQ ID NO: 121386
augcuccuaaacuuuaaau

SEQ ID NO: 121388 - RNA, 19 nt, Artificial Sequence
  Description of Artificial Sequence: Synthetic oligonucleotide
  Sense strand starting at position 646 of SEQ ID NO: 1546
auucuuaugucaucucuga

SEQ ID NO: 121389 - RNA, 19 nt, Artificial Sequence
  Description of Artificial Sequence: Synthetic oligonucleotide
  Antisense strand to SEQ ID NO: 121388
ucagagaugacauaagaau

SEQ ID NO: 121390 - RNA, 19 nt, Artificial Sequence
  Description of Artificial Sequence: Synthetic oligonucleotide
  Sense strand starting at position 639 of SEQ ID NO: 1546
gguauuuauucuuauguca

SEQ ID NO: 121391 - RNA, 19 nt, Artificial Sequence
  Description of Artificial Sequence: Synthetic oligonucleotide
  Antisense strand to SEQ ID NO: 121390
ugacauaagaauaaauacc

SEQ ID NO: 121392 - RNA, 19 nt, Artificial Sequence
  Description of Artificial Sequence: Synthetic oligonucleotide
  Sense strand starting at position 614 of SEQ ID NO: 1546
guuaaaugugagcagugga

SEQ ID NO: 121393 - RNA, 19 nt, Artificial Sequence
  Description of Artificial Sequence: Synthetic oligonucleotide
  Antisense strand to SEQ ID NO: 121392
uccacugcucacauuuaac

SEQ ID NO: 121394 - RNA, 19 nt, Artificial Sequence
  Description of Artificial Sequence: Synthetic oligonucleotide
  Sense strand starting at position 612 of SEQ ID NO: 1546
gcguuaaaugugagcagug

SEQ ID NO: 121395 - RNA, 19 nt, Artificial Sequence
  Description of Artificial Sequence: Synthetic oligonucleotide
  Antisense strand to SEQ ID NO: 121394
cacugcucacauuuaacgc

SEQ ID NO: 121396 - RNA, 19 nt, Artificial Sequence
  Description of Artificial Sequence: Synthetic oligonucleotide
  Sense strand starting at position 604 of SEQ ID NO: 1546
auuaacaagcguuaaaugu

SEQ ID NO: 121397 - RNA, 19 nt, Artificial Sequence
  Description of Artificial Sequence: Synthetic oligonucleotide
  Antisense strand to SEQ ID NO: 121396
acauuuaacgcuuguuaau

SEQ ID NO: 121398 - RNA, 19 nt, Artificial Sequence
  Description of Artificial Sequence: Synthetic oligonucleotide
  Sense strand starting at position 586 of SEQ ID NO: 1546
aaggaaauauggcaagaca

SEQ ID NO: 121399 - RNA, 19 nt, Artificial Sequence
  Description of Artificial Sequence: Synthetic oligonucleotide
  Antisense strand to SEQ ID NO: 121398
ugucuugccauauuuccuu

SEQ ID NO: 121400 - RNA, 19 nt, Artificial Sequence
  Description of Artificial Sequence: Synthetic oligonucleotide
  Sense strand starting at position 573 of SEQ ID NO: 1546
agaaaugggucugaaggaa

SEQ ID NO: 121401 - RNA, 19 nt, Artificial Sequence
  Description of Artificial Sequence: Synthetic oligonucleotide
  Antisense strand to SEQ ID NO: 121400
uuccuucagacccauuucu

SEQ ID NO: 121402 - RNA, 19 nt, Artificial Sequence
  Description of Artificial Sequence: Synthetic oligonucleotide
  Sense strand starting at position 57 of SEQ ID NO: 1547
cuguaauuaucacugguga

SEQ ID NO: 121403 - RNA, 19 nt, Artificial Sequence
  Description of Artificial Sequence: Synthetic oligonucleotide
  Antisense strand to SEQ ID NO: 121402
ucaccagugauaauuacag

SEQ ID NO: 121404 - RNA, 19 nt, Artificial Sequence
  Description of Artificial Sequence: Synthetic oligonucleotide
  Sense strand starting at position 58 of SEQ ID NO: 1547
uguaauuaucacuggugaa

SEQ ID NO: 121405 - RNA, 19 nt, Artificial Sequence
  Description of Artificial Sequence: Synthetic oligonucleotide
  Antisense strand to SEQ ID NO: 121404
uucaccagugauaauuaca

SEQ ID NO: 121406 - RNA, 19 nt, Artificial Sequence
  Description of Artificial Sequence: Synthetic oligonucleotide
  Sense strand starting at position 149 of SEQ ID NO: 1547
agagguuaguggagaugga

SEQ ID NO: 121407 - RNA, 19 nt, Artificial Sequence
  Description of Artificial Sequence: Synthetic oligonucleotide
  Antisense strand to SEQ ID NO: 121406
uccaucuccacuaaccucu

SEQ ID NO: 121408 - RNA, 19 nt, Artificial Sequence
  Description of Artificial Sequence: Synthetic oligonucleotide
  Sense strand starting at position 509 of SEQ ID NO: 1547
accagucauuucccguuua

SEQ ID NO: 121409 - RNA, 19 nt, Artificial Sequence
  Description of Artificial Sequence: Synthetic oligonucleotide
  Antisense strand to SEQ ID NO: 121408
uaaacgggaaaugacuggu

SEQ ID NO: 121410 - RNA, 19 nt, Artificial Sequence
  Description of Artificial Sequence: Synthetic oligonucleotide
  Sense strand starting at position 551 of SEQ ID NO: 1547
uggauucuguguccuuaaa

SEQ ID NO: 121411 - RNA, 19 nt, Artificial Sequence
  Description of Artificial Sequence: Synthetic oligonucleotide
  Antisense strand to SEQ ID NO: 121410
uuuaaggacacagaaucca

SEQ ID NO: 121412 - RNA, 19 nt, Artificial Sequence
  Description of Artificial Sequence: Synthetic oligonucleotide
  Sense strand starting at position 572 of SEQ ID NO: 1547
cuaacagagugcuuagaac

SEQ ID NO: 121413 - RNA, 19 nt, Artificial Sequence
  Description of Artificial Sequence: Synthetic oligonucleotide
  Antisense strand to SEQ ID NO: 121412
guucuaagcacucuguuag

SEQ ID NO: 121414 - RNA, 19 nt, Artificial Sequence
  Description of Artificial Sequence: Synthetic oligonucleotide
  Sense strand starting at position 709 of SEQ ID NO: 1547
gguauccacucgguaaaug

SEQ ID NO: 121415 - RNA, 19 nt, Artificial Sequence
  Description of Artificial Sequence: Synthetic oligonucleotide
  Antisense strand to SEQ ID NO: 121414
cauuuaccgaguggauacc

SEQ ID NO: 121416 - RNA, 19 nt, Artificial Sequence
  Description of Artificial Sequence: Synthetic oligonucleotide
  Sense strand starting at position 765 of SEQ ID NO: 1547
gggauaucuggucauuccu

SEQ ID NO: 121417 - RNA, 19 nt, Artificial Sequence
  Description of Artificial Sequence: Synthetic oligonucleotide
  Antisense strand to SEQ ID NO: 121416
aggaaugaccagauauccc

SEQ ID NO: 121418 - RNA, 19 nt, Artificial Sequence
  Description of Artificial Sequence: Synthetic oligonucleotide
  Sense strand starting at position 838 of SEQ ID NO: 1547
cacuaagcuuggguaauau

SEQ ID NO: 121419 - RNA, 19 nt, Artificial Sequence
  Description of Artificial Sequence: Synthetic oligonucleotide
  Antisense strand to SEQ ID NO: 121418
auauuacccaagcuuagug

SEQ ID NO: 121420 - RNA, 19 nt, Artificial Sequence
  Description of Artificial Sequence: Synthetic oligonucleotide
  Sense strand starting at position 906 of SEQ ID NO: 1547
aaagguagacaucggcaaa

SEQ ID NO: 121421 - RNA, 19 nt, Artificial Sequence
  Description of Artificial Sequence: Synthetic oligonucleotide
  Antisense strand to SEQ ID NO: 121420
uuugccgaugucuaccuuu

SEQ ID NO: 121422 - RNA, 19 nt, Artificial Sequence
  Description of Artificial Sequence: Synthetic oligonucleotide
  Sense strand starting at position 1160 of SEQ ID NO: 1547
gugaauguacuguacagaa

SEQ ID NO: 121423 - RNA, 19 nt, Artificial Sequence
  Description of Artificial Sequence: Synthetic oligonucleotide
  Antisense strand to SEQ ID NO: 121422
uucuguacaguacauucac

SEQ ID NO: 121424 - RNA, 19 nt, Artificial Sequence
  Description of Artificial Sequence: Synthetic oligonucleotide
  Sense strand starting at position 1218 of SEQ ID NO: 1547
aaaugagagugagcguuua

SEQ ID NO: 121425 - RNA, 19 nt, Artificial Sequence
  Description of Artificial Sequence: Synthetic oligonucleotide
  Antisense strand to SEQ ID NO: 121424
uaaacgcucacucucauuu

SEQ ID NO: 121426 - RNA, 19 nt, Artificial Sequence
  Description of Artificial Sequence: Synthetic oligonucleotide
  Sense strand starting at position 1399 of SEQ ID NO: 1547
ggcgaacggcaguaauaaa

SEQ ID NO: 121427 - RNA, 19 nt, Artificial Sequence
  Description of Artificial Sequence: Synthetic oligonucleotide
  Antisense strand to SEQ ID NO: 121426
uuuauuacugccguucgcc

SEQ ID NO: 121428 - RNA, 19 nt, Artificial Sequence
  Description of Artificial Sequence: Synthetic oligonucleotide
  Sense strand starting at position 1490 of SEQ ID NO: 1547
acuuuauuucccgggcuuu

SEQ ID NO: 121429 - RNA, 19 nt, Artificial Sequence
  Description of Artificial Sequence: Synthetic oligonucleotide
  Antisense strand to SEQ ID NO: 121428
aaagcccgggaaauaaagu

SEQ ID NO: 121430 - RNA, 19 nt, Artificial Sequence
  Description of Artificial Sequence: Synthetic oligonucleotide
  Sense strand starting at position 1799 of SEQ ID NO: 1547
cucgauagagcuuauccga

SEQ ID NO: 121431 - RNA, 19 nt, Artificial Sequence
  Description of Artificial Sequence: Synthetic oligonucleotide
  Antisense strand to SEQ ID NO: 121430
ucggauaagcucuaucgag

SEQ ID NO: 121432 - RNA, 19 nt, Artificial Sequence
  Description of Artificial Sequence: Synthetic oligonucleotide
  Sense strand starting at position 1802 of SEQ ID NO: 1547
gauagagcuuauccgaaga

SEQ ID NO: 121433 - RNA, 19 nt, Artificial Sequence
  Description of Artificial Sequence: Synthetic oligonucleotide
  Antisense strand to SEQ ID NO: 121432
ucuucggauaagcucuauc

SEQ ID NO: 121434 - RNA, 19 nt, Artificial Sequence
  Description of Artificial Sequence: Synthetic oligonucleotide
  Sense strand starting at position 2153 of SEQ ID NO: 1547
cuaguagcucuuuggagga

SEQ ID NO: 121435 - RNA, 19 nt, Artificial Sequence
  Description of Artificial Sequence: Synthetic oligonucleotide
  Antisense strand to SEQ ID NO: 121434
uccuccaaagagcuacuag

SEQ ID NO: 121436 - RNA, 19 nt, Artificial Sequence
  Description of Artificial Sequence: Synthetic oligonucleotide
  Sense strand starting at position 2202 of SEQ ID NO: 1547
caggaagucuuacuugauu

SEQ ID NO: 121437 - RNA, 19 nt, Artificial Sequence
  Description of Artificial Sequence: Synthetic oligonucleotide
  Antisense strand to SEQ ID NO: 121436
aaucaaguaagacuuccug

SEQ ID NO: 121438 - RNA, 19 nt, Artificial Sequence
  Description of Artificial Sequence: Synthetic oligonucleotide
  Sense strand starting at position 2776 of SEQ ID NO: 1547
ugacuuugugggcaauagu

SEQ ID NO: 121439 - RNA, 19 nt, Artificial Sequence
  Description of Artificial Sequence: Synthetic oligonucleotide
  Antisense strand to SEQ ID NO: 121438
acuauugcccacaaaguca

SEQ ID NO: 121440 - RNA, 19 nt, Artificial Sequence
  Description of Artificial Sequence: Synthetic oligonucleotide
  Sense strand starting at position 2779 of SEQ ID NO: 1547
cuuugugggcaauagucau

SEQ ID NO: 121441 - RNA, 19 nt, Artificial Sequence
  Description of Artificial Sequence: Synthetic oligonucleotide
  Antisense strand to SEQ ID NO: 121440
augacuauugcccacaaag

SEQ ID NO: 121442 - RNA, 19 nt, Artificial Sequence
  Description of Artificial Sequence: Synthetic oligonucleotide
  Sense strand starting at position 2783 of SEQ ID NO: 1547
gugggcaauagucaucaca

SEQ ID NO: 121443 - RNA, 19 nt, Artificial Sequence
  Description of Artificial Sequence: Synthetic oligonucleotide
  Antisense strand to SEQ ID NO: 121442
ugugaugacuauugcccac

SEQ ID NO: 121444 - RNA, 19 nt, Artificial Sequence
  Description of Artificial Sequence: Synthetic oligonucleotide
  Sense strand starting at position 2785 of SEQ ID NO: 1547
gggcaauagucaucacaga

SEQ ID NO: 121445 - RNA, 19 nt, Artificial Sequence
  Description of Artificial Sequence: Synthetic oligonucleotide
  Antisense strand to SEQ ID NO: 121444
ucugugaugacuauugccc

SEQ ID NO: 121446 - RNA, 19 nt, Artificial Sequence
  Description of Artificial Sequence: Synthetic oligonucleotide
  Sense strand starting at position 2786 of SEQ ID NO: 1547
ggcaauagucaucacagac

SEQ ID NO: 121447 - RNA, 19 nt, Artificial Sequence
  Description of Artificial Sequence: Synthetic oligonucleotide
  Antisense strand to SEQ ID NO: 121446
gucugugaugacuauugcc

SEQ ID NO: 121448 - RNA, 19 nt, Artificial Sequence
  Description of Artificial Sequence: Synthetic oligonucleotide
  Sense strand starting at position 2821 of SEQ ID NO: 1547
acaguuguuggugauaacu

SEQ ID NO: 121449 - RNA, 19 nt, Artificial Sequence
  Description of Artificial Sequence: Synthetic oligonucleotide
  Antisense strand to SEQ ID NO: 121448
aguuaucaccaacaacugu

SEQ ID NO: 121450 - RNA, 19 nt, Artificial Sequence
  Description of Artificial Sequence: Synthetic oligonucleotide
  Sense strand starting at position 2838 of SEQ ID NO: 1547
cucgaaauauuauuaagcu

SEQ ID NO: 121451 - RNA, 19 nt, Artificial Sequence
  Description of Artificial Sequence: Synthetic oligonucleotide
  Antisense strand to SEQ ID NO: 121450
agcuuaauaauauuucgag

SEQ ID NO: 121452 - RNA, 19 nt, Artificial Sequence
  Description of Artificial Sequence: Synthetic oligonucleotide
  Sense strand starting at position 2854 of SEQ ID NO: 1547
gcucaucacuacucgaaau

SEQ ID NO: 121453 - RNA, 19 nt, Artificial Sequence
  Description of Artificial Sequence: Synthetic oligonucleotide
  Antisense strand to SEQ ID NO: 121452
auuucgaguagugaugagc

SEQ ID NO: 121454 - RNA, 19 nt, Artificial Sequence
  Description of Artificial Sequence: Synthetic oligonucleotide
  Sense strand starting at position 3163 of SEQ ID NO: 1547
acaugagugugcuuuauuu

SEQ ID NO: 121455 - RNA, 19 nt, Artificial Sequence
  Description of Artificial Sequence: Synthetic oligonucleotide
  Antisense strand to SEQ ID NO: 121454
aaauaaagcacacucaugu

SEQ ID NO: 121456 - RNA, 19 nt, Artificial Sequence
  Description of Artificial Sequence: Synthetic oligonucleotide
  Sense strand starting at position 3261 of SEQ ID NO: 1547
agaagcuaguggcuuaaga

SEQ ID NO: 121457 - RNA, 19 nt, Artificial Sequence
  Description of Artificial Sequence: Synthetic oligonucleotide
  Antisense strand to SEQ ID NO: 121456
ucuuaagccacuagcuucu

SEQ ID NO: 121458 - RNA, 19 nt, Artificial Sequence
  Description of Artificial Sequence: Synthetic oligonucleotide
  Sense strand starting at position 3263 of SEQ ID NO: 1547
aagcuaguggcuuaagaga

SEQ ID NO: 121459 - RNA, 19 nt, Artificial Sequence
  Description of Artificial Sequence: Synthetic oligonucleotide
  Antisense strand to SEQ ID NO: 121458
ucucuuaagccacuagcuu

SEQ ID NO: 121460 - RNA, 19 nt, Artificial Sequence
  Description of Artificial Sequence: Synthetic oligonucleotide
  Sense strand starting at position 3282 of SEQ ID NO: 1547
caaggauguugaguaagca

SEQ ID NO: 121461 - RNA, 19 nt, Artificial Sequence
  Description of Artificial Sequence: Synthetic oligonucleotide
  Antisense strand to SEQ ID NO: 121460
ugcuuacucaacauccuug

SEQ ID NO: 121462 - RNA, 19 nt, Artificial Sequence
  Description of Artificial Sequence: Synthetic oligonucleotide
  Sense strand starting at position 3286 of SEQ ID NO: 1547
gauguugaguaagcaagaa

SEQ ID NO: 121463 - RNA, 19 nt, Artificial Sequence
  Description of Artificial Sequence: Synthetic oligonucleotide
  Antisense strand to SEQ ID NO: 121462
uucuugcuuacucaacauc

SEQ ID NO: 121464 - RNA, 19 nt, Artificial Sequence
  Description of Artificial Sequence: Synthetic oligonucleotide
  Sense strand starting at position 3290 of SEQ ID NO: 1547
uugaguaagcaagaagguu

SEQ ID NO: 121465 - RNA, 19 nt, Artificial Sequence
  Description of Artificial Sequence: Synthetic oligonucleotide
  Antisense strand to SEQ ID NO: 121464
aaccuucuugcuuacucaa

SEQ ID NO: 121466 - RNA, 19 nt, Artificial Sequence
  Description of Artificial Sequence: Synthetic oligonucleotide
  Sense strand starting at position 3296 of SEQ ID NO: 1547
aagcaagaagguugugaga

SEQ ID NO: 121467 - RNA, 19 nt, Artificial Sequence
  Description of Artificial Sequence: Synthetic oligonucleotide
  Antisense strand to SEQ ID NO: 121466
ucucacaaccuucuugcuu

SEQ ID NO: 121468 - RNA, 19 nt, Artificial Sequence
  Description of Artificial Sequence: Synthetic oligonucleotide
  Sense strand starting at position 3341 of SEQ ID NO: 1547
accaguuagauacguugaa

SEQ ID NO: 121469 - RNA, 19 nt, Artificial Sequence
  Description of Artificial Sequence: Synthetic oligonucleotide
  Antisense strand to SEQ ID NO: 121468
uucaacguaucuaacuggu

SEQ ID NO: 121470 - RNA, 19 nt, Artificial Sequence
  Description of Artificial Sequence: Synthetic oligonucleotide
  Sense strand starting at position 3345 of SEQ ID NO: 1547
guuagauacguugaaggua

SEQ ID NO: 121471 - RNA, 19 nt, Artificial Sequence
  Description of Artificial Sequence: Synthetic oligonucleotide
  Antisense strand to SEQ ID NO: 121470
uaccuucaacguaucuaac

SEQ ID NO: 121472 - RNA, 19 nt, Artificial Sequence
  Description of Artificial Sequence: Synthetic oligonucleotide
  Sense strand starting at position 3778 of SEQ ID NO: 1547
uggccacucauuggugaua

SEQ ID NO: 121473 - RNA, 19 nt, Artificial Sequence
  Description of Artificial Sequence: Synthetic oligonucleotide
  Antisense strand to SEQ ID NO: 121472
uaucaccaaugaguggcca

SEQ ID NO: 121474 - RNA, 19 nt, Artificial Sequence
  Description of Artificial Sequence: Synthetic oligonucleotide
  Sense strand starting at position 3779 of SEQ ID NO: 1547
ggccacucauuggugauaa

SEQ ID NO: 121475 - RNA, 19 nt, Artificial Sequence
  Description of Artificial Sequence: Synthetic oligonucleotide
  Antisense strand to SEQ ID NO: 121474
uuaucaccaaugaguggcc

SEQ ID NO: 121476 - RNA, 19 nt, Artificial Sequence
  Description of Artificial Sequence: Synthetic oligonucleotide
  Sense strand starting at position 3794 of SEQ ID NO: 1547
auaagauuauggucccauc

SEQ ID NO: 121477 - RNA, 19 nt, Artificial Sequence
  Description of Artificial Sequence: Synthetic oligonucleotide
  Antisense strand to SEQ ID NO: 121476
gaugggaccauaaucuuau

SEQ ID NO: 121478 - RNA, 19 nt, Artificial Sequence
  Description of Artificial Sequence: Synthetic oligonucleotide
  Sense strand starting at position 3869 of SEQ ID NO: 1547
ggcugauuggugagcugca

SEQ ID NO: 121479 - RNA, 19 nt, Artificial Sequence
  Description of Artificial Sequence: Synthetic oligonucleotide
  Antisense strand to SEQ ID NO: 121478
ugcagcucaccaaucagcc

SEQ ID NO: 121480 - RNA, 19 nt, Artificial Sequence
  Description of Artificial Sequence: Synthetic oligonucleotide
  Sense strand starting at position 3979 of SEQ ID NO: 1547
caacucugucagugggaca

SEQ ID NO: 121481 - RNA, 19 nt, Artificial Sequence
  Description of Artificial Sequence: Synthetic oligonucleotide
  Antisense strand to SEQ ID NO: 121480
ugucccacugacagaguug

SEQ ID NO: 121482 - RNA, 19 nt, Artificial Sequence
  Description of Artificial Sequence: Synthetic oligonucleotide
  Sense strand starting at position 84 of SEQ ID NO: 1548
agacgacagcuaugucuau

SEQ ID NO: 121483 - RNA, 19 nt, Artificial Sequence
  Description of Artificial Sequence: Synthetic oligonucleotide
  Antisense strand to SEQ ID NO: 121482
auagacauagcugucgucu

SEQ ID NO: 121484 - RNA, 19 nt, Artificial Sequence
  Description of Artificial Sequence: Synthetic oligonucleotide
  Sense strand starting at position 318 of SEQ ID NO: 1548
auguucuaucaaugaauga

SEQ ID NO: 121485 - RNA, 19 nt, Artificial Sequence
  Description of Artificial Sequence: Synthetic oligonucleotide
  Antisense strand to SEQ ID NO: 121484
ucauucauugauagaacau

SEQ ID NO: 121486 - RNA, 19 nt, Artificial Sequence
  Description of Artificial Sequence: Synthetic oligonucleotide
  Sense strand starting at position 345 of SEQ ID NO: 1548
auucuugaacccugucagu

SEQ ID NO: 121487 - RNA, 19 nt, Artificial Sequence
  Description of Artificial Sequence: Synthetic oligonucleotide
  Antisense strand to SEQ ID NO: 121486
acugacaggguucaagaau

SEQ ID NO: 121488 - RNA, 19 nt, Artificial Sequence
  Description of Artificial Sequence: Synthetic oligonucleotide
  Sense strand starting at position 811 of SEQ ID NO: 1548
aggucagugucgauguuua

SEQ ID NO: 121489 - RNA, 19 nt, Artificial Sequence
  Description of Artificial Sequence: Synthetic oligonucleotide
  Antisense strand to SEQ ID NO: 121488
uaaacaucgacacugaccu

SEQ ID NO: 121490 - RNA, 19 nt, Artificial Sequence
  Description of Artificial Sequence: Synthetic oligonucleotide
  Sense strand starting at position 816 of SEQ ID NO: 1548
agugucgauguuuaacauu

SEQ ID NO: 121491 - RNA, 19 nt, Artificial Sequence
  Description of Artificial Sequence: Synthetic oligonucleotide
  Antisense strand to SEQ ID NO: 121490
aauguuaaacaucgacacu

SEQ ID NO: 121492 - RNA, 19 nt, Artificial Sequence
  Description of Artificial Sequence: Synthetic oligonucleotide
  Sense strand starting at position 894 of SEQ ID NO: 1548
ucgcauaaugccuacuauu

SEQ ID NO: 121493 - RNA, 19 nt, Artificial Sequence
  Description of Artificial Sequence: Synthetic oligonucleotide
  Antisense strand to SEQ ID NO: 121492
aauaguaggcauuaugcga

SEQ ID NO: 121494 - RNA, 19 nt, Artificial Sequence
  Description of Artificial Sequence: Synthetic oligonucleotide
  Sense strand starting at position 915 of SEQ ID NO: 1548
ggcuauuauuaucuguuga

SEQ ID NO: 121495 - RNA, 19 nt, Artificial Sequence
  Description of Artificial Sequence: Synthetic oligonucleotide
  Antisense strand to SEQ ID NO: 121494
ucaacagauaauaauagcc

SEQ ID NO: 121496 - RNA, 19 nt, Artificial Sequence
  Description of Artificial Sequence: Synthetic oligonucleotide
  Sense strand starting at position 917 of SEQ ID NO: 1548
cuauuauuaucuguugauc

SEQ ID NO: 121497 - RNA, 19 nt, Artificial Sequence
  Description of Artificial Sequence: Synthetic oligonucleotide
  Antisense strand to SEQ ID NO: 121496
gaucaacagauaauaauag

SEQ ID NO: 121498 - RNA, 19 nt, Artificial Sequence
  Description of Artificial Sequence: Synthetic oligonucleotide
  Sense strand starting at position 1144 of SEQ ID NO: 1548
gcaaacagccucugagaca

SEQ ID NO: 121499 - RNA, 19 nt, Artificial Sequence
  Description of Artificial Sequence: Synthetic oligonucleotide
  Antisense strand to SEQ ID NO: 121498
ugucucagaggcuguuugc

SEQ ID NO: 121500 - RNA, 19 nt, Artificial Sequence
  Description of Artificial Sequence: Synthetic oligonucleotide
  Sense strand starting at position 1474 of SEQ ID NO: 1548
cgaacugugcuacauuaaa

SEQ ID NO: 121501 - RNA, 19 nt, Artificial Sequence
  Description of Artificial Sequence: Synthetic oligonucleotide
  Antisense strand to SEQ ID NO: 121500
uuuaauguagcacaguucg

SEQ ID NO: 121502 - RNA, 19 nt, Artificial Sequence
  Description of Artificial Sequence: Synthetic oligonucleotide
  Sense strand starting at position 1839 of SEQ ID NO: 1548
ccgcgugcucgcuucauuu

SEQ ID NO: 121503 - RNA, 19 nt, Artificial Sequence
  Description of Artificial Sequence: Synthetic oligonucleotide
  Antisense strand to SEQ ID NO: 121502
aaaugaagcgagcacgcgg

SEQ ID NO: 121504 - RNA, 19 nt, Artificial Sequence
  Description of Artificial Sequence: Synthetic oligonucleotide
  Sense strand starting at position 2098 of SEQ ID NO: 1548
ccggaaguguagccaaaga

SEQ ID NO: 121505 - RNA, 19 nt, Artificial Sequence
  Description of Artificial Sequence: Synthetic oligonucleotide
  Antisense strand to SEQ ID NO: 121504
ucuuuggcuacacuuccgg

SEQ ID NO: 121506 - RNA, 19 nt, Artificial Sequence
  Description of Artificial Sequence: Synthetic oligonucleotide
  Sense strand starting at position 2153 of SEQ ID NO: 1548
cagggcagccuugaguaaa

SEQ ID NO: 121507 - RNA, 19 nt, Artificial Sequence
  Description of Artificial Sequence: Synthetic oligonucleotide
  Antisense strand to SEQ ID NO: 121506
uuuacucaaggcugcccug

SEQ ID NO: 121508 - RNA, 19 nt, Artificial Sequence
  Description of Artificial Sequence: Synthetic oligonucleotide
  Sense strand starting at position 2156 of SEQ ID NO: 1548
ggcagccuugaguaaauca

SEQ ID NO: 121509 - RNA, 19 nt, Artificial Sequence
  Description of Artificial Sequence: Synthetic oligonucleotide
  Antisense strand to SEQ ID NO: 121508
ugauuuacucaaggcugcc

SEQ ID NO: 121510 - RNA, 19 nt, Artificial Sequence
  Description of Artificial Sequence: Synthetic oligonucleotide
  Sense strand starting at position 2207 of SEQ ID NO: 1548
gguauaacucuaugaugac

SEQ ID NO: 121511 - RNA, 19 nt, Artificial Sequence
  Description of Artificial Sequence: Synthetic oligonucleotide
  Antisense strand to SEQ ID NO: 121510
gucaucauagaguuauacc

SEQ ID NO: 121512 - RNA, 19 nt, Artificial Sequence
  Description of Artificial Sequence: Synthetic oligonucleotide
  Sense strand starting at position 2291 of SEQ ID NO: 1548
caguguaaccaugacgaca

SEQ ID NO: 121513 - RNA, 19 nt, Artificial Sequence
  Description of Artificial Sequence: Synthetic oligonucleotide
  Antisense strand to SEQ ID NO: 121512
ugucgucaugguuacacug

SEQ ID NO: 121514 - RNA, 19 nt, Artificial Sequence
  Description of Artificial Sequence: Synthetic oligonucleotide
  Sense strand starting at position 2378 of SEQ ID NO: 1548
ugugaaacaguuugagaaa

SEQ ID NO: 121515 - RNA, 19 nt, Artificial Sequence
  Description of Artificial Sequence: Synthetic oligonucleotide
  Antisense strand to SEQ ID NO: 121514
uuucucaaacuguuucaca

SEQ ID NO: 121516 - RNA, 19 nt, Artificial Sequence
  Description of Artificial Sequence: Synthetic oligonucleotide
  Sense strand starting at position 2381 of SEQ ID NO: 1548
gaaacaguuugagaaagac

SEQ ID NO: 121517 - RNA, 19 nt, Artificial Sequence
  Description of Artificial Sequence: Synthetic oligonucleotide
  Antisense strand to SEQ ID NO: 121516
gucuuucucaaacuguuuc

SEQ ID NO: 121518 - RNA, 19 nt, Artificial Sequence
  Description of Artificial Sequence: Synthetic oligonucleotide
  Sense strand starting at position 2416 of SEQ ID NO: 1548
ccaagacagucuuuaagac

SEQ ID NO: 121519 - RNA, 19 nt, Artificial Sequence
  Description of Artificial Sequence: Synthetic oligonucleotide
  Antisense strand to SEQ ID NO: 121518
gucuuaaagacugucuugg

SEQ ID NO: 121520 - RNA, 19 nt, Artificial Sequence
  Description of Artificial Sequence: Synthetic oligonucleotide
  Sense strand starting at position 2555 of SEQ ID NO: 1548
gcuuguguucuagagagga

SEQ ID NO: 121521 - RNA, 19 nt, Artificial Sequence
  Description of Artificial Sequence: Synthetic oligonucleotide
  Antisense strand to SEQ ID NO: 121520
uccucucuagaacacaagc

SEQ ID NO: 121522 - RNA, 19 nt, Artificial Sequence
  Description of Artificial Sequence: Synthetic oligonucleotide
  Sense strand starting at position 2557 of SEQ ID NO: 1548
uuguguucuagagaggaca

SEQ ID NO: 121523 - RNA, 19 nt, Artificial Sequence
  Description of Artificial Sequence: Synthetic oligonucleotide
  Antisense strand to SEQ ID NO: 121522
uguccucucuagaacacaa

SEQ ID NO: 121524 - RNA, 19 nt, Artificial Sequence
  Description of Artificial Sequence: Synthetic oligonucleotide
  Sense strand starting at position 2559 of SEQ ID NO: 1548
guguucuagagaggacaca

SEQ ID NO: 121525 - RNA, 19 nt, Artificial Sequence
  Description of Artificial Sequence: Synthetic oligonucleotide
  Antisense strand to SEQ ID NO: 121524
uguguccucucuagaacac

SEQ ID NO: 121526 - RNA, 19 nt, Artificial Sequence
  Description of Artificial Sequence: Synthetic oligonucleotide
  Sense strand starting at position 2726 of SEQ ID NO: 1548
aagaaucugucagucagau

SEQ ID NO: 121527 - RNA, 19 nt, Artificial Sequence
  Description of Artificial Sequence: Synthetic oligonucleotide
  Antisense strand to SEQ ID NO: 121526
aucugacugacagauucuu

SEQ ID NO: 121528 - RNA, 19 nt, Artificial Sequence
  Description of Artificial Sequence: Synthetic oligonucleotide
  Sense strand starting at position 2732 of SEQ ID NO: 1548
cugucagucagauggugau

SEQ ID NO: 121529 - RNA, 19 nt, Artificial Sequence
  Description of Artificial Sequence: Synthetic oligonucleotide
  Antisense strand to SEQ ID NO: 121528
aucaccaucugacugacag

SEQ ID NO: 121530 - RNA, 19 nt, Artificial Sequence
  Description of Artificial Sequence: Synthetic oligonucleotide
  Sense strand starting at position 2742 of SEQ ID NO: 1548
gauggugauaagggcuaua

SEQ ID NO: 121531 - RNA, 19 nt, Artificial Sequence
  Description of Artificial Sequence: Synthetic oligonucleotide
  Antisense strand to SEQ ID NO: 121530
uauagcccuuaucaccauc

SEQ ID NO: 121532 - RNA, 19 nt, Artificial Sequence
  Description of Artificial Sequence: Synthetic oligonucleotide
  Sense strand starting at position 2795 of SEQ ID NO: 1548
aguuaaguguuugcaauuu

SEQ ID NO: 121533 - RNA, 19 nt, Artificial Sequence
  Description of Artificial Sequence: Synthetic oligonucleotide
  Antisense strand to SEQ ID NO: 121532
aaauugcaaacacuuaacu

SEQ ID NO: 121534 - RNA, 19 nt, Artificial Sequence
  Description of Artificial Sequence: Synthetic oligonucleotide
  Sense strand starting at position 3109 of SEQ ID NO: 1548
agccaaguguuugcaauuu

SEQ ID NO: 121535 - RNA, 19 nt, Artificial Sequence
  Description of Artificial Sequence: Synthetic oligonucleotide
  Antisense strand to SEQ ID NO: 121534
aaauugcaaacacuuggcu

SEQ ID NO: 121536 - RNA, 19 nt, Artificial Sequence
  Description of Artificial Sequence: Synthetic oligonucleotide
  Sense strand starting at position 3261 of SEQ ID NO: 1548
gugggaacugcauguuaua

SEQ ID NO: 121537 - RNA, 19 nt, Artificial Sequence
  Description of Artificial Sequence: Synthetic oligonucleotide
  Antisense strand to SEQ ID NO: 121536
uauaacaugcaguucccac

SEQ ID NO: 121538 - RNA, 19 nt, Artificial Sequence
  Description of Artificial Sequence: Synthetic oligonucleotide
  Sense strand starting at position 3301 of SEQ ID NO: 1548
acaguuauugaaugccuaa

SEQ ID NO: 121539 - RNA, 19 nt, Artificial Sequence
  Description of Artificial Sequence: Synthetic oligonucleotide
  Antisense strand to SEQ ID NO: 121538
uuaggcauucaauaacugu

SEQ ID NO: 121540 - RNA, 19 nt, Artificial Sequence
  Description of Artificial Sequence: Synthetic oligonucleotide
  Sense strand starting at position 3335 of SEQ ID NO: 1548
augcaagacacuggugauu

SEQ ID NO: 121541 - RNA, 19 nt, Artificial Sequence
  Description of Artificial Sequence: Synthetic oligonucleotide
  Antisense strand to SEQ ID NO: 121540
aaucaccagugucuugcau

SEQ ID NO: 121542 - RNA, 19 nt, Artificial Sequence
  Description of Artificial Sequence: Synthetic oligonucleotide
  Sense strand starting at position 3369 of SEQ ID NO: 1548
agaagcucucaguacgaca

SEQ ID NO: 121543 - RNA, 19 nt, Artificial Sequence
  Description of Artificial Sequence: Synthetic oligonucleotide
  Antisense strand to SEQ ID NO: 121542
ugucguacugagagcuucu

SEQ ID NO: 121544 - RNA, 19 nt, Artificial Sequence
  Description of Artificial Sequence: Synthetic oligonucleotide
  Sense strand starting at position 3397 of SEQ ID NO: 1548
aggaacaacuccgugugau

SEQ ID NO: 121545 - RNA, 19 nt, Artificial Sequence
  Description of Artificial Sequence: Synthetic oligonucleotide
  Antisense strand to SEQ ID NO: 121544
aucacacggaguuguuccu

SEQ ID NO: 121546 - RNA, 19 nt, Artificial Sequence
  Description of Artificial Sequence: Synthetic oligonucleotide
  Sense strand starting at position 3398 of SEQ ID NO: 1548
ggaacaacuccgugugauc

SEQ ID NO: 121547 - RNA, 19 nt, Artificial Sequence
  Description of Artificial Sequence: Synthetic oligonucleotide
  Antisense strand to SEQ ID NO: 121546
gaucacacggaguuguucc

SEQ ID NO: 121548 - RNA, 19 nt, Artificial Sequence
  Description of Artificial Sequence: Synthetic oligonucleotide
  Sense strand starting at position 3467 of SEQ ID NO: 1548
ggcuucacugaggagguua

SEQ ID NO: 121549 - RNA, 19 nt, Artificial Sequence
  Description of Artificial Sequence: Synthetic oligonucleotide
  Antisense strand to SEQ ID NO: 121548
uaaccuccucagugaagcc

SEQ ID NO: 121550 - RNA, 19 nt, Artificial Sequence
  Description of Artificial Sequence: Synthetic oligonucleotide
  Sense strand starting at position 3478 of SEQ ID NO: 1548
ggagguuaccuuugagcug

SEQ ID NO: 121551 - RNA, 19 nt, Artificial Sequence
  Description of Artificial Sequence: Synthetic oligonucleotide
  Antisense strand to SEQ ID NO: 121550
cagcucaaagguaaccucc

SEQ ID NO: 121552 - RNA, 19 nt, Artificial Sequence
  Description of Artificial Sequence: Synthetic oligonucleotide
  Sense strand starting at position 3527 of SEQ ID NO: 1548
caagaauggcagugggagu

SEQ ID NO: 121553 - RNA, 19 nt, Artificial Sequence
  Description of Artificial Sequence: Synthetic oligonucleotide
  Antisense strand to SEQ ID NO: 121552
acucccacugccauucuug

SEQ ID NO: 121554 - RNA, 19 nt, Artificial Sequence
  Description of Artificial Sequence: Synthetic oligonucleotide
  Sense strand starting at position 3717 of SEQ ID NO: 1548
gcauuagagucauuauaug

SEQ ID NO: 121555 - RNA, 19 nt, Artificial Sequence
  Description of Artificial Sequence: Synthetic oligonucleotide
  Antisense strand to SEQ ID NO: 121554
cauauaaugacucuaaugc

SEQ ID NO: 121556 - RNA, 19 nt, Artificial Sequence
  Description of Artificial Sequence: Synthetic oligonucleotide
  Sense strand starting at position 3769 of SEQ ID NO: 1548
uugugcagacauuauuauu

SEQ ID NO: 121557 - RNA, 19 nt, Artificial Sequence
  Description of Artificial Sequence: Synthetic oligonucleotide
  Antisense strand to SEQ ID NO: 121556
aauaauaaugucugcacaa

SEQ ID NO: 121558 - RNA, 19 nt, Artificial Sequence
  Description of Artificial Sequence: Synthetic oligonucleotide
  Sense strand starting at position 3894 of SEQ ID NO: 1548
uuauuauccuggucuuaca

SEQ ID NO: 121559 - RNA, 19 nt, Artificial Sequence
  Description of Artificial Sequence: Synthetic oligonucleotide
  Antisense strand to SEQ ID NO: 121558
uguaagaccaggauaauaa

SEQ ID NO: 121560 - RNA, 19 nt, Artificial Sequence
  Description of Artificial Sequence: Synthetic oligonucleotide
  Sense strand starting at position 3903 of SEQ ID NO: 1548
uggucuuacaguugaagaa

SEQ ID NO: 121561 - RNA, 19 nt, Artificial Sequence
  Description of Artificial Sequence: Synthetic oligonucleotide
  Antisense strand to SEQ ID NO: 121560
uucuucaacuguaagacca

SEQ ID NO: 121562 - RNA, 19 nt, Artificial Sequence
  Description of Artificial Sequence: Synthetic oligonucleotide
  Sense strand starting at position 3948 of SEQ ID NO: 1549
gugugcuugcgugugaaua

SEQ ID NO: 121563 - RNA, 19 nt, Artificial Sequence
  Description of Artificial Sequence: Synthetic oligonucleotide
  Antisense strand to SEQ ID NO: 121562
uauucacacgcaagcacac

SEQ ID NO: 121564 - RNA, 19 nt, Artificial Sequence
  Description of Artificial Sequence: Synthetic oligonucleotide
  Sense strand starting at position 3916 of SEQ ID NO: 1549
gcacuucuucccuguauuu

SEQ ID NO: 121565 - RNA, 19 nt, Artificial Sequence
  Description of Artificial Sequence: Synthetic oligonucleotide
  Antisense strand to SEQ ID NO: 121564
aaauacagggaagaagugc

SEQ ID NO: 121566 - RNA, 19 nt, Artificial Sequence
  Description of Artificial Sequence: Synthetic oligonucleotide
  Sense strand starting at position 3892 of SEQ ID NO: 1549
guccucugccuggaagguu

SEQ ID NO: 121567 - RNA, 19 nt, Artificial Sequence
  Description of Artificial Sequence: Synthetic oligonucleotide
  Antisense strand to SEQ ID NO: 121566
aaccuuccaggcagaggac

SEQ ID NO: 121568 - RNA, 19 nt, Artificial Sequence
  Description of Artificial Sequence: Synthetic oligonucleotide
  Sense strand starting at position 3796 of SEQ ID NO: 1549
guauuuguaucauauacac

SEQ ID NO: 121569 - RNA, 19 nt, Artificial Sequence
  Description of Artificial Sequence: Synthetic oligonucleotide
  Antisense strand to SEQ ID NO: 121568
guguauaugauacaaauac

SEQ ID NO: 121570 - RNA, 19 nt, Artificial Sequence
  Description of Artificial Sequence: Synthetic oligonucleotide
  Sense strand starting at position 3773 of SEQ ID NO: 1549
auucucuguguguauauau

SEQ ID NO: 121571 - RNA, 19 nt, Artificial Sequence
  Description of Artificial Sequence: Synthetic oligonucleotide
  Antisense strand to SEQ ID NO: 121570
auauauacacacagagaau

SEQ ID NO: 121572 - RNA, 19 nt, Artificial Sequence
  Description of Artificial Sequence: Synthetic oligonucleotide
  Sense strand starting at position 3772 of SEQ ID NO: 1549
uauucucuguguguauaua

SEQ ID NO: 121573 - RNA, 19 nt, Artificial Sequence
  Description of Artificial Sequence: Synthetic oligonucleotide
  Antisense strand to SEQ ID NO: 121572
uauauacacacagagaaua

SEQ ID NO: 121574 - RNA, 19 nt, Artificial Sequence
  Description of Artificial Sequence: Synthetic oligonucleotide
  Sense strand starting at position 3771 of SEQ ID NO: 1549
auauucucuguguguauau

SEQ ID NO: 121575 - RNA, 19 nt, Artificial Sequence
  Description of Artificial Sequence: Synthetic oligonucleotide
  Antisense strand to SEQ ID NO: 121574
auauacacacagagaauau

SEQ ID NO: 121576 - RNA, 19 nt, Artificial Sequence
  Description of Artificial Sequence: Synthetic oligonucleotide
  Sense strand starting at position 3768 of SEQ ID NO: 1549
uauauauucucugugugua

SEQ ID NO: 121577 - RNA, 19 nt, Artificial Sequence
  Description of Artificial Sequence: Synthetic oligonucleotide
  Antisense strand to SEQ ID NO: 121576
uacacacagagaauauaua

SEQ ID NO: 121578 - RNA, 19 nt, Artificial Sequence
  Description of Artificial Sequence: Synthetic oligonucleotide
  Sense strand starting at position 3753 of SEQ ID NO: 1549
accuccauagguggauaua

SEQ ID NO: 121579 - RNA, 19 nt, Artificial Sequence
  Description of Artificial Sequence: Synthetic oligonucleotide
  Antisense strand to SEQ ID NO: 121578
uauauccaccuauggaggu

SEQ ID NO: 121580 - RNA, 19 nt, Artificial Sequence
  Description of Artificial Sequence: Synthetic oligonucleotide
  Sense strand starting at position 3746 of SEQ ID NO: 1549
ugcuuugaccuccauaggu

SEQ ID NO: 121581 - RNA, 19 nt, Artificial Sequence
  Description of Artificial Sequence: Synthetic oligonucleotide
  Antisense strand to SEQ ID NO: 121580
accuauggaggucaaagca

SEQ ID NO: 121582 - RNA, 19 nt, Artificial Sequence
  Description of Artificial Sequence: Synthetic oligonucleotide
  Sense strand starting at position 3651 of SEQ ID NO: 1549
gggagagauugggagauca

SEQ ID NO: 121583 - RNA, 19 nt, Artificial Sequence
  Description of Artificial Sequence: Synthetic oligonucleotide
  Antisense strand to SEQ ID NO: 121582
ugaucucccaaucucuccc

SEQ ID NO: 121584 - RNA, 19 nt, Artificial Sequence
  Description of Artificial Sequence: Synthetic oligonucleotide
  Sense strand starting at position 3557 of SEQ ID NO: 1549
cucucuaacugagaagaca

SEQ ID NO: 121585 - RNA, 19 nt, Artificial Sequence
  Description of Artificial Sequence: Synthetic oligonucleotide
  Antisense strand to SEQ ID NO: 121584
ugucuucucaguuagagag

SEQ ID NO: 121586 - RNA, 19 nt, Artificial Sequence
  Description of Artificial Sequence: Synthetic oligonucleotide
  Sense strand starting at position 3005 of SEQ ID NO: 1549
gagggagcccgucaagacu

SEQ ID NO: 121587 - RNA, 19 nt, Artificial Sequence
  Description of Artificial Sequence: Synthetic oligonucleotide
  Antisense strand to SEQ ID NO: 121586
agucuugacgggcucccuc

SEQ ID NO: 121588 - RNA, 19 nt, Artificial Sequence
  Description of Artificial Sequence: Synthetic oligonucleotide
  Sense strand starting at position 2980 of SEQ ID NO: 1549
gcccaaagaggugggaaau

SEQ ID NO: 121589 - RNA, 19 nt, Artificial Sequence
  Description of Artificial Sequence: Synthetic oligonucleotide
  Antisense strand to SEQ ID NO: 121588
auuucccaccucuuugggc

SEQ ID NO: 121590 - RNA, 19 nt, Artificial Sequence
  Description of Artificial Sequence: Synthetic oligonucleotide
  Sense strand starting at position 2931 of SEQ ID NO: 1549
gcagguaguuggguuuaca

SEQ ID NO: 121591 - RNA, 19 nt, Artificial Sequence
  Description of Artificial Sequence: Synthetic oligonucleotide
  Antisense strand to SEQ ID NO: 121590
uguaaacccaacuaccugc

SEQ ID NO: 121592 - RNA, 19 nt, Artificial Sequence
  Description of Artificial Sequence: Synthetic oligonucleotide
  Sense strand starting at position 2639 of SEQ ID NO: 1549
cucugaaauuccuccagug

SEQ ID NO: 121593 - RNA, 19 nt, Artificial Sequence
  Description of Artificial Sequence: Synthetic oligonucleotide
  Antisense strand to SEQ ID NO: 121592
cacuggaggaauuucagag

SEQ ID NO: 121594 - RNA, 19 nt, Artificial Sequence
  Description of Artificial Sequence: Synthetic oligonucleotide
  Sense strand starting at position 2447 of SEQ ID NO: 1549
agugccuuccuuugaugaa

SEQ ID NO: 121595 - RNA, 19 nt, Artificial Sequence
  Description of Artificial Sequence: Synthetic oligonucleotide
  Antisense strand to SEQ ID NO: 121594
uucaucaaaggaaggcacu

SEQ ID NO: 121596 - RNA, 19 nt, Artificial Sequence
  Description of Artificial Sequence: Synthetic oligonucleotide
  Sense strand starting at position 2297 of SEQ ID NO: 1549
agaaaucgccaacgaauau

SEQ ID NO: 121597 - RNA, 19 nt, Artificial Sequence
  Description of Artificial Sequence: Synthetic oligonucleotide
  Antisense strand to SEQ ID NO: 121596
auauucguuggcgauuucu

SEQ ID NO: 121598 - RNA, 19 nt, Artificial Sequence
  Description of Artificial Sequence: Synthetic oligonucleotide
  Sense strand starting at position 2215 of SEQ ID NO: 1549
aucugauagguucggacuu

SEQ ID NO: 121599 - RNA, 19 nt, Artificial Sequence
  Description of Artificial Sequence: Synthetic oligonucleotide
  Antisense strand to SEQ ID NO: 121598
aaguccgaaccuaucagau

SEQ ID NO: 121600 - RNA, 19 nt, Artificial Sequence
  Description of Artificial Sequence: Synthetic oligonucleotide
  Sense strand starting at position 2130 of SEQ ID NO: 1549
gugaucagcuggguaaguu

SEQ ID NO: 121601 - RNA, 19 nt, Artificial Sequence
  Description of Artificial Sequence: Synthetic oligonucleotide
  Antisense strand to SEQ ID NO: 121600
aacuuacccagcugaucac

SEQ ID NO: 121602 - RNA, 19 nt, Artificial Sequence
  Description of Artificial Sequence: Synthetic oligonucleotide
  Sense strand starting at position 2129 of SEQ ID NO: 1549
agugaucagcuggguaagu

SEQ ID NO: 121603 - RNA, 19 nt, Artificial Sequence
  Description of Artificial Sequence: Synthetic oligonucleotide
  Antisense strand to SEQ ID NO: 121602
acuuacccagcugaucacu

SEQ ID NO: 121604 - RNA, 19 nt, Artificial Sequence
  Description of Artificial Sequence: Synthetic oligonucleotide
  Sense strand starting at position 2128 of SEQ ID NO: 1549
gagugaucagcuggguaag

SEQ ID NO: 121605 - RNA, 19 nt, Artificial Sequence
  Description of Artificial Sequence: Synthetic oligonucleotide
  Antisense strand to SEQ ID NO: 121604
cuuacccagcugaucacuc

SEQ ID NO: 121606 - RNA, 19 nt, Artificial Sequence
  Description of Artificial Sequence: Synthetic oligonucleotide
  Sense strand starting at position 1203 of SEQ ID NO: 1549
acgggaucccucugcuauc

SEQ ID NO: 121607 - RNA, 19 nt, Artificial Sequence
  Description of Artificial Sequence: Synthetic oligonucleotide
  Antisense strand to SEQ ID NO: 121606
gauagcagagggaucccgu

SEQ ID NO: 121608 - RNA, 19 nt, Artificial Sequence
  Description of Artificial Sequence: Synthetic oligonucleotide
  Sense strand starting at position 1032 of SEQ ID NO: 1549
gauauuuacuaggagucca

SEQ ID NO: 121609 - RNA, 19 nt, Artificial Sequence
  Description of Artificial Sequence: Synthetic oligonucleotide
  Antisense strand to SEQ ID NO: 121608
uggacuccuaguaaauauc

SEQ ID NO: 121610 - RNA, 19 nt, Artificial Sequence
  Description of Artificial Sequence: Synthetic oligonucleotide
  Sense strand starting at position 1029 of SEQ ID NO: 1549
ccugauauuuacuaggagu

SEQ ID NO: 121611 - RNA, 19 nt, Artificial Sequence
  Description of Artificial Sequence: Synthetic oligonucleotide
  Antisense strand to SEQ ID NO: 121610
acuccuaguaaauaucagg

SEQ ID NO: 121612 - RNA, 19 nt, Artificial Sequence
  Description of Artificial Sequence: Synthetic oligonucleotide
  Sense strand starting at position 983 of SEQ ID NO: 1549
ggaagaagugucuggaaau

SEQ ID NO: 121613 - RNA, 19 nt, Artificial Sequence
  Description of Artificial Sequence: Synthetic oligonucleotide
  Antisense strand to SEQ ID NO: 121612
auuuccagacacuucuucc

SEQ ID NO: 121614 - RNA, 19 nt, Artificial Sequence
  Description of Artificial Sequence: Synthetic oligonucleotide
  Sense strand starting at position 865 of SEQ ID NO: 1549
caugguaggugguucgaaa

SEQ ID NO: 121615 - RNA, 19 nt, Artificial Sequence
  Description of Artificial Sequence: Synthetic oligonucleotide
  Antisense strand to SEQ ID NO: 121614
uuucgaaccaccuaccaug

SEQ ID NO: 121616 - RNA, 19 nt, Artificial Sequence
  Description of Artificial Sequence: Synthetic oligonucleotide
  Sense strand starting at position 841 of SEQ ID NO: 1549
aguugaggcauauaaagua

SEQ ID NO: 121617 - RNA, 19 nt, Artificial Sequence
  Description of Artificial Sequence: Synthetic oligonucleotide
  Antisense strand to SEQ ID NO: 121616
uacuuuauaugccucaacu

SEQ ID NO: 121618 - RNA, 19 nt, Artificial Sequence
  Description of Artificial Sequence: Synthetic oligonucleotide
  Sense strand starting at position 839 of SEQ ID NO: 1549
guaguugaggcauauaaag

SEQ ID NO: 121619 - RNA, 19 nt, Artificial Sequence
  Description of Artificial Sequence: Synthetic oligonucleotide
  Antisense strand to SEQ ID NO: 121618
cuuuauaugccucaacuac

SEQ ID NO: 121620 - RNA, 19 nt, Artificial Sequence
  Description of Artificial Sequence: Synthetic oligonucleotide
  Sense strand starting at position 688 of SEQ ID NO: 1549
gguucucucccgggagauu

SEQ ID NO: 121621 - RNA, 19 nt, Artificial Sequence
  Description of Artificial Sequence: Synthetic oligonucleotide
  Antisense strand to SEQ ID NO: 121620
aaucucccgggagagaacc

SEQ ID NO: 121622 - RNA, 19 nt, Artificial Sequence
  Description of Artificial Sequence: Synthetic oligonucleotide
  Sense strand starting at position 687 of SEQ ID NO: 1549
agguucucucccgggagau

SEQ ID NO: 121623 - RNA, 19 nt, Artificial Sequence
  Description of Artificial Sequence: Synthetic oligonucleotide
  Antisense strand to SEQ ID NO: 121622
aucucccgggagagaaccu

SEQ ID NO: 121624 - RNA, 19 nt, Artificial Sequence
  Description of Artificial Sequence: Synthetic oligonucleotide
  Sense strand starting at position 448 of SEQ ID NO: 1549
ggccuuccauuaguuuaaa

SEQ ID NO: 121625 - RNA, 19 nt, Artificial Sequence
  Description of Artificial Sequence: Synthetic oligonucleotide
  Antisense strand to SEQ ID NO: 121624
uuuaaacuaauggaaggcc

SEQ ID NO: 121626 - RNA, 19 nt, Artificial Sequence
  Description of Artificial Sequence: Synthetic oligonucleotide
  Sense strand starting at position 446 of SEQ ID NO: 1549
gaggccuuccauuaguuua

SEQ ID NO: 121627 - RNA, 19 nt, Artificial Sequence
  Description of Artificial Sequence: Synthetic oligonucleotide
  Antisense strand to SEQ ID NO: 121626
uaaacuaauggaaggccuc

SEQ ID NO: 121628 - RNA, 19 nt, Artificial Sequence
  Description of Artificial Sequence: Synthetic oligonucleotide
  Sense strand starting at position 420 of SEQ ID NO: 1549
gccaaaugaucccucagug

SEQ ID NO: 121629 - RNA, 19 nt, Artificial Sequence
  Description of Artificial Sequence: Synthetic oligonucleotide
  Antisense strand to SEQ ID NO: 121628
cacugagggaucauuuggc

SEQ ID NO: 121630 - RNA, 19 nt, Artificial Sequence
  Description of Artificial Sequence: Synthetic oligonucleotide
  Sense strand starting at position 376 of SEQ ID NO: 1549
ucuaaugacuucucuguga

SEQ ID NO: 121631 - RNA, 19 nt, Artificial Sequence
  Description of Artificial Sequence: Synthetic oligonucleotide
  Antisense strand to SEQ ID NO: 121630
ucacagagaagucauuaga

SEQ ID NO: 121632 - RNA, 19 nt, Artificial Sequence
  Description of Artificial Sequence: Synthetic oligonucleotide
  Sense strand starting at position 102 of SEQ ID NO: 1549
uugcauucgcuacaggaga

SEQ ID NO: 121633 - RNA, 19 nt, Artificial Sequence
  Description of Artificial Sequence: Synthetic oligonucleotide
  Antisense strand to SEQ ID NO: 121632
ucuccuguagcgaaugcaa

SEQ ID NO: 121634 - RNA, 19 nt, Artificial Sequence
  Description of Artificial Sequence: Synthetic oligonucleotide
  Sense strand starting at position 54 of SEQ ID NO: 1549
ggcaaauauuguucuaauc

SEQ ID NO: 121635 - RNA, 19 nt, Artificial Sequence
  Description of Artificial Sequence: Synthetic oligonucleotide
  Antisense strand to SEQ ID NO: 121634
gauuagaacaauauuugcc

SEQ ID NO: 121636 - RNA, 19 nt, Artificial Sequence
  Description of Artificial Sequence: Synthetic oligonucleotide
  Sense strand starting at position 53 of SEQ ID NO: 1549
gggcaaauauuguucuaau

SEQ ID NO: 121637 - RNA, 19 nt, Artificial Sequence
  Description of Artificial Sequence: Synthetic oligonucleotide
  Antisense strand to SEQ ID NO: 121636
auuagaacaauauuugccc

SEQ ID NO: 121638 - RNA, 19 nt, Artificial Sequence
  Description of Artificial Sequence: Synthetic oligonucleotide
  Sense strand starting at position 44 of SEQ ID NO: 1549
cgucauguugggcaaauau

SEQ ID NO: 121639 - RNA, 19 nt, Artificial Sequence
  Description of Artificial Sequence: Synthetic oligonucleotide
  Antisense strand to SEQ ID NO: 121638
auauuugcccaacaugacg

SEQ ID NO: 121640 - RNA, 19 nt, Artificial Sequence
  Description of Artificial Sequence: Synthetic oligonucleotide
  Sense strand starting at position 34 of SEQ ID NO: 1549
caguauucugcgucauguu

SEQ ID NO: 121641 - RNA, 19 nt, Artificial Sequence
  Description of Artificial Sequence: Synthetic oligonucleotide
  Antisense strand to SEQ ID NO: 121640
aacaugacgcagaauacug

SEQ ID NO: 121642 - RNA, 19 nt, Artificial Sequence
  Description of Artificial Sequence: Synthetic oligonucleotide
  Sense strand starting at position 3584 of SEQ ID NO: 1550
guaucauagcuccagacag

SEQ ID NO: 121643 - RNA, 19 nt, Artificial Sequence
  Description of Artificial Sequence: Synthetic oligonucleotide
  Antisense strand to SEQ ID NO: 121642
cugucuggagcuaugauac

SEQ ID NO: 121644 - RNA, 19 nt, Artificial Sequence
  Description of Artificial Sequence: Synthetic oligonucleotide
  Sense strand starting at position 3581 of SEQ ID NO: 1550
ccaguaucauagcuccaga

SEQ ID NO: 121645 - RNA, 19 nt, Artificial Sequence
  Description of Artificial Sequence: Synthetic oligonucleotide
  Antisense strand to SEQ ID NO: 121644
ucuggagcuaugauacugg

SEQ ID NO: 121646 - RNA, 19 nt, Artificial Sequence
  Description of Artificial Sequence: Synthetic oligonucleotide
  Sense strand starting at position 3454 of SEQ ID NO: 1550
ggaaacuugaggugcuuaa

SEQ ID NO: 121647 - RNA, 19 nt, Artificial Sequence
  Description of Artificial Sequence: Synthetic oligonucleotide
  Antisense strand to SEQ ID NO: 121646
uuaagcaccucaaguuucc

SEQ ID NO: 121648 - RNA, 19 nt, Artificial Sequence
  Description of Artificial Sequence: Synthetic oligonucleotide
  Sense strand starting at position 3430 of SEQ ID NO: 1550
gucuauugccuguccaguu

SEQ ID NO: 121649 - RNA, 19 nt, Artificial Sequence
  Description of Artificial Sequence: Synthetic oligonucleotide
  Antisense strand to SEQ ID NO: 121648
aacuggacaggcaauagac

SEQ ID NO: 121650 - RNA, 19 nt, Artificial Sequence
  Description of Artificial Sequence: Synthetic oligonucleotide
  Sense strand starting at position 3429 of SEQ ID NO: 1550
ugucuauugccuguccagu

SEQ ID NO: 121651 - RNA, 19 nt, Artificial Sequence
  Description of Artificial Sequence: Synthetic oligonucleotide
  Antisense strand to SEQ ID NO: 121650
acuggacaggcaauagaca

SEQ ID NO: 121652 - RNA, 19 nt, Artificial Sequence
  Description of Artificial Sequence: Synthetic oligonucleotide
  Sense strand starting at position 3388 of SEQ ID NO: 1550
gucuaacagaaauguguga

SEQ ID NO: 121653 - RNA, 19 nt, Artificial Sequence
  Description of Artificial Sequence: Synthetic oligonucleotide
  Antisense strand to SEQ ID NO: 121652
ucacacauuucuguuagac

SEQ ID NO: 121654 - RNA, 19 nt, Artificial Sequence
  Description of Artificial Sequence: Synthetic oligonucleotide
  Sense strand starting at position 3348 of SEQ ID NO: 1550
ccuccaaaggccuaguauu

SEQ ID NO: 121655 - RNA, 19 nt, Artificial Sequence
  Description of Artificial Sequence: Synthetic oligonucleotide
  Antisense strand to SEQ ID NO: 121654
aauacuaggccuuuggagg

SEQ ID NO: 121656 - RNA, 19 nt, Artificial Sequence
  Description of Artificial Sequence: Synthetic oligonucleotide
  Sense strand starting at position 3291 of SEQ ID NO: 1550
guccaagguccacaguuau

SEQ ID NO: 121657 - RNA, 19 nt, Artificial Sequence
  Description of Artificial Sequence: Synthetic oligonucleotide
  Antisense strand to SEQ ID NO: 121656
auaacuguggaccuuggac

SEQ ID NO: 121658 - RNA, 19 nt, Artificial Sequence
  Description of Artificial Sequence: Synthetic oligonucleotide
  Sense strand starting at position 3228 of SEQ ID NO: 1550
uugugaguuauggauuauu

SEQ ID NO: 121659 - RNA, 19 nt, Artificial Sequence
  Description of Artificial Sequence: Synthetic oligonucleotide
  Antisense strand to SEQ ID NO: 121658
aauaauccauaacucacaa

SEQ ID NO: 121660 - RNA, 19 nt, Artificial Sequence
  Description of Artificial Sequence: Synthetic oligonucleotide
  Sense strand starting at position 3224 of SEQ ID NO: 1550
aucuuugugaguuauggau

SEQ ID NO: 121661 - RNA, 19 nt, Artificial Sequence
  Description of Artificial Sequence: Synthetic oligonucleotide
  Antisense strand to SEQ ID NO: 121660
auccauaacucacaaagau

SEQ ID NO: 121662 - RNA, 19 nt, Artificial Sequence
  Description of Artificial Sequence: Synthetic oligonucleotide
  Sense strand starting at position 3218 of SEQ ID NO: 1550
caagacaucuuugugaguu

SEQ ID NO: 121663 - RNA, 19 nt, Artificial Sequence
  Description of Artificial Sequence: Synthetic oligonucleotide
  Antisense strand to SEQ ID NO: 121662
aacucacaaagaugucuug

SEQ ID NO: 121664 - RNA, 19 nt, Artificial Sequence
  Description of Artificial Sequence: Synthetic oligonucleotide
  Sense strand starting at position 3217 of SEQ ID NO: 1550
ccaagacaucuuugugagu

SEQ ID NO: 121665 - RNA, 19 nt, Artificial Sequence
  Description of Artificial Sequence: Synthetic oligonucleotide
  Antisense strand to SEQ ID NO: 121664
acucacaaagaugucuugg

SEQ ID NO: 121666 - RNA, 19 nt, Artificial Sequence
  Description of Artificial Sequence: Synthetic oligonucleotide
  Sense strand starting at position 3130 of SEQ ID NO: 1550
auuauuaacugggaagaga

SEQ ID NO: 121667 - RNA, 19 nt, Artificial Sequence
  Description of Artificial Sequence: Synthetic oligonucleotide
  Antisense strand to SEQ ID NO: 121666
ucucuucccaguuaauaau

SEQ ID NO: 121668 - RNA, 19 nt, Artificial Sequence
  Description of Artificial Sequence: Synthetic oligonucleotide
  Sense strand starting at position 3079 of SEQ ID NO: 1550
agaaaugcauuaucacagu

SEQ ID NO: 121669 - RNA, 19 nt, Artificial Sequence
  Description of Artificial Sequence: Synthetic oligonucleotide
  Antisense strand to SEQ ID NO: 121668
acugugauaaugcauuucu

SEQ ID NO: 121670 - RNA, 19 nt, Artificial Sequence
  Description of Artificial Sequence: Synthetic oligonucleotide
  Sense strand starting at position 2843 of SEQ ID NO: 1550
auaaguggcagauguaaua

SEQ ID NO: 121671 - RNA, 19 nt, Artificial Sequence
  Description of Artificial Sequence: Synthetic oligonucleotide
  Antisense strand to SEQ ID NO: 121670
uauuacaucugccacuuau

SEQ ID NO: 121672 - RNA, 19 nt, Artificial Sequence
  Description of Artificial Sequence: Synthetic oligonucleotide
  Sense strand starting at position 2841 of SEQ ID NO: 1550
uaauaaguggcagauguaa

SEQ ID NO: 121673 - RNA, 19 nt, Artificial Sequence
  Description of Artificial Sequence: Synthetic oligonucleotide
  Antisense strand to SEQ ID NO: 121672
uuacaucugccacuuauua

SEQ ID NO: 121674 - RNA, 19 nt, Artificial Sequence
  Description of Artificial Sequence: Synthetic oligonucleotide
  Sense strand starting at position 2786 of SEQ ID NO: 1550
gcacgacguaguuaugaaa

SEQ ID NO: 121675 - RNA, 19 nt, Artificial Sequence
  Description of Artificial Sequence: Synthetic oligonucleotide
  Antisense strand to SEQ ID NO: 121674
uuucauaacuacgucgugc

SEQ ID NO: 121676 - RNA, 19 nt, Artificial Sequence
  Description of Artificial Sequence: Synthetic oligonucleotide
  Sense strand starting at position 2599 of SEQ ID NO: 1550
gguugcguccuugaggaaa

SEQ ID NO: 121677 - RNA, 19 nt, Artificial Sequence
  Description of Artificial Sequence: Synthetic oligonucleotide
  Antisense strand to SEQ ID NO: 121676
uuuccucaaggacgcaacc

SEQ ID NO: 121678 - RNA, 19 nt, Artificial Sequence
  Description of Artificial Sequence: Synthetic oligonucleotide
  Sense strand starting at position 2522 of SEQ ID NO: 1550
gucuccaguccuuaaaggu

SEQ ID NO: 121679 - RNA, 19 nt, Artificial Sequence
  Description of Artificial Sequence: Synthetic oligonucleotide
  Antisense strand to SEQ ID NO: 121678
accuuuaaggacuggagac

SEQ ID NO: 121680 - RNA, 19 nt, Artificial Sequence
  Description of Artificial Sequence: Synthetic oligonucleotide
  Sense strand starting at position 2466 of SEQ ID NO: 1550
cgcccugucaaucagaguu

SEQ ID NO: 121681 - RNA, 19 nt, Artificial Sequence
  Description of Artificial Sequence: Synthetic oligonucleotide
  Antisense strand to SEQ ID NO: 121680
aacucugauugacagggcg

SEQ ID NO: 121682 - RNA, 19 nt, Artificial Sequence
  Description of Artificial Sequence: Synthetic oligonucleotide
  Sense strand starting at position 2465 of SEQ ID NO: 1550
gcgcccugucaaucagagu

SEQ ID NO: 121683 - RNA, 19 nt, Artificial Sequence
  Description of Artificial Sequence: Synthetic oligonucleotide
  Antisense strand to SEQ ID NO: 121682
acucugauugacagggcgc

SEQ ID NO: 121684 - RNA, 19 nt, Artificial Sequence
  Description of Artificial Sequence: Synthetic oligonucleotide
  Sense strand starting at position 2038 of SEQ ID NO: 1550
gggccagagugaucucaaa

SEQ ID NO: 121685 - RNA, 19 nt, Artificial Sequence
  Description of Artificial Sequence: Synthetic oligonucleotide
  Antisense strand to SEQ ID NO: 121684
uuugagaucacucuggccc

SEQ ID NO: 121686 - RNA, 19 nt, Artificial Sequence
  Description of Artificial Sequence: Synthetic oligonucleotide
  Sense strand starting at position 1077 of SEQ ID NO: 1550
uguguuuguguggauauaa

SEQ ID NO: 121687 - RNA, 19 nt, Artificial Sequence
  Description of Artificial Sequence: Synthetic oligonucleotide
  Antisense strand to SEQ ID NO: 121686
uuauauccacacaaacaca

SEQ ID NO: 121688 - RNA, 19 nt, Artificial Sequence
  Description of Artificial Sequence: Synthetic oligonucleotide
  Sense strand starting at position 908 of SEQ ID NO: 1550
aaguguucuugggacauuu

SEQ ID NO: 121689 - RNA, 19 nt, Artificial Sequence
  Description of Artificial Sequence: Synthetic oligonucleotide
  Antisense strand to SEQ ID NO: 121688
aaaugucccaagaacacuu

SEQ ID NO: 121690 - RNA, 19 nt, Artificial Sequence
  Description of Artificial Sequence: Synthetic oligonucleotide
  Sense strand starting at position 906 of SEQ ID NO: 1550
uaaaguguucuugggacau

SEQ ID NO: 121691 - RNA, 19 nt, Artificial Sequence
  Description of Artificial Sequence: Synthetic oligonucleotide
  Antisense strand to SEQ ID NO: 121690
augucccaagaacacuuua

SEQ ID NO: 121692 - RNA, 19 nt, Artificial Sequence
  Description of Artificial Sequence: Synthetic oligonucleotide
  Sense strand starting at position 904 of SEQ ID NO: 1550
aauaaaguguucuugggac

SEQ ID NO: 121693 - RNA, 19 nt, Artificial Sequence
  Description of Artificial Sequence: Synthetic oligonucleotide
  Antisense strand to SEQ ID NO: 121692
gucccaagaacacuuuauu

SEQ ID NO: 121694 - RNA, 19 nt, Artificial Sequence
  Description of Artificial Sequence: Synthetic oligonucleotide
  Sense strand starting at position 606 of SEQ ID NO: 1550
ggcugaaauuaggagacaa

SEQ ID NO: 121695 - RNA, 19 nt, Artificial Sequence
  Description of Artificial Sequence: Synthetic oligonucleotide
  Antisense strand to SEQ ID NO: 121694
uugucuccuaauuucagcc

SEQ ID NO: 121696 - RNA, 19 nt, Artificial Sequence
  Description of Artificial Sequence: Synthetic oligonucleotide
  Sense strand starting at position 598 of SEQ ID NO: 1550
aguaaaccggcugaaauua

SEQ ID NO: 121697 - RNA, 19 nt, Artificial Sequence
  Description of Artificial Sequence: Synthetic oligonucleotide
  Antisense strand to SEQ ID NO: 121696
uaauuucagccgguuuacu

SEQ ID NO: 121698 - RNA, 19 nt, Artificial Sequence
  Description of Artificial Sequence: Synthetic oligonucleotide
  Sense strand starting at position 597 of SEQ ID NO: 1550
uaguaaaccggcugaaauu

SEQ ID NO: 121699 - RNA, 19 nt, Artificial Sequence
  Description of Artificial Sequence: Synthetic oligonucleotide
  Antisense strand to SEQ ID NO: 121698
aauuucagccgguuuacua

SEQ ID NO: 121700 - RNA, 19 nt, Artificial Sequence
  Description of Artificial Sequence: Synthetic oligonucleotide
  Sense strand starting at position 579 of SEQ ID NO: 1550
gucugugucacggaagguu

SEQ ID NO: 121701 - RNA, 19 nt, Artificial Sequence
  Description of Artificial Sequence: Synthetic oligonucleotide
  Antisense strand to SEQ ID NO: 121700
aaccuuccgugacacagac

SEQ ID NO: 121702 - RNA, 19 nt, Artificial Sequence
  Description of Artificial Sequence: Synthetic oligonucleotide
  Sense strand starting at position 317 of SEQ ID NO: 1550
ugucacuuagucuauguuu

SEQ ID NO: 121703 - RNA, 19 nt, Artificial Sequence
  Description of Artificial Sequence: Synthetic oligonucleotide
  Antisense strand to SEQ ID NO: 121702
aaacauagacuaagugaca

SEQ ID NO: 121704 - RNA, 19 nt, Artificial Sequence
  Description of Artificial Sequence: Synthetic oligonucleotide
  Sense strand starting at position 312 of SEQ ID NO: 1550
cggguugucacuuagucua

SEQ ID NO: 121705 - RNA, 19 nt, Artificial Sequence
  Description of Artificial Sequence: Synthetic oligonucleotide
  Antisense strand to SEQ ID NO: 121704
uagacuaagugacaacccg

SEQ ID NO: 121706 - RNA, 19 nt, Artificial Sequence
  Description of Artificial Sequence: Synthetic oligonucleotide
  Sense strand starting at position 311 of SEQ ID NO: 1550
gcggguugucacuuagucu

SEQ ID NO: 121707 - RNA, 19 nt, Artificial Sequence
  Description of Artificial Sequence: Synthetic oligonucleotide
  Antisense strand to SEQ ID NO: 121706
agacuaagugacaacccgc

SEQ ID NO: 121708 - RNA, 19 nt, Artificial Sequence
  Description of Artificial Sequence: Synthetic oligonucleotide
  Sense strand starting at position 303 of SEQ ID NO: 1550
agcuguuagcggguuguca

SEQ ID NO: 121709 - RNA, 19 nt, Artificial Sequence
  Description of Artificial Sequence: Synthetic oligonucleotide
  Antisense strand to SEQ ID NO: 121708
ugacaacccgcuaacagcu

SEQ ID NO: 121710 - RNA, 19 nt, Artificial Sequence
  Description of Artificial Sequence: Synthetic oligonucleotide
  Sense strand starting at position 246 of SEQ ID NO: 1550
agacauauguggucauuag

SEQ ID NO: 121711 - RNA, 19 nt, Artificial Sequence
  Description of Artificial Sequence: Synthetic oligonucleotide
  Antisense strand to SEQ ID NO: 121710
cuaaugaccacauaugucu

SEQ ID NO: 121712 - RNA, 19 nt, Artificial Sequence
  Description of Artificial Sequence: Synthetic oligonucleotide
  Sense strand starting at position 223 of SEQ ID NO: 1550
auaacaaagcuggguaauu

SEQ ID NO: 121713 - RNA, 19 nt, Artificial Sequence
  Description of Artificial Sequence: Synthetic oligonucleotide
  Antisense strand to SEQ ID NO: 121712
aauuacccagcuuuguuau

SEQ ID NO: 121714 - RNA, 19 nt, Artificial Sequence
  Description of Artificial Sequence: Synthetic oligonucleotide
  Sense strand starting at position 208 of SEQ ID NO: 1550
cgcuacuucggagauauaa

SEQ ID NO: 121715 - RNA, 19 nt, Artificial Sequence
  Description of Artificial Sequence: Synthetic oligonucleotide
  Antisense strand to SEQ ID NO: 121714
uuauaucuccgaaguagcg

SEQ ID NO: 121716 - RNA, 19 nt, Artificial Sequence
  Description of Artificial Sequence: Synthetic oligonucleotide
  Sense strand starting at position 171 of SEQ ID NO: 1550
ugcguauauuuguuuacag

SEQ ID NO: 121717 - RNA, 19 nt, Artificial Sequence
  Description of Artificial Sequence: Synthetic oligonucleotide
  Antisense strand to SEQ ID NO: 121716
cuguaaacaaauauacgca

SEQ ID NO: 121718 - RNA, 19 nt, Artificial Sequence
  Description of Artificial Sequence: Synthetic oligonucleotide
  Sense strand starting at position 170 of SEQ ID NO: 1550
uugcguauauuuguuuaca

SEQ ID NO: 121719 - RNA, 19 nt, Artificial Sequence
  Description of Artificial Sequence: Synthetic oligonucleotide
  Antisense strand to SEQ ID NO: 121718
uguaaacaaauauacgcaa

SEQ ID NO: 121720 - RNA, 19 nt, Artificial Sequence
  Description of Artificial Sequence: Synthetic oligonucleotide
  Sense strand starting at position 165 of SEQ ID NO: 1550
aggaguugcguauauuugu

SEQ ID NO: 121721 - RNA, 19 nt, Artificial Sequence
  Description of Artificial Sequence: Synthetic oligonucleotide
  Antisense strand to SEQ ID NO: 121720
acaaauauacgcaacuccu

SEQ ID NO: 121722 - RNA, 19 nt, Artificial Sequence
  Description of Artificial Sequence: Synthetic oligonucleotide
  Sense strand starting at position 175 of SEQ ID NO: 1551
ccacuugcccagcauaagu

SEQ ID NO: 121723 - RNA, 19 nt, Artificial Sequence
  Description of Artificial Sequence: Synthetic oligonucleotide
  Antisense strand to SEQ ID NO: 121722
acuuaugcugggcaagugg

SEQ ID NO: 121724 - RNA, 19 nt, Artificial Sequence
  Description of Artificial Sequence: Synthetic oligonucleotide
  Sense strand starting at position 184 of SEQ ID NO: 1551
cagcauaaguccuugguau

SEQ ID NO: 121725 - RNA, 19 nt, Artificial Sequence
  Description of Artificial Sequence: Synthetic oligonucleotide
  Antisense strand to SEQ ID NO: 121724
auaccaaggacuuaugcug

SEQ ID NO: 121726 - RNA, 19 nt, Artificial Sequence
  Description of Artificial Sequence: Synthetic oligonucleotide
  Sense strand starting at position 185 of SEQ ID NO: 1551
agcauaaguccuugguaug

SEQ ID NO: 121727 - RNA, 19 nt, Artificial Sequence
  Description of Artificial Sequence: Synthetic oligonucleotide
  Antisense strand to SEQ ID NO: 121726
cauaccaaggacuuaugcu

SEQ ID NO: 121728 - RNA, 19 nt, Artificial Sequence
  Description of Artificial Sequence: Synthetic oligonucleotide
  Sense strand starting at position 420 of SEQ ID NO: 1551
cuguuuaccuucuuaguaa

SEQ ID NO: 121729 - RNA, 19 nt, Artificial Sequence
  Description of Artificial Sequence: Synthetic oligonucleotide
  Antisense strand to SEQ ID NO: 121728
uuacuaagaagguaaacag

SEQ ID NO: 121730 - RNA, 19 nt, Artificial Sequence
  Description of Artificial Sequence: Synthetic oligonucleotide
  Sense strand starting at position 431 of SEQ ID NO: 1551
cuuaguaaucgccagaguu

SEQ ID NO: 121731 - RNA, 19 nt, Artificial Sequence
  Description of Artificial Sequence: Synthetic oligonucleotide
  Antisense strand to SEQ ID NO: 121730
aacucuggcgauuacuaag

SEQ ID NO: 121732 - RNA, 19 nt, Artificial Sequence
  Description of Artificial Sequence: Synthetic oligonucleotide
  Sense strand starting at position 433 of SEQ ID NO: 1551
uaguaaucgccagaguuug

SEQ ID NO: 121733 - RNA, 19 nt, Artificial Sequence
  Description of Artificial Sequence: Synthetic oligonucleotide
  Antisense strand to SEQ ID NO: 121732
caaacucuggcgauuacua

SEQ ID NO: 121734 - RNA, 19 nt, Artificial Sequence
  Description of Artificial Sequence: Synthetic oligonucleotide
  Sense strand starting at position 441 of SEQ ID NO: 1551
gccagaguuuggucuuagg

SEQ ID NO: 121735 - RNA, 19 nt, Artificial Sequence
  Description of Artificial Sequence: Synthetic oligonucleotide
  Antisense strand to SEQ ID NO: 121734
ccuaagaccaaacucuggc

SEQ ID NO: 121736 - RNA, 19 nt, Artificial Sequence
  Description of Artificial Sequence: Synthetic oligonucleotide
  Sense strand starting at position 482 of SEQ ID NO: 1551
auggauuuauggcaacuau

SEQ ID NO: 121737 - RNA, 19 nt, Artificial Sequence
  Description of Artificial Sequence: Synthetic oligonucleotide
  Antisense strand to SEQ ID NO: 121736
auaguugccauaaauccau

SEQ ID NO: 121738 - RNA, 19 nt, Artificial Sequence
  Description of Artificial Sequence: Synthetic oligonucleotide
  Sense strand starting at position 743 of SEQ ID NO: 1551
cugaccucucaagaguacu

SEQ ID NO: 121739 - RNA, 19 nt, Artificial Sequence
  Description of Artificial Sequence: Synthetic oligonucleotide
  Antisense strand to SEQ ID NO: 121738
aguacucuugagaggucag

SEQ ID NO: 121740 - RNA, 19 nt, Artificial Sequence
  Description of Artificial Sequence: Synthetic oligonucleotide
  Sense strand starting at position 754 of SEQ ID NO: 1551
agaguacuggauugugauc

SEQ ID NO: 121741 - RNA, 19 nt, Artificial Sequence
  Description of Artificial Sequence: Synthetic oligonucleotide
  Antisense strand to SEQ ID NO: 121740
gaucacaauccaguacucu

SEQ ID NO: 121742 - RNA, 19 nt, Artificial Sequence
  Description of Artificial Sequence: Synthetic oligonucleotide
  Sense strand starting at position 798 of SEQ ID NO: 1551
ucccgagcacuuuauaaga

SEQ ID NO: 121743 - RNA, 19 nt, Artificial Sequence
  Description of Artificial Sequence: Synthetic oligonucleotide
  Antisense strand to SEQ ID NO: 121742
ucuuauaaagugcucggga

SEQ ID NO: 121744 - RNA, 19 nt, Artificial Sequence
  Description of Artificial Sequence: Synthetic oligonucleotide
  Sense strand starting at position 913 of SEQ ID NO: 1551
cugcguggugcccuaagua

SEQ ID NO: 121745 - RNA, 19 nt, Artificial Sequence
  Description of Artificial Sequence: Synthetic oligonucleotide
  Antisense strand to SEQ ID NO: 121744
uacuuagggcaccacgcag

SEQ ID NO: 121746 - RNA, 19 nt, Artificial Sequence
  Description of Artificial Sequence: Synthetic oligonucleotide
  Sense strand starting at position 967 of SEQ ID NO: 1551
cuggauaggucuuucccaa

SEQ ID NO: 121747 - RNA, 19 nt, Artificial Sequence
  Description of Artificial Sequence: Synthetic oligonucleotide
  Antisense strand to SEQ ID NO: 121746
uugggaaagaccuauccag

SEQ ID NO: 121748 - RNA, 19 nt, Artificial Sequence
  Description of Artificial Sequence: Synthetic oligonucleotide
  Sense strand starting at position 1085 of SEQ ID NO: 1551
aucuguaaguauccauaga

SEQ ID NO: 121749 - RNA, 19 nt, Artificial Sequence
  Description of Artificial Sequence: Synthetic oligonucleotide
  Antisense strand to SEQ ID NO: 121748
ucuauggauacuuacagau

SEQ ID NO: 121750 - RNA, 19 nt, Artificial Sequence
  Description of Artificial Sequence: Synthetic oligonucleotide
  Sense strand starting at position 1231 of SEQ ID NO: 1551
uguuuaucccuagcugugu

SEQ ID NO: 121751 - RNA, 19 nt, Artificial Sequence
  Description of Artificial Sequence: Synthetic oligonucleotide
  Antisense strand to SEQ ID NO: 121750
acacagcuagggauaaaca

SEQ ID NO: 121752 - RNA, 19 nt, Artificial Sequence
  Description of Artificial Sequence: Synthetic oligonucleotide
  Sense strand starting at position 1257 of SEQ ID NO: 1551
cugcucagguccucuagaa

SEQ ID NO: 121753 - RNA, 19 nt, Artificial Sequence
  Description of Artificial Sequence: Synthetic oligonucleotide
  Antisense strand to SEQ ID NO: 121752
uucuagaggaccugagcag

SEQ ID NO: 121754 - RNA, 19 nt, Artificial Sequence
  Description of Artificial Sequence: Synthetic oligonucleotide
  Sense strand starting at position 1394 of SEQ ID NO: 1551
ccuauacucuggguuccaa

SEQ ID NO: 121755 - RNA, 19 nt, Artificial Sequence
  Description of Artificial Sequence: Synthetic oligonucleotide
  Antisense strand to SEQ ID NO: 121754
uuggaacccagaguauagg

SEQ ID NO: 121756 - RNA, 19 nt, Artificial Sequence
  Description of Artificial Sequence: Synthetic oligonucleotide
  Sense strand starting at position 1423 of SEQ ID NO: 1551
cucuuucuugguuagguua

SEQ ID NO: 121757 - RNA, 19 nt, Artificial Sequence
  Description of Artificial Sequence: Synthetic oligonucleotide
  Antisense strand to SEQ ID NO: 121756
uaaccuaaccaagaaagag

SEQ ID NO: 121758 - RNA, 19 nt, Artificial Sequence
  Description of Artificial Sequence: Synthetic oligonucleotide
  Sense strand starting at position 1483 of SEQ ID NO: 1551
cucacugccuuauuaggaa

SEQ ID NO: 121759 - RNA, 19 nt, Artificial Sequence
  Description of Artificial Sequence: Synthetic oligonucleotide
  Antisense strand to SEQ ID NO: 121758
uuccuaauaaggcagugag

SEQ ID NO: 121760 - RNA, 19 nt, Artificial Sequence
  Description of Artificial Sequence: Synthetic oligonucleotide
  Sense strand starting at position 1648 of SEQ ID NO: 1551
uaaggauuaugacagagac

SEQ ID NO: 121761 - RNA, 19 nt, Artificial Sequence
  Description of Artificial Sequence: Synthetic oligonucleotide
  Antisense strand to SEQ ID NO: 121760
gucucugucauaauccuua

SEQ ID NO: 121762 - RNA, 19 nt, Artificial Sequence
  Description of Artificial Sequence: Synthetic oligonucleotide
  Sense strand starting at position 1726 of SEQ ID NO: 1551
aagucucgccucuaguuaa

SEQ ID NO: 121763 - RNA, 19 nt, Artificial Sequence
  Description of Artificial Sequence: Synthetic oligonucleotide
  Antisense strand to SEQ ID NO: 121762
uuaacuagaggcgagacuu

SEQ ID NO: 121764 - RNA, 19 nt, Artificial Sequence
  Description of Artificial Sequence: Synthetic oligonucleotide
  Sense strand starting at position 1729 of SEQ ID NO: 1551
ucucgccucuaguuaauuu

SEQ ID NO: 121765 - RNA, 19 nt, Artificial Sequence
  Description of Artificial Sequence: Synthetic oligonucleotide
  Antisense strand to SEQ ID NO: 121764
aaauuaacuagaggcgaga

SEQ ID NO: 121766 - RNA, 19 nt, Artificial Sequence
  Description of Artificial Sequence: Synthetic oligonucleotide
  Sense strand starting at position 1887 of SEQ ID NO: 1551
ucauuccuucuagauuagu

SEQ ID NO: 121767 - RNA, 19 nt, Artificial Sequence
  Description of Artificial Sequence: Synthetic oligonucleotide
  Antisense strand to SEQ ID NO: 121766
acuaaucuagaaggaauga

SEQ ID NO: 121768 - RNA, 19 nt, Artificial Sequence
  Description of Artificial Sequence: Synthetic oligonucleotide
  Sense strand starting at position 2306 of SEQ ID NO: 1551
cgucuucugagaugacgaa

SEQ ID NO: 121769 - RNA, 19 nt, Artificial Sequence
  Description of Artificial Sequence: Synthetic oligonucleotide
  Antisense strand to SEQ ID NO: 121768
uucgucaucucagaagacg

SEQ ID NO: 121770 - RNA, 19 nt, Artificial Sequence
  Description of Artificial Sequence: Synthetic oligonucleotide
  Sense strand starting at position 2529 of SEQ ID NO: 1551
gaaauuugcuaggacagaa

SEQ ID NO: 121771 - RNA, 19 nt, Artificial Sequence
  Description of Artificial Sequence: Synthetic oligonucleotide
  Antisense strand to SEQ ID NO: 121770
uucuguccuagcaaauuuc

SEQ ID NO: 121772 - RNA, 19 nt, Artificial Sequence
  Description of Artificial Sequence: Synthetic oligonucleotide
  Sense strand starting at position 2682 of SEQ ID NO: 1551
aggccuggcccaggaauau

SEQ ID NO: 121773 - RNA, 19 nt, Artificial Sequence
  Description of Artificial Sequence: Synthetic oligonucleotide
  Antisense strand to SEQ ID NO: 121772
auauuccugggccaggccu

SEQ ID NO: 121774 - RNA, 19 nt, Artificial Sequence
  Description of Artificial Sequence: Synthetic oligonucleotide
  Sense strand starting at position 2922 of SEQ ID NO: 1551
aggaguccuugucugggau

SEQ ID NO: 121775 - RNA, 19 nt, Artificial Sequence
  Description of Artificial Sequence: Synthetic oligonucleotide
  Antisense strand to SEQ ID NO: 121774
aucccagacaaggacuccu

SEQ ID NO: 121776 - RNA, 19 nt, Artificial Sequence
  Description of Artificial Sequence: Synthetic oligonucleotide
  Sense strand starting at position 2923 of SEQ ID NO: 1551
ggaguccuugucugggauu

SEQ ID NO: 121777 - RNA, 19 nt, Artificial Sequence
  Description of Artificial Sequence: Synthetic oligonucleotide
  Antisense strand to SEQ ID NO: 121776
aaucccagacaaggacucc

SEQ ID NO: 121778 - RNA, 19 nt, Artificial Sequence
  Description of Artificial Sequence: Synthetic oligonucleotide
  Sense strand starting at position 3016 of SEQ ID NO: 1551
aaaguaguggagugagaga

SEQ ID NO: 121779 - RNA, 19 nt, Artificial Sequence
  Description of Artificial Sequence: Synthetic oligonucleotide
  Antisense strand to SEQ ID NO: 121778
ucucucacuccacuacuuu

SEQ ID NO: 121780 - RNA, 19 nt, Artificial Sequence
  Description of Artificial Sequence: Synthetic oligonucleotide
  Sense strand starting at position 3259 of SEQ ID NO: 1551
gguugucagcuccaccaga

SEQ ID NO: 121781 - RNA, 19 nt, Artificial Sequence
  Description of Artificial Sequence: Synthetic oligonucleotide
  Antisense strand to SEQ ID NO: 121780
ucugguggagcugacaacc

SEQ ID NO: 121782 - RNA, 19 nt, Artificial Sequence
  Description of Artificial Sequence: Synthetic oligonucleotide
  Sense strand starting at position 3416 of SEQ ID NO: 1551
ggaggaaugugugcaugaa

SEQ ID NO: 121783 - RNA, 19 nt, Artificial Sequence
  Description of Artificial Sequence: Synthetic oligonucleotide
  Antisense strand to SEQ ID NO: 121782
uucaugcacacauuccucc

SEQ ID NO: 121784 - RNA, 19 nt, Artificial Sequence
  Description of Artificial Sequence: Synthetic oligonucleotide
  Sense strand starting at position 3417 of SEQ ID NO: 1551
gaggaaugugugcaugaac

SEQ ID NO: 121785 - RNA, 19 nt, Artificial Sequence
  Description of Artificial Sequence: Synthetic oligonucleotide
  Antisense strand to SEQ ID NO: 121784
guucaugcacacauuccuc

SEQ ID NO: 121786 - RNA, 19 nt, Artificial Sequence
  Description of Artificial Sequence: Synthetic oligonucleotide
  Sense strand starting at position 3420 of SEQ ID NO: 1551
gaaugugugcaugaacaga

SEQ ID NO: 121787 - RNA, 19 nt, Artificial Sequence
  Description of Artificial Sequence: Synthetic oligonucleotide
  Antisense strand to SEQ ID NO: 121786
ucuguucaugcacacauuc

SEQ ID NO: 121788 - RNA, 19 nt, Artificial Sequence
  Description of Artificial Sequence: Synthetic oligonucleotide
  Sense strand starting at position 3537 of SEQ ID NO: 1551
aggccuuuggcugagagga

SEQ ID NO: 121789 - RNA, 19 nt, Artificial Sequence
  Description of Artificial Sequence: Synthetic oligonucleotide
  Antisense strand to SEQ ID NO: 121788
uccucucagccaaaggccu

SEQ ID NO: 121790 - RNA, 19 nt, Artificial Sequence
  Description of Artificial Sequence: Synthetic oligonucleotide
  Sense strand starting at position 3638 of SEQ ID NO: 1551
cuuugaguaccauggcaau

SEQ ID NO: 121791 - RNA, 19 nt, Artificial Sequence
  Description of Artificial Sequence: Synthetic oligonucleotide
  Antisense strand to SEQ ID NO: 121790
auugccaugguacucaaag

SEQ ID NO: 121792 - RNA, 19 nt, Artificial Sequence
  Description of Artificial Sequence: Synthetic oligonucleotide
  Sense strand starting at position 3644 of SEQ ID NO: 1551
guaccauggcaaugaggau

SEQ ID NO: 121793 - RNA, 19 nt, Artificial Sequence
  Description of Artificial Sequence: Synthetic oligonucleotide
  Antisense strand to SEQ ID NO: 121792
auccucauugccaugguac

SEQ ID NO: 121794 - RNA, 19 nt, Artificial Sequence
  Description of Artificial Sequence: Synthetic oligonucleotide
  Sense strand starting at position 3818 of SEQ ID NO: 1551
cggaguauaaugugcaaca

SEQ ID NO: 121795 - RNA, 19 nt, Artificial Sequence
  Description of Artificial Sequence: Synthetic oligonucleotide
  Antisense strand to SEQ ID NO: 121794
uguugcacauuauacuccg

SEQ ID NO: 121796 - RNA, 19 nt, Artificial Sequence
  Description of Artificial Sequence: Synthetic oligonucleotide
  Sense strand starting at position 3820 of SEQ ID NO: 1551
gaguauaaugugcaacaga

SEQ ID NO: 121797 - RNA, 19 nt, Artificial Sequence
  Description of Artificial Sequence: Synthetic oligonucleotide
  Antisense strand to SEQ ID NO: 121796
ucuguugcacauuauacuc

SEQ ID NO: 121798 - RNA, 19 nt, Artificial Sequence
  Description of Artificial Sequence: Synthetic oligonucleotide
  Sense strand starting at position 3897 of SEQ ID NO: 1551
aauauucuggucugucaga

SEQ ID NO: 121799 - RNA, 19 nt, Artificial Sequence
  Description of Artificial Sequence: Synthetic oligonucleotide
  Antisense strand to SEQ ID NO: 121798
ucugacagaccagaauauu

SEQ ID NO: 121800 - RNA, 19 nt, Artificial Sequence
  Description of Artificial Sequence: Synthetic oligonucleotide
  Sense strand starting at position 3898 of SEQ ID NO: 1551
auauucuggucugucagau

SEQ ID NO: 121801 - RNA, 19 nt, Artificial Sequence
  Description of Artificial Sequence: Synthetic oligonucleotide
  Antisense strand to SEQ ID NO: 121800
aucugacagaccagaauau

SEQ ID NO: 121802 - RNA, 19 nt, Artificial Sequence
  Description of Artificial Sequence: Synthetic oligonucleotide
  Sense strand starting at position 86 of SEQ ID NO: 1552
gaaggugaagcuugcucaa

SEQ ID NO: 121803 - RNA, 19 nt, Artificial Sequence
  Description of Artificial Sequence: Synthetic oligonucleotide
  Antisense strand to SEQ ID NO: 121802
uugagcaagcuucaccuuc

SEQ ID NO: 121804 - RNA, 19 nt, Artificial Sequence
  Description of Artificial Sequence: Synthetic oligonucleotide
  Sense strand starting at position 107 of SEQ ID NO: 1552
ucauauuaggucuagugag

SEQ ID NO: 121805 - RNA, 19 nt, Artificial Sequence
  Description of Artificial Sequence: Synthetic oligonucleotide
  Antisense strand to SEQ ID NO: 121804
cucacuagaccuaauauga

SEQ ID NO: 121806 - RNA, 19 nt, Artificial Sequence
  Description of Artificial Sequence: Synthetic oligonucleotide
  Sense strand starting at position 359 of SEQ ID NO: 1552
ggugauugugaugaucaca

SEQ ID NO: 121807 - RNA, 19 nt, Artificial Sequence
  Description of Artificial Sequence: Synthetic oligonucleotide
  Antisense strand to SEQ ID NO: 121806
ugugaucaucacaaucacc

SEQ ID NO: 121808 - RNA, 19 nt, Artificial Sequence
  Description of Artificial Sequence: Synthetic oligonucleotide
  Sense strand starting at position 750 of SEQ ID NO: 1552
cucggaauccaucagucau

SEQ ID NO: 121809 - RNA, 19 nt, Artificial Sequence
  Description of Artificial Sequence: Synthetic oligonucleotide
  Antisense strand to SEQ ID NO: 121808
augacugauggauuccgag

SEQ ID NO: 121810 - RNA, 19 nt, Artificial Sequence
  Description of Artificial Sequence: Synthetic oligonucleotide
  Sense strand starting at position 767 of SEQ ID NO: 1552
augcaaacucauugacgau

SEQ ID NO: 121811 - RNA, 19 nt, Artificial Sequence
  Description of Artificial Sequence: Synthetic oligonucleotide
  Antisense strand to SEQ ID NO: 121810
aucgucaaugaguuugcau

SEQ ID NO: 121812 - RNA, 19 nt, Artificial Sequence
  Description of Artificial Sequence: Synthetic oligonucleotide
  Sense strand starting at position 805 of SEQ ID NO: 1552
aucaaauaauguguuagga

SEQ ID NO: 121813 - RNA, 19 nt, Artificial Sequence
  Description of Artificial Sequence: Synthetic oligonucleotide
  Antisense strand to SEQ ID NO: 121812
uccuaacacauuauuugau

SEQ ID NO: 121814 - RNA, 19 nt, Artificial Sequence
  Description of Artificial Sequence: Synthetic oligonucleotide
  Sense strand starting at position 813 of SEQ ID NO: 1552
auguguuaggaauaaaguc

SEQ ID NO: 121815 - RNA, 19 nt, Artificial Sequence
  Description of Artificial Sequence: Synthetic oligonucleotide
  Antisense strand to SEQ ID NO: 121814
gacuuuauuccuaacacau

SEQ ID NO: 121816 - RNA, 19 nt, Artificial Sequence
  Description of Artificial Sequence: Synthetic oligonucleotide
  Sense strand starting at position 854 of SEQ ID NO: 1552
agauucuuggcacguaaag

SEQ ID NO: 121817 - RNA, 19 nt, Artificial Sequence
  Description of Artificial Sequence: Synthetic oligonucleotide
  Antisense strand to SEQ ID NO: 121816
cuuuacgugccaagaaucu

SEQ ID NO: 121818 - RNA, 19 nt, Artificial Sequence
  Description of Artificial Sequence: Synthetic oligonucleotide
  Sense strand starting at position 856 of SEQ ID NO: 1552
auucuuggcacguaaaguu

SEQ ID NO: 121819 - RNA, 19 nt, Artificial Sequence
  Description of Artificial Sequence: Synthetic oligonucleotide
  Antisense strand to SEQ ID NO: 121818
aacuuuacgugccaagaau

SEQ ID NO: 121820 - RNA, 19 nt, Artificial Sequence
  Description of Artificial Sequence: Synthetic oligonucleotide
  Sense strand starting at position 863 of SEQ ID NO: 1552
gcacguaaaguuuaauaag

SEQ ID NO: 121821 - RNA, 19 nt, Artificial Sequence
  Description of Artificial Sequence: Synthetic oligonucleotide
  Antisense strand to SEQ ID NO: 121820
cuuauuaaacuuuacgugc

SEQ ID NO: 121822 - RNA, 19 nt, Artificial Sequence
  Description of Artificial Sequence: Synthetic oligonucleotide
  Sense strand starting at position 955 of SEQ ID NO: 1552
gaaggccaucuauguaguu

SEQ ID NO: 121823 - RNA, 19 nt, Artificial Sequence
  Description of Artificial Sequence: Synthetic oligonucleotide
  Antisense strand to SEQ ID NO: 121822
aacuacauagauggccuuc

SEQ ID NO: 121824 - RNA, 19 nt, Artificial Sequence
  Description of Artificial Sequence: Synthetic oligonucleotide
  Sense strand starting at position 1039 of SEQ ID NO: 1552
cuuuguuuagcauaaagua

SEQ ID NO: 121825 - RNA, 19 nt, Artificial Sequence
  Description of Artificial Sequence: Synthetic oligonucleotide
  Antisense strand to SEQ ID NO: 121824
uacuuuaugcuaaacaaag

SEQ ID NO: 121826 - RNA, 19 nt, Artificial Sequence
  Description of Artificial Sequence: Synthetic oligonucleotide
  Sense strand starting at position 1099 of SEQ ID NO: 1552
uacauagugguguagaaau

SEQ ID NO: 121827 - RNA, 19 nt, Artificial Sequence
  Description of Artificial Sequence: Synthetic oligonucleotide
  Antisense strand to SEQ ID NO: 121826
auuucuacaccacuaugua

SEQ ID NO: 121828 - RNA, 19 nt, Artificial Sequence
  Description of Artificial Sequence: Synthetic oligonucleotide
  Sense strand starting at position 1101 of SEQ ID NO: 1552
cauagugguguagaaauua

SEQ ID NO: 121829 - RNA, 19 nt, Artificial Sequence
  Description of Artificial Sequence: Synthetic oligonucleotide
  Antisense strand to SEQ ID NO: 121828
uaauuucuacaccacuaug

SEQ ID NO: 121830 - RNA, 19 nt, Artificial Sequence
  Description of Artificial Sequence: Synthetic oligonucleotide
  Sense strand starting at position 1111 of SEQ ID NO: 1552
uagaaauuacaaugugagu

SEQ ID NO: 121831 - RNA, 19 nt, Artificial Sequence
  Description of Artificial Sequence: Synthetic oligonucleotide
  Antisense strand to SEQ ID NO: 121830
acucacauuguaauuucua

SEQ ID NO: 121832 - RNA, 19 nt, Artificial Sequence
  Description of Artificial Sequence: Synthetic oligonucleotide
  Sense strand starting at position 1120 of SEQ ID NO: 1552
caaugugaguaacugauaa

SEQ ID NO: 121833 - RNA, 19 nt, Artificial Sequence
  Description of Artificial Sequence: Synthetic oligonucleotide
  Antisense strand to SEQ ID NO: 121832
uuaucaguuacucacauug

SEQ ID NO: 121834 - RNA, 19 nt, Artificial Sequence
  Description of Artificial Sequence: Synthetic oligonucleotide
  Sense strand starting at position 1239 of SEQ ID NO: 1552
ggcuacaaucuacagcauu

SEQ ID NO: 121835 - RNA, 19 nt, Artificial Sequence
  Description of Artificial Sequence: Synthetic oligonucleotide
  Antisense strand to SEQ ID NO: 121834
aaugcuguagauuguagcc

SEQ ID NO: 121836 - RNA, 19 nt, Artificial Sequence
  Description of Artificial Sequence: Synthetic oligonucleotide
  Sense strand starting at position 1286 of SEQ ID NO: 1552
agcucuaaggccuagaguu

SEQ ID NO: 121837 - RNA, 19 nt, Artificial Sequence
  Description of Artificial Sequence: Synthetic oligonucleotide
  Antisense strand to SEQ ID NO: 121836
aacucuaggccuuagagcu

SEQ ID NO: 121838 - RNA, 19 nt, Artificial Sequence
  Description of Artificial Sequence: Synthetic oligonucleotide
  Sense strand starting at position 1357 of SEQ ID NO: 1552
ccuaacauccggcaucaau

SEQ ID NO: 121839 - RNA, 19 nt, Artificial Sequence
  Description of Artificial Sequence: Synthetic oligonucleotide
  Antisense strand to SEQ ID NO: 121838
auugaugccggauguuagg

SEQ ID NO: 121840 - RNA, 19 nt, Artificial Sequence
  Description of Artificial Sequence: Synthetic oligonucleotide
  Sense strand starting at position 1366 of SEQ ID NO: 1552
cggcaucaauucuuaauga

SEQ ID NO: 121841 - RNA, 19 nt, Artificial Sequence
  Description of Artificial Sequence: Synthetic oligonucleotide
  Antisense strand to SEQ ID NO: 121840
ucauuaagaauugaugccg

SEQ ID NO: 121842 - RNA, 19 nt, Artificial Sequence
  Description of Artificial Sequence: Synthetic oligonucleotide
  Sense strand starting at position 1396 of SEQ ID NO: 1552
cccgcaguccugucuacuu

SEQ ID NO: 121843 - RNA, 19 nt, Artificial Sequence
  Description of Artificial Sequence: Synthetic oligonucleotide
  Antisense strand to SEQ ID NO: 121842
aaguagacaggacugcggg

SEQ ID NO: 121844 - RNA, 19 nt, Artificial Sequence
  Description of Artificial Sequence: Synthetic oligonucleotide
  Sense strand starting at position 1424 of SEQ ID NO: 1552
uccagugaauccucacagu

SEQ ID NO: 121845 - RNA, 19 nt, Artificial Sequence
  Description of Artificial Sequence: Synthetic oligonucleotide
  Antisense strand to SEQ ID NO: 121844
acugugaggauucacugga

SEQ ID NO: 121846 - RNA, 19 nt, Artificial Sequence
  Description of Artificial Sequence: Synthetic oligonucleotide
  Sense strand starting at position 1498 of SEQ ID NO: 1552
ucuuaagaaucucuacgaa

SEQ ID NO: 121847 - RNA, 19 nt, Artificial Sequence
  Description of Artificial Sequence: Synthetic oligonucleotide
  Antisense strand to SEQ ID NO: 121846
uucguagagauucuuaaga

SEQ ID NO: 121848 - RNA, 19 nt, Artificial Sequence
  Description of Artificial Sequence: Synthetic oligonucleotide
  Sense strand starting at position 2611 of SEQ ID NO: 1552
guccaacuugguggagaaa

SEQ ID NO: 121849 - RNA, 19 nt, Artificial Sequence
  Description of Artificial Sequence: Synthetic oligonucleotide
  Antisense strand to SEQ ID NO: 121848
uuucuccaccaaguuggac

SEQ ID NO: 121850 - RNA, 19 nt, Artificial Sequence
  Description of Artificial Sequence: Synthetic oligonucleotide
  Sense strand starting at position 2722 of SEQ ID NO: 1552
ggcuauauagaacauuagu

SEQ ID NO: 121851 - RNA, 19 nt, Artificial Sequence
  Description of Artificial Sequence: Synthetic oligonucleotide
  Antisense strand to SEQ ID NO: 121850
acuaauguucuauauagcc

SEQ ID NO: 121852 - RNA, 19 nt, Artificial Sequence
  Description of Artificial Sequence: Synthetic oligonucleotide
  Sense strand starting at position 2755 of SEQ ID NO: 1552
gcuguuuagacaggaagac

SEQ ID NO: 121853 - RNA, 19 nt, Artificial Sequence
  Description of Artificial Sequence: Synthetic oligonucleotide
  Antisense strand to SEQ ID NO: 121852
gucuuccugucuaaacagc

SEQ ID NO: 121854 - RNA, 19 nt, Artificial Sequence
  Description of Artificial Sequence: Synthetic oligonucleotide
  Sense strand starting at position 3098 of SEQ ID NO: 1552
ccuagucaggcccaguaaa

SEQ ID NO: 121855 - RNA, 19 nt, Artificial Sequence
  Description of Artificial Sequence: Synthetic oligonucleotide
  Antisense strand to SEQ ID NO: 121854
uuuacugggccugacuagg

SEQ ID NO: 121856 - RNA, 19 nt, Artificial Sequence
  Description of Artificial Sequence: Synthetic oligonucleotide
  Sense strand starting at position 3223 of SEQ ID NO: 1552
gugugucugccaucagcua

SEQ ID NO: 121857 - RNA, 19 nt, Artificial Sequence
  Description of Artificial Sequence: Synthetic oligonucleotide
  Antisense strand to SEQ ID NO: 121856
uagcugauggcagacacac

SEQ ID NO: 121858 - RNA, 19 nt, Artificial Sequence
  Description of Artificial Sequence: Synthetic oligonucleotide
  Sense strand starting at position 3307 of SEQ ID NO: 1552
cuuucuguacuggaagagu

SEQ ID NO: 121859 - RNA, 19 nt, Artificial Sequence
  Description of Artificial Sequence: Synthetic oligonucleotide
  Antisense strand to SEQ ID NO: 121858
acucuuccaguacagaaag

SEQ ID NO: 121860 - RNA, 19 nt, Artificial Sequence
  Description of Artificial Sequence: Synthetic oligonucleotide
  Sense strand starting at position 3411 of SEQ ID NO: 1552
aguguuuaauggguuaauc

SEQ ID NO: 121861 - RNA, 19 nt, Artificial Sequence
  Description of Artificial Sequence: Synthetic oligonucleotide
  Antisense strand to SEQ ID NO: 121860
gauuaacccauuaaacacu

SEQ ID NO: 121862 - RNA, 19 nt, Artificial Sequence
  Description of Artificial Sequence: Synthetic oligonucleotide
  Sense strand starting at position 3413 of SEQ ID NO: 1552
uguuuaauggguuaaucaa

SEQ ID NO: 121863 - RNA, 19 nt, Artificial Sequence
  Description of Artificial Sequence: Synthetic oligonucleotide
  Antisense strand to SEQ ID NO: 121862
uugauuaacccauuaaaca

SEQ ID NO: 121864 - RNA, 19 nt, Artificial Sequence
  Description of Artificial Sequence: Synthetic oligonucleotide
  Sense strand starting at position 3687 of SEQ ID NO: 1552
augugcugccuguuaucau

SEQ ID NO: 121865 - RNA, 19 nt, Artificial Sequence
  Description of Artificial Sequence: Synthetic oligonucleotide
  Antisense strand to SEQ ID NO: 121864
augauaacaggcagcacau

SEQ ID NO: 121866 - RNA, 19 nt, Artificial Sequence
  Description of Artificial Sequence: Synthetic oligonucleotide
  Sense strand starting at position 3761 of SEQ ID NO: 1552
gcagaagacauguguaagu

SEQ ID NO: 121867 - RNA, 19 nt, Artificial Sequence
  Description of Artificial Sequence: Synthetic oligonucleotide
  Antisense strand to SEQ ID NO: 121866
acuuacacaugucuucugc

SEQ ID NO: 121868 - RNA, 19 nt, Artificial Sequence
  Description of Artificial Sequence: Synthetic oligonucleotide
  Sense strand starting at position 3846 of SEQ ID NO: 1552
aaggcauguaagugggaau

SEQ ID NO: 121869 - RNA, 19 nt, Artificial Sequence
  Description of Artificial Sequence: Synthetic oligonucleotide
  Antisense strand to SEQ ID NO: 121868
auucccacuuacaugccuu

SEQ ID NO: 121870 - RNA, 19 nt, Artificial Sequence
  Description of Artificial Sequence: Synthetic oligonucleotide
  Sense strand starting at position 3847 of SEQ ID NO: 1552
aggcauguaagugggaaua

SEQ ID NO: 121871 - RNA, 19 nt, Artificial Sequence
  Description of Artificial Sequence: Synthetic oligonucleotide
  Antisense strand to SEQ ID NO: 121870
uauucccacuuacaugccu

SEQ ID NO: 121872 - RNA, 19 nt, Artificial Sequence
  Description of Artificial Sequence: Synthetic oligonucleotide
  Sense strand starting at position 3859 of SEQ ID NO: 1552
gggaauaguucuccaggca

SEQ ID NO: 121873 - RNA, 19 nt, Artificial Sequence
  Description of Artificial Sequence: Synthetic oligonucleotide
  Antisense strand to SEQ ID NO: 121872
ugccuggagaacuauuccc

SEQ ID NO: 121874 - RNA, 19 nt, Artificial Sequence
  Description of Artificial Sequence: Synthetic oligonucleotide
  Sense strand starting at position 3860 of SEQ ID NO: 1552
ggaauaguucuccaggcac

SEQ ID NO: 121875 - RNA, 19 nt, Artificial Sequence
  Description of Artificial Sequence: Synthetic oligonucleotide
  Antisense strand to SEQ ID NO: 121874
gugccuggagaacuauucc

SEQ ID NO: 121876 - RNA, 19 nt, Artificial Sequence
  Description of Artificial Sequence: Synthetic oligonucleotide
  Sense strand starting at position 3874 of SEQ ID NO: 1552
ggcacauguauauguggaa

SEQ ID NO: 121877 - RNA, 19 nt, Artificial Sequence
  Description of Artificial Sequence: Synthetic oligonucleotide
  Antisense strand to SEQ ID NO: 121876
uuccacauauacaugugcc

SEQ ID NO: 121878 - RNA, 19 nt, Artificial Sequence
  Description of Artificial Sequence: Synthetic oligonucleotide
  Sense strand starting at position 3875 of SEQ ID NO: 1552
gcacauguauauguggaaa

SEQ ID NO: 121879 - RNA, 19 nt, Artificial Sequence
  Description of Artificial Sequence: Synthetic oligonucleotide
  Antisense strand to SEQ ID NO: 121878
uuuccacauauacaugugc

SEQ ID NO: 121880 - RNA, 19 nt, Artificial Sequence
  Description of Artificial Sequence: Synthetic oligonucleotide
  Sense strand starting at position 3918 of SEQ ID NO: 1552
augucaggauagucuaaca

SEQ ID NO: 121881 - RNA, 19 nt, Artificial Sequence
  Description of Artificial Sequence: Synthetic oligonucleotide
  Antisense strand to SEQ ID NO: 121880
uguuagacuauccugacau

SEQ ID NO: 121882 - RNA, 19 nt, Artificial Sequence
  Description of Artificial Sequence: Synthetic oligonucleotide
  Sense strand starting at position 3826 of SEQ ID NO: 1553
aggugaaaguccuccuuuc

SEQ ID NO: 121883 - RNA, 19 nt, Artificial Sequence
  Description of Artificial Sequence: Synthetic oligonucleotide
  Antisense strand to SEQ ID NO: 121882
gaaaggaggacuuucaccu

SEQ ID NO: 121884 - RNA, 19 nt, Artificial Sequence
  Description of Artificial Sequence: Synthetic oligonucleotide
  Sense strand starting at position 3682 of SEQ ID NO: 1553
gaagccaugucgccuaacu

SEQ ID NO: 121885 - RNA, 19 nt, Artificial Sequence
  Description of Artificial Sequence: Synthetic oligonucleotide
  Antisense strand to SEQ ID NO: 121884
aguuaggcgacauggcuuc

SEQ ID NO: 121886 - RNA, 19 nt, Artificial Sequence
  Description of Artificial Sequence: Synthetic oligonucleotide
  Sense strand starting at position 3450 of SEQ ID NO: 1553
gugguaguauccuccagag

SEQ ID NO: 121887 - RNA, 19 nt, Artificial Sequence
  Description of Artificial Sequence: Synthetic oligonucleotide
  Antisense strand to SEQ ID NO: 121886
cucuggaggauacuaccac

SEQ ID NO: 121888 - RNA, 19 nt, Artificial Sequence
  Description of Artificial Sequence: Synthetic oligonucleotide
  Sense strand starting at position 3377 of SEQ ID NO: 1553
ccagcugcuguuggaaauu

SEQ ID NO: 121889 - RNA, 19 nt, Artificial Sequence
  Description of Artificial Sequence: Synthetic oligonucleotide
  Antisense strand to SEQ ID NO: 121888
aauuuccaacagcagcugg

SEQ ID NO: 121890 - RNA, 19 nt, Artificial Sequence
  Description of Artificial Sequence: Synthetic oligonucleotide
  Sense strand starting at position 3259 of SEQ ID NO: 1553
gagugcuaauuggcacauu

SEQ ID NO: 121891 - RNA, 19 nt, Artificial Sequence
  Description of Artificial Sequence: Synthetic oligonucleotide
  Antisense strand to SEQ ID NO: 121890
aaugugccaauuagcacuc

SEQ ID NO: 121892 - RNA, 19 nt, Artificial Sequence
  Description of Artificial Sequence: Synthetic oligonucleotide
  Sense strand starting at position 3044 of SEQ ID NO: 1553
auguauugugaagagcgaa

SEQ ID NO: 121893 - RNA, 19 nt, Artificial Sequence
  Description of Artificial Sequence: Synthetic oligonucleotide
  Antisense strand to SEQ ID NO: 121892
uucgcucuucacaauacau

SEQ ID NO: 121894 - RNA, 19 nt, Artificial Sequence
  Description of Artificial Sequence: Synthetic oligonucleotide
  Sense strand starting at position 2848 of SEQ ID NO: 1553
gaucauagaucucaggagu

SEQ ID NO: 121895 - RNA, 19 nt, Artificial Sequence
  Description of Artificial Sequence: Synthetic oligonucleotide
  Antisense strand to SEQ ID NO: 121894
acuccugagaucuaugauc

SEQ ID NO: 121896 - RNA, 19 nt, Artificial Sequence
  Description of Artificial Sequence: Synthetic oligonucleotide
  Sense strand starting at position 2841 of SEQ ID NO: 1553
uguggaagaucauagaucu

SEQ ID NO: 121897 - RNA, 19 nt, Artificial Sequence
  Description of Artificial Sequence: Synthetic oligonucleotide
  Antisense strand to SEQ ID NO: 121896
agaucuaugaucuuccaca

SEQ ID NO: 121898 - RNA, 19 nt, Artificial Sequence
  Description of Artificial Sequence: Synthetic oligonucleotide
  Sense strand starting at position 2833 of SEQ ID NO: 1553
cuguuugauguggaagauc

SEQ ID NO: 121899 - RNA, 19 nt, Artificial Sequence
  Description of Artificial Sequence: Synthetic oligonucleotide
  Antisense strand to SEQ ID NO: 121898
gaucuuccacaucaaacag

SEQ ID NO: 121900 - RNA, 19 nt, Artificial Sequence
  Description of Artificial Sequence: Synthetic oligonucleotide
  Sense strand starting at position 2831 of SEQ ID NO: 1553
gccuguuugauguggaaga

SEQ ID NO: 121901 - RNA, 19 nt, Artificial Sequence
  Description of Artificial Sequence: Synthetic oligonucleotide
  Antisense strand to SEQ ID NO: 121900
ucuuccacaucaaacaggc

SEQ ID NO: 121902 - RNA, 19 nt, Artificial Sequence
  Description of Artificial Sequence: Synthetic oligonucleotide
  Sense strand starting at position 2825 of SEQ ID NO: 1553
ugaagugccuguuugaugu

SEQ ID NO: 121903 - RNA, 19 nt, Artificial Sequence
  Description of Artificial Sequence: Synthetic oligonucleotide
  Antisense strand to SEQ ID NO: 121902
acaucaaacaggcacuuca

SEQ ID NO: 121904 - RNA, 19 nt, Artificial Sequence
  Description of Artificial Sequence: Synthetic oligonucleotide
  Sense strand starting at position 2822 of SEQ ID NO: 1553
uugugaagugccuguuuga

SEQ ID NO: 121905 - RNA, 19 nt, Artificial Sequence
  Description of Artificial Sequence: Synthetic oligonucleotide
  Antisense strand to SEQ ID NO: 121904
ucaaacaggcacuucacaa

SEQ ID NO: 121906 - RNA, 19 nt, Artificial Sequence
  Description of Artificial Sequence: Synthetic oligonucleotide
  Sense strand starting at position 2355 of SEQ ID NO: 1553
gauguugcagauuaagauu

SEQ ID NO: 121907 - RNA, 19 nt, Artificial Sequence
  Description of Artificial Sequence: Synthetic oligonucleotide
  Antisense strand to SEQ ID NO: 121906
aaucuuaaucugcaacauc

SEQ ID NO: 121908 - RNA, 19 nt, Artificial Sequence
  Description of Artificial Sequence: Synthetic oligonucleotide
  Sense strand starting at position 2341 of SEQ ID NO: 1553
ggguaaagccaagagaugu

SEQ ID NO: 121909 - RNA, 19 nt, Artificial Sequence
  Description of Artificial Sequence: Synthetic oligonucleotide
  Antisense strand to SEQ ID NO: 121908
acaucucuuggcuuuaccc

SEQ ID NO: 121910 - RNA, 19 nt, Artificial Sequence
  Description of Artificial Sequence: Synthetic oligonucleotide
  Sense strand starting at position 1409 of SEQ ID NO: 1553
cagaauaaucucgggcagu

SEQ ID NO: 121911 - RNA, 19 nt, Artificial Sequence
  Description of Artificial Sequence: Synthetic oligonucleotide
  Antisense strand to SEQ ID NO: 121910
acugcccgagauuauucug

SEQ ID NO: 121912 - RNA, 19 nt, Artificial Sequence
  Description of Artificial Sequence: Synthetic oligonucleotide
  Sense strand starting at position 1353 of SEQ ID NO: 1553
gccuuacaucccuaggaga

SEQ ID NO: 121913 - RNA, 19 nt, Artificial Sequence
  Description of Artificial Sequence: Synthetic oligonucleotide
  Antisense strand to SEQ ID NO: 121912
ucuccuagggauguaaggc

SEQ ID NO: 121914 - RNA, 19 nt, Artificial Sequence
  Description of Artificial Sequence: Synthetic oligonucleotide
  Sense strand starting at position 1343 of SEQ ID NO: 1553
gaaugugagugccuuacau

SEQ ID NO: 121915 - RNA, 19 nt, Artificial Sequence
  Description of Artificial Sequence: Synthetic oligonucleotide
  Antisense strand to SEQ ID NO: 121914
auguaaggcacucacauuc

SEQ ID NO: 121916 - RNA, 19 nt, Artificial Sequence
  Description of Artificial Sequence: Synthetic oligonucleotide
  Sense strand starting at position 1340 of SEQ ID NO: 1553
aaggaaugugagugccuua

SEQ ID NO: 121917 - RNA, 19 nt, Artificial Sequence
  Description of Artificial Sequence: Synthetic oligonucleotide
  Antisense strand to SEQ ID NO: 121916
uaaggcacucacauuccuu

SEQ ID NO: 121918 - RNA, 19 nt, Artificial Sequence
  Description of Artificial Sequence: Synthetic oligonucleotide
  Sense strand starting at position 1339 of SEQ ID NO: 1553
gaaggaaugugagugccuu

SEQ ID NO: 121919 - RNA, 19 nt, Artificial Sequence
  Description of Artificial Sequence: Synthetic oligonucleotide
  Antisense strand to SEQ ID NO: 121918
aaggcacucacauuccuuc

SEQ ID NO: 121920 - RNA, 19 nt, Artificial Sequence
  Description of Artificial Sequence: Synthetic oligonucleotide
  Sense strand starting at position 1236 of SEQ ID NO: 1553
aacguuccugacugaauga

SEQ ID NO: 121921 - RNA, 19 nt, Artificial Sequence
  Description of Artificial Sequence: Synthetic oligonucleotide
  Antisense strand to SEQ ID NO: 121920
ucauucagucaggaacguu

SEQ ID NO: 121922 - RNA, 19 nt, Artificial Sequence
  Description of Artificial Sequence: Synthetic oligonucleotide
  Sense strand starting at position 1235 of SEQ ID NO: 1553
caacguuccugacugaaug

SEQ ID NO: 121923 - RNA, 19 nt, Artificial Sequence
  Description of Artificial Sequence: Synthetic oligonucleotide
  Antisense strand to SEQ ID NO: 121922
cauucagucaggaacguug

SEQ ID NO: 121924 - RNA, 19 nt, Artificial Sequence
  Description of Artificial Sequence: Synthetic oligonucleotide
  Sense strand starting at position 1132 of SEQ ID NO: 1553
gaagaccuaguuuguaaca

SEQ ID NO: 121925 - RNA, 19 nt, Artificial Sequence
  Description of Artificial Sequence: Synthetic oligonucleotide
  Antisense strand to SEQ ID NO: 121924
uguuacaaacuaggucuuc

SEQ ID NO: 121926 - RNA, 19 nt, Artificial Sequence
  Description of Artificial Sequence: Synthetic oligonucleotide
  Sense strand starting at position 1054 of SEQ ID NO: 1553
caugaacaguguucuuuga

SEQ ID NO: 121927 - RNA, 19 nt, Artificial Sequence
  Description of Artificial Sequence: Synthetic oligonucleotide
  Antisense strand to SEQ ID NO: 121926
ucaaagaacacuguucaug

SEQ ID NO: 121928 - RNA, 19 nt, Artificial Sequence
  Description of Artificial Sequence: Synthetic oligonucleotide
  Sense strand starting at position 1017 of SEQ ID NO: 1553
uccaaagucucugcuuuga

SEQ ID NO: 121929 - RNA, 19 nt, Artificial Sequence
  Description of Artificial Sequence: Synthetic oligonucleotide
  Antisense strand to SEQ ID NO: 121928
ucaaagcagagacuuugga

SEQ ID NO: 121930 - RNA, 19 nt, Artificial Sequence
  Description of Artificial Sequence: Synthetic oligonucleotide
  Sense strand starting at position 1006 of SEQ ID NO: 1553
ggagacgucuuuccaaagu

SEQ ID NO: 121931 - RNA, 19 nt, Artificial Sequence
  Description of Artificial Sequence: Synthetic oligonucleotide
  Antisense strand to SEQ ID NO: 121930
acuuuggaaagacgucucc

SEQ ID NO: 121932 - RNA, 19 nt, Artificial Sequence
  Description of Artificial Sequence: Synthetic oligonucleotide
  Sense strand starting at position 979 of SEQ ID NO: 1553
ugagacugugccuacaaau

SEQ ID NO: 121933 - RNA, 19 nt, Artificial Sequence
  Description of Artificial Sequence: Synthetic oligonucleotide
  Antisense strand to SEQ ID NO: 121932
auuuguaggcacagucuca

SEQ ID NO: 121934 - RNA, 19 nt, Artificial Sequence
  Description of Artificial Sequence: Synthetic oligonucleotide
  Sense strand starting at position 978 of SEQ ID NO: 1553
augagacugugccuacaaa

SEQ ID NO: 121935 - RNA, 19 nt, Artificial Sequence
  Description of Artificial Sequence: Synthetic oligonucleotide
  Antisense strand to SEQ ID NO: 121934
uuuguaggcacagucucau

SEQ ID NO: 121936 - RNA, 19 nt, Artificial Sequence
  Description of Artificial Sequence: Synthetic oligonucleotide
  Sense strand starting at position 967 of SEQ ID NO: 1553
uguuucuggagaugagacu

SEQ ID NO: 121937 - RNA, 19 nt, Artificial Sequence
  Description of Artificial Sequence: Synthetic oligonucleotide
  Antisense strand to SEQ ID NO: 121936
agucucaucuccagaaaca

SEQ ID NO: 121938 - RNA, 19 nt, Artificial Sequence
  Description of Artificial Sequence: Synthetic oligonucleotide
  Sense strand starting at position 960 of SEQ ID NO: 1553
ugauccuuguuucuggaga

SEQ ID NO: 121939 - RNA, 19 nt, Artificial Sequence
  Description of Artificial Sequence: Synthetic oligonucleotide
  Antisense strand to SEQ ID NO: 121938
ucuccagaaacaaggauca

SEQ ID NO: 121940 - RNA, 19 nt, Artificial Sequence
  Description of Artificial Sequence: Synthetic oligonucleotide
  Sense strand starting at position 823 of SEQ ID NO: 1553
guaaguagcuggccuacau

SEQ ID NO: 121941 - RNA, 19 nt, Artificial Sequence
  Description of Artificial Sequence: Synthetic oligonucleotide
  Antisense strand to SEQ ID NO: 121940
auguaggccagcuacuuac

SEQ ID NO: 121942 - RNA, 19 nt, Artificial Sequence
  Description of Artificial Sequence: Synthetic oligonucleotide
  Sense strand starting at position 810 of SEQ ID NO: 1553
ggcuacaucacagguaagu

SEQ ID NO: 121943 - RNA, 19 nt, Artificial Sequence
  Description of Artificial Sequence: Synthetic oligonucleotide
  Antisense strand to SEQ ID NO: 121942
acuuaccugugauguagcc

SEQ ID NO: 121944 - RNA, 19 nt, Artificial Sequence
  Description of Artificial Sequence: Synthetic oligonucleotide
  Sense strand starting at position 708 of SEQ ID NO: 1553
ucaaguauuuggcauauau

SEQ ID NO: 121945 - RNA, 19 nt, Artificial Sequence
  Description of Artificial Sequence: Synthetic oligonucleotide
  Antisense strand to SEQ ID NO: 121944
auauaugccaaauacuuga

SEQ ID NO: 121946 - RNA, 19 nt, Artificial Sequence
  Description of Artificial Sequence: Synthetic oligonucleotide
  Sense strand starting at position 664 of SEQ ID NO: 1553
acagaaagauaauagcuaa

SEQ ID NO: 121947 - RNA, 19 nt, Artificial Sequence
  Description of Artificial Sequence: Synthetic oligonucleotide
  Antisense strand to SEQ ID NO: 121946
uuagcuauuaucuuucugu

SEQ ID NO: 121948 - RNA, 19 nt, Artificial Sequence
  Description of Artificial Sequence: Synthetic oligonucleotide
  Sense strand starting at position 608 of SEQ ID NO: 1553
gggaauucuucuguuaaau

SEQ ID NO: 121949 - RNA, 19 nt, Artificial Sequence
  Description of Artificial Sequence: Synthetic oligonucleotide
  Antisense strand to SEQ ID NO: 121948
auuuaacagaagaauuccc

SEQ ID NO: 121950 - RNA, 19 nt, Artificial Sequence
  Description of Artificial Sequence: Synthetic oligonucleotide
  Sense strand starting at position 595 of SEQ ID NO: 1553
aucuaaugucuuugggaau

SEQ ID NO: 121951 - RNA, 19 nt, Artificial Sequence
  Description of Artificial Sequence: Synthetic oligonucleotide
  Antisense strand to SEQ ID NO: 121950
auucccaaagacauuagau

SEQ ID NO: 121952 - RNA, 19 nt, Artificial Sequence
  Description of Artificial Sequence: Synthetic oligonucleotide
  Sense strand starting at position 494 of SEQ ID NO: 1553
uaauuagcucccuggguga

SEQ ID NO: 121953 - RNA, 19 nt, Artificial Sequence
  Description of Artificial Sequence: Synthetic oligonucleotide
  Antisense strand to SEQ ID NO: 121952
ucacccagggagcuaauua

SEQ ID NO: 121954 - RNA, 19 nt, Artificial Sequence
  Description of Artificial Sequence: Synthetic oligonucleotide
  Sense strand starting at position 353 of SEQ ID NO: 1553
ucugaaagauugccaucau

SEQ ID NO: 121955 - RNA, 19 nt, Artificial Sequence
  Description of Artificial Sequence: Synthetic oligonucleotide
  Antisense strand to SEQ ID NO: 121954
augauggcaaucuuucaga

SEQ ID NO: 121956 - RNA, 19 nt, Artificial Sequence
  Description of Artificial Sequence: Synthetic oligonucleotide
  Sense strand starting at position 161 of SEQ ID NO: 1553
aaauccucacguuggcaua

SEQ ID NO: 121957 - RNA, 19 nt, Artificial Sequence
  Description of Artificial Sequence: Synthetic oligonucleotide
  Antisense strand to SEQ ID NO: 121956
uaugccaacgugaggauuu

SEQ ID NO: 121958 - RNA, 19 nt, Artificial Sequence
  Description of Artificial Sequence: Synthetic oligonucleotide
  Sense strand starting at position 102 of SEQ ID NO: 1553
ccuguaguguguccuacaa

SEQ ID NO: 121959 - RNA, 19 nt, Artificial Sequence
  Description of Artificial Sequence: Synthetic oligonucleotide
  Antisense strand to SEQ ID NO: 121958
uuguaggacacacuacagg

SEQ ID NO: 121960 - RNA, 19 nt, Artificial Sequence
  Description of Artificial Sequence: Synthetic oligonucleotide
  Sense strand starting at position 37 of SEQ ID NO: 1553
cgaauuguuuccuuugcua

SEQ ID NO: 121961 - RNA, 19 nt, Artificial Sequence
  Description of Artificial Sequence: Synthetic oligonucleotide
  Antisense strand to SEQ ID NO: 121960
uagcaaaggaaacaauucg

SEQ ID NO: 121962 - RNA, 19 nt, Artificial Sequence
  Description of Artificial Sequence: Synthetic oligonucleotide
  Sense strand starting at position 3753 of SEQ ID NO: 1554
cugaguuauucuuucccuu

SEQ ID NO: 121963 - RNA, 19 nt, Artificial Sequence
  Description of Artificial Sequence: Synthetic oligonucleotide
  Antisense strand to SEQ ID NO: 121962
aagggaaagaauaacucag

SEQ ID NO: 121964 - RNA, 19 nt, Artificial Sequence
  Description of Artificial Sequence: Synthetic oligonucleotide
  Sense strand starting at position 3743 of SEQ ID NO: 1554
augccucuuccugaguuau

SEQ ID NO: 121965 - RNA, 19 nt, Artificial Sequence
  Description of Artificial Sequence: Synthetic oligonucleotide
  Antisense strand to SEQ ID NO: 121964
auaacucaggaagaggcau

SEQ ID NO: 121966 - RNA, 19 nt, Artificial Sequence
  Description of Artificial Sequence: Synthetic oligonucleotide
  Sense strand starting at position 3583 of SEQ ID NO: 1554
agugcuuucugggucaaca

SEQ ID NO: 121967 - RNA, 19 nt, Artificial Sequence
  Description of Artificial Sequence: Synthetic oligonucleotide
  Antisense strand to SEQ ID NO: 121966
uguugacccagaaagcacu

SEQ ID NO: 121968 - RNA, 19 nt, Artificial Sequence
  Description of Artificial Sequence: Synthetic oligonucleotide
  Sense strand starting at position 3532 of SEQ ID NO: 1554
cagcaaucaggguaaguca

SEQ ID NO: 121969 - RNA, 19 nt, Artificial Sequence
  Description of Artificial Sequence: Synthetic oligonucleotide
  Antisense strand to SEQ ID NO: 121968
ugacuuacccugauugcug

SEQ ID NO: 121970 - RNA, 19 nt, Artificial Sequence
  Description of Artificial Sequence: Synthetic oligonucleotide
  Sense strand starting at position 3446 of SEQ ID NO: 1554
ggaauugugucaccuucuc

SEQ ID NO: 121971 - RNA, 19 nt, Artificial Sequence
  Description of Artificial Sequence: Synthetic oligonucleotide
  Antisense strand to SEQ ID NO: 121970
gagaaggugacacaauucc

SEQ ID NO: 121972 - RNA, 19 nt, Artificial Sequence
  Description of Artificial Sequence: Synthetic oligonucleotide
  Sense strand starting at position 3439 of SEQ ID NO: 1554
gcccaaaggaauuguguca

SEQ ID NO: 121973 - RNA, 19 nt, Artificial Sequence
  Description of Artificial Sequence: Synthetic oligonucleotide
  Antisense strand to SEQ ID NO: 121972
ugacacaauuccuuugggc

SEQ ID NO: 121974 - RNA, 19 nt, Artificial Sequence
  Description of Artificial Sequence: Synthetic oligonucleotide
  Sense strand starting at position 3430 of SEQ ID NO: 1554
ccauaaguugcccaaagga

SEQ ID NO: 121975 - RNA, 19 nt, Artificial Sequence
  Description of Artificial Sequence: Synthetic oligonucleotide
  Antisense strand to SEQ ID NO: 121974
uccuuugggcaacuuaugg

SEQ ID NO: 121976 - RNA, 19 nt, Artificial Sequence
  Description of Artificial Sequence: Synthetic oligonucleotide
  Sense strand starting at position 3297 of SEQ ID NO: 1554
ggcucugcgacagauggaa

SEQ ID NO: 121977 - RNA, 19 nt, Artificial Sequence
  Description of Artificial Sequence: Synthetic oligonucleotide
  Antisense strand to SEQ ID NO: 121976
uuccaucugucgcagagcc

SEQ ID NO: 121978 - RNA, 19 nt, Artificial Sequence
  Description of Artificial Sequence: Synthetic oligonucleotide
  Sense strand starting at position 3094 of SEQ ID NO: 1554
aagaauagaugggagcuaa

SEQ ID NO: 121979 - RNA, 19 nt, Artificial Sequence
  Description of Artificial Sequence: Synthetic oligonucleotide
  Antisense strand to SEQ ID NO: 121978
uuagcucccaucuauucuu

SEQ ID NO: 121980 - RNA, 19 nt, Artificial Sequence
  Description of Artificial Sequence: Synthetic oligonucleotide
  Sense strand starting at position 3059 of SEQ ID NO: 1554
uuggcagcuuccucaucaa

SEQ ID NO: 121981 - RNA, 19 nt, Artificial Sequence
  Description of Artificial Sequence: Synthetic oligonucleotide
  Antisense strand to SEQ ID NO: 121980
uugaugaggaagcugccaa

SEQ ID NO: 121982 - RNA, 19 nt, Artificial Sequence
  Description of Artificial Sequence: Synthetic oligonucleotide
  Sense strand starting at position 3022 of SEQ ID NO: 1554
uguugccuguaauuggaau

SEQ ID NO: 121983 - RNA, 19 nt, Artificial Sequence
  Description of Artificial Sequence: Synthetic oligonucleotide
  Antisense strand to SEQ ID NO: 121982
auuccaauuacaggcaaca

SEQ ID NO: 121984 - RNA, 19 nt, Artificial Sequence
  Description of Artificial Sequence: Synthetic oligonucleotide
  Sense strand starting at position 2969 of SEQ ID NO: 1554
agaguaggagcucaugguu

SEQ ID NO: 121985 - RNA, 19 nt, Artificial Sequence
  Description of Artificial Sequence: Synthetic oligonucleotide
  Antisense strand to SEQ ID NO: 121984
aaccaugagcuccuacucu

SEQ ID NO: 121986 - RNA, 19 nt, Artificial Sequence
  Description of Artificial Sequence: Synthetic oligonucleotide
  Sense strand starting at position 2844 of SEQ ID NO: 1554
uccacuuuguuugcaaaga

SEQ ID NO: 121987 - RNA, 19 nt, Artificial Sequence
  Description of Artificial Sequence: Synthetic oligonucleotide
  Antisense strand to SEQ ID NO: 121986
ucuuugcaaacaaagugga

SEQ ID NO: 121988 - RNA, 19 nt, Artificial Sequence
  Description of Artificial Sequence: Synthetic oligonucleotide
  Sense strand starting at position 2816 of SEQ ID NO: 1554
ggugcuggaguccaaaguu

SEQ ID NO: 121989 - RNA, 19 nt, Artificial Sequence
  Description of Artificial Sequence: Synthetic oligonucleotide
  Antisense strand to SEQ ID NO: 121988
aacuuuggacuccagcacc

SEQ ID NO: 121990 - RNA, 19 nt, Artificial Sequence
  Description of Artificial Sequence: Synthetic oligonucleotide
  Sense strand starting at position 2781 of SEQ ID NO: 1554
gcagauuccgagugaaaug

SEQ ID NO: 121991 - RNA, 19 nt, Artificial Sequence
  Description of Artificial Sequence: Synthetic oligonucleotide
  Antisense strand to SEQ ID NO: 121990
cauuucacucggaaucugc

SEQ ID NO: 121992 - RNA, 19 nt, Artificial Sequence
  Description of Artificial Sequence: Synthetic oligonucleotide
  Sense strand starting at position 2701 of SEQ ID NO: 1554
gaggcuugcucuuucugga

SEQ ID NO: 121993 - RNA, 19 nt, Artificial Sequence
  Description of Artificial Sequence: Synthetic oligonucleotide
  Antisense strand to SEQ ID NO: 121992
uccagaaagagcaagccuc

SEQ ID NO: 121994 - RNA, 19 nt, Artificial Sequence
  Description of Artificial Sequence: Synthetic oligonucleotide
  Sense strand starting at position 2683 of SEQ ID NO: 1554
guacauguggcaugacaug

SEQ ID NO: 121995 - RNA, 19 nt, Artificial Sequence
  Description of Artificial Sequence: Synthetic oligonucleotide
  Antisense strand to SEQ ID NO: 121994
caugucaugccacauguac

SEQ ID NO: 121996 - RNA, 19 nt, Artificial Sequence
  Description of Artificial Sequence: Synthetic oligonucleotide
  Sense strand starting at position 2676 of SEQ ID NO: 1554
ucagauuguacauguggca

SEQ ID NO: 121997 - RNA, 19 nt, Artificial Sequence
  Description of Artificial Sequence: Synthetic oligonucleotide
  Antisense strand to SEQ ID NO: 121996
ugccacauguacaaucuga

SEQ ID NO: 121998 - RNA, 19 nt, Artificial Sequence
  Description of Artificial Sequence: Synthetic oligonucleotide
  Sense strand starting at position 2662 of SEQ ID NO: 1554
gagagcuccuggccucaga

SEQ ID NO: 121999 - RNA, 19 nt, Artificial Sequence
  Description of Artificial Sequence: Synthetic oligonucleotide
  Antisense strand to SEQ ID NO: 121998
ucugaggccaggagcucuc

SEQ ID NO: 122000 - RNA, 19 nt, Artificial Sequence
  Description of Artificial Sequence: Synthetic oligonucleotide
  Sense strand starting at position 2540 of SEQ ID NO: 1554
cucagcuuuccagaagauu

SEQ ID NO: 122001 - RNA, 19 nt, Artificial Sequence
  Description of Artificial Sequence: Synthetic oligonucleotide
  Antisense strand to SEQ ID NO: 122000
aaucuucuggaaagcugag

SEQ ID NO: 122002 - RNA, 19 nt, Artificial Sequence
  Description of Artificial Sequence: Synthetic oligonucleotide
  Sense strand starting at position 2498 of SEQ ID NO: 1554
gacgucauauagguacauu

SEQ ID NO: 122003 - RNA, 19 nt, Artificial Sequence
  Description of Artificial Sequence: Synthetic oligonucleotide
  Antisense strand to SEQ ID NO: 122002
aauguaccuauaugacguc

SEQ ID NO: 122004 - RNA, 19 nt, Artificial Sequence
  Description of Artificial Sequence: Synthetic oligonucleotide
  Sense strand starting at position 2497 of SEQ ID NO: 1554
agacgucauauagguacau

SEQ ID NO: 122005 - RNA, 19 nt, Artificial Sequence
  Description of Artificial Sequence: Synthetic oligonucleotide
  Antisense strand to SEQ ID NO: 122004
auguaccuauaugacgucu

SEQ ID NO: 122006 - RNA, 19 nt, Artificial Sequence
  Description of Artificial Sequence: Synthetic oligonucleotide
  Sense strand starting at position 2491 of SEQ ID NO: 1554
uugcaaagacgucauauag

SEQ ID NO: 122007 - RNA, 19 nt, Artificial Sequence
  Description of Artificial Sequence: Synthetic oligonucleotide
  Antisense strand to SEQ ID NO: 122006
cuauaugacgucuuugcaa

SEQ ID NO: 122008 - RNA, 19 nt, Artificial Sequence
  Description of Artificial Sequence: Synthetic oligonucleotide
  Sense strand starting at position 2413 of SEQ ID NO: 1554
ugaagagauugcuugcuuu

SEQ ID NO: 122009 - RNA, 19 nt, Artificial Sequence
  Description of Artificial Sequence: Synthetic oligonucleotide
  Antisense strand to SEQ ID NO: 122008
aaagcaagcaaucucuuca

SEQ ID NO: 122010 - RNA, 19 nt, Artificial Sequence
  Description of Artificial Sequence: Synthetic oligonucleotide
  Sense strand starting at position 2400 of SEQ ID NO: 1554
acuagcugcuccuugaaga

SEQ ID NO: 122011 - RNA, 19 nt, Artificial Sequence
  Description of Artificial Sequence: Synthetic oligonucleotide
  Antisense strand to SEQ ID NO: 122010
ucuucaaggagcagcuagu

SEQ ID NO: 122012 - RNA, 19 nt, Artificial Sequence
  Description of Artificial Sequence: Synthetic oligonucleotide
  Sense strand starting at position 2245 of SEQ ID NO: 1554
ccugcugaccagugagacu

SEQ ID NO: 122013 - RNA, 19 nt, Artificial Sequence
  Description of Artificial Sequence: Synthetic oligonucleotide
  Antisense strand to SEQ ID NO: 122012
agucucacuggucagcagg

SEQ ID NO: 122014 - RNA, 19 nt, Artificial Sequence
  Description of Artificial Sequence: Synthetic oligonucleotide
  Sense strand starting at position 2067 of SEQ ID NO: 1554
cccaaacagcgucagauua

SEQ ID NO: 122015 - RNA, 19 nt, Artificial Sequence
  Description of Artificial Sequence: Synthetic oligonucleotide
  Antisense strand to SEQ ID NO: 122014
uaaucugacgcuguuuggg

SEQ ID NO: 122016 - RNA, 19 nt, Artificial Sequence
  Description of Artificial Sequence: Synthetic oligonucleotide
  Sense strand starting at position 1998 of SEQ ID NO: 1554
ggacgauccuaucugauua

SEQ ID NO: 122017 - RNA, 19 nt, Artificial Sequence
  Description of Artificial Sequence: Synthetic oligonucleotide
  Antisense strand to SEQ ID NO: 122016
uaaucagauaggaucgucc

SEQ ID NO: 122018 - RNA, 19 nt, Artificial Sequence
  Description of Artificial Sequence: Synthetic oligonucleotide
  Sense strand starting at position 768 of SEQ ID NO: 1554
gccaaugggccucgagaau

SEQ ID NO: 122019 - RNA, 19 nt, Artificial Sequence
  Description of Artificial Sequence: Synthetic oligonucleotide
  Antisense strand to SEQ ID NO: 122018
auucucgaggcccauuggc

SEQ ID NO: 122020 - RNA, 19 nt, Artificial Sequence
  Description of Artificial Sequence: Synthetic oligonucleotide
  Sense strand starting at position 619 of SEQ ID NO: 1554
agaguuguugagcaaacuc

SEQ ID NO: 122021 - RNA, 19 nt, Artificial Sequence
  Description of Artificial Sequence: Synthetic oligonucleotide
  Antisense strand to SEQ ID NO: 122020
gaguuugcucaacaacucu

SEQ ID NO: 122022 - RNA, 19 nt, Artificial Sequence
  Description of Artificial Sequence: Synthetic oligonucleotide
  Sense strand starting at position 618 of SEQ ID NO: 1554
cagaguuguugagcaaacu

SEQ ID NO: 122023 - RNA, 19 nt, Artificial Sequence
  Description of Artificial Sequence: Synthetic oligonucleotide
  Antisense strand to SEQ ID NO: 122022
aguuugcucaacaacucug

SEQ ID NO: 122024 - RNA, 19 nt, Artificial Sequence
  Description of Artificial Sequence: Synthetic oligonucleotide
  Sense strand starting at position 616 of SEQ ID NO: 1554
ggcagaguuguugagcaaa

SEQ ID NO: 122025 - RNA, 19 nt, Artificial Sequence
  Description of Artificial Sequence: Synthetic oligonucleotide
  Antisense strand to SEQ ID NO: 122024
uuugcucaacaacucugcc

SEQ ID NO: 122026 - RNA, 19 nt, Artificial Sequence
  Description of Artificial Sequence: Synthetic oligonucleotide
  Sense strand starting at position 534 of SEQ ID NO: 1554
aaguccugggcugguaaua

SEQ ID NO: 122027 - RNA, 19 nt, Artificial Sequence
  Description of Artificial Sequence: Synthetic oligonucleotide
  Antisense strand to SEQ ID NO: 122026
uauuaccagcccaggacuu

SEQ ID NO: 122028 - RNA, 19 nt, Artificial Sequence
  Description of Artificial Sequence: Synthetic oligonucleotide
  Sense strand starting at position 442 of SEQ ID NO: 1554
auaagugacuugucaagca

SEQ ID NO: 122029 - RNA, 19 nt, Artificial Sequence
  Description of Artificial Sequence: Synthetic oligonucleotide
  Antisense strand to SEQ ID NO: 122028
ugcuugacaagucacuuau

SEQ ID NO: 122030 - RNA, 19 nt, Artificial Sequence
  Description of Artificial Sequence: Synthetic oligonucleotide
  Sense strand starting at position 440 of SEQ ID NO: 1554
ggauaagugacuugucaag

SEQ ID NO: 122031 - RNA, 19 nt, Artificial Sequence
  Description of Artificial Sequence: Synthetic oligonucleotide
  Antisense strand to SEQ ID NO: 122030
cuugacaagucacuuaucc

SEQ ID NO: 122032 - RNA, 19 nt, Artificial Sequence
  Description of Artificial Sequence: Synthetic oligonucleotide
  Sense strand starting at position 438 of SEQ ID NO: 1554
aaggauaagugacuuguca

SEQ ID NO: 122033 - RNA, 19 nt, Artificial Sequence
  Description of Artificial Sequence: Synthetic oligonucleotide
  Antisense strand to SEQ ID NO: 122032
ugacaagucacuuauccuu

SEQ ID NO: 122034 - RNA, 19 nt, Artificial Sequence
  Description of Artificial Sequence: Synthetic oligonucleotide
  Sense strand starting at position 394 of SEQ ID NO: 1554
ggacgauugucaccucccu

SEQ ID NO: 122035 - RNA, 19 nt, Artificial Sequence
  Description of Artificial Sequence: Synthetic oligonucleotide
  Antisense strand to SEQ ID NO: 122034
agggaggugacaaucgucc

SEQ ID NO: 122036 - RNA, 19 nt, Artificial Sequence
  Description of Artificial Sequence: Synthetic oligonucleotide
  Sense strand starting at position 147 of SEQ ID NO: 1554
ugaguaaggacuugccauc

SEQ ID NO: 122037 - RNA, 19 nt, Artificial Sequence
  Description of Artificial Sequence: Synthetic oligonucleotide
  Antisense strand to SEQ ID NO: 122036
gauggcaaguccuuacuca

SEQ ID NO: 122038 - RNA, 19 nt, Artificial Sequence
  Description of Artificial Sequence: Synthetic oligonucleotide
  Sense strand starting at position 135 of SEQ ID NO: 1554
gcuauacugagcugaguaa

SEQ ID NO: 122039 - RNA, 19 nt, Artificial Sequence
  Description of Artificial Sequence: Synthetic oligonucleotide
  Antisense strand to SEQ ID NO: 122038
uuacucagcucaguauagc

SEQ ID NO: 122040 - RNA, 19 nt, Artificial Sequence
  Description of Artificial Sequence: Synthetic oligonucleotide
  Sense strand starting at position 133 of SEQ ID NO: 1554
gggcuauacugagcugagu

SEQ ID NO: 122041 - RNA, 19 nt, Artificial Sequence
  Description of Artificial Sequence: Synthetic oligonucleotide
  Antisense strand to SEQ ID NO: 122040
acucagcucaguauagccc

SEQ ID NO: 122042 - RNA, 19 nt, Artificial Sequence
  Description of Artificial Sequence: Synthetic oligonucleotide
  Sense strand starting at position 435 of SEQ ID NO: 1556
cuguacauauuguuugaau

SEQ ID NO: 122043 - RNA, 19 nt, Artificial Sequence
  Description of Artificial Sequence: Synthetic oligonucleotide
  Antisense strand to SEQ ID NO: 122042
auucaaacaauauguacag

SEQ ID NO: 122044 - RNA, 19 nt, Artificial Sequence
  Description of Artificial Sequence: Synthetic oligonucleotide
  Sense strand starting at position 437 of SEQ ID NO: 1556
guacauauuguuugaauuc

SEQ ID NO: 122045 - RNA, 19 nt, Artificial Sequence
  Description of Artificial Sequence: Synthetic oligonucleotide
  Antisense strand to SEQ ID NO: 122044
gaauucaaacaauauguac

SEQ ID NO: 122046 - RNA, 19 nt, Artificial Sequence
  Description of Artificial Sequence: Synthetic oligonucleotide
  Sense strand starting at position 599 of SEQ ID NO: 1556
aggugauucuaaguagcag

SEQ ID NO: 122047 - RNA, 19 nt, Artificial Sequence
  Description of Artificial Sequence: Synthetic oligonucleotide
  Antisense strand to SEQ ID NO: 122046
cugcuacuuagaaucaccu

SEQ ID NO: 122048 - RNA, 19 nt, Artificial Sequence
  Description of Artificial Sequence: Synthetic oligonucleotide
  Sense strand starting at position 680 of SEQ ID NO: 1556
uggacucuauaguuagaag

SEQ ID NO: 122049 - RNA, 19 nt, Artificial Sequence
  Description of Artificial Sequence: Synthetic oligonucleotide
  Antisense strand to SEQ ID NO: 122048
cuucuaacuauagagucca

SEQ ID NO: 122050 - RNA, 19 nt, Artificial Sequence
  Description of Artificial Sequence: Synthetic oligonucleotide
  Sense strand starting at position 757 of SEQ ID NO: 1556
ugaugcaaacuguaagguu

SEQ ID NO: 122051 - RNA, 19 nt, Artificial Sequence
  Description of Artificial Sequence: Synthetic oligonucleotide
  Antisense strand to SEQ ID NO: 122050
aaccuuacaguuugcauca

SEQ ID NO: 122052 - RNA, 19 nt, Artificial Sequence
  Description of Artificial Sequence: Synthetic oligonucleotide
  Sense strand starting at position 764 of SEQ ID NO: 1556
aacuguaagguuuauuagu

SEQ ID NO: 122053 - RNA, 19 nt, Artificial Sequence
  Description of Artificial Sequence: Synthetic oligonucleotide
  Antisense strand to SEQ ID NO: 122052
acuaauaaaccuuacaguu

SEQ ID NO: 122054 - RNA, 19 nt, Artificial Sequence
  Description of Artificial Sequence: Synthetic oligonucleotide
  Sense strand starting at position 1070 of SEQ ID NO: 1556
ucuuucugugauuacaguu

SEQ ID NO: 122055 - RNA, 19 nt, Artificial Sequence
  Description of Artificial Sequence: Synthetic oligonucleotide
  Antisense strand to SEQ ID NO: 122054
aacuguaaucacagaaaga

SEQ ID NO: 122056 - RNA, 19 nt, Artificial Sequence
  Description of Artificial Sequence: Synthetic oligonucleotide
  Sense strand starting at position 1155 of SEQ ID NO: 1556
uuagauuugcaguguacug

SEQ ID NO: 122057 - RNA, 19 nt, Artificial Sequence
  Description of Artificial Sequence: Synthetic oligonucleotide
  Antisense strand to SEQ ID NO: 122056
caguacacugcaaaucuaa

SEQ ID NO: 122058 - RNA, 19 nt, Artificial Sequence
  Description of Artificial Sequence: Synthetic oligonucleotide
  Sense strand starting at position 1169 of SEQ ID NO: 1556
uacugaguagcuugaugaa

SEQ ID NO: 122059 - RNA, 19 nt, Artificial Sequence
  Description of Artificial Sequence: Synthetic oligonucleotide
  Antisense strand to SEQ ID NO: 122058
uucaucaagcuacucagua

SEQ ID NO: 122060 - RNA, 19 nt, Artificial Sequence
  Description of Artificial Sequence: Synthetic oligonucleotide
  Sense strand starting at position 1263 of SEQ ID NO: 1556
uacugucuugguuaucaga

SEQ ID NO: 122061 - RNA, 19 nt, Artificial Sequence
  Description of Artificial Sequence: Synthetic oligonucleotide
  Antisense strand to SEQ ID NO: 122060
ucugauaaccaagacagua

SEQ ID NO: 122062 - RNA, 19 nt, Artificial Sequence
  Description of Artificial Sequence: Synthetic oligonucleotide
  Sense strand starting at position 1271 of SEQ ID NO: 1556
ugguuaucagauugacuau

SEQ ID NO: 122063 - RNA, 19 nt, Artificial Sequence
  Description of Artificial Sequence: Synthetic oligonucleotide
  Antisense strand to SEQ ID NO: 122062
auagucaaucugauaacca

SEQ ID NO: 122064 - RNA, 19 nt, Artificial Sequence
  Description of Artificial Sequence: Synthetic oligonucleotide
  Sense strand starting at position 1355 of SEQ ID NO: 1556
gguagcauauuguuauaaa

SEQ ID NO: 122065 - RNA, 19 nt, Artificial Sequence
  Description of Artificial Sequence: Synthetic oligonucleotide
  Antisense strand to SEQ ID NO: 122064
uuuauaacaauaugcuacc

SEQ ID NO: 122066 - RNA, 19 nt, Artificial Sequence
  Description of Artificial Sequence: Synthetic oligonucleotide
  Sense strand starting at position 1390 of SEQ ID NO: 1556
uagugauuaugguuaaccu

SEQ ID NO: 122067 - RNA, 19 nt, Artificial Sequence
  Description of Artificial Sequence: Synthetic oligonucleotide
  Antisense strand to SEQ ID NO: 122066
agguuaaccauaaucacua

SEQ ID NO: 122068 - RNA, 19 nt, Artificial Sequence
  Description of Artificial Sequence: Synthetic oligonucleotide
  Sense strand starting at position 1394 of SEQ ID NO: 1556
gauuaugguuaaccucuga

SEQ ID NO: 122069 - RNA, 19 nt, Artificial Sequence
  Description of Artificial Sequence: Synthetic oligonucleotide
  Antisense strand to SEQ ID NO: 122068
ucagagguuaaccauaauc

SEQ ID NO: 122070 - RNA, 19 nt, Artificial Sequence
  Description of Artificial Sequence: Synthetic oligonucleotide
  Sense strand starting at position 1445 of SEQ ID NO: 1556
agguauguauguucaggaa

SEQ ID NO: 122071 - RNA, 19 nt, Artificial Sequence
  Description of Artificial Sequence: Synthetic oligonucleotide
  Antisense strand to SEQ ID NO: 122070
uuccugaacauacauaccu

SEQ ID NO: 122072 - RNA, 19 nt, Artificial Sequence
  Description of Artificial Sequence: Synthetic oligonucleotide
  Sense strand starting at position 1739 of SEQ ID NO: 1556
gaaucuguauuagugaaga

SEQ ID NO: 122073 - RNA, 19 nt, Artificial Sequence
  Description of Artificial Sequence: Synthetic oligonucleotide
  Antisense strand to SEQ ID NO: 122072
ucuucacuaauacagauuc

SEQ ID NO: 122074 - RNA, 19 nt, Artificial Sequence
  Description of Artificial Sequence: Synthetic oligonucleotide
  Sense strand starting at position 1976 of SEQ ID NO: 1556
cuuguugagugggugagaa

SEQ ID NO: 122075 - RNA, 19 nt, Artificial Sequence
  Description of Artificial Sequence: Synthetic oligonucleotide
  Antisense strand to SEQ ID NO: 122074
uucucacccacucaacaag

SEQ ID NO: 122076 - RNA, 19 nt, Artificial Sequence
  Description of Artificial Sequence: Synthetic oligonucleotide
  Sense strand starting at position 1986 of SEQ ID NO: 1556
gggugagaaucccugucua

SEQ ID NO: 122077 - RNA, 19 nt, Artificial Sequence
  Description of Artificial Sequence: Synthetic oligonucleotide
  Antisense strand to SEQ ID NO: 122076
uagacagggauucucaccc

SEQ ID NO: 122078 - RNA, 19 nt, Artificial Sequence
  Description of Artificial Sequence: Synthetic oligonucleotide
  Sense strand starting at position 1990 of SEQ ID NO: 1556
gagaaucccugucuacuga

SEQ ID NO: 122079 - RNA, 19 nt, Artificial Sequence
  Description of Artificial Sequence: Synthetic oligonucleotide
  Antisense strand to SEQ ID NO: 122078
ucaguagacagggauucuc

SEQ ID NO: 122080 - RNA, 19 nt, Artificial Sequence
  Description of Artificial Sequence: Synthetic oligonucleotide
  Sense strand starting at position 2059 of SEQ ID NO: 1556
auugaugacccuugcagaa

SEQ ID NO: 122081 - RNA, 19 nt, Artificial Sequence
  Description of Artificial Sequence: Synthetic oligonucleotide
  Antisense strand to SEQ ID NO: 122080
uucugcaagggucaucaau

SEQ ID NO: 122082 - RNA, 19 nt, Artificial Sequence
  Description of Artificial Sequence: Synthetic oligonucleotide
  Sense strand starting at position 2147 of SEQ ID NO: 1556
aacaaagaguagucaguuu

SEQ ID NO: 122083 - RNA, 19 nt, Artificial Sequence
  Description of Artificial Sequence: Synthetic oligonucleotide
  Antisense strand to SEQ ID NO: 122082
aaacugacuacucuuuguu

SEQ ID NO: 122084 - RNA, 19 nt, Artificial Sequence
  Description of Artificial Sequence: Synthetic oligonucleotide
  Sense strand starting at position 2202 of SEQ ID NO: 1556
aggucauuauuaguacuau

SEQ ID NO: 122085 - RNA, 19 nt, Artificial Sequence
  Description of Artificial Sequence: Synthetic oligonucleotide
  Antisense strand to SEQ ID NO: 122084
auaguacuaauaaugaccu

SEQ ID NO: 122086 - RNA, 19 nt, Artificial Sequence
  Description of Artificial Sequence: Synthetic oligonucleotide
  Sense strand starting at position 2224 of SEQ ID NO: 1556
ucgcaauaacaugaguugu

SEQ ID NO: 122087 - RNA, 19 nt, Artificial Sequence
  Description of Artificial Sequence: Synthetic oligonucleotide
  Antisense strand to SEQ ID NO: 122086
acaacucauguuauugcga

SEQ ID NO: 122088 - RNA, 19 nt, Artificial Sequence
  Description of Artificial Sequence: Synthetic oligonucleotide
  Sense strand starting at position 2226 of SEQ ID NO: 1556
gcaauaacaugaguuguau

SEQ ID NO: 122089 - RNA, 19 nt, Artificial Sequence
  Description of Artificial Sequence: Synthetic oligonucleotide
  Antisense strand to SEQ ID NO: 122088
auacaacucauguuauugc

SEQ ID NO: 122090 - RNA, 19 nt, Artificial Sequence
  Description of Artificial Sequence: Synthetic oligonucleotide
  Sense strand starting at position 2273 of SEQ ID NO: 1556
accuacuuugugugaaaca

SEQ ID NO: 122091 - RNA, 19 nt, Artificial Sequence
  Description of Artificial Sequence: Synthetic oligonucleotide
  Antisense strand to SEQ ID NO: 122090
uguuucacacaaaguaggu

SEQ ID NO: 122092 - RNA, 19 nt, Artificial Sequence
  Description of Artificial Sequence: Synthetic oligonucleotide
  Sense strand starting at position 2395 of SEQ ID NO: 1556
aaugaagugcuaugauuac

SEQ ID NO: 122093 - RNA, 19 nt, Artificial Sequence
  Description of Artificial Sequence: Synthetic oligonucleotide
  Antisense strand to SEQ ID NO: 122092
guaaucauagcacuucauu

SEQ ID NO: 122094 - RNA, 19 nt, Artificial Sequence
  Description of Artificial Sequence: Synthetic oligonucleotide
  Sense strand starting at position 2401 of SEQ ID NO: 1556
gugcuaugauuacuacaac

SEQ ID NO: 122095 - RNA, 19 nt, Artificial Sequence
  Description of Artificial Sequence: Synthetic oligonucleotide
  Antisense strand to SEQ ID NO: 122094
guuguaguaaucauagcac

SEQ ID NO: 122096 - RNA, 19 nt, Artificial Sequence
  Description of Artificial Sequence: Synthetic oligonucleotide
  Sense strand starting at position 2492 of SEQ ID NO: 1556
augggcugucuuuacagau

SEQ ID NO: 122097 - RNA, 19 nt, Artificial Sequence
  Description of Artificial Sequence: Synthetic oligonucleotide
  Antisense strand to SEQ ID NO: 122096
aucuguaaagacagcccau

SEQ ID NO: 122098 - RNA, 19 nt, Artificial Sequence
  Description of Artificial Sequence: Synthetic oligonucleotide
  Sense strand starting at position 2513 of SEQ ID NO: 1556
acuugcuuucuggauucua

SEQ ID NO: 122099 - RNA, 19 nt, Artificial Sequence
  Description of Artificial Sequence: Synthetic oligonucleotide
  Antisense strand to SEQ ID NO: 122098
uagaauccagaaagcaagu

SEQ ID NO: 122100 - RNA, 19 nt, Artificial Sequence
  Description of Artificial Sequence: Synthetic oligonucleotide
  Sense strand starting at position 2892 of SEQ ID NO: 1556
cagugauagugucuaaaua

SEQ ID NO: 122101 - RNA, 19 nt, Artificial Sequence
  Description of Artificial Sequence: Synthetic oligonucleotide
  Antisense strand to SEQ ID NO: 122100
uauuuagacacuaucacug

SEQ ID NO: 122102 - RNA, 19 nt, Artificial Sequence
  Description of Artificial Sequence: Synthetic oligonucleotide
  Sense strand starting at position 2893 of SEQ ID NO: 1556
agugauagugucuaaauaa

SEQ ID NO: 122103 - RNA, 19 nt, Artificial Sequence
  Description of Artificial Sequence: Synthetic oligonucleotide
  Antisense strand to SEQ ID NO: 122102
uuauuuagacacuaucacu

SEQ ID NO: 122104 - RNA, 19 nt, Artificial Sequence
  Description of Artificial Sequence: Synthetic oligonucleotide
  Sense strand starting at position 2959 of SEQ ID NO: 1556
uacucuuuguuaguaagag

SEQ ID NO: 122105 - RNA, 19 nt, Artificial Sequence
  Description of Artificial Sequence: Synthetic oligonucleotide
  Antisense strand to SEQ ID NO: 122104
cucuuacuaacaaagagua

SEQ ID NO: 122106 - RNA, 19 nt, Artificial Sequence
  Description of Artificial Sequence: Synthetic oligonucleotide
  Sense strand starting at position 2976 of SEQ ID NO: 1556
agggaaaccugucacauuu

SEQ ID NO: 122107 - RNA, 19 nt, Artificial Sequence
  Description of Artificial Sequence: Synthetic oligonucleotide
  Antisense strand to SEQ ID NO: 122106
aaaugugacagguuucccu

SEQ ID NO: 122108 - RNA, 19 nt, Artificial Sequence
  Description of Artificial Sequence: Synthetic oligonucleotide
  Sense strand starting at position 3232 of SEQ ID NO: 1556
agaguuucucagggcaauu

SEQ ID NO: 122109 - RNA, 19 nt, Artificial Sequence
  Description of Artificial Sequence: Synthetic oligonucleotide
  Antisense strand to SEQ ID NO: 122108
aauugcccugagaaacucu

SEQ ID NO: 122110 - RNA, 19 nt, Artificial Sequence
  Description of Artificial Sequence: Synthetic oligonucleotide
  Sense strand starting at position 3439 of SEQ ID NO: 1556
ucaaauauagcuugguacu

SEQ ID NO: 122111 - RNA, 19 nt, Artificial Sequence
  Description of Artificial Sequence: Synthetic oligonucleotide
  Antisense strand to SEQ ID NO: 122110
aguaccaagcuauauuuga

SEQ ID NO: 122112 - RNA, 19 nt, Artificial Sequence
  Description of Artificial Sequence: Synthetic oligonucleotide
  Sense strand starting at position 3445 of SEQ ID NO: 1556
auagcuugguacucauaug

SEQ ID NO: 122113 - RNA, 19 nt, Artificial Sequence
  Description of Artificial Sequence: Synthetic oligonucleotide
  Antisense strand to SEQ ID NO: 122112
cauaugaguaccaagcuau

SEQ ID NO: 122114 - RNA, 19 nt, Artificial Sequence
  Description of Artificial Sequence: Synthetic oligonucleotide
  Sense strand starting at position 3473 of SEQ ID NO: 1556
guaauauaggcacaagcau

SEQ ID NO: 122115 - RNA, 19 nt, Artificial Sequence
  Description of Artificial Sequence: Synthetic oligonucleotide
  Antisense strand to SEQ ID NO: 122114
augcuugugccuauauuac

SEQ ID NO: 122116 - RNA, 19 nt, Artificial Sequence
  Description of Artificial Sequence: Synthetic oligonucleotide
  Sense strand starting at position 3623 of SEQ ID NO: 1556
ggucauuacggacaucaca

SEQ ID NO: 122117 - RNA, 19 nt, Artificial Sequence
  Description of Artificial Sequence: Synthetic oligonucleotide
  Antisense strand to SEQ ID NO: 122116
ugugauguccguaaugacc

SEQ ID NO: 122118 - RNA, 19 nt, Artificial Sequence
  Description of Artificial Sequence: Synthetic oligonucleotide
  Sense strand starting at position 3763 of SEQ ID NO: 1556
uaugauucuugauugaugu

SEQ ID NO: 122119 - RNA, 19 nt, Artificial Sequence
  Description of Artificial Sequence: Synthetic oligonucleotide
  Antisense strand to SEQ ID NO: 122118
acaucaaucaagaaucaua

SEQ ID NO: 122120 - RNA, 19 nt, Artificial Sequence
  Description of Artificial Sequence: Synthetic oligonucleotide
  Sense strand starting at position 3764 of SEQ ID NO: 1556
augauucuugauugaugua

SEQ ID NO: 122121 - RNA, 19 nt, Artificial Sequence
  Description of Artificial Sequence: Synthetic oligonucleotide
  Antisense strand to SEQ ID NO: 122120
uacaucaaucaagaaucau

SEQ ID NO: 122122 - RNA, 19 nt, Artificial Sequence
  Description of Artificial Sequence: Synthetic oligonucleotide
  Sense strand starting at position 57 of SEQ ID NO: 1555
aaaggauauuucggaaaca

SEQ ID NO: 122123 - RNA, 19 nt, Artificial Sequence
  Description of Artificial Sequence: Synthetic oligonucleotide
  Antisense strand to SEQ ID NO: 122122
uguuuccgaaauauccuuu

SEQ ID NO: 122124 - RNA, 19 nt, Artificial Sequence
  Description of Artificial Sequence: Synthetic oligonucleotide
  Sense strand starting at position 58 of SEQ ID NO: 1555
aaggauauuucggaaacau

SEQ ID NO: 122125 - RNA, 19 nt, Artificial Sequence
  Description of Artificial Sequence: Synthetic oligonucleotide
  Antisense strand to SEQ ID NO: 122124
auguuuccgaaauauccuu

SEQ ID NO: 122126 - RNA, 19 nt, Artificial Sequence
  Description of Artificial Sequence: Synthetic oligonucleotide
  Sense strand starting at position 68 of SEQ ID NO: 1555
cggaaacauuuguacuaau

SEQ ID NO: 122127 - RNA, 19 nt, Artificial Sequence
  Description of Artificial Sequence: Synthetic oligonucleotide
  Antisense strand to SEQ ID NO: 122126
auuaguacaaauguuuccg

SEQ ID NO: 122128 - RNA, 19 nt, Artificial Sequence
  Description of Artificial Sequence: Synthetic oligonucleotide
  Sense strand starting at position 231 of SEQ ID NO: 1555
uuggcauuacaguauuaau

SEQ ID NO: 122129 - RNA, 19 nt, Artificial Sequence
  Description of Artificial Sequence: Synthetic oligonucleotide
  Antisense strand to SEQ ID NO: 122128
auuaauacuguaaugccaa

SEQ ID NO: 122130 - RNA, 19 nt, Artificial Sequence
  Description of Artificial Sequence: Synthetic oligonucleotide
  Sense strand starting at position 379 of SEQ ID NO: 1555
cuaagauucuaggcauauu

SEQ ID NO: 122131 - RNA, 19 nt, Artificial Sequence
  Description of Artificial Sequence: Synthetic oligonucleotide
  Antisense strand to SEQ ID NO: 122130
aauaugccuagaaucuuag

SEQ ID NO: 122132 - RNA, 19 nt, Artificial Sequence
  Description of Artificial Sequence: Synthetic oligonucleotide
  Sense strand starting at position 797 of SEQ ID NO: 1555
gaugacuaacaacguuauu

SEQ ID NO: 122133 - RNA, 19 nt, Artificial Sequence
  Description of Artificial Sequence: Synthetic oligonucleotide
  Antisense strand to SEQ ID NO: 122132
aauaacguuguuagucauc

SEQ ID NO: 122134 - RNA, 19 nt, Artificial Sequence
  Description of Artificial Sequence: Synthetic oligonucleotide
  Sense strand starting at position 921 of SEQ ID NO: 1555
auucuauauguggauguau

SEQ ID NO: 122135 - RNA, 19 nt, Artificial Sequence
  Description of Artificial Sequence: Synthetic oligonucleotide
  Antisense strand to SEQ ID NO: 122134
auacauccacauauagaau

SEQ ID NO: 122136 - RNA, 19 nt, Artificial Sequence
  Description of Artificial Sequence: Synthetic oligonucleotide
  Sense strand starting at position 1023 of SEQ ID NO: 1555
auauuauaugcaggcaauc

SEQ ID NO: 122137 - RNA, 19 nt, Artificial Sequence
  Description of Artificial Sequence: Synthetic oligonucleotide
  Antisense strand to SEQ ID NO: 122136
gauugccugcauauaauau

SEQ ID NO: 122138 - RNA, 19 nt, Artificial Sequence
  Description of Artificial Sequence: Synthetic oligonucleotide
  Sense strand starting at position 1216 of SEQ ID NO: 1555
auacuauaucuuggagauu

SEQ ID NO: 122139 - RNA, 19 nt, Artificial Sequence
  Description of Artificial Sequence: Synthetic oligonucleotide
  Antisense strand to SEQ ID NO: 122138
aaucuccaagauauaguau

SEQ ID NO: 122140 - RNA, 19 nt, Artificial Sequence
  Description of Artificial Sequence: Synthetic oligonucleotide
  Sense strand starting at position 1325 of SEQ ID NO: 1555
cuguuuaaucgugaucuac

SEQ ID NO: 122141 - RNA, 19 nt, Artificial Sequence
  Description of Artificial Sequence: Synthetic oligonucleotide
  Antisense strand to SEQ ID NO: 122140
guagaucacgauuaaacag

SEQ ID NO: 122142 - RNA, 19 nt, Artificial Sequence
  Description of Artificial Sequence: Synthetic oligonucleotide
  Sense strand starting at position 1331 of SEQ ID NO: 1555
aaucgugaucuacauuguu

SEQ ID NO: 122143 - RNA, 19 nt, Artificial Sequence
  Description of Artificial Sequence: Synthetic oligonucleotide
  Antisense strand to SEQ ID NO: 122142
aacaauguagaucacgauu

SEQ ID NO: 122144 - RNA, 19 nt, Artificial Sequence
  Description of Artificial Sequence: Synthetic oligonucleotide
  Sense strand starting at position 1371 of SEQ ID NO: 1555
auaugaugcugagugaaga

SEQ ID NO: 122145 - RNA, 19 nt, Artificial Sequence
  Description of Artificial Sequence: Synthetic oligonucleotide
  Antisense strand to SEQ ID NO: 122144
ucuucacucagcaucauau

SEQ ID NO: 122146 - RNA, 19 nt, Artificial Sequence
  Description of Artificial Sequence: Synthetic oligonucleotide
  Sense strand starting at position 1372 of SEQ ID NO: 1555
uaugaugcugagugaagaa

SEQ ID NO: 122147 - RNA, 19 nt, Artificial Sequence
  Description of Artificial Sequence: Synthetic oligonucleotide
  Antisense strand to SEQ ID NO: 122146
uucuucacucagcaucaua

SEQ ID NO: 122148 - RNA, 19 nt, Artificial Sequence
  Description of Artificial Sequence: Synthetic oligonucleotide
  Sense strand starting at position 1385 of SEQ ID NO: 1555
gaagaaucuugugcauaca

SEQ ID NO: 122149 - RNA, 19 nt, Artificial Sequence
  Description of Artificial Sequence: Synthetic oligonucleotide
  Antisense strand to SEQ ID NO: 122148
uguaugcacaagauucuuc

SEQ ID NO: 122150 - RNA, 19 nt, Artificial Sequence
  Description of Artificial Sequence: Synthetic oligonucleotide
  Sense strand starting at position 1537 of SEQ ID NO: 1555
aauguaugagggugccaaa

SEQ ID NO: 122151 - RNA, 19 nt, Artificial Sequence
  Description of Artificial Sequence: Synthetic oligonucleotide
  Antisense strand to SEQ ID NO: 122150
uuuggcacccucauacauu

SEQ ID NO: 122152 - RNA, 19 nt, Artificial Sequence
  Description of Artificial Sequence: Synthetic oligonucleotide
  Sense strand starting at position 1625 of SEQ ID NO: 1555
ccaugaauagucuguccua

SEQ ID NO: 122153 - RNA, 19 nt, Artificial Sequence
  Description of Artificial Sequence: Synthetic oligonucleotide
  Antisense strand to SEQ ID NO: 122152
uaggacagacuauucaugg

SEQ ID NO: 122154 - RNA, 19 nt, Artificial Sequence
  Description of Artificial Sequence: Synthetic oligonucleotide
  Sense strand starting at position 1787 of SEQ ID NO: 1555
ccuggugaccuuuaccaga

SEQ ID NO: 122155 - RNA, 19 nt, Artificial Sequence
  Description of Artificial Sequence: Synthetic oligonucleotide
  Antisense strand to SEQ ID NO: 122154
ucugguaaaggucaccagg

SEQ ID NO: 122156 - RNA, 19 nt, Artificial Sequence
  Description of Artificial Sequence: Synthetic oligonucleotide
  Sense strand starting at position 1789 of SEQ ID NO: 1555
uggugaccuuuaccagaca

SEQ ID NO: 122157 - RNA, 19 nt, Artificial Sequence
  Description of Artificial Sequence: Synthetic oligonucleotide
  Antisense strand to SEQ ID NO: 122156
ugucugguaaaggucacca

SEQ ID NO: 122158 - RNA, 19 nt, Artificial Sequence
  Description of Artificial Sequence: Synthetic oligonucleotide
  Sense strand starting at position 2146 of SEQ ID NO: 1555
guggcauauagauagccaa

SEQ ID NO: 122159 - RNA, 19 nt, Artificial Sequence
  Description of Artificial Sequence: Synthetic oligonucleotide
  Antisense strand to SEQ ID NO: 122158
uuggcuaucuauaugccac

SEQ ID NO: 122160 - RNA, 19 nt, Artificial Sequence
  Description of Artificial Sequence: Synthetic oligonucleotide
  Sense strand starting at position 2149 of SEQ ID NO: 1555
gcauauagauagccaaaca

SEQ ID NO: 122161 - RNA, 19 nt, Artificial Sequence
  Description of Artificial Sequence: Synthetic oligonucleotide
  Antisense strand to SEQ ID NO: 122160
uguuuggcuaucuauaugc

SEQ ID NO: 122162 - RNA, 19 nt, Artificial Sequence
  Description of Artificial Sequence: Synthetic oligonucleotide
  Sense strand starting at position 2327 of SEQ ID NO: 1555
ggucuaaucuuguuuacaa

SEQ ID NO: 122163 - RNA, 19 nt, Artificial Sequence
  Description of Artificial Sequence: Synthetic oligonucleotide
  Antisense strand to SEQ ID NO: 122162
uuguaaacaagauuagacc

SEQ ID NO: 122164 - RNA, 19 nt, Artificial Sequence
  Description of Artificial Sequence: Synthetic oligonucleotide
  Sense strand starting at position 2334 of SEQ ID NO: 1555
ucuuguuuacaaugaaagu

SEQ ID NO: 122165 - RNA, 19 nt, Artificial Sequence
  Description of Artificial Sequence: Synthetic oligonucleotide
  Antisense strand to SEQ ID NO: 122164
acuuucauuguaaacaaga

SEQ ID NO: 122166 - RNA, 19 nt, Artificial Sequence
  Description of Artificial Sequence: Synthetic oligonucleotide
  Sense strand starting at position 2382 of SEQ ID NO: 1555
agaggaaaguggcuuaauu

SEQ ID NO: 122167 - RNA, 19 nt, Artificial Sequence
  Description of Artificial Sequence: Synthetic oligonucleotide
  Antisense strand to SEQ ID NO: 122166
aauuaagccacuuuccucu

SEQ ID NO: 122168 - RNA, 19 nt, Artificial Sequence
  Description of Artificial Sequence: Synthetic oligonucleotide
  Sense strand starting at position 2740 of SEQ ID NO: 1555
gggacuggauuugauauaa

SEQ ID NO: 122169 - RNA, 19 nt, Artificial Sequence
  Description of Artificial Sequence: Synthetic oligonucleotide
  Antisense strand to SEQ ID NO: 122168
uuauaucaaauccaguccc

SEQ ID NO: 122170 - RNA, 19 nt, Artificial Sequence
  Description of Artificial Sequence: Synthetic oligonucleotide
  Sense strand starting at position 2793 of SEQ ID NO: 1555
agaauuccaggauguacau

SEQ ID NO: 122171 - RNA, 19 nt, Artificial Sequence
  Description of Artificial Sequence: Synthetic oligonucleotide
  Antisense strand to SEQ ID NO: 122170
auguacauccuggaauucu

SEQ ID NO: 122172 - RNA, 19 nt, Artificial Sequence
  Description of Artificial Sequence: Synthetic oligonucleotide
  Sense strand starting at position 2889 of SEQ ID NO: 1555
gauaaucacucagugguaa

SEQ ID NO: 122173 - RNA, 19 nt, Artificial Sequence
  Description of Artificial Sequence: Synthetic oligonucleotide
  Antisense strand to SEQ ID NO: 122172
uuaccacugagugauuauc

SEQ ID NO: 122174 - RNA, 19 nt, Artificial Sequence
  Description of Artificial Sequence: Synthetic oligonucleotide
  Sense strand starting at position 2890 of SEQ ID NO: 1555
auaaucacucagugguaaa

SEQ ID NO: 122175 - RNA, 19 nt, Artificial Sequence
  Description of Artificial Sequence: Synthetic oligonucleotide
  Antisense strand to SEQ ID NO: 122174
uuuaccacugagugauuau

SEQ ID NO: 122176 - RNA, 19 nt, Artificial Sequence
  Description of Artificial Sequence: Synthetic oligonucleotide
  Sense strand starting at position 2902 of SEQ ID NO: 1555
ugguaaaguaagugguaaa

SEQ ID NO: 122177 - RNA, 19 nt, Artificial Sequence
  Description of Artificial Sequence: Synthetic oligonucleotide
  Antisense strand to SEQ ID NO: 122176
uuuaccacuuacuuuacca

SEQ ID NO: 122178 - RNA, 19 nt, Artificial Sequence
  Description of Artificial Sequence: Synthetic oligonucleotide
  Sense strand starting at position 2903 of SEQ ID NO: 1555
gguaaaguaagugguaaag

SEQ ID NO: 122179 - RNA, 19 nt, Artificial Sequence
  Description of Artificial Sequence: Synthetic oligonucleotide
  Antisense strand to SEQ ID NO: 122178
cuuuaccacuuacuuuacc

SEQ ID NO: 122180 - RNA, 19 nt, Artificial Sequence
  Description of Artificial Sequence: Synthetic oligonucleotide
  Sense strand starting at position 2969 of SEQ ID NO: 1555
uguguuauuaaagaugucu

SEQ ID NO: 122181 - RNA, 19 nt, Artificial Sequence
  Description of Artificial Sequence: Synthetic oligonucleotide
  Antisense strand to SEQ ID NO: 122180
agacaucuuuaauaacaca

SEQ ID NO: 122182 - RNA, 19 nt, Artificial Sequence
  Description of Artificial Sequence: Synthetic oligonucleotide
  Sense strand starting at position 2974 of SEQ ID NO: 1555
uauuaaagaugucuggacu

SEQ ID NO: 122183 - RNA, 19 nt, Artificial Sequence
  Description of Artificial Sequence: Synthetic oligonucleotide
  Antisense strand to SEQ ID NO: 122182
aguccagacaucuuuaaua

SEQ ID NO: 122184 - RNA, 19 nt, Artificial Sequence
  Description of Artificial Sequence: Synthetic oligonucleotide
  Sense strand starting at position 2975 of SEQ ID NO: 1555
auuaaagaugucuggacuu

SEQ ID NO: 122185 - RNA, 19 nt, Artificial Sequence
  Description of Artificial Sequence: Synthetic oligonucleotide
  Antisense strand to SEQ ID NO: 122184
aaguccagacaucuuuaau

SEQ ID NO: 122186 - RNA, 19 nt, Artificial Sequence
  Description of Artificial Sequence: Synthetic oligonucleotide
  Sense strand starting at position 3048 of SEQ ID NO: 1555
agucuaugugguuagugaa

SEQ ID NO: 122187 - RNA, 19 nt, Artificial Sequence
  Description of Artificial Sequence: Synthetic oligonucleotide
  Antisense strand to SEQ ID NO: 122186
uucacuaaccacauagacu

SEQ ID NO: 122188 - RNA, 19 nt, Artificial Sequence
  Description of Artificial Sequence: Synthetic oligonucleotide
  Sense strand starting at position 3055 of SEQ ID NO: 1555
gugguuagugaacauuauu

SEQ ID NO: 122189 - RNA, 19 nt, Artificial Sequence
  Description of Artificial Sequence: Synthetic oligonucleotide
  Antisense strand to SEQ ID NO: 122188
aauaauguucacuaaccac

SEQ ID NO: 122190 - RNA, 19 nt, Artificial Sequence
  Description of Artificial Sequence: Synthetic oligonucleotide
  Sense strand starting at position 3182 of SEQ ID NO: 1555
cuaugaacacuauguguca

SEQ ID NO: 122191 - RNA, 19 nt, Artificial Sequence
  Description of Artificial Sequence: Synthetic oligonucleotide
  Antisense strand to SEQ ID NO: 122190
ugacacauaguguucauag

SEQ ID NO: 122192 - RNA, 19 nt, Artificial Sequence
  Description of Artificial Sequence: Synthetic oligonucleotide
  Sense strand starting at position 3198 of SEQ ID NO: 1555
ucaggcauuguuuaaauua

SEQ ID NO: 122193 - RNA, 19 nt, Artificial Sequence
  Description of Artificial Sequence: Synthetic oligonucleotide
  Antisense strand to SEQ ID NO: 122192
uaauuuaaacaaugccuga

SEQ ID NO: 122194 - RNA, 19 nt, Artificial Sequence
  Description of Artificial Sequence: Synthetic oligonucleotide
  Sense strand starting at position 3252 of SEQ ID NO: 1555
cuauaugugguaggaacaa

SEQ ID NO: 122195 - RNA, 19 nt, Artificial Sequence
  Description of Artificial Sequence: Synthetic oligonucleotide
  Antisense strand to SEQ ID NO: 122194
uuguuccuaccacauauag

SEQ ID NO: 122196 - RNA, 19 nt, Artificial Sequence
  Description of Artificial Sequence: Synthetic oligonucleotide
  Sense strand starting at position 3280 of SEQ ID NO: 1555
acauguuguaaccgaggaa

SEQ ID NO: 122197 - RNA, 19 nt, Artificial Sequence
  Description of Artificial Sequence: Synthetic oligonucleotide
  Antisense strand to SEQ ID NO: 122196
uuccucgguuacaacaugu

SEQ ID NO: 122198 - RNA, 19 nt, Artificial Sequence
  Description of Artificial Sequence: Synthetic oligonucleotide
  Sense strand starting at position 3470 of SEQ ID NO: 1555
aucuuugaauuggcauuaa

SEQ ID NO: 122199 - RNA, 19 nt, Artificial Sequence
  Description of Artificial Sequence: Synthetic oligonucleotide
  Antisense strand to SEQ ID NO: 122198
uuaaugccaauucaaagau

SEQ ID NO: 122200 - RNA, 19 nt, Artificial Sequence
  Description of Artificial Sequence: Synthetic oligonucleotide
  Sense strand starting at position 3588 of SEQ ID NO: 1555
uagguaagccuauaguauu

SEQ ID NO: 122201 - RNA, 19 nt, Artificial Sequence
  Description of Artificial Sequence: Synthetic oligonucleotide
  Antisense strand to SEQ ID NO: 122200
aauacuauaggcuuaccua

SEQ ID NO: 122202 - RNA, 19 nt, Artificial Sequence
  Description of Artificial Sequence: Synthetic oligonucleotide
  Sense strand starting at position 3982 of SEQ ID NO: 1558
agacuuuguguccacuuua

SEQ ID NO: 122203 - RNA, 19 nt, Artificial Sequence
  Description of Artificial Sequence: Synthetic oligonucleotide
  Antisense strand to SEQ ID NO: 122202
uaaaguggacacaaagucu

SEQ ID NO: 122204 - RNA, 19 nt, Artificial Sequence
  Description of Artificial Sequence: Synthetic oligonucleotide
  Sense strand starting at position 3979 of SEQ ID NO: 1558
ucaagacuuuguguccacu

SEQ ID NO: 122205 - RNA, 19 nt, Artificial Sequence
  Description of Artificial Sequence: Synthetic oligonucleotide
  Antisense strand to SEQ ID NO: 122204
aguggacacaaagucuuga

SEQ ID NO: 122206 - RNA, 19 nt, Artificial Sequence
  Description of Artificial Sequence: Synthetic oligonucleotide
  Sense strand starting at position 3929 of SEQ ID NO: 1558
agcaauguuaguuaggcua

SEQ ID NO: 122207 - RNA, 19 nt, Artificial Sequence
  Description of Artificial Sequence: Synthetic oligonucleotide
  Antisense strand to SEQ ID NO: 122206
uagccuaacuaacauugcu

SEQ ID NO: 122208 - RNA, 19 nt, Artificial Sequence
  Description of Artificial Sequence: Synthetic oligonucleotide
  Sense strand starting at position 3822 of SEQ ID NO: 1558
gugagaugugggugaacag

SEQ ID NO: 122209 - RNA, 19 nt, Artificial Sequence
  Description of Artificial Sequence: Synthetic oligonucleotide
  Antisense strand to SEQ ID NO: 122208
cuguucacccacaucucac

SEQ ID NO: 122210 - RNA, 19 nt, Artificial Sequence
  Description of Artificial Sequence: Synthetic oligonucleotide
  Sense strand starting at position 3821 of SEQ ID NO: 1558
cgugagaugugggugaaca

SEQ ID NO: 122211 - RNA, 19 nt, Artificial Sequence
  Description of Artificial Sequence: Synthetic oligonucleotide
  Antisense strand to SEQ ID NO: 122210
uguucacccacaucucacg

SEQ ID NO: 122212 - RNA, 19 nt, Artificial Sequence
  Description of Artificial Sequence: Synthetic oligonucleotide
  Sense strand starting at position 3802 of SEQ ID NO: 1558
acuucuagaguugguacaa

SEQ ID NO: 122213 - RNA, 19 nt, Artificial Sequence
  Description of Artificial Sequence: Synthetic oligonucleotide
  Antisense strand to SEQ ID NO: 122212
uuguaccaacucuagaagu

SEQ ID NO: 122214 - RNA, 19 nt, Artificial Sequence
  Description of Artificial Sequence: Synthetic oligonucleotide
  Sense strand starting at position 3792 of SEQ ID NO: 1558
gcacucagguacuucuaga

SEQ ID NO: 122215 - RNA, 19 nt, Artificial Sequence
  Description of Artificial Sequence: Synthetic oligonucleotide
  Antisense strand to SEQ ID NO: 122214
ucuagaaguaccugagugc

SEQ ID NO: 122216 - RNA, 19 nt, Artificial Sequence
  Description of Artificial Sequence: Synthetic oligonucleotide
  Sense strand starting at position 3773 of SEQ ID NO: 1558
ugucuacugcauggaacaa

SEQ ID NO: 122217 - RNA, 19 nt, Artificial Sequence
  Description of Artificial Sequence: Synthetic oligonucleotide
  Antisense strand to SEQ ID NO: 122216
uuguuccaugcaguagaca

SEQ ID NO: 122218 - RNA, 19 nt, Artificial Sequence
  Description of Artificial Sequence: Synthetic oligonucleotide
  Sense strand starting at position 3772 of SEQ ID NO: 1558
uugucuacugcauggaaca

SEQ ID NO: 122219 - RNA, 19 nt, Artificial Sequence
  Description of Artificial Sequence: Synthetic oligonucleotide
  Antisense strand to SEQ ID NO: 122218
uguuccaugcaguagacaa

SEQ ID NO: 122220 - RNA, 19 nt, Artificial Sequence
  Description of Artificial Sequence: Synthetic oligonucleotide
  Sense strand starting at position 3770 of SEQ ID NO: 1558
cauugucuacugcauggaa

SEQ ID NO: 122221 - RNA, 19 nt, Artificial Sequence
  Description of Artificial Sequence: Synthetic oligonucleotide
  Antisense strand to SEQ ID NO: 122220
uuccaugcaguagacaaug

SEQ ID NO: 122222 - RNA, 19 nt, Artificial Sequence
  Description of Artificial Sequence: Synthetic oligonucleotide
  Sense strand starting at position 3706 of SEQ ID NO: 1558
uaauuauacccgcagaagu

SEQ ID NO: 122223 - RNA, 19 nt, Artificial Sequence
  Description of Artificial Sequence: Synthetic oligonucleotide
  Antisense strand to SEQ ID NO: 122222
acuucugcggguauaauua

SEQ ID NO: 122224 - RNA, 19 nt, Artificial Sequence
  Description of Artificial Sequence: Synthetic oligonucleotide
  Sense strand starting at position 3703 of SEQ ID NO: 1558
caguaauuauacccgcaga

SEQ ID NO: 122225 - RNA, 19 nt, Artificial Sequence
  Description of Artificial Sequence: Synthetic oligonucleotide
  Antisense strand to SEQ ID NO: 122224
ucugcggguauaauuacug

SEQ ID NO: 122226 - RNA, 19 nt, Artificial Sequence
  Description of Artificial Sequence: Synthetic oligonucleotide
  Sense strand starting at position 3525 of SEQ ID NO: 1558
gguucucuguaacuaauau

SEQ ID NO: 122227 - RNA, 19 nt, Artificial Sequence
  Description of Artificial Sequence: Synthetic oligonucleotide
  Antisense strand to SEQ ID NO: 122226
auauuaguuacagagaacc

SEQ ID NO: 122228 - RNA, 19 nt, Artificial Sequence
  Description of Artificial Sequence: Synthetic oligonucleotide
  Sense strand starting at position 3522 of SEQ ID NO: 1558
ugugguucucuguaacuaa

SEQ ID NO: 122229 - RNA, 19 nt, Artificial Sequence
  Description of Artificial Sequence: Synthetic oligonucleotide
  Antisense strand to SEQ ID NO: 122228
uuaguuacagagaaccaca

SEQ ID NO: 122230 - RNA, 19 nt, Artificial Sequence
  Description of Artificial Sequence: Synthetic oligonucleotide
  Sense strand starting at position 3312 of SEQ ID NO: 1558
acacgaagauucucugacu

SEQ ID NO: 122231 - RNA, 19 nt, Artificial Sequence
  Description of Artificial Sequence: Synthetic oligonucleotide
  Antisense strand to SEQ ID NO: 122230
agucagagaaucuucgugu

SEQ ID NO: 122232 - RNA, 19 nt, Artificial Sequence
  Description of Artificial Sequence: Synthetic oligonucleotide
  Sense strand starting at position 3304 of SEQ ID NO: 1558
cugccucaacacgaagauu

SEQ ID NO: 122233 - RNA, 19 nt, Artificial Sequence
  Description of Artificial Sequence: Synthetic oligonucleotide
  Antisense strand to SEQ ID NO: 122232
aaucuucguguugaggcag

SEQ ID NO: 122234 - RNA, 19 nt, Artificial Sequence
  Description of Artificial Sequence: Synthetic oligonucleotide
  Sense strand starting at position 3168 of SEQ ID NO: 1558
ggagguaacuuccuccauu

SEQ ID NO: 122235 - RNA, 19 nt, Artificial Sequence
  Description of Artificial Sequence: Synthetic oligonucleotide
  Antisense strand to SEQ ID NO: 122234
aauggaggaaguuaccucc

SEQ ID NO: 122236 - RNA, 19 nt, Artificial Sequence
  Description of Artificial Sequence: Synthetic oligonucleotide
  Sense strand starting at position 3033 of SEQ ID NO: 1558
ggaaucacuuggccacaga

SEQ ID NO: 122237 - RNA, 19 nt, Artificial Sequence
  Description of Artificial Sequence: Synthetic oligonucleotide
  Antisense strand to SEQ ID NO: 122236
ucuguggccaagugauucc

SEQ ID NO: 122238 - RNA, 19 nt, Artificial Sequence
  Description of Artificial Sequence: Synthetic oligonucleotide
  Sense strand starting at position 3009 of SEQ ID NO: 1558
acagaacugugauuccaag

SEQ ID NO: 122239 - RNA, 19 nt, Artificial Sequence
  Description of Artificial Sequence: Synthetic oligonucleotide
  Antisense strand to SEQ ID NO: 122238
cuuggaaucacaguucugu

SEQ ID NO: 122240 - RNA, 19 nt, Artificial Sequence
  Description of Artificial Sequence: Synthetic oligonucleotide
  Sense strand starting at position 2646 of SEQ ID NO: 1558
ucagguuacuggcuuaaga

SEQ ID NO: 122241 - RNA, 19 nt, Artificial Sequence
  Description of Artificial Sequence: Synthetic oligonucleotide
  Antisense strand to SEQ ID NO: 122240
ucuuaagccaguaaccuga

SEQ ID NO: 122242 - RNA, 19 nt, Artificial Sequence
  Description of Artificial Sequence: Synthetic oligonucleotide
  Sense strand starting at position 2509 of SEQ ID NO: 1558
cuggaaauauuguugguau

SEQ ID NO: 122243 - RNA, 19 nt, Artificial Sequence
  Description of Artificial Sequence: Synthetic oligonucleotide
  Antisense strand to SEQ ID NO: 122242
auaccaacaauauuuccag

SEQ ID NO: 122244 - RNA, 19 nt, Artificial Sequence
  Description of Artificial Sequence: Synthetic oligonucleotide
  Sense strand starting at position 2489 of SEQ ID NO: 1558
gcccuaagacucuagacuu

SEQ ID NO: 122245 - RNA, 19 nt, Artificial Sequence
  Description of Artificial Sequence: Synthetic oligonucleotide
  Antisense strand to SEQ ID NO: 122244
aagucuagagucuuagggc

SEQ ID NO: 122246 - RNA, 19 nt, Artificial Sequence
  Description of Artificial Sequence: Synthetic oligonucleotide
  Sense strand starting at position 2435 of SEQ ID NO: 1558
ugugaacacucugcagauu

SEQ ID NO: 122247 - RNA, 19 nt, Artificial Sequence
  Description of Artificial Sequence: Synthetic oligonucleotide
  Antisense strand to SEQ ID NO: 122246
aaucugcagaguguucaca

SEQ ID NO: 122248 - RNA, 19 nt, Artificial Sequence
  Description of Artificial Sequence: Synthetic oligonucleotide
  Sense strand starting at position 2434 of SEQ ID NO: 1558
augugaacacucugcagau

SEQ ID NO: 122249 - RNA, 19 nt, Artificial Sequence
  Description of Artificial Sequence: Synthetic oligonucleotide
  Antisense strand to SEQ ID NO: 122248
aucugcagaguguucacau

SEQ ID NO: 122250 - RNA, 19 nt, Artificial Sequence
  Description of Artificial Sequence: Synthetic oligonucleotide
  Sense strand starting at position 2288 of SEQ ID NO: 1558
aaagaagcugucuggaguu

SEQ ID NO: 122251 - RNA, 19 nt, Artificial Sequence
  Description of Artificial Sequence: Synthetic oligonucleotide
  Antisense strand to SEQ ID NO: 122250
aacuccagacagcuucuuu

SEQ ID NO: 122252 - RNA, 19 nt, Artificial Sequence
  Description of Artificial Sequence: Synthetic oligonucleotide
  Sense strand starting at position 2199 of SEQ ID NO: 1558
guaagaggcauaggcuauu

SEQ ID NO: 122253 - RNA, 19 nt, Artificial Sequence
  Description of Artificial Sequence: Synthetic oligonucleotide
  Antisense strand to SEQ ID NO: 122252
aauagccuaugccucuuac

SEQ ID NO: 122254 - RNA, 19 nt, Artificial Sequence
  Description of Artificial Sequence: Synthetic oligonucleotide
  Sense strand starting at position 2018 of SEQ ID NO: 1558
uugccaucucaaggagaaa

SEQ ID NO: 122255 - RNA, 19 nt, Artificial Sequence
  Description of Artificial Sequence: Synthetic oligonucleotide
  Antisense strand to SEQ ID NO: 122254
uuucuccuugagauggcaa

SEQ ID NO: 122256 - RNA, 19 nt, Artificial Sequence
  Description of Artificial Sequence: Synthetic oligonucleotide
  Sense strand starting at position 2002 of SEQ ID NO: 1558
gucauuucugagugcuuug

SEQ ID NO: 122257 - RNA, 19 nt, Artificial Sequence
  Description of Artificial Sequence: Synthetic oligonucleotide
  Antisense strand to SEQ ID NO: 122256
caaagcacucagaaaugac

SEQ ID NO: 122258 - RNA, 19 nt, Artificial Sequence
  Description of Artificial Sequence: Synthetic oligonucleotide
  Sense strand starting at position 2001 of SEQ ID NO: 1558
ugucauuucugagugcuuu

SEQ ID NO: 122259 - RNA, 19 nt, Artificial Sequence
  Description of Artificial Sequence: Synthetic oligonucleotide
  Antisense strand to SEQ ID NO: 122258
aaagcacucagaaaugaca

SEQ ID NO: 122260 - RNA, 19 nt, Artificial Sequence
  Description of Artificial Sequence: Synthetic oligonucleotide
  Sense strand starting at position 1481 of SEQ ID NO: 1558
ucucuuaccuuguuagaag

SEQ ID NO: 122261 - RNA, 19 nt, Artificial Sequence
  Description of Artificial Sequence: Synthetic oligonucleotide
  Antisense strand to SEQ ID NO: 122260
cuucuaacaagguaagaga

SEQ ID NO: 122262 - RNA, 19 nt, Artificial Sequence
  Description of Artificial Sequence: Synthetic oligonucleotide
  Sense strand starting at position 1146 of SEQ ID NO: 1558
gcuuccugauaauuguaaa

SEQ ID NO: 122263 - RNA, 19 nt, Artificial Sequence
  Description of Artificial Sequence: Synthetic oligonucleotide
  Antisense strand to SEQ ID NO: 122262
uuuacaauuaucaggaagc

SEQ ID NO: 122264 - RNA, 19 nt, Artificial Sequence
  Description of Artificial Sequence: Synthetic oligonucleotide
  Sense strand starting at position 1109 of SEQ ID NO: 1558
accugauugcaaugcaaca

SEQ ID NO: 122265 - RNA, 19 nt, Artificial Sequence
  Description of Artificial Sequence: Synthetic oligonucleotide
  Antisense strand to SEQ ID NO: 122264
uguugcauugcaaucaggu

SEQ ID NO: 122266 - RNA, 19 nt, Artificial Sequence
  Description of Artificial Sequence: Synthetic oligonucleotide
  Sense strand starting at position 1103 of SEQ ID NO: 1558
ugugacaccugauugcaau

SEQ ID NO: 122267 - RNA, 19 nt, Artificial Sequence
  Description of Artificial Sequence: Synthetic oligonucleotide
  Antisense strand to SEQ ID NO: 122266
auugcaaucaggugucaca

SEQ ID NO: 122268 - RNA, 19 nt, Artificial Sequence
  Description of Artificial Sequence: Synthetic oligonucleotide
  Sense strand starting at position 855 of SEQ ID NO: 1558
ggcaguaugcaugaagcaa

SEQ ID NO: 122269 - RNA, 19 nt, Artificial Sequence
  Description of Artificial Sequence: Synthetic oligonucleotide
  Antisense strand to SEQ ID NO: 122268
uugcuucaugcauacugcc

SEQ ID NO: 122270 - RNA, 19 nt, Artificial Sequence
  Description of Artificial Sequence: Synthetic oligonucleotide
  Sense strand starting at position 570 of SEQ ID NO: 1558
cucugaaaugugcaccuau

SEQ ID NO: 122271 - RNA, 19 nt, Artificial Sequence
  Description of Artificial Sequence: Synthetic oligonucleotide
  Antisense strand to SEQ ID NO: 122270
auaggugcacauuucagag

SEQ ID NO: 122272 - RNA, 19 nt, Artificial Sequence
  Description of Artificial Sequence: Synthetic oligonucleotide
  Sense strand starting at position 401 of SEQ ID NO: 1558
ccuugauccaaagguggua

SEQ ID NO: 122273 - RNA, 19 nt, Artificial Sequence
  Description of Artificial Sequence: Synthetic oligonucleotide
  Antisense strand to SEQ ID NO: 122272
uaccaccuuuggaucaagg

SEQ ID NO: 122274 - RNA, 19 nt, Artificial Sequence
  Description of Artificial Sequence: Synthetic oligonucleotide
  Sense strand starting at position 393 of SEQ ID NO: 1558
ccagcaagccuugauccaa

SEQ ID NO: 122275 - RNA, 19 nt, Artificial Sequence
  Description of Artificial Sequence: Synthetic oligonucleotide
  Antisense strand to SEQ ID NO: 122274
uuggaucaaggcuugcugg

SEQ ID NO: 122276 - RNA, 19 nt, Artificial Sequence
  Description of Artificial Sequence: Synthetic oligonucleotide
  Sense strand starting at position 192 of SEQ ID NO: 1558
auaguuaauccucaaaugu

SEQ ID NO: 122277 - RNA, 19 nt, Artificial Sequence
  Description of Artificial Sequence: Synthetic oligonucleotide
  Antisense strand to SEQ ID NO: 122276
acauuugaggauuaacuau

SEQ ID NO: 122278 - RNA, 19 nt, Artificial Sequence
  Description of Artificial Sequence: Synthetic oligonucleotide
  Sense strand starting at position 38 of SEQ ID NO: 1558
uugugaaaguccuucuaca

SEQ ID NO: 122279 - RNA, 19 nt, Artificial Sequence
  Description of Artificial Sequence: Synthetic oligonucleotide
  Antisense strand to SEQ ID NO: 122278
uguagaaggacuuucacaa

SEQ ID NO: 122280 - RNA, 19 nt, Artificial Sequence
  Description of Artificial Sequence: Synthetic oligonucleotide
  Sense strand starting at position 9 of SEQ ID NO: 1558
cugcuaaugcuccaaagua

SEQ ID NO: 122281 - RNA, 19 nt, Artificial Sequence
  Description of Artificial Sequence: Synthetic oligonucleotide
  Antisense strand to SEQ ID NO: 122280
uacuuuggagcauuagcag

SEQ ID NO: 122282 - RNA, 19 nt, Artificial Sequence
  Description of Artificial Sequence: Synthetic oligonucleotide
  Sense strand starting at position 3961 of SEQ ID NO: 1561
ucaaguaggcucuaaugca

SEQ ID NO: 122283 - RNA, 19 nt, Artificial Sequence
  Description of Artificial Sequence: Synthetic oligonucleotide
  Antisense strand to SEQ ID NO: 122282
ugcauuagagccuacuuga

SEQ ID NO: 122284 - RNA, 19 nt, Artificial Sequence
  Description of Artificial Sequence: Synthetic oligonucleotide
  Sense strand starting at position 3909 of SEQ ID NO: 1561
uuugauucccaauggaaug

SEQ ID NO: 122285 - RNA, 19 nt, Artificial Sequence
  Description of Artificial Sequence: Synthetic oligonucleotide
  Antisense strand to SEQ ID NO: 122284
cauuccauugggaaucaaa

SEQ ID NO: 122286 - RNA, 19 nt, Artificial Sequence
  Description of Artificial Sequence: Synthetic oligonucleotide
  Sense strand starting at position 3694 of SEQ ID NO: 1561
gguacuacucuggaaagca

SEQ ID NO: 122287 - RNA, 19 nt, Artificial Sequence
  Description of Artificial Sequence: Synthetic oligonucleotide
  Antisense strand to SEQ ID NO: 122286
ugcuuuccagaguaguacc

SEQ ID NO: 122288 - RNA, 19 nt, Artificial Sequence
  Description of Artificial Sequence: Synthetic oligonucleotide
  Sense strand starting at position 3692 of SEQ ID NO: 1561
acgguacuacucuggaaag

SEQ ID NO: 122289 - RNA, 19 nt, Artificial Sequence
  Description of Artificial Sequence: Synthetic oligonucleotide
  Antisense strand to SEQ ID NO: 122288
cuuuccagaguaguaccgu

SEQ ID NO: 122290 - RNA, 19 nt, Artificial Sequence
  Description of Artificial Sequence: Synthetic oligonucleotide
  Sense strand starting at position 3679 of SEQ ID NO: 1561
aaauuacugguuuacggua

SEQ ID NO: 122291 - RNA, 19 nt, Artificial Sequence
  Description of Artificial Sequence: Synthetic oligonucleotide
  Antisense strand to SEQ ID NO: 122290
uaccguaaaccaguaauuu

SEQ ID NO: 122292 - RNA, 19 nt, Artificial Sequence
  Description of Artificial Sequence: Synthetic oligonucleotide
  Sense strand starting at position 3152 of SEQ ID NO: 1561
ucgguaagacuucagugaa

SEQ ID NO: 122293 - RNA, 19 nt, Artificial Sequence
  Description of Artificial Sequence: Synthetic oligonucleotide
  Antisense strand to SEQ ID NO: 122292
uucacugaagucuuaccga

SEQ ID NO: 122294 - RNA, 19 nt, Artificial Sequence
  Description of Artificial Sequence: Synthetic oligonucleotide
  Sense strand starting at position 3144 of SEQ ID NO: 1561
aaugauucucgguaagacu

SEQ ID NO: 122295 - RNA, 19 nt, Artificial Sequence
  Description of Artificial Sequence: Synthetic oligonucleotide
  Antisense strand to SEQ ID NO: 122294
agucuuaccgagaaucauu

SEQ ID NO: 122296 - RNA, 19 nt, Artificial Sequence
  Description of Artificial Sequence: Synthetic oligonucleotide
  Sense strand starting at position 3143 of SEQ ID NO: 1561
aaaugauucucgguaagac

SEQ ID NO: 122297 - RNA, 19 nt, Artificial Sequence
  Description of Artificial Sequence: Synthetic oligonucleotide
  Antisense strand to SEQ ID NO: 122296
gucuuaccgagaaucauuu

SEQ ID NO: 122298 - RNA, 19 nt, Artificial Sequence
  Description of Artificial Sequence: Synthetic oligonucleotide
  Sense strand starting at position 3140 of SEQ ID NO: 1561
aagaaaugauucucgguaa

SEQ ID NO: 122299 - RNA, 19 nt, Artificial Sequence
  Description of Artificial Sequence: Synthetic oligonucleotide
  Antisense strand to SEQ ID NO: 122298
uuaccgagaaucauuucuu

SEQ ID NO: 122300 - RNA, 19 nt, Artificial Sequence
  Description of Artificial Sequence: Synthetic oligonucleotide
  Sense strand starting at position 3114 of SEQ ID NO: 1561
cagcaagaucagcaagagu

SEQ ID NO: 122301 - RNA, 19 nt, Artificial Sequence
  Description of Artificial Sequence: Synthetic oligonucleotide
  Antisense strand to SEQ ID NO: 122300
acucuugcugaucuugcug

SEQ ID NO: 122302 - RNA, 19 nt, Artificial Sequence
  Description of Artificial Sequence: Synthetic oligonucleotide
  Sense strand starting at position 3104 of SEQ ID NO: 1561
uagggcucaucagcaagau

SEQ ID NO: 122303 - RNA, 19 nt, Artificial Sequence
  Description of Artificial Sequence: Synthetic oligonucleotide
  Antisense strand to SEQ ID NO: 122302
aucuugcugaugagcccua

SEQ ID NO: 122304 - RNA, 19 nt, Artificial Sequence
  Description of Artificial Sequence: Synthetic oligonucleotide
  Sense strand starting at position 3038 of SEQ ID NO: 1561
agucuauaccggcaaugau

SEQ ID NO: 122305 - RNA, 19 nt, Artificial Sequence
  Description of Artificial Sequence: Synthetic oligonucleotide
  Antisense strand to SEQ ID NO: 122304
aucauugccgguauagacu

SEQ ID NO: 122306 - RNA, 19 nt, Artificial Sequence
  Description of Artificial Sequence: Synthetic oligonucleotide
  Sense strand starting at position 3016 of SEQ ID NO: 1561
gaaguuucuggauguuaug

SEQ ID NO: 122307 - RNA, 19 nt, Artificial Sequence
  Description of Artificial Sequence: Synthetic oligonucleotide
  Antisense strand to SEQ ID NO: 122306
cauaacauccagaaacuuc

SEQ ID NO: 122308 - RNA, 19 nt, Artificial Sequence
  Description of Artificial Sequence: Synthetic oligonucleotide
  Sense strand starting at position 2919 of SEQ ID NO: 1561
agcagaucacuguaaccua

SEQ ID NO: 122309 - RNA, 19 nt, Artificial Sequence
  Description of Artificial Sequence: Synthetic oligonucleotide
  Antisense strand to SEQ ID NO: 122308
uagguuacagugaucugcu

SEQ ID NO: 122310 - RNA, 19 nt, Artificial Sequence
  Description of Artificial Sequence: Synthetic oligonucleotide
  Sense strand starting at position 2786 of SEQ ID NO: 1561
ugcagauagguguacaaga

SEQ ID NO: 122311 - RNA, 19 nt, Artificial Sequence
  Description of Artificial Sequence: Synthetic oligonucleotide
  Antisense strand to SEQ ID NO: 122310
ucuuguacaccuaucugca

SEQ ID NO: 122312 - RNA, 19 nt, Artificial Sequence
  Description of Artificial Sequence: Synthetic oligonucleotide
  Sense strand starting at position 2781 of SEQ ID NO: 1561
gugugugcagauaggugua

SEQ ID NO: 122313 - RNA, 19 nt, Artificial Sequence
  Description of Artificial Sequence: Synthetic oligonucleotide
  Antisense strand to SEQ ID NO: 122312
uacaccuaucugcacacac

SEQ ID NO: 122314 - RNA, 19 nt, Artificial Sequence
  Description of Artificial Sequence: Synthetic oligonucleotide
  Sense strand starting at position 2725 of SEQ ID NO: 1561
ugaauacucucaguuaaag

SEQ ID NO: 122315 - RNA, 19 nt, Artificial Sequence
  Description of Artificial Sequence: Synthetic oligonucleotide
  Antisense strand to SEQ ID NO: 122314
cuuuaacugagaguauuca

SEQ ID NO: 122316 - RNA, 19 nt, Artificial Sequence
  Description of Artificial Sequence: Synthetic oligonucleotide
  Sense strand starting at position 2384 of SEQ ID NO: 1561
ugauuaaauccaggauugu

SEQ ID NO: 122317 - RNA, 19 nt, Artificial Sequence
  Description of Artificial Sequence: Synthetic oligonucleotide
  Antisense strand to SEQ ID NO: 122316
acaauccuggauuuaauca

SEQ ID NO: 122318 - RNA, 19 nt, Artificial Sequence
  Description of Artificial Sequence: Synthetic oligonucleotide
  Sense strand starting at position 2265 of SEQ ID NO: 1561
augcuauuggcccaggauu

SEQ ID NO: 122319 - RNA, 19 nt, Artificial Sequence
  Description of Artificial Sequence: Synthetic oligonucleotide
  Antisense strand to SEQ ID NO: 122318
aauccugggccaauagcau

SEQ ID NO: 122320 - RNA, 19 nt, Artificial Sequence
  Description of Artificial Sequence: Synthetic oligonucleotide
  Sense strand starting at position 2191 of SEQ ID NO: 1561
auguguaauguuuaaaguc

SEQ ID NO: 122321 - RNA, 19 nt, Artificial Sequence
  Description of Artificial Sequence: Synthetic oligonucleotide
  Antisense strand to SEQ ID NO: 122320
gacuuuaaacauuacacau

SEQ ID NO: 122322 - RNA, 19 nt, Artificial Sequence
  Description of Artificial Sequence: Synthetic oligonucleotide
  Sense strand starting at position 1465 of SEQ ID NO: 1561
cuuaucuuaccauguauga

SEQ ID NO: 122323 - RNA, 19 nt, Artificial Sequence
  Description of Artificial Sequence: Synthetic oligonucleotide
  Antisense strand to SEQ ID NO: 122322
ucauacaugguaagauaag

SEQ ID NO: 122324 - RNA, 19 nt, Artificial Sequence
  Description of Artificial Sequence: Synthetic oligonucleotide
  Sense strand starting at position 1448 of SEQ ID NO: 1561
uguagauaccuccaagucu

SEQ ID NO: 122325 - RNA, 19 nt, Artificial Sequence
  Description of Artificial Sequence: Synthetic oligonucleotide
  Antisense strand to SEQ ID NO: 122324
agacuuggagguaucuaca

SEQ ID NO: 122326 - RNA, 19 nt, Artificial Sequence
  Description of Artificial Sequence: Synthetic oligonucleotide
  Sense strand starting at position 1284 of SEQ ID NO: 1561
cuaguagcacaaugacaau

SEQ ID NO: 122327 - RNA, 19 nt, Artificial Sequence
  Description of Artificial Sequence: Synthetic oligonucleotide
  Antisense strand to SEQ ID NO: 122326
auugucauugugcuacuag

SEQ ID NO: 122328 - RNA, 19 nt, Artificial Sequence
  Description of Artificial Sequence: Synthetic oligonucleotide
  Sense strand starting at position 1209 of SEQ ID NO: 1561
agaauuagcuauguauucu

SEQ ID NO: 122329 - RNA, 19 nt, Artificial Sequence
  Description of Artificial Sequence: Synthetic oligonucleotide
  Antisense strand to SEQ ID NO: 122328
agaauacauagcuaauucu

SEQ ID NO: 122330 - RNA, 19 nt, Artificial Sequence
  Description of Artificial Sequence: Synthetic oligonucleotide
  Sense strand starting at position 1194 of SEQ ID NO: 1561
uuacucgacuuaccuagaa

SEQ ID NO: 122331 - RNA, 19 nt, Artificial Sequence
  Description of Artificial Sequence: Synthetic oligonucleotide
  Antisense strand to SEQ ID NO: 122330
uucuagguaagucgaguaa

SEQ ID NO: 122332 - RNA, 19 nt, Artificial Sequence
  Description of Artificial Sequence: Synthetic oligonucleotide
  Sense strand starting at position 1000 of SEQ ID NO: 1561
ugcuauaaacaugauggua

SEQ ID NO: 122333 - RNA, 19 nt, Artificial Sequence
  Description of Artificial Sequence: Synthetic oligonucleotide
  Antisense strand to SEQ ID NO: 122332
uaccaucauguuuauagca

SEQ ID NO: 122334 - RNA, 19 nt, Artificial Sequence
  Description of Artificial Sequence: Synthetic oligonucleotide
  Sense strand starting at position 989 of SEQ ID NO: 1561
acugguuuauaugcuauaa

SEQ ID NO: 122335 - RNA, 19 nt, Artificial Sequence
  Description of Artificial Sequence: Synthetic oligonucleotide
  Antisense strand to SEQ ID NO: 122334
uuauagcauauaaaccagu

SEQ ID NO: 122336 - RNA, 19 nt, Artificial Sequence
  Description of Artificial Sequence: Synthetic oligonucleotide
  Sense strand starting at position 902 of SEQ ID NO: 1561
aguaacugaccaugcaauu

SEQ ID NO: 122337 - RNA, 19 nt, Artificial Sequence
  Description of Artificial Sequence: Synthetic oligonucleotide
  Antisense strand to SEQ ID NO: 122336
aauugcauggucaguuacu

SEQ ID NO: 122338 - RNA, 19 nt, Artificial Sequence
  Description of Artificial Sequence: Synthetic oligonucleotide
  Sense strand starting at position 798 of SEQ ID NO: 1561
gaauuuauuugcuggguau

SEQ ID NO: 122339 - RNA, 19 nt, Artificial Sequence
  Description of Artificial Sequence: Synthetic oligonucleotide
  Antisense strand to SEQ ID NO: 122338
auacccagcaaauaaauuc

SEQ ID NO: 122340 - RNA, 19 nt, Artificial Sequence
  Description of Artificial Sequence: Synthetic oligonucleotide
  Sense strand starting at position 784 of SEQ ID NO: 1561
uacagaggguucuugaauu

SEQ ID NO: 122341 - RNA, 19 nt, Artificial Sequence
  Description of Artificial Sequence: Synthetic oligonucleotide
  Antisense strand to SEQ ID NO: 122340
aauucaagaacccucugua

SEQ ID NO: 122342 - RNA, 19 nt, Artificial Sequence
  Description of Artificial Sequence: Synthetic oligonucleotide
  Sense strand starting at position 697 of SEQ ID NO: 1561
ucauuauacuguuuaagga

SEQ ID NO: 122343 - RNA, 19 nt, Artificial Sequence
  Description of Artificial Sequence: Synthetic oligonucleotide
  Antisense strand to SEQ ID NO: 122342
uccuuaaacaguauaauga

SEQ ID NO: 122344 - RNA, 19 nt, Artificial Sequence
  Description of Artificial Sequence: Synthetic oligonucleotide
  Sense strand starting at position 524 of SEQ ID NO: 1561
guacaugcucccuauauug

SEQ ID NO: 122345 - RNA, 19 nt, Artificial Sequence
  Description of Artificial Sequence: Synthetic oligonucleotide
  Antisense strand to SEQ ID NO: 122344
caauauagggagcauguac

SEQ ID NO: 122346 - RNA, 19 nt, Artificial Sequence
  Description of Artificial Sequence: Synthetic oligonucleotide
  Sense strand starting at position 365 of SEQ ID NO: 1561
ugcacuauacaguagauua

SEQ ID NO: 122347 - RNA, 19 nt, Artificial Sequence
  Description of Artificial Sequence: Synthetic oligonucleotide
  Antisense strand to SEQ ID NO: 122346
uaaucuacuguauagugca

SEQ ID NO: 122348 - RNA, 19 nt, Artificial Sequence
  Description of Artificial Sequence: Synthetic oligonucleotide
  Sense strand starting at position 332 of SEQ ID NO: 1561
uauauauuucuaggcguaa

SEQ ID NO: 122349 - RNA, 19 nt, Artificial Sequence
  Description of Artificial Sequence: Synthetic oligonucleotide
  Antisense strand to SEQ ID NO: 122348
uuacgccuagaaauauaua

SEQ ID NO: 122350 - RNA, 19 nt, Artificial Sequence
  Description of Artificial Sequence: Synthetic oligonucleotide
  Sense strand starting at position 273 of SEQ ID NO: 1561
ucauauaugccaggcaaag

SEQ ID NO: 122351 - RNA, 19 nt, Artificial Sequence
  Description of Artificial Sequence: Synthetic oligonucleotide
  Antisense strand to SEQ ID NO: 122350
cuuugccuggcauauauga

SEQ ID NO: 122352 - RNA, 19 nt, Artificial Sequence
  Description of Artificial Sequence: Synthetic oligonucleotide
  Sense strand starting at position 237 of SEQ ID NO: 1561
ugaacaguccauugucaga

SEQ ID NO: 122353 - RNA, 19 nt, Artificial Sequence
  Description of Artificial Sequence: Synthetic oligonucleotide
  Antisense strand to SEQ ID NO: 122352
ucugacaauggacuguuca

SEQ ID NO: 122354 - RNA, 19 nt, Artificial Sequence
  Description of Artificial Sequence: Synthetic oligonucleotide
  Sense strand starting at position 133 of SEQ ID NO: 1561
aaagacuaaccacguguau

SEQ ID NO: 122355 - RNA, 19 nt, Artificial Sequence
  Description of Artificial Sequence: Synthetic oligonucleotide
  Antisense strand to SEQ ID NO: 122354
auacacgugguuagucuuu

SEQ ID NO: 122356 - RNA, 19 nt, Artificial Sequence
  Description of Artificial Sequence: Synthetic oligonucleotide
  Sense strand starting at position 119 of SEQ ID NO: 1561
auuaguaggcuuugaaaga

SEQ ID NO: 122357 - RNA, 19 nt, Artificial Sequence
  Description of Artificial Sequence: Synthetic oligonucleotide
  Antisense strand to SEQ ID NO: 122356
ucuuucaaagccuacuaau

SEQ ID NO: 122358 - RNA, 19 nt, Artificial Sequence
  Description of Artificial Sequence: Synthetic oligonucleotide
  Sense strand starting at position 108 of SEQ ID NO: 1561
auguuaccaucauuaguag

SEQ ID NO: 122359 - RNA, 19 nt, Artificial Sequence
  Description of Artificial Sequence: Synthetic oligonucleotide
  Antisense strand to SEQ ID NO: 122358
cuacuaaugaugguaacau

SEQ ID NO: 122360 - RNA, 19 nt, Artificial Sequence
  Description of Artificial Sequence: Synthetic oligonucleotide
  Sense strand starting at position 70 of SEQ ID NO: 1561
gucaguacauccuuauaca

SEQ ID NO: 122361 - RNA, 19 nt, Artificial Sequence
  Description of Artificial Sequence: Synthetic oligonucleotide
  Antisense strand to SEQ ID NO: 122360
uguauaaggauguacugac

SEQ ID NO: 122362 - RNA, 19 nt, Artificial Sequence
  Description of Artificial Sequence: Synthetic oligonucleotide
  Sense strand starting at position 3896 of SEQ ID NO: 1559
ugaguuugggcagaaguca

SEQ ID NO: 122363 - RNA, 19 nt, Artificial Sequence
  Description of Artificial Sequence: Synthetic oligonucleotide
  Antisense strand to SEQ ID NO: 122362
ugacuucugcccaaacuca

SEQ ID NO: 122364 - RNA, 19 nt, Artificial Sequence
  Description of Artificial Sequence: Synthetic oligonucleotide
  Sense strand starting at position 3871 of SEQ ID NO: 1559
gcuucuaaagguuaccaaa

SEQ ID NO: 122365 - RNA, 19 nt, Artificial Sequence
  Description of Artificial Sequence: Synthetic oligonucleotide
  Antisense strand to SEQ ID NO: 122364
uuugguaaccuuuagaagc

SEQ ID NO: 122366 - RNA, 19 nt, Artificial Sequence
  Description of Artificial Sequence: Synthetic oligonucleotide
  Sense strand starting at position 3493 of SEQ ID NO: 1559
ggauuaguuagauguauua

SEQ ID NO: 122367 - RNA, 19 nt, Artificial Sequence
  Description of Artificial Sequence: Synthetic oligonucleotide
  Antisense strand to SEQ ID NO: 122366
uaauacaucuaacuaaucc

SEQ ID NO: 122368 - RNA, 19 nt, Artificial Sequence
  Description of Artificial Sequence: Synthetic oligonucleotide
  Sense strand starting at position 3487 of SEQ ID NO: 1559
caguuaggauuaguuagau

SEQ ID NO: 122369 - RNA, 19 nt, Artificial Sequence
  Description of Artificial Sequence: Synthetic oligonucleotide
  Antisense strand to SEQ ID NO: 122368
aucuaacuaauccuaacug

SEQ ID NO: 122370 - RNA, 19 nt, Artificial Sequence
  Description of Artificial Sequence: Synthetic oligonucleotide
  Sense strand starting at position 3343 of SEQ ID NO: 1559
ccuugaaauugagcccaaa

SEQ ID NO: 122371 - RNA, 19 nt, Artificial Sequence
  Description of Artificial Sequence: Synthetic oligonucleotide
  Antisense strand to SEQ ID NO: 122370
uuugggcucaauuucaagg

SEQ ID NO: 122372 - RNA, 19 nt, Artificial Sequence
  Description of Artificial Sequence: Synthetic oligonucleotide
  Sense strand starting at position 3303 of SEQ ID NO: 1559
ggaccuguugcuuacacua

SEQ ID NO: 122373 - RNA, 19 nt, Artificial Sequence
  Description of Artificial Sequence: Synthetic oligonucleotide
  Antisense strand to SEQ ID NO: 122372
uaguguaagcaacaggucc

SEQ ID NO: 122374 - RNA, 19 nt, Artificial Sequence
  Description of Artificial Sequence: Synthetic oligonucleotide
  Sense strand starting at position 3275 of SEQ ID NO: 1559
aaguguucgcugguuauuc

SEQ ID NO: 122375 - RNA, 19 nt, Artificial Sequence
  Description of Artificial Sequence: Synthetic oligonucleotide
  Antisense strand to SEQ ID NO: 122374
gaauaaccagcgaacacuu

SEQ ID NO: 122376 - RNA, 19 nt, Artificial Sequence
  Description of Artificial Sequence: Synthetic oligonucleotide
  Sense strand starting at position 3221 of SEQ ID NO: 1559
aacacuagcguuuggagua

SEQ ID NO: 122377 - RNA, 19 nt, Artificial Sequence
  Description of Artificial Sequence: Synthetic oligonucleotide
  Antisense strand to SEQ ID NO: 122376
uacuccaaacgcuaguguu

SEQ ID NO: 122378 - RNA, 19 nt, Artificial Sequence
  Description of Artificial Sequence: Synthetic oligonucleotide
  Sense strand starting at position 3159 of SEQ ID NO: 1559
agcuuaucaguguaggaac

SEQ ID NO: 122379 - RNA, 19 nt, Artificial Sequence
  Description of Artificial Sequence: Synthetic oligonucleotide
  Antisense strand to SEQ ID NO: 122378
guuccuacacugauaagcu

SEQ ID NO: 122380 - RNA, 19 nt, Artificial Sequence
  Description of Artificial Sequence: Synthetic oligonucleotide
  Sense strand starting at position 3157 of SEQ ID NO: 1559
agagcuuaucaguguagga

SEQ ID NO: 122381 - RNA, 19 nt, Artificial Sequence
  Description of Artificial Sequence: Synthetic oligonucleotide
  Antisense strand to SEQ ID NO: 122380
uccuacacugauaagcucu

SEQ ID NO: 122382 - RNA, 19 nt, Artificial Sequence
  Description of Artificial Sequence: Synthetic oligonucleotide
  Sense strand starting at position 3151 of SEQ ID NO: 1559
ugucuaagagcuuaucagu

SEQ ID NO: 122383 - RNA, 19 nt, Artificial Sequence
  Description of Artificial Sequence: Synthetic oligonucleotide
  Antisense strand to SEQ ID NO: 122382
acugauaagcucuuagaca

SEQ ID NO: 122384 - RNA, 19 nt, Artificial Sequence
  Description of Artificial Sequence: Synthetic oligonucleotide
  Sense strand starting at position 3139 of SEQ ID NO: 1559
cauugaaaggcaugucuaa

SEQ ID NO: 122385 - RNA, 19 nt, Artificial Sequence
  Description of Artificial Sequence: Synthetic oligonucleotide
  Antisense strand to SEQ ID NO: 122384
uuagacaugccuuucaaug

SEQ ID NO: 122386 - RNA, 19 nt, Artificial Sequence
  Description of Artificial Sequence: Synthetic oligonucleotide
  Sense strand starting at position 3034 of SEQ ID NO: 1559
aucugaacuguguauuaaa

SEQ ID NO: 122387 - RNA, 19 nt, Artificial Sequence
  Description of Artificial Sequence: Synthetic oligonucleotide
  Antisense strand to SEQ ID NO: 122386
uuuaauacacaguucagau

SEQ ID NO: 122388 - RNA, 19 nt, Artificial Sequence
  Description of Artificial Sequence: Synthetic oligonucleotide
  Sense strand starting at position 3032 of SEQ ID NO: 1559
ccaucugaacuguguauua

SEQ ID NO: 122389 - RNA, 19 nt, Artificial Sequence
  Description of Artificial Sequence: Synthetic oligonucleotide
  Antisense strand to SEQ ID NO: 122388
uaauacacaguucagaugg

SEQ ID NO: 122390 - RNA, 19 nt, Artificial Sequence
  Description of Artificial Sequence: Synthetic oligonucleotide
  Sense strand starting at position 2853 of SEQ ID NO: 1559
ugcagagucgauuaggaca

SEQ ID NO: 122391 - RNA, 19 nt, Artificial Sequence
  Description of Artificial Sequence: Synthetic oligonucleotide
  Antisense strand to SEQ ID NO: 122390
uguccuaaucgacucugca

SEQ ID NO: 122392 - RNA, 19 nt, Artificial Sequence
  Description of Artificial Sequence: Synthetic oligonucleotide
  Sense strand starting at position 2830 of SEQ ID NO: 1559
gagcacuuugcagaagcua

SEQ ID NO: 122393 - RNA, 19 nt, Artificial Sequence
  Description of Artificial Sequence: Synthetic oligonucleotide
  Antisense strand to SEQ ID NO: 122392
uagcuucugcaaagugcuc

SEQ ID NO: 122394 - RNA, 19 nt, Artificial Sequence
  Description of Artificial Sequence: Synthetic oligonucleotide
  Sense strand starting at position 2768 of SEQ ID NO: 1559
agacaacauucgccuguuu

SEQ ID NO: 122395 - RNA, 19 nt, Artificial Sequence
  Description of Artificial Sequence: Synthetic oligonucleotide
  Antisense strand to SEQ ID NO: 122394
aaacaggcgaauguugucu

SEQ ID NO: 122396 - RNA, 19 nt, Artificial Sequence
  Description of Artificial Sequence: Synthetic oligonucleotide
  Sense strand starting at position 2605 of SEQ ID NO: 1559
agagguaugcuggaaagca

SEQ ID NO: 122397 - RNA, 19 nt, Artificial Sequence
  Description of Artificial Sequence: Synthetic oligonucleotide
  Antisense strand to SEQ ID NO: 122396
ugcuuuccagcauaccucu

SEQ ID NO: 122398 - RNA, 19 nt, Artificial Sequence
  Description of Artificial Sequence: Synthetic oligonucleotide
  Sense strand starting at position 2453 of SEQ ID NO: 1559
ugggaauucgugugaugga

SEQ ID NO: 122399 - RNA, 19 nt, Artificial Sequence
  Description of Artificial Sequence: Synthetic oligonucleotide
  Antisense strand to SEQ ID NO: 122398
uccaucacacgaauuccca

SEQ ID NO: 122400 - RNA, 19 nt, Artificial Sequence
  Description of Artificial Sequence: Synthetic oligonucleotide
  Sense strand starting at position 2442 of SEQ ID NO: 1559
gucccacaacuugggaauu

SEQ ID NO: 122401 - RNA, 19 nt, Artificial Sequence
  Description of Artificial Sequence: Synthetic oligonucleotide
  Antisense strand to SEQ ID NO: 122400
aauucccaaguugugggac

SEQ ID NO: 122402 - RNA, 19 nt, Artificial Sequence
  Description of Artificial Sequence: Synthetic oligonucleotide
  Sense strand starting at position 2436 of SEQ ID NO: 1559
aggugagucccacaacuug

SEQ ID NO: 122403 - RNA, 19 nt, Artificial Sequence
  Description of Artificial Sequence: Synthetic oligonucleotide
  Antisense strand to SEQ ID NO: 122402
caaguugugggacucaccu

SEQ ID NO: 122404 - RNA, 19 nt, Artificial Sequence
  Description of Artificial Sequence: Synthetic oligonucleotide
  Sense strand starting at position 2371 of SEQ ID NO: 1559
cgcagugcuccugaaccaa

SEQ ID NO: 122405 - RNA, 19 nt, Artificial Sequence
  Description of Artificial Sequence: Synthetic oligonucleotide
  Antisense strand to SEQ ID NO: 122404
uugguucaggagcacugcg

SEQ ID NO: 122406 - RNA, 19 nt, Artificial Sequence
  Description of Artificial Sequence: Synthetic oligonucleotide
  Sense strand starting at position 2176 of SEQ ID NO: 1559
ugcaucugccaugaauaca

SEQ ID NO: 122407 - RNA, 19 nt, Artificial Sequence
  Description of Artificial Sequence: Synthetic oligonucleotide
  Antisense strand to SEQ ID NO: 122406
uguauucauggcagaugca

SEQ ID NO: 122408 - RNA, 19 nt, Artificial Sequence
  Description of Artificial Sequence: Synthetic oligonucleotide
  Sense strand starting at position 1793 of SEQ ID NO: 1559
cugucaauucuagggugca

SEQ ID NO: 122409 - RNA, 19 nt, Artificial Sequence
  Description of Artificial Sequence: Synthetic oligonucleotide
  Antisense strand to SEQ ID NO: 122408
ugcacccuagaauugacag

SEQ ID NO: 122410 - RNA, 19 nt, Artificial Sequence
  Description of Artificial Sequence: Synthetic oligonucleotide
  Sense strand starting at position 1005 of SEQ ID NO: 1559
cccagugacuugucaagag

SEQ ID NO: 122411 - RNA, 19 nt, Artificial Sequence
  Description of Artificial Sequence: Synthetic oligonucleotide
  Antisense strand to SEQ ID NO: 122410
cucuugacaagucacuggg

SEQ ID NO: 122412 - RNA, 19 nt, Artificial Sequence
  Description of Artificial Sequence: Synthetic oligonucleotide
  Sense strand starting at position 847 of SEQ ID NO: 1559
cagcaaacucuuggguagu

SEQ ID NO: 122413 - RNA, 19 nt, Artificial Sequence
  Description of Artificial Sequence: Synthetic oligonucleotide
  Antisense strand to SEQ ID NO: 122412
acuacccaagaguuugcug

SEQ ID NO: 122414 - RNA, 19 nt, Artificial Sequence
  Description of Artificial Sequence: Synthetic oligonucleotide
  Sense strand starting at position 547 of SEQ ID NO: 1559
ccgauuuguguuugaagua

SEQ ID NO: 122415 - RNA, 19 nt, Artificial Sequence
  Description of Artificial Sequence: Synthetic oligonucleotide
  Antisense strand to SEQ ID NO: 122414
uacuucaaacacaaaucgg

SEQ ID NO: 122416 - RNA, 19 nt, Artificial Sequence
  Description of Artificial Sequence: Synthetic oligonucleotide
  Sense strand starting at position 546 of SEQ ID NO: 1559
uccgauuuguguuugaagu

SEQ ID NO: 122417 - RNA, 19 nt, Artificial Sequence
  Description of Artificial Sequence: Synthetic oligonucleotide
  Antisense strand to SEQ ID NO: 122416
acuucaaacacaaaucgga

SEQ ID NO: 122418 - RNA, 19 nt, Artificial Sequence
  Description of Artificial Sequence: Synthetic oligonucleotide
  Sense strand starting at position 541 of SEQ ID NO: 1559
uggguuccgauuuguguuu

SEQ ID NO: 122419 - RNA, 19 nt, Artificial Sequence
  Description of Artificial Sequence: Synthetic oligonucleotide
  Antisense strand to SEQ ID NO: 122418
aaacacaaaucggaaccca

SEQ ID NO: 122420 - RNA, 19 nt, Artificial Sequence
  Description of Artificial Sequence: Synthetic oligonucleotide
  Sense strand starting at position 497 of SEQ ID NO: 1559
cugugcgcuccuccuuaua

SEQ ID NO: 122421 - RNA, 19 nt, Artificial Sequence
  Description of Artificial Sequence: Synthetic oligonucleotide
  Antisense strand to SEQ ID NO: 122420
uauaaggaggagcgcacag

SEQ ID NO: 122422 - RNA, 19 nt, Artificial Sequence
  Description of Artificial Sequence: Synthetic oligonucleotide
  Sense strand starting at position 478 of SEQ ID NO: 1559
guaauuaagagcgauucuu

SEQ ID NO: 122423 - RNA, 19 nt, Artificial Sequence
  Description of Artificial Sequence: Synthetic oligonucleotide
  Antisense strand to SEQ ID NO: 122422
aagaaucgcucuuaauuac

SEQ ID NO: 122424 - RNA, 19 nt, Artificial Sequence
  Description of Artificial Sequence: Synthetic oligonucleotide
  Sense strand starting at position 477 of SEQ ID NO: 1559
uguaauuaagagcgauucu

SEQ ID NO: 122425 - RNA, 19 nt, Artificial Sequence
  Description of Artificial Sequence: Synthetic oligonucleotide
  Antisense strand to SEQ ID NO: 122424
agaaucgcucuuaauuaca

SEQ ID NO: 122426 - RNA, 19 nt, Artificial Sequence
  Description of Artificial Sequence: Synthetic oligonucleotide
  Sense strand starting at position 343 of SEQ ID NO: 1559
ggcaucauauaauuaugau

SEQ ID NO: 122427 - RNA, 19 nt, Artificial Sequence
  Description of Artificial Sequence: Synthetic oligonucleotide
  Antisense strand to SEQ ID NO: 122426
aucauaauuauaugaugcc

SEQ ID NO: 122428 - RNA, 19 nt, Artificial Sequence
  Description of Artificial Sequence: Synthetic oligonucleotide
  Sense strand starting at position 310 of SEQ ID NO: 1559
gcagaaugcauagaguuac

SEQ ID NO: 122429 - RNA, 19 nt, Artificial Sequence
  Description of Artificial Sequence: Synthetic oligonucleotide
  Antisense strand to SEQ ID NO: 122428
guaacucuaugcauucugc

SEQ ID NO: 122430 - RNA, 19 nt, Artificial Sequence
  Description of Artificial Sequence: Synthetic oligonucleotide
  Sense strand starting at position 266 of SEQ ID NO: 1559
cgaugcaugugauucaaag

SEQ ID NO: 122431 - RNA, 19 nt, Artificial Sequence
  Description of Artificial Sequence: Synthetic oligonucleotide
  Antisense strand to SEQ ID NO: 122430
cuuugaaucacaugcaucg

SEQ ID NO: 122432 - RNA, 19 nt, Artificial Sequence
  Description of Artificial Sequence: Synthetic oligonucleotide
  Sense strand starting at position 261 of SEQ ID NO: 1559
uuaaacgaugcaugugauu

SEQ ID NO: 122433 - RNA, 19 nt, Artificial Sequence
  Description of Artificial Sequence: Synthetic oligonucleotide
  Antisense strand to SEQ ID NO: 122432
aaucacaugcaucguuuaa

SEQ ID NO: 122434 - RNA, 19 nt, Artificial Sequence
  Description of Artificial Sequence: Synthetic oligonucleotide
  Sense strand starting at position 257 of SEQ ID NO: 1559
gaaauuaaacgaugcaugu

SEQ ID NO: 122435 - RNA, 19 nt, Artificial Sequence
  Description of Artificial Sequence: Synthetic oligonucleotide
  Antisense strand to SEQ ID NO: 122434
acaugcaucguuuaauuuc

SEQ ID NO: 122436 - RNA, 19 nt, Artificial Sequence
  Description of Artificial Sequence: Synthetic oligonucleotide
  Sense strand starting at position 244 of SEQ ID NO: 1559
gcuggaaaucuuugaaauu

SEQ ID NO: 122437 - RNA, 19 nt, Artificial Sequence
  Description of Artificial Sequence: Synthetic oligonucleotide
  Antisense strand to SEQ ID NO: 122436
aauuucaaagauuuccagc

SEQ ID NO: 122438 - RNA, 19 nt, Artificial Sequence
  Description of Artificial Sequence: Synthetic oligonucleotide
  Sense strand starting at position 73 of SEQ ID NO: 1559
cuccaaauuuguuucguuu

SEQ ID NO: 122439 - RNA, 19 nt, Artificial Sequence
  Description of Artificial Sequence: Synthetic oligonucleotide
  Antisense strand to SEQ ID NO: 122438
aaacgaaacaaauuuggag

SEQ ID NO: 122440 - RNA, 19 nt, Artificial Sequence
  Description of Artificial Sequence: Synthetic oligonucleotide
  Sense strand starting at position 72 of SEQ ID NO: 1559
ucuccaaauuuguuucguu

SEQ ID NO: 122441 - RNA, 19 nt, Artificial Sequence
  Description of Artificial Sequence: Synthetic oligonucleotide
  Antisense strand to SEQ ID NO: 122440
aacgaaacaaauuuggaga

SEQ ID NO: 122442 - RNA, 19 nt, Artificial Sequence
  Description of Artificial Sequence: Synthetic oligonucleotide
  Sense strand starting at position 3982 of SEQ ID NO: 1562
ccaagagugcaauacaugu

SEQ ID NO: 122443 - RNA, 19 nt, Artificial Sequence
  Description of Artificial Sequence: Synthetic oligonucleotide
  Antisense strand to SEQ ID NO: 122442
acauguauugcacucuugg

SEQ ID NO: 122444 - RNA, 19 nt, Artificial Sequence
  Description of Artificial Sequence: Synthetic oligonucleotide
  Sense strand starting at position 3871 of SEQ ID NO: 1562
gaagaaugauaauaaugga

SEQ ID NO: 122445 - RNA, 19 nt, Artificial Sequence
  Description of Artificial Sequence: Synthetic oligonucleotide
  Antisense strand to SEQ ID NO: 122444
uccauuauuaucauucuuc

SEQ ID NO: 122446 - RNA, 19 nt, Artificial Sequence
  Description of Artificial Sequence: Synthetic oligonucleotide
  Sense strand starting at position 3848 of SEQ ID NO: 1562
ugcuaugugaaaugaugau

SEQ ID NO: 122447 - RNA, 19 nt, Artificial Sequence
  Description of Artificial Sequence: Synthetic oligonucleotide
  Antisense strand to SEQ ID NO: 122446
aucaucauuucacauagca

SEQ ID NO: 122448 - RNA, 19 nt, Artificial Sequence
  Description of Artificial Sequence: Synthetic oligonucleotide
  Sense strand starting at position 3842 of SEQ ID NO: 1562
uaaagaugcuaugugaaau

SEQ ID NO: 122449 - RNA, 19 nt, Artificial Sequence
  Description of Artificial Sequence: Synthetic oligonucleotide
  Antisense strand to SEQ ID NO: 122448
auuucacauagcaucuuua

SEQ ID NO: 122450 - RNA, 19 nt, Artificial Sequence
  Description of Artificial Sequence: Synthetic oligonucleotide
  Sense strand starting at position 3816 of SEQ ID NO: 1562
uaaaguugugagcauauaa

SEQ ID NO: 122451 - RNA, 19 nt, Artificial Sequence
  Description of Artificial Sequence: Synthetic oligonucleotide
  Antisense strand to SEQ ID NO: 122450
uuauaugcucacaacuuua

SEQ ID NO: 122452 - RNA, 19 nt, Artificial Sequence
  Description of Artificial Sequence: Synthetic oligonucleotide
  Sense strand starting at position 3697 of SEQ ID NO: 1562
uauaguuaggguuaaaccu

SEQ ID NO: 122453 - RNA, 19 nt, Artificial Sequence
  Description of Artificial Sequence: Synthetic oligonucleotide
  Antisense strand to SEQ ID NO: 122452
agguuuaacccuaacuaua

SEQ ID NO: 122454 - RNA, 19 nt, Artificial Sequence
  Description of Artificial Sequence: Synthetic oligonucleotide
  Sense strand starting at position 3455 of SEQ ID NO: 1562
uuauaagugcucuagggag

SEQ ID NO: 122455 - RNA, 19 nt, Artificial Sequence
  Description of Artificial Sequence: Synthetic oligonucleotide
  Antisense strand to SEQ ID NO: 122454
cucccuagagcacuuauaa

SEQ ID NO: 122456 - RNA, 19 nt, Artificial Sequence
  Description of Artificial Sequence: Synthetic oligonucleotide
  Sense strand starting at position 3440 of SEQ ID NO: 1562
ggagaaacuuugccuuuau

SEQ ID NO: 122457 - RNA, 19 nt, Artificial Sequence
  Description of Artificial Sequence: Synthetic oligonucleotide
  Antisense strand to SEQ ID NO: 122456
auaaaggcaaaguuucucc

SEQ ID NO: 122458 - RNA, 19 nt, Artificial Sequence
  Description of Artificial Sequence: Synthetic oligonucleotide
  Sense strand starting at position 3439 of SEQ ID NO: 1562
gggagaaacuuugccuuua

SEQ ID NO: 122459 - RNA, 19 nt, Artificial Sequence
  Description of Artificial Sequence: Synthetic oligonucleotide
  Antisense strand to SEQ ID NO: 122458
uaaaggcaaaguuucuccc

SEQ ID NO: 122460 - RNA, 19 nt, Artificial Sequence
  Description of Artificial Sequence: Synthetic oligonucleotide
  Sense strand starting at position 3393 of SEQ ID NO: 1562
aggaguuggcagugaaacu

SEQ ID NO: 122461 - RNA, 19 nt, Artificial Sequence
  Description of Artificial Sequence: Synthetic oligonucleotide
  Antisense strand to SEQ ID NO: 122460
aguuucacugccaacuccu

SEQ ID NO: 122462 - RNA, 19 nt, Artificial Sequence
  Description of Artificial Sequence: Synthetic oligonucleotide
  Sense strand starting at position 3299 of SEQ ID NO: 1562
uagcuaugugacuaggaau

SEQ ID NO: 122463 - RNA, 19 nt, Artificial Sequence
  Description of Artificial Sequence: Synthetic oligonucleotide
  Antisense strand to SEQ ID NO: 122462
auuccuagucacauagcua

SEQ ID NO: 122464 - RNA, 19 nt, Artificial Sequence
  Description of Artificial Sequence: Synthetic oligonucleotide
  Sense strand starting at position 3298 of SEQ ID NO: 1562
guagcuaugugacuaggaa

SEQ ID NO: 122465 - RNA, 19 nt, Artificial Sequence
  Description of Artificial Sequence: Synthetic oligonucleotide
  Antisense strand to SEQ ID NO: 122464
uuccuagucacauagcuac

SEQ ID NO: 122466 - RNA, 19 nt, Artificial Sequence
  Description of Artificial Sequence: Synthetic oligonucleotide
  Sense strand starting at position 3291 of SEQ ID NO: 1562
ugaaauuguagcuauguga

SEQ ID NO: 122467 - RNA, 19 nt, Artificial Sequence
  Description of Artificial Sequence: Synthetic oligonucleotide
  Antisense strand to SEQ ID NO: 122466
ucacauagcuacaauuuca

SEQ ID NO: 122468 - RNA, 19 nt, Artificial Sequence
  Description of Artificial Sequence: Synthetic oligonucleotide
  Sense strand starting at position 3252 of SEQ ID NO: 1562
cuucucuagcaugaagaua

SEQ ID NO: 122469 - RNA, 19 nt, Artificial Sequence
  Description of Artificial Sequence: Synthetic oligonucleotide
  Antisense strand to SEQ ID NO: 122468
uaucuucaugcuagagaag

SEQ ID NO: 122470 - RNA, 19 nt, Artificial Sequence
  Description of Artificial Sequence: Synthetic oligonucleotide
  Sense strand starting at position 3112 of SEQ ID NO: 1562
aguauuaguccauauaaug

SEQ ID NO: 122471 - RNA, 19 nt, Artificial Sequence
  Description of Artificial Sequence: Synthetic oligonucleotide
  Antisense strand to SEQ ID NO: 122470
cauuauauggacuaauacu

SEQ ID NO: 122472 - RNA, 19 nt, Artificial Sequence
  Description of Artificial Sequence: Synthetic oligonucleotide
  Sense strand starting at position 3042 of SEQ ID NO: 1562
auacaaagaauucgguguu

SEQ ID NO: 122473 - RNA, 19 nt, Artificial Sequence
  Description of Artificial Sequence: Synthetic oligonucleotide
  Antisense strand to SEQ ID NO: 122472
aacaccgaauucuuuguau

SEQ ID NO: 122474 - RNA, 19 nt, Artificial Sequence
  Description of Artificial Sequence: Synthetic oligonucleotide
  Sense strand starting at position 3016 of SEQ ID NO: 1562
guugucauacaacagacua

SEQ ID NO: 122475 - RNA, 19 nt, Artificial Sequence
  Description of Artificial Sequence: Synthetic oligonucleotide
  Antisense strand to SEQ ID NO: 122474
uagucuguuguaugacaac

SEQ ID NO: 122476 - RNA, 19 nt, Artificial Sequence
  Description of Artificial Sequence: Synthetic oligonucleotide
  Sense strand starting at position 2908 of SEQ ID NO: 1562
gguugauggguucacugga

SEQ ID NO: 122477 - RNA, 19 nt, Artificial Sequence
  Description of Artificial Sequence: Synthetic oligonucleotide
  Antisense strand to SEQ ID NO: 122476
uccagugaacccaucaacc

SEQ ID NO: 122478 - RNA, 19 nt, Artificial Sequence
  Description of Artificial Sequence: Synthetic oligonucleotide
  Sense strand starting at position 2817 of SEQ ID NO: 1562
caguuacugguuuaugaag

SEQ ID NO: 122479 - RNA, 19 nt, Artificial Sequence
  Description of Artificial Sequence: Synthetic oligonucleotide
  Antisense strand to SEQ ID NO: 122478
cuucauaaaccaguaacug

SEQ ID NO: 122480 - RNA, 19 nt, Artificial Sequence
  Description of Artificial Sequence: Synthetic oligonucleotide
  Sense strand starting at position 2731 of SEQ ID NO: 1562
acuggaagucauugcagaa

SEQ ID NO: 122481 - RNA, 19 nt, Artificial Sequence
  Description of Artificial Sequence: Synthetic oligonucleotide
  Antisense strand to SEQ ID NO: 122480
uucugcaaugacuuccagu

SEQ ID NO: 122482 - RNA, 19 nt, Artificial Sequence
  Description of Artificial Sequence: Synthetic oligonucleotide
  Sense strand starting at position 2685 of SEQ ID NO: 1562
uugagauagagaugcugua

SEQ ID NO: 122483 - RNA, 19 nt, Artificial Sequence
  Description of Artificial Sequence: Synthetic oligonucleotide
  Antisense strand to SEQ ID NO: 122482
uacagcaucucuaucucaa

SEQ ID NO: 122484 - RNA, 19 nt, Artificial Sequence
  Description of Artificial Sequence: Synthetic oligonucleotide
  Sense strand starting at position 2602 of SEQ ID NO: 1562
ggcaauuacuuaucacaga

SEQ ID NO: 122485 - RNA, 19 nt, Artificial Sequence
  Description of Artificial Sequence: Synthetic oligonucleotide
  Antisense strand to SEQ ID NO: 122484
ucugugauaaguaauugcc

SEQ ID NO: 122486 - RNA, 19 nt, Artificial Sequence
  Description of Artificial Sequence: Synthetic oligonucleotide
  Sense strand starting at position 2138 of SEQ ID NO: 1562
uaaguuugauaugcugaga

SEQ ID NO: 122487 - RNA, 19 nt, Artificial Sequence
  Description of Artificial Sequence: Synthetic oligonucleotide
  Antisense strand to SEQ ID NO: 122486
ucucagcauaucaaacuua

SEQ ID NO: 122488 - RNA, 19 nt, Artificial Sequence
  Description of Artificial Sequence: Synthetic oligonucleotide
  Sense strand starting at position 2132 of SEQ ID NO: 1562
gccaauuaaguuugauaug

SEQ ID NO: 122489 - RNA, 19 nt, Artificial Sequence
  Description of Artificial Sequence: Synthetic oligonucleotide
  Antisense strand to SEQ ID NO: 122488
cauaucaaacuuaauuggc

SEQ ID NO: 122490 - RNA, 19 nt, Artificial Sequence
  Description of Artificial Sequence: Synthetic oligonucleotide
  Sense strand starting at position 2033 of SEQ ID NO: 1562
agcucuguauccuuaaaga

SEQ ID NO: 122491 - RNA, 19 nt, Artificial Sequence
  Description of Artificial Sequence: Synthetic oligonucleotide
  Antisense strand to SEQ ID NO: 122490
ucuuuaaggauacagagcu

SEQ ID NO: 122492 - RNA, 19 nt, Artificial Sequence
  Description of Artificial Sequence: Synthetic oligonucleotide
  Sense strand starting at position 2028 of SEQ ID NO: 1562
agaacagcucuguauccuu

SEQ ID NO: 122493 - RNA, 19 nt, Artificial Sequence
  Description of Artificial Sequence: Synthetic oligonucleotide
  Antisense strand to SEQ ID NO: 122492
aaggauacagagcuguucu

SEQ ID NO: 122494 - RNA, 19 nt, Artificial Sequence
  Description of Artificial Sequence: Synthetic oligonucleotide
  Sense strand starting at position 1838 of SEQ ID NO: 1562
gugacuucuuuauugaaca

SEQ ID NO: 122495 - RNA, 19 nt, Artificial Sequence
  Description of Artificial Sequence: Synthetic oligonucleotide
  Antisense strand to SEQ ID NO: 122494
uguucaauaaagaagucac

SEQ ID NO: 122496 - RNA, 19 nt, Artificial Sequence
  Description of Artificial Sequence: Synthetic oligonucleotide
  Sense strand starting at position 1827 of SEQ ID NO: 1562
agaauuauccagugacuuc

SEQ ID NO: 122497 - RNA, 19 nt, Artificial Sequence
  Description of Artificial Sequence: Synthetic oligonucleotide
  Antisense strand to SEQ ID NO: 122496
gaagucacuggauaauucu

SEQ ID NO: 122498 - RNA, 19 nt, Artificial Sequence
  Description of Artificial Sequence: Synthetic oligonucleotide
  Sense strand starting at position 1814 of SEQ ID NO: 1562
cugcccuuugaauagaauu

SEQ ID NO: 122499 - RNA, 19 nt, Artificial Sequence
  Description of Artificial Sequence: Synthetic oligonucleotide
  Antisense strand to SEQ ID NO: 122498
aauucuauucaaagggcag

SEQ ID NO: 122500 - RNA, 19 nt, Artificial Sequence
  Description of Artificial Sequence: Synthetic oligonucleotide
  Sense strand starting at position 1636 of SEQ ID NO: 1562
agacuagagauuggugguu

SEQ ID NO: 122501 - RNA, 19 nt, Artificial Sequence
  Description of Artificial Sequence: Synthetic oligonucleotide
  Antisense strand to SEQ ID NO: 122500
aaccaccaaucucuagucu

SEQ ID NO: 122502 - RNA, 19 nt, Artificial Sequence
  Description of Artificial Sequence: Synthetic oligonucleotide
  Sense strand starting at position 1352 of SEQ ID NO: 1562
gucugauuuguaggucuga

SEQ ID NO: 122503 - RNA, 19 nt, Artificial Sequence
  Description of Artificial Sequence: Synthetic oligonucleotide
  Antisense strand to SEQ ID NO: 122502
ucagaccuacaaaucagac

SEQ ID NO: 122504 - RNA, 19 nt, Artificial Sequence
  Description of Artificial Sequence: Synthetic oligonucleotide
  Sense strand starting at position 1261 of SEQ ID NO: 1562
gaagauaguuuacagauuu

SEQ ID NO: 122505 - RNA, 19 nt, Artificial Sequence
  Description of Artificial Sequence: Synthetic oligonucleotide
  Antisense strand to SEQ ID NO: 122504
aaaucuguaaacuaucuuc

SEQ ID NO: 122506 - RNA, 19 nt, Artificial Sequence
  Description of Artificial Sequence: Synthetic oligonucleotide
  Sense strand starting at position 1127 of SEQ ID NO: 1562
ugaucagcggcacauaauu

SEQ ID NO: 122507 - RNA, 19 nt, Artificial Sequence
  Description of Artificial Sequence: Synthetic oligonucleotide
  Antisense strand to SEQ ID NO: 122506
aauuaugugccgcugauca

SEQ ID NO: 122508 - RNA, 19 nt, Artificial Sequence
  Description of Artificial Sequence: Synthetic oligonucleotide
  Sense strand starting at position 1049 of SEQ ID NO: 1562
gcuuaacaagauggauuau

SEQ ID NO: 122509 - RNA, 19 nt, Artificial Sequence
  Description of Artificial Sequence: Synthetic oligonucleotide
  Antisense strand to SEQ ID NO: 122508
auaauccaucuuguuaagc

SEQ ID NO: 122510 - RNA, 19 nt, Artificial Sequence
  Description of Artificial Sequence: Synthetic oligonucleotide
  Sense strand starting at position 1026 of SEQ ID NO: 1562
gggugagcaucugugaaac

SEQ ID NO: 122511 - RNA, 19 nt, Artificial Sequence
  Description of Artificial Sequence: Synthetic oligonucleotide
  Antisense strand to SEQ ID NO: 122510
guuucacagaugcucaccc

SEQ ID NO: 122512 - RNA, 19 nt, Artificial Sequence
  Description of Artificial Sequence: Synthetic oligonucleotide
  Sense strand starting at position 871 of SEQ ID NO: 1562
gaguguauuugggaaggaa

SEQ ID NO: 122513 - RNA, 19 nt, Artificial Sequence
  Description of Artificial Sequence: Synthetic oligonucleotide
  Antisense strand to SEQ ID NO: 122512
uuccuucccaaauacacuc

SEQ ID NO: 122514 - RNA, 19 nt, Artificial Sequence
  Description of Artificial Sequence: Synthetic oligonucleotide
  Sense strand starting at position 736 of SEQ ID NO: 1562
ccuucugguccaggagaga

SEQ ID NO: 122515 - RNA, 19 nt, Artificial Sequence
  Description of Artificial Sequence: Synthetic oligonucleotide
  Antisense strand to SEQ ID NO: 122514
ucucuccuggaccagaagg

SEQ ID NO: 122516 - RNA, 19 nt, Artificial Sequence
  Description of Artificial Sequence: Synthetic oligonucleotide
  Sense strand starting at position 369 of SEQ ID NO: 1562
gaguaaaucuagguaauau

SEQ ID NO: 122517 - RNA, 19 nt, Artificial Sequence
  Description of Artificial Sequence: Synthetic oligonucleotide
  Antisense strand to SEQ ID NO: 122516
auauuaccuagauuuacuc

SEQ ID NO: 122518 - RNA, 19 nt, Artificial Sequence
  Description of Artificial Sequence: Synthetic oligonucleotide
  Sense strand starting at position 368 of SEQ ID NO: 1562
agaguaaaucuagguaaua

SEQ ID NO: 122519 - RNA, 19 nt, Artificial Sequence
  Description of Artificial Sequence: Synthetic oligonucleotide
  Antisense strand to SEQ ID NO: 122518
uauuaccuagauuuacucu

SEQ ID NO: 122520 - RNA, 19 nt, Artificial Sequence
  Description of Artificial Sequence: Synthetic oligonucleotide
  Sense strand starting at position 247 of SEQ ID NO: 1562
aaugaaaugcuuuguauug

SEQ ID NO: 122521 - RNA, 19 nt, Artificial Sequence
  Description of Artificial Sequence: Synthetic oligonucleotide
  Antisense strand to SEQ ID NO: 122520
caauacaaagcauuucauu

SEQ ID NO: 122522 - RNA, 19 nt, Artificial Sequence
  Description of Artificial Sequence: Synthetic oligonucleotide
  Sense strand starting at position 3915 of SEQ ID NO: 1557
ugggauacauugucaauca

SEQ ID NO: 122523 - RNA, 19 nt, Artificial Sequence
  Description of Artificial Sequence: Synthetic oligonucleotide
  Antisense strand to SEQ ID NO: 122522
ugauugacaauguauccca

SEQ ID NO: 122524 - RNA, 19 nt, Artificial Sequence
  Description of Artificial Sequence: Synthetic oligonucleotide
  Sense strand starting at position 3882 of SEQ ID NO: 1557
uuucuauagucuuccauug

SEQ ID NO: 122525 - RNA, 19 nt, Artificial Sequence
  Description of Artificial Sequence: Synthetic oligonucleotide
  Antisense strand to SEQ ID NO: 122524
caauggaagacuauagaaa

SEQ ID NO: 122526 - RNA, 19 nt, Artificial Sequence
  Description of Artificial Sequence: Synthetic oligonucleotide
  Sense strand starting at position 3388 of SEQ ID NO: 1557
cuuuaauuggaucauugua

SEQ ID NO: 122527 - RNA, 19 nt, Artificial Sequence
  Description of Artificial Sequence: Synthetic oligonucleotide
  Antisense strand to SEQ ID NO: 122526
uacaaugauccaauuaaag

SEQ ID NO: 122528 - RNA, 19 nt, Artificial Sequence
  Description of Artificial Sequence: Synthetic oligonucleotide
  Sense strand starting at position 3382 of SEQ ID NO: 1557
agugaacuuuaauuggauc

SEQ ID NO: 122529 - RNA, 19 nt, Artificial Sequence
  Description of Artificial Sequence: Synthetic oligonucleotide
  Antisense strand to SEQ ID NO: 122528
gauccaauuaaaguucacu

SEQ ID NO: 122530 - RNA, 19 nt, Artificial Sequence
  Description of Artificial Sequence: Synthetic oligonucleotide
  Sense strand starting at position 3338 of SEQ ID NO: 1557
acaaguuuauaugcucuga

SEQ ID NO: 122531 - RNA, 19 nt, Artificial Sequence
  Description of Artificial Sequence: Synthetic oligonucleotide
  Antisense strand to SEQ ID NO: 122530
ucagagcauauaaacuugu

SEQ ID NO: 122532 - RNA, 19 nt, Artificial Sequence
  Description of Artificial Sequence: Synthetic oligonucleotide
  Sense strand starting at position 3187 of SEQ ID NO: 1557
auugaaccucugugcaauu

SEQ ID NO: 122533 - RNA, 19 nt, Artificial Sequence
  Description of Artificial Sequence: Synthetic oligonucleotide
  Antisense strand to SEQ ID NO: 122532
aauugcacagagguucaau

SEQ ID NO: 122534 - RNA, 19 nt, Artificial Sequence
  Description of Artificial Sequence: Synthetic oligonucleotide
  Sense strand starting at position 3131 of SEQ ID NO: 1557
auauguuuguaaccaggca

SEQ ID NO: 122535 - RNA, 19 nt, Artificial Sequence
  Description of Artificial Sequence: Synthetic oligonucleotide
  Antisense strand to SEQ ID NO: 122534
ugccugguuacaaacauau

SEQ ID NO: 122536 - RNA, 19 nt, Artificial Sequence
  Description of Artificial Sequence: Synthetic oligonucleotide
  Sense strand starting at position 3113 of SEQ ID NO: 1557
uguguuucccaugauacaa

SEQ ID NO: 122537 - RNA, 19 nt, Artificial Sequence
  Description of Artificial Sequence: Synthetic oligonucleotide
  Antisense strand to SEQ ID NO: 122536
uuguaucaugggaaacaca

SEQ ID NO: 122538 - RNA, 19 nt, Artificial Sequence
  Description of Artificial Sequence: Synthetic oligonucleotide
  Sense strand starting at position 3049 of SEQ ID NO: 1557
caggcauuguucucaaaga

SEQ ID NO: 122539 - RNA, 19 nt, Artificial Sequence
  Description of Artificial Sequence: Synthetic oligonucleotide
  Antisense strand to SEQ ID NO: 122538
ucuuugagaacaaugccug

SEQ ID NO: 122540 - RNA, 19 nt, Artificial Sequence
  Description of Artificial Sequence: Synthetic oligonucleotide
  Sense strand starting at position 2622 of SEQ ID NO: 1557
uugagaaagucauuccuuc

SEQ ID NO: 122541 - RNA, 19 nt, Artificial Sequence
  Description of Artificial Sequence: Synthetic oligonucleotide
  Antisense strand to SEQ ID NO: 122540
gaaggaaugacuuucucaa

SEQ ID NO: 122542 - RNA, 19 nt, Artificial Sequence
  Description of Artificial Sequence: Synthetic oligonucleotide
  Sense strand starting at position 2566 of SEQ ID NO: 1557
uuagaaaucugaggauuua

SEQ ID NO: 122543 - RNA, 19 nt, Artificial Sequence
  Description of Artificial Sequence: Synthetic oligonucleotide
  Antisense strand to SEQ ID NO: 122542
uaaauccucagauuucuaa

SEQ ID NO: 122544 - RNA, 19 nt, Artificial Sequence
  Description of Artificial Sequence: Synthetic oligonucleotide
  Sense strand starting at position 2543 of SEQ ID NO: 1557
aguguuacaucuucuaacu

SEQ ID NO: 122545 - RNA, 19 nt, Artificial Sequence
  Description of Artificial Sequence: Synthetic oligonucleotide
  Antisense strand to SEQ ID NO: 122544
aguuagaagauguaacacu

SEQ ID NO: 122546 - RNA, 19 nt, Artificial Sequence
  Description of Artificial Sequence: Synthetic oligonucleotide
  Sense strand starting at position 2526 of SEQ ID NO: 1557
ugaauuguuugagauuuag

SEQ ID NO: 122547 - RNA, 19 nt, Artificial Sequence
  Description of Artificial Sequence: Synthetic oligonucleotide
  Antisense strand to SEQ ID NO: 122546
cuaaaucucaaacaauuca

SEQ ID NO: 122548 - RNA, 19 nt, Artificial Sequence
  Description of Artificial Sequence: Synthetic oligonucleotide
  Sense strand starting at position 2523 of SEQ ID NO: 1557
uggugaauuguuugagauu

SEQ ID NO: 122549 - RNA, 19 nt, Artificial Sequence
  Description of Artificial Sequence: Synthetic oligonucleotide
  Antisense strand to SEQ ID NO: 122548
aaucucaaacaauucacca

SEQ ID NO: 122550 - RNA, 19 nt, Artificial Sequence
  Description of Artificial Sequence: Synthetic oligonucleotide
  Sense strand starting at position 2521 of SEQ ID NO: 1557
aauggugaauuguuugaga

SEQ ID NO: 122551 - RNA, 19 nt, Artificial Sequence
  Description of Artificial Sequence: Synthetic oligonucleotide
  Antisense strand to SEQ ID NO: 122550
ucucaaacaauucaccauu

SEQ ID NO: 122552 - RNA, 19 nt, Artificial Sequence
  Description of Artificial Sequence: Synthetic oligonucleotide
  Sense strand starting at position 2474 of SEQ ID NO: 1557
uaggauccagaguguguua

SEQ ID NO: 122553 - RNA, 19 nt, Artificial Sequence
  Description of Artificial Sequence: Synthetic oligonucleotide
  Antisense strand to SEQ ID NO: 122552
uaacacacucuggauccua

SEQ ID NO: 122554 - RNA, 19 nt, Artificial Sequence
  Description of Artificial Sequence: Synthetic oligonucleotide
  Sense strand starting at position 2430 of SEQ ID NO: 1557
gauugcauucgacaaaugu

SEQ ID NO: 122555 - RNA, 19 nt, Artificial Sequence
  Description of Artificial Sequence: Synthetic oligonucleotide
  Antisense strand to SEQ ID NO: 122554
acauuugucgaaugcaauc

SEQ ID NO: 122556 - RNA, 19 nt, Artificial Sequence
  Description of Artificial Sequence: Synthetic oligonucleotide
  Sense strand starting at position 2374 of SEQ ID NO: 1557
cuuccuaugcagcauguaa

SEQ ID NO: 122557 - RNA, 19 nt, Artificial Sequence
  Description of Artificial Sequence: Synthetic oligonucleotide
  Antisense strand to SEQ ID NO: 122556
uuacaugcugcauaggaag

SEQ ID NO: 122558 - RNA, 19 nt, Artificial Sequence
  Description of Artificial Sequence: Synthetic oligonucleotide
  Sense strand starting at position 2295 of SEQ ID NO: 1557
aagcgugugccagugcauu

SEQ ID NO: 122559 - RNA, 19 nt, Artificial Sequence
  Description of Artificial Sequence: Synthetic oligonucleotide
  Antisense strand to SEQ ID NO: 122558
aaugcacuggcacacgcuu

SEQ ID NO: 122560 - RNA, 19 nt, Artificial Sequence
  Description of Artificial Sequence: Synthetic oligonucleotide
  Sense strand starting at position 2132 of SEQ ID NO: 1557
gcucuaauugaucaaagug

SEQ ID NO: 122561 - RNA, 19 nt, Artificial Sequence
  Description of Artificial Sequence: Synthetic oligonucleotide
  Antisense strand to SEQ ID NO: 122560
cacuuugaucaauuagagc

SEQ ID NO: 122562 - RNA, 19 nt, Artificial Sequence
  Description of Artificial Sequence: Synthetic oligonucleotide
  Sense strand starting at position 2056 of SEQ ID NO: 1557
cuagguguuccuuaacccu

SEQ ID NO: 122563 - RNA, 19 nt, Artificial Sequence
  Description of Artificial Sequence: Synthetic oligonucleotide
  Antisense strand to SEQ ID NO: 122562
aggguuaaggaacaccuag

SEQ ID NO: 122564 - RNA, 19 nt, Artificial Sequence
  Description of Artificial Sequence: Synthetic oligonucleotide
  Sense strand starting at position 2052 of SEQ ID NO: 1557
ucaacuagguguuccuuaa

SEQ ID NO: 122565 - RNA, 19 nt, Artificial Sequence
  Description of Artificial Sequence: Synthetic oligonucleotide
  Antisense strand to SEQ ID NO: 122564
uuaaggaacaccuaguuga

SEQ ID NO: 122566 - RNA, 19 nt, Artificial Sequence
  Description of Artificial Sequence: Synthetic oligonucleotide
  Sense strand starting at position 1361 of SEQ ID NO: 1557
gucccaguggguuaaauga

SEQ ID NO: 122567 - RNA, 19 nt, Artificial Sequence
  Description of Artificial Sequence: Synthetic oligonucleotide
  Antisense strand to SEQ ID NO: 122566
ucauuuaacccacugggac

SEQ ID NO: 122568 - RNA, 19 nt, Artificial Sequence
  Description of Artificial Sequence: Synthetic oligonucleotide
  Sense strand starting at position 1198 of SEQ ID NO: 1557
ccuauuuggugagaggaga

SEQ ID NO: 122569 - RNA, 19 nt, Artificial Sequence
  Description of Artificial Sequence: Synthetic oligonucleotide
  Antisense strand to SEQ ID NO: 122568
ucuccucucaccaaauagg

SEQ ID NO: 122570 - RNA, 19 nt, Artificial Sequence
  Description of Artificial Sequence: Synthetic oligonucleotide
  Sense strand starting at position 942 of SEQ ID NO: 1557
gagguuggaugagcagaua

SEQ ID NO: 122571 - RNA, 19 nt, Artificial Sequence
  Description of Artificial Sequence: Synthetic oligonucleotide
  Antisense strand to SEQ ID NO: 122570
uaucugcucauccaaccuc

SEQ ID NO: 122572 - RNA, 19 nt, Artificial Sequence
  Description of Artificial Sequence: Synthetic oligonucleotide
  Sense strand starting at position 922 of SEQ ID NO: 1557
cuuuacuguccaggaauca

SEQ ID NO: 122573 - RNA, 19 nt, Artificial Sequence
  Description of Artificial Sequence: Synthetic oligonucleotide
  Antisense strand to SEQ ID NO: 122572
ugauuccuggacaguaaag

SEQ ID NO: 122574 - RNA, 19 nt, Artificial Sequence
  Description of Artificial Sequence: Synthetic oligonucleotide
  Sense strand starting at position 679 of SEQ ID NO: 1557
gaggauguccuugauaggu

SEQ ID NO: 122575 - RNA, 19 nt, Artificial Sequence
  Description of Artificial Sequence: Synthetic oligonucleotide
  Antisense strand to SEQ ID NO: 122574
accuaucaaggacauccuc

SEQ ID NO: 122576 - RNA, 19 nt, Artificial Sequence
  Description of Artificial Sequence: Synthetic oligonucleotide
  Sense strand starting at position 678 of SEQ ID NO: 1557
ugaggauguccuugauagg

SEQ ID NO: 122577 - RNA, 19 nt, Artificial Sequence
  Description of Artificial Sequence: Synthetic oligonucleotide
  Antisense strand to SEQ ID NO: 122576
ccuaucaaggacauccuca

SEQ ID NO: 122578 - RNA, 19 nt, Artificial Sequence
  Description of Artificial Sequence: Synthetic oligonucleotide
  Sense strand starting at position 675 of SEQ ID NO: 1557
acaugaggauguccuugau

SEQ ID NO: 122579 - RNA, 19 nt, Artificial Sequence
  Description of Artificial Sequence: Synthetic oligonucleotide
  Antisense strand to SEQ ID NO: 122578
aucaaggacauccucaugu

SEQ ID NO: 122580 - RNA, 19 nt, Artificial Sequence
  Description of Artificial Sequence: Synthetic oligonucleotide
  Sense strand starting at position 612 of SEQ ID NO: 1557
gaagacuggccuuaguuau

SEQ ID NO: 122581 - RNA, 19 nt, Artificial Sequence
  Description of Artificial Sequence: Synthetic oligonucleotide
  Antisense strand to SEQ ID NO: 122580
auaacuaaggccagucuuc

SEQ ID NO: 122582 - RNA, 19 nt, Artificial Sequence
  Description of Artificial Sequence: Synthetic oligonucleotide
  Sense strand starting at position 609 of SEQ ID NO: 1557
uuugaagacuggccuuagu

SEQ ID NO: 122583 - RNA, 19 nt, Artificial Sequence
  Description of Artificial Sequence: Synthetic oligonucleotide
  Antisense strand to SEQ ID NO: 122582
acuaaggccagucuucaaa

SEQ ID NO: 122584 - RNA, 19 nt, Artificial Sequence
  Description of Artificial Sequence: Synthetic oligonucleotide
  Sense strand starting at position 540 of SEQ ID NO: 1557
cucugucuuggauggguau

SEQ ID NO: 122585 - RNA, 19 nt, Artificial Sequence
  Description of Artificial Sequence: Synthetic oligonucleotide
  Antisense strand to SEQ ID NO: 122584
auacccauccaagacagag

SEQ ID NO: 122586 - RNA, 19 nt, Artificial Sequence
  Description of Artificial Sequence: Synthetic oligonucleotide
  Sense strand starting at position 425 of SEQ ID NO: 1557
gggcuugggugauuggauu

SEQ ID NO: 122587 - RNA, 19 nt, Artificial Sequence
  Description of Artificial Sequence: Synthetic oligonucleotide
  Antisense strand to SEQ ID NO: 122586
aauccaaucacccaagccc

SEQ ID NO: 122588 - RNA, 19 nt, Artificial Sequence
  Description of Artificial Sequence: Synthetic oligonucleotide
  Sense strand starting at position 363 of SEQ ID NO: 1557
agcucaguuauuggaggaa

SEQ ID NO: 122589 - RNA, 19 nt, Artificial Sequence
  Description of Artificial Sequence: Synthetic oligonucleotide
  Antisense strand to SEQ ID NO: 122588
uuccuccaauaacugagcu

SEQ ID NO: 122590 - RNA, 19 nt, Artificial Sequence
  Description of Artificial Sequence: Synthetic oligonucleotide
  Sense strand starting at position 355 of SEQ ID NO: 1557
uugcucaaagcucaguuau

SEQ ID NO: 122591 - RNA, 19 nt, Artificial Sequence
  Description of Artificial Sequence: Synthetic oligonucleotide
  Antisense strand to SEQ ID NO: 122590
auaacugagcuuugagcaa

SEQ ID NO: 122592 - RNA, 19 nt, Artificial Sequence
  Description of Artificial Sequence: Synthetic oligonucleotide
  Sense strand starting at position 278 of SEQ ID NO: 1557
gcuuauucucaaggaccaa

SEQ ID NO: 122593 - RNA, 19 nt, Artificial Sequence
  Description of Artificial Sequence: Synthetic oligonucleotide
  Antisense strand to SEQ ID NO: 122592
uugguccuugagaauaagc

SEQ ID NO: 122594 - RNA, 19 nt, Artificial Sequence
  Description of Artificial Sequence: Synthetic oligonucleotide
  Sense strand starting at position 170 of SEQ ID NO: 1557
cugcuugcagaagaugaaa

SEQ ID NO: 122595 - RNA, 19 nt, Artificial Sequence
  Description of Artificial Sequence: Synthetic oligonucleotide
  Antisense strand to SEQ ID NO: 122594
uuucaucuucugcaagcag

SEQ ID NO: 122596 - RNA, 19 nt, Artificial Sequence
  Description of Artificial Sequence: Synthetic oligonucleotide
  Sense strand starting at position 104 of SEQ ID NO: 1557
guuaaauaccaguaaugua

SEQ ID NO: 122597 - RNA, 19 nt, Artificial Sequence
  Description of Artificial Sequence: Synthetic oligonucleotide
  Antisense strand to SEQ ID NO: 122596
uacauuacugguauuuaac

SEQ ID NO: 122598 - RNA, 19 nt, Artificial Sequence
  Description of Artificial Sequence: Synthetic oligonucleotide
  Sense strand starting at position 92 of SEQ ID NO: 1557
agcaaaucauguguuaaau

SEQ ID NO: 122599 - RNA, 19 nt, Artificial Sequence
  Description of Artificial Sequence: Synthetic oligonucleotide
  Antisense strand to SEQ ID NO: 122598
auuuaacacaugauuugcu

SEQ ID NO: 122600 - RNA, 19 nt, Artificial Sequence
  Description of Artificial Sequence: Synthetic oligonucleotide
  Sense strand starting at position 5 of SEQ ID NO: 1557
ugccuuuaagacugaauuc

SEQ ID NO: 122601 - RNA, 19 nt, Artificial Sequence
  Description of Artificial Sequence: Synthetic oligonucleotide
  Antisense strand to SEQ ID NO: 122600
gaauucagucuuaaaggca

SEQ ID NO: 122602 - RNA, 19 nt, Artificial Sequence
  Description of Artificial Sequence: Synthetic oligonucleotide
  Sense strand starting at position 3966 of SEQ ID NO: 1560
ggaccuguugcuuacacua

SEQ ID NO: 122603 - RNA, 19 nt, Artificial Sequence
  Description of Artificial Sequence: Synthetic oligonucleotide
  Antisense strand to SEQ ID NO: 122602
uaguguaagcaacaggucc

SEQ ID NO: 122604 - RNA, 19 nt, Artificial Sequence
  Description of Artificial Sequence: Synthetic oligonucleotide
  Sense strand starting at position 3938 of SEQ ID NO: 1560
aaguguucgcugguuauuc

SEQ ID NO: 122605 - RNA, 19 nt, Artificial Sequence
  Description of Artificial Sequence: Synthetic oligonucleotide
  Antisense strand to SEQ ID NO: 122604
gaauaaccagcgaacacuu

SEQ ID NO: 122606 - RNA, 19 nt, Artificial Sequence
  Description of Artificial Sequence: Synthetic oligonucleotide
  Sense strand starting at position 3822 of SEQ ID NO: 1560
agcuuaucaguguaggaac

SEQ ID NO: 122607 - RNA, 19 nt, Artificial Sequence
  Description of Artificial Sequence: Synthetic oligonucleotide
  Antisense strand to SEQ ID NO: 122606
guuccuacacugauaagcu

SEQ ID NO: 122608 - RNA, 19 nt, Artificial Sequence
  Description of Artificial Sequence: Synthetic oligonucleotide
  Sense strand starting at position 3820 of SEQ ID NO: 1560
agagcuuaucaguguagga

SEQ ID NO: 122609 - RNA, 19 nt, Artificial Sequence
  Description of Artificial Sequence: Synthetic oligonucleotide
  Antisense strand to SEQ ID NO: 122608
uccuacacugauaagcucu

SEQ ID NO: 122610 - RNA, 19 nt, Artificial Sequence
  Description of Artificial Sequence: Synthetic oligonucleotide
  Sense strand starting at position 3814 of SEQ ID NO: 1560
ugucuaagagcuuaucagu

SEQ ID NO: 122611 - RNA, 19 nt, Artificial Sequence
  Description of Artificial Sequence: Synthetic oligonucleotide
  Antisense strand to SEQ ID NO: 122610
acugauaagcucuuagaca

SEQ ID NO: 122612 - RNA, 19 nt, Artificial Sequence
  Description of Artificial Sequence: Synthetic oligonucleotide
  Sense strand starting at position 3802 of SEQ ID NO: 1560
cauugaaaggcaugucuaa

SEQ ID NO: 122613 - RNA, 19 nt, Artificial Sequence
  Description of Artificial Sequence: Synthetic oligonucleotide
  Antisense strand to SEQ ID NO: 122612
uuagacaugccuuucaaug

SEQ ID NO: 122614 - RNA, 19 nt, Artificial Sequence
  Description of Artificial Sequence: Synthetic oligonucleotide
  Sense strand starting at position 3697 of SEQ ID NO: 1560
aucugaacuguguauuaaa

SEQ ID NO: 122615 - RNA, 19 nt, Artificial Sequence
  Description of Artificial Sequence: Synthetic oligonucleotide
  Antisense strand to SEQ ID NO: 122614
uuuaauacacaguucagau

SEQ ID NO: 122616 - RNA, 19 nt, Artificial Sequence
  Description of Artificial Sequence: Synthetic oligonucleotide
  Sense strand starting at position 3695 of SEQ ID NO: 1560
ccaucugaacuguguauua

SEQ ID NO: 122617 - RNA, 19 nt, Artificial Sequence
  Description of Artificial Sequence: Synthetic oligonucleotide
  Antisense strand to SEQ ID NO: 122616
uaauacacaguucagaugg

SEQ ID NO: 122618 - RNA, 19 nt, Artificial Sequence
  Description of Artificial Sequence: Synthetic oligonucleotide
  Sense strand starting at position 3516 of SEQ ID NO: 1560
ugcagagucgauuaggaca

SEQ ID NO: 122619 - RNA, 19 nt, Artificial Sequence
  Description of Artificial Sequence: Synthetic oligonucleotide
  Antisense strand to SEQ ID NO: 122618
uguccuaaucgacucugca

SEQ ID NO: 122620 - RNA, 19 nt, Artificial Sequence
  Description of Artificial Sequence: Synthetic oligonucleotide
  Sense strand starting at position 3493 of SEQ ID NO: 1560
gagcacuuugcagaagcua

SEQ ID NO: 122621 - RNA, 19 nt, Artificial Sequence
  Description of Artificial Sequence: Synthetic oligonucleotide
  Antisense strand to SEQ ID NO: 122620
uagcuucugcaaagugcuc

SEQ ID NO: 122622 - RNA, 19 nt, Artificial Sequence
  Description of Artificial Sequence: Synthetic oligonucleotide
  Sense strand starting at position 3268 of SEQ ID NO: 1560
agagguaugcuggaaagca

SEQ ID NO: 122623 - RNA, 19 nt, Artificial Sequence
  Description of Artificial Sequence: Synthetic oligonucleotide
  Antisense strand to SEQ ID NO: 122622
ugcuuuccagcauaccucu

SEQ ID NO: 122624 - RNA, 19 nt, Artificial Sequence
  Description of Artificial Sequence: Synthetic oligonucleotide
  Sense strand starting at position 3116 of SEQ ID NO: 1560
ugggaauucgugugaugga

SEQ ID NO: 122625 - RNA, 19 nt, Artificial Sequence
  Description of Artificial Sequence: Synthetic oligonucleotide
  Antisense strand to SEQ ID NO: 122624
uccaucacacgaauuccca

SEQ ID NO: 122626 - RNA, 19 nt, Artificial Sequence
  Description of Artificial Sequence: Synthetic oligonucleotide
  Sense strand starting at position 3105 of SEQ ID NO: 1560
gucccacaacuugggaauu

SEQ ID NO: 122627 - RNA, 19 nt, Artificial Sequence
  Description of Artificial Sequence: Synthetic oligonucleotide
  Antisense strand to SEQ ID NO: 122626
aauucccaaguugugggac

SEQ ID NO: 122628 - RNA, 19 nt, Artificial Sequence
  Description of Artificial Sequence: Synthetic oligonucleotide
  Sense strand starting at position 3099 of SEQ ID NO: 1560
aggugagucccacaacuug

SEQ ID NO: 122629 - RNA, 19 nt, Artificial Sequence
  Description of Artificial Sequence: Synthetic oligonucleotide
  Antisense strand to SEQ ID NO: 122628
caaguugugggacucaccu

SEQ ID NO: 122630 - RNA, 19 nt, Artificial Sequence
  Description of Artificial Sequence: Synthetic oligonucleotide
  Sense strand starting at position 2839 of SEQ ID NO: 1560
ugcaucugccaugaauaca

SEQ ID NO: 122631 - RNA, 19 nt, Artificial Sequence
  Description of Artificial Sequence: Synthetic oligonucleotide
  Antisense strand to SEQ ID NO: 122630
uguauucauggcagaugca

SEQ ID NO: 122632 - RNA, 19 nt, Artificial Sequence
  Description of Artificial Sequence: Synthetic oligonucleotide
  Sense strand starting at position 1668 of SEQ ID NO: 1560
cccagugacuugucaagag

SEQ ID NO: 122633 - RNA, 19 nt, Artificial Sequence
  Description of Artificial Sequence: Synthetic oligonucleotide
  Antisense strand to SEQ ID NO: 122632
cucuugacaagucacuggg

SEQ ID NO: 122634 - RNA, 19 nt, Artificial Sequence
  Description of Artificial Sequence: Synthetic oligonucleotide
  Sense strand starting at position 1210 of SEQ ID NO: 1560
ccgauuuguguuugaagua

SEQ ID NO: 122635 - RNA, 19 nt, Artificial Sequence
  Description of Artificial Sequence: Synthetic oligonucleotide
  Antisense strand to SEQ ID NO: 122634
uacuucaaacacaaaucgg

SEQ ID NO: 122636 - RNA, 19 nt, Artificial Sequence
  Description of Artificial Sequence: Synthetic oligonucleotide
  Sense strand starting at position 1209 of SEQ ID NO: 1560
uccgauuuguguuugaagu

SEQ ID NO: 122637 - RNA, 19 nt, Artificial Sequence
  Description of Artificial Sequence: Synthetic oligonucleotide
  Antisense strand to SEQ ID NO: 122636
acuucaaacacaaaucgga

SEQ ID NO: 122638 - RNA, 19 nt, Artificial Sequence
  Description of Artificial Sequence: Synthetic oligonucleotide
  Sense strand starting at position 1204 of SEQ ID NO: 1560
uggguuccgauuuguguuu

SEQ ID NO: 122639 - RNA, 19 nt, Artificial Sequence
  Description of Artificial Sequence: Synthetic oligonucleotide
  Antisense strand to SEQ ID NO: 122638
aaacacaaaucggaaccca

SEQ ID NO: 122640 - RNA, 19 nt, Artificial Sequence
  Description of Artificial Sequence: Synthetic oligonucleotide
  Sense strand starting at position 1160 of SEQ ID NO: 1560
cugugcgcuccuccuuaua

SEQ ID NO: 122641 - RNA, 19 nt, Artificial Sequence
  Description of Artificial Sequence: Synthetic oligonucleotide
  Antisense strand to SEQ ID NO: 122640
uauaaggaggagcgcacag

SEQ ID NO: 122642 - RNA, 19 nt, Artificial Sequence
  Description of Artificial Sequence: Synthetic oligonucleotide
  Sense strand starting at position 1141 of SEQ ID NO: 1560
guaauuaagagcgauucuu

SEQ ID NO: 122643 - RNA, 19 nt, Artificial Sequence
  Description of Artificial Sequence: Synthetic oligonucleotide
  Antisense strand to SEQ ID NO: 122642
aagaaucgcucuuaauuac

SEQ ID NO: 122644 - RNA, 19 nt, Artificial Sequence
  Description of Artificial Sequence: Synthetic oligonucleotide
  Sense strand starting at position 1140 of SEQ ID NO: 1560
uguaauuaagagcgauucu

SEQ ID NO: 122645 - RNA, 19 nt, Artificial Sequence
  Description of Artificial Sequence: Synthetic oligonucleotide
  Antisense strand to SEQ ID NO: 122644
agaaucgcucuuaauuaca

SEQ ID NO: 122646 - RNA, 19 nt, Artificial Sequence
  Description of Artificial Sequence: Synthetic oligonucleotide
  Sense strand starting at position 1006 of SEQ ID NO: 1560
ggcaucauauaauuaugau

SEQ ID NO: 122647 - RNA, 19 nt, Artificial Sequence
  Description of Artificial Sequence: Synthetic oligonucleotide
  Antisense strand to SEQ ID NO: 122646
aucauaauuauaugaugcc

SEQ ID NO: 122648 - RNA, 19 nt, Artificial Sequence
  Description of Artificial Sequence: Synthetic oligonucleotide
  Sense strand starting at position 973 of SEQ ID NO: 1560
gcagaaugcauagaguuac

SEQ ID NO: 122649 - RNA, 19 nt, Artificial Sequence
  Description of Artificial Sequence: Synthetic oligonucleotide
  Antisense strand to SEQ ID NO: 122648
guaacucuaugcauucugc

SEQ ID NO: 122650 - RNA, 19 nt, Artificial Sequence
  Description of Artificial Sequence: Synthetic oligonucleotide
  Sense strand starting at position 929 of SEQ ID NO: 1560
cgaugcaugugauucaaag

SEQ ID NO: 122651 - RNA, 19 nt, Artificial Sequence
  Description of Artificial Sequence: Synthetic oligonucleotide
  Antisense strand to SEQ ID NO: 122650
cuuugaaucacaugcaucg

SEQ ID NO: 122652 - RNA, 19 nt, Artificial Sequence
  Description of Artificial Sequence: Synthetic oligonucleotide
  Sense strand starting at position 924 of SEQ ID NO: 1560
uuaaacgaugcaugugauu

SEQ ID NO: 122653 - RNA, 19 nt, Artificial Sequence
  Description of Artificial Sequence: Synthetic oligonucleotide
  Antisense strand to SEQ ID NO: 122652
aaucacaugcaucguuuaa

SEQ ID NO: 122654 - RNA, 19 nt, Artificial Sequence
  Description of Artificial Sequence: Synthetic oligonucleotide
  Sense strand starting at position 920 of SEQ ID NO: 1560
gaaauuaaacgaugcaugu

SEQ ID NO: 122655 - RNA, 19 nt, Artificial Sequence
  Description of Artificial Sequence: Synthetic oligonucleotide
  Antisense strand to SEQ ID NO: 122654
acaugcaucguuuaauuuc

SEQ ID NO: 122656 - RNA, 19 nt, Artificial Sequence
  Description of Artificial Sequence: Synthetic oligonucleotide
  Sense strand starting at position 907 of SEQ ID NO: 1560
gcuggaaaucuuugaaauu

SEQ ID NO: 122657 - RNA, 19 nt, Artificial Sequence
  Description of Artificial Sequence: Synthetic oligonucleotide
  Antisense strand to SEQ ID NO: 122656
aauuucaaagauuuccagc

SEQ ID NO: 122658 - RNA, 19 nt, Artificial Sequence
  Description of Artificial Sequence: Synthetic oligonucleotide
  Sense strand starting at position 736 of SEQ ID NO: 1560
cuccaaauuuguuucguuu

SEQ ID NO: 122659 - RNA, 19 nt, Artificial Sequence
  Description of Artificial Sequence: Synthetic oligonucleotide
  Antisense strand to SEQ ID NO: 122658
aaacgaaacaaauuuggag

SEQ ID NO: 122660 - RNA, 19 nt, Artificial Sequence
  Description of Artificial Sequence: Synthetic oligonucleotide
  Sense strand starting at position 735 of SEQ ID NO: 1560
ucuccaaauuuguuucguu

SEQ ID NO: 122661 - RNA, 19 nt, Artificial Sequence
  Description of Artificial Sequence: Synthetic oligonucleotide
  Antisense strand to SEQ ID NO: 122660
aacgaaacaaauuuggaga

SEQ ID NO: 122662 - RNA, 19 nt, Artificial Sequence
  Description of Artificial Sequence: Synthetic oligonucleotide
  Sense strand starting at position 639 of SEQ ID NO: 1560
ugaaaucauuggccuuauc

SEQ ID NO: 122663 - RNA, 19 nt, Artificial Sequence
  Description of Artificial Sequence: Synthetic oligonucleotide
  Antisense strand to SEQ ID NO: 122662
gauaaggccaaugauuuca

SEQ ID NO: 122664 - RNA, 19 nt, Artificial Sequence
  Description of Artificial Sequence: Synthetic oligonucleotide
  Sense strand starting at position 638 of SEQ ID NO: 1560
gugaaaucauuggccuuau

SEQ ID NO: 122665 - RNA, 19 nt, Artificial Sequence
  Description of Artificial Sequence: Synthetic oligonucleotide
  Antisense strand to SEQ ID NO: 122664
auaaggccaaugauuucac

SEQ ID NO: 122666 - RNA, 19 nt, Artificial Sequence
  Description of Artificial Sequence: Synthetic oligonucleotide
  Sense strand starting at position 636 of SEQ ID NO: 1560
cagugaaaucauuggccuu

SEQ ID NO: 122667 - RNA, 19 nt, Artificial Sequence
  Description of Artificial Sequence: Synthetic oligonucleotide
  Antisense strand to SEQ ID NO: 122666
aaggccaaugauuucacug

SEQ ID NO: 122668 - RNA, 19 nt, Artificial Sequence
  Description of Artificial Sequence: Synthetic oligonucleotide
  Sense strand starting at position 627 of SEQ ID NO: 1560
cuuuaccugcagugaaauc

SEQ ID NO: 122669 - RNA, 19 nt, Artificial Sequence
  Description of Artificial Sequence: Synthetic oligonucleotide
  Antisense strand to SEQ ID NO: 122668
gauuucacugcagguaaag

SEQ ID NO: 122670 - RNA, 19 nt, Artificial Sequence
  Description of Artificial Sequence: Synthetic oligonucleotide
  Sense strand starting at position 624 of SEQ ID NO: 1560
uuccuuuaccugcagugaa

SEQ ID NO: 122671 - RNA, 19 nt, Artificial Sequence
  Description of Artificial Sequence: Synthetic oligonucleotide
  Antisense strand to SEQ ID NO: 122670
uucacugcagguaaaggaa

SEQ ID NO: 122672 - RNA, 19 nt, Artificial Sequence
  Description of Artificial Sequence: Synthetic oligonucleotide
  Sense strand starting at position 535 of SEQ ID NO: 1560
agagaccaaugcuauauuu

SEQ ID NO: 122673 - RNA, 19 nt, Artificial Sequence
  Description of Artificial Sequence: Synthetic oligonucleotide
  Antisense strand to SEQ ID NO: 122672
aaauauagcauuggucucu

SEQ ID NO: 122674 - RNA, 19 nt, Artificial Sequence
  Description of Artificial Sequence: Synthetic oligonucleotide
  Sense strand starting at position 532 of SEQ ID NO: 1560
ugaagagaccaaugcuaua

SEQ ID NO: 122675 - RNA, 19 nt, Artificial Sequence
  Description of Artificial Sequence: Synthetic oligonucleotide
  Antisense strand to SEQ ID NO: 122674
uauagcauuggucucuuca

SEQ ID NO: 122676 - RNA, 19 nt, Artificial Sequence
  Description of Artificial Sequence: Synthetic oligonucleotide
  Sense strand starting at position 500 of SEQ ID NO: 1560
agucaaguccuacaaguau

SEQ ID NO: 122677 - RNA, 19 nt, Artificial Sequence
  Description of Artificial Sequence: Synthetic oligonucleotide
  Antisense strand to SEQ ID NO: 122676
auacuuguaggacuugacu

SEQ ID NO: 122678 - RNA, 19 nt, Artificial Sequence
  Description of Artificial Sequence: Synthetic oligonucleotide
  Sense strand starting at position 181 of SEQ ID NO: 1560
guaugucuaacagguuacu

SEQ ID NO: 122679 - RNA, 19 nt, Artificial Sequence
  Description of Artificial Sequence: Synthetic oligonucleotide
  Antisense strand to SEQ ID NO: 122678
aguaaccuguuagacauac

SEQ ID NO: 122680 - RNA, 19 nt, Artificial Sequence
  Description of Artificial Sequence: Synthetic oligonucleotide
  Sense strand starting at position 9 of SEQ ID NO: 1560
uguccaguaucuuuaucaa

SEQ ID NO: 122681 - RNA, 19 nt, Artificial Sequence
  Description of Artificial Sequence: Synthetic oligonucleotide
  Antisense strand to SEQ ID NO: 122680
uugauaaagauacuggaca

SEQ ID NO: 122682 - RNA, 19 nt, Artificial Sequence
  Description of Artificial Sequence: Synthetic oligonucleotide
  Sense strand starting at position 3501 of SEQ ID NO: 1566
gcauaauuagagugaagca

SEQ ID NO: 122683 - RNA, 19 nt, Artificial Sequence
  Description of Artificial Sequence: Synthetic oligonucleotide
  Antisense strand to SEQ ID NO: 122682
ugcuucacucuaauuaugc

SEQ ID NO: 122684 - RNA, 19 nt, Artificial Sequence
  Description of Artificial Sequence: Synthetic oligonucleotide
  Sense strand starting at position 3498 of SEQ ID NO: 1566
agggcauaauuagagugaa

SEQ ID NO: 122685 - RNA, 19 nt, Artificial Sequence
  Description of Artificial Sequence: Synthetic oligonucleotide
  Antisense strand to SEQ ID NO: 122684
uucacucuaauuaugcccu

SEQ ID NO: 122686 - RNA, 19 nt, Artificial Sequence
  Description of Artificial Sequence: Synthetic oligonucleotide
  Sense strand starting at position 3191 of SEQ ID NO: 1566
auugccaucuaguacauau

SEQ ID NO: 122687 - RNA, 19 nt, Artificial Sequence
  Description of Artificial Sequence: Synthetic oligonucleotide
  Antisense strand to SEQ ID NO: 122686
auauguacuagauggcaau

SEQ ID NO: 122688 - RNA, 19 nt, Artificial Sequence
  Description of Artificial Sequence: Synthetic oligonucleotide
  Sense strand starting at position 1296 of SEQ ID NO: 1566
cacgucaguguuugagaga

SEQ ID NO: 122689 - RNA, 19 nt, Artificial Sequence
  Description of Artificial Sequence: Synthetic oligonucleotide
  Antisense strand to SEQ ID NO: 122688
ucucucaaacacugacgug

SEQ ID NO: 122690 - RNA, 19 nt, Artificial Sequence
  Description of Artificial Sequence: Synthetic oligonucleotide
  Sense strand starting at position 334 of SEQ ID NO: 1566
gccuaagauucugucuuaa

SEQ ID NO: 122691 - RNA, 19 nt, Artificial Sequence
  Description of Artificial Sequence: Synthetic oligonucleotide
  Antisense strand to SEQ ID NO: 122690
uuaagacagaaucuuaggc

SEQ ID NO: 122692 - RNA, 19 nt, Artificial Sequence
  Description of Artificial Sequence: Synthetic oligonucleotide
  Sense strand starting at position 333 of SEQ ID NO: 1566
ugccuaagauucugucuua

SEQ ID NO: 122693 - RNA, 19 nt, Artificial Sequence
  Description of Artificial Sequence: Synthetic oligonucleotide
  Antisense strand to SEQ ID NO: 122692
uaagacagaaucuuaggca

SEQ ID NO: 122694 - RNA, 19 nt, Artificial Sequence
  Description of Artificial Sequence: Synthetic oligonucleotide
  Sense strand starting at position 3827 of SEQ ID NO: 1563
aaucuauggugaucuauag

SEQ ID NO: 122695 - RNA, 19 nt, Artificial Sequence
  Description of Artificial Sequence: Synthetic oligonucleotide
  Antisense strand to SEQ ID NO: 122694
cuauagaucaccauagauu

SEQ ID NO: 122696 - RNA, 19 nt, Artificial Sequence
  Description of Artificial Sequence: Synthetic oligonucleotide
  Sense strand starting at position 3775 of SEQ ID NO: 1563
ccucuagguaugugagcuu

SEQ ID NO: 122697 - RNA, 19 nt, Artificial Sequence
  Description of Artificial Sequence: Synthetic oligonucleotide
  Antisense strand to SEQ ID NO: 122696
aagcucacauaccuagagg

SEQ ID NO: 122698 - RNA, 19 nt, Artificial Sequence
  Description of Artificial Sequence: Synthetic oligonucleotide
  Sense strand starting at position 3647 of SEQ ID NO: 1563
gcaagaauggccuaauauc

SEQ ID NO: 122699 - RNA, 19 nt, Artificial Sequence
  Description of Artificial Sequence: Synthetic oligonucleotide
  Antisense strand to SEQ ID NO: 122698
gauauuaggccauucuugc

SEQ ID NO: 122700 - RNA, 19 nt, Artificial Sequence
  Description of Artificial Sequence: Synthetic oligonucleotide
  Sense strand starting at position 3626 of SEQ ID NO: 1563
gucucaaguauguauagca

SEQ ID NO: 122701 - RNA, 19 nt, Artificial Sequence
  Description of Artificial Sequence: Synthetic oligonucleotide
  Antisense strand to SEQ ID NO: 122700
ugcuauacauacuugagac

SEQ ID NO: 122702 - RNA, 19 nt, Artificial Sequence
  Description of Artificial Sequence: Synthetic oligonucleotide
  Sense strand starting at position 3622 of SEQ ID NO: 1563
ccuggucucaaguauguau

SEQ ID NO: 122703 - RNA, 19 nt, Artificial Sequence
  Description of Artificial Sequence: Synthetic oligonucleotide
  Antisense strand to SEQ ID NO: 122702
auacauacuugagaccagg

SEQ ID NO: 122704 - RNA, 19 nt, Artificial Sequence
  Description of Artificial Sequence: Synthetic oligonucleotide
  Sense strand starting at position 3410 of SEQ ID NO: 1563
ugcaauagagagugaguuu

SEQ ID NO: 122705 - RNA, 19 nt, Artificial Sequence
  Description of Artificial Sequence: Synthetic oligonucleotide
  Antisense strand to SEQ ID NO: 122704
aaacucacucucuauugca

SEQ ID NO: 122706 - RNA, 19 nt, Artificial Sequence
  Description of Artificial Sequence: Synthetic oligonucleotide
  Sense strand starting at position 3398 of SEQ ID NO: 1563
uugugcuaccuuugcaaua

SEQ ID NO: 122707 - RNA, 19 nt, Artificial Sequence
  Description of Artificial Sequence: Synthetic oligonucleotide
  Antisense strand to SEQ ID NO: 122706
uauugcaaagguagcacaa

SEQ ID NO: 122708 - RNA, 19 nt, Artificial Sequence
  Description of Artificial Sequence: Synthetic oligonucleotide
  Sense strand starting at position 3387 of SEQ ID NO: 1563
cccucauggguuugugcua

SEQ ID NO: 122709 - RNA, 19 nt, Artificial Sequence
  Description of Artificial Sequence: Synthetic oligonucleotide
  Antisense strand to SEQ ID NO: 122708
uagcacaaacccaugaggg

SEQ ID NO: 122710 - RNA, 19 nt, Artificial Sequence
  Description of Artificial Sequence: Synthetic oligonucleotide
  Sense strand starting at position 3268 of SEQ ID NO: 1563
ggcuuaguaggugauauga

SEQ ID NO: 122711 - RNA, 19 nt, Artificial Sequence
  Description of Artificial Sequence: Synthetic oligonucleotide
  Antisense strand to SEQ ID NO: 122710
ucauaucaccuacuaagcc

SEQ ID NO: 122712 - RNA, 19 nt, Artificial Sequence
  Description of Artificial Sequence: Synthetic oligonucleotide
  Sense strand starting at position 3267 of SEQ ID NO: 1563
gggcuuaguaggugauaug

SEQ ID NO: 122713 - RNA, 19 nt, Artificial Sequence
  Description of Artificial Sequence: Synthetic oligonucleotide
  Antisense strand to SEQ ID NO: 122712
cauaucaccuacuaagccc

SEQ ID NO: 122714 - RNA, 19 nt, Artificial Sequence
  Description of Artificial Sequence: Synthetic oligonucleotide
  Sense strand starting at position 3266 of SEQ ID NO: 1563
ugggcuuaguaggugauau

SEQ ID NO: 122715 - RNA, 19 nt, Artificial Sequence
  Description of Artificial Sequence: Synthetic oligonucleotide
  Antisense strand to SEQ ID NO: 122714
auaucaccuacuaagccca

SEQ ID NO: 122716 - RNA, 19 nt, Artificial Sequence
  Description of Artificial Sequence: Synthetic oligonucleotide
  Sense strand starting at position 3265 of SEQ ID NO: 1563
uugggcuuaguaggugaua

SEQ ID NO: 122717 - RNA, 19 nt, Artificial Sequence
  Description of Artificial Sequence: Synthetic oligonucleotide
  Antisense strand to SEQ ID NO: 122716
uaucaccuacuaagcccaa

SEQ ID NO: 122718 - RNA, 19 nt, Artificial Sequence
  Description of Artificial Sequence: Synthetic oligonucleotide
  Sense strand starting at position 3191 of SEQ ID NO: 1563
uuguauuguucucuuaauc

SEQ ID NO: 122719 - RNA, 19 nt, Artificial Sequence
  Description of Artificial Sequence: Synthetic oligonucleotide
  Antisense strand to SEQ ID NO: 122718
gauuaagagaacaauacaa

SEQ ID NO: 122720 - RNA, 19 nt, Artificial Sequence
  Description of Artificial Sequence: Synthetic oligonucleotide
  Sense strand starting at position 3093 of SEQ ID NO: 1563
uguuucgcucauuaaauaa

SEQ ID NO: 122721 - RNA, 19 nt, Artificial Sequence
  Description of Artificial Sequence: Synthetic oligonucleotide
  Antisense strand to SEQ ID NO: 122720
uuauuuaaugagcgaaaca

SEQ ID NO: 122722 - RNA, 19 nt, Artificial Sequence
  Description of Artificial Sequence: Synthetic oligonucleotide
  Sense strand starting at position 3092 of SEQ ID NO: 1563
guguuucgcucauuaaaua

SEQ ID NO: 122723 - RNA, 19 nt, Artificial Sequence
  Description of Artificial Sequence: Synthetic oligonucleotide
  Antisense strand to SEQ ID NO: 122722
uauuuaaugagcgaaacac

SEQ ID NO: 122724 - RNA, 19 nt, Artificial Sequence
  Description of Artificial Sequence: Synthetic oligonucleotide
  Sense strand starting at position 3090 of SEQ ID NO: 1563
ccguguuucgcucauuaaa

SEQ ID NO: 122725 - RNA, 19 nt, Artificial Sequence
  Description of Artificial Sequence: Synthetic oligonucleotide
  Antisense strand to SEQ ID NO: 122724
uuuaaugagcgaaacacgg

SEQ ID NO: 122726 - RNA, 19 nt, Artificial Sequence
  Description of Artificial Sequence: Synthetic oligonucleotide
  Sense strand starting at position 3083 of SEQ ID NO: 1563
gcuuuaaccguguuucgcu

SEQ ID NO: 122727 - RNA, 19 nt, Artificial Sequence
  Description of Artificial Sequence: Synthetic oligonucleotide
  Antisense strand to SEQ ID NO: 122726
agcgaaacacgguuaaagc

SEQ ID NO: 122728 - RNA, 19 nt, Artificial Sequence
  Description of Artificial Sequence: Synthetic oligonucleotide
  Sense strand starting at position 3075 of SEQ ID NO: 1563
gaggaaaugcuuuaaccgu

SEQ ID NO: 122729 - RNA, 19 nt, Artificial Sequence
  Description of Artificial Sequence: Synthetic oligonucleotide
  Antisense strand to SEQ ID NO: 122728
acgguuaaagcauuuccuc

SEQ ID NO: 122730 - RNA, 19 nt, Artificial Sequence
  Description of Artificial Sequence: Synthetic oligonucleotide
  Sense strand starting at position 2839 of SEQ ID NO: 1563
ggaacaaccucagcaauca

SEQ ID NO: 122731 - RNA, 19 nt, Artificial Sequence
  Description of Artificial Sequence: Synthetic oligonucleotide
  Antisense strand to SEQ ID NO: 122730
ugauugcugagguuguucc

SEQ ID NO: 122732 - RNA, 19 nt, Artificial Sequence
  Description of Artificial Sequence: Synthetic oligonucleotide
  Sense strand starting at position 2798 of SEQ ID NO: 1563
uuaucuuccuggcuugaga

SEQ ID NO: 122733 - RNA, 19 nt, Artificial Sequence
  Description of Artificial Sequence: Synthetic oligonucleotide
  Antisense strand to SEQ ID NO: 122732
ucucaagccaggaagauaa

SEQ ID NO: 122734 - RNA, 19 nt, Artificial Sequence
  Description of Artificial Sequence: Synthetic oligonucleotide
  Sense strand starting at position 2794 of SEQ ID NO: 1563
ggaauuaucuuccuggcuu

SEQ ID NO: 122735 - RNA, 19 nt, Artificial Sequence
  Description of Artificial Sequence: Synthetic oligonucleotide
  Antisense strand to SEQ ID NO: 122734
aagccaggaagauaauucc

SEQ ID NO: 122736 - RNA, 19 nt, Artificial Sequence
  Description of Artificial Sequence: Synthetic oligonucleotide
  Sense strand starting at position 2748 of SEQ ID NO: 1563
agcccugacuagguagaau

SEQ ID NO: 122737 - RNA, 19 nt, Artificial Sequence
  Description of Artificial Sequence: Synthetic oligonucleotide
  Antisense strand to SEQ ID NO: 122736
auucuaccuagucagggcu

SEQ ID NO: 122738 - RNA, 19 nt, Artificial Sequence
  Description of Artificial Sequence: Synthetic oligonucleotide
  Sense strand starting at position 2665 of SEQ ID NO: 1563
ugucuuacucagcauugua

SEQ ID NO: 122739 - RNA, 19 nt, Artificial Sequence
  Description of Artificial Sequence: Synthetic oligonucleotide
  Antisense strand to SEQ ID NO: 122738
uacaaugcugaguaagaca

SEQ ID NO: 122740 - RNA, 19 nt, Artificial Sequence
  Description of Artificial Sequence: Synthetic oligonucleotide
  Sense strand starting at position 2664 of SEQ ID NO: 1563
augucuuacucagcauugu

SEQ ID NO: 122741 - RNA, 19 nt, Artificial Sequence
  Description of Artificial Sequence: Synthetic oligonucleotide
  Antisense strand to SEQ ID NO: 122740
acaaugcugaguaagacau

SEQ ID NO: 122742 - RNA, 19 nt, Artificial Sequence
  Description of Artificial Sequence: Synthetic oligonucleotide
  Sense strand starting at position 2480 of SEQ ID NO: 1563
gcgaguagauuaccaccau

SEQ ID NO: 122743 - RNA, 19 nt, Artificial Sequence
  Description of Artificial Sequence: Synthetic oligonucleotide
  Antisense strand to SEQ ID NO: 122742
auggugguaaucuacucgc

SEQ ID NO: 122744 - RNA, 19 nt, Artificial Sequence
  Description of Artificial Sequence: Synthetic oligonucleotide
  Sense strand starting at position 2430 of SEQ ID NO: 1563
ucuugaagauaguagaaga

SEQ ID NO: 122745 - RNA, 19 nt, Artificial Sequence
  Description of Artificial Sequence: Synthetic oligonucleotide
  Antisense strand to SEQ ID NO: 122744
ucuucuacuaucuucaaga

SEQ ID NO: 122746 - RNA, 19 nt, Artificial Sequence
  Description of Artificial Sequence: Synthetic oligonucleotide
  Sense strand starting at position 2409 of SEQ ID NO: 1563
ugugaaucugguuaaccaa

SEQ ID NO: 122747 - RNA, 19 nt, Artificial Sequence
  Description of Artificial Sequence: Synthetic oligonucleotide
  Antisense strand to SEQ ID NO: 122746
uugguuaaccagauucaca

SEQ ID NO: 122748 - RNA, 19 nt, Artificial Sequence
  Description of Artificial Sequence: Synthetic oligonucleotide
  Sense strand starting at position 2408 of SEQ ID NO: 1563
augugaaucugguuaacca

SEQ ID NO: 122749 - RNA, 19 nt, Artificial Sequence
  Description of Artificial Sequence: Synthetic oligonucleotide
  Antisense strand to SEQ ID NO: 122748
ugguuaaccagauucacau

SEQ ID NO: 122750 - RNA, 19 nt, Artificial Sequence
  Description of Artificial Sequence: Synthetic oligonucleotide
  Sense strand starting at position 2397 of SEQ ID NO: 1563
cggcacauacaaugugaau

SEQ ID NO: 122751 - RNA, 19 nt, Artificial Sequence
  Description of Artificial Sequence: Synthetic oligonucleotide
  Antisense strand to SEQ ID NO: 122750
auucacauuguaugugccg

SEQ ID NO: 122752 - RNA, 19 nt, Artificial Sequence
  Description of Artificial Sequence: Synthetic oligonucleotide
  Sense strand starting at position 2388 of SEQ ID NO: 1563
gaaagaguccggcacauac

SEQ ID NO: 122753 - RNA, 19 nt, Artificial Sequence
  Description of Artificial Sequence: Synthetic oligonucleotide
  Antisense strand to SEQ ID NO: 122752
guaugugccggacucuuuc

SEQ ID NO: 122754 - RNA, 19 nt, Artificial Sequence
  Description of Artificial Sequence: Synthetic oligonucleotide
  Sense strand starting at position 2373 of SEQ ID NO: 1563
agagcagucaccugagaaa

SEQ ID NO: 122755 - RNA, 19 nt, Artificial Sequence
  Description of Artificial Sequence: Synthetic oligonucleotide
  Antisense strand to SEQ ID NO: 122754
uuucucaggugacugcucu

SEQ ID NO: 122756 - RNA, 19 nt, Artificial Sequence
  Description of Artificial Sequence: Synthetic oligonucleotide
  Sense strand starting at position 2327 of SEQ ID NO: 1563
gguuaguacccguggguga

SEQ ID NO: 122757 - RNA, 19 nt, Artificial Sequence
  Description of Artificial Sequence: Synthetic oligonucleotide
  Antisense strand to SEQ ID NO: 122756
ucacccacggguacuaacc

SEQ ID NO: 122758 - RNA, 19 nt, Artificial Sequence
  Description of Artificial Sequence: Synthetic oligonucleotide
  Sense strand starting at position 2298 of SEQ ID NO: 1563
guguuucucccuugaugug

SEQ ID NO: 122759 - RNA, 19 nt, Artificial Sequence
  Description of Artificial Sequence: Synthetic oligonucleotide
  Antisense strand to SEQ ID NO: 122758
cacaucaagggagaaacac

SEQ ID NO: 122760 - RNA, 19 nt, Artificial Sequence
  Description of Artificial Sequence: Synthetic oligonucleotide
  Sense strand starting at position 2296 of SEQ ID NO: 1563
gaguguuucucccuugaug

SEQ ID NO: 122761 - RNA, 19 nt, Artificial Sequence
  Description of Artificial Sequence: Synthetic oligonucleotide
  Antisense strand to SEQ ID NO: 122760
caucaagggagaaacacuc

SEQ ID NO: 122762 - RNA, 19 nt, Artificial Sequence
  Description of Artificial Sequence: Synthetic oligonucleotide
  Sense strand starting at position 2294 of SEQ ID NO: 1563
aggaguguuucucccuuga

SEQ ID NO: 122763 - RNA, 19 nt, Artificial Sequence
  Description of Artificial Sequence: Synthetic oligonucleotide
  Antisense strand to SEQ ID NO: 122762
ucaagggagaaacacuccu

SEQ ID NO: 122764 - RNA, 19 nt, Artificial Sequence
  Description of Artificial Sequence: Synthetic oligonucleotide
  Sense strand starting at position 2292 of SEQ ID NO: 1563
agaggaguguuucucccuu

SEQ ID NO: 122765 - RNA, 19 nt, Artificial Sequence
  Description of Artificial Sequence: Synthetic oligonucleotide
  Antisense strand to SEQ ID NO: 122764
aagggagaaacacuccucu

SEQ ID NO: 122766 - RNA, 19 nt, Artificial Sequence
  Description of Artificial Sequence: Synthetic oligonucleotide
  Sense strand starting at position 2287 of SEQ ID NO: 1563
agaguagaggaguguuucu

SEQ ID NO: 122767 - RNA, 19 nt, Artificial Sequence
  Description of Artificial Sequence: Synthetic oligonucleotide
  Antisense strand to SEQ ID NO: 122766
agaaacacuccucuacucu

SEQ ID NO: 122768 - RNA, 19 nt, Artificial Sequence
  Description of Artificial Sequence: Synthetic oligonucleotide
  Sense strand starting at position 2061 of SEQ ID NO: 1563
cccugcauucucggacagu

SEQ ID NO: 122769 - RNA, 19 nt, Artificial Sequence
  Description of Artificial Sequence: Synthetic oligonucleotide
  Antisense strand to SEQ ID NO: 122768
acuguccgagaaugcaggg

SEQ ID NO: 122770 - RNA, 19 nt, Artificial Sequence
  Description of Artificial Sequence: Synthetic oligonucleotide
  Sense strand starting at position 51 of SEQ ID NO: 1563
gcaaaucacguuuacuaaa

SEQ ID NO: 122771 - RNA, 19 nt, Artificial Sequence
  Description of Artificial Sequence: Synthetic oligonucleotide
  Antisense strand to SEQ ID NO: 122770
uuuaguaaacgugauuugc

SEQ ID NO: 122772 - RNA, 19 nt, Artificial Sequence
  Description of Artificial Sequence: Synthetic oligonucleotide
  Sense strand starting at position 40 of SEQ ID NO: 1563
auuaucugagugcaaauca

SEQ ID NO: 122773 - RNA, 19 nt, Artificial Sequence
  Description of Artificial Sequence: Synthetic oligonucleotide
  Antisense strand to SEQ ID NO: 122772
ugauuugcacucagauaau

SEQ ID NO: 122774 - RNA, 19 nt, Artificial Sequence
  Description of Artificial Sequence: Synthetic oligonucleotide
  Sense strand starting at position 3515 of SEQ ID NO: 1567
gcuguuguauuauguaugu

SEQ ID NO: 122775 - RNA, 19 nt, Artificial Sequence
  Description of Artificial Sequence: Synthetic oligonucleotide
  Antisense strand to SEQ ID NO: 122774
acauacauaauacaacagc

SEQ ID NO: 122776 - RNA, 19 nt, Artificial Sequence
  Description of Artificial Sequence: Synthetic oligonucleotide
  Sense strand starting at position 3382 of SEQ ID NO: 1567
gcccaaaccuuugagucau

SEQ ID NO: 122777 - RNA, 19 nt, Artificial Sequence
  Description of Artificial Sequence: Synthetic oligonucleotide
  Antisense strand to SEQ ID NO: 122776
augacucaaagguuugggc

SEQ ID NO: 122778 - RNA, 19 nt, Artificial Sequence
  Description of Artificial Sequence: Synthetic oligonucleotide
  Sense strand starting at position 3381 of SEQ ID NO: 1567
agcccaaaccuuugaguca

SEQ ID NO: 122779 - RNA, 19 nt, Artificial Sequence
  Description of Artificial Sequence: Synthetic oligonucleotide
  Antisense strand to SEQ ID NO: 122778
ugacucaaagguuugggcu

SEQ ID NO: 122780 - RNA, 19 nt, Artificial Sequence
  Description of Artificial Sequence: Synthetic oligonucleotide
  Sense strand starting at position 2973 of SEQ ID NO: 1567
ccuaaauauuuguggaauc

SEQ ID NO: 122781 - RNA, 19 nt, Artificial Sequence
  Description of Artificial Sequence: Synthetic oligonucleotide
  Antisense strand to SEQ ID NO: 122780
gauuccacaaauauuuagg

SEQ ID NO: 122782 - RNA, 19 nt, Artificial Sequence
  Description of Artificial Sequence: Synthetic oligonucleotide
  Sense strand starting at position 2712 of SEQ ID NO: 1567
uuuagaguuacgcgacuuu

SEQ ID NO: 122783 - RNA, 19 nt, Artificial Sequence
  Description of Artificial Sequence: Synthetic oligonucleotide
  Antisense strand to SEQ ID NO: 122782
aaagucgcguaacucuaaa

SEQ ID NO: 122784 - RNA, 19 nt, Artificial Sequence
  Description of Artificial Sequence: Synthetic oligonucleotide
  Sense strand starting at position 2686 of SEQ ID NO: 1567
guuaucuugaaggguuauu

SEQ ID NO: 122785 - RNA, 19 nt, Artificial Sequence
  Description of Artificial Sequence: Synthetic oligonucleotide
  Antisense strand to SEQ ID NO: 122784
aauaacccuucaagauaac

SEQ ID NO: 122786 - RNA, 19 nt, Artificial Sequence
  Description of Artificial Sequence: Synthetic oligonucleotide
  Sense strand starting at position 2685 of SEQ ID NO: 1567
uguuaucuugaaggguuau

SEQ ID NO: 122787 - RNA, 19 nt, Artificial Sequence
  Description of Artificial Sequence: Synthetic oligonucleotide
  Antisense strand to SEQ ID NO: 122786
auaacccuucaagauaaca

SEQ ID NO: 122788 - RNA, 19 nt, Artificial Sequence
  Description of Artificial Sequence: Synthetic oligonucleotide
  Sense strand starting at position 2377 of SEQ ID NO: 1567
augguaaguccucagccuu

SEQ ID NO: 122789 - RNA, 19 nt, Artificial Sequence
  Description of Artificial Sequence: Synthetic oligonucleotide
  Antisense strand to SEQ ID NO: 122788
aaggcugaggacuuaccau

SEQ ID NO: 122790 - RNA, 19 nt, Artificial Sequence
  Description of Artificial Sequence: Synthetic oligonucleotide
  Sense strand starting at position 2376 of SEQ ID NO: 1567
gaugguaaguccucagccu

SEQ ID NO: 122791 - RNA, 19 nt, Artificial Sequence
  Description of Artificial Sequence: Synthetic oligonucleotide
  Antisense strand to SEQ ID NO: 122790
aggcugaggacuuaccauc

SEQ ID NO: 122792 - RNA, 19 nt, Artificial Sequence
  Description of Artificial Sequence: Synthetic oligonucleotide
  Sense strand starting at position 1422 of SEQ ID NO: 1567
gcauaauuagagugaagca

SEQ ID NO: 122793 - RNA, 19 nt, Artificial Sequence
  Description of Artificial Sequence: Synthetic oligonucleotide
  Antisense strand to SEQ ID NO: 122792
ugcuucacucuaauuaugc

SEQ ID NO: 122794 - RNA, 19 nt, Artificial Sequence
  Description of Artificial Sequence: Synthetic oligonucleotide
  Sense strand starting at position 1419 of SEQ ID NO: 1567
agggcauaauuagagugaa

SEQ ID NO: 122795 - RNA, 19 nt, Artificial Sequence
  Description of Artificial Sequence: Synthetic oligonucleotide
  Antisense strand to SEQ ID NO: 122794
uucacucuaauuaugcccu

SEQ ID NO: 122796 - RNA, 19 nt, Artificial Sequence
  Description of Artificial Sequence: Synthetic oligonucleotide
  Sense strand starting at position 1112 of SEQ ID NO: 1567
auugccaucuaguacauau

SEQ ID NO: 122797 - RNA, 19 nt, Artificial Sequence
  Description of Artificial Sequence: Synthetic oligonucleotide
  Antisense strand to SEQ ID NO: 122796
auauguacuagauggcaau

SEQ ID NO: 122798 - RNA, 19 nt, Artificial Sequence
  Description of Artificial Sequence: Synthetic oligonucleotide
  Sense strand starting at position 3452 of SEQ ID NO: 1564
gcauaauuagagugaagca

SEQ ID NO: 122799 - RNA, 19 nt, Artificial Sequence
  Description of Artificial Sequence: Synthetic oligonucleotide
  Antisense strand to SEQ ID NO: 122798
ugcuucacucuaauuaugc

SEQ ID NO: 122800 - RNA, 19 nt, Artificial Sequence
  Description of Artificial Sequence: Synthetic oligonucleotide
  Sense strand starting at position 3449 of SEQ ID NO: 1564
agggcauaauuagagugaa

SEQ ID NO: 122801 - RNA, 19 nt, Artificial Sequence
  Description of Artificial Sequence: Synthetic oligonucleotide
  Antisense strand to SEQ ID NO: 122800
uucacucuaauuaugcccu

SEQ ID NO: 122802 - RNA, 19 nt, Artificial Sequence
  Description of Artificial Sequence: Synthetic oligonucleotide
  Sense strand starting at position 3142 of SEQ ID NO: 1564
auugccaucuaguacauau

SEQ ID NO: 122803 - RNA, 19 nt, Artificial Sequence
  Description of Artificial Sequence: Synthetic oligonucleotide
  Antisense strand to SEQ ID NO: 122802
auauguacuagauggcaau

SEQ ID NO: 122804 - RNA, 19 nt, Artificial Sequence
  Description of Artificial Sequence: Synthetic oligonucleotide
  Sense strand starting at position 1247 of SEQ ID NO: 1564
cacgucaguguuugagaga

SEQ ID NO: 122805 - RNA, 19 nt, Artificial Sequence
  Description of Artificial Sequence: Synthetic oligonucleotide
  Antisense strand to SEQ ID NO: 122804
ucucucaaacacugacgug

SEQ ID NO: 122806 - RNA, 19 nt, Artificial Sequence
  Description of Artificial Sequence: Synthetic oligonucleotide
  Sense strand starting at position 285 of SEQ ID NO: 1564
gccuaagauucugucuuaa

SEQ ID NO: 122807 - RNA, 19 nt, Artificial Sequence
  Description of Artificial Sequence: Synthetic oligonucleotide
  Antisense strand to SEQ ID NO: 122806
uuaagacagaaucuuaggc

SEQ ID NO: 122808 - RNA, 19 nt, Artificial Sequence
  Description of Artificial Sequence: Synthetic oligonucleotide
  Sense strand starting at position 284 of SEQ ID NO: 1564
ugccuaagauucugucuua

SEQ ID NO: 122809 - RNA, 19 nt, Artificial Sequence
  Description of Artificial Sequence: Synthetic oligonucleotide
  Antisense strand to SEQ ID NO: 122808
uaagacagaaucuuaggca

SEQ ID NO: 122810 - RNA, 19 nt, Artificial Sequence
  Description of Artificial Sequence: Synthetic oligonucleotide
  Sense strand starting at position 3231 of SEQ ID NO: 1568
gaagguuuagcagaacugu

SEQ ID NO: 122811 - RNA, 19 nt, Artificial Sequence
  Description of Artificial Sequence: Synthetic oligonucleotide
  Antisense strand to SEQ ID NO: 122810
acaguucugcuaaaccuuc

SEQ ID NO: 122812 - RNA, 19 nt, Artificial Sequence
  Description of Artificial Sequence: Synthetic oligonucleotide
  Sense strand starting at position 2320 of SEQ ID NO: 1568
gcugaaugcagauguauac

SEQ ID NO: 122813 - RNA, 19 nt, Artificial Sequence
  Description of Artificial Sequence: Synthetic oligonucleotide
  Antisense strand to SEQ ID NO: 122812
guauacaucugcauucagc

SEQ ID NO: 122814 - RNA, 19 nt, Artificial Sequence
  Description of Artificial Sequence: Synthetic oligonucleotide
  Sense strand starting at position 2042 of SEQ ID NO: 1568
gcagaaucggcccagguua

SEQ ID NO: 122815 - RNA, 19 nt, Artificial Sequence
  Description of Artificial Sequence: Synthetic oligonucleotide
  Antisense strand to SEQ ID NO: 122814
uaaccugggccgauucugc

SEQ ID NO: 122816 - RNA, 19 nt, Artificial Sequence
  Description of Artificial Sequence: Synthetic oligonucleotide
  Sense strand starting at position 3876 of SEQ ID NO: 1565
auagacacgugguagauuu

SEQ ID NO: 122817 - RNA, 19 nt, Artificial Sequence
  Description of Artificial Sequence: Synthetic oligonucleotide
  Antisense strand to SEQ ID NO: 122816
aaaucuaccacgugucuau

SEQ ID NO: 122818 - RNA, 19 nt, Artificial Sequence
  Description of Artificial Sequence: Synthetic oligonucleotide
  Sense strand starting at position 3873 of SEQ ID NO: 1565
cccauagacacgugguaga

SEQ ID NO: 122819 - RNA, 19 nt, Artificial Sequence
  Description of Artificial Sequence: Synthetic oligonucleotide
  Antisense strand to SEQ ID NO: 122818
ucuaccacgugucuauggg

SEQ ID NO: 122820 - RNA, 19 nt, Artificial Sequence
  Description of Artificial Sequence: Synthetic oligonucleotide
  Sense strand starting at position 2525 of SEQ ID NO: 1565
aagguuugucuuuguaguu

SEQ ID NO: 122821 - RNA, 19 nt, Artificial Sequence
  Description of Artificial Sequence: Synthetic oligonucleotide
  Antisense strand to SEQ ID NO: 122820
aacuacaaagacaaaccuu

SEQ ID NO: 122822 - RNA, 19 nt, Artificial Sequence
  Description of Artificial Sequence: Synthetic oligonucleotide
  Sense strand starting at position 2524 of SEQ ID NO: 1565
caagguuugucuuuguagu

SEQ ID NO: 122823 - RNA, 19 nt, Artificial Sequence
  Description of Artificial Sequence: Synthetic oligonucleotide
  Antisense strand to SEQ ID NO: 122822
acuacaaagacaaaccuug

SEQ ID NO: 122824 - RNA, 19 nt, Artificial Sequence
  Description of Artificial Sequence: Synthetic oligonucleotide
  Sense strand starting at position 1170 of SEQ ID NO: 1565
agagcuuccuaugcuuuaa

SEQ ID NO: 122825 - RNA, 19 nt, Artificial Sequence
  Description of Artificial Sequence: Synthetic oligonucleotide
  Antisense strand to SEQ ID NO: 122824
uuaaagcauaggaagcucu

SEQ ID NO: 122826 - RNA, 19 nt, Artificial Sequence
  Description of Artificial Sequence: Synthetic oligonucleotide
  Sense strand starting at position 1167 of SEQ ID NO: 1565
gauagagcuuccuaugcuu

SEQ ID NO: 122827 - RNA, 19 nt, Artificial Sequence
  Description of Artificial Sequence: Synthetic oligonucleotide
  Antisense strand to SEQ ID NO: 122826
aagcauaggaagcucuauc

SEQ ID NO: 122828 - RNA, 19 nt, Artificial Sequence
  Description of Artificial Sequence: Synthetic oligonucleotide
  Sense strand starting at position 745 of SEQ ID NO: 1565
uuauguuacugcugcuaca

SEQ ID NO: 122829 - RNA, 19 nt, Artificial Sequence
  Description of Artificial Sequence: Synthetic oligonucleotide
  Antisense strand to SEQ ID NO: 122828
uguagcagcaguaacauaa

SEQ ID NO: 122830 - RNA, 19 nt, Artificial Sequence
  Description of Artificial Sequence: Synthetic oligonucleotide
  Sense strand starting at position 663 of SEQ ID NO: 1565
cugugaugcggacauguuu

SEQ ID NO: 122831 - RNA, 19 nt, Artificial Sequence
  Description of Artificial Sequence: Synthetic oligonucleotide
  Antisense strand to SEQ ID NO: 122830
aaacauguccgcaucacag

SEQ ID NO: 122832 - RNA, 19 nt, Artificial Sequence
  Description of Artificial Sequence: Synthetic oligonucleotide
  Sense strand starting at position 309 of SEQ ID NO: 1565
uauuauggguuccuuagaa

SEQ ID NO: 122833 - RNA, 19 nt, Artificial Sequence
  Description of Artificial Sequence: Synthetic oligonucleotide
  Antisense strand to SEQ ID NO: 122832
uucuaaggaacccauaaua

SEQ ID NO: 122834 - RNA, 19 nt, Artificial Sequence
  Description of Artificial Sequence: Synthetic oligonucleotide
  Sense strand starting at position 300 of SEQ ID NO: 1565
gcaguaauuuauuaugggu

SEQ ID NO: 122835 - RNA, 19 nt, Artificial Sequence
  Description of Artificial Sequence: Synthetic oligonucleotide
  Antisense strand to SEQ ID NO: 122834
acccauaauaaauuacugc

SEQ ID NO: 122836 - RNA, 19 nt, Artificial Sequence
  Description of Artificial Sequence: Synthetic oligonucleotide
  Sense strand starting at position 68 of SEQ ID NO: 1565
ugcguaaggugauuaagga

SEQ ID NO: 122837 - RNA, 19 nt, Artificial Sequence
  Description of Artificial Sequence: Synthetic oligonucleotide
  Antisense strand to SEQ ID NO: 122836
uccuuaaucaccuuacgca

SEQ ID NO: 122838 - RNA, 19 nt, Artificial Sequence
  Description of Artificial Sequence: Synthetic oligonucleotide
  Sense strand starting at position 65 of SEQ ID NO: 1565
gugugcguaaggugauuaa

SEQ ID NO: 122839 - RNA, 19 nt, Artificial Sequence
  Description of Artificial Sequence: Synthetic oligonucleotide
  Antisense strand to SEQ ID NO: 122838
uuaaucaccuuacgcacac

SEQ ID NO: 122840 - RNA, 19 nt, Artificial Sequence
  Description of Artificial Sequence: Synthetic oligonucleotide
  Sense strand starting at position 63 of SEQ ID NO: 1565
ccgugugcguaaggugauu

SEQ ID NO: 122841 - RNA, 19 nt, Artificial Sequence
  Description of Artificial Sequence: Synthetic oligonucleotide
  Antisense strand to SEQ ID NO: 122840
aaucaccuuacgcacacgg

SEQ ID NO: 122842 - RNA, 19 nt, Artificial Sequence
  Description of Artificial Sequence: Synthetic oligonucleotide
  Sense strand starting at position 15 of SEQ ID NO: 1565
uuaaauucugcaggauuaa

SEQ ID NO: 122843 - RNA, 19 nt, Artificial Sequence
  Description of Artificial Sequence: Synthetic oligonucleotide
  Antisense strand to SEQ ID NO: 122842
uuaauccugcagaauuuaa

SEQ ID NO: 122844 - RNA, 19 nt, Artificial Sequence
  Description of Artificial Sequence: Synthetic oligonucleotide
  Sense strand starting at position 3642 of SEQ ID NO: 1569
uuggaaacugcucacaugu

SEQ ID NO: 122845 - RNA, 19 nt, Artificial Sequence
  Description of Artificial Sequence: Synthetic oligonucleotide
  Antisense strand to SEQ ID NO: 122844
acaugugagcaguuuccaa

SEQ ID NO: 122846 - RNA, 19 nt, Artificial Sequence
  Description of Artificial Sequence: Synthetic oligonucleotide
  Sense strand starting at position 3641 of SEQ ID NO: 1569
auuggaaacugcucacaug

SEQ ID NO: 122847 - RNA, 19 nt, Artificial Sequence
  Description of Artificial Sequence: Synthetic oligonucleotide
  Antisense strand to SEQ ID NO: 122846
caugugagcaguuuccaau

SEQ ID NO: 122848 - RNA, 19 nt, Artificial Sequence
  Description of Artificial Sequence: Synthetic oligonucleotide
  Sense strand starting at position 3540 of SEQ ID NO: 1569
cgaggaaucuauccuagua

SEQ ID NO: 122849 - RNA, 19 nt, Artificial Sequence
  Description of Artificial Sequence: Synthetic oligonucleotide
  Antisense strand to SEQ ID NO: 122848
uacuaggauagauuccucg

SEQ ID NO: 122850 - RNA, 19 nt, Artificial Sequence
  Description of Artificial Sequence: Synthetic oligonucleotide
  Sense strand starting at position 3529 of SEQ ID NO: 1569
auacuagauuucgaggaau

SEQ ID NO: 122851 - RNA, 19 nt, Artificial Sequence
  Description of Artificial Sequence: Synthetic oligonucleotide
  Antisense strand to SEQ ID NO: 122850
auuccucgaaaucuaguau

SEQ ID NO: 122852 - RNA, 19 nt, Artificial Sequence
  Description of Artificial Sequence: Synthetic oligonucleotide
  Sense strand starting at position 3528 of SEQ ID NO: 1569
aauacuagauuucgaggaa

SEQ ID NO: 122853 - RNA, 19 nt, Artificial Sequence
  Description of Artificial Sequence: Synthetic oligonucleotide
  Antisense strand to SEQ ID NO: 122852
uuccucgaaaucuaguauu

SEQ ID NO: 122854 - RNA, 19 nt, Artificial Sequence
  Description of Artificial Sequence: Synthetic oligonucleotide
  Sense strand starting at position 3354 of SEQ ID NO: 1569
caggaaccuugucugugau

SEQ ID NO: 122855 - RNA, 19 nt, Artificial Sequence
  Description of Artificial Sequence: Synthetic oligonucleotide
  Antisense strand to SEQ ID NO: 122854
aucacagacaagguuccug

SEQ ID NO: 122856 - RNA, 19 nt, Artificial Sequence
  Description of Artificial Sequence: Synthetic oligonucleotide
  Sense strand starting at position 3164 of SEQ ID NO: 1569
ggguguccuccugaggaaa

SEQ ID NO: 122857 - RNA, 19 nt, Artificial Sequence
  Description of Artificial Sequence: Synthetic oligonucleotide
  Antisense strand to SEQ ID NO: 122856
uuuccucaggaggacaccc

SEQ ID NO: 122858 - RNA, 19 nt, Artificial Sequence
  Description of Artificial Sequence: Synthetic oligonucleotide
  Sense strand starting at position 3134 of SEQ ID NO: 1569
ucuugugggaccugaaacu

SEQ ID NO: 122859 - RNA, 19 nt, Artificial Sequence
  Description of Artificial Sequence: Synthetic oligonucleotide
  Antisense strand to SEQ ID NO: 122858
aguuucaggucccacaaga

SEQ ID NO: 122860 - RNA, 19 nt, Artificial Sequence
  Description of Artificial Sequence: Synthetic oligonucleotide
  Sense strand starting at position 3016 of SEQ ID NO: 1569
ugucucagucauuaaauau

SEQ ID NO: 122861 - RNA, 19 nt, Artificial Sequence
  Description of Artificial Sequence: Synthetic oligonucleotide
  Antisense strand to SEQ ID NO: 122860
auauuuaaugacugagaca

SEQ ID NO: 122862 - RNA, 19 nt, Artificial Sequence
  Description of Artificial Sequence: Synthetic oligonucleotide
  Sense strand starting at position 3015 of SEQ ID NO: 1569
uugucucagucauuaaaua

SEQ ID NO: 122863 - RNA, 19 nt, Artificial Sequence
  Description of Artificial Sequence: Synthetic oligonucleotide
  Antisense strand to SEQ ID NO: 122862
uauuuaaugacugagacaa

SEQ ID NO: 122864 - RNA, 19 nt, Artificial Sequence
  Description of Artificial Sequence: Synthetic oligonucleotide
  Sense strand starting at position 2954 of SEQ ID NO: 1569
guggguuauugaucccaau

SEQ ID NO: 122865 - RNA, 19 nt, Artificial Sequence
  Description of Artificial Sequence: Synthetic oligonucleotide
  Antisense strand to SEQ ID NO: 122864
auugggaucaauaacccac

SEQ ID NO: 122866 - RNA, 19 nt, Artificial Sequence
  Description of Artificial Sequence: Synthetic oligonucleotide
  Sense strand starting at position 2948 of SEQ ID NO: 1569
accuguguggguuauugau

SEQ ID NO: 122867 - RNA, 19 nt, Artificial Sequence
  Description of Artificial Sequence: Synthetic oligonucleotide
  Antisense strand to SEQ ID NO: 122866
aucaauaacccacacaggu

SEQ ID NO: 122868 - RNA, 19 nt, Artificial Sequence
  Description of Artificial Sequence: Synthetic oligonucleotide
  Sense strand starting at position 2873 of SEQ ID NO: 1569
ggugucagccaagacuuau

SEQ ID NO: 122869 - RNA, 19 nt, Artificial Sequence
  Description of Artificial Sequence: Synthetic oligonucleotide
  Antisense strand to SEQ ID NO: 122868
auaagucuuggcugacacc

SEQ ID NO: 122870 - RNA, 19 nt, Artificial Sequence
  Description of Artificial Sequence: Synthetic oligonucleotide
  Sense strand starting at position 2870 of SEQ ID NO: 1569
acuggugucagccaagacu

SEQ ID NO: 122871 - RNA, 19 nt, Artificial Sequence
  Description of Artificial Sequence: Synthetic oligonucleotide
  Antisense strand to SEQ ID NO: 122870
agucuuggcugacaccagu

SEQ ID NO: 122872 - RNA, 19 nt, Artificial Sequence
  Description of Artificial Sequence: Synthetic oligonucleotide
  Sense strand starting at position 2749 of SEQ ID NO: 1569
ccauuccugguguaacaca

SEQ ID NO: 122873 - RNA, 19 nt, Artificial Sequence
  Description of Artificial Sequence: Synthetic oligonucleotide
  Antisense strand to SEQ ID NO: 122872
uguguuacaccaggaaugg

SEQ ID NO: 122874 - RNA, 19 nt, Artificial Sequence
  Description of Artificial Sequence: Synthetic oligonucleotide
  Sense strand starting at position 2728 of SEQ ID NO: 1569
ggaugugucuaccuugaau

SEQ ID NO: 122875 - RNA, 19 nt, Artificial Sequence
  Description of Artificial Sequence: Synthetic oligonucleotide
  Antisense strand to SEQ ID NO: 122874
auucaagguagacacaucc

SEQ ID NO: 122876 - RNA, 19 nt, Artificial Sequence
  Description of Artificial Sequence: Synthetic oligonucleotide
  Sense strand starting at position 2603 of SEQ ID NO: 1569
ggguuaggucuuuauauaa

SEQ ID NO: 122877 - RNA, 19 nt, Artificial Sequence
  Description of Artificial Sequence: Synthetic oligonucleotide
  Antisense strand to SEQ ID NO: 122876
uuauauaaagaccuaaccc

SEQ ID NO: 122878 - RNA, 19 nt, Artificial Sequence
  Description of Artificial Sequence: Synthetic oligonucleotide
  Sense strand starting at position 2602 of SEQ ID NO: 1569
uggguuaggucuuuauaua

SEQ ID NO: 122879 - RNA, 19 nt, Artificial Sequence
  Description of Artificial Sequence: Synthetic oligonucleotide
  Antisense strand to SEQ ID NO: 122878
uauauaaagaccuaaccca

SEQ ID NO: 122880 - RNA, 19 nt, Artificial Sequence
  Description of Artificial Sequence: Synthetic oligonucleotide
  Sense strand starting at position 2441 of SEQ ID NO: 1569
ucgauuuauucugcaccca

SEQ ID NO: 122881 - RNA, 19 nt, Artificial Sequence
  Description of Artificial Sequence: Synthetic oligonucleotide
  Antisense strand to SEQ ID NO: 122880
ugggugcagaauaaaucga

SEQ ID NO: 122882 - RNA, 19 nt, Artificial Sequence
  Description of Artificial Sequence: Synthetic oligonucleotide
  Sense strand starting at position 2395 of SEQ ID NO: 1569
uuguuagaucaguaagcau

SEQ ID NO: 122883 - RNA, 19 nt, Artificial Sequence
  Description of Artificial Sequence: Synthetic oligonucleotide
  Antisense strand to SEQ ID NO: 122882
augcuuacugaucuaacaa

SEQ ID NO: 122884 - RNA, 19 nt, Artificial Sequence
  Description of Artificial Sequence: Synthetic oligonucleotide
  Sense strand starting at position 2033 of SEQ ID NO: 1569
ggugguaucucccuuaaag

SEQ ID NO: 122885 - RNA, 19 nt, Artificial Sequence
  Description of Artificial Sequence: Synthetic oligonucleotide
  Antisense strand to SEQ ID NO: 122884
cuuuaagggagauaccacc

SEQ ID NO: 122886 - RNA, 19 nt, Artificial Sequence
  Description of Artificial Sequence: Synthetic oligonucleotide
  Sense strand starting at position 1991 of SEQ ID NO: 1569
ugcgaucaucugggaggau

SEQ ID NO: 122887 - RNA, 19 nt, Artificial Sequence
  Description of Artificial Sequence: Synthetic oligonucleotide
  Antisense strand to SEQ ID NO: 122886
auccucccagaugaucgca

SEQ ID NO: 122888 - RNA, 19 nt, Artificial Sequence
  Description of Artificial Sequence: Synthetic oligonucleotide
  Sense strand starting at position 1482 of SEQ ID NO: 1569
ccucccucucucgaggauu

SEQ ID NO: 122889 - RNA, 19 nt, Artificial Sequence
  Description of Artificial Sequence: Synthetic oligonucleotide
  Antisense strand to SEQ ID NO: 122888
aauccucgagagagggagg

SEQ ID NO: 122890 - RNA, 19 nt, Artificial Sequence
  Description of Artificial Sequence: Synthetic oligonucleotide
  Sense strand starting at position 1140 of SEQ ID NO: 1569
caggaugacuccgcugaca

SEQ ID NO: 122891 - RNA, 19 nt, Artificial Sequence
  Description of Artificial Sequence: Synthetic oligonucleotide
  Antisense strand to SEQ ID NO: 122890
ugucagcggagucauccug

SEQ ID NO: 122892 - RNA, 19 nt, Artificial Sequence
  Description of Artificial Sequence: Synthetic oligonucleotide
  Sense strand starting at position 783 of SEQ ID NO: 1569
ugacuuucgaccgaaagug

SEQ ID NO: 122893 - RNA, 19 nt, Artificial Sequence
  Description of Artificial Sequence: Synthetic oligonucleotide
  Antisense strand to SEQ ID NO: 122892
cacuuucggucgaaaguca

SEQ ID NO: 122894 - RNA, 19 nt, Artificial Sequence
  Description of Artificial Sequence: Synthetic oligonucleotide
  Sense strand starting at position 774 of SEQ ID NO: 1569
gaaccuaagugacuuucga

SEQ ID NO: 122895 - RNA, 19 nt, Artificial Sequence
  Description of Artificial Sequence: Synthetic oligonucleotide
  Antisense strand to SEQ ID NO: 122894
ucgaaagucacuuagguuc

SEQ ID NO: 122896 - RNA, 19 nt, Artificial Sequence
  Description of Artificial Sequence: Synthetic oligonucleotide
  Sense strand starting at position 748 of SEQ ID NO: 1569
cccggauccaaugaugcau

SEQ ID NO: 122897 - RNA, 19 nt, Artificial Sequence
  Description of Artificial Sequence: Synthetic oligonucleotide
  Antisense strand to SEQ ID NO: 122896
augcaucauuggauccggg

SEQ ID NO: 122898 - RNA, 19 nt, Artificial Sequence
  Description of Artificial Sequence: Synthetic oligonucleotide
  Sense strand starting at position 730 of SEQ ID NO: 1569
uuaugaaacccgugggauc

SEQ ID NO: 122899 - RNA, 19 nt, Artificial Sequence
  Description of Artificial Sequence: Synthetic oligonucleotide
  Antisense strand to SEQ ID NO: 122898
gaucccacggguuucauaa

SEQ ID NO: 122900 - RNA, 19 nt, Artificial Sequence
  Description of Artificial Sequence: Synthetic oligonucleotide
  Sense strand starting at position 715 of SEQ ID NO: 1569
ggaggagagagguguuuau

SEQ ID NO: 122901 - RNA, 19 nt, Artificial Sequence
  Description of Artificial Sequence: Synthetic oligonucleotide
  Antisense strand to SEQ ID NO: 122900
auaaacaccucucuccucc

SEQ ID NO: 122902 - RNA, 19 nt, Artificial Sequence
  Description of Artificial Sequence: Synthetic oligonucleotide
  Sense strand starting at position 431 of SEQ ID NO: 1569
gcuuuaagucuacaggaua

SEQ ID NO: 122903 - RNA, 19 nt, Artificial Sequence
  Description of Artificial Sequence: Synthetic oligonucleotide
  Antisense strand to SEQ ID NO: 122902
uauccuguagacuuaaagc

SEQ ID NO: 122904 - RNA, 19 nt, Artificial Sequence
  Description of Artificial Sequence: Synthetic oligonucleotide
  Sense strand starting at position 429 of SEQ ID NO: 1569
cugcuuuaagucuacagga

SEQ ID NO: 122905 - RNA, 19 nt, Artificial Sequence
  Description of Artificial Sequence: Synthetic oligonucleotide
  Antisense strand to SEQ ID NO: 122904
uccuguagacuuaaagcag

SEQ ID NO: 122906 - RNA, 19 nt, Artificial Sequence
  Description of Artificial Sequence: Synthetic oligonucleotide
  Sense strand starting at position 401 of SEQ ID NO: 1569
acccuagagccugagaagu

SEQ ID NO: 122907 - RNA, 19 nt, Artificial Sequence
  Description of Artificial Sequence: Synthetic oligonucleotide
  Antisense strand to SEQ ID NO: 122906
acuucucaggcucuagggu

SEQ ID NO: 122908 - RNA, 19 nt, Artificial Sequence
  Description of Artificial Sequence: Synthetic oligonucleotide
  Sense strand starting at position 344 of SEQ ID NO: 1569
guaaccugagauuguacaa

SEQ ID NO: 122909 - RNA, 19 nt, Artificial Sequence
  Description of Artificial Sequence: Synthetic oligonucleotide
  Antisense strand to SEQ ID NO: 122908
uuguacaaucucagguuac

SEQ ID NO: 122910 - RNA, 19 nt, Artificial Sequence
  Description of Artificial Sequence: Synthetic oligonucleotide
  Sense strand starting at position 226 of SEQ ID NO: 1569
ucauguguugaauggagaa

SEQ ID NO: 122911 - RNA, 19 nt, Artificial Sequence
  Description of Artificial Sequence: Synthetic oligonucleotide
  Antisense strand to SEQ ID NO: 122910
uucuccauucaacacauga

SEQ ID NO: 122912 - RNA, 19 nt, Artificial Sequence
  Description of Artificial Sequence: Synthetic oligonucleotide
  Sense strand starting at position 223 of SEQ ID NO: 1569
ugcucauguguugaaugga

SEQ ID NO: 122913 - RNA, 19 nt, Artificial Sequence
  Description of Artificial Sequence: Synthetic oligonucleotide
  Antisense strand to SEQ ID NO: 122912
uccauucaacacaugagca

SEQ ID NO: 122914 - RNA, 19 nt, Artificial Sequence
  Description of Artificial Sequence: Synthetic oligonucleotide
  Sense strand starting at position 215 of SEQ ID NO: 1569
cacagaaaugcucaugugu

SEQ ID NO: 122915 - RNA, 19 nt, Artificial Sequence
  Description of Artificial Sequence: Synthetic oligonucleotide
  Antisense strand to SEQ ID NO: 122914
acacaugagcauuucugug

SEQ ID NO: 122916 - RNA, 19 nt, Artificial Sequence
  Description of Artificial Sequence: Synthetic oligonucleotide
  Sense strand starting at position 175 of SEQ ID NO: 1569
caacuuacugaacgguuua

SEQ ID NO: 122917 - RNA, 19 nt, Artificial Sequence
  Description of Artificial Sequence: Synthetic oligonucleotide
  Antisense strand to SEQ ID NO: 122916
uaaaccguucaguaaguug

SEQ ID NO: 122918 - RNA, 19 nt, Artificial Sequence
  Description of Artificial Sequence: Synthetic oligonucleotide
  Sense strand starting at position 156 of SEQ ID NO: 1569
gacagaguucuugggaauu

SEQ ID NO: 122919 - RNA, 19 nt, Artificial Sequence
  Description of Artificial Sequence: Synthetic oligonucleotide
  Antisense strand to SEQ ID NO: 122918
aauucccaagaacucuguc

SEQ ID NO: 122920 - RNA, 19 nt, Artificial Sequence
  Description of Artificial Sequence: Synthetic oligonucleotide
  Sense strand starting at position 154 of SEQ ID NO: 1569
cugacagaguucuugggaa

SEQ ID NO: 122921 - RNA, 19 nt, Artificial Sequence
  Description of Artificial Sequence: Synthetic oligonucleotide
  Antisense strand to SEQ ID NO: 122920
uucccaagaacucugucag

SEQ ID NO: 122922 - RNA, 19 nt, Artificial Sequence
  Description of Artificial Sequence: Synthetic oligonucleotide
  Sense strand starting at position 72 of SEQ ID NO: 1569
ucauaagacagcuggagua

SEQ ID NO: 122923 - RNA, 19 nt, Artificial Sequence
  Description of Artificial Sequence: Synthetic oligonucleotide
  Antisense strand to SEQ ID NO: 122922
uacuccagcugucuuauga

SEQ ID NO: 122924 - RNA, 19 nt, Artificial Sequence
  Description of Artificial Sequence: Synthetic oligonucleotide
  Sense strand starting at position 3967 of SEQ ID NO: 1570
aggaaccuugucugugauu

SEQ ID NO: 122925 - RNA, 19 nt, Artificial Sequence
  Description of Artificial Sequence: Synthetic oligonucleotide
  Antisense strand to SEQ ID NO: 122924
aaucacagacaagguuccu

SEQ ID NO: 122926 - RNA, 19 nt, Artificial Sequence
  Description of Artificial Sequence: Synthetic oligonucleotide
  Sense strand starting at position 3966 of SEQ ID NO: 1570
caggaaccuugucugugau

SEQ ID NO: 122927 - RNA, 19 nt, Artificial Sequence
  Description of Artificial Sequence: Synthetic oligonucleotide
  Antisense strand to SEQ ID NO: 122926
aucacagacaagguuccug

SEQ ID NO: 122928 - RNA, 19 nt, Artificial Sequence
  Description of Artificial Sequence: Synthetic oligonucleotide
  Sense strand starting at position 3776 of SEQ ID NO: 1570
ggguguccuccugaggaaa

SEQ ID NO: 122929 - RNA, 19 nt, Artificial Sequence
  Description of Artificial Sequence: Synthetic oligonucleotide
  Antisense strand to SEQ ID NO: 122928
uuuccucaggaggacaccc

SEQ ID NO: 122930 - RNA, 19 nt, Artificial Sequence
  Description of Artificial Sequence: Synthetic oligonucleotide
  Sense strand starting at position 3746 of SEQ ID NO: 1570
ucuugugggaccugaaacu

SEQ ID NO: 122931 - RNA, 19 nt, Artificial Sequence
  Description of Artificial Sequence: Synthetic oligonucleotide
  Antisense strand to SEQ ID NO: 122930
aguuucaggucccacaaga

SEQ ID NO: 122932 - RNA, 19 nt, Artificial Sequence
  Description of Artificial Sequence: Synthetic oligonucleotide
  Sense strand starting at position 3628 of SEQ ID NO: 1570
ugucucagucauuaaauau

SEQ ID NO: 122933 - RNA, 19 nt, Artificial Sequence
  Description of Artificial Sequence: Synthetic oligonucleotide
  Antisense strand to SEQ ID NO: 122932
auauuuaaugacugagaca

SEQ ID NO: 122934 - RNA, 19 nt, Artificial Sequence
  Description of Artificial Sequence: Synthetic oligonucleotide
  Sense strand starting at position 3627 of SEQ ID NO: 1570
uugucucagucauuaaaua

SEQ ID NO: 122935 - RNA, 19 nt, Artificial Sequence
  Description of Artificial Sequence: Synthetic oligonucleotide
  Antisense strand to SEQ ID NO: 122934
uauuuaaugacugagacaa

SEQ ID NO: 122936 - RNA, 19 nt, Artificial Sequence
  Description of Artificial Sequence: Synthetic oligonucleotide
  Sense strand starting at position 3566 of SEQ ID NO: 1570
guggguuauugaucccaau

SEQ ID NO: 122937 - RNA, 19 nt, Artificial Sequence
  Description of Artificial Sequence: Synthetic oligonucleotide
  Antisense strand to SEQ ID NO: 122936
auugggaucaauaacccac

SEQ ID NO: 122938 - RNA, 19 nt, Artificial Sequence
  Description of Artificial Sequence: Synthetic oligonucleotide
  Sense strand starting at position 3560 of SEQ ID NO: 1570
accuguguggguuauugau

SEQ ID NO: 122939 - RNA, 19 nt, Artificial Sequence
  Description of Artificial Sequence: Synthetic oligonucleotide
  Antisense strand to SEQ ID NO: 122938
aucaauaacccacacaggu

SEQ ID NO: 122940 - RNA, 19 nt, Artificial Sequence
  Description of Artificial Sequence: Synthetic oligonucleotide
  Sense strand starting at position 3485 of SEQ ID NO: 1570
ggugucagccaagacuuau

SEQ ID NO: 122941 - RNA, 19 nt, Artificial Sequence
  Description of Artificial Sequence: Synthetic oligonucleotide
  Antisense strand to SEQ ID NO: 122940
auaagucuuggcugacacc

SEQ ID NO: 122942 - RNA, 19 nt, Artificial Sequence
  Description of Artificial Sequence: Synthetic oligonucleotide
  Sense strand starting at position 3482 of SEQ ID NO: 1570
acuggugucagccaagacu

SEQ ID NO: 122943 - RNA, 19 nt, Artificial Sequence
  Description of Artificial Sequence: Synthetic oligonucleotide
  Antisense strand to SEQ ID NO: 122942
agucuuggcugacaccagu

SEQ ID NO: 122944 - RNA, 19 nt, Artificial Sequence
  Description of Artificial Sequence: Synthetic oligonucleotide
  Sense strand starting at position 3465 of SEQ ID NO: 1570
agcuguuugcuggaaacac

SEQ ID NO: 122945 - RNA, 19 nt, Artificial Sequence
  Description of Artificial Sequence: Synthetic oligonucleotide
  Antisense strand to SEQ ID NO: 122944
guguuuccagcaaacagcu

SEQ ID NO: 122946 - RNA, 19 nt, Artificial Sequence
  Description of Artificial Sequence: Synthetic oligonucleotide
  Sense strand starting at position 3361 of SEQ ID NO: 1570
ccauuccugguguaacaca

SEQ ID NO: 122947 - RNA, 19 nt, Artificial Sequence
  Description of Artificial Sequence: Synthetic oligonucleotide
  Antisense strand to SEQ ID NO: 122946
uguguuacaccaggaaugg

SEQ ID NO: 122948 - RNA, 19 nt, Artificial Sequence
  Description of Artificial Sequence: Synthetic oligonucleotide
  Sense strand starting at position 3357 of SEQ ID NO: 1570
auacccauuccugguguaa

SEQ ID NO: 122949 - RNA, 19 nt, Artificial Sequence
  Description of Artificial Sequence: Synthetic oligonucleotide
  Antisense strand to SEQ ID NO: 122948
uuacaccaggaauggguau

SEQ ID NO: 122950 - RNA, 19 nt, Artificial Sequence
  Description of Artificial Sequence: Synthetic oligonucleotide
  Sense strand starting at position 3340 of SEQ ID NO: 1570
ggaugugucuaccuugaau

SEQ ID NO: 122951 - RNA, 19 nt, Artificial Sequence
  Description of Artificial Sequence: Synthetic oligonucleotide
  Antisense strand to SEQ ID NO: 122950
auucaagguagacacaucc

SEQ ID NO: 122952 - RNA, 19 nt, Artificial Sequence
  Description of Artificial Sequence: Synthetic oligonucleotide
  Sense strand starting at position 3215 of SEQ ID NO: 1570
ggguuaggucuuuauauaa

SEQ ID NO: 122953 - RNA, 19 nt, Artificial Sequence
  Description of Artificial Sequence: Synthetic oligonucleotide
  Antisense strand to SEQ ID NO: 122952
uuauauaaagaccuaaccc

SEQ ID NO: 122954 - RNA, 19 nt, Artificial Sequence
  Description of Artificial Sequence: Synthetic oligonucleotide
  Sense strand starting at position 3214 of SEQ ID NO: 1570
uggguuaggucuuuauaua

SEQ ID NO: 122955 - RNA, 19 nt, Artificial Sequence
  Description of Artificial Sequence: Synthetic oligonucleotide
  Antisense strand to SEQ ID NO: 122954
uauauaaagaccuaaccca

SEQ ID NO: 122956 - RNA, 19 nt, Artificial Sequence
  Description of Artificial Sequence: Synthetic oligonucleotide
  Sense strand starting at position 3053 of SEQ ID NO: 1570
ucgauuuauucugcaccca

SEQ ID NO: 122957 - RNA, 19 nt, Artificial Sequence
  Description of Artificial Sequence: Synthetic oligonucleotide
  Antisense strand to SEQ ID NO: 122956
ugggugcagaauaaaucga

SEQ ID NO: 122958 - RNA, 19 nt, Artificial Sequence
  Description of Artificial Sequence: Synthetic oligonucleotide
  Sense strand starting at position 3007 of SEQ ID NO: 1570
uuguuagaucaguaagcau

SEQ ID NO: 122959 - RNA, 19 nt, Artificial Sequence
  Description of Artificial Sequence: Synthetic oligonucleotide
  Antisense strand to SEQ ID NO: 122958
augcuuacugaucuaacaa

SEQ ID NO: 122960 - RNA, 19 nt, Artificial Sequence
  Description of Artificial Sequence: Synthetic oligonucleotide
  Sense strand starting at position 2645 of SEQ ID NO: 1570
ggugguaucucccuuaaag

SEQ ID NO: 122961 - RNA, 19 nt, Artificial Sequence
  Description of Artificial Sequence: Synthetic oligonucleotide
  Antisense strand to SEQ ID NO: 122960
cuuuaagggagauaccacc

SEQ ID NO: 122962 - RNA, 19 nt, Artificial Sequence
  Description of Artificial Sequence: Synthetic oligonucleotide
  Sense strand starting at position 2603 of SEQ ID NO: 1570
ugcgaucaucugggaggau

SEQ ID NO: 122963 - RNA, 19 nt, Artificial Sequence
  Description of Artificial Sequence: Synthetic oligonucleotide
  Antisense strand to SEQ ID NO: 122962
auccucccagaugaucgca

SEQ ID NO: 122964 - RNA, 19 nt, Artificial Sequence
  Description of Artificial Sequence: Synthetic oligonucleotide
  Sense strand starting at position 2094 of SEQ ID NO: 1570
ccucccucucucgaggauu

SEQ ID NO: 122965 - RNA, 19 nt, Artificial Sequence
  Description of Artificial Sequence: Synthetic oligonucleotide
  Antisense strand to SEQ ID NO: 122964
aauccucgagagagggagg

SEQ ID NO: 122966 - RNA, 19 nt, Artificial Sequence
  Description of Artificial Sequence: Synthetic oligonucleotide
  Sense strand starting at position 1752 of SEQ ID NO: 1570
caggaugacuccgcugaca

SEQ ID NO: 122967 - RNA, 19 nt, Artificial Sequence
  Description of Artificial Sequence: Synthetic oligonucleotide
  Antisense strand to SEQ ID NO: 122966
ugucagcggagucauccug

SEQ ID NO: 122968 - RNA, 19 nt, Artificial Sequence
  Description of Artificial Sequence: Synthetic oligonucleotide
  Sense strand starting at position 1395 of SEQ ID NO: 1570
ugacuuucgaccgaaagug

SEQ ID NO: 122969 - RNA, 19 nt, Artificial Sequence
  Description of Artificial Sequence: Synthetic oligonucleotide
  Antisense strand to SEQ ID NO: 122968
cacuuucggucgaaaguca

SEQ ID NO: 122970 - RNA, 19 nt, Artificial Sequence
  Description of Artificial Sequence: Synthetic oligonucleotide
  Sense strand starting at position 1386 of SEQ ID NO: 1570
gaaccuaagugacuuucga

SEQ ID NO: 122971 - RNA, 19 nt, Artificial Sequence
  Description of Artificial Sequence: Synthetic oligonucleotide
  Antisense strand to SEQ ID NO: 122970
ucgaaagucacuuagguuc

SEQ ID NO: 122972 - RNA, 19 nt, Artificial Sequence
  Description of Artificial Sequence: Synthetic oligonucleotide
  Sense strand starting at position 1360 of SEQ ID NO: 1570
cccggauccaaugaugcau

SEQ ID NO: 122973 - RNA, 19 nt, Artificial Sequence
  Description of Artificial Sequence: Synthetic oligonucleotide
  Antisense strand to SEQ ID NO: 122972
augcaucauuggauccggg

SEQ ID NO: 122974 - RNA, 19 nt, Artificial Sequence
  Description of Artificial Sequence: Synthetic oligonucleotide
  Sense strand starting at position 1342 of SEQ ID NO: 1570
uuaugaaacccgugggauc

SEQ ID NO: 122975 - RNA, 19 nt, Artificial Sequence
  Description of Artificial Sequence: Synthetic oligonucleotide
  Antisense strand to SEQ ID NO: 122974
gaucccacggguuucauaa

SEQ ID NO: 122976 - RNA, 19 nt, Artificial Sequence
  Description of Artificial Sequence: Synthetic oligonucleotide
  Sense strand starting at position 1327 of SEQ ID NO: 1570
ggaggagagagguguuuau

SEQ ID NO: 122977 - RNA, 19 nt, Artificial Sequence
  Description of Artificial Sequence: Synthetic oligonucleotide
  Antisense strand to SEQ ID NO: 122976
auaaacaccucucuccucc

SEQ ID NO: 122978 - RNA, 19 nt, Artificial Sequence
  Description of Artificial Sequence: Synthetic oligonucleotide
  Sense strand starting at position 1043 of SEQ ID NO: 1570
gcuuuaagucuacaggaua

SEQ ID NO: 122979 - RNA, 19 nt, Artificial Sequence
  Description of Artificial Sequence: Synthetic oligonucleotide
  Antisense strand to SEQ ID NO: 122978
uauccuguagacuuaaagc

SEQ ID NO: 122980 - RNA, 19 nt, Artificial Sequence
  Description of Artificial Sequence: Synthetic oligonucleotide
  Sense strand starting at position 1041 of SEQ ID NO: 1570
cugcuuuaagucuacagga

SEQ ID NO: 122981 - RNA, 19 nt, Artificial Sequence
  Description of Artificial Sequence: Synthetic oligonucleotide
  Antisense strand to SEQ ID NO: 122980
uccuguagacuuaaagcag

SEQ ID NO: 122982 - RNA, 19 nt, Artificial Sequence
  Description of Artificial Sequence: Synthetic oligonucleotide
  Sense strand starting at position 1013 of SEQ ID NO: 1570
acccuagagccugagaagu

SEQ ID NO: 122983 - RNA, 19 nt, Artificial Sequence
  Description of Artificial Sequence: Synthetic oligonucleotide
  Antisense strand to SEQ ID NO: 122982
acuucucaggcucuagggu

SEQ ID NO: 122984 - RNA, 19 nt, Artificial Sequence
  Description of Artificial Sequence: Synthetic oligonucleotide
  Sense strand starting at position 956 of SEQ ID NO: 1570
guaaccugagauuguacaa

SEQ ID NO: 122985 - RNA, 19 nt, Artificial Sequence
  Description of Artificial Sequence: Synthetic oligonucleotide
  Antisense strand to SEQ ID NO: 122984
uuguacaaucucagguuac

SEQ ID NO: 122986 - RNA, 19 nt, Artificial Sequence
  Description of Artificial Sequence: Synthetic oligonucleotide
  Sense strand starting at position 838 of SEQ ID NO: 1570
ucauguguugaauggagaa

SEQ ID NO: 122987 - RNA, 19 nt, Artificial Sequence
  Description of Artificial Sequence: Synthetic oligonucleotide
  Antisense strand to SEQ ID NO: 122986
uucuccauucaacacauga

SEQ ID NO: 122988 - RNA, 19 nt, Artificial Sequence
  Description of Artificial Sequence: Synthetic oligonucleotide
  Sense strand starting at position 835 of SEQ ID NO: 1570
ugcucauguguugaaugga

SEQ ID NO: 122989 - RNA, 19 nt, Artificial Sequence
  Description of Artificial Sequence: Synthetic oligonucleotide
  Antisense strand to SEQ ID NO: 122988
uccauucaacacaugagca

SEQ ID NO: 122990 - RNA, 19 nt, Artificial Sequence
  Description of Artificial Sequence: Synthetic oligonucleotide
  Sense strand starting at position 827 of SEQ ID NO: 1570
cacagaaaugcucaugugu

SEQ ID NO: 122991 - RNA, 19 nt, Artificial Sequence
  Description of Artificial Sequence: Synthetic oligonucleotide
  Antisense strand to SEQ ID NO: 122990
acacaugagcauuucugug

SEQ ID NO: 122992 - RNA, 19 nt, Artificial Sequence
  Description of Artificial Sequence: Synthetic oligonucleotide
  Sense strand starting at position 787 of SEQ ID NO: 1570
caacuuacugaacgguuua

SEQ ID NO: 122993 - RNA, 19 nt, Artificial Sequence
  Description of Artificial Sequence: Synthetic oligonucleotide
  Antisense strand to SEQ ID NO: 122992
uaaaccguucaguaaguug

SEQ ID NO: 122994 - RNA, 19 nt, Artificial Sequence
  Description of Artificial Sequence: Synthetic oligonucleotide
  Sense strand starting at position 768 of SEQ ID NO: 1570
gacagaguucuugggaauu

SEQ ID NO: 122995 - RNA, 19 nt, Artificial Sequence
  Description of Artificial Sequence: Synthetic oligonucleotide
  Antisense strand to SEQ ID NO: 122994
aauucccaagaacucuguc

SEQ ID NO: 122996 - RNA, 19 nt, Artificial Sequence
  Description of Artificial Sequence: Synthetic oligonucleotide
  Sense strand starting at position 766 of SEQ ID NO: 1570
cugacagaguucuugggaa

SEQ ID NO: 122997 - RNA, 19 nt, Artificial Sequence
  Description of Artificial Sequence: Synthetic oligonucleotide
  Antisense strand to SEQ ID NO: 122996
uucccaagaacucugucag

SEQ ID NO: 122998 - RNA, 19 nt, Artificial Sequence
  Description of Artificial Sequence: Synthetic oligonucleotide
  Sense strand starting at position 684 of SEQ ID NO: 1570
ucauaagacagcuggagua

SEQ ID NO: 122999 - RNA, 19 nt, Artificial Sequence
  Description of Artificial Sequence: Synthetic oligonucleotide
  Antisense strand to SEQ ID NO: 122998
uacuccagcugucuuauga

SEQ ID NO: 123000 - RNA, 19 nt, Artificial Sequence
  Description of Artificial Sequence: Synthetic oligonucleotide
  Sense strand starting at position 591 of SEQ ID NO: 1570
aaaguaagcuacuuggaua

SEQ ID NO: 123001 - RNA, 19 nt, Artificial Sequence
  Description of Artificial Sequence: Synthetic oligonucleotide
  Antisense strand to SEQ ID NO: 123000
uauccaaguagcuuacuuu

SEQ ID NO: 123002 - RNA, 19 nt, Artificial Sequence
  Description of Artificial Sequence: Synthetic oligonucleotide
  Sense strand starting at position 157 of SEQ ID NO: 1570
guggccaaacucuaucuau

SEQ ID NO: 123003 - RNA, 19 nt, Artificial Sequence
  Description of Artificial Sequence: Synthetic oligonucleotide
  Antisense strand to SEQ ID NO: 123002
auagauagaguuuggccac

SEQ ID NO: 123004 - RNA, 19 nt, Artificial Sequence
  Description of Artificial Sequence: Synthetic oligonucleotide
  Sense strand starting at position 3983 of SEQ ID NO: 1572
ucuuguuaugggcagaagu

SEQ ID NO: 123005 - RNA, 19 nt, Artificial Sequence
  Description of Artificial Sequence: Synthetic oligonucleotide
  Antisense strand to SEQ ID NO: 123004
acuucugcccauaacaaga

SEQ ID NO: 123006 - RNA, 19 nt, Artificial Sequence
  Description of Artificial Sequence: Synthetic oligonucleotide
  Sense strand starting at position 3981 of SEQ ID NO: 1572
uuucuuguuaugggcagaa

SEQ ID NO: 123007 - RNA, 19 nt, Artificial Sequence
  Description of Artificial Sequence: Synthetic oligonucleotide
  Antisense strand to SEQ ID NO: 123006
uucugcccauaacaagaaa

SEQ ID NO: 123008 - RNA, 19 nt, Artificial Sequence
  Description of Artificial Sequence: Synthetic oligonucleotide
  Sense strand starting at position 3773 of SEQ ID NO: 1572
gaucucaggccagguuuaa

SEQ ID NO: 123009 - RNA, 19 nt, Artificial Sequence
  Description of Artificial Sequence: Synthetic oligonucleotide
  Antisense strand to SEQ ID NO: 123008
uuaaaccuggccugagauc

SEQ ID NO: 123010 - RNA, 19 nt, Artificial Sequence
  Description of Artificial Sequence: Synthetic oligonucleotide
  Sense strand starting at position 2993 of SEQ ID NO: 1572
ugcguauuccuccaacaca

SEQ ID NO: 123011 - RNA, 19 nt, Artificial Sequence
  Description of Artificial Sequence: Synthetic oligonucleotide
  Antisense strand to SEQ ID NO: 123010
uguguuggaggaauacgca

SEQ ID NO: 123012 - RNA, 19 nt, Artificial Sequence
  Description of Artificial Sequence: Synthetic oligonucleotide
  Sense strand starting at position 2678 of SEQ ID NO: 1572
guuguugcccaagaugaac

SEQ ID NO: 123013 - RNA, 19 nt, Artificial Sequence
  Description of Artificial Sequence: Synthetic oligonucleotide
  Antisense strand to SEQ ID NO: 123012
guucaucuugggcaacaac

SEQ ID NO: 123014 - RNA, 19 nt, Artificial Sequence
  Description of Artificial Sequence: Synthetic oligonucleotide
  Sense strand starting at position 2675 of SEQ ID NO: 1572
gauguuguugcccaagaug

SEQ ID NO: 123015 - RNA, 19 nt, Artificial Sequence
  Description of Artificial Sequence: Synthetic oligonucleotide
  Antisense strand to SEQ ID NO: 123014
caucuugggcaacaacauc

SEQ ID NO: 123016 - RNA, 19 nt, Artificial Sequence
  Description of Artificial Sequence: Synthetic oligonucleotide
  Sense strand starting at position 2452 of SEQ ID NO: 1572
ugcagaacauauguucuau

SEQ ID NO: 123017 - RNA, 19 nt, Artificial Sequence
  Description of Artificial Sequence: Synthetic oligonucleotide
  Antisense strand to SEQ ID NO: 123016
auagaacauauguucugca

SEQ ID NO: 123018 - RNA, 19 nt, Artificial Sequence
  Description of Artificial Sequence: Synthetic oligonucleotide
  Sense strand starting at position 2424 of SEQ ID NO: 1572
ggaaucauggcuggaugua

SEQ ID NO: 123019 - RNA, 19 nt, Artificial Sequence
  Description of Artificial Sequence: Synthetic oligonucleotide
  Antisense strand to SEQ ID NO: 123018
uacauccagccaugauucc

SEQ ID NO: 123020 - RNA, 19 nt, Artificial Sequence
  Description of Artificial Sequence: Synthetic oligonucleotide
  Sense strand starting at position 2423 of SEQ ID NO: 1572
gggaaucauggcuggaugu

SEQ ID NO: 123021 - RNA, 19 nt, Artificial Sequence
  Description of Artificial Sequence: Synthetic oligonucleotide
  Antisense strand to SEQ ID NO: 123020
acauccagccaugauuccc

SEQ ID NO: 123022 - RNA, 19 nt, Artificial Sequence
  Description of Artificial Sequence: Synthetic oligonucleotide
  Sense strand starting at position 2343 of SEQ ID NO: 1572
aagaucacgaguuagguua

SEQ ID NO: 123023 - RNA, 19 nt, Artificial Sequence
  Description of Artificial Sequence: Synthetic oligonucleotide
  Antisense strand to SEQ ID NO: 123022
uaaccuaacucgugaucuu

SEQ ID NO: 123024 - RNA, 19 nt, Artificial Sequence
  Description of Artificial Sequence: Synthetic oligonucleotide
  Sense strand starting at position 2186 of SEQ ID NO: 1572
gucuguguggaccauugua

SEQ ID NO: 123025 - RNA, 19 nt, Artificial Sequence
  Description of Artificial Sequence: Synthetic oligonucleotide
  Antisense strand to SEQ ID NO: 123024
uacaaugguccacacagac

SEQ ID NO: 123026 - RNA, 19 nt, Artificial Sequence
  Description of Artificial Sequence: Synthetic oligonucleotide
  Sense strand starting at position 2164 of SEQ ID NO: 1572
uucccugagauuggguauu

SEQ ID NO: 123027 - RNA, 19 nt, Artificial Sequence
  Description of Artificial Sequence: Synthetic oligonucleotide
  Antisense strand to SEQ ID NO: 123026
aauacccaaucucagggaa

SEQ ID NO: 123028 - RNA, 19 nt, Artificial Sequence
  Description of Artificial Sequence: Synthetic oligonucleotide
  Sense strand starting at position 2146 of SEQ ID NO: 1572
agagcagaacucugucauu

SEQ ID NO: 123029 - RNA, 19 nt, Artificial Sequence
  Description of Artificial Sequence: Synthetic oligonucleotide
  Antisense strand to SEQ ID NO: 123028
aaugacagaguucugcucu

SEQ ID NO: 123030 - RNA, 19 nt, Artificial Sequence
  Description of Artificial Sequence: Synthetic oligonucleotide
  Sense strand starting at position 2071 of SEQ ID NO: 1572
auaggacugcuacgaauaa

SEQ ID NO: 123031 - RNA, 19 nt, Artificial Sequence
  Description of Artificial Sequence: Synthetic oligonucleotide
  Antisense strand to SEQ ID NO: 123030
uuauucguagcaguccuau

SEQ ID NO: 123032 - RNA, 19 nt, Artificial Sequence
  Description of Artificial Sequence: Synthetic oligonucleotide
  Sense strand starting at position 2039 of SEQ ID NO: 1572
uauauauuccaguggaaag

SEQ ID NO: 123033 - RNA, 19 nt, Artificial Sequence
  Description of Artificial Sequence: Synthetic oligonucleotide
  Antisense strand to SEQ ID NO: 123032
cuuuccacuggaauauaua

SEQ ID NO: 123034 - RNA, 19 nt, Artificial Sequence
  Description of Artificial Sequence: Synthetic oligonucleotide
  Sense strand starting at position 1664 of SEQ ID NO: 1572
cgcucauuauucucagaca

SEQ ID NO: 123035 - RNA, 19 nt, Artificial Sequence
  Description of Artificial Sequence: Synthetic oligonucleotide
  Antisense strand to SEQ ID NO: 123034
ugucugagaauaaugagcg

SEQ ID NO: 123036 - RNA, 19 nt, Artificial Sequence
  Description of Artificial Sequence: Synthetic oligonucleotide
  Sense strand starting at position 1423 of SEQ ID NO: 1572
gccagauguguggacaaca

SEQ ID NO: 123037 - RNA, 19 nt, Artificial Sequence
  Description of Artificial Sequence: Synthetic oligonucleotide
  Antisense strand to SEQ ID NO: 123036
uguuguccacacaucuggc

SEQ ID NO: 123038 - RNA, 19 nt, Artificial Sequence
  Description of Artificial Sequence: Synthetic oligonucleotide
  Sense strand starting at position 1421 of SEQ ID NO: 1572
augccagauguguggacaa

SEQ ID NO: 123039 - RNA, 19 nt, Artificial Sequence
  Description of Artificial Sequence: Synthetic oligonucleotide
  Antisense strand to SEQ ID NO: 123038
uuguccacacaucuggcau

SEQ ID NO: 123040 - RNA, 19 nt, Artificial Sequence
  Description of Artificial Sequence: Synthetic oligonucleotide
  Sense strand starting at position 1369 of SEQ ID NO: 1572
ugccuuccugaugaaaguu

SEQ ID NO: 123041 - RNA, 19 nt, Artificial Sequence
  Description of Artificial Sequence: Synthetic oligonucleotide
  Antisense strand to SEQ ID NO: 123040
aacuuucaucaggaaggca

SEQ ID NO: 123042 - RNA, 19 nt, Artificial Sequence
  Description of Artificial Sequence: Synthetic oligonucleotide
  Sense strand starting at position 1366 of SEQ ID NO: 1572
acgugccuuccugaugaaa

SEQ ID NO: 123043 - RNA, 19 nt, Artificial Sequence
  Description of Artificial Sequence: Synthetic oligonucleotide
  Antisense strand to SEQ ID NO: 123042
uuucaucaggaaggcacgu

SEQ ID NO: 123044 - RNA, 19 nt, Artificial Sequence
  Description of Artificial Sequence: Synthetic oligonucleotide
  Sense strand starting at position 1260 of SEQ ID NO: 1572
gauuaauccuggguggauu

SEQ ID NO: 123045 - RNA, 19 nt, Artificial Sequence
  Description of Artificial Sequence: Synthetic oligonucleotide
  Antisense strand to SEQ ID NO: 123044
aauccacccaggauuaauc

SEQ ID NO: 123046 - RNA, 19 nt, Artificial Sequence
  Description of Artificial Sequence: Synthetic oligonucleotide
  Sense strand starting at position 1259 of SEQ ID NO: 1572
ugauuaauccuggguggau

SEQ ID NO: 123047 - RNA, 19 nt, Artificial Sequence
  Description of Artificial Sequence: Synthetic oligonucleotide
  Antisense strand to SEQ ID NO: 123046
auccacccaggauuaauca

SEQ ID NO: 123048 - RNA, 19 nt, Artificial Sequence
  Description of Artificial Sequence: Synthetic oligonucleotide
  Sense strand starting at position 1258 of SEQ ID NO: 1572
augauuaauccugggugga

SEQ ID NO: 123049 - RNA, 19 nt, Artificial Sequence
  Description of Artificial Sequence: Synthetic oligonucleotide
  Antisense strand to SEQ ID NO: 123048
uccacccaggauuaaucau

SEQ ID NO: 123050 - RNA, 19 nt, Artificial Sequence
  Description of Artificial Sequence: Synthetic oligonucleotide
  Sense strand starting at position 1245 of SEQ ID NO: 1572
auuuguuggccgcaugauu

SEQ ID NO: 123051 - RNA, 19 nt, Artificial Sequence
  Description of Artificial Sequence: Synthetic oligonucleotide
  Antisense strand to SEQ ID NO: 123050
aaucaugcggccaacaaau

SEQ ID NO: 123052 - RNA, 19 nt, Artificial Sequence
  Description of Artificial Sequence: Synthetic oligonucleotide
  Sense strand starting at position 1241 of SEQ ID NO: 1572
ggaaauuuguuggccgcau

SEQ ID NO: 123053 - RNA, 19 nt, Artificial Sequence
  Description of Artificial Sequence: Synthetic oligonucleotide
  Antisense strand to SEQ ID NO: 123052
augcggccaacaaauuucc

SEQ ID NO: 123054 - RNA, 19 nt, Artificial Sequence
  Description of Artificial Sequence: Synthetic oligonucleotide
  Sense strand starting at position 1240 of SEQ ID NO: 1572
gggaaauuuguuggccgca

SEQ ID NO: 123055 - RNA, 19 nt, Artificial Sequence
  Description of Artificial Sequence: Synthetic oligonucleotide
  Antisense strand to SEQ ID NO: 123054
ugcggccaacaaauuuccc

SEQ ID NO: 123056 - RNA, 19 nt, Artificial Sequence
  Description of Artificial Sequence: Synthetic oligonucleotide
  Sense strand starting at position 1141 of SEQ ID NO: 1572
accugaucuuuauuaagug

SEQ ID NO: 123057 - RNA, 19 nt, Artificial Sequence
  Description of Artificial Sequence: Synthetic oligonucleotide
  Antisense strand to SEQ ID NO: 123056
cacuuaauaaagaucaggu

SEQ ID NO: 123058 - RNA, 19 nt, Artificial Sequence
  Description of Artificial Sequence: Synthetic oligonucleotide
  Sense strand starting at position 993 of SEQ ID NO: 1572
gaaggaguuuagucccuuu

SEQ ID NO: 123059 - RNA, 19 nt, Artificial Sequence
  Description of Artificial Sequence: Synthetic oligonucleotide
  Antisense strand to SEQ ID NO: 123058
aaagggacuaaacuccuuc

SEQ ID NO: 123060 - RNA, 19 nt, Artificial Sequence
  Description of Artificial Sequence: Synthetic oligonucleotide
  Sense strand starting at position 935 of SEQ ID NO: 1572
auaauucuacaguguagag

SEQ ID NO: 123061 - RNA, 19 nt, Artificial Sequence
  Description of Artificial Sequence: Synthetic oligonucleotide
  Antisense strand to SEQ ID NO: 123060
cucuacacuguagaauuau

SEQ ID NO: 123062 - RNA, 19 nt, Artificial Sequence
  Description of Artificial Sequence: Synthetic oligonucleotide
  Sense strand starting at position 932 of SEQ ID NO: 1572
cuuauaauucuacagugua

SEQ ID NO: 123063 - RNA, 19 nt, Artificial Sequence
  Description of Artificial Sequence: Synthetic oligonucleotide
  Antisense strand to SEQ ID NO: 123062
uacacuguagaauuauaag

SEQ ID NO: 123064 - RNA, 19 nt, Artificial Sequence
  Description of Artificial Sequence: Synthetic oligonucleotide
  Sense strand starting at position 922 of SEQ ID NO: 1572
gcuugagguccuuauaauu

SEQ ID NO: 123065 - RNA, 19 nt, Artificial Sequence
  Description of Artificial Sequence: Synthetic oligonucleotide
  Antisense strand to SEQ ID NO: 123064
aauuauaaggaccucaagc

SEQ ID NO: 123066 - RNA, 19 nt, Artificial Sequence
  Description of Artificial Sequence: Synthetic oligonucleotide
  Sense strand starting at position 788 of SEQ ID NO: 1572
gagauaagaguauguaauu

SEQ ID NO: 123067 - RNA, 19 nt, Artificial Sequence
  Description of Artificial Sequence: Synthetic oligonucleotide
  Antisense strand to SEQ ID NO: 123066
aauuacauacucuuaucuc

SEQ ID NO: 123068 - RNA, 19 nt, Artificial Sequence
  Description of Artificial Sequence: Synthetic oligonucleotide
  Sense strand starting at position 713 of SEQ ID NO: 1572
ggcagaguaguguaguaaa

SEQ ID NO: 123069 - RNA, 19 nt, Artificial Sequence
  Description of Artificial Sequence: Synthetic oligonucleotide
  Antisense strand to SEQ ID NO: 123068
uuuacuacacuacucugcc

SEQ ID NO: 123070 - RNA, 19 nt, Artificial Sequence
  Description of Artificial Sequence: Synthetic oligonucleotide
  Sense strand starting at position 363 of SEQ ID NO: 1572
aagugagguuaaccuuuaa

SEQ ID NO: 123071 - RNA, 19 nt, Artificial Sequence
  Description of Artificial Sequence: Synthetic oligonucleotide
  Antisense strand to SEQ ID NO: 123070
uuaaagguuaaccucacuu

SEQ ID NO: 123072 - RNA, 19 nt, Artificial Sequence
  Description of Artificial Sequence: Synthetic oligonucleotide
  Sense strand starting at position 355 of SEQ ID NO: 1572
gaggcuuaaagugagguua

SEQ ID NO: 123073 - RNA, 19 nt, Artificial Sequence
  Description of Artificial Sequence: Synthetic oligonucleotide
  Antisense strand to SEQ ID NO: 123072
uaaccucacuuuaagccuc

SEQ ID NO: 123074 - RNA, 19 nt, Artificial Sequence
  Description of Artificial Sequence: Synthetic oligonucleotide
  Sense strand starting at position 349 of SEQ ID NO: 1572
guuuaagaggcuuaaagug

SEQ ID NO: 123075 - RNA, 19 nt, Artificial Sequence
  Description of Artificial Sequence: Synthetic oligonucleotide
  Antisense strand to SEQ ID NO: 123074
cacuuuaagccucuuaaac

SEQ ID NO: 123076 - RNA, 19 nt, Artificial Sequence
  Description of Artificial Sequence: Synthetic oligonucleotide
  Sense strand starting at position 345 of SEQ ID NO: 1572
cuacguuuaagaggcuuaa

SEQ ID NO: 123077 - RNA, 19 nt, Artificial Sequence
  Description of Artificial Sequence: Synthetic oligonucleotide
  Antisense strand to SEQ ID NO: 123076
uuaagccucuuaaacguag

SEQ ID NO: 123078 - RNA, 19 nt, Artificial Sequence
  Description of Artificial Sequence: Synthetic oligonucleotide
  Sense strand starting at position 315 of SEQ ID NO: 1572
gaauucucguaucuuuaga

SEQ ID NO: 123079 - RNA, 19 nt, Artificial Sequence
  Description of Artificial Sequence: Synthetic oligonucleotide
  Antisense strand to SEQ ID NO: 123078
ucuaaagauacgagaauuc

SEQ ID NO: 123080 - RNA, 19 nt, Artificial Sequence
  Description of Artificial Sequence: Synthetic oligonucleotide
  Sense strand starting at position 296 of SEQ ID NO: 1572
gggagcauuuaauguaaag

SEQ ID NO: 123081 - RNA, 19 nt, Artificial Sequence
  Description of Artificial Sequence: Synthetic oligonucleotide
  Antisense strand to SEQ ID NO: 123080
cuuuacauuaaaugcuccc

SEQ ID NO: 123082 - RNA, 19 nt, Artificial Sequence
  Description of Artificial Sequence: Synthetic oligonucleotide
  Sense strand starting at position 67 of SEQ ID NO: 1572
cagauaagccgauggaauu

SEQ ID NO: 123083 - RNA, 19 nt, Artificial Sequence
  Description of Artificial Sequence: Synthetic oligonucleotide
  Antisense strand to SEQ ID NO: 123082
aauuccaucggcuuaucug

SEQ ID NO: 123084 - RNA, 19 nt, Artificial Sequence
  Description of Artificial Sequence: Synthetic oligonucleotide
  Sense strand starting at position 3947 of SEQ ID NO: 1571
gcgagacucgguuagcuaa

SEQ ID NO: 123085 - RNA, 19 nt, Artificial Sequence
  Description of Artificial Sequence: Synthetic oligonucleotide
  Antisense strand to SEQ ID NO: 123084
uuagcuaaccgagucucgc

SEQ ID NO: 123086 - RNA, 19 nt, Artificial Sequence
  Description of Artificial Sequence: Synthetic oligonucleotide
  Sense strand starting at position 3806 of SEQ ID NO: 1571
gggugcuguuggucugaaa

SEQ ID NO: 123087 - RNA, 19 nt, Artificial Sequence
  Description of Artificial Sequence: Synthetic oligonucleotide
  Antisense strand to SEQ ID NO: 123086
uuucagaccaacagcaccc

SEQ ID NO: 123088 - RNA, 19 nt, Artificial Sequence
  Description of Artificial Sequence: Synthetic oligonucleotide
  Sense strand starting at position 3680 of SEQ ID NO: 1571
cuagaagguuggucacaug

SEQ ID NO: 123089 - RNA, 19 nt, Artificial Sequence
  Description of Artificial Sequence: Synthetic oligonucleotide
  Antisense strand to SEQ ID NO: 123088
caugugaccaaccuucuag

SEQ ID NO: 123090 - RNA, 19 nt, Artificial Sequence
  Description of Artificial Sequence: Synthetic oligonucleotide
  Sense strand starting at position 3679 of SEQ ID NO: 1571
ucuagaagguuggucacau

SEQ ID NO: 123091 - RNA, 19 nt, Artificial Sequence
  Description of Artificial Sequence: Synthetic oligonucleotide
  Antisense strand to SEQ ID NO: 123090
augugaccaaccuucuaga

SEQ ID NO: 123092 - RNA, 19 nt, Artificial Sequence
  Description of Artificial Sequence: Synthetic oligonucleotide
  Sense strand starting at position 3662 of SEQ ID NO: 1571
cccggaugugucuagaauc

SEQ ID NO: 123093 - RNA, 19 nt, Artificial Sequence
  Description of Artificial Sequence: Synthetic oligonucleotide
  Antisense strand to SEQ ID NO: 123092
gauucuagacacauccggg

SEQ ID NO: 123094 - RNA, 19 nt, Artificial Sequence
  Description of Artificial Sequence: Synthetic oligonucleotide
  Sense strand starting at position 3498 of SEQ ID NO: 1571
guguaacuccaaggucaca

SEQ ID NO: 123095 - RNA, 19 nt, Artificial Sequence
  Description of Artificial Sequence: Synthetic oligonucleotide
  Antisense strand to SEQ ID NO: 123094
ugugaccuuggaguuacac

SEQ ID NO: 123096 - RNA, 19 nt, Artificial Sequence
  Description of Artificial Sequence: Synthetic oligonucleotide
  Sense strand starting at position 3455 of SEQ ID NO: 1571
gagccuguuagauggagaa

SEQ ID NO: 123097 - RNA, 19 nt, Artificial Sequence
  Description of Artificial Sequence: Synthetic oligonucleotide
  Antisense strand to SEQ ID NO: 123096
uucuccaucuaacaggcuc

SEQ ID NO: 123098 - RNA, 19 nt, Artificial Sequence
  Description of Artificial Sequence: Synthetic oligonucleotide
  Sense strand starting at position 3413 of SEQ ID NO: 1571
ucaauaaugucuguugaca

SEQ ID NO: 123099 - RNA, 19 nt, Artificial Sequence
  Description of Artificial Sequence: Synthetic oligonucleotide
  Antisense strand to SEQ ID NO: 123098
ugucaacagacauuauuga

SEQ ID NO: 123100 - RNA, 19 nt, Artificial Sequence
  Description of Artificial Sequence: Synthetic oligonucleotide
  Sense strand starting at position 3412 of SEQ ID NO: 1571
gucaauaaugucuguugac

SEQ ID NO: 123101 - RNA, 19 nt, Artificial Sequence
  Description of Artificial Sequence: Synthetic oligonucleotide
  Antisense strand to SEQ ID NO: 123100
gucaacagacauuauugac

SEQ ID NO: 123102 - RNA, 19 nt, Artificial Sequence
  Description of Artificial Sequence: Synthetic oligonucleotide
  Sense strand starting at position 3411 of SEQ ID NO: 1571
ugucaauaaugucuguuga

SEQ ID NO: 123103 - RNA, 19 nt, Artificial Sequence
  Description of Artificial Sequence: Synthetic oligonucleotide
  Antisense strand to SEQ ID NO: 123102
ucaacagacauuauugaca

SEQ ID NO: 123104 - RNA, 19 nt, Artificial Sequence
  Description of Artificial Sequence: Synthetic oligonucleotide
  Sense strand starting at position 3314 of SEQ ID NO: 1571
gagccaaggaguuggaaau

SEQ ID NO: 123105 - RNA, 19 nt, Artificial Sequence
  Description of Artificial Sequence: Synthetic oligonucleotide
  Antisense strand to SEQ ID NO: 123104
auuuccaacuccuuggcuc

SEQ ID NO: 123106 - RNA, 19 nt, Artificial Sequence
  Description of Artificial Sequence: Synthetic oligonucleotide
  Sense strand starting at position 2984 of SEQ ID NO: 1571
uucuaagaaucacaggaga

SEQ ID NO: 123107 - RNA, 19 nt, Artificial Sequence
  Description of Artificial Sequence: Synthetic oligonucleotide
  Antisense strand to SEQ ID NO: 123106
ucuccugugauucuuagaa

SEQ ID NO: 123108 - RNA, 19 nt, Artificial Sequence
  Description of Artificial Sequence: Synthetic oligonucleotide
  Sense strand starting at position 2897 of SEQ ID NO: 1571
gaagacuaacgcugucuca

SEQ ID NO: 123109 - RNA, 19 nt, Artificial Sequence
  Description of Artificial Sequence: Synthetic oligonucleotide
  Antisense strand to SEQ ID NO: 123108
ugagacagcguuagucuuc

SEQ ID NO: 123110 - RNA, 19 nt, Artificial Sequence
  Description of Artificial Sequence: Synthetic oligonucleotide
  Sense strand starting at position 2840 of SEQ ID NO: 1571
ggaaguggucucugcucca

SEQ ID NO: 123111 - RNA, 19 nt, Artificial Sequence
  Description of Artificial Sequence: Synthetic oligonucleotide
  Antisense strand to SEQ ID NO: 123110
uggagcagagaccacuucc

SEQ ID NO: 123112 - RNA, 19 nt, Artificial Sequence
  Description of Artificial Sequence: Synthetic oligonucleotide
  Sense strand starting at position 2730 of SEQ ID NO: 1571
cgaucuugccuugaucuca

SEQ ID NO: 123113 - RNA, 19 nt, Artificial Sequence
  Description of Artificial Sequence: Synthetic oligonucleotide
  Antisense strand to SEQ ID NO: 123112
ugagaucaaggcaagaucg

SEQ ID NO: 123114 - RNA, 19 nt, Artificial Sequence
  Description of Artificial Sequence: Synthetic oligonucleotide
  Sense strand starting at position 2723 of SEQ ID NO: 1571
guuuaagcgaucuugccuu

SEQ ID NO: 123115 - RNA, 19 nt, Artificial Sequence
  Description of Artificial Sequence: Synthetic oligonucleotide
  Antisense strand to SEQ ID NO: 123114
aaggcaagaucgcuuaaac

SEQ ID NO: 123116 - RNA, 19 nt, Artificial Sequence
  Description of Artificial Sequence: Synthetic oligonucleotide
  Sense strand starting at position 2689 of SEQ ID NO: 1571
uccugaguuugcucccaua

SEQ ID NO: 123117 - RNA, 19 nt, Artificial Sequence
  Description of Artificial Sequence: Synthetic oligonucleotide
  Antisense strand to SEQ ID NO: 123116
uaugggagcaaacucagga

SEQ ID NO: 123118 - RNA, 19 nt, Artificial Sequence
  Description of Artificial Sequence: Synthetic oligonucleotide
  Sense strand starting at position 2291 of SEQ ID NO: 1571
aguaaacuguuucuugagu

SEQ ID NO: 123119 - RNA, 19 nt, Artificial Sequence
  Description of Artificial Sequence: Synthetic oligonucleotide
  Antisense strand to SEQ ID NO: 123118
acucaagaaacaguuuacu

SEQ ID NO: 123120 - RNA, 19 nt, Artificial Sequence
  Description of Artificial Sequence: Synthetic oligonucleotide
  Sense strand starting at position 2289 of SEQ ID NO: 1571
gaaguaaacuguuucuuga

SEQ ID NO: 123121 - RNA, 19 nt, Artificial Sequence
  Description of Artificial Sequence: Synthetic oligonucleotide
  Antisense strand to SEQ ID NO: 123120
ucaagaaacaguuuacuuc

SEQ ID NO: 123122 - RNA, 19 nt, Artificial Sequence
  Description of Artificial Sequence: Synthetic oligonucleotide
  Sense strand starting at position 2270 of SEQ ID NO: 1571
uuguuaugggcagaaguga

SEQ ID NO: 123123 - RNA, 19 nt, Artificial Sequence
  Description of Artificial Sequence: Synthetic oligonucleotide
  Antisense strand to SEQ ID NO: 123122
ucacuucugcccauaacaa

SEQ ID NO: 123124 - RNA, 19 nt, Artificial Sequence
  Description of Artificial Sequence: Synthetic oligonucleotide
  Sense strand starting at position 2268 of SEQ ID NO: 1571
ucuuguuaugggcagaagu

SEQ ID NO: 123125 - RNA, 19 nt, Artificial Sequence
  Description of Artificial Sequence: Synthetic oligonucleotide
  Antisense strand to SEQ ID NO: 123124
acuucugcccauaacaaga

SEQ ID NO: 123126 - RNA, 19 nt, Artificial Sequence
  Description of Artificial Sequence: Synthetic oligonucleotide
  Sense strand starting at position 2266 of SEQ ID NO: 1571
uuucuuguuaugggcagaa

SEQ ID NO: 123127 - RNA, 19 nt, Artificial Sequence
  Description of Artificial Sequence: Synthetic oligonucleotide
  Antisense strand to SEQ ID NO: 123126
uucugcccauaacaagaaa

SEQ ID NO: 123128 - RNA, 19 nt, Artificial Sequence
  Description of Artificial Sequence: Synthetic oligonucleotide
  Sense strand starting at position 2058 of SEQ ID NO: 1571
gaucucaggccagguuuaa

SEQ ID NO: 123129 - RNA, 19 nt, Artificial Sequence
  Description of Artificial Sequence: Synthetic oligonucleotide
  Antisense strand to SEQ ID NO: 123128
uuaaaccuggccugagauc

SEQ ID NO: 123130 - RNA, 19 nt, Artificial Sequence
  Description of Artificial Sequence: Synthetic oligonucleotide
  Sense strand starting at position 1585 of SEQ ID NO: 1571
cgggcauuccagcaagucu

SEQ ID NO: 123131 - RNA, 19 nt, Artificial Sequence
  Description of Artificial Sequence: Synthetic oligonucleotide
  Antisense strand to SEQ ID NO: 123130
agacuugcuggaaugcccg

SEQ ID NO: 123132 - RNA, 19 nt, Artificial Sequence
  Description of Artificial Sequence: Synthetic oligonucleotide
  Sense strand starting at position 1278 of SEQ ID NO: 1571
ugcguauuccuccaacaca

SEQ ID NO: 123133 - RNA, 19 nt, Artificial Sequence
  Description of Artificial Sequence: Synthetic oligonucleotide
  Antisense strand to SEQ ID NO: 123132
uguguuggaggaauacgca

SEQ ID NO: 123134 - RNA, 19 nt, Artificial Sequence
  Description of Artificial Sequence: Synthetic oligonucleotide
  Sense strand starting at position 963 of SEQ ID NO: 1571
guuguugcccaagaugaac

SEQ ID NO: 123135 - RNA, 19 nt, Artificial Sequence
  Description of Artificial Sequence: Synthetic oligonucleotide
  Antisense strand to SEQ ID NO: 123134
guucaucuugggcaacaac

SEQ ID NO: 123136 - RNA, 19 nt, Artificial Sequence
  Description of Artificial Sequence: Synthetic oligonucleotide
  Sense strand starting at position 960 of SEQ ID NO: 1571
gauguuguugcccaagaug

SEQ ID NO: 123137 - RNA, 19 nt, Artificial Sequence
  Description of Artificial Sequence: Synthetic oligonucleotide
  Antisense strand to SEQ ID NO: 123136
caucuugggcaacaacauc

SEQ ID NO: 123138 - RNA, 19 nt, Artificial Sequence
  Description of Artificial Sequence: Synthetic oligonucleotide
  Sense strand starting at position 959 of SEQ ID NO: 1571
ugauguuguugcccaagau

SEQ ID NO: 123139 - RNA, 19 nt, Artificial Sequence
  Description of Artificial Sequence: Synthetic oligonucleotide
  Antisense strand to SEQ ID NO: 123138
aucuugggcaacaacauca

SEQ ID NO: 123140 - RNA, 19 nt, Artificial Sequence
  Description of Artificial Sequence: Synthetic oligonucleotide
  Sense strand starting at position 737 of SEQ ID NO: 1571
ugcagaacauauguucuau

SEQ ID NO: 123141 - RNA, 19 nt, Artificial Sequence
  Description of Artificial Sequence: Synthetic oligonucleotide
  Antisense strand to SEQ ID NO: 123140
auagaacauauguucugca

SEQ ID NO: 123142 - RNA, 19 nt, Artificial Sequence
  Description of Artificial Sequence: Synthetic oligonucleotide
  Sense strand starting at position 729 of SEQ ID NO: 1571
cugcguccugcagaacaua

SEQ ID NO: 123143 - RNA, 19 nt, Artificial Sequence
  Description of Artificial Sequence: Synthetic oligonucleotide
  Antisense strand to SEQ ID NO: 123142
uauguucugcaggacgcag

SEQ ID NO: 123144 - RNA, 19 nt, Artificial Sequence
  Description of Artificial Sequence: Synthetic oligonucleotide
  Sense strand starting at position 709 of SEQ ID NO: 1571
ggaaucauggcuggaugua

SEQ ID NO: 123145 - RNA, 19 nt, Artificial Sequence
  Description of Artificial Sequence: Synthetic oligonucleotide
  Antisense strand to SEQ ID NO: 123144
uacauccagccaugauucc

SEQ ID NO: 123146 - RNA, 19 nt, Artificial Sequence
  Description of Artificial Sequence: Synthetic oligonucleotide
  Sense strand starting at position 708 of SEQ ID NO: 1571
gggaaucauggcuggaugu

SEQ ID NO: 123147 - RNA, 19 nt, Artificial Sequence
  Description of Artificial Sequence: Synthetic oligonucleotide
  Antisense strand to SEQ ID NO: 123146
acauccagccaugauuccc

SEQ ID NO: 123148 - RNA, 19 nt, Artificial Sequence
  Description of Artificial Sequence: Synthetic oligonucleotide
  Sense strand starting at position 658 of SEQ ID NO: 1571
accaacauuuagugagcaa

SEQ ID NO: 123149 - RNA, 19 nt, Artificial Sequence
  Description of Artificial Sequence: Synthetic oligonucleotide
  Antisense strand to SEQ ID NO: 123148
uugcucacuaaauguuggu

SEQ ID NO: 123150 - RNA, 19 nt, Artificial Sequence
  Description of Artificial Sequence: Synthetic oligonucleotide
  Sense strand starting at position 628 of SEQ ID NO: 1571
aagaucacgaguuagguua

SEQ ID NO: 123151 - RNA, 19 nt, Artificial Sequence
  Description of Artificial Sequence: Synthetic oligonucleotide
  Antisense strand to SEQ ID NO: 123150
uaaccuaacucgugaucuu

SEQ ID NO: 123152 - RNA, 19 nt, Artificial Sequence
  Description of Artificial Sequence: Synthetic oligonucleotide
  Sense strand starting at position 471 of SEQ ID NO: 1571
gucuguguggaccauugua

SEQ ID NO: 123153 - RNA, 19 nt, Artificial Sequence
  Description of Artificial Sequence: Synthetic oligonucleotide
  Antisense strand to SEQ ID NO: 123152
uacaaugguccacacagac

SEQ ID NO: 123154 - RNA, 19 nt, Artificial Sequence
  Description of Artificial Sequence: Synthetic oligonucleotide
  Sense strand starting at position 449 of SEQ ID NO: 1571
uucccugagauuggguauu

SEQ ID NO: 123155 - RNA, 19 nt, Artificial Sequence
  Description of Artificial Sequence: Synthetic oligonucleotide
  Antisense strand to SEQ ID NO: 123154
aauacccaaucucagggaa

SEQ ID NO: 123156 - RNA, 19 nt, Artificial Sequence
  Description of Artificial Sequence: Synthetic oligonucleotide
  Sense strand starting at position 431 of SEQ ID NO: 1571
agagcagaacucugucauu

SEQ ID NO: 123157 - RNA, 19 nt, Artificial Sequence
  Description of Artificial Sequence: Synthetic oligonucleotide
  Antisense strand to SEQ ID NO: 123156
aaugacagaguucugcucu

SEQ ID NO: 123158 - RNA, 19 nt, Artificial Sequence
  Description of Artificial Sequence: Synthetic oligonucleotide
  Sense strand starting at position 356 of SEQ ID NO: 1571
auaggacugcuacgaauaa

SEQ ID NO: 123159 - RNA, 19 nt, Artificial Sequence
  Description of Artificial Sequence: Synthetic oligonucleotide
  Antisense strand to SEQ ID NO: 123158
uuauucguagcaguccuau

SEQ ID NO: 123160 - RNA, 19 nt, Artificial Sequence
  Description of Artificial Sequence: Synthetic oligonucleotide
  Sense strand starting at position 324 of SEQ ID NO: 1571
uauauauuccaguggaaag

SEQ ID NO: 123161 - RNA, 19 nt, Artificial Sequence
  Description of Artificial Sequence: Synthetic oligonucleotide
  Antisense strand to SEQ ID NO: 123160
cuuuccacuggaauauaua

SEQ ID NO: 123162 - RNA, 19 nt, Artificial Sequence
  Description of Artificial Sequence: Synthetic oligonucleotide
  Sense strand starting at position 51 of SEQ ID NO: 1571
uucuuuaguaguggaguuu

SEQ ID NO: 123163 - RNA, 19 nt, Artificial Sequence
  Description of Artificial Sequence: Synthetic oligonucleotide
  Antisense strand to SEQ ID NO: 123162
aaacuccacuacuaaagaa

SEQ ID NO: 123164 - RNA, 19 nt, Artificial Sequence
  Description of Artificial Sequence: Synthetic oligonucleotide
  Sense strand starting at position 14 of SEQ ID NO: 1573
acacgcugugaaugauaga

SEQ ID NO: 123165 - RNA, 19 nt, Artificial Sequence
  Description of Artificial Sequence: Synthetic oligonucleotide
  Antisense strand to SEQ ID NO: 123164
ucuaucauucacagcgugu

SEQ ID NO: 123166 - RNA, 19 nt, Artificial Sequence
  Description of Artificial Sequence: Synthetic oligonucleotide
  Sense strand starting at position 192 of SEQ ID NO: 1573
acuucuuauuuguaaguga

SEQ ID NO: 123167 - RNA, 19 nt, Artificial Sequence
  Description of Artificial Sequence: Synthetic oligonucleotide
  Antisense strand to SEQ ID NO: 123166
ucacuuacaaauaagaagu

SEQ ID NO: 123168 - RNA, 19 nt, Artificial Sequence
  Description of Artificial Sequence: Synthetic oligonucleotide
  Sense strand starting at position 195 of SEQ ID NO: 1573
ucuuauuuguaagugagca

SEQ ID NO: 123169 - RNA, 19 nt, Artificial Sequence
  Description of Artificial Sequence: Synthetic oligonucleotide
  Antisense strand to SEQ ID NO: 123168
ugcucacuuacaaauaaga

SEQ ID NO: 123170 - RNA, 19 nt, Artificial Sequence
  Description of Artificial Sequence: Synthetic oligonucleotide
  Sense strand starting at position 312 of SEQ ID NO: 1573
uuugaaaucuaggcaucuu

SEQ ID NO: 123171 - RNA, 19 nt, Artificial Sequence
  Description of Artificial Sequence: Synthetic oligonucleotide
  Antisense strand to SEQ ID NO: 123170
aagaugccuagauuucaaa

SEQ ID NO: 123172 - RNA, 19 nt, Artificial Sequence
  Description of Artificial Sequence: Synthetic oligonucleotide
  Sense strand starting at position 500 of SEQ ID NO: 1573
gccaccaugcaggauuaau

SEQ ID NO: 123173 - RNA, 19 nt, Artificial Sequence
  Description of Artificial Sequence: Synthetic oligonucleotide
  Antisense strand to SEQ ID NO: 123172
auuaauccugcaugguggc

SEQ ID NO: 123174 - RNA, 19 nt, Artificial Sequence
  Description of Artificial Sequence: Synthetic oligonucleotide
  Sense strand starting at position 749 of SEQ ID NO: 1573
cuaaguaguuugucuaaug

SEQ ID NO: 123175 - RNA, 19 nt, Artificial Sequence
  Description of Artificial Sequence: Synthetic oligonucleotide
  Antisense strand to SEQ ID NO: 123174
cauuagacaaacuacuuag

SEQ ID NO: 123176 - RNA, 19 nt, Artificial Sequence
  Description of Artificial Sequence: Synthetic oligonucleotide
  Sense strand starting at position 795 of SEQ ID NO: 1573
ucugaugauuuguauucca

SEQ ID NO: 123177 - RNA, 19 nt, Artificial Sequence
  Description of Artificial Sequence: Synthetic oligonucleotide
  Antisense strand to SEQ ID NO: 123176
uggaauacaaaucaucaga

SEQ ID NO: 123178 - RNA, 19 nt, Artificial Sequence
  Description of Artificial Sequence: Synthetic oligonucleotide
  Sense strand starting at position 851 of SEQ ID NO: 1573
uagccaguggucuaugaau

SEQ ID NO: 123179 - RNA, 19 nt, Artificial Sequence
  Description of Artificial Sequence: Synthetic oligonucleotide
  Antisense strand to SEQ ID NO: 123178
auucauagaccacuggcua

SEQ ID NO: 123180 - RNA, 19 nt, Artificial Sequence
  Description of Artificial Sequence: Synthetic oligonucleotide
  Sense strand starting at position 853 of SEQ ID NO: 1573
gccaguggucuaugaauau

SEQ ID NO: 123181 - RNA, 19 nt, Artificial Sequence
  Description of Artificial Sequence: Synthetic oligonucleotide
  Antisense strand to SEQ ID NO: 123180
auauucauagaccacuggc

SEQ ID NO: 123182 - RNA, 19 nt, Artificial Sequence
  Description of Artificial Sequence: Synthetic oligonucleotide
  Sense strand starting at position 972 of SEQ ID NO: 1573
cugaguaauuugcugcaga

SEQ ID NO: 123183 - RNA, 19 nt, Artificial Sequence
  Description of Artificial Sequence: Synthetic oligonucleotide
  Antisense strand to SEQ ID NO: 123182
ucugcagcaaauuacucag

SEQ ID NO: 123184 - RNA, 19 nt, Artificial Sequence
  Description of Artificial Sequence: Synthetic oligonucleotide
  Sense strand starting at position 1062 of SEQ ID NO: 1573
gaaagcugcccuggugaca

SEQ ID NO: 123185 - RNA, 19 nt, Artificial Sequence
  Description of Artificial Sequence: Synthetic oligonucleotide
  Antisense strand to SEQ ID NO: 123184
ugucaccagggcagcuuuc

SEQ ID NO: 123186 - RNA, 19 nt, Artificial Sequence
  Description of Artificial Sequence: Synthetic oligonucleotide
  Sense strand starting at position 1107 of SEQ ID NO: 1573
aagaauguguuucucagag

SEQ ID NO: 123187 - RNA, 19 nt, Artificial Sequence
  Description of Artificial Sequence: Synthetic oligonucleotide
  Antisense strand to SEQ ID NO: 123186
cucugagaaacacauucuu

SEQ ID NO: 123188 - RNA, 19 nt, Artificial Sequence
  Description of Artificial Sequence: Synthetic oligonucleotide
  Sense strand starting at position 1187 of SEQ ID NO: 1573
cccuuagguaagugucaua

SEQ ID NO: 123189 - RNA, 19 nt, Artificial Sequence
  Description of Artificial Sequence: Synthetic oligonucleotide
  Antisense strand to SEQ ID NO: 123188
uaugacacuuaccuaaggg

SEQ ID NO: 123190 - RNA, 19 nt, Artificial Sequence
  Description of Artificial Sequence: Synthetic oligonucleotide
  Sense strand starting at position 1217 of SEQ ID NO: 1573
ugagucuucugcuuaagaa

SEQ ID NO: 123191 - RNA, 19 nt, Artificial Sequence
  Description of Artificial Sequence: Synthetic oligonucleotide
  Antisense strand to SEQ ID NO: 123190
uucuuaagcagaagacuca

SEQ ID NO: 123192 - RNA, 19 nt, Artificial Sequence
  Description of Artificial Sequence: Synthetic oligonucleotide
  Sense strand starting at position 1218 of SEQ ID NO: 1573
gagucuucugcuuaagaaa

SEQ ID NO: 123193 - RNA, 19 nt, Artificial Sequence
  Description of Artificial Sequence: Synthetic oligonucleotide
  Antisense strand to SEQ ID NO: 123192
uuucuuaagcagaagacuc

SEQ ID NO: 123194 - RNA, 19 nt, Artificial Sequence
  Description of Artificial Sequence: Synthetic oligonucleotide
  Sense strand starting at position 1417 of SEQ ID NO: 1573
cuuagugcugcagugugau

SEQ ID NO: 123195 - RNA, 19 nt, Artificial Sequence
  Description of Artificial Sequence: Synthetic oligonucleotide
  Antisense strand to SEQ ID NO: 123194
aucacacugcagcacuaag

SEQ ID NO: 123196 - RNA, 19 nt, Artificial Sequence
  Description of Artificial Sequence: Synthetic oligonucleotide
  Sense strand starting at position 1441 of SEQ ID NO: 1573
gaggaaagaugccugcuuu

SEQ ID NO: 123197 - RNA, 19 nt, Artificial Sequence
  Description of Artificial Sequence: Synthetic oligonucleotide
  Antisense strand to SEQ ID NO: 123196
aaagcaggcaucuuuccuc

SEQ ID NO: 123198 - RNA, 19 nt, Artificial Sequence
  Description of Artificial Sequence: Synthetic oligonucleotide
  Sense strand starting at position 1459 of SEQ ID NO: 1573
uuauuaucuagugggcaag

SEQ ID NO: 123199 - RNA, 19 nt, Artificial Sequence
  Description of Artificial Sequence: Synthetic oligonucleotide
  Antisense strand to SEQ ID NO: 123198
cuugcccacuagauaauaa

SEQ ID NO: 123200 - RNA, 19 nt, Artificial Sequence
  Description of Artificial Sequence: Synthetic oligonucleotide
  Sense strand starting at position 1512 of SEQ ID NO: 1573
agaagagucuucucugcua

SEQ ID NO: 123201 - RNA, 19 nt, Artificial Sequence
  Description of Artificial Sequence: Synthetic oligonucleotide
  Antisense strand to SEQ ID NO: 123200
uagcagagaagacucuucu

SEQ ID NO: 123202 - RNA, 19 nt, Artificial Sequence
  Description of Artificial Sequence: Synthetic oligonucleotide
  Sense strand starting at position 1585 of SEQ ID NO: 1573
ugaagucaguugucucacu

SEQ ID NO: 123203 - RNA, 19 nt, Artificial Sequence
  Description of Artificial Sequence: Synthetic oligonucleotide
  Antisense strand to SEQ ID NO: 123202
agugagacaacugacuuca

SEQ ID NO: 123204 - RNA, 19 nt, Artificial Sequence
  Description of Artificial Sequence: Synthetic oligonucleotide
  Sense strand starting at position 1709 of SEQ ID NO: 1573
gcaucuccagcagaaagaa

SEQ ID NO: 123205 - RNA, 19 nt, Artificial Sequence
  Description of Artificial Sequence: Synthetic oligonucleotide
  Antisense strand to SEQ ID NO: 123204
uucuuucugcuggagaugc

SEQ ID NO: 123206 - RNA, 19 nt, Artificial Sequence
  Description of Artificial Sequence: Synthetic oligonucleotide
  Sense strand starting at position 1727 of SEQ ID NO: 1573
aucucagagcguggaucau

SEQ ID NO: 123207 - RNA, 19 nt, Artificial Sequence
  Description of Artificial Sequence: Synthetic oligonucleotide
  Antisense strand to SEQ ID NO: 123206
augauccacgcucugagau

SEQ ID NO: 123208 - RNA, 19 nt, Artificial Sequence
  Description of Artificial Sequence: Synthetic oligonucleotide
  Sense strand starting at position 1733 of SEQ ID NO: 1573
gagcguggaucaucucuca

SEQ ID NO: 123209 - RNA, 19 nt, Artificial Sequence
  Description of Artificial Sequence: Synthetic oligonucleotide
  Antisense strand to SEQ ID NO: 123208
ugagagaugauccacgcuc

SEQ ID NO: 123210 - RNA, 19 nt, Artificial Sequence
  Description of Artificial Sequence: Synthetic oligonucleotide
  Sense strand starting at position 1791 of SEQ ID NO: 1573
gggacucuucucugcccua

SEQ ID NO: 123211 - RNA, 19 nt, Artificial Sequence
  Description of Artificial Sequence: Synthetic oligonucleotide
  Antisense strand to SEQ ID NO: 123210
uagggcagagaagaguccc

SEQ ID NO: 123212 - RNA, 19 nt, Artificial Sequence
  Description of Artificial Sequence: Synthetic oligonucleotide
  Sense strand starting at position 1905 of SEQ ID NO: 1573
agcaguucuuaccuggaga

SEQ ID NO: 123213 - RNA, 19 nt, Artificial Sequence
  Description of Artificial Sequence: Synthetic oligonucleotide
  Antisense strand to SEQ ID NO: 123212
ucuccagguaagaacugcu

SEQ ID NO: 123214 - RNA, 19 nt, Artificial Sequence
  Description of Artificial Sequence: Synthetic oligonucleotide
  Sense strand starting at position 1907 of SEQ ID NO: 1573
caguucuuaccuggagaug

SEQ ID NO: 123215 - RNA, 19 nt, Artificial Sequence
  Description of Artificial Sequence: Synthetic oligonucleotide
  Antisense strand to SEQ ID NO: 123214
caucuccagguaagaacug

SEQ ID NO: 123216 - RNA, 19 nt, Artificial Sequence
  Description of Artificial Sequence: Synthetic oligonucleotide
  Sense strand starting at position 1992 of SEQ ID NO: 1573
cucacuggacuuugaacaa

SEQ ID NO: 123217 - RNA, 19 nt, Artificial Sequence
  Description of Artificial Sequence: Synthetic oligonucleotide
  Antisense strand to SEQ ID NO: 123216
uuguucaaaguccagugag

SEQ ID NO: 123218 - RNA, 19 nt, Artificial Sequence
  Description of Artificial Sequence: Synthetic oligonucleotide
  Sense strand starting at position 2040 of SEQ ID NO: 1573
agggacauguggucugaau

SEQ ID NO: 123219 - RNA, 19 nt, Artificial Sequence
  Description of Artificial Sequence: Synthetic oligonucleotide
  Antisense strand to SEQ ID NO: 123218
auucagaccacaugucccu

SEQ ID NO: 123220 - RNA, 19 nt, Artificial Sequence
  Description of Artificial Sequence: Synthetic oligonucleotide
  Sense strand starting at position 2042 of SEQ ID NO: 1573
ggacauguggucugaauuc

SEQ ID NO: 123221 - RNA, 19 nt, Artificial Sequence
  Description of Artificial Sequence: Synthetic oligonucleotide
  Antisense strand to SEQ ID NO: 123220
gaauucagaccacaugucc

SEQ ID NO: 123222 - RNA, 19 nt, Artificial Sequence
  Description of Artificial Sequence: Synthetic oligonucleotide
  Sense strand starting at position 2256 of SEQ ID NO: 1573
guacucucccuuuggcaga

SEQ ID NO: 123223 - RNA, 19 nt, Artificial Sequence
  Description of Artificial Sequence: Synthetic oligonucleotide
  Antisense strand to SEQ ID NO: 123222
ucugccaaagggagaguac

SEQ ID NO: 123224 - RNA, 19 nt, Artificial Sequence
  Description of Artificial Sequence: Synthetic oligonucleotide
  Sense strand starting at position 2269 of SEQ ID NO: 1573
ggcagauaccuugguuaca

SEQ ID NO: 123225 - RNA, 19 nt, Artificial Sequence
  Description of Artificial Sequence: Synthetic oligonucleotide
  Antisense strand to SEQ ID NO: 123224
uguaaccaagguaucugcc

SEQ ID NO: 123226 - RNA, 19 nt, Artificial Sequence
  Description of Artificial Sequence: Synthetic oligonucleotide
  Sense strand starting at position 2270 of SEQ ID NO: 1573
gcagauaccuugguuacac

SEQ ID NO: 123227 - RNA, 19 nt, Artificial Sequence
  Description of Artificial Sequence: Synthetic oligonucleotide
  Antisense strand to SEQ ID NO: 123226
guguaaccaagguaucugc

SEQ ID NO: 123228 - RNA, 19 nt, Artificial Sequence
  Description of Artificial Sequence: Synthetic oligonucleotide
  Sense strand starting at position 2355 of SEQ ID NO: 1573
acaggaguauccucaauca

SEQ ID NO: 123229 - RNA, 19 nt, Artificial Sequence
  Description of Artificial Sequence: Synthetic oligonucleotide
  Antisense strand to SEQ ID NO: 123228
ugauugaggauacuccugu

SEQ ID NO: 123230 - RNA, 19 nt, Artificial Sequence
  Description of Artificial Sequence: Synthetic oligonucleotide
  Sense strand starting at position 2482 of SEQ ID NO: 1573
ccuggauucucacuugugu

SEQ ID NO: 123231 - RNA, 19 nt, Artificial Sequence
  Description of Artificial Sequence: Synthetic oligonucleotide
  Antisense strand to SEQ ID NO: 123230
acacaagugagaauccagg

SEQ ID NO: 123232 - RNA, 19 nt, Artificial Sequence
  Description of Artificial Sequence: Synthetic oligonucleotide
  Sense strand starting at position 3515 of SEQ ID NO: 1573
ucccauuucccagguguuu

SEQ ID NO: 123233 - RNA, 19 nt, Artificial Sequence
  Description of Artificial Sequence: Synthetic oligonucleotide
  Antisense strand to SEQ ID NO: 123232
aaacaccugggaaauggga

SEQ ID NO: 123234 - RNA, 19 nt, Artificial Sequence
  Description of Artificial Sequence: Synthetic oligonucleotide
  Sense strand starting at position 3524 of SEQ ID NO: 1573
ccagguguuugauccagag

SEQ ID NO: 123235 - RNA, 19 nt, Artificial Sequence
  Description of Artificial Sequence: Synthetic oligonucleotide
  Antisense strand to SEQ ID NO: 123234
cucuggaucaaacaccugg

SEQ ID NO: 123236 - RNA, 19 nt, Artificial Sequence
  Description of Artificial Sequence: Synthetic oligonucleotide
  Sense strand starting at position 3526 of SEQ ID NO: 1573
agguguuugauccagagua

SEQ ID NO: 123237 - RNA, 19 nt, Artificial Sequence
  Description of Artificial Sequence: Synthetic oligonucleotide
  Antisense strand to SEQ ID NO: 123236
uacucuggaucaaacaccu

SEQ ID NO: 123238 - RNA, 19 nt, Artificial Sequence
  Description of Artificial Sequence: Synthetic oligonucleotide
  Sense strand starting at position 3528 of SEQ ID NO: 1573
guguuugauccagaguaau

SEQ ID NO: 123239 - RNA, 19 nt, Artificial Sequence
  Description of Artificial Sequence: Synthetic oligonucleotide
  Antisense strand to SEQ ID NO: 123238
auuacucuggaucaaacac

SEQ ID NO: 123240 - RNA, 19 nt, Artificial Sequence
  Description of Artificial Sequence: Synthetic oligonucleotide
  Sense strand starting at position 3904 of SEQ ID NO: 1573
ggauuacaggccuggugua

SEQ ID NO: 123241 - RNA, 19 nt, Artificial Sequence
  Description of Artificial Sequence: Synthetic oligonucleotide
  Antisense strand to SEQ ID NO: 123240
uacaccaggccuguaaucc

SEQ ID NO: 123242 - RNA, 19 nt, Artificial Sequence
  Description of Artificial Sequence: Synthetic oligonucleotide
  Sense strand starting at position 3905 of SEQ ID NO: 1573
gauuacaggccugguguau

SEQ ID NO: 123243 - RNA, 19 nt, Artificial Sequence
  Description of Artificial Sequence: Synthetic oligonucleotide
  Antisense strand to SEQ ID NO: 123242
auacaccaggccuguaauc

SEQ ID NO: 123244 - RNA, 19 nt, Artificial Sequence
  Description of Artificial Sequence: Synthetic oligonucleotide
  Sense strand starting at position 337 of SEQ ID NO: 1574
ggagcucagccuuguagag

SEQ ID NO: 123245 - RNA, 19 nt, Artificial Sequence
  Description of Artificial Sequence: Synthetic oligonucleotide
  Antisense strand to SEQ ID NO: 123244
cucuacaaggcugagcucc

SEQ ID NO: 123246 - RNA, 19 nt, Artificial Sequence
  Description of Artificial Sequence: Synthetic oligonucleotide
  Sense strand starting at position 424 of SEQ ID NO: 1574
gccuccaggccagaauaua

SEQ ID NO: 123247 - RNA, 19 nt, Artificial Sequence
  Description of Artificial Sequence: Synthetic oligonucleotide
  Antisense strand to SEQ ID NO: 123246
uauauucuggccuggaggc

SEQ ID NO: 123248 - RNA, 19 nt, Artificial Sequence
  Description of Artificial Sequence: Synthetic oligonucleotide
  Sense strand starting at position 498 of SEQ ID NO: 1574
gcucacuccugcucaaaug

SEQ ID NO: 123249 - RNA, 19 nt, Artificial Sequence
  Description of Artificial Sequence: Synthetic oligonucleotide
  Antisense strand to SEQ ID NO: 123248
cauuugagcaggagugagc

SEQ ID NO: 123250 - RNA, 19 nt, Artificial Sequence
  Description of Artificial Sequence: Synthetic oligonucleotide
  Sense strand starting at position 664 of SEQ ID NO: 1574
gaagacacacagugugauu

SEQ ID NO: 123251 - RNA, 19 nt, Artificial Sequence
  Description of Artificial Sequence: Synthetic oligonucleotide
  Antisense strand to SEQ ID NO: 123250
aaucacacugugugucuuc

SEQ ID NO: 123252 - RNA, 19 nt, Artificial Sequence
  Description of Artificial Sequence: Synthetic oligonucleotide
  Sense strand starting at position 673 of SEQ ID NO: 1574
cagugugauuacccucagu

SEQ ID NO: 123253 - RNA, 19 nt, Artificial Sequence
  Description of Artificial Sequence: Synthetic oligonucleotide
  Antisense strand to SEQ ID NO: 123252
acugaggguaaucacacug

SEQ ID NO: 123254 - RNA, 19 nt, Artificial Sequence
  Description of Artificial Sequence: Synthetic oligonucleotide
  Sense strand starting at position 708 of SEQ ID NO: 1574
agcaguauuugggagucau

SEQ ID NO: 123255 - RNA, 19 nt, Artificial Sequence
  Description of Artificial Sequence: Synthetic oligonucleotide
  Antisense strand to SEQ ID NO: 123254
augacucccaaauacugcu

SEQ ID NO: 123256 - RNA, 19 nt, Artificial Sequence
  Description of Artificial Sequence: Synthetic oligonucleotide
  Sense strand starting at position 718 of SEQ ID NO: 1574
gggagucauuguuucccua

SEQ ID NO: 123257 - RNA, 19 nt, Artificial Sequence
  Description of Artificial Sequence: Synthetic oligonucleotide
  Antisense strand to SEQ ID NO: 123256
uagggaaacaaugacuccc

SEQ ID NO: 123258 - RNA, 19 nt, Artificial Sequence
  Description of Artificial Sequence: Synthetic oligonucleotide
  Sense strand starting at position 809 of SEQ ID NO: 1574
cucccuguuuccuccuaga

SEQ ID NO: 123259 - RNA, 19 nt, Artificial Sequence
  Description of Artificial Sequence: Synthetic oligonucleotide
  Antisense strand to SEQ ID NO: 123258
ucuaggaggaaacagggag

SEQ ID NO: 123260 - RNA, 19 nt, Artificial Sequence
  Description of Artificial Sequence: Synthetic oligonucleotide
  Sense strand starting at position 918 of SEQ ID NO: 1574
ggagaaagguggucugaac

SEQ ID NO: 123261 - RNA, 19 nt, Artificial Sequence
  Description of Artificial Sequence: Synthetic oligonucleotide
  Antisense strand to SEQ ID NO: 123260
guucagaccaccuuucucc

SEQ ID NO: 123262 - RNA, 19 nt, Artificial Sequence
  Description of Artificial Sequence: Synthetic oligonucleotide
  Sense strand starting at position 1120 of SEQ ID NO: 1574
ccagacuuuggcugcagau

SEQ ID NO: 123263 - RNA, 19 nt, Artificial Sequence
  Description of Artificial Sequence: Synthetic oligonucleotide
  Antisense strand to SEQ ID NO: 123262
aucugcagccaaagucugg

SEQ ID NO: 123264 - RNA, 19 nt, Artificial Sequence
  Description of Artificial Sequence: Synthetic oligonucleotide
  Sense strand starting at position 1139 of SEQ ID NO: 1574
gcagccugacaguguagaa

SEQ ID NO: 123265 - RNA, 19 nt, Artificial Sequence
  Description of Artificial Sequence: Synthetic oligonucleotide
  Antisense strand to SEQ ID NO: 123264
uucuacacugucaggcugc

SEQ ID NO: 123266 - RNA, 19 nt, Artificial Sequence
  Description of Artificial Sequence: Synthetic oligonucleotide
  Sense strand starting at position 1163 of SEQ ID NO: 1574
gccagaccuuggguuaguu

SEQ ID NO: 123267 - RNA, 19 nt, Artificial Sequence
  Description of Artificial Sequence: Synthetic oligonucleotide
  Antisense strand to SEQ ID NO: 123266
aacuaacccaaggucuggc

SEQ ID NO: 123268 - RNA, 19 nt, Artificial Sequence
  Description of Artificial Sequence: Synthetic oligonucleotide
  Sense strand starting at position 1377 of SEQ ID NO: 1574
ggcacuguucucuauccaa

SEQ ID NO: 123269 - RNA, 19 nt, Artificial Sequence
  Description of Artificial Sequence: Synthetic oligonucleotide
  Antisense strand to SEQ ID NO: 123268
uuggauagagaacagugcc

SEQ ID NO: 123270 - RNA, 19 nt, Artificial Sequence
  Description of Artificial Sequence: Synthetic oligonucleotide
  Sense strand starting at position 1537 of SEQ ID NO: 1574
uccuguuccucccugagau

SEQ ID NO: 123271 - RNA, 19 nt, Artificial Sequence
  Description of Artificial Sequence: Synthetic oligonucleotide
  Antisense strand to SEQ ID NO: 123270
aucucagggaggaacagga

SEQ ID NO: 123272 - RNA, 19 nt, Artificial Sequence
  Description of Artificial Sequence: Synthetic oligonucleotide
  Sense strand starting at position 1538 of SEQ ID NO: 1574
ccuguuccucccugagauc

SEQ ID NO: 123273 - RNA, 19 nt, Artificial Sequence
  Description of Artificial Sequence: Synthetic oligonucleotide
  Antisense strand to SEQ ID NO: 123272
gaucucagggaggaacagg

SEQ ID NO: 123274 - RNA, 19 nt, Artificial Sequence
  Description of Artificial Sequence: Synthetic oligonucleotide
  Sense strand starting at position 1603 of SEQ ID NO: 1574
ggcagagacuugguucaga

SEQ ID NO: 123275 - RNA, 19 nt, Artificial Sequence
  Description of Artificial Sequence: Synthetic oligonucleotide
  Antisense strand to SEQ ID NO: 123274
ucugaaccaagucucugcc

SEQ ID NO: 123276 - RNA, 19 nt, Artificial Sequence
  Description of Artificial Sequence: Synthetic oligonucleotide
  Sense strand starting at position 1621 of SEQ ID NO: 1574
aggucucugccuugggaca

SEQ ID NO: 123277 - RNA, 19 nt, Artificial Sequence
  Description of Artificial Sequence: Synthetic oligonucleotide
  Antisense strand to SEQ ID NO: 123276
ugucccaaggcagagaccu

SEQ ID NO: 123278 - RNA, 19 nt, Artificial Sequence
  Description of Artificial Sequence: Synthetic oligonucleotide
  Sense strand starting at position 1622 of SEQ ID NO: 1574
ggucucugccuugggacau

SEQ ID NO: 123279 - RNA, 19 nt, Artificial Sequence
  Description of Artificial Sequence: Synthetic oligonucleotide
  Antisense strand to SEQ ID NO: 123278
augucccaaggcagagacc

SEQ ID NO: 123280 - RNA, 19 nt, Artificial Sequence
  Description of Artificial Sequence: Synthetic oligonucleotide
  Sense strand starting at position 1668 of SEQ ID NO: 1574
cccuccaaacuguaaguau

SEQ ID NO: 123281 - RNA, 19 nt, Artificial Sequence
  Description of Artificial Sequence: Synthetic oligonucleotide
  Antisense strand to SEQ ID NO: 123280
auacuuacaguuuggaggg

SEQ ID NO: 123282 - RNA, 19 nt, Artificial Sequence
  Description of Artificial Sequence: Synthetic oligonucleotide
  Sense strand starting at position 1904 of SEQ ID NO: 1574
ugguguccgccugaaauca

SEQ ID NO: 123283 - RNA, 19 nt, Artificial Sequence
  Description of Artificial Sequence: Synthetic oligonucleotide
  Antisense strand to SEQ ID NO: 123282
ugauuucaggcggacacca

SEQ ID NO: 123284 - RNA, 19 nt, Artificial Sequence
  Description of Artificial Sequence: Synthetic oligonucleotide
  Sense strand starting at position 2027 of SEQ ID NO: 1574
augguaaugagcugccaga

SEQ ID NO: 123285 - RNA, 19 nt, Artificial Sequence
  Description of Artificial Sequence: Synthetic oligonucleotide
  Antisense strand to SEQ ID NO: 123284
ucuggcagcucauuaccau

SEQ ID NO: 123286 - RNA, 19 nt, Artificial Sequence
  Description of Artificial Sequence: Synthetic oligonucleotide
  Sense strand starting at position 2272 of SEQ ID NO: 1574
gaaggcugacagugggauu

SEQ ID NO: 123287 - RNA, 19 nt, Artificial Sequence
  Description of Artificial Sequence: Synthetic oligonucleotide
  Antisense strand to SEQ ID NO: 123286
aaucccacugucagccuuc

SEQ ID NO: 123288 - RNA, 19 nt, Artificial Sequence
  Description of Artificial Sequence: Synthetic oligonucleotide
  Sense strand starting at position 2368 of SEQ ID NO: 1574
ccgagagccuggccuauuu

SEQ ID NO: 123289 - RNA, 19 nt, Artificial Sequence
  Description of Artificial Sequence: Synthetic oligonucleotide
  Antisense strand to SEQ ID NO: 123288
aaauaggccaggcucucgg

SEQ ID NO: 123290 - RNA, 19 nt, Artificial Sequence
  Description of Artificial Sequence: Synthetic oligonucleotide
  Sense strand starting at position 2633 of SEQ ID NO: 1574
agauguggucccuggaaac

SEQ ID NO: 123291 - RNA, 19 nt, Artificial Sequence
  Description of Artificial Sequence: Synthetic oligonucleotide
  Antisense strand to SEQ ID NO: 123290
guuuccagggaccacaucu

SEQ ID NO: 123292 - RNA, 19 nt, Artificial Sequence
  Description of Artificial Sequence: Synthetic oligonucleotide
  Sense strand starting at position 2671 of SEQ ID NO: 1574
agauacagccuuggucaga

SEQ ID NO: 123293 - RNA, 19 nt, Artificial Sequence
  Description of Artificial Sequence: Synthetic oligonucleotide
  Antisense strand to SEQ ID NO: 123292
ucugaccaaggcuguaucu

SEQ ID NO: 123294 - RNA, 19 nt, Artificial Sequence
  Description of Artificial Sequence: Synthetic oligonucleotide
  Sense strand starting at position 2964 of SEQ ID NO: 1574
gaaugagaauggccagagu

SEQ ID NO: 123295 - RNA, 19 nt, Artificial Sequence
  Description of Artificial Sequence: Synthetic oligonucleotide
  Antisense strand to SEQ ID NO: 123294
acucuggccauucucauuc

SEQ ID NO: 123296 - RNA, 19 nt, Artificial Sequence
  Description of Artificial Sequence: Synthetic oligonucleotide
  Sense strand starting at position 3092 of SEQ ID NO: 1574
ggaacaaagucucaucaga

SEQ ID NO: 123297 - RNA, 19 nt, Artificial Sequence
  Description of Artificial Sequence: Synthetic oligonucleotide
  Antisense strand to SEQ ID NO: 123296
ucugaugagacuuuguucc

SEQ ID NO: 123298 - RNA, 19 nt, Artificial Sequence
  Description of Artificial Sequence: Synthetic oligonucleotide
  Sense strand starting at position 3408 of SEQ ID NO: 1574
gucucaaggugaucuggga

SEQ ID NO: 123299 - RNA, 19 nt, Artificial Sequence
  Description of Artificial Sequence: Synthetic oligonucleotide
  Antisense strand to SEQ ID NO: 123298
ucccagaucaccuugagac

SEQ ID NO: 123300 - RNA, 19 nt, Artificial Sequence
  Description of Artificial Sequence: Synthetic oligonucleotide
  Sense strand starting at position 3423 of SEQ ID NO: 1574
gggagaacuuugcuuggag

SEQ ID NO: 123301 - RNA, 19 nt, Artificial Sequence
  Description of Artificial Sequence: Synthetic oligonucleotide
  Antisense strand to SEQ ID NO: 123300
cuccaagcaaaguucuccc

SEQ ID NO: 123302 - RNA, 19 nt, Artificial Sequence
  Description of Artificial Sequence: Synthetic oligonucleotide
  Sense strand starting at position 3424 of SEQ ID NO: 1574
ggagaacuuugcuuggagu

SEQ ID NO: 123303 - RNA, 19 nt, Artificial Sequence
  Description of Artificial Sequence: Synthetic oligonucleotide
  Antisense strand to SEQ ID NO: 123302
acuccaagcaaaguucucc

SEQ ID NO: 123304 - RNA, 19 nt, Artificial Sequence
  Description of Artificial Sequence: Synthetic oligonucleotide
  Sense strand starting at position 3425 of SEQ ID NO: 1574
gagaacuuugcuuggaguu

SEQ ID NO: 123305 - RNA, 19 nt, Artificial Sequence
  Description of Artificial Sequence: Synthetic oligonucleotide
  Antisense strand to SEQ ID NO: 123304
aacuccaagcaaaguucuc

SEQ ID NO: 123306 - RNA, 19 nt, Artificial Sequence
  Description of Artificial Sequence: Synthetic oligonucleotide
  Sense strand starting at position 3431 of SEQ ID NO: 1574
uuugcuuggaguugaguga

SEQ ID NO: 123307 - RNA, 19 nt, Artificial Sequence
  Description of Artificial Sequence: Synthetic oligonucleotide
  Antisense strand to SEQ ID NO: 123306
ucacucaacuccaagcaaa

SEQ ID NO: 123308 - RNA, 19 nt, Artificial Sequence
  Description of Artificial Sequence: Synthetic oligonucleotide
  Sense strand starting at position 3489 of SEQ ID NO: 1574
ccaacuugguguccucaga

SEQ ID NO: 123309 - RNA, 19 nt, Artificial Sequence
  Description of Artificial Sequence: Synthetic oligonucleotide
  Antisense strand to SEQ ID NO: 123308
ucugaggacaccaaguugg

SEQ ID NO: 123310 - RNA, 19 nt, Artificial Sequence
  Description of Artificial Sequence: Synthetic oligonucleotide
  Sense strand starting at position 3528 of SEQ ID NO: 1574
guaagcacugugcauguua

SEQ ID NO: 123311 - RNA, 19 nt, Artificial Sequence
  Description of Artificial Sequence: Synthetic oligonucleotide
  Antisense strand to SEQ ID NO: 123310
uaacaugcacagugcuuac

SEQ ID NO: 123312 - RNA, 19 nt, Artificial Sequence
  Description of Artificial Sequence: Synthetic oligonucleotide
  Sense strand starting at position 3554 of SEQ ID NO: 1574
gccagagaaucacugauug

SEQ ID NO: 123313 - RNA, 19 nt, Artificial Sequence
  Description of Artificial Sequence: Synthetic oligonucleotide
  Antisense strand to SEQ ID NO: 123312
caaucagugauucucuggc

SEQ ID NO: 123314 - RNA, 19 nt, Artificial Sequence
  Description of Artificial Sequence: Synthetic oligonucleotide
  Sense strand starting at position 3588 of SEQ ID NO: 1574
ggcugaauuuaacaaacau

SEQ ID NO: 123315 - RNA, 19 nt, Artificial Sequence
  Description of Artificial Sequence: Synthetic oligonucleotide
  Antisense strand to SEQ ID NO: 123314
auguuuguuaaauucagcc

SEQ ID NO: 123316 - RNA, 19 nt, Artificial Sequence
  Description of Artificial Sequence: Synthetic oligonucleotide
  Sense strand starting at position 3609 of SEQ ID NO: 1574
acuggugccuucuccaaga

SEQ ID NO: 123317 - RNA, 19 nt, Artificial Sequence
  Description of Artificial Sequence: Synthetic oligonucleotide
  Antisense strand to SEQ ID NO: 123316
ucuuggagaaggcaccagu

SEQ ID NO: 123318 - RNA, 19 nt, Artificial Sequence
  Description of Artificial Sequence: Synthetic oligonucleotide
  Sense strand starting at position 3611 of SEQ ID NO: 1574
uggugccuucuccaagaau

SEQ ID NO: 123319 - RNA, 19 nt, Artificial Sequence
  Description of Artificial Sequence: Synthetic oligonucleotide
  Antisense strand to SEQ ID NO: 123318
auucuuggagaaggcacca

SEQ ID NO: 123320 - RNA, 19 nt, Artificial Sequence
  Description of Artificial Sequence: Synthetic oligonucleotide
  Sense strand starting at position 3637 of SEQ ID NO: 1574
aggagagucacaugguuag

SEQ ID NO: 123321 - RNA, 19 nt, Artificial Sequence
  Description of Artificial Sequence: Synthetic oligonucleotide
  Antisense strand to SEQ ID NO: 123320
cuaaccaugugacucuccu

SEQ ID NO: 123322 - RNA, 19 nt, Artificial Sequence
  Description of Artificial Sequence: Synthetic oligonucleotide
  Sense strand starting at position 3640 of SEQ ID NO: 1574
agagucacaugguuaguuu

SEQ ID NO: 123323 - RNA, 19 nt, Artificial Sequence
  Description of Artificial Sequence: Synthetic oligonucleotide
  Antisense strand to SEQ ID NO: 123322
aaacuaaccaugugacucu

SEQ ID NO: 123324 - RNA, 19 nt, Artificial Sequence
  Description of Artificial Sequence: Synthetic oligonucleotide
  Sense strand starting at position 3595 of SEQ ID NO: 1575
aucuuuccguacuuagaaa

SEQ ID NO: 123325 - RNA, 19 nt, Artificial Sequence
  Description of Artificial Sequence: Synthetic oligonucleotide
  Antisense strand to SEQ ID NO: 123324
uuucuaaguacggaaagau

SEQ ID NO: 123326 - RNA, 19 nt, Artificial Sequence
  Description of Artificial Sequence: Synthetic oligonucleotide
  Sense strand starting at position 3550 of SEQ ID NO: 1575
uggacuugucuguggagag

SEQ ID NO: 123327 - RNA, 19 nt, Artificial Sequence
  Description of Artificial Sequence: Synthetic oligonucleotide
  Antisense strand to SEQ ID NO: 123326
cucuccacagacaagucca

SEQ ID NO: 123328 - RNA, 19 nt, Artificial Sequence
  Description of Artificial Sequence: Synthetic oligonucleotide
  Sense strand starting at position 3549 of SEQ ID NO: 1575
cuggacuugucuguggaga

SEQ ID NO: 123329 - RNA, 19 nt, Artificial Sequence
  Description of Artificial Sequence: Synthetic oligonucleotide
  Antisense strand to SEQ ID NO: 123328
ucuccacagacaaguccag

SEQ ID NO: 123330 - RNA, 19 nt, Artificial Sequence
  Description of Artificial Sequence: Synthetic oligonucleotide
  Sense strand starting at position 3524 of SEQ ID NO: 1575
cugccacauucucuaggaa

SEQ ID NO: 123331 - RNA, 19 nt, Artificial Sequence
  Description of Artificial Sequence: Synthetic oligonucleotide
  Antisense strand to SEQ ID NO: 123330
uuccuagagaauguggcag

SEQ ID NO: 123332 - RNA, 19 nt, Artificial Sequence
  Description of Artificial Sequence: Synthetic oligonucleotide
  Sense strand starting at position 3397 of SEQ ID NO: 1575
ugaccuaugcuagacagua

SEQ ID NO: 123333 - RNA, 19 nt, Artificial Sequence
  Description of Artificial Sequence: Synthetic oligonucleotide
  Antisense strand to SEQ ID NO: 123332
uacugucuagcauagguca

SEQ ID NO: 123334 - RNA, 19 nt, Artificial Sequence
  Description of Artificial Sequence: Synthetic oligonucleotide
  Sense strand starting at position 3392 of SEQ ID NO: 1575
uccacugaccuaugcuaga

SEQ ID NO: 123335 - RNA, 19 nt, Artificial Sequence
  Description of Artificial Sequence: Synthetic oligonucleotide
  Antisense strand to SEQ ID NO: 123334
ucuagcauaggucagugga

SEQ ID NO: 123336 - RNA, 19 nt, Artificial Sequence
  Description of Artificial Sequence: Synthetic oligonucleotide
  Sense strand starting at position 3321 of SEQ ID NO: 1575
aauaguaagucucuaggga

SEQ ID NO: 123337 - RNA, 19 nt, Artificial Sequence
  Description of Artificial Sequence: Synthetic oligonucleotide
  Antisense strand to SEQ ID NO: 123336
ucccuagagacuuacuauu

SEQ ID NO: 123338 - RNA, 19 nt, Artificial Sequence
  Description of Artificial Sequence: Synthetic oligonucleotide
  Sense strand starting at position 3270 of SEQ ID NO: 1575
gucagaucagggugccaau

SEQ ID NO: 123339 - RNA, 19 nt, Artificial Sequence
  Description of Artificial Sequence: Synthetic oligonucleotide
  Antisense strand to SEQ ID NO: 123338
auuggcacccugaucugac

SEQ ID NO: 123340 - RNA, 19 nt, Artificial Sequence
  Description of Artificial Sequence: Synthetic oligonucleotide
  Sense strand starting at position 3224 of SEQ ID NO: 1575
ccauuccuugggcaaguua

SEQ ID NO: 123341 - RNA, 19 nt, Artificial Sequence
  Description of Artificial Sequence: Synthetic oligonucleotide
  Antisense strand to SEQ ID NO: 123340
uaacuugcccaaggaaugg

SEQ ID NO: 123342 - RNA, 19 nt, Artificial Sequence
  Description of Artificial Sequence: Synthetic oligonucleotide
  Sense strand starting at position 3151 of SEQ ID NO: 1575
guaguuucuaagugaaagg

SEQ ID NO: 123343 - RNA, 19 nt, Artificial Sequence
  Description of Artificial Sequence: Synthetic oligonucleotide
  Antisense strand to SEQ ID NO: 123342
ccuuucacuuagaaacuac

SEQ ID NO: 123344 - RNA, 19 nt, Artificial Sequence
  Description of Artificial Sequence: Synthetic oligonucleotide
  Sense strand starting at position 3150 of SEQ ID NO: 1575
uguaguuucuaagugaaag

SEQ ID NO: 123345 - RNA, 19 nt, Artificial Sequence
  Description of Artificial Sequence: Synthetic oligonucleotide
  Antisense strand to SEQ ID NO: 123344
cuuucacuuagaaacuaca

SEQ ID NO: 123346 - RNA, 19 nt, Artificial Sequence
  Description of Artificial Sequence: Synthetic oligonucleotide
  Sense strand starting at position 3143 of SEQ ID NO: 1575
agacucauguaguuucuaa

SEQ ID NO: 123347 - RNA, 19 nt, Artificial Sequence
  Description of Artificial Sequence: Synthetic oligonucleotide
  Antisense strand to SEQ ID NO: 123346
uuagaaacuacaugagucu

SEQ ID NO: 123348 - RNA, 19 nt, Artificial Sequence
  Description of Artificial Sequence: Synthetic oligonucleotide
  Sense strand starting at position 3129 of SEQ ID NO: 1575
uugacccaucuuugagacu

SEQ ID NO: 123349 - RNA, 19 nt, Artificial Sequence
  Description of Artificial Sequence: Synthetic oligonucleotide
  Antisense strand to SEQ ID NO: 123348
agucucaaagaugggucaa

SEQ ID NO: 123350 - RNA, 19 nt, Artificial Sequence
  Description of Artificial Sequence: Synthetic oligonucleotide
  Sense strand starting at position 3074 of SEQ ID NO: 1575
uuugccuuuguauauauca

SEQ ID NO: 123351 - RNA, 19 nt, Artificial Sequence
  Description of Artificial Sequence: Synthetic oligonucleotide
  Antisense strand to SEQ ID NO: 123350
ugauauauacaaaggcaaa

SEQ ID NO: 123352 - RNA, 19 nt, Artificial Sequence
  Description of Artificial Sequence: Synthetic oligonucleotide
  Sense strand starting at position 3071 of SEQ ID NO: 1575
ucauuugccuuuguauaua

SEQ ID NO: 123353 - RNA, 19 nt, Artificial Sequence
  Description of Artificial Sequence: Synthetic oligonucleotide
  Antisense strand to SEQ ID NO: 123352
uauauacaaaggcaaauga

SEQ ID NO: 123354 - RNA, 19 nt, Artificial Sequence
  Description of Artificial Sequence: Synthetic oligonucleotide
  Sense strand starting at position 3070 of SEQ ID NO: 1575
aucauuugccuuuguauau

SEQ ID NO: 123355 - RNA, 19 nt, Artificial Sequence
  Description of Artificial Sequence: Synthetic oligonucleotide
  Antisense strand to SEQ ID NO: 123354
auauacaaaggcaaaugau

SEQ ID NO: 123356 - RNA, 19 nt, Artificial Sequence
  Description of Artificial Sequence: Synthetic oligonucleotide
  Sense strand starting at position 2925 of SEQ ID NO: 1575
ggcagagacuccuccagaa

SEQ ID NO: 123357 - RNA, 19 nt, Artificial Sequence
  Description of Artificial Sequence: Synthetic oligonucleotide
  Antisense strand to SEQ ID NO: 123356
uucuggaggagucucugcc

SEQ ID NO: 123358 - RNA, 19 nt, Artificial Sequence
  Description of Artificial Sequence: Synthetic oligonucleotide
  Sense strand starting at position 2791 of SEQ ID NO: 1575
ggguuuggcccuggaaaga

SEQ ID NO: 123359 - RNA, 19 nt, Artificial Sequence
  Description of Artificial Sequence: Synthetic oligonucleotide
  Antisense strand to SEQ ID NO: 123358
ucuuuccagggccaaaccc

SEQ ID NO: 123360 - RNA, 19 nt, Artificial Sequence
  Description of Artificial Sequence: Synthetic oligonucleotide
  Sense strand starting at position 2790 of SEQ ID NO: 1575
aggguuuggcccuggaaag

SEQ ID NO: 123361 - RNA, 19 nt, Artificial Sequence
  Description of Artificial Sequence: Synthetic oligonucleotide
  Antisense strand to SEQ ID NO: 123360
cuuuccagggccaaacccu

SEQ ID NO: 123362 - RNA, 19 nt, Artificial Sequence
  Description of Artificial Sequence: Synthetic oligonucleotide
  Sense strand starting at position 2555 of SEQ ID NO: 1575
gcagcagugagcucagcau

SEQ ID NO: 123363 - RNA, 19 nt, Artificial Sequence
  Description of Artificial Sequence: Synthetic oligonucleotide
  Antisense strand to SEQ ID NO: 123362
augcugagcucacugcugc

SEQ ID NO: 123364 - RNA, 19 nt, Artificial Sequence
  Description of Artificial Sequence: Synthetic oligonucleotide
  Sense strand starting at position 2436 of SEQ ID NO: 1575
cuucucuuuccaggaugau

SEQ ID NO: 123365 - RNA, 19 nt, Artificial Sequence
  Description of Artificial Sequence: Synthetic oligonucleotide
  Antisense strand to SEQ ID NO: 123364
aucauccuggaaagagaag

SEQ ID NO: 123366 - RNA, 19 nt, Artificial Sequence
  Description of Artificial Sequence: Synthetic oligonucleotide
  Sense strand starting at position 2150 of SEQ ID NO: 1575
gcgaaacaauucucauauu

SEQ ID NO: 123367 - RNA, 19 nt, Artificial Sequence
  Description of Artificial Sequence: Synthetic oligonucleotide
  Antisense strand to SEQ ID NO: 123366
aauaugagaauuguuucgc

SEQ ID NO: 123368 - RNA, 19 nt, Artificial Sequence
  Description of Artificial Sequence: Synthetic oligonucleotide
  Sense strand starting at position 1234 of SEQ ID NO: 1575
cguguuucccugucaguuu

SEQ ID NO: 123369 - RNA, 19 nt, Artificial Sequence
  Description of Artificial Sequence: Synthetic oligonucleotide
  Antisense strand to SEQ ID NO: 123368
aaacugacagggaaacacg

SEQ ID NO: 123370 - RNA, 19 nt, Artificial Sequence
  Description of Artificial Sequence: Synthetic oligonucleotide
  Sense strand starting at position 1233 of SEQ ID NO: 1575
gcguguuucccugucaguu

SEQ ID NO: 123371 - RNA, 19 nt, Artificial Sequence
  Description of Artificial Sequence: Synthetic oligonucleotide
  Antisense strand to SEQ ID NO: 123370
aacugacagggaaacacgc

SEQ ID NO: 123372 - RNA, 19 nt, Artificial Sequence
  Description of Artificial Sequence: Synthetic oligonucleotide
  Sense strand starting at position 1209 of SEQ ID NO: 1575
ugugcuggcgugccuuaua

SEQ ID NO: 123373 - RNA, 19 nt, Artificial Sequence
  Description of Artificial Sequence: Synthetic oligonucleotide
  Antisense strand to SEQ ID NO: 123372
uauaaggcacgccagcaca

SEQ ID NO: 123374 - RNA, 19 nt, Artificial Sequence
  Description of Artificial Sequence: Synthetic oligonucleotide
  Sense strand starting at position 1173 of SEQ ID NO: 1575
cuauguguauaagucacau

SEQ ID NO: 123375 - RNA, 19 nt, Artificial Sequence
  Description of Artificial Sequence: Synthetic oligonucleotide
  Antisense strand to SEQ ID NO: 123374
augugacuuauacacauag

SEQ ID NO: 123376 - RNA, 19 nt, Artificial Sequence
  Description of Artificial Sequence: Synthetic oligonucleotide
  Sense strand starting at position 1170 of SEQ ID NO: 1575
agacuauguguauaaguca

SEQ ID NO: 123377 - RNA, 19 nt, Artificial Sequence
  Description of Artificial Sequence: Synthetic oligonucleotide
  Antisense strand to SEQ ID NO: 123376
ugacuuauacacauagucu

SEQ ID NO: 123378 - RNA, 19 nt, Artificial Sequence
  Description of Artificial Sequence: Synthetic oligonucleotide
  Sense strand starting at position 1168 of SEQ ID NO: 1575
cuagacuauguguauaagu

SEQ ID NO: 123379 - RNA, 19 nt, Artificial Sequence
  Description of Artificial Sequence: Synthetic oligonucleotide
  Antisense strand to SEQ ID NO: 123378
acuuauacacauagucuag

SEQ ID NO: 123380 - RNA, 19 nt, Artificial Sequence
  Description of Artificial Sequence: Synthetic oligonucleotide
  Sense strand starting at position 1167 of SEQ ID NO: 1575
gcuagacuauguguauaag

SEQ ID NO: 123381 - RNA, 19 nt, Artificial Sequence
  Description of Artificial Sequence: Synthetic oligonucleotide
  Antisense strand to SEQ ID NO: 123380
cuuauacacauagucuagc

SEQ ID NO: 123382 - RNA, 19 nt, Artificial Sequence
  Description of Artificial Sequence: Synthetic oligonucleotide
  Sense strand starting at position 1159 of SEQ ID NO: 1575
uggagugugcuagacuaug

SEQ ID NO: 123383 - RNA, 19 nt, Artificial Sequence
  Description of Artificial Sequence: Synthetic oligonucleotide
  Antisense strand to SEQ ID NO: 123382
cauagucuagcacacucca

SEQ ID NO: 123384 - RNA, 19 nt, Artificial Sequence
  Description of Artificial Sequence: Synthetic oligonucleotide
  Sense strand starting at position 1152 of SEQ ID NO: 1575
ugugauuuggagugugcua

SEQ ID NO: 123385 - RNA, 19 nt, Artificial Sequence
  Description of Artificial Sequence: Synthetic oligonucleotide
  Antisense strand to SEQ ID NO: 123384
uagcacacuccaaaucaca

SEQ ID NO: 123386 - RNA, 19 nt, Artificial Sequence
  Description of Artificial Sequence: Synthetic oligonucleotide
  Sense strand starting at position 894 of SEQ ID NO: 1575
ccuuguguuagaggaauga

SEQ ID NO: 123387 - RNA, 19 nt, Artificial Sequence
  Description of Artificial Sequence: Synthetic oligonucleotide
  Antisense strand to SEQ ID NO: 123386
ucauuccucuaacacaagg

SEQ ID NO: 123388 - RNA, 19 nt, Artificial Sequence
  Description of Artificial Sequence: Synthetic oligonucleotide
  Sense strand starting at position 784 of SEQ ID NO: 1575
ggccacucuuacccagaaa

SEQ ID NO: 123389 - RNA, 19 nt, Artificial Sequence
  Description of Artificial Sequence: Synthetic oligonucleotide
  Antisense strand to SEQ ID NO: 123388
uuucuggguaagaguggcc

SEQ ID NO: 123390 - RNA, 19 nt, Artificial Sequence
  Description of Artificial Sequence: Synthetic oligonucleotide
  Sense strand starting at position 714 of SEQ ID NO: 1575
ccauucuuggcugacucau

SEQ ID NO: 123391 - RNA, 19 nt, Artificial Sequence
  Description of Artificial Sequence: Synthetic oligonucleotide
  Antisense strand to SEQ ID NO: 123390
augagucagccaagaaugg

SEQ ID NO: 123392 - RNA, 19 nt, Artificial Sequence
  Description of Artificial Sequence: Synthetic oligonucleotide
  Sense strand starting at position 644 of SEQ ID NO: 1575
ucuagaccucucuggagau

SEQ ID NO: 123393 - RNA, 19 nt, Artificial Sequence
  Description of Artificial Sequence: Synthetic oligonucleotide
  Antisense strand to SEQ ID NO: 123392
aucuccagagaggucuaga

SEQ ID NO: 123394 - RNA, 19 nt, Artificial Sequence
  Description of Artificial Sequence: Synthetic oligonucleotide
  Sense strand starting at position 357 of SEQ ID NO: 1575
acaugaugggcacggaauu

SEQ ID NO: 123395 - RNA, 19 nt, Artificial Sequence
  Description of Artificial Sequence: Synthetic oligonucleotide
  Antisense strand to SEQ ID NO: 123394
aauuccgugcccaucaugu

SEQ ID NO: 123396 - RNA, 19 nt, Artificial Sequence
  Description of Artificial Sequence: Synthetic oligonucleotide
  Sense strand starting at position 310 of SEQ ID NO: 1575
gcgcucugugauucuguga

SEQ ID NO: 123397 - RNA, 19 nt, Artificial Sequence
  Description of Artificial Sequence: Synthetic oligonucleotide
  Antisense strand to SEQ ID NO: 123396
ucacagaaucacagagcgc

SEQ ID NO: 123398 - RNA, 19 nt, Artificial Sequence
  Description of Artificial Sequence: Synthetic oligonucleotide
  Sense strand starting at position 286 of SEQ ID NO: 1575
ugaggaucugugugagaga

SEQ ID NO: 123399 - RNA, 19 nt, Artificial Sequence
  Description of Artificial Sequence: Synthetic oligonucleotide
  Antisense strand to SEQ ID NO: 123398
ucucucacacagauccuca

SEQ ID NO: 123400 - RNA, 19 nt, Artificial Sequence
  Description of Artificial Sequence: Synthetic oligonucleotide
  Sense strand starting at position 275 of SEQ ID NO: 1575
gacauugugcgugaggauc

SEQ ID NO: 123401 - RNA, 19 nt, Artificial Sequence
  Description of Artificial Sequence: Synthetic oligonucleotide
  Antisense strand to SEQ ID NO: 123400
gauccucacgcacaauguc

SEQ ID NO: 123402 - RNA, 19 nt, Artificial Sequence
  Description of Artificial Sequence: Synthetic oligonucleotide
  Sense strand starting at position 256 of SEQ ID NO: 1575
uggugaagauauccaucau

SEQ ID NO: 123403 - RNA, 19 nt, Artificial Sequence
  Description of Artificial Sequence: Synthetic oligonucleotide
  Antisense strand to SEQ ID NO: 123402
augauggauaucuucacca

SEQ ID NO: 123404 - RNA, 19 nt, Artificial Sequence
  Description of Artificial Sequence: Synthetic oligonucleotide
  Sense strand starting at position 3962 of SEQ ID NO: 1576
acucaacuguauugaggua

SEQ ID NO: 123405 - RNA, 19 nt, Artificial Sequence
  Description of Artificial Sequence: Synthetic oligonucleotide
  Antisense strand to SEQ ID NO: 123404
uaccucaauacaguugagu

SEQ ID NO: 123406 - RNA, 19 nt, Artificial Sequence
  Description of Artificial Sequence: Synthetic oligonucleotide
  Sense strand starting at position 3935 of SEQ ID NO: 1576
uaucaucccuccugggaga

SEQ ID NO: 123407 - RNA, 19 nt, Artificial Sequence
  Description of Artificial Sequence: Synthetic oligonucleotide
  Antisense strand to SEQ ID NO: 123406
ucucccaggagggaugaua

SEQ ID NO: 123408 - RNA, 19 nt, Artificial Sequence
  Description of Artificial Sequence: Synthetic oligonucleotide
  Sense strand starting at position 3847 of SEQ ID NO: 1576
gucuguggugcguccaauu

SEQ ID NO: 123409 - RNA, 19 nt, Artificial Sequence
  Description of Artificial Sequence: Synthetic oligonucleotide
  Antisense strand to SEQ ID NO: 123408
aauuggacgcaccacagac

SEQ ID NO: 123410 - RNA, 19 nt, Artificial Sequence
  Description of Artificial Sequence: Synthetic oligonucleotide
  Sense strand starting at position 3428 of SEQ ID NO: 1576
cguauugccucauugaauc

SEQ ID NO: 123411 - RNA, 19 nt, Artificial Sequence
  Description of Artificial Sequence: Synthetic oligonucleotide
  Antisense strand to SEQ ID NO: 123410
gauucaaugaggcaauacg

SEQ ID NO: 123412 - RNA, 19 nt, Artificial Sequence
  Description of Artificial Sequence: Synthetic oligonucleotide
  Sense strand starting at position 3426 of SEQ ID NO: 1576
ggcguauugccucauugaa

SEQ ID NO: 123413 - RNA, 19 nt, Artificial Sequence
  Description of Artificial Sequence: Synthetic oligonucleotide
  Antisense strand to SEQ ID NO: 123412
uucaaugaggcaauacgcc

SEQ ID NO: 123414 - RNA, 19 nt, Artificial Sequence
  Description of Artificial Sequence: Synthetic oligonucleotide
  Sense strand starting at position 3351 of SEQ ID NO: 1576
gccugauagcaaugaacau

SEQ ID NO: 123415 - RNA, 19 nt, Artificial Sequence
  Description of Artificial Sequence: Synthetic oligonucleotide
  Antisense strand to SEQ ID NO: 123414
auguucauugcuaucaggc

SEQ ID NO: 123416 - RNA, 19 nt, Artificial Sequence
  Description of Artificial Sequence: Synthetic oligonucleotide
  Sense strand starting at position 3180 of SEQ ID NO: 1576
gugugacccugggaagcau

SEQ ID NO: 123417 - RNA, 19 nt, Artificial Sequence
  Description of Artificial Sequence: Synthetic oligonucleotide
  Antisense strand to SEQ ID NO: 123416
augcuucccagggucacac

SEQ ID NO: 123418 - RNA, 19 nt, Artificial Sequence
  Description of Artificial Sequence: Synthetic oligonucleotide
  Sense strand starting at position 2784 of SEQ ID NO: 1576
cgucucuacgaagaguaca

SEQ ID NO: 123419 - RNA, 19 nt, Artificial Sequence
  Description of Artificial Sequence: Synthetic oligonucleotide
  Antisense strand to SEQ ID NO: 123418
uguacucuucguagagacg

SEQ ID NO: 123420 - RNA, 19 nt, Artificial Sequence
  Description of Artificial Sequence: Synthetic oligonucleotide
  Sense strand starting at position 2781 of SEQ ID NO: 1576
cuccgucucuacgaagagu

SEQ ID NO: 123421 - RNA, 19 nt, Artificial Sequence
  Description of Artificial Sequence: Synthetic oligonucleotide
  Antisense strand to SEQ ID NO: 123420
acucuucguagagacggag

SEQ ID NO: 123422 - RNA, 19 nt, Artificial Sequence
  Description of Artificial Sequence: Synthetic oligonucleotide
  Sense strand starting at position 2430 of SEQ ID NO: 1576
ccgugaucuuauuaagacc

SEQ ID NO: 123423 - RNA, 19 nt, Artificial Sequence
  Description of Artificial Sequence: Synthetic oligonucleotide
  Antisense strand to SEQ ID NO: 123422
ggucuuaauaagaucacgg

SEQ ID NO: 123424 - RNA, 19 nt, Artificial Sequence
  Description of Artificial Sequence: Synthetic oligonucleotide
  Sense strand starting at position 2424 of SEQ ID NO: 1576
cagcaaccgugaucuuauu

SEQ ID NO: 123425 - RNA, 19 nt, Artificial Sequence
  Description of Artificial Sequence: Synthetic oligonucleotide
  Antisense strand to SEQ ID NO: 123424
aauaagaucacgguugcug

SEQ ID NO: 123426 - RNA, 19 nt, Artificial Sequence
  Description of Artificial Sequence: Synthetic oligonucleotide
  Sense strand starting at position 2422 of SEQ ID NO: 1576
cccagcaaccgugaucuua

SEQ ID NO: 123427 - RNA, 19 nt, Artificial Sequence
  Description of Artificial Sequence: Synthetic oligonucleotide
  Antisense strand to SEQ ID NO: 123426
uaagaucacgguugcuggg

SEQ ID NO: 123428 - RNA, 19 nt, Artificial Sequence
  Description of Artificial Sequence: Synthetic oligonucleotide
  Sense strand starting at position 2348 of SEQ ID NO: 1576
gcuuuccuaucugcaaagu

SEQ ID NO: 123429 - RNA, 19 nt, Artificial Sequence
  Description of Artificial Sequence: Synthetic oligonucleotide
  Antisense strand to SEQ ID NO: 123428
acuuugcagauaggaaagc

SEQ ID NO: 123430 - RNA, 19 nt, Artificial Sequence
  Description of Artificial Sequence: Synthetic oligonucleotide
  Sense strand starting at position 2180 of SEQ ID NO: 1576
uguauucugggugggauca

SEQ ID NO: 123431 - RNA, 19 nt, Artificial Sequence
  Description of Artificial Sequence: Synthetic oligonucleotide
  Antisense strand to SEQ ID NO: 123430
ugaucccacccagaauaca

SEQ ID NO: 123432 - RNA, 19 nt, Artificial Sequence
  Description of Artificial Sequence: Synthetic oligonucleotide
  Sense strand starting at position 2179 of SEQ ID NO: 1576
cuguauucugggugggauc

SEQ ID NO: 123433 - RNA, 19 nt, Artificial Sequence
  Description of Artificial Sequence: Synthetic oligonucleotide
  Antisense strand to SEQ ID NO: 123432
gaucccacccagaauacag

SEQ ID NO: 123434 - RNA, 19 nt, Artificial Sequence
  Description of Artificial Sequence: Synthetic oligonucleotide
  Sense strand starting at position 2178 of SEQ ID NO: 1576
acuguauucugggugggau

SEQ ID NO: 123435 - RNA, 19 nt, Artificial Sequence
  Description of Artificial Sequence: Synthetic oligonucleotide
  Antisense strand to SEQ ID NO: 123434
aucccacccagaauacagu

SEQ ID NO: 123436 - RNA, 19 nt, Artificial Sequence
  Description of Artificial Sequence: Synthetic oligonucleotide
  Sense strand starting at position 2177 of SEQ ID NO: 1576
aacuguauucuggguggga

SEQ ID NO: 123437 - RNA, 19 nt, Artificial Sequence
  Description of Artificial Sequence: Synthetic oligonucleotide
  Antisense strand to SEQ ID NO: 123436
ucccacccagaauacaguu

SEQ ID NO: 123438 - RNA, 19 nt, Artificial Sequence
  Description of Artificial Sequence: Synthetic oligonucleotide
  Sense strand starting at position 1627 of SEQ ID NO: 1576
ggaacaaccucgcuagcau

SEQ ID NO: 123439 - RNA, 19 nt, Artificial Sequence
  Description of Artificial Sequence: Synthetic oligonucleotide
  Antisense strand to SEQ ID NO: 123438
augcuagcgagguuguucc

SEQ ID NO: 123440 - RNA, 19 nt, Artificial Sequence
  Description of Artificial Sequence: Synthetic oligonucleotide
  Sense strand starting at position 1367 of SEQ ID NO: 1576
ugagguaggcccuauauua

SEQ ID NO: 123441 - RNA, 19 nt, Artificial Sequence
  Description of Artificial Sequence: Synthetic oligonucleotide
  Antisense strand to SEQ ID NO: 123440
uaauauagggccuaccuca

SEQ ID NO: 123442 - RNA, 19 nt, Artificial Sequence
  Description of Artificial Sequence: Synthetic oligonucleotide
  Sense strand starting at position 1304 of SEQ ID NO: 1576
cuguuuaucuagcgucauu

SEQ ID NO: 123443 - RNA, 19 nt, Artificial Sequence
  Description of Artificial Sequence: Synthetic oligonucleotide
  Antisense strand to SEQ ID NO: 123442
aaugacgcuagauaaacag

SEQ ID NO: 123444 - RNA, 19 nt, Artificial Sequence
  Description of Artificial Sequence: Synthetic oligonucleotide
  Sense strand starting at position 1297 of SEQ ID NO: 1576
ugauaaucuguuuaucuag

SEQ ID NO: 123445 - RNA, 19 nt, Artificial Sequence
  Description of Artificial Sequence: Synthetic oligonucleotide
  Antisense strand to SEQ ID NO: 123444
cuagauaaacagauuauca

SEQ ID NO: 123446 - RNA, 19 nt, Artificial Sequence
  Description of Artificial Sequence: Synthetic oligonucleotide
  Sense strand starting at position 1195 of SEQ ID NO: 1576
ccucauaacuggcaaagau

SEQ ID NO: 123447 - RNA, 19 nt, Artificial Sequence
  Description of Artificial Sequence: Synthetic oligonucleotide
  Antisense strand to SEQ ID NO: 123446
aucuuugccaguuaugagg

SEQ ID NO: 123448 - RNA, 19 nt, Artificial Sequence
  Description of Artificial Sequence: Synthetic oligonucleotide
  Sense strand starting at position 744 of SEQ ID NO: 1576
gcuuaugacuggcucacaa

SEQ ID NO: 123449 - RNA, 19 nt, Artificial Sequence
  Description of Artificial Sequence: Synthetic oligonucleotide
  Antisense strand to SEQ ID NO: 123448
uugugagccagucauaagc

SEQ ID NO: 123450 - RNA, 19 nt, Artificial Sequence
  Description of Artificial Sequence: Synthetic oligonucleotide
  Sense strand starting at position 497 of SEQ ID NO: 1576
gggagagucugauaggaga

SEQ ID NO: 123451 - RNA, 19 nt, Artificial Sequence
  Description of Artificial Sequence: Synthetic oligonucleotide
  Antisense strand to SEQ ID NO: 123450
ucuccuaucagacucuccc

SEQ ID NO: 123452 - RNA, 19 nt, Artificial Sequence
  Description of Artificial Sequence: Synthetic oligonucleotide
  Sense strand starting at position 495 of SEQ ID NO: 1576
cugggagagucugauagga

SEQ ID NO: 123453 - RNA, 19 nt, Artificial Sequence
  Description of Artificial Sequence: Synthetic oligonucleotide
  Antisense strand to SEQ ID NO: 123452
uccuaucagacucucccag

SEQ ID NO: 123454 - RNA, 19 nt, Artificial Sequence
  Description of Artificial Sequence: Synthetic oligonucleotide
  Sense strand starting at position 479 of SEQ ID NO: 1576
gcgugaguuuccucuucug

SEQ ID NO: 123455 - RNA, 19 nt, Artificial Sequence
  Description of Artificial Sequence: Synthetic oligonucleotide
  Antisense strand to SEQ ID NO: 123454
cagaagaggaaacucacgc

SEQ ID NO: 123456 - RNA, 19 nt, Artificial Sequence
  Description of Artificial Sequence: Synthetic oligonucleotide
  Sense strand starting at position 447 of SEQ ID NO: 1576
agguuuccgacugguggau

SEQ ID NO: 123457 - RNA, 19 nt, Artificial Sequence
  Description of Artificial Sequence: Synthetic oligonucleotide
  Antisense strand to SEQ ID NO: 123456
auccaccagucggaaaccu

SEQ ID NO: 123458 - RNA, 19 nt, Artificial Sequence
  Description of Artificial Sequence: Synthetic oligonucleotide
  Sense strand starting at position 446 of SEQ ID NO: 1576
cagguuuccgacuggugga

SEQ ID NO: 123459 - RNA, 19 nt, Artificial Sequence
  Description of Artificial Sequence: Synthetic oligonucleotide
  Antisense strand to SEQ ID NO: 123458
uccaccagucggaaaccug

SEQ ID NO: 123460 - RNA, 19 nt, Artificial Sequence
  Description of Artificial Sequence: Synthetic oligonucleotide
  Sense strand starting at position 218 of SEQ ID NO: 1576
cccuguagguuagaugaca

SEQ ID NO: 123461 - RNA, 19 nt, Artificial Sequence
  Description of Artificial Sequence: Synthetic oligonucleotide
  Antisense strand to SEQ ID NO: 123460
ugucaucuaaccuacaggg

SEQ ID NO: 123462 - RNA, 19 nt, Artificial Sequence
  Description of Artificial Sequence: Synthetic oligonucleotide
  Sense strand starting at position 128 of SEQ ID NO: 1576
cuguuuccguauuuauauc

SEQ ID NO: 123463 - RNA, 19 nt, Artificial Sequence
  Description of Artificial Sequence: Synthetic oligonucleotide
  Antisense strand to SEQ ID NO: 123462
gauauaaauacggaaacag

SEQ ID NO: 123464 - RNA, 19 nt, Artificial Sequence
  Description of Artificial Sequence: Synthetic oligonucleotide
  Sense strand starting at position 124 of SEQ ID NO: 1576
gccucuguuuccguauuua

SEQ ID NO: 123465 - RNA, 19 nt, Artificial Sequence
  Description of Artificial Sequence: Synthetic oligonucleotide
  Antisense strand to SEQ ID NO: 123464
uaaauacggaaacagaggc

SEQ ID NO: 123466 - RNA, 19 nt, Artificial Sequence
  Description of Artificial Sequence: Synthetic oligonucleotide
  Sense strand starting at position 29 of SEQ ID NO: 1576
cuaggucucugcucuauuu

SEQ ID NO: 123467 - RNA, 19 nt, Artificial Sequence
  Description of Artificial Sequence: Synthetic oligonucleotide
  Antisense strand to SEQ ID NO: 123466
aaauagagcagagaccuag

SEQ ID NO: 123468 - RNA, 19 nt, Artificial Sequence
  Description of Artificial Sequence: Synthetic oligonucleotide
  Sense strand starting at position 13 of SEQ ID NO: 1577
cuggaugauuuacaaugua

SEQ ID NO: 123469 - RNA, 19 nt, Artificial Sequence
  Description of Artificial Sequence: Synthetic oligonucleotide
  Antisense strand to SEQ ID NO: 123468
uacauuguaaaucauccag

SEQ ID NO: 123470 - RNA, 19 nt, Artificial Sequence
  Description of Artificial Sequence: Synthetic oligonucleotide
  Sense strand starting at position 55 of SEQ ID NO: 1577
aauagcuuguggucaauaa

SEQ ID NO: 123471 - RNA, 19 nt, Artificial Sequence
  Description of Artificial Sequence: Synthetic oligonucleotide
  Antisense strand to SEQ ID NO: 123470
uuauugaccacaagcuauu

SEQ ID NO: 123472 - RNA, 19 nt, Artificial Sequence
  Description of Artificial Sequence: Synthetic oligonucleotide
  Sense strand starting at position 59 of SEQ ID NO: 1577
gcuuguggucaauaaacuu

SEQ ID NO: 123473 - RNA, 19 nt, Artificial Sequence
  Description of Artificial Sequence: Synthetic oligonucleotide
  Antisense strand to SEQ ID NO: 123472
aaguuuauugaccacaagc

SEQ ID NO: 123474 - RNA, 19 nt, Artificial Sequence
  Description of Artificial Sequence: Synthetic oligonucleotide
  Sense strand starting at position 250 of SEQ ID NO: 1577
ucucucuaaggaugcaaua

SEQ ID NO: 123475 - RNA, 19 nt, Artificial Sequence
  Description of Artificial Sequence: Synthetic oligonucleotide
  Antisense strand to SEQ ID NO: 123474
uauugcauccuuagagaga

SEQ ID NO: 123476 - RNA, 19 nt, Artificial Sequence
  Description of Artificial Sequence: Synthetic oligonucleotide
  Sense strand starting at position 372 of SEQ ID NO: 1577
ggguaauaauaccugcaug

SEQ ID NO: 123477 - RNA, 19 nt, Artificial Sequence
  Description of Artificial Sequence: Synthetic oligonucleotide
  Antisense strand to SEQ ID NO: 123476
caugcagguauuauuaccc

SEQ ID NO: 123478 - RNA, 19 nt, Artificial Sequence
  Description of Artificial Sequence: Synthetic oligonucleotide
  Sense strand starting at position 421 of SEQ ID NO: 1577
agguccaaacacuguguaa

SEQ ID NO: 123479 - RNA, 19 nt, Artificial Sequence
  Description of Artificial Sequence: Synthetic oligonucleotide
  Antisense strand to SEQ ID NO: 123478
uuacacaguguuuggaccu

SEQ ID NO: 123480 - RNA, 19 nt, Artificial Sequence
  Description of Artificial Sequence: Synthetic oligonucleotide
  Sense strand starting at position 502 of SEQ ID NO: 1577
uugagcacuguguaauaua

SEQ ID NO: 123481 - RNA, 19 nt, Artificial Sequence
  Description of Artificial Sequence: Synthetic oligonucleotide
  Antisense strand to SEQ ID NO: 123480
uauauuacacagugcucaa

SEQ ID NO: 123482 - RNA, 19 nt, Artificial Sequence
  Description of Artificial Sequence: Synthetic oligonucleotide
  Sense strand starting at position 541 of SEQ ID NO: 1577
acauuucguuuauggauuu

SEQ ID NO: 123483 - RNA, 19 nt, Artificial Sequence
  Description of Artificial Sequence: Synthetic oligonucleotide
  Antisense strand to SEQ ID NO: 123482
aaauccauaaacgaaaugu

SEQ ID NO: 123484 - RNA, 19 nt, Artificial Sequence
  Description of Artificial Sequence: Synthetic oligonucleotide
  Sense strand starting at position 565 of SEQ ID NO: 1577
ccuaaauaacugugugauc

SEQ ID NO: 123485 - RNA, 19 nt, Artificial Sequence
  Description of Artificial Sequence: Synthetic oligonucleotide
  Antisense strand to SEQ ID NO: 123484
gaucacacaguuauuuagg

SEQ ID NO: 123486 - RNA, 19 nt, Artificial Sequence
  Description of Artificial Sequence: Synthetic oligonucleotide
  Sense strand starting at position 762 of SEQ ID NO: 1577
cuuuaugaggcagauccua

SEQ ID NO: 123487 - RNA, 19 nt, Artificial Sequence
  Description of Artificial Sequence: Synthetic oligonucleotide
  Antisense strand to SEQ ID NO: 123486
uaggaucugccucauaaag

SEQ ID NO: 123488 - RNA, 19 nt, Artificial Sequence
  Description of Artificial Sequence: Synthetic oligonucleotide
  Sense strand starting at position 958 of SEQ ID NO: 1577
ugcgguauuccugacugaa

SEQ ID NO: 123489 - RNA, 19 nt, Artificial Sequence
  Description of Artificial Sequence: Synthetic oligonucleotide
  Antisense strand to SEQ ID NO: 123488
uucagucaggaauaccgca

SEQ ID NO: 123490 - RNA, 19 nt, Artificial Sequence
  Description of Artificial Sequence: Synthetic oligonucleotide
  Sense strand starting at position 960 of SEQ ID NO: 1577
cgguauuccugacugaauc

SEQ ID NO: 123491 - RNA, 19 nt, Artificial Sequence
  Description of Artificial Sequence: Synthetic oligonucleotide
  Antisense strand to SEQ ID NO: 123490
gauucagucaggaauaccg

SEQ ID NO: 123492 - RNA, 19 nt, Artificial Sequence
  Description of Artificial Sequence: Synthetic oligonucleotide
  Sense strand starting at position 961 of SEQ ID NO: 1577
gguauuccugacugaauca

SEQ ID NO: 123493 - RNA, 19 nt, Artificial Sequence
  Description of Artificial Sequence: Synthetic oligonucleotide
  Antisense strand to SEQ ID NO: 123492
ugauucagucaggaauacc

SEQ ID NO: 123494 - RNA, 19 nt, Artificial Sequence
  Description of Artificial Sequence: Synthetic oligonucleotide
  Sense strand starting at position 1113 of SEQ ID NO: 1577
ugaacuaagucagugguca

SEQ ID NO: 123495 - RNA, 19 nt, Artificial Sequence
  Description of Artificial Sequence: Synthetic oligonucleotide
  Antisense strand to SEQ ID NO: 123494
ugaccacugacuuaguuca

SEQ ID NO: 123496 - RNA, 19 nt, Artificial Sequence
  Description of Artificial Sequence: Synthetic oligonucleotide
  Sense strand starting at position 1114 of SEQ ID NO: 1577
gaacuaagucaguggucaa

SEQ ID NO: 123497 - RNA, 19 nt, Artificial Sequence
  Description of Artificial Sequence: Synthetic oligonucleotide
  Antisense strand to SEQ ID NO: 123496
uugaccacugacuuaguuc

SEQ ID NO: 123498 - RNA, 19 nt, Artificial Sequence
  Description of Artificial Sequence: Synthetic oligonucleotide
  Sense strand starting at position 1169 of SEQ ID NO: 1577
uccugaugacucugaugca

SEQ ID NO: 123499 - RNA, 19 nt, Artificial Sequence
  Description of Artificial Sequence: Synthetic oligonucleotide
  Antisense strand to SEQ ID NO: 123498
ugcaucagagucaucagga

SEQ ID NO: 123500 - RNA, 19 nt, Artificial Sequence
  Description of Artificial Sequence: Synthetic oligonucleotide
  Sense strand starting at position 1409 of SEQ ID NO: 1577
gcgaaugugcgguccuuca

SEQ ID NO: 123501 - RNA, 19 nt, Artificial Sequence
  Description of Artificial Sequence: Synthetic oligonucleotide
  Antisense strand to SEQ ID NO: 123500
ugaaggaccgcacauucgc

SEQ ID NO: 123502 - RNA, 19 nt, Artificial Sequence
  Description of Artificial Sequence: Synthetic oligonucleotide
  Sense strand starting at position 1811 of SEQ ID NO: 1577
gagcuaagugauugaugga

SEQ ID NO: 123503 - RNA, 19 nt, Artificial Sequence
  Description of Artificial Sequence: Synthetic oligonucleotide
  Antisense strand to SEQ ID NO: 123502
uccaucaaucacuuagcuc

SEQ ID NO: 123504 - RNA, 19 nt, Artificial Sequence
  Description of Artificial Sequence: Synthetic oligonucleotide
  Sense strand starting at position 1900 of SEQ ID NO: 1577
agguggucagguugggaaa

SEQ ID NO: 123505 - RNA, 19 nt, Artificial Sequence
  Description of Artificial Sequence: Synthetic oligonucleotide
  Antisense strand to SEQ ID NO: 123504
uuucccaaccugaccaccu

SEQ ID NO: 123506 - RNA, 19 nt, Artificial Sequence
  Description of Artificial Sequence: Synthetic oligonucleotide
  Sense strand starting at position 1901 of SEQ ID NO: 1577
gguggucagguugggaaau

SEQ ID NO: 123507 - RNA, 19 nt, Artificial Sequence
  Description of Artificial Sequence: Synthetic oligonucleotide
  Antisense strand to SEQ ID NO: 123506
auuucccaaccugaccacc

SEQ ID NO: 123508 - RNA, 19 nt, Artificial Sequence
  Description of Artificial Sequence: Synthetic oligonucleotide
  Sense strand starting at position 1912 of SEQ ID NO: 1577
ugggaaauuuagugagaag

SEQ ID NO: 123509 - RNA, 19 nt, Artificial Sequence
  Description of Artificial Sequence: Synthetic oligonucleotide
  Antisense strand to SEQ ID NO: 123508
cuucucacuaaauuuccca

SEQ ID NO: 123510 - RNA, 19 nt, Artificial Sequence
  Description of Artificial Sequence: Synthetic oligonucleotide
  Sense strand starting at position 1915 of SEQ ID NO: 1577
gaaauuuagugagaagccu

SEQ ID NO: 123511 - RNA, 19 nt, Artificial Sequence
  Description of Artificial Sequence: Synthetic oligonucleotide
  Antisense strand to SEQ ID NO: 123510
aggcuucucacuaaauuuc

SEQ ID NO: 123512 - RNA, 19 nt, Artificial Sequence
  Description of Artificial Sequence: Synthetic oligonucleotide
  Sense strand starting at position 1958 of SEQ ID NO: 1577
auguuauaaccuggcaaau

SEQ ID NO: 123513 - RNA, 19 nt, Artificial Sequence
  Description of Artificial Sequence: Synthetic oligonucleotide
  Antisense strand to SEQ ID NO: 123512
auuugccagguuauaacau

SEQ ID NO: 123514 - RNA, 19 nt, Artificial Sequence
  Description of Artificial Sequence: Synthetic oligonucleotide
  Sense strand starting at position 1971 of SEQ ID NO: 1577
gcaaaugggacgcaugaua

SEQ ID NO: 123515 - RNA, 19 nt, Artificial Sequence
  Description of Artificial Sequence: Synthetic oligonucleotide
  Antisense strand to SEQ ID NO: 123514
uaucaugcgucccauuugc

SEQ ID NO: 123516 - RNA, 19 nt, Artificial Sequence
  Description of Artificial Sequence: Synthetic oligonucleotide
  Sense strand starting at position 2004 of SEQ ID NO: 1577
ggaguagcuccugaguuuc

SEQ ID NO: 123517 - RNA, 19 nt, Artificial Sequence
  Description of Artificial Sequence: Synthetic oligonucleotide
  Antisense strand to SEQ ID NO: 123516
gaaacucaggagcuacucc

SEQ ID NO: 123518 - RNA, 19 nt, Artificial Sequence
  Description of Artificial Sequence: Synthetic oligonucleotide
  Sense strand starting at position 2122 of SEQ ID NO: 1577
cggaauuacuccucuaaug

SEQ ID NO: 123519 - RNA, 19 nt, Artificial Sequence
  Description of Artificial Sequence: Synthetic oligonucleotide
  Antisense strand to SEQ ID NO: 123518
cauuagaggaguaauuccg

SEQ ID NO: 123520 - RNA, 19 nt, Artificial Sequence
  Description of Artificial Sequence: Synthetic oligonucleotide
  Sense strand starting at position 2165 of SEQ ID NO: 1577
acccuuguagugggauaca

SEQ ID NO: 123521 - RNA, 19 nt, Artificial Sequence
  Description of Artificial Sequence: Synthetic oligonucleotide
  Antisense strand to SEQ ID NO: 123520
uguaucccacuacaagggu

SEQ ID NO: 123522 - RNA, 19 nt, Artificial Sequence
  Description of Artificial Sequence: Synthetic oligonucleotide
  Sense strand starting at position 2168 of SEQ ID NO: 1577
cuuguagugggauacagau

SEQ ID NO: 123523 - RNA, 19 nt, Artificial Sequence
  Description of Artificial Sequence: Synthetic oligonucleotide
  Antisense strand to SEQ ID NO: 123522
aucuguaucccacuacaag

SEQ ID NO: 123524 - RNA, 19 nt, Artificial Sequence
  Description of Artificial Sequence: Synthetic oligonucleotide
  Sense strand starting at position 2178 of SEQ ID NO: 1577
gauacagaucuguggucuu

SEQ ID NO: 123525 - RNA, 19 nt, Artificial Sequence
  Description of Artificial Sequence: Synthetic oligonucleotide
  Antisense strand to SEQ ID NO: 123524
aagaccacagaucuguauc

SEQ ID NO: 123526 - RNA, 19 nt, Artificial Sequence
  Description of Artificial Sequence: Synthetic oligonucleotide
  Sense strand starting at position 2404 of SEQ ID NO: 1577
gagugaucucagcaccaug

SEQ ID NO: 123527 - RNA, 19 nt, Artificial Sequence
  Description of Artificial Sequence: Synthetic oligonucleotide
  Antisense strand to SEQ ID NO: 123526
cauggugcugagaucacuc

SEQ ID NO: 123528 - RNA, 19 nt, Artificial Sequence
  Description of Artificial Sequence: Synthetic oligonucleotide
  Sense strand starting at position 2469 of SEQ ID NO: 1577
uuugauuucuuugucaagu

SEQ ID NO: 123529 - RNA, 19 nt, Artificial Sequence
  Description of Artificial Sequence: Synthetic oligonucleotide
  Antisense strand to SEQ ID NO: 123528
acuugacaaagaaaucaaa

SEQ ID NO: 123530 - RNA, 19 nt, Artificial Sequence
  Description of Artificial Sequence: Synthetic oligonucleotide
  Sense strand starting at position 2470 of SEQ ID NO: 1577
uugauuucuuugucaaguu

SEQ ID NO: 123531 - RNA, 19 nt, Artificial Sequence
  Description of Artificial Sequence: Synthetic oligonucleotide
  Antisense strand to SEQ ID NO: 123530
aacuugacaaagaaaucaa

SEQ ID NO: 123532 - RNA, 19 nt, Artificial Sequence
  Description of Artificial Sequence: Synthetic oligonucleotide
  Sense strand starting at position 2551 of SEQ ID NO: 1577
agcgacugacacgauuauu

SEQ ID NO: 123533 - RNA, 19 nt, Artificial Sequence
  Description of Artificial Sequence: Synthetic oligonucleotide
  Antisense strand to SEQ ID NO: 123532
aauaaucgugucagucgcu

SEQ ID NO: 123534 - RNA, 19 nt, Artificial Sequence
  Description of Artificial Sequence: Synthetic oligonucleotide
  Sense strand starting at position 3108 of SEQ ID NO: 1577
guguaugugcucuccucau

SEQ ID NO: 123535 - RNA, 19 nt, Artificial Sequence
  Description of Artificial Sequence: Synthetic oligonucleotide
  Antisense strand to SEQ ID NO: 123534
augaggagagcacauacac

SEQ ID NO: 123536 - RNA, 19 nt, Artificial Sequence
  Description of Artificial Sequence: Synthetic oligonucleotide
  Sense strand starting at position 3500 of SEQ ID NO: 1577
cccuuagcuccagaguuag

SEQ ID NO: 123537 - RNA, 19 nt, Artificial Sequence
  Description of Artificial Sequence: Synthetic oligonucleotide
  Antisense strand to SEQ ID NO: 123536
cuaacucuggagcuaaggg

SEQ ID NO: 123538 - RNA, 19 nt, Artificial Sequence
  Description of Artificial Sequence: Synthetic oligonucleotide
  Sense strand starting at position 3777 of SEQ ID NO: 1577
gcacuaucacuguagucca

SEQ ID NO: 123539 - RNA, 19 nt, Artificial Sequence
  Description of Artificial Sequence: Synthetic oligonucleotide
  Antisense strand to SEQ ID NO: 123538
uggacuacagugauagugc

SEQ ID NO: 123540 - RNA, 19 nt, Artificial Sequence
  Description of Artificial Sequence: Synthetic oligonucleotide
  Sense strand starting at position 3780 of SEQ ID NO: 1577
cuaucacuguaguccaaga

SEQ ID NO: 123541 - RNA, 19 nt, Artificial Sequence
  Description of Artificial Sequence: Synthetic oligonucleotide
  Antisense strand to SEQ ID NO: 123540
ucuuggacuacagugauag

SEQ ID NO: 123542 - RNA, 19 nt, Artificial Sequence
  Description of Artificial Sequence: Synthetic oligonucleotide
  Sense strand starting at position 3785 of SEQ ID NO: 1577
acuguaguccaagacacua

SEQ ID NO: 123543 - RNA, 19 nt, Artificial Sequence
  Description of Artificial Sequence: Synthetic oligonucleotide
  Antisense strand to SEQ ID NO: 123542
uagugucuuggacuacagu

SEQ ID NO: 123544 - RNA, 19 nt, Artificial Sequence
  Description of Artificial Sequence: Synthetic oligonucleotide
  Sense strand starting at position 3810 of SEQ ID NO: 1577
gugccuggaucacuacaau

SEQ ID NO: 123545 - RNA, 19 nt, Artificial Sequence
  Description of Artificial Sequence: Synthetic oligonucleotide
  Antisense strand to SEQ ID NO: 123544
auuguagugauccaggcac

SEQ ID NO: 123546 - RNA, 19 nt, Artificial Sequence
  Description of Artificial Sequence: Synthetic oligonucleotide
  Sense strand starting at position 3893 of SEQ ID NO: 1577
cagagugguuaucuuauuc

SEQ ID NO: 123547 - RNA, 19 nt, Artificial Sequence
  Description of Artificial Sequence: Synthetic oligonucleotide
  Antisense strand to SEQ ID NO: 123546
gaauaagauaaccacucug

SEQ ID NO: 123548 - RNA, 19 nt, Artificial Sequence
  Description of Artificial Sequence: Synthetic oligonucleotide
  Sense strand starting at position 3936 of SEQ ID NO: 1578
ccuaaagcgauguguagaa

SEQ ID NO: 123549 - RNA, 19 nt, Artificial Sequence
  Description of Artificial Sequence: Synthetic oligonucleotide
  Antisense strand to SEQ ID NO: 123548
uucuacacaucgcuuuagg

SEQ ID NO: 123550 - RNA, 19 nt, Artificial Sequence
  Description of Artificial Sequence: Synthetic oligonucleotide
  Sense strand starting at position 3934 of SEQ ID NO: 1578
agccuaaagcgauguguag

SEQ ID NO: 123551 - RNA, 19 nt, Artificial Sequence
  Description of Artificial Sequence: Synthetic oligonucleotide
  Antisense strand to SEQ ID NO: 123550
cuacacaucgcuuuaggcu

SEQ ID NO: 123552 - RNA, 19 nt, Artificial Sequence
  Description of Artificial Sequence: Synthetic oligonucleotide
  Sense strand starting at position 3799 of SEQ ID NO: 1578
auuuauugcgugcagaucu

SEQ ID NO: 123553 - RNA, 19 nt, Artificial Sequence
  Description of Artificial Sequence: Synthetic oligonucleotide
  Antisense strand to SEQ ID NO: 123552
agaucugcacgcaauaaau

SEQ ID NO: 123554 - RNA, 19 nt, Artificial Sequence
  Description of Artificial Sequence: Synthetic oligonucleotide
  Sense strand starting at position 3797 of SEQ ID NO: 1578
gcauuuauugcgugcagau

SEQ ID NO: 123555 - RNA, 19 nt, Artificial Sequence
  Description of Artificial Sequence: Synthetic oligonucleotide
  Antisense strand to SEQ ID NO: 123554
aucugcacgcaauaaaugc

SEQ ID NO: 123556 - RNA, 19 nt, Artificial Sequence
  Description of Artificial Sequence: Synthetic oligonucleotide
  Sense strand starting at position 3796 of SEQ ID NO: 1578
agcauuuauugcgugcaga

SEQ ID NO: 123557 - RNA, 19 nt, Artificial Sequence
  Description of Artificial Sequence: Synthetic oligonucleotide
  Antisense strand to SEQ ID NO: 123556
ucugcacgcaauaaaugcu

SEQ ID NO: 123558 - RNA, 19 nt, Artificial Sequence
  Description of Artificial Sequence: Synthetic oligonucleotide
  Sense strand starting at position 3680 of SEQ ID NO: 1578
ugaggugaguguucauguu

SEQ ID NO: 123559 - RNA, 19 nt, Artificial Sequence
  Description of Artificial Sequence: Synthetic oligonucleotide
  Antisense strand to SEQ ID NO: 123558
aacaugaacacucaccuca

SEQ ID NO: 123560 - RNA, 19 nt, Artificial Sequence
  Description of Artificial Sequence: Synthetic oligonucleotide
  Sense strand starting at position 3677 of SEQ ID NO: 1578
aagugaggugaguguucau

SEQ ID NO: 123561 - RNA, 19 nt, Artificial Sequence
  Description of Artificial Sequence: Synthetic oligonucleotide
  Antisense strand to SEQ ID NO: 123560
augaacacucaccucacuu

SEQ ID NO: 123562 - RNA, 19 nt, Artificial Sequence
  Description of Artificial Sequence: Synthetic oligonucleotide
  Sense strand starting at position 3647 of SEQ ID NO: 1578
gaugaaauuguauguaaag

SEQ ID NO: 123563 - RNA, 19 nt, Artificial Sequence
  Description of Artificial Sequence: Synthetic oligonucleotide
  Antisense strand to SEQ ID NO: 123562
cuuuacauacaauuucauc

SEQ ID NO: 123564 - RNA, 19 nt, Artificial Sequence
  Description of Artificial Sequence: Synthetic oligonucleotide
  Sense strand starting at position 3643 of SEQ ID NO: 1578
gauggaugaaauuguaugu

SEQ ID NO: 123565 - RNA, 19 nt, Artificial Sequence
  Description of Artificial Sequence: Synthetic oligonucleotide
  Antisense strand to SEQ ID NO: 123564
acauacaauuucauccauc

SEQ ID NO: 123566 - RNA, 19 nt, Artificial Sequence
  Description of Artificial Sequence: Synthetic oligonucleotide
  Sense strand starting at position 3558 of SEQ ID NO: 1578
cucaacauguuagaaauga

SEQ ID NO: 123567 - RNA, 19 nt, Artificial Sequence
  Description of Artificial Sequence: Synthetic oligonucleotide
  Antisense strand to SEQ ID NO: 123566
ucauuucuaacauguugag

SEQ ID NO: 123568 - RNA, 19 nt, Artificial Sequence
  Description of Artificial Sequence: Synthetic oligonucleotide
  Sense strand starting at position 3551 of SEQ ID NO: 1578
uuaguaucucaacauguua

SEQ ID NO: 123569 - RNA, 19 nt, Artificial Sequence
  Description of Artificial Sequence: Synthetic oligonucleotide
  Antisense strand to SEQ ID NO: 123568
uaacauguugagauacuaa

SEQ ID NO: 123570 - RNA, 19 nt, Artificial Sequence
  Description of Artificial Sequence: Synthetic oligonucleotide
  Sense strand starting at position 3546 of SEQ ID NO: 1578
ucaguuuaguaucucaaca

SEQ ID NO: 123571 - RNA, 19 nt, Artificial Sequence
  Description of Artificial Sequence: Synthetic oligonucleotide
  Antisense strand to SEQ ID NO: 123570
uguugagauacuaaacuga

SEQ ID NO: 123572 - RNA, 19 nt, Artificial Sequence
  Description of Artificial Sequence: Synthetic oligonucleotide
  Sense strand starting at position 3537 of SEQ ID NO: 1578
ucugaaagcucaguuuagu

SEQ ID NO: 123573 - RNA, 19 nt, Artificial Sequence
  Description of Artificial Sequence: Synthetic oligonucleotide
  Antisense strand to SEQ ID NO: 123572
acuaaacugagcuuucaga

SEQ ID NO: 123574 - RNA, 19 nt, Artificial Sequence
  Description of Artificial Sequence: Synthetic oligonucleotide
  Sense strand starting at position 3286 of SEQ ID NO: 1578
uaaagauggucuguguuag

SEQ ID NO: 123575 - RNA, 19 nt, Artificial Sequence
  Description of Artificial Sequence: Synthetic oligonucleotide
  Antisense strand to SEQ ID NO: 123574
cuaacacagaccaucuuua

SEQ ID NO: 123576 - RNA, 19 nt, Artificial Sequence
  Description of Artificial Sequence: Synthetic oligonucleotide
  Sense strand starting at position 3283 of SEQ ID NO: 1578
ugguaaagauggucugugu

SEQ ID NO: 123577 - RNA, 19 nt, Artificial Sequence
  Description of Artificial Sequence: Synthetic oligonucleotide
  Antisense strand to SEQ ID NO: 123576
acacagaccaucuuuacca

SEQ ID NO: 123578 - RNA, 19 nt, Artificial Sequence
  Description of Artificial Sequence: Synthetic oligonucleotide
  Sense strand starting at position 2841 of SEQ ID NO: 1578
ggucgaguccuggaguuug

SEQ ID NO: 123579 - RNA, 19 nt, Artificial Sequence
  Description of Artificial Sequence: Synthetic oligonucleotide
  Antisense strand to SEQ ID NO: 123578
caaacuccaggacucgacc

SEQ ID NO: 123580 - RNA, 19 nt, Artificial Sequence
  Description of Artificial Sequence: Synthetic oligonucleotide
  Sense strand starting at position 2840 of SEQ ID NO: 1578
gggucgaguccuggaguuu

SEQ ID NO: 123581 - RNA, 19 nt, Artificial Sequence
  Description of Artificial Sequence: Synthetic oligonucleotide
  Antisense strand to SEQ ID NO: 123580
aaacuccaggacucgaccc

SEQ ID NO: 123582 - RNA, 19 nt, Artificial Sequence
  Description of Artificial Sequence: Synthetic oligonucleotide
  Sense strand starting at position 2256 of SEQ ID NO: 1578
ggugcgcccggguuauaua

SEQ ID NO: 123583 - RNA, 19 nt, Artificial Sequence
  Description of Artificial Sequence: Synthetic oligonucleotide
  Antisense strand to SEQ ID NO: 123582
uauauaacccgggcgcacc

SEQ ID NO: 123584 - RNA, 19 nt, Artificial Sequence
  Description of Artificial Sequence: Synthetic oligonucleotide
  Sense strand starting at position 1240 of SEQ ID NO: 1578
ccugauacucuucgguaau

SEQ ID NO: 123585 - RNA, 19 nt, Artificial Sequence
  Description of Artificial Sequence: Synthetic oligonucleotide
  Antisense strand to SEQ ID NO: 123584
auuaccgaagaguaucagg

SEQ ID NO: 123586 - RNA, 19 nt, Artificial Sequence
  Description of Artificial Sequence: Synthetic oligonucleotide
  Sense strand starting at position 1239 of SEQ ID NO: 1578
uccugauacucuucgguaa

SEQ ID NO: 123587 - RNA, 19 nt, Artificial Sequence
  Description of Artificial Sequence: Synthetic oligonucleotide
  Antisense strand to SEQ ID NO: 123586
uuaccgaagaguaucagga

SEQ ID NO: 123588 - RNA, 19 nt, Artificial Sequence
  Description of Artificial Sequence: Synthetic oligonucleotide
  Sense strand starting at position 1154 of SEQ ID NO: 1578
acuggugaaugacaaacau

SEQ ID NO: 123589 - RNA, 19 nt, Artificial Sequence
  Description of Artificial Sequence: Synthetic oligonucleotide
  Antisense strand to SEQ ID NO: 123588
auguuugucauucaccagu

SEQ ID NO: 123590 - RNA, 19 nt, Artificial Sequence
  Description of Artificial Sequence: Synthetic oligonucleotide
  Sense strand starting at position 1151 of SEQ ID NO: 1578
gcaacuggugaaugacaaa

SEQ ID NO: 123591 - RNA, 19 nt, Artificial Sequence
  Description of Artificial Sequence: Synthetic oligonucleotide
  Antisense strand to SEQ ID NO: 123590
uuugucauucaccaguugc

SEQ ID NO: 123592 - RNA, 19 nt, Artificial Sequence
  Description of Artificial Sequence: Synthetic oligonucleotide
  Sense strand starting at position 1145 of SEQ ID NO: 1578
ggcaaagcaacuggugaau

SEQ ID NO: 123593 - RNA, 19 nt, Artificial Sequence
  Description of Artificial Sequence: Synthetic oligonucleotide
  Antisense strand to SEQ ID NO: 123592
auucaccaguugcuuugcc

SEQ ID NO: 123594 - RNA, 19 nt, Artificial Sequence
  Description of Artificial Sequence: Synthetic oligonucleotide
  Sense strand starting at position 1072 of SEQ ID NO: 1578
guaaguuucuaagugcucu

SEQ ID NO: 123595 - RNA, 19 nt, Artificial Sequence
  Description of Artificial Sequence: Synthetic oligonucleotide
  Antisense strand to SEQ ID NO: 123594
agagcacuuagaaacuuac

SEQ ID NO: 123596 - RNA, 19 nt, Artificial Sequence
  Description of Artificial Sequence: Synthetic oligonucleotide
  Sense strand starting at position 831 of SEQ ID NO: 1578
ccggcuuguuuaccuugaa

SEQ ID NO: 123597 - RNA, 19 nt, Artificial Sequence
  Description of Artificial Sequence: Synthetic oligonucleotide
  Antisense strand to SEQ ID NO: 123596
uucaagguaaacaagccgg

SEQ ID NO: 123598 - RNA, 19 nt, Artificial Sequence
  Description of Artificial Sequence: Synthetic oligonucleotide
  Sense strand starting at position 819 of SEQ ID NO: 1578
ugaaauuucucuccggcuu

SEQ ID NO: 123599 - RNA, 19 nt, Artificial Sequence
  Description of Artificial Sequence: Synthetic oligonucleotide
  Antisense strand to SEQ ID NO: 123598
aagccggagagaaauuuca

SEQ ID NO: 123600 - RNA, 19 nt, Artificial Sequence
  Description of Artificial Sequence: Synthetic oligonucleotide
  Sense strand starting at position 807 of SEQ ID NO: 1578
gcauucguaggaugaaauu

SEQ ID NO: 123601 - RNA, 19 nt, Artificial Sequence
  Description of Artificial Sequence: Synthetic oligonucleotide
  Antisense strand to SEQ ID NO: 123600
aauuucauccuacgaaugc

SEQ ID NO: 123602 - RNA, 19 nt, Artificial Sequence
  Description of Artificial Sequence: Synthetic oligonucleotide
  Sense strand starting at position 804 of SEQ ID NO: 1578
ggugcauucguaggaugaa

SEQ ID NO: 123603 - RNA, 19 nt, Artificial Sequence
  Description of Artificial Sequence: Synthetic oligonucleotide
  Antisense strand to SEQ ID NO: 123602
uucauccuacgaaugcacc

SEQ ID NO: 123604 - RNA, 19 nt, Artificial Sequence
  Description of Artificial Sequence: Synthetic oligonucleotide
  Sense strand starting at position 801 of SEQ ID NO: 1578
ccuggugcauucguaggau

SEQ ID NO: 123605 - RNA, 19 nt, Artificial Sequence
  Description of Artificial Sequence: Synthetic oligonucleotide
  Antisense strand to SEQ ID NO: 123604
auccuacgaaugcaccagg

SEQ ID NO: 123606 - RNA, 19 nt, Artificial Sequence
  Description of Artificial Sequence: Synthetic oligonucleotide
  Sense strand starting at position 746 of SEQ ID NO: 1578
aauuauuugucugacugag

SEQ ID NO: 123607 - RNA, 19 nt, Artificial Sequence
  Description of Artificial Sequence: Synthetic oligonucleotide
  Antisense strand to SEQ ID NO: 123606
cucagucagacaaauaauu

SEQ ID NO: 123608 - RNA, 19 nt, Artificial Sequence
  Description of Artificial Sequence: Synthetic oligonucleotide
  Sense strand starting at position 702 of SEQ ID NO: 1578
gguguagauuugcucaucu

SEQ ID NO: 123609 - RNA, 19 nt, Artificial Sequence
  Description of Artificial Sequence: Synthetic oligonucleotide
  Antisense strand to SEQ ID NO: 123608
agaugagcaaaucuacacc

SEQ ID NO: 123610 - RNA, 19 nt, Artificial Sequence
  Description of Artificial Sequence: Synthetic oligonucleotide
  Sense strand starting at position 494 of SEQ ID NO: 1578
agguaacuauuucguggaa

SEQ ID NO: 123611 - RNA, 19 nt, Artificial Sequence
  Description of Artificial Sequence: Synthetic oligonucleotide
  Antisense strand to SEQ ID NO: 123610
uuccacgaaauaguuaccu

SEQ ID NO: 123612 - RNA, 19 nt, Artificial Sequence
  Description of Artificial Sequence: Synthetic oligonucleotide
  Sense strand starting at position 477 of SEQ ID NO: 1578
auguguacggcauguaaag

SEQ ID NO: 123613 - RNA, 19 nt, Artificial Sequence
  Description of Artificial Sequence: Synthetic oligonucleotide
  Antisense strand to SEQ ID NO: 123612
cuuuacaugccguacacau

SEQ ID NO: 123614 - RNA, 19 nt, Artificial Sequence
  Description of Artificial Sequence: Synthetic oligonucleotide
  Sense strand starting at position 475 of SEQ ID NO: 1578
guauguguacggcauguaa

SEQ ID NO: 123615 - RNA, 19 nt, Artificial Sequence
  Description of Artificial Sequence: Synthetic oligonucleotide
  Antisense strand to SEQ ID NO: 123614
uuacaugccguacacauac

SEQ ID NO: 123616 - RNA, 19 nt, Artificial Sequence
  Description of Artificial Sequence: Synthetic oligonucleotide
  Sense strand starting at position 123 of SEQ ID NO: 1578
uuugguaaauuccugauau

SEQ ID NO: 123617 - RNA, 19 nt, Artificial Sequence
  Description of Artificial Sequence: Synthetic oligonucleotide
  Antisense strand to SEQ ID NO: 123616
auaucaggaauuuaccaaa

SEQ ID NO: 123618 - RNA, 19 nt, Artificial Sequence
  Description of Artificial Sequence: Synthetic oligonucleotide
  Sense strand starting at position 77 of SEQ ID NO: 1578
cuggaaaugucagagagaa

SEQ ID NO: 123619 - RNA, 19 nt, Artificial Sequence
  Description of Artificial Sequence: Synthetic oligonucleotide
  Antisense strand to SEQ ID NO: 123618
uucucucugacauuuccag

SEQ ID NO: 123620 - RNA, 19 nt, Artificial Sequence
  Description of Artificial Sequence: Synthetic oligonucleotide
  Sense strand starting at position 41 of SEQ ID NO: 1578
guuugugcuaaagagaaua

SEQ ID NO: 123621 - RNA, 19 nt, Artificial Sequence
  Description of Artificial Sequence: Synthetic oligonucleotide
  Antisense strand to SEQ ID NO: 123620
uauucucuuuagcacaaac

SEQ ID NO: 123622 - RNA, 19 nt, Artificial Sequence
  Description of Artificial Sequence: Synthetic oligonucleotide
  Sense strand starting at position 32 of SEQ ID NO: 1578
agcacugagguuugugcua

SEQ ID NO: 123623 - RNA, 19 nt, Artificial Sequence
  Description of Artificial Sequence: Synthetic oligonucleotide
  Antisense strand to SEQ ID NO: 123622
uagcacaaaccucagugcu

SEQ ID NO: 123624 - RNA, 19 nt, Artificial Sequence
  Description of Artificial Sequence: Synthetic oligonucleotide
  Sense strand starting at position 26 of SEQ ID NO: 1578
auaugaagcacugagguuu

SEQ ID NO: 123625 - RNA, 19 nt, Artificial Sequence
  Description of Artificial Sequence: Synthetic oligonucleotide
  Antisense strand to SEQ ID NO: 123624
aaaccucagugcuucauau

SEQ ID NO: 123626 - RNA, 19 nt, Artificial Sequence
  Description of Artificial Sequence: Synthetic oligonucleotide
  Sense strand starting at position 13 of SEQ ID NO: 1578
aggaacauaucauauauga

SEQ ID NO: 123627 - RNA, 19 nt, Artificial Sequence
  Description of Artificial Sequence: Synthetic oligonucleotide
  Antisense strand to SEQ ID NO: 123626
ucauauaugauauguuccu

SEQ ID NO: 123628 - RNA, 19 nt, Artificial Sequence
  Description of Artificial Sequence: Synthetic oligonucleotide
  Sense strand starting at position 25 of SEQ ID NO: 1579
ugacuuagcccuugagaca

SEQ ID NO: 123629 - RNA, 19 nt, Artificial Sequence
  Description of Artificial Sequence: Synthetic oligonucleotide
  Antisense strand to SEQ ID NO: 123628
ugucucaagggcuaaguca

SEQ ID NO: 123630 - RNA, 19 nt, Artificial Sequence
  Description of Artificial Sequence: Synthetic oligonucleotide
  Sense strand starting at position 26 of SEQ ID NO: 1579
gacuuagcccuugagacau

SEQ ID NO: 123631 - RNA, 19 nt, Artificial Sequence
  Description of Artificial Sequence: Synthetic oligonucleotide
  Antisense strand to SEQ ID NO: 123630
augucucaagggcuaaguc

SEQ ID NO: 123632 - RNA, 19 nt, Artificial Sequence
  Description of Artificial Sequence: Synthetic oligonucleotide
  Sense strand starting at position 166 of SEQ ID NO: 1579
uggucugucuuccugcaca

SEQ ID NO: 123633 - RNA, 19 nt, Artificial Sequence
  Description of Artificial Sequence: Synthetic oligonucleotide
  Antisense strand to SEQ ID NO: 123632
ugugcaggaagacagacca

SEQ ID NO: 123634 - RNA, 19 nt, Artificial Sequence
  Description of Artificial Sequence: Synthetic oligonucleotide
  Sense strand starting at position 498 of SEQ ID NO: 1579
gcaucuggucuccagaaga

SEQ ID NO: 123635 - RNA, 19 nt, Artificial Sequence
  Description of Artificial Sequence: Synthetic oligonucleotide
  Antisense strand to SEQ ID NO: 123634
ucuucuggagaccagaugc

SEQ ID NO: 123636 - RNA, 19 nt, Artificial Sequence
  Description of Artificial Sequence: Synthetic oligonucleotide
  Sense strand starting at position 779 of SEQ ID NO: 1579
uggucaaugucacuggaca

SEQ ID NO: 123637 - RNA, 19 nt, Artificial Sequence
  Description of Artificial Sequence: Synthetic oligonucleotide
  Antisense strand to SEQ ID NO: 123636
uguccagugacauugacca

SEQ ID NO: 123638 - RNA, 19 nt, Artificial Sequence
  Description of Artificial Sequence: Synthetic oligonucleotide
  Sense strand starting at position 780 of SEQ ID NO: 1579
ggucaaugucacuggacaa

SEQ ID NO: 123639 - RNA, 19 nt, Artificial Sequence
  Description of Artificial Sequence: Synthetic oligonucleotide
  Antisense strand to SEQ ID NO: 123638
uuguccagugacauugacc

SEQ ID NO: 123640 - RNA, 19 nt, Artificial Sequence
  Description of Artificial Sequence: Synthetic oligonucleotide
  Sense strand starting at position 781 of SEQ ID NO: 1579
gucaaugucacuggacaag

SEQ ID NO: 123641 - RNA, 19 nt, Artificial Sequence
  Description of Artificial Sequence: Synthetic oligonucleotide
  Antisense strand to SEQ ID NO: 123640
cuuguccagugacauugac

SEQ ID NO: 123642 - RNA, 19 nt, Artificial Sequence
  Description of Artificial Sequence: Synthetic oligonucleotide
  Sense strand starting at position 888 of SEQ ID NO: 1579
ggacgcuguacuggaaauu

SEQ ID NO: 123643 - RNA, 19 nt, Artificial Sequence
  Description of Artificial Sequence: Synthetic oligonucleotide
  Antisense strand to SEQ ID NO: 123642
aauuuccaguacagcgucc

SEQ ID NO: 123644 - RNA, 19 nt, Artificial Sequence
  Description of Artificial Sequence: Synthetic oligonucleotide
  Sense strand starting at position 1113 of SEQ ID NO: 1579
ggugacgauuuccaaguua

SEQ ID NO: 123645 - RNA, 19 nt, Artificial Sequence
  Description of Artificial Sequence: Synthetic oligonucleotide
  Antisense strand to SEQ ID NO: 123644
uaacuuggaaaucgucacc

SEQ ID NO: 123646 - RNA, 19 nt, Artificial Sequence
  Description of Artificial Sequence: Synthetic oligonucleotide
  Sense strand starting at position 1172 of SEQ ID NO: 1579
ccaaaugauagcuguguga

SEQ ID NO: 123647 - RNA, 19 nt, Artificial Sequence
  Description of Artificial Sequence: Synthetic oligonucleotide
  Antisense strand to SEQ ID NO: 123646
ucacacagcuaucauuugg

SEQ ID NO: 123648 - RNA, 19 nt, Artificial Sequence
  Description of Artificial Sequence: Synthetic oligonucleotide
  Sense strand starting at position 1185 of SEQ ID NO: 1579
gugugaugaugcgguguua

SEQ ID NO: 123649 - RNA, 19 nt, Artificial Sequence
  Description of Artificial Sequence: Synthetic oligonucleotide
  Antisense strand to SEQ ID NO: 123648
uaacaccgcaucaucacac

SEQ ID NO: 123650 - RNA, 19 nt, Artificial Sequence
  Description of Artificial Sequence: Synthetic oligonucleotide
  Sense strand starting at position 1197 of SEQ ID NO: 1579
gguguuacauuccuagaau

SEQ ID NO: 123651 - RNA, 19 nt, Artificial Sequence
  Description of Artificial Sequence: Synthetic oligonucleotide
  Antisense strand to SEQ ID NO: 123650
auucuaggaauguaacacc

SEQ ID NO: 123652 - RNA, 19 nt, Artificial Sequence
  Description of Artificial Sequence: Synthetic oligonucleotide
  Sense strand starting at position 1198 of SEQ ID NO: 1579
guguuacauuccuagaauc

SEQ ID NO: 123653 - RNA, 19 nt, Artificial Sequence
  Description of Artificial Sequence: Synthetic oligonucleotide
  Antisense strand to SEQ ID NO: 123652
gauucuaggaauguaacac

SEQ ID NO: 123654 - RNA, 19 nt, Artificial Sequence
  Description of Artificial Sequence: Synthetic oligonucleotide
  Sense strand starting at position 1328 of SEQ ID NO: 1579
gcugucuuugcacggcaaa

SEQ ID NO: 123655 - RNA, 19 nt, Artificial Sequence
  Description of Artificial Sequence: Synthetic oligonucleotide
  Antisense strand to SEQ ID NO: 123654
uuugccgugcaaagacagc

SEQ ID NO: 123656 - RNA, 19 nt, Artificial Sequence
  Description of Artificial Sequence: Synthetic oligonucleotide
  Sense strand starting at position 1508 of SEQ ID NO: 1579
aggcuauucucugagcuca

SEQ ID NO: 123657 - RNA, 19 nt, Artificial Sequence
  Description of Artificial Sequence: Synthetic oligonucleotide
  Antisense strand to SEQ ID NO: 123656
ugagcucagagaauagccu

SEQ ID NO: 123658 - RNA, 19 nt, Artificial Sequence
  Description of Artificial Sequence: Synthetic oligonucleotide
  Sense strand starting at position 2099 of SEQ ID NO: 1579
acaaauagauggcauuuga

SEQ ID NO: 123659 - RNA, 19 nt, Artificial Sequence
  Description of Artificial Sequence: Synthetic oligonucleotide
  Antisense strand to SEQ ID NO: 123658
ucaaaugccaucuauuugu

SEQ ID NO: 123660 - RNA, 19 nt, Artificial Sequence
  Description of Artificial Sequence: Synthetic oligonucleotide
  Sense strand starting at position 2358 of SEQ ID NO: 1579
ggcucaugugagggugagu

SEQ ID NO: 123661 - RNA, 19 nt, Artificial Sequence
  Description of Artificial Sequence: Synthetic oligonucleotide
  Antisense strand to SEQ ID NO: 123660
acucacccucacaugagcc

SEQ ID NO: 123662 - RNA, 19 nt, Artificial Sequence
  Description of Artificial Sequence: Synthetic oligonucleotide
  Sense strand starting at position 2567 of SEQ ID NO: 1579
ggcagcacguccugagaaa

SEQ ID NO: 123663 - RNA, 19 nt, Artificial Sequence
  Description of Artificial Sequence: Synthetic oligonucleotide
  Antisense strand to SEQ ID NO: 123662
uuucucaggacgugcugcc

SEQ ID NO: 123664 - RNA, 19 nt, Artificial Sequence
  Description of Artificial Sequence: Synthetic oligonucleotide
  Sense strand starting at position 2644 of SEQ ID NO: 1579
ccgagaagcuccugagagu

SEQ ID NO: 123665 - RNA, 19 nt, Artificial Sequence
  Description of Artificial Sequence: Synthetic oligonucleotide
  Antisense strand to SEQ ID NO: 123664
acucucaggagcuucucgg

SEQ ID NO: 123666 - RNA, 19 nt, Artificial Sequence
  Description of Artificial Sequence: Synthetic oligonucleotide
  Sense strand starting at position 2645 of SEQ ID NO: 1579
cgagaagcuccugagaguu

SEQ ID NO: 123667 - RNA, 19 nt, Artificial Sequence
  Description of Artificial Sequence: Synthetic oligonucleotide
  Antisense strand to SEQ ID NO: 123666
aacucucaggagcuucucg

SEQ ID NO: 123668 - RNA, 19 nt, Artificial Sequence
  Description of Artificial Sequence: Synthetic oligonucleotide
  Sense strand starting at position 2657 of SEQ ID NO: 1579
gagaguucagggcacgaua

SEQ ID NO: 123669 - RNA, 19 nt, Artificial Sequence
  Description of Artificial Sequence: Synthetic oligonucleotide
  Antisense strand to SEQ ID NO: 123668
uaucgugcccugaacucuc

SEQ ID NO: 123670 - RNA, 19 nt, Artificial Sequence
  Description of Artificial Sequence: Synthetic oligonucleotide
  Sense strand starting at position 2733 of SEQ ID NO: 1579
gugcaugccuggugccaua

SEQ ID NO: 123671 - RNA, 19 nt, Artificial Sequence
  Description of Artificial Sequence: Synthetic oligonucleotide
  Antisense strand to SEQ ID NO: 123670
uauggcaccaggcaugcac

SEQ ID NO: 123672 - RNA, 19 nt, Artificial Sequence
  Description of Artificial Sequence: Synthetic oligonucleotide
  Sense strand starting at position 2941 of SEQ ID NO: 1579
gaggcuguccugugugaac

SEQ ID NO: 123673 - RNA, 19 nt, Artificial Sequence
  Description of Artificial Sequence: Synthetic oligonucleotide
  Antisense strand to SEQ ID NO: 123672
guucacacaggacagccuc

SEQ ID NO: 123674 - RNA, 19 nt, Artificial Sequence
  Description of Artificial Sequence: Synthetic oligonucleotide
  Sense strand starting at position 2943 of SEQ ID NO: 1579
ggcuguccugugugaacgu

SEQ ID NO: 123675 - RNA, 19 nt, Artificial Sequence
  Description of Artificial Sequence: Synthetic oligonucleotide
  Antisense strand to SEQ ID NO: 123674
acguucacacaggacagcc

SEQ ID NO: 123676 - RNA, 19 nt, Artificial Sequence
  Description of Artificial Sequence: Synthetic oligonucleotide
  Sense strand starting at position 3027 of SEQ ID NO: 1579
cacggugcggcugugaaua

SEQ ID NO: 123677 - RNA, 19 nt, Artificial Sequence
  Description of Artificial Sequence: Synthetic oligonucleotide
  Antisense strand to SEQ ID NO: 123676
uauucacagccgcaccgug

SEQ ID NO: 123678 - RNA, 19 nt, Artificial Sequence
  Description of Artificial Sequence: Synthetic oligonucleotide
  Sense strand starting at position 3028 of SEQ ID NO: 1579
acggugcggcugugaauau

SEQ ID NO: 123679 - RNA, 19 nt, Artificial Sequence
  Description of Artificial Sequence: Synthetic oligonucleotide
  Antisense strand to SEQ ID NO: 123678
auauucacagccgcaccgu

SEQ ID NO: 123680 - RNA, 19 nt, Artificial Sequence
  Description of Artificial Sequence: Synthetic oligonucleotide
  Sense strand starting at position 3035 of SEQ ID NO: 1579
ggcugugaauaucugggaa

SEQ ID NO: 123681 - RNA, 19 nt, Artificial Sequence
  Description of Artificial Sequence: Synthetic oligonucleotide
  Antisense strand to SEQ ID NO: 123680
uucccagauauucacagcc

SEQ ID NO: 123682 - RNA, 19 nt, Artificial Sequence
  Description of Artificial Sequence: Synthetic oligonucleotide
  Sense strand starting at position 3037 of SEQ ID NO: 1579
cugugaauaucugggaaca

SEQ ID NO: 123683 - RNA, 19 nt, Artificial Sequence
  Description of Artificial Sequence: Synthetic oligonucleotide
  Antisense strand to SEQ ID NO: 123682
uguucccagauauucacag

SEQ ID NO: 123684 - RNA, 19 nt, Artificial Sequence
  Description of Artificial Sequence: Synthetic oligonucleotide
  Sense strand starting at position 3038 of SEQ ID NO: 1579
ugugaauaucugggaacau

SEQ ID NO: 123685 - RNA, 19 nt, Artificial Sequence
  Description of Artificial Sequence: Synthetic oligonucleotide
  Antisense strand to SEQ ID NO: 123684
auguucccagauauucaca

SEQ ID NO: 123686 - RNA, 19 nt, Artificial Sequence
  Description of Artificial Sequence: Synthetic oligonucleotide
  Sense strand starting at position 3039 of SEQ ID NO: 1579
gugaauaucugggaacauu

SEQ ID NO: 123687 - RNA, 19 nt, Artificial Sequence
  Description of Artificial Sequence: Synthetic oligonucleotide
  Antisense strand to SEQ ID NO: 123686
aauguucccagauauucac

SEQ ID NO: 123688 - RNA, 19 nt, Artificial Sequence
  Description of Artificial Sequence: Synthetic oligonucleotide
  Sense strand starting at position 3051 of SEQ ID NO: 1579
gaacauuccuuucggcgaa

SEQ ID NO: 123689 - RNA, 19 nt, Artificial Sequence
  Description of Artificial Sequence: Synthetic oligonucleotide
  Antisense strand to SEQ ID NO: 123688
uucgccgaaaggaauguuc

SEQ ID NO: 123690 - RNA, 19 nt, Artificial Sequence
  Description of Artificial Sequence: Synthetic oligonucleotide
  Sense strand starting at position 3063 of SEQ ID NO: 1579
cggcgaaccucucacauuu

SEQ ID NO: 123691 - RNA, 19 nt, Artificial Sequence
  Description of Artificial Sequence: Synthetic oligonucleotide
  Antisense strand to SEQ ID NO: 123690
aaaugugagagguucgccg

SEQ ID NO: 123692 - RNA, 19 nt, Artificial Sequence
  Description of Artificial Sequence: Synthetic oligonucleotide
  Sense strand starting at position 3390 of SEQ ID NO: 1579
gcugaugugcaauggcaaa

SEQ ID NO: 123693 - RNA, 19 nt, Artificial Sequence
  Description of Artificial Sequence: Synthetic oligonucleotide
  Antisense strand to SEQ ID NO: 123692
uuugccauugcacaucagc

SEQ ID NO: 123694 - RNA, 19 nt, Artificial Sequence
  Description of Artificial Sequence: Synthetic oligonucleotide
  Sense strand starting at position 3666 of SEQ ID NO: 1579
ggcauugacuucugugaga

SEQ ID NO: 123695 - RNA, 19 nt, Artificial Sequence
  Description of Artificial Sequence: Synthetic oligonucleotide
  Antisense strand to SEQ ID NO: 123694
ucucacagaagucaaugcc

SEQ ID NO: 123696 - RNA, 19 nt, Artificial Sequence
  Description of Artificial Sequence: Synthetic oligonucleotide
  Sense strand starting at position 3668 of SEQ ID NO: 1579
cauugacuucugugagagg

SEQ ID NO: 123697 - RNA, 19 nt, Artificial Sequence
  Description of Artificial Sequence: Synthetic oligonucleotide
  Antisense strand to SEQ ID NO: 123696
ccucucacagaagucaaug

SEQ ID NO: 123698 - RNA, 19 nt, Artificial Sequence
  Description of Artificial Sequence: Synthetic oligonucleotide
  Sense strand starting at position 3669 of SEQ ID NO: 1579
auugacuucugugagaggu

SEQ ID NO: 123699 - RNA, 19 nt, Artificial Sequence
  Description of Artificial Sequence: Synthetic oligonucleotide
  Antisense strand to SEQ ID NO: 123698
accucucacagaagucaau

SEQ ID NO: 123700 - RNA, 19 nt, Artificial Sequence
  Description of Artificial Sequence: Synthetic oligonucleotide
  Sense strand starting at position 3924 of SEQ ID NO: 1579
acgagcugucacuggaguu

SEQ ID NO: 123701 - RNA, 19 nt, Artificial Sequence
  Description of Artificial Sequence: Synthetic oligonucleotide
  Antisense strand to SEQ ID NO: 123700
aacuccagugacagcucgu

SEQ ID NO: 123702 - RNA, 19 nt, Artificial Sequence
  Description of Artificial Sequence: Synthetic oligonucleotide
  Sense strand starting at position 72 of SEQ ID NO: 1580
gcagacagucugcgaagaa

SEQ ID NO: 123703 - RNA, 19 nt, Artificial Sequence
  Description of Artificial Sequence: Synthetic oligonucleotide
  Antisense strand to SEQ ID NO: 123702
uucuucgcagacugucugc

SEQ ID NO: 123704 - RNA, 19 nt, Artificial Sequence
  Description of Artificial Sequence: Synthetic oligonucleotide
  Sense strand starting at position 73 of SEQ ID NO: 1580
cagacagucugcgaagaau

SEQ ID NO: 123705 - RNA, 19 nt, Artificial Sequence
  Description of Artificial Sequence: Synthetic oligonucleotide
  Antisense strand to SEQ ID NO: 123704
auucuucgcagacugucug

SEQ ID NO: 123706 - RNA, 19 nt, Artificial Sequence
  Description of Artificial Sequence: Synthetic oligonucleotide
  Sense strand starting at position 84 of SEQ ID NO: 1580
cgaagaaucucccaccugu

SEQ ID NO: 123707 - RNA, 19 nt, Artificial Sequence
  Description of Artificial Sequence: Synthetic oligonucleotide
  Antisense strand to SEQ ID NO: 123706
acaggugggagauucuucg

SEQ ID NO: 123708 - RNA, 19 nt, Artificial Sequence
  Description of Artificial Sequence: Synthetic oligonucleotide
  Sense strand starting at position 106 of SEQ ID NO: 1580
caucucuugcuccgggauu

SEQ ID NO: 123709 - RNA, 19 nt, Artificial Sequence
  Description of Artificial Sequence: Synthetic oligonucleotide
  Antisense strand to SEQ ID NO: 123708
aaucccggagcaagagaug

SEQ ID NO: 123710 - RNA, 19 nt, Artificial Sequence
  Description of Artificial Sequence: Synthetic oligonucleotide
  Sense strand starting at position 132 of SEQ ID NO: 1580
gcaacuguucuagggccua

SEQ ID NO: 123711 - RNA, 19 nt, Artificial Sequence
  Description of Artificial Sequence: Synthetic oligonucleotide
  Antisense strand to SEQ ID NO: 123710
uaggcccuagaacaguugc

SEQ ID NO: 123712 - RNA, 19 nt, Artificial Sequence
  Description of Artificial Sequence: Synthetic oligonucleotide
  Sense strand starting at position 246 of SEQ ID NO: 1580
ugaggucuuucuggaaucu

SEQ ID NO: 123713 - RNA, 19 nt, Artificial Sequence
  Description of Artificial Sequence: Synthetic oligonucleotide
  Antisense strand to SEQ ID NO: 123712
agauuccagaaagaccuca

SEQ ID NO: 123714 - RNA, 19 nt, Artificial Sequence
  Description of Artificial Sequence: Synthetic oligonucleotide
  Sense strand starting at position 269 of SEQ ID NO: 1580
uugcucaucuaucagaaga

SEQ ID NO: 123715 - RNA, 19 nt, Artificial Sequence
  Description of Artificial Sequence: Synthetic oligonucleotide
  Antisense strand to SEQ ID NO: 123714
ucuucugauagaugagcaa

SEQ ID NO: 123716 - RNA, 19 nt, Artificial Sequence
  Description of Artificial Sequence: Synthetic oligonucleotide
  Sense strand starting at position 271 of SEQ ID NO: 1580
gcucaucuaucagaagagu

SEQ ID NO: 123717 - RNA, 19 nt, Artificial Sequence
  Description of Artificial Sequence: Synthetic oligonucleotide
  Antisense strand to SEQ ID NO: 123716
acucuucugauagaugagc

SEQ ID NO: 123718 - RNA, 19 nt, Artificial Sequence
  Description of Artificial Sequence: Synthetic oligonucleotide
  Sense strand starting at position 488 of SEQ ID NO: 1580
cuggcuguccucugauauu

SEQ ID NO: 123719 - RNA, 19 nt, Artificial Sequence
  Description of Artificial Sequence: Synthetic oligonucleotide
  Antisense strand to SEQ ID NO: 123718
aauaucagaggacagccag

SEQ ID NO: 123720 - RNA, 19 nt, Artificial Sequence
  Description of Artificial Sequence: Synthetic oligonucleotide
  Sense strand starting at position 491 of SEQ ID NO: 1580
gcuguccucugauauuuac

SEQ ID NO: 123721 - RNA, 19 nt, Artificial Sequence
  Description of Artificial Sequence: Synthetic oligonucleotide
  Antisense strand to SEQ ID NO: 123720
guaaauaucagaggacagc

SEQ ID NO: 123722 - RNA, 19 nt, Artificial Sequence
  Description of Artificial Sequence: Synthetic oligonucleotide
  Sense strand starting at position 589 of SEQ ID NO: 1580
aaacguucugcugggaguu

SEQ ID NO: 123723 - RNA, 19 nt, Artificial Sequence
  Description of Artificial Sequence: Synthetic oligonucleotide
  Antisense strand to SEQ ID NO: 123722
aacucccagcagaacguuu

SEQ ID NO: 123724 - RNA, 19 nt, Artificial Sequence
  Description of Artificial Sequence: Synthetic oligonucleotide
  Sense strand starting at position 857 of SEQ ID NO: 1580
ucaccauguuguguagacu

SEQ ID NO: 123725 - RNA, 19 nt, Artificial Sequence
  Description of Artificial Sequence: Synthetic oligonucleotide
  Antisense strand to SEQ ID NO: 123724
agucuacacaacaugguga

SEQ ID NO: 123726 - RNA, 19 nt, Artificial Sequence
  Description of Artificial Sequence: Synthetic oligonucleotide
  Sense strand starting at position 866 of SEQ ID NO: 1580
uguguagacuggucucgaa

SEQ ID NO: 123727 - RNA, 19 nt, Artificial Sequence
  Description of Artificial Sequence: Synthetic oligonucleotide
  Antisense strand to SEQ ID NO: 123726
uucgagaccagucuacaca

SEQ ID NO: 123728 - RNA, 19 nt, Artificial Sequence
  Description of Artificial Sequence: Synthetic oligonucleotide
  Sense strand starting at position 1244 of SEQ ID NO: 1580
ggugcugcuucauugagua

SEQ ID NO: 123729 - RNA, 19 nt, Artificial Sequence
  Description of Artificial Sequence: Synthetic oligonucleotide
  Antisense strand to SEQ ID NO: 123728
uacucaaugaagcagcacc

SEQ ID NO: 123730 - RNA, 19 nt, Artificial Sequence
  Description of Artificial Sequence: Synthetic oligonucleotide
  Sense strand starting at position 1354 of SEQ ID NO: 1580
gcugcucaggccuaggaaa

SEQ ID NO: 123731 - RNA, 19 nt, Artificial Sequence
  Description of Artificial Sequence: Synthetic oligonucleotide
  Antisense strand to SEQ ID NO: 123730
uuuccuaggccugagcagc

SEQ ID NO: 123732 - RNA, 19 nt, Artificial Sequence
  Description of Artificial Sequence: Synthetic oligonucleotide
  Sense strand starting at position 2403 of SEQ ID NO: 1580
ucgcuugggucuucgggaa

SEQ ID NO: 123733 - RNA, 19 nt, Artificial Sequence
  Description of Artificial Sequence: Synthetic oligonucleotide
  Antisense strand to SEQ ID NO: 123732
uucccgaagacccaagcga

SEQ ID NO: 123734 - RNA, 19 nt, Artificial Sequence
  Description of Artificial Sequence: Synthetic oligonucleotide
  Sense strand starting at position 2583 of SEQ ID NO: 1580
cccaguaauccugcgcgaa

SEQ ID NO: 123735 - RNA, 19 nt, Artificial Sequence
  Description of Artificial Sequence: Synthetic oligonucleotide
  Antisense strand to SEQ ID NO: 123734
uucgcgcaggauuacuggg

SEQ ID NO: 123736 - RNA, 19 nt, Artificial Sequence
  Description of Artificial Sequence: Synthetic oligonucleotide
  Sense strand starting at position 2584 of SEQ ID NO: 1580
ccaguaauccugcgcgaaa

SEQ ID NO: 123737 - RNA, 19 nt, Artificial Sequence
  Description of Artificial Sequence: Synthetic oligonucleotide
  Antisense strand to SEQ ID NO: 123736
uuucgcgcaggauuacugg

SEQ ID NO: 123738 - RNA, 19 nt, Artificial Sequence
  Description of Artificial Sequence: Synthetic oligonucleotide
  Sense strand starting at position 3004 of SEQ ID NO: 1580
gcaggagaugccugguaca

SEQ ID NO: 123739 - RNA, 19 nt, Artificial Sequence
  Description of Artificial Sequence: Synthetic oligonucleotide
  Antisense strand to SEQ ID NO: 123738
uguaccaggcaucuccugc

SEQ ID NO: 123740 - RNA, 19 nt, Artificial Sequence
  Description of Artificial Sequence: Synthetic oligonucleotide
  Sense strand starting at position 3007 of SEQ ID NO: 1580
ggagaugccugguacauac

SEQ ID NO: 123741 - RNA, 19 nt, Artificial Sequence
  Description of Artificial Sequence: Synthetic oligonucleotide
  Antisense strand to SEQ ID NO: 123740
guauguaccaggcaucucc

SEQ ID NO: 123742 - RNA, 19 nt, Artificial Sequence
  Description of Artificial Sequence: Synthetic oligonucleotide
  Sense strand starting at position 3093 of SEQ ID NO: 1580
uggagaguccugcaggauu

SEQ ID NO: 123743 - RNA, 19 nt, Artificial Sequence
  Description of Artificial Sequence: Synthetic oligonucleotide
  Antisense strand to SEQ ID NO: 123742
aauccugcaggacucucca

SEQ ID NO: 123744 - RNA, 19 nt, Artificial Sequence
  Description of Artificial Sequence: Synthetic oligonucleotide
  Sense strand starting at position 3213 of SEQ ID NO: 1580
agcucagcugugggaucau

SEQ ID NO: 123745 - RNA, 19 nt, Artificial Sequence
  Description of Artificial Sequence: Synthetic oligonucleotide
  Antisense strand to SEQ ID NO: 123744
augaucccacagcugagcu

SEQ ID NO: 123746 - RNA, 19 nt, Artificial Sequence
  Description of Artificial Sequence: Synthetic oligonucleotide
  Sense strand starting at position 3510 of SEQ ID NO: 1580
gaucauguguucuggucaa

SEQ ID NO: 123747 - RNA, 19 nt, Artificial Sequence
  Description of Artificial Sequence: Synthetic oligonucleotide
  Antisense strand to SEQ ID NO: 123746
uugaccagaacacaugauc

SEQ ID NO: 123748 - RNA, 19 nt, Artificial Sequence
  Description of Artificial Sequence: Synthetic oligonucleotide
  Sense strand starting at position 3514 of SEQ ID NO: 1580
auguguucuggucaaugcu

SEQ ID NO: 123749 - RNA, 19 nt, Artificial Sequence
  Description of Artificial Sequence: Synthetic oligonucleotide
  Antisense strand to SEQ ID NO: 123748
agcauugaccagaacacau

SEQ ID NO: 123750 - RNA, 19 nt, Artificial Sequence
  Description of Artificial Sequence: Synthetic oligonucleotide
  Sense strand starting at position 3520 of SEQ ID NO: 1580
ucuggucaaugcuuagaua

SEQ ID NO: 123751 - RNA, 19 nt, Artificial Sequence
  Description of Artificial Sequence: Synthetic oligonucleotide
  Antisense strand to SEQ ID NO: 123750
uaucuaagcauugaccaga

SEQ ID NO: 123752 - RNA, 19 nt, Artificial Sequence
  Description of Artificial Sequence: Synthetic oligonucleotide
  Sense strand starting at position 3521 of SEQ ID NO: 1580
cuggucaaugcuuagauaa

SEQ ID NO: 123753 - RNA, 19 nt, Artificial Sequence
  Description of Artificial Sequence: Synthetic oligonucleotide
  Antisense strand to SEQ ID NO: 123752
uuaucuaagcauugaccag

SEQ ID NO: 123754 - RNA, 19 nt, Artificial Sequence
  Description of Artificial Sequence: Synthetic oligonucleotide
  Sense strand starting at position 3523 of SEQ ID NO: 1580
ggucaaugcuuagauaaca

SEQ ID NO: 123755 - RNA, 19 nt, Artificial Sequence
  Description of Artificial Sequence: Synthetic oligonucleotide
  Antisense strand to SEQ ID NO: 123754
uguuaucuaagcauugacc

SEQ ID NO: 123756 - RNA, 19 nt, Artificial Sequence
  Description of Artificial Sequence: Synthetic oligonucleotide
  Sense strand starting at position 3582 of SEQ ID NO: 1580
gucugauucugaggaggag

SEQ ID NO: 123757 - RNA, 19 nt, Artificial Sequence
  Description of Artificial Sequence: Synthetic oligonucleotide
  Antisense strand to SEQ ID NO: 123756
cuccuccucagaaucagac

SEQ ID NO: 123758 - RNA, 19 nt, Artificial Sequence
  Description of Artificial Sequence: Synthetic oligonucleotide
  Sense strand starting at position 17 of SEQ ID NO: 1582
gggaauaaccugugguaua

SEQ ID NO: 123759 - RNA, 19 nt, Artificial Sequence
  Description of Artificial Sequence: Synthetic oligonucleotide
  Antisense strand to SEQ ID NO: 123758
uauaccacagguuauuccc

SEQ ID NO: 123760 - RNA, 19 nt, Artificial Sequence
  Description of Artificial Sequence: Synthetic oligonucleotide
  Sense strand starting at position 20 of SEQ ID NO: 1582
aauaaccugugguauagaa

SEQ ID NO: 123761 - RNA, 19 nt, Artificial Sequence
  Description of Artificial Sequence: Synthetic oligonucleotide
  Antisense strand to SEQ ID NO: 123760
uucuauaccacagguuauu

SEQ ID NO: 123762 - RNA, 19 nt, Artificial Sequence
  Description of Artificial Sequence: Synthetic oligonucleotide
  Sense strand starting at position 28 of SEQ ID NO: 1582
gugguauagaagcacaauu

SEQ ID NO: 123763 - RNA, 19 nt, Artificial Sequence
  Description of Artificial Sequence: Synthetic oligonucleotide
  Antisense strand to SEQ ID NO: 123762
aauugugcuucuauaccac

SEQ ID NO: 123764 - RNA, 19 nt, Artificial Sequence
  Description of Artificial Sequence: Synthetic oligonucleotide
  Sense strand starting at position 123 of SEQ ID NO: 1582
uuugauauucuccgauagu

SEQ ID NO: 123765 - RNA, 19 nt, Artificial Sequence
  Description of Artificial Sequence: Synthetic oligonucleotide
  Antisense strand to SEQ ID NO: 123764
acuaucggagaauaucaaa

SEQ ID NO: 123766 - RNA, 19 nt, Artificial Sequence
  Description of Artificial Sequence: Synthetic oligonucleotide
  Sense strand starting at position 126 of SEQ ID NO: 1582
gauauucuccgauaguuua

SEQ ID NO: 123767 - RNA, 19 nt, Artificial Sequence
  Description of Artificial Sequence: Synthetic oligonucleotide
  Antisense strand to SEQ ID NO: 123766
uaaacuaucggagaauauc

SEQ ID NO: 123768 - RNA, 19 nt, Artificial Sequence
  Description of Artificial Sequence: Synthetic oligonucleotide
  Sense strand starting at position 129 of SEQ ID NO: 1582
auucuccgauaguuuaaga

SEQ ID NO: 123769 - RNA, 19 nt, Artificial Sequence
  Description of Artificial Sequence: Synthetic oligonucleotide
  Antisense strand to SEQ ID NO: 123768
ucuuaaacuaucggagaau

SEQ ID NO: 123770 - RNA, 19 nt, Artificial Sequence
  Description of Artificial Sequence: Synthetic oligonucleotide
  Sense strand starting at position 164 of SEQ ID NO: 1582
ccaagugacugaucaagac

SEQ ID NO: 123771 - RNA, 19 nt, Artificial Sequence
  Description of Artificial Sequence: Synthetic oligonucleotide
  Antisense strand to SEQ ID NO: 123770
gucuugaucagucacuugg

SEQ ID NO: 123772 - RNA, 19 nt, Artificial Sequence
  Description of Artificial Sequence: Synthetic oligonucleotide
  Sense strand starting at position 182 of SEQ ID NO: 1582
cuuauauacucuggaaaga

SEQ ID NO: 123773 - RNA, 19 nt, Artificial Sequence
  Description of Artificial Sequence: Synthetic oligonucleotide
  Antisense strand to SEQ ID NO: 123772
ucuuuccagaguauauaag

SEQ ID NO: 123774 - RNA, 19 nt, Artificial Sequence
  Description of Artificial Sequence: Synthetic oligonucleotide
  Sense strand starting at position 358 of SEQ ID NO: 1582
cauugucacaggcgaagua

SEQ ID NO: 123775 - RNA, 19 nt, Artificial Sequence
  Description of Artificial Sequence: Synthetic oligonucleotide
  Antisense strand to SEQ ID NO: 123774
uacuucgccugugacaaug

SEQ ID NO: 123776 - RNA, 19 nt, Artificial Sequence
  Description of Artificial Sequence: Synthetic oligonucleotide
  Sense strand starting at position 381 of SEQ ID NO: 1582
gcucgauugaggugacuaa

SEQ ID NO: 123777 - RNA, 19 nt, Artificial Sequence
  Description of Artificial Sequence: Synthetic oligonucleotide
  Antisense strand to SEQ ID NO: 123776
uuagucaccucaaucgagc

SEQ ID NO: 123778 - RNA, 19 nt, Artificial Sequence
  Description of Artificial Sequence: Synthetic oligonucleotide
  Sense strand starting at position 388 of SEQ ID NO: 1582
ugaggugacuaacagugau

SEQ ID NO: 123779 - RNA, 19 nt, Artificial Sequence
  Description of Artificial Sequence: Synthetic oligonucleotide
  Antisense strand to SEQ ID NO: 123778
aucacuguuagucaccuca

SEQ ID NO: 123780 - RNA, 19 nt, Artificial Sequence
  Description of Artificial Sequence: Synthetic oligonucleotide
  Sense strand starting at position 391 of SEQ ID NO: 1582
ggugacuaacagugaugca

SEQ ID NO: 123781 - RNA, 19 nt, Artificial Sequence
  Description of Artificial Sequence: Synthetic oligonucleotide
  Antisense strand to SEQ ID NO: 123780
ugcaucacuguuagucacc

SEQ ID NO: 123782 - RNA, 19 nt, Artificial Sequence
  Description of Artificial Sequence: Synthetic oligonucleotide
  Sense strand starting at position 417 of SEQ ID NO: 1582
aggacaacaucugauaggu

SEQ ID NO: 123783 - RNA, 19 nt, Artificial Sequence
  Description of Artificial Sequence: Synthetic oligonucleotide
  Antisense strand to SEQ ID NO: 123782
accuaucagauguuguccu

SEQ ID NO: 123784 - RNA, 19 nt, Artificial Sequence
  Description of Artificial Sequence: Synthetic oligonucleotide
  Sense strand starting at position 419 of SEQ ID NO: 1582
gacaacaucugauagguga

SEQ ID NO: 123785 - RNA, 19 nt, Artificial Sequence
  Description of Artificial Sequence: Synthetic oligonucleotide
  Antisense strand to SEQ ID NO: 123784
ucaccuaucagauguuguc

SEQ ID NO: 123786 - RNA, 19 nt, Artificial Sequence
  Description of Artificial Sequence: Synthetic oligonucleotide
  Sense strand starting at position 471 of SEQ ID NO: 1582
gaguuacccaggcguagaa

SEQ ID NO: 123787 - RNA, 19 nt, Artificial Sequence
  Description of Artificial Sequence: Synthetic oligonucleotide
  Antisense strand to SEQ ID NO: 123786
uucuacgccuggguaacuc

SEQ ID NO: 123788 - RNA, 19 nt, Artificial Sequence
  Description of Artificial Sequence: Synthetic oligonucleotide
  Sense strand starting at position 1192 of SEQ ID NO: 1582
uggcucuccaguugucgaa

SEQ ID NO: 123789 - RNA, 19 nt, Artificial Sequence
  Description of Artificial Sequence: Synthetic oligonucleotide
  Antisense strand to SEQ ID NO: 123788
uucgacaacuggagagcca

SEQ ID NO: 123790 - RNA, 19 nt, Artificial Sequence
  Description of Artificial Sequence: Synthetic oligonucleotide
  Sense strand starting at position 1204 of SEQ ID NO: 1582
ugucgaaucuguuucugua

SEQ ID NO: 123791 - RNA, 19 nt, Artificial Sequence
  Description of Artificial Sequence: Synthetic oligonucleotide
  Antisense strand to SEQ ID NO: 123790
uacagaaacagauucgaca

SEQ ID NO: 123792 - RNA, 19 nt, Artificial Sequence
  Description of Artificial Sequence: Synthetic oligonucleotide
  Sense strand starting at position 1487 of SEQ ID NO: 1582
gggagcacuauugaauguu

SEQ ID NO: 123793 - RNA, 19 nt, Artificial Sequence
  Description of Artificial Sequence: Synthetic oligonucleotide
  Antisense strand to SEQ ID NO: 123792
aacauucaauagugcuccc

SEQ ID NO: 123794 - RNA, 19 nt, Artificial Sequence
  Description of Artificial Sequence: Synthetic oligonucleotide
  Sense strand starting at position 1496 of SEQ ID NO: 1582
auugaauguugagcaaauu

SEQ ID NO: 123795 - RNA, 19 nt, Artificial Sequence
  Description of Artificial Sequence: Synthetic oligonucleotide
  Antisense strand to SEQ ID NO: 123794
aauuugcucaacauucaau

SEQ ID NO: 123796 - RNA, 19 nt, Artificial Sequence
  Description of Artificial Sequence: Synthetic oligonucleotide
  Sense strand starting at position 1497 of SEQ ID NO: 1582
uugaauguugagcaaauua

SEQ ID NO: 123797 - RNA, 19 nt, Artificial Sequence
  Description of Artificial Sequence: Synthetic oligonucleotide
  Antisense strand to SEQ ID NO: 123796
uaauuugcucaacauucaa

SEQ ID NO: 123798 - RNA, 19 nt, Artificial Sequence
  Description of Artificial Sequence: Synthetic oligonucleotide
  Sense strand starting at position 1574 of SEQ ID NO: 1582
agcacaucagcgugagcau

SEQ ID NO: 123799 - RNA, 19 nt, Artificial Sequence
  Description of Artificial Sequence: Synthetic oligonucleotide
  Antisense strand to SEQ ID NO: 123798
augcucacgcugaugugcu

SEQ ID NO: 123800 - RNA, 19 nt, Artificial Sequence
  Description of Artificial Sequence: Synthetic oligonucleotide
  Sense strand starting at position 1586 of SEQ ID NO: 1582
ugagcauguacgugaucga

SEQ ID NO: 123801 - RNA, 19 nt, Artificial Sequence
  Description of Artificial Sequence: Synthetic oligonucleotide
  Antisense strand to SEQ ID NO: 123800
ucgaucacguacaugcuca

SEQ ID NO: 123802 - RNA, 19 nt, Artificial Sequence
  Description of Artificial Sequence: Synthetic oligonucleotide
  Sense strand starting at position 1587 of SEQ ID NO: 1582
gagcauguacgugaucgau

SEQ ID NO: 123803 - RNA, 19 nt, Artificial Sequence
  Description of Artificial Sequence: Synthetic oligonucleotide
  Antisense strand to SEQ ID NO: 123802
aucgaucacguacaugcuc

SEQ ID NO: 123804 - RNA, 19 nt, Artificial Sequence
  Description of Artificial Sequence: Synthetic oligonucleotide
  Sense strand starting at position 1589 of SEQ ID NO: 1582
gcauguacgugaucgauga

SEQ ID NO: 123805 - RNA, 19 nt, Artificial Sequence
  Description of Artificial Sequence: Synthetic oligonucleotide
  Antisense strand to SEQ ID NO: 123804
ucaucgaucacguacaugc

SEQ ID NO: 123806 - RNA, 19 nt, Artificial Sequence
  Description of Artificial Sequence: Synthetic oligonucleotide
  Sense strand starting at position 1806 of SEQ ID NO: 1582
gcgaaugcuccucauucca

SEQ ID NO: 123807 - RNA, 19 nt, Artificial Sequence
  Description of Artificial Sequence: Synthetic oligonucleotide
  Antisense strand to SEQ ID NO: 123806
uggaaugaggagcauucgc

SEQ ID NO: 123808 - RNA, 19 nt, Artificial Sequence
  Description of Artificial Sequence: Synthetic oligonucleotide
  Sense strand starting at position 1838 of SEQ ID NO: 1582
aggacacugucggucuuau

SEQ ID NO: 123809 - RNA, 19 nt, Artificial Sequence
  Description of Artificial Sequence: Synthetic oligonucleotide
  Antisense strand to SEQ ID NO: 123808
auaagaccgacaguguccu

SEQ ID NO: 123810 - RNA, 19 nt, Artificial Sequence
  Description of Artificial Sequence: Synthetic oligonucleotide
  Sense strand starting at position 2030 of SEQ ID NO: 1582
cugacuucgccucacuaga

SEQ ID NO: 123811 - RNA, 19 nt, Artificial Sequence
  Description of Artificial Sequence: Synthetic oligonucleotide
  Antisense strand to SEQ ID NO: 123810
ucuagugaggcgaagucag

SEQ ID NO: 123812 - RNA, 19 nt, Artificial Sequence
  Description of Artificial Sequence: Synthetic oligonucleotide
  Sense strand starting at position 2046 of SEQ ID NO: 1582
agagucuuccucuguccau

SEQ ID NO: 123813 - RNA, 19 nt, Artificial Sequence
  Description of Artificial Sequence: Synthetic oligonucleotide
  Antisense strand to SEQ ID NO: 123812
auggacagaggaagacucu

SEQ ID NO: 123814 - RNA, 19 nt, Artificial Sequence
  Description of Artificial Sequence: Synthetic oligonucleotide
  Sense strand starting at position 2289 of SEQ ID NO: 1582
gcggaauuucaggacgcga

SEQ ID NO: 123815 - RNA, 19 nt, Artificial Sequence
  Description of Artificial Sequence: Synthetic oligonucleotide
  Antisense strand to SEQ ID NO: 123814
ucgcguccugaaauuccgc

SEQ ID NO: 123816 - RNA, 19 nt, Artificial Sequence
  Description of Artificial Sequence: Synthetic oligonucleotide
  Sense strand starting at position 2322 of SEQ ID NO: 1582
gagccuccaucuguguauu

SEQ ID NO: 123817 - RNA, 19 nt, Artificial Sequence
  Description of Artificial Sequence: Synthetic oligonucleotide
  Antisense strand to SEQ ID NO: 123816
aauacacagauggaggcuc

SEQ ID NO: 123818 - RNA, 19 nt, Artificial Sequence
  Description of Artificial Sequence: Synthetic oligonucleotide
  Sense strand starting at position 2323 of SEQ ID NO: 1582
agccuccaucuguguauua

SEQ ID NO: 123819 - RNA, 19 nt, Artificial Sequence
  Description of Artificial Sequence: Synthetic oligonucleotide
  Antisense strand to SEQ ID NO: 123818
uaauacacagauggaggcu

SEQ ID NO: 123820 - RNA, 19 nt, Artificial Sequence
  Description of Artificial Sequence: Synthetic oligonucleotide
  Sense strand starting at position 2325 of SEQ ID NO: 1582
ccuccaucuguguauuacu

SEQ ID NO: 123821 - RNA, 19 nt, Artificial Sequence
  Description of Artificial Sequence: Synthetic oligonucleotide
  Antisense strand to SEQ ID NO: 123820
aguaauacacagauggagg

SEQ ID NO: 123822 - RNA, 19 nt, Artificial Sequence
  Description of Artificial Sequence: Synthetic oligonucleotide
  Sense strand starting at position 2405 of SEQ ID NO: 1582
gcggcaccuucuucuuuaa

SEQ ID NO: 123823 - RNA, 19 nt, Artificial Sequence
  Description of Artificial Sequence: Synthetic oligonucleotide
  Antisense strand to SEQ ID NO: 123822
uuaaagaagaaggugccgc

SEQ ID NO: 123824 - RNA, 19 nt, Artificial Sequence
  Description of Artificial Sequence: Synthetic oligonucleotide
  Sense strand starting at position 2468 of SEQ ID NO: 1582
gagaaagcgccgcagugau

SEQ ID NO: 123825 - RNA, 19 nt, Artificial Sequence
  Description of Artificial Sequence: Synthetic oligonucleotide
  Antisense strand to SEQ ID NO: 123824
aucacugcggcgcuuucuc

SEQ ID NO: 123826 - RNA, 19 nt, Artificial Sequence
  Description of Artificial Sequence: Synthetic oligonucleotide
  Sense strand starting at position 2480 of SEQ ID NO: 1582
cagugaucuccacgucuug

SEQ ID NO: 123827 - RNA, 19 nt, Artificial Sequence
  Description of Artificial Sequence: Synthetic oligonucleotide
  Antisense strand to SEQ ID NO: 123826
caagacguggagaucacug

SEQ ID NO: 123828 - RNA, 19 nt, Artificial Sequence
  Description of Artificial Sequence: Synthetic oligonucleotide
  Sense strand starting at position 3372 of SEQ ID NO: 1582
gugagugaccuaggacuca

SEQ ID NO: 123829 - RNA, 19 nt, Artificial Sequence
  Description of Artificial Sequence: Synthetic oligonucleotide
  Antisense strand to SEQ ID NO: 123828
ugaguccuaggucacucac

SEQ ID NO: 123830 - RNA, 19 nt, Artificial Sequence
  Description of Artificial Sequence: Synthetic oligonucleotide
  Sense strand starting at position 3413 of SEQ ID NO: 1582
ggguccauagcaugaguua

SEQ ID NO: 123831 - RNA, 19 nt, Artificial Sequence
  Description of Artificial Sequence: Synthetic oligonucleotide
  Antisense strand to SEQ ID NO: 123830
uaacucaugcuauggaccc

SEQ ID NO: 123832 - RNA, 19 nt, Artificial Sequence
  Description of Artificial Sequence: Synthetic oligonucleotide
  Sense strand starting at position 3414 of SEQ ID NO: 1582
gguccauagcaugaguuaa

SEQ ID NO: 123833 - RNA, 19 nt, Artificial Sequence
  Description of Artificial Sequence: Synthetic oligonucleotide
  Antisense strand to SEQ ID NO: 123832
uuaacucaugcuauggacc

SEQ ID NO: 123834 - RNA, 19 nt, Artificial Sequence
  Description of Artificial Sequence: Synthetic oligonucleotide
  Sense strand starting at position 3454 of SEQ ID NO: 1582
agccauuaauucucaggga

SEQ ID NO: 123835 - RNA, 19 nt, Artificial Sequence
  Description of Artificial Sequence: Synthetic oligonucleotide
  Antisense strand to SEQ ID NO: 123834
ucccugagaauuaauggcu

SEQ ID NO: 123836 - RNA, 19 nt, Artificial Sequence
  Description of Artificial Sequence: Synthetic oligonucleotide
  Sense strand starting at position 3458 of SEQ ID NO: 1582
auuaauucucagggaguaa

SEQ ID NO: 123837 - RNA, 19 nt, Artificial Sequence
  Description of Artificial Sequence: Synthetic oligonucleotide
  Antisense strand to SEQ ID NO: 123836
uuacucccugagaauuaau

SEQ ID NO: 123838 - RNA, 19 nt, Artificial Sequence
  Description of Artificial Sequence: Synthetic oligonucleotide
  Sense strand starting at position 22 of SEQ ID NO: 1581
aggacaacaucugauaggu

SEQ ID NO: 123839 - RNA, 19 nt, Artificial Sequence
  Description of Artificial Sequence: Synthetic oligonucleotide
  Antisense strand to SEQ ID NO: 123838
accuaucagauguuguccu

SEQ ID NO: 123840 - RNA, 19 nt, Artificial Sequence
  Description of Artificial Sequence: Synthetic oligonucleotide
  Sense strand starting at position 24 of SEQ ID NO: 1581
gacaacaucugauagguga

SEQ ID NO: 123841 - RNA, 19 nt, Artificial Sequence
  Description of Artificial Sequence: Synthetic oligonucleotide
  Antisense strand to SEQ ID NO: 123840
ucaccuaucagauguuguc

SEQ ID NO: 123842 - RNA, 19 nt, Artificial Sequence
  Description of Artificial Sequence: Synthetic oligonucleotide
  Sense strand starting at position 63 of SEQ ID NO: 1581
aagggcaucugcugaguua

SEQ ID NO: 123843 - RNA, 19 nt, Artificial Sequence
  Description of Artificial Sequence: Synthetic oligonucleotide
  Antisense strand to SEQ ID NO: 123842
uaacucagcagaugcccuu

SEQ ID NO: 123844 - RNA, 19 nt, Artificial Sequence
  Description of Artificial Sequence: Synthetic oligonucleotide
  Sense strand starting at position 76 of SEQ ID NO: 1581
gaguuacccaggcguagaa

SEQ ID NO: 123845 - RNA, 19 nt, Artificial Sequence
  Description of Artificial Sequence: Synthetic oligonucleotide
  Antisense strand to SEQ ID NO: 123844
uucuacgccuggguaacuc

SEQ ID NO: 123846 - RNA, 19 nt, Artificial Sequence
  Description of Artificial Sequence: Synthetic oligonucleotide
  Sense strand starting at position 88 of SEQ ID NO: 1581
cguagaacuuguggagauu

SEQ ID NO: 123847 - RNA, 19 nt, Artificial Sequence
  Description of Artificial Sequence: Synthetic oligonucleotide
  Antisense strand to SEQ ID NO: 123846
aaucuccacaaguucuacg

SEQ ID NO: 123848 - RNA, 19 nt, Artificial Sequence
  Description of Artificial Sequence: Synthetic oligonucleotide
  Sense strand starting at position 797 of SEQ ID NO: 1581
uggcucuccaguugucgaa

SEQ ID NO: 123849 - RNA, 19 nt, Artificial Sequence
  Description of Artificial Sequence: Synthetic oligonucleotide
  Antisense strand to SEQ ID NO: 123848
uucgacaacuggagagcca

SEQ ID NO: 123850 - RNA, 19 nt, Artificial Sequence
  Description of Artificial Sequence: Synthetic oligonucleotide
  Sense strand starting at position 809 of SEQ ID NO: 1581
ugucgaaucuguuucugua

SEQ ID NO: 123851 - RNA, 19 nt, Artificial Sequence
  Description of Artificial Sequence: Synthetic oligonucleotide
  Antisense strand to SEQ ID NO: 123850
uacagaaacagauucgaca

SEQ ID NO: 123852 - RNA, 19 nt, Artificial Sequence
  Description of Artificial Sequence: Synthetic oligonucleotide
  Sense strand starting at position 812 of SEQ ID NO: 1581
cgaaucuguuucuguaacu

SEQ ID NO: 123853 - RNA, 19 nt, Artificial Sequence
  Description of Artificial Sequence: Synthetic oligonucleotide
  Antisense strand to SEQ ID NO: 123852
aguuacagaaacagauucg

SEQ ID NO: 123854 - RNA, 19 nt, Artificial Sequence
  Description of Artificial Sequence: Synthetic oligonucleotide
  Sense strand starting at position 983 of SEQ ID NO: 1581
uucccaguuugagaacacu

SEQ ID NO: 123855 - RNA, 19 nt, Artificial Sequence
  Description of Artificial Sequence: Synthetic oligonucleotide
  Antisense strand to SEQ ID NO: 123854
aguguucucaaacugggaa

SEQ ID NO: 123856 - RNA, 19 nt, Artificial Sequence
  Description of Artificial Sequence: Synthetic oligonucleotide
  Sense strand starting at position 1092 of SEQ ID NO: 1581
gggagcacuauugaauguu

SEQ ID NO: 123857 - RNA, 19 nt, Artificial Sequence
  Description of Artificial Sequence: Synthetic oligonucleotide
  Antisense strand to SEQ ID NO: 123856
aacauucaauagugcuccc

SEQ ID NO: 123858 - RNA, 19 nt, Artificial Sequence
  Description of Artificial Sequence: Synthetic oligonucleotide
  Sense strand starting at position 1098 of SEQ ID NO: 1581
acuauugaauguugagcaa

SEQ ID NO: 123859 - RNA, 19 nt, Artificial Sequence
  Description of Artificial Sequence: Synthetic oligonucleotide
  Antisense strand to SEQ ID NO: 123858
uugcucaacauucaauagu

SEQ ID NO: 123860 - RNA, 19 nt, Artificial Sequence
  Description of Artificial Sequence: Synthetic oligonucleotide
  Sense strand starting at position 1101 of SEQ ID NO: 1581
auugaauguugagcaaauu

SEQ ID NO: 123861 - RNA, 19 nt, Artificial Sequence
  Description of Artificial Sequence: Synthetic oligonucleotide
  Antisense strand to SEQ ID NO: 123860
aauuugcucaacauucaau

SEQ ID NO: 123862 - RNA, 19 nt, Artificial Sequence
  Description of Artificial Sequence: Synthetic oligonucleotide
  Sense strand starting at position 1102 of SEQ ID NO: 1581
uugaauguugagcaaauua

SEQ ID NO: 123863 - RNA, 19 nt, Artificial Sequence
  Description of Artificial Sequence: Synthetic oligonucleotide
  Antisense strand to SEQ ID NO: 123862
uaauuugcucaacauucaa

SEQ ID NO: 123864 - RNA, 19 nt, Artificial Sequence
  Description of Artificial Sequence: Synthetic oligonucleotide
  Sense strand starting at position 1179 of SEQ ID NO: 1581
agcacaucagcgugagcau

SEQ ID NO: 123865 - RNA, 19 nt, Artificial Sequence
  Description of Artificial Sequence: Synthetic oligonucleotide
  Antisense strand to SEQ ID NO: 123864
augcucacgcugaugugcu

SEQ ID NO: 123866 - RNA, 19 nt, Artificial Sequence
  Description of Artificial Sequence: Synthetic oligonucleotide
  Sense strand starting at position 1191 of SEQ ID NO: 1581
ugagcauguacgugaucga

SEQ ID NO: 123867 - RNA, 19 nt, Artificial Sequence
  Description of Artificial Sequence: Synthetic oligonucleotide
  Antisense strand to SEQ ID NO: 123866
ucgaucacguacaugcuca

SEQ ID NO: 123868 - RNA, 19 nt, Artificial Sequence
  Description of Artificial Sequence: Synthetic oligonucleotide
  Sense strand starting at position 1192 of SEQ ID NO: 1581
gagcauguacgugaucgau

SEQ ID NO: 123869 - RNA, 19 nt, Artificial Sequence
  Description of Artificial Sequence: Synthetic oligonucleotide
  Antisense strand to SEQ ID NO: 123868
aucgaucacguacaugcuc

SEQ ID NO: 123870 - RNA, 19 nt, Artificial Sequence
  Description of Artificial Sequence: Synthetic oligonucleotide
  Sense strand starting at position 1194 of SEQ ID NO: 1581
gcauguacgugaucgauga

SEQ ID NO: 123871 - RNA, 19 nt, Artificial Sequence
  Description of Artificial Sequence: Synthetic oligonucleotide
  Antisense strand to SEQ ID NO: 123870
ucaucgaucacguacaugc

SEQ ID NO: 123872 - RNA, 19 nt, Artificial Sequence
  Description of Artificial Sequence: Synthetic oligonucleotide
  Sense strand starting at position 1411 of SEQ ID NO: 1581
gcgaaugcuccucauucca

SEQ ID NO: 123873 - RNA, 19 nt, Artificial Sequence
  Description of Artificial Sequence: Synthetic oligonucleotide
  Antisense strand to SEQ ID NO: 123872
uggaaugaggagcauucgc

SEQ ID NO: 123874 - RNA, 19 nt, Artificial Sequence
  Description of Artificial Sequence: Synthetic oligonucleotide
  Sense strand starting at position 1443 of SEQ ID NO: 1581
aggacacugucggucuuau

SEQ ID NO: 123875 - RNA, 19 nt, Artificial Sequence
  Description of Artificial Sequence: Synthetic oligonucleotide
  Antisense strand to SEQ ID NO: 123874
auaagaccgacaguguccu

SEQ ID NO: 123876 - RNA, 19 nt, Artificial Sequence
  Description of Artificial Sequence: Synthetic oligonucleotide
  Sense strand starting at position 1635 of SEQ ID NO: 1581
cugacuucgccucacuaga

SEQ ID NO: 123877 - RNA, 19 nt, Artificial Sequence
  Description of Artificial Sequence: Synthetic oligonucleotide
  Antisense strand to SEQ ID NO: 123876
ucuagugaggcgaagucag

SEQ ID NO: 123878 - RNA, 19 nt, Artificial Sequence
  Description of Artificial Sequence: Synthetic oligonucleotide
  Sense strand starting at position 1651 of SEQ ID NO: 1581
agagucuuccucuguccau

SEQ ID NO: 123879 - RNA, 19 nt, Artificial Sequence
  Description of Artificial Sequence: Synthetic oligonucleotide
  Antisense strand to SEQ ID NO: 123878
auggacagaggaagacucu

SEQ ID NO: 123880 - RNA, 19 nt, Artificial Sequence
  Description of Artificial Sequence: Synthetic oligonucleotide
  Sense strand starting at position 1894 of SEQ ID NO: 1581
gcggaauuucaggacgcga

SEQ ID NO: 123881 - RNA, 19 nt, Artificial Sequence
  Description of Artificial Sequence: Synthetic oligonucleotide
  Antisense strand to SEQ ID NO: 123880
ucgcguccugaaauuccgc

SEQ ID NO: 123882 - RNA, 19 nt, Artificial Sequence
  Description of Artificial Sequence: Synthetic oligonucleotide
  Sense strand starting at position 1907 of SEQ ID NO: 1581
acgcgaaacucgugucuuu

SEQ ID NO: 123883 - RNA, 19 nt, Artificial Sequence
  Description of Artificial Sequence: Synthetic oligonucleotide
  Antisense strand to SEQ ID NO: 123882
aaagacacgaguuucgcgu

SEQ ID NO: 123884 - RNA, 19 nt, Artificial Sequence
  Description of Artificial Sequence: Synthetic oligonucleotide
  Sense strand starting at position 1927 of SEQ ID NO: 1581
gagccuccaucuguguauu

SEQ ID NO: 123885 - RNA, 19 nt, Artificial Sequence
  Description of Artificial Sequence: Synthetic oligonucleotide
  Antisense strand to SEQ ID NO: 123884
aauacacagauggaggcuc

SEQ ID NO: 123886 - RNA, 19 nt, Artificial Sequence
  Description of Artificial Sequence: Synthetic oligonucleotide
  Sense strand starting at position 1928 of SEQ ID NO: 1581
agccuccaucuguguauua

SEQ ID NO: 123887 - RNA, 19 nt, Artificial Sequence
  Description of Artificial Sequence: Synthetic oligonucleotide
  Antisense strand to SEQ ID NO: 123886
uaauacacagauggaggcu

SEQ ID NO: 123888 - RNA, 19 nt, Artificial Sequence
  Description of Artificial Sequence: Synthetic oligonucleotide
  Sense strand starting at position 1930 of SEQ ID NO: 1581
ccuccaucuguguauuacu

SEQ ID NO: 123889 - RNA, 19 nt, Artificial Sequence
  Description of Artificial Sequence: Synthetic oligonucleotide
  Antisense strand to SEQ ID NO: 123888
aguaauacacagauggagg

SEQ ID NO: 123890 - RNA, 19 nt, Artificial Sequence
  Description of Artificial Sequence: Synthetic oligonucleotide
  Sense strand starting at position 1938 of SEQ ID NO: 1581
uguguauuacugugcgugu

SEQ ID NO: 123891 - RNA, 19 nt, Artificial Sequence
  Description of Artificial Sequence: Synthetic oligonucleotide
  Antisense strand to SEQ ID NO: 123890
acacgcacaguaauacaca

SEQ ID NO: 123892 - RNA, 19 nt, Artificial Sequence
  Description of Artificial Sequence: Synthetic oligonucleotide
  Sense strand starting at position 2010 of SEQ ID NO: 1581
gcggcaccuucuucuuuaa

SEQ ID NO: 123893 - RNA, 19 nt, Artificial Sequence
  Description of Artificial Sequence: Synthetic oligonucleotide
  Antisense strand to SEQ ID NO: 123892
uuaaagaagaaggugccgc

SEQ ID NO: 123894 - RNA, 19 nt, Artificial Sequence
  Description of Artificial Sequence: Synthetic oligonucleotide
  Sense strand starting at position 2073 of SEQ ID NO: 1581
gagaaagcgccgcagugau

SEQ ID NO: 123895 - RNA, 19 nt, Artificial Sequence
  Description of Artificial Sequence: Synthetic oligonucleotide
  Antisense strand to SEQ ID NO: 123894
aucacugcggcgcuuucuc

SEQ ID NO: 123896 - RNA, 19 nt, Artificial Sequence
  Description of Artificial Sequence: Synthetic oligonucleotide
  Sense strand starting at position 2085 of SEQ ID NO: 1581
cagugaucuccacgucuug

SEQ ID NO: 123897 - RNA, 19 nt, Artificial Sequence
  Description of Artificial Sequence: Synthetic oligonucleotide
  Antisense strand to SEQ ID NO: 123896
caagacguggagaucacug

SEQ ID NO: 123898 - RNA, 19 nt, Artificial Sequence
  Description of Artificial Sequence: Synthetic oligonucleotide
  Sense strand starting at position 2977 of SEQ ID NO: 1581
gugagugaccuaggacuca

SEQ ID NO: 123899 - RNA, 19 nt, Artificial Sequence
  Description of Artificial Sequence: Synthetic oligonucleotide
  Antisense strand to SEQ ID NO: 123898
ugaguccuaggucacucac

SEQ ID NO: 123900 - RNA, 19 nt, Artificial Sequence
  Description of Artificial Sequence: Synthetic oligonucleotide
  Sense strand starting at position 3018 of SEQ ID NO: 1581
ggguccauagcaugaguua

SEQ ID NO: 123901 - RNA, 19 nt, Artificial Sequence
  Description of Artificial Sequence: Synthetic oligonucleotide
  Antisense strand to SEQ ID NO: 123900
uaacucaugcuauggaccc

SEQ ID NO: 123902 - RNA, 19 nt, Artificial Sequence
  Description of Artificial Sequence: Synthetic oligonucleotide
  Sense strand starting at position 3019 of SEQ ID NO: 1581
gguccauagcaugaguuaa

SEQ ID NO: 123903 - RNA, 19 nt, Artificial Sequence
  Description of Artificial Sequence: Synthetic oligonucleotide
  Antisense strand to SEQ ID NO: 123902
uuaacucaugcuauggacc

SEQ ID NO: 123904 - RNA, 19 nt, Artificial Sequence
  Description of Artificial Sequence: Synthetic oligonucleotide
  Sense strand starting at position 3059 of SEQ ID NO: 1581
agccauuaauucucaggga

SEQ ID NO: 123905 - RNA, 19 nt, Artificial Sequence
  Description of Artificial Sequence: Synthetic oligonucleotide
  Antisense strand to SEQ ID NO: 123904
ucccugagaauuaauggcu

SEQ ID NO: 123906 - RNA, 19 nt, Artificial Sequence
  Description of Artificial Sequence: Synthetic oligonucleotide
  Sense strand starting at position 3060 of SEQ ID NO: 1581
gccauuaauucucagggag

SEQ ID NO: 123907 - RNA, 19 nt, Artificial Sequence
  Description of Artificial Sequence: Synthetic oligonucleotide
  Antisense strand to SEQ ID NO: 123906
cucccugagaauuaauggc

SEQ ID NO: 123908 - RNA, 19 nt, Artificial Sequence
  Description of Artificial Sequence: Synthetic oligonucleotide
  Sense strand starting at position 3062 of SEQ ID NO: 1581
cauuaauucucagggagua

SEQ ID NO: 123909 - RNA, 19 nt, Artificial Sequence
  Description of Artificial Sequence: Synthetic oligonucleotide
  Antisense strand to SEQ ID NO: 123908
uacucccugagaauuaaug

SEQ ID NO: 123910 - RNA, 19 nt, Artificial Sequence
  Description of Artificial Sequence: Synthetic oligonucleotide
  Sense strand starting at position 3063 of SEQ ID NO: 1581
auuaauucucagggaguaa

SEQ ID NO: 123911 - RNA, 19 nt, Artificial Sequence
  Description of Artificial Sequence: Synthetic oligonucleotide
  Antisense strand to SEQ ID NO: 123910
uuacucccugagaauuaau

SEQ ID NO: 123912 - RNA, 19 nt, Artificial Sequence
  Description of Artificial Sequence: Synthetic oligonucleotide
  Sense strand starting at position 3397 of SEQ ID NO: 1581
uucgauuccucagggaucu

SEQ ID NO: 123913 - RNA, 19 nt, Artificial Sequence
  Description of Artificial Sequence: Synthetic oligonucleotide
  Antisense strand to SEQ ID NO: 123912
agaucccugaggaaucgaa

SEQ ID NO: 123914 - RNA, 19 nt, Artificial Sequence
  Description of Artificial Sequence: Synthetic oligonucleotide
  Sense strand starting at position 3966 of SEQ ID NO: 1583
uuuccucuccgaugcauuu

SEQ ID NO: 123915 - RNA, 19 nt, Artificial Sequence
  Description of Artificial Sequence: Synthetic oligonucleotide
  Antisense strand to SEQ ID NO: 123914
aaaugcaucggagaggaaa

SEQ ID NO: 123916 - RNA, 19 nt, Artificial Sequence
  Description of Artificial Sequence: Synthetic oligonucleotide
  Sense strand starting at position 3910 of SEQ ID NO: 1583
auauguugucaagaggcau

SEQ ID NO: 123917 - RNA, 19 nt, Artificial Sequence
  Description of Artificial Sequence: Synthetic oligonucleotide
  Antisense strand to SEQ ID NO: 123916
augccucuugacaacauau

SEQ ID NO: 123918 - RNA, 19 nt, Artificial Sequence
  Description of Artificial Sequence: Synthetic oligonucleotide
  Sense strand starting at position 3906 of SEQ ID NO: 1583
augaauauguugucaagag

SEQ ID NO: 123919 - RNA, 19 nt, Artificial Sequence
  Description of Artificial Sequence: Synthetic oligonucleotide
  Antisense strand to SEQ ID NO: 123918
cucuugacaacauauucau

SEQ ID NO: 123920 - RNA, 19 nt, Artificial Sequence
  Description of Artificial Sequence: Synthetic oligonucleotide
  Sense strand starting at position 3758 of SEQ ID NO: 1583
gcagauaauuacuucuagu

SEQ ID NO: 123921 - RNA, 19 nt, Artificial Sequence
  Description of Artificial Sequence: Synthetic oligonucleotide
  Antisense strand to SEQ ID NO: 123920
acuagaaguaauuaucugc

SEQ ID NO: 123922 - RNA, 19 nt, Artificial Sequence
  Description of Artificial Sequence: Synthetic oligonucleotide
  Sense strand starting at position 2854 of SEQ ID NO: 1583
cugguugaauuguuagauu

SEQ ID NO: 123923 - RNA, 19 nt, Artificial Sequence
  Description of Artificial Sequence: Synthetic oligonucleotide
  Antisense strand to SEQ ID NO: 123922
aaucuaacaauucaaccag

SEQ ID NO: 123924 - RNA, 19 nt, Artificial Sequence
  Description of Artificial Sequence: Synthetic oligonucleotide
  Sense strand starting at position 2761 of SEQ ID NO: 1583
auaggacucggauaagugu

SEQ ID NO: 123925 - RNA, 19 nt, Artificial Sequence
  Description of Artificial Sequence: Synthetic oligonucleotide
  Antisense strand to SEQ ID NO: 123924
acacuuauccgaguccuau

SEQ ID NO: 123926 - RNA, 19 nt, Artificial Sequence
  Description of Artificial Sequence: Synthetic oligonucleotide
  Sense strand starting at position 2673 of SEQ ID NO: 1583
uugguaggccuugaaauaa

SEQ ID NO: 123927 - RNA, 19 nt, Artificial Sequence
  Description of Artificial Sequence: Synthetic oligonucleotide
  Antisense strand to SEQ ID NO: 123926
uuauuucaaggccuaccaa

SEQ ID NO: 123928 - RNA, 19 nt, Artificial Sequence
  Description of Artificial Sequence: Synthetic oligonucleotide
  Sense strand starting at position 2672 of SEQ ID NO: 1583
uuugguaggccuugaaaua

SEQ ID NO: 123929 - RNA, 19 nt, Artificial Sequence
  Description of Artificial Sequence: Synthetic oligonucleotide
  Antisense strand to SEQ ID NO: 123928
uauuucaaggccuaccaaa

SEQ ID NO: 123930 - RNA, 19 nt, Artificial Sequence
  Description of Artificial Sequence: Synthetic oligonucleotide
  Sense strand starting at position 2655 of SEQ ID NO: 1583
uacuauaugcuagggacuu

SEQ ID NO: 123931 - RNA, 19 nt, Artificial Sequence
  Description of Artificial Sequence: Synthetic oligonucleotide
  Antisense strand to SEQ ID NO: 123930
aagucccuagcauauagua

SEQ ID NO: 123932 - RNA, 19 nt, Artificial Sequence
  Description of Artificial Sequence: Synthetic oligonucleotide
  Sense strand starting at position 2596 of SEQ ID NO: 1583
ugcgaagaaacuuggaaau

SEQ ID NO: 123933 - RNA, 19 nt, Artificial Sequence
  Description of Artificial Sequence: Synthetic oligonucleotide
  Antisense strand to SEQ ID NO: 123932
auuuccaaguuucuucgca

SEQ ID NO: 123934 - RNA, 19 nt, Artificial Sequence
  Description of Artificial Sequence: Synthetic oligonucleotide
  Sense strand starting at position 2577 of SEQ ID NO: 1583
ggacuugccaauggaugaa

SEQ ID NO: 123935 - RNA, 19 nt, Artificial Sequence
  Description of Artificial Sequence: Synthetic oligonucleotide
  Antisense strand to SEQ ID NO: 123934
uucauccauuggcaagucc

SEQ ID NO: 123936 - RNA, 19 nt, Artificial Sequence
  Description of Artificial Sequence: Synthetic oligonucleotide
  Sense strand starting at position 2576 of SEQ ID NO: 1583
gggacuugccaauggauga

SEQ ID NO: 123937 - RNA, 19 nt, Artificial Sequence
  Description of Artificial Sequence: Synthetic oligonucleotide
  Antisense strand to SEQ ID NO: 123936
ucauccauuggcaaguccc

SEQ ID NO: 123938 - RNA, 19 nt, Artificial Sequence
  Description of Artificial Sequence: Synthetic oligonucleotide
  Sense strand starting at position 2531 of SEQ ID NO: 1583
uugaguuaaucucugccca

SEQ ID NO: 123939 - RNA, 19 nt, Artificial Sequence
  Description of Artificial Sequence: Synthetic oligonucleotide
  Antisense strand to SEQ ID NO: 123938
ugggcagagauuaacucaa

SEQ ID NO: 123940 - RNA, 19 nt, Artificial Sequence
  Description of Artificial Sequence: Synthetic oligonucleotide
  Sense strand starting at position 2186 of SEQ ID NO: 1583
cuucuuugcguuguuauau

SEQ ID NO: 123941 - RNA, 19 nt, Artificial Sequence
  Description of Artificial Sequence: Synthetic oligonucleotide
  Antisense strand to SEQ ID NO: 123940
auauaacaacgcaaagaag

SEQ ID NO: 123942 - RNA, 19 nt, Artificial Sequence
  Description of Artificial Sequence: Synthetic oligonucleotide
  Sense strand starting at position 2184 of SEQ ID NO: 1583
aucuucuuugcguuguuau

SEQ ID NO: 123943 - RNA, 19 nt, Artificial Sequence
  Description of Artificial Sequence: Synthetic oligonucleotide
  Antisense strand to SEQ ID NO: 123942
auaacaacgcaaagaagau

SEQ ID NO: 123944 - RNA, 19 nt, Artificial Sequence
  Description of Artificial Sequence: Synthetic oligonucleotide
  Sense strand starting at position 2155 of SEQ ID NO: 1583
ucugcuuuccaggaagauc

SEQ ID NO: 123945 - RNA, 19 nt, Artificial Sequence
  Description of Artificial Sequence: Synthetic oligonucleotide
  Antisense strand to SEQ ID NO: 123944
gaucuuccuggaaagcaga

SEQ ID NO: 123946 - RNA, 19 nt, Artificial Sequence
  Description of Artificial Sequence: Synthetic oligonucleotide
  Sense strand starting at position 2154 of SEQ ID NO: 1583
cucugcuuuccaggaagau

SEQ ID NO: 123947 - RNA, 19 nt, Artificial Sequence
  Description of Artificial Sequence: Synthetic oligonucleotide
  Antisense strand to SEQ ID NO: 123946
aucuuccuggaaagcagag

SEQ ID NO: 123948 - RNA, 19 nt, Artificial Sequence
  Description of Artificial Sequence: Synthetic oligonucleotide
  Sense strand starting at position 2137 of SEQ ID NO: 1583
cauaguuuccguuaagacu

SEQ ID NO: 123949 - RNA, 19 nt, Artificial Sequence
  Description of Artificial Sequence: Synthetic oligonucleotide
  Antisense strand to SEQ ID NO: 123948
agucuuaacggaaacuaug

SEQ ID NO: 123950 - RNA, 19 nt, Artificial Sequence
  Description of Artificial Sequence: Synthetic oligonucleotide
  Sense strand starting at position 1743 of SEQ ID NO: 1583
ccggaauguggucaaagag

SEQ ID NO: 123951 - RNA, 19 nt, Artificial Sequence
  Description of Artificial Sequence: Synthetic oligonucleotide
  Antisense strand to SEQ ID NO: 123950
cucuuugaccacauuccgg

SEQ ID NO: 123952 - RNA, 19 nt, Artificial Sequence
  Description of Artificial Sequence: Synthetic oligonucleotide
  Sense strand starting at position 1742 of SEQ ID NO: 1583
uccggaauguggucaaaga

SEQ ID NO: 123953 - RNA, 19 nt, Artificial Sequence
  Description of Artificial Sequence: Synthetic oligonucleotide
  Antisense strand to SEQ ID NO: 123952
ucuuugaccacauuccgga

SEQ ID NO: 123954 - RNA, 19 nt, Artificial Sequence
  Description of Artificial Sequence: Synthetic oligonucleotide
  Sense strand starting at position 1578 of SEQ ID NO: 1583
ccgggaacgaucgaucuau

SEQ ID NO: 123955 - RNA, 19 nt, Artificial Sequence
  Description of Artificial Sequence: Synthetic oligonucleotide
  Antisense strand to SEQ ID NO: 123954
auagaucgaucguucccgg

SEQ ID NO: 123956 - RNA, 19 nt, Artificial Sequence
  Description of Artificial Sequence: Synthetic oligonucleotide
  Sense strand starting at position 1427 of SEQ ID NO: 1583
agggcucgacuagauuauu

SEQ ID NO: 123957 - RNA, 19 nt, Artificial Sequence
  Description of Artificial Sequence: Synthetic oligonucleotide
  Antisense strand to SEQ ID NO: 123956
aauaaucuagucgagcccu

SEQ ID NO: 123958 - RNA, 19 nt, Artificial Sequence
  Description of Artificial Sequence: Synthetic oligonucleotide
  Sense strand starting at position 1422 of SEQ ID NO: 1583
cugagagggcucgacuaga

SEQ ID NO: 123959 - RNA, 19 nt, Artificial Sequence
  Description of Artificial Sequence: Synthetic oligonucleotide
  Antisense strand to SEQ ID NO: 123958
ucuagucgagcccucucag

SEQ ID NO: 123960 - RNA, 19 nt, Artificial Sequence
  Description of Artificial Sequence: Synthetic oligonucleotide
  Sense strand starting at position 1279 of SEQ ID NO: 1583
ugggauuugucugaaucug

SEQ ID NO: 123961 - RNA, 19 nt, Artificial Sequence
  Description of Artificial Sequence: Synthetic oligonucleotide
  Antisense strand to SEQ ID NO: 123960
cagauucagacaaauccca

SEQ ID NO: 123962 - RNA, 19 nt, Artificial Sequence
  Description of Artificial Sequence: Synthetic oligonucleotide
  Sense strand starting at position 1267 of SEQ ID NO: 1583
cccuuauuggagugggauu

SEQ ID NO: 123963 - RNA, 19 nt, Artificial Sequence
  Description of Artificial Sequence: Synthetic oligonucleotide
  Antisense strand to SEQ ID NO: 123962
aaucccacuccaauaaggg

SEQ ID NO: 123964 - RNA, 19 nt, Artificial Sequence
  Description of Artificial Sequence: Synthetic oligonucleotide
  Sense strand starting at position 1131 of SEQ ID NO: 1583
aauguaagaugucucuuag

SEQ ID NO: 123965 - RNA, 19 nt, Artificial Sequence
  Description of Artificial Sequence: Synthetic oligonucleotide
  Antisense strand to SEQ ID NO: 123964
cuaagagacaucuuacauu

SEQ ID NO: 123966 - RNA, 19 nt, Artificial Sequence
  Description of Artificial Sequence: Synthetic oligonucleotide
  Sense strand starting at position 1123 of SEQ ID NO: 1583
ggcaguuaaauguaagaug

SEQ ID NO: 123967 - RNA, 19 nt, Artificial Sequence
  Description of Artificial Sequence: Synthetic oligonucleotide
  Antisense strand to SEQ ID NO: 123966
caucuuacauuuaacugcc

SEQ ID NO: 123968 - RNA, 19 nt, Artificial Sequence
  Description of Artificial Sequence: Synthetic oligonucleotide
  Sense strand starting at position 1093 of SEQ ID NO: 1583
uguaauuugugcucaacau

SEQ ID NO: 123969 - RNA, 19 nt, Artificial Sequence
  Description of Artificial Sequence: Synthetic oligonucleotide
  Antisense strand to SEQ ID NO: 123968
auguugagcacaaauuaca

SEQ ID NO: 123970 - RNA, 19 nt, Artificial Sequence
  Description of Artificial Sequence: Synthetic oligonucleotide
  Sense strand starting at position 1091 of SEQ ID NO: 1583
gauguaauuugugcucaac

SEQ ID NO: 123971 - RNA, 19 nt, Artificial Sequence
  Description of Artificial Sequence: Synthetic oligonucleotide
  Antisense strand to SEQ ID NO: 123970
guugagcacaaauuacauc

SEQ ID NO: 123972 - RNA, 19 nt, Artificial Sequence
  Description of Artificial Sequence: Synthetic oligonucleotide
  Sense strand starting at position 1081 of SEQ ID NO: 1583
cgagauaauagauguaauu

SEQ ID NO: 123973 - RNA, 19 nt, Artificial Sequence
  Description of Artificial Sequence: Synthetic oligonucleotide
  Antisense strand to SEQ ID NO: 123972
aauuacaucuauuaucucg

SEQ ID NO: 123974 - RNA, 19 nt, Artificial Sequence
  Description of Artificial Sequence: Synthetic oligonucleotide
  Sense strand starting at position 1069 of SEQ ID NO: 1583
gugaacacuaaacgagaua

SEQ ID NO: 123975 - RNA, 19 nt, Artificial Sequence
  Description of Artificial Sequence: Synthetic oligonucleotide
  Antisense strand to SEQ ID NO: 123974
uaucucguuuaguguucac

SEQ ID NO: 123976 - RNA, 19 nt, Artificial Sequence
  Description of Artificial Sequence: Synthetic oligonucleotide
  Sense strand starting at position 1065 of SEQ ID NO: 1583
uguagugaacacuaaacga

SEQ ID NO: 123977 - RNA, 19 nt, Artificial Sequence
  Description of Artificial Sequence: Synthetic oligonucleotide
  Antisense strand to SEQ ID NO: 123976
ucguuuaguguucacuaca

SEQ ID NO: 123978 - RNA, 19 nt, Artificial Sequence
  Description of Artificial Sequence: Synthetic oligonucleotide
  Sense strand starting at position 1062 of SEQ ID NO: 1583
gguuguagugaacacuaaa

SEQ ID NO: 123979 - RNA, 19 nt, Artificial Sequence
  Description of Artificial Sequence: Synthetic oligonucleotide
  Antisense strand to SEQ ID NO: 123978
uuuaguguucacuacaacc

SEQ ID NO: 123980 - RNA, 19 nt, Artificial Sequence
  Description of Artificial Sequence: Synthetic oligonucleotide
  Sense strand starting at position 1024 of SEQ ID NO: 1583
uucugugaaauggagguua

SEQ ID NO: 123981 - RNA, 19 nt, Artificial Sequence
  Description of Artificial Sequence: Synthetic oligonucleotide
  Antisense strand to SEQ ID NO: 123980
uaaccuccauuucacagaa

SEQ ID NO: 123982 - RNA, 19 nt, Artificial Sequence
  Description of Artificial Sequence: Synthetic oligonucleotide
  Sense strand starting at position 1002 of SEQ ID NO: 1583
gucacaaacccuuaguauu

SEQ ID NO: 123983 - RNA, 19 nt, Artificial Sequence
  Description of Artificial Sequence: Synthetic oligonucleotide
  Antisense strand to SEQ ID NO: 123982
aauacuaaggguuugugac

SEQ ID NO: 123984 - RNA, 19 nt, Artificial Sequence
  Description of Artificial Sequence: Synthetic oligonucleotide
  Sense strand starting at position 791 of SEQ ID NO: 1583
gucuucugccucugaagga

SEQ ID NO: 123985 - RNA, 19 nt, Artificial Sequence
  Description of Artificial Sequence: Synthetic oligonucleotide
  Antisense strand to SEQ ID NO: 123984
uccuucagaggcagaagac

SEQ ID NO: 123986 - RNA, 19 nt, Artificial Sequence
  Description of Artificial Sequence: Synthetic oligonucleotide
  Sense strand starting at position 747 of SEQ ID NO: 1583
guaacagacgugcagaaua

SEQ ID NO: 123987 - RNA, 19 nt, Artificial Sequence
  Description of Artificial Sequence: Synthetic oligonucleotide
  Antisense strand to SEQ ID NO: 123986
uauucugcacgucuguuac

SEQ ID NO: 123988 - RNA, 19 nt, Artificial Sequence
  Description of Artificial Sequence: Synthetic oligonucleotide
  Sense strand starting at position 628 of SEQ ID NO: 1583
agaaucaguccuuguuauc

SEQ ID NO: 123989 - RNA, 19 nt, Artificial Sequence
  Description of Artificial Sequence: Synthetic oligonucleotide
  Antisense strand to SEQ ID NO: 123988
gauaacaaggacugauucu

SEQ ID NO: 123990 - RNA, 19 nt, Artificial Sequence
  Description of Artificial Sequence: Synthetic oligonucleotide
  Sense strand starting at position 259 of SEQ ID NO: 1583
ugaaaccuaucgcuacuaa

SEQ ID NO: 123991 - RNA, 19 nt, Artificial Sequence
  Description of Artificial Sequence: Synthetic oligonucleotide
  Antisense strand to SEQ ID NO: 123990
uuaguagcgauagguuuca

SEQ ID NO: 123992 - RNA, 19 nt, Artificial Sequence
  Description of Artificial Sequence: Synthetic oligonucleotide
  Sense strand starting at position 64 of SEQ ID NO: 1583
aauccuugggcauaacagu

SEQ ID NO: 123993 - RNA, 19 nt, Artificial Sequence
  Description of Artificial Sequence: Synthetic oligonucleotide
  Antisense strand to SEQ ID NO: 123992
acuguuaugcccaaggauu

SEQ ID NO: 123994 - RNA, 19 nt, Artificial Sequence
  Description of Artificial Sequence: Synthetic oligonucleotide
  Sense strand starting at position 7 of SEQ ID NO: 1584
gcaccuggccucugauaga

SEQ ID NO: 123995 - RNA, 19 nt, Artificial Sequence
  Description of Artificial Sequence: Synthetic oligonucleotide
  Antisense strand to SEQ ID NO: 123994
ucuaucagaggccaggugc

SEQ ID NO: 123996 - RNA, 19 nt, Artificial Sequence
  Description of Artificial Sequence: Synthetic oligonucleotide
  Sense strand starting at position 115 of SEQ ID NO: 1584
aaagguaucuagucauuga

SEQ ID NO: 123997 - RNA, 19 nt, Artificial Sequence
  Description of Artificial Sequence: Synthetic oligonucleotide
  Antisense strand to SEQ ID NO: 123996
ucaaugacuagauaccuuu

SEQ ID NO: 123998 - RNA, 19 nt, Artificial Sequence
  Description of Artificial Sequence: Synthetic oligonucleotide
  Sense strand starting at position 118 of SEQ ID NO: 1584
gguaucuagucauugaagg

SEQ ID NO: 123999 - RNA, 19 nt, Artificial Sequence
  Description of Artificial Sequence: Synthetic oligonucleotide
  Antisense strand to SEQ ID NO: 123998
ccuucaaugacuagauacc

SEQ ID NO: 124000 - RNA, 19 nt, Artificial Sequence
  Description of Artificial Sequence: Synthetic oligonucleotide
  Sense strand starting at position 119 of SEQ ID NO: 1584
guaucuagucauugaagga

SEQ ID NO: 124001 - RNA, 19 nt, Artificial Sequence
  Description of Artificial Sequence: Synthetic oligonucleotide
  Antisense strand to SEQ ID NO: 124000
uccuucaaugacuagauac

SEQ ID NO: 124002 - RNA, 19 nt, Artificial Sequence
  Description of Artificial Sequence: Synthetic oligonucleotide
  Sense strand starting at position 136 of SEQ ID NO: 1584
gaggguaugggauggcaua

SEQ ID NO: 124003 - RNA, 19 nt, Artificial Sequence
  Description of Artificial Sequence: Synthetic oligonucleotide
  Antisense strand to SEQ ID NO: 124002
uaugccaucccauacccuc

SEQ ID NO: 124004 - RNA, 19 nt, Artificial Sequence
  Description of Artificial Sequence: Synthetic oligonucleotide
  Sense strand starting at position 456 of SEQ ID NO: 1584
aggguuuggcuuuaucgaa

SEQ ID NO: 124005 - RNA, 19 nt, Artificial Sequence
  Description of Artificial Sequence: Synthetic oligonucleotide
  Antisense strand to SEQ ID NO: 124004
uucgauaaagccaaacccu

SEQ ID NO: 124006 - RNA, 19 nt, Artificial Sequence
  Description of Artificial Sequence: Synthetic oligonucleotide
  Sense strand starting at position 513 of SEQ ID NO: 1584
guguguuggcgacagauga

SEQ ID NO: 124007 - RNA, 19 nt, Artificial Sequence
  Description of Artificial Sequence: Synthetic oligonucleotide
  Antisense strand to SEQ ID NO: 124006
ucaucugucgccaacacac

SEQ ID NO: 124008 - RNA, 19 nt, Artificial Sequence
  Description of Artificial Sequence: Synthetic oligonucleotide
  Sense strand starting at position 517 of SEQ ID NO: 1584
guuggcgacagaugagaau

SEQ ID NO: 124009 - RNA, 19 nt, Artificial Sequence
  Description of Artificial Sequence: Synthetic oligonucleotide
  Antisense strand to SEQ ID NO: 124008
auucucaucugucgccaac

SEQ ID NO: 124010 - RNA, 19 nt, Artificial Sequence
  Description of Artificial Sequence: Synthetic oligonucleotide
  Sense strand starting at position 548 of SEQ ID NO: 1584
gggugguuucugggcaaag

SEQ ID NO: 124011 - RNA, 19 nt, Artificial Sequence
  Description of Artificial Sequence: Synthetic oligonucleotide
  Antisense strand to SEQ ID NO: 124010
cuuugcccagaaaccaccc

SEQ ID NO: 124012 - RNA, 19 nt, Artificial Sequence
  Description of Artificial Sequence: Synthetic oligonucleotide
  Sense strand starting at position 550 of SEQ ID NO: 1584
gugguuucugggcaaagca

SEQ ID NO: 124013 - RNA, 19 nt, Artificial Sequence
  Description of Artificial Sequence: Synthetic oligonucleotide
  Antisense strand to SEQ ID NO: 124012
ugcuuugcccagaaaccac

SEQ ID NO: 124014 - RNA, 19 nt, Artificial Sequence
  Description of Artificial Sequence: Synthetic oligonucleotide
  Sense strand starting at position 675 of SEQ ID NO: 1584
cuaauuuauugugagcaaa

SEQ ID NO: 124015 - RNA, 19 nt, Artificial Sequence
  Description of Artificial Sequence: Synthetic oligonucleotide
  Antisense strand to SEQ ID NO: 124014
uuugcucacaauaaauuag

SEQ ID NO: 124016 - RNA, 19 nt, Artificial Sequence
  Description of Artificial Sequence: Synthetic oligonucleotide
  Sense strand starting at position 801 of SEQ ID NO: 1584
cccuaacgauucccuagaa

SEQ ID NO: 124017 - RNA, 19 nt, Artificial Sequence
  Description of Artificial Sequence: Synthetic oligonucleotide
  Antisense strand to SEQ ID NO: 124016
uucuagggaaucguuaggg

SEQ ID NO: 124018 - RNA, 19 nt, Artificial Sequence
  Description of Artificial Sequence: Synthetic oligonucleotide
  Sense strand starting at position 802 of SEQ ID NO: 1584
ccuaacgauucccuagaaa

SEQ ID NO: 124019 - RNA, 19 nt, Artificial Sequence
  Description of Artificial Sequence: Synthetic oligonucleotide
  Antisense strand to SEQ ID NO: 124018
uuucuagggaaucguuagg

SEQ ID NO: 124020 - RNA, 19 nt, Artificial Sequence
  Description of Artificial Sequence: Synthetic oligonucleotide
  Sense strand starting at position 988 of SEQ ID NO: 1584
augguacggcauuaaacua

SEQ ID NO: 124021 - RNA, 19 nt, Artificial Sequence
  Description of Artificial Sequence: Synthetic oligonucleotide
  Antisense strand to SEQ ID NO: 124020
uaguuuaaugccguaccau

SEQ ID NO: 124022 - RNA, 19 nt, Artificial Sequence
  Description of Artificial Sequence: Synthetic oligonucleotide
  Sense strand starting at position 1060 of SEQ ID NO: 1584
uggccugaucucugcagau

SEQ ID NO: 124023 - RNA, 19 nt, Artificial Sequence
  Description of Artificial Sequence: Synthetic oligonucleotide
  Antisense strand to SEQ ID NO: 124022
aucugcagagaucaggcca

SEQ ID NO: 124024 - RNA, 19 nt, Artificial Sequence
  Description of Artificial Sequence: Synthetic oligonucleotide
  Sense strand starting at position 1062 of SEQ ID NO: 1584
gccugaucucugcagauaa

SEQ ID NO: 124025 - RNA, 19 nt, Artificial Sequence
  Description of Artificial Sequence: Synthetic oligonucleotide
  Antisense strand to SEQ ID NO: 124024
uuaucugcagagaucaggc

SEQ ID NO: 124026 - RNA, 19 nt, Artificial Sequence
  Description of Artificial Sequence: Synthetic oligonucleotide
  Sense strand starting at position 1072 of SEQ ID NO: 1584
ugcagauaaccguacacua

SEQ ID NO: 124027 - RNA, 19 nt, Artificial Sequence
  Description of Artificial Sequence: Synthetic oligonucleotide
  Antisense strand to SEQ ID NO: 124026
uaguguacgguuaucugca

SEQ ID NO: 124028 - RNA, 19 nt, Artificial Sequence
  Description of Artificial Sequence: Synthetic oligonucleotide
  Sense strand starting at position 1143 of SEQ ID NO: 1584
cccacaucuccgugauuga

SEQ ID NO: 124029 - RNA, 19 nt, Artificial Sequence
  Description of Artificial Sequence: Synthetic oligonucleotide
  Antisense strand to SEQ ID NO: 124028
ucaaucacggagauguggg

SEQ ID NO: 124030 - RNA, 19 nt, Artificial Sequence
  Description of Artificial Sequence: Synthetic oligonucleotide
  Sense strand starting at position 1144 of SEQ ID NO: 1584
ccacaucuccgugauugag

SEQ ID NO: 124031 - RNA, 19 nt, Artificial Sequence
  Description of Artificial Sequence: Synthetic oligonucleotide
  Antisense strand to SEQ ID NO: 124030
cucaaucacggagaugugg

SEQ ID NO: 124032 - RNA, 19 nt, Artificial Sequence
  Description of Artificial Sequence: Synthetic oligonucleotide
  Sense strand starting at position 1153 of SEQ ID NO: 1584
cgugauugagcaagcgauu

SEQ ID NO: 124033 - RNA, 19 nt, Artificial Sequence
  Description of Artificial Sequence: Synthetic oligonucleotide
  Antisense strand to SEQ ID NO: 124032
aaucgcuugcucaaucacg

SEQ ID NO: 124034 - RNA, 19 nt, Artificial Sequence
  Description of Artificial Sequence: Synthetic oligonucleotide
  Sense strand starting at position 1159 of SEQ ID NO: 1584
ugagcaagcgauuacaaau

SEQ ID NO: 124035 - RNA, 19 nt, Artificial Sequence
  Description of Artificial Sequence: Synthetic oligonucleotide
  Antisense strand to SEQ ID NO: 124034
auuuguaaucgcuugcuca

SEQ ID NO: 124036 - RNA, 19 nt, Artificial Sequence
  Description of Artificial Sequence: Synthetic oligonucleotide
  Sense strand starting at position 1307 of SEQ ID NO: 1584
cgucuuucaggagggugaa

SEQ ID NO: 124037 - RNA, 19 nt, Artificial Sequence
  Description of Artificial Sequence: Synthetic oligonucleotide
  Antisense strand to SEQ ID NO: 124036
uucacccuccugaaagacg

SEQ ID NO: 124038 - RNA, 19 nt, Artificial Sequence
  Description of Artificial Sequence: Synthetic oligonucleotide
  Sense strand starting at position 1383 of SEQ ID NO: 1584
gcuugagcuacugacaaga

SEQ ID NO: 124039 - RNA, 19 nt, Artificial Sequence
  Description of Artificial Sequence: Synthetic oligonucleotide
  Antisense strand to SEQ ID NO: 124038
ucuugucaguagcucaagc

SEQ ID NO: 124040 - RNA, 19 nt, Artificial Sequence
  Description of Artificial Sequence: Synthetic oligonucleotide
  Sense strand starting at position 1464 of SEQ ID NO: 1584
uuucguguuaaggaagaca

SEQ ID NO: 124041 - RNA, 19 nt, Artificial Sequence
  Description of Artificial Sequence: Synthetic oligonucleotide
  Antisense strand to SEQ ID NO: 124040
ugucuuccuuaacacgaaa

SEQ ID NO: 124042 - RNA, 19 nt, Artificial Sequence
  Description of Artificial Sequence: Synthetic oligonucleotide
  Sense strand starting at position 1512 of SEQ ID NO: 1584
cuugcuaggaguuaaugua

SEQ ID NO: 124043 - RNA, 19 nt, Artificial Sequence
  Description of Artificial Sequence: Synthetic oligonucleotide
  Antisense strand to SEQ ID NO: 124042
uacauuaacuccuagcaag

SEQ ID NO: 124044 - RNA, 19 nt, Artificial Sequence
  Description of Artificial Sequence: Synthetic oligonucleotide
  Sense strand starting at position 1520 of SEQ ID NO: 1584
gaguuaauguaagcaauca

SEQ ID NO: 124045 - RNA, 19 nt, Artificial Sequence
  Description of Artificial Sequence: Synthetic oligonucleotide
  Antisense strand to SEQ ID NO: 124044
ugauugcuuacauuaacuc

SEQ ID NO: 124046 - RNA, 19 nt, Artificial Sequence
  Description of Artificial Sequence: Synthetic oligonucleotide
  Sense strand starting at position 1630 of SEQ ID NO: 1584
agaggaguuugaagaggua

SEQ ID NO: 124047 - RNA, 19 nt, Artificial Sequence
  Description of Artificial Sequence: Synthetic oligonucleotide
  Antisense strand to SEQ ID NO: 124046
uaccucuucaaacuccucu

SEQ ID NO: 124048 - RNA, 19 nt, Artificial Sequence
  Description of Artificial Sequence: Synthetic oligonucleotide
  Sense strand starting at position 1895 of SEQ ID NO: 1584
ggcucuuacuuuccagaag

SEQ ID NO: 124049 - RNA, 19 nt, Artificial Sequence
  Description of Artificial Sequence: Synthetic oligonucleotide
  Antisense strand to SEQ ID NO: 124048
cuucuggaaaguaagagcc

SEQ ID NO: 124050 - RNA, 19 nt, Artificial Sequence
  Description of Artificial Sequence: Synthetic oligonucleotide
  Sense strand starting at position 2059 of SEQ ID NO: 1584
ucggguaaccaaugguauu

SEQ ID NO: 124051 - RNA, 19 nt, Artificial Sequence
  Description of Artificial Sequence: Synthetic oligonucleotide
  Antisense strand to SEQ ID NO: 124050
aauaccauugguuacccga

SEQ ID NO: 124052 - RNA, 19 nt, Artificial Sequence
  Description of Artificial Sequence: Synthetic oligonucleotide
  Sense strand starting at position 2075 of SEQ ID NO: 1584
auuguugaccagugcggaa

SEQ ID NO: 124053 - RNA, 19 nt, Artificial Sequence
  Description of Artificial Sequence: Synthetic oligonucleotide
  Antisense strand to SEQ ID NO: 124052
uuccgcacuggucaacaau

SEQ ID NO: 124054 - RNA, 19 nt, Artificial Sequence
  Description of Artificial Sequence: Synthetic oligonucleotide
  Sense strand starting at position 2162 of SEQ ID NO: 1584
gaaacagaauuagggauaa

SEQ ID NO: 124055 - RNA, 19 nt, Artificial Sequence
  Description of Artificial Sequence: Synthetic oligonucleotide
  Antisense strand to SEQ ID NO: 124054
uuaucccuaauucuguuuc

SEQ ID NO: 124056 - RNA, 19 nt, Artificial Sequence
  Description of Artificial Sequence: Synthetic oligonucleotide
  Sense strand starting at position 3102 of SEQ ID NO: 1584
gggcaauucgaaugcagua

SEQ ID NO: 124057 - RNA, 19 nt, Artificial Sequence
  Description of Artificial Sequence: Synthetic oligonucleotide
  Antisense strand to SEQ ID NO: 124056
uacugcauucgaauugccc

SEQ ID NO: 124058 - RNA, 19 nt, Artificial Sequence
  Description of Artificial Sequence: Synthetic oligonucleotide
  Sense strand starting at position 3107 of SEQ ID NO: 1584
auucgaaugcaguaguaau

SEQ ID NO: 124059 - RNA, 19 nt, Artificial Sequence
  Description of Artificial Sequence: Synthetic oligonucleotide
  Antisense strand to SEQ ID NO: 124058
auuacuacugcauucgaau

SEQ ID NO: 124060 - RNA, 19 nt, Artificial Sequence
  Description of Artificial Sequence: Synthetic oligonucleotide
  Sense strand starting at position 3645 of SEQ ID NO: 1584
uauuaugaacugugaguua

SEQ ID NO: 124061 - RNA, 19 nt, Artificial Sequence
  Description of Artificial Sequence: Synthetic oligonucleotide
  Antisense strand to SEQ ID NO: 124060
uaacucacaguucauaaua

SEQ ID NO: 124062 - RNA, 19 nt, Artificial Sequence
  Description of Artificial Sequence: Synthetic oligonucleotide
  Sense strand starting at position 3648 of SEQ ID NO: 1584
uaugaacugugaguuagaa

SEQ ID NO: 124063 - RNA, 19 nt, Artificial Sequence
  Description of Artificial Sequence: Synthetic oligonucleotide
  Antisense strand to SEQ ID NO: 124062
uucuaacucacaguucaua

SEQ ID NO: 124064 - RNA, 19 nt, Artificial Sequence
  Description of Artificial Sequence: Synthetic oligonucleotide
  Sense strand starting at position 3814 of SEQ ID NO: 1584
acacguguaucuccaauau

SEQ ID NO: 124065 - RNA, 19 nt, Artificial Sequence
  Description of Artificial Sequence: Synthetic oligonucleotide
  Antisense strand to SEQ ID NO: 124064
auauuggagauacacgugu

SEQ ID NO: 124066 - RNA, 19 nt, Artificial Sequence
  Description of Artificial Sequence: Synthetic oligonucleotide
  Sense strand starting at position 3818 of SEQ ID NO: 1584
guguaucuccaauauggcu

SEQ ID NO: 124067 - RNA, 19 nt, Artificial Sequence
  Description of Artificial Sequence: Synthetic oligonucleotide
  Antisense strand to SEQ ID NO: 124066
agccauauuggagauacac

SEQ ID NO: 124068 - RNA, 19 nt, Artificial Sequence
  Description of Artificial Sequence: Synthetic oligonucleotide
  Sense strand starting at position 3823 of SEQ ID NO: 1584
ucuccaauauggcuauagu

SEQ ID NO: 124069 - RNA, 19 nt, Artificial Sequence
  Description of Artificial Sequence: Synthetic oligonucleotide
  Antisense strand to SEQ ID NO: 124068
acuauagccauauuggaga

SEQ ID NO: 124070 - RNA, 19 nt, Artificial Sequence
  Description of Artificial Sequence: Synthetic oligonucleotide
  Sense strand starting at position 3824 of SEQ ID NO: 1584
cuccaauauggcuauaguu

SEQ ID NO: 124071 - RNA, 19 nt, Artificial Sequence
  Description of Artificial Sequence: Synthetic oligonucleotide
  Antisense strand to SEQ ID NO: 124070
aacuauagccauauuggag

SEQ ID NO: 124072 - RNA, 19 nt, Artificial Sequence
  Description of Artificial Sequence: Synthetic oligonucleotide
  Sense strand starting at position 3826 of SEQ ID NO: 1584
ccaauauggcuauaguugu

SEQ ID NO: 124073 - RNA, 19 nt, Artificial Sequence
  Description of Artificial Sequence: Synthetic oligonucleotide
  Antisense strand to SEQ ID NO: 124072
acaacuauagccauauugg

SEQ ID NO: 124074 - RNA, 19 nt, Artificial Sequence
  Description of Artificial Sequence: Synthetic oligonucleotide
  Sense strand starting at position 582 of SEQ ID NO: 1585
agacuaugcucuucgagac

SEQ ID NO: 124075 - RNA, 19 nt, Artificial Sequence
  Description of Artificial Sequence: Synthetic oligonucleotide
  Antisense strand to SEQ ID NO: 124074
gucucgaagagcauagucu

SEQ ID NO: 124076 - RNA, 19 nt, Artificial Sequence
  Description of Artificial Sequence: Synthetic oligonucleotide
  Sense strand starting at position 814 of SEQ ID NO: 1585
gcugauacaucugcuugua

SEQ ID NO: 124077 - RNA, 19 nt, Artificial Sequence
  Description of Artificial Sequence: Synthetic oligonucleotide
  Antisense strand to SEQ ID NO: 124076
uacaagcagauguaucagc

SEQ ID NO: 124078 - RNA, 19 nt, Artificial Sequence
  Description of Artificial Sequence: Synthetic oligonucleotide
  Sense strand starting at position 816 of SEQ ID NO: 1585
ugauacaucugcuuguauu

SEQ ID NO: 124079 - RNA, 19 nt, Artificial Sequence
  Description of Artificial Sequence: Synthetic oligonucleotide
  Antisense strand to SEQ ID NO: 124078
aauacaagcagauguauca

SEQ ID NO: 124080 - RNA, 19 nt, Artificial Sequence
  Description of Artificial Sequence: Synthetic oligonucleotide
  Sense strand starting at position 1324 of SEQ ID NO: 1585
aaugcaaacucggauuaga

SEQ ID NO: 124081 - RNA, 19 nt, Artificial Sequence
  Description of Artificial Sequence: Synthetic oligonucleotide
  Antisense strand to SEQ ID NO: 124080
ucuaauccgaguuugcauu

SEQ ID NO: 124082 - RNA, 19 nt, Artificial Sequence
  Description of Artificial Sequence: Synthetic oligonucleotide
  Sense strand starting at position 1347 of SEQ ID NO: 1585
gguuucuggucucuaaaga

SEQ ID NO: 124083 - RNA, 19 nt, Artificial Sequence
  Description of Artificial Sequence: Synthetic oligonucleotide
  Antisense strand to SEQ ID NO: 124082
ucuuuagagaccagaaacc

SEQ ID NO: 124084 - RNA, 19 nt, Artificial Sequence
  Description of Artificial Sequence: Synthetic oligonucleotide
  Sense strand starting at position 1348 of SEQ ID NO: 1585
guuucuggucucuaaagaa

SEQ ID NO: 124085 - RNA, 19 nt, Artificial Sequence
  Description of Artificial Sequence: Synthetic oligonucleotide
  Antisense strand to SEQ ID NO: 124084
uucuuuagagaccagaaac

SEQ ID NO: 124086 - RNA, 19 nt, Artificial Sequence
  Description of Artificial Sequence: Synthetic oligonucleotide
  Sense strand starting at position 1410 of SEQ ID NO: 1585
acacuaggcuguucgagua

SEQ ID NO: 124087 - RNA, 19 nt, Artificial Sequence
  Description of Artificial Sequence: Synthetic oligonucleotide
  Antisense strand to SEQ ID NO: 124086
uacucgaacagccuagugu

SEQ ID NO: 124088 - RNA, 19 nt, Artificial Sequence
  Description of Artificial Sequence: Synthetic oligonucleotide
  Sense strand starting at position 1417 of SEQ ID NO: 1585
gcuguucgaguaugagagu

SEQ ID NO: 124089 - RNA, 19 nt, Artificial Sequence
  Description of Artificial Sequence: Synthetic oligonucleotide
  Antisense strand to SEQ ID NO: 124088
acucucauacucgaacagc

SEQ ID NO: 124090 - RNA, 19 nt, Artificial Sequence
  Description of Artificial Sequence: Synthetic oligonucleotide
  Sense strand starting at position 1450 of SEQ ID NO: 1585
gcgugacggcgauugucaa

SEQ ID NO: 124091 - RNA, 19 nt, Artificial Sequence
  Description of Artificial Sequence: Synthetic oligonucleotide
  Antisense strand to SEQ ID NO: 124090
uugacaaucgccgucacgc

SEQ ID NO: 124092 - RNA, 19 nt, Artificial Sequence
  Description of Artificial Sequence: Synthetic oligonucleotide
  Sense strand starting at position 1458 of SEQ ID NO: 1585
gcgauugucaacguggguu

SEQ ID NO: 124093 - RNA, 19 nt, Artificial Sequence
  Description of Artificial Sequence: Synthetic oligonucleotide
  Antisense strand to SEQ ID NO: 124092
aacccacguugacaaucgc

SEQ ID NO: 124094 - RNA, 19 nt, Artificial Sequence
  Description of Artificial Sequence: Synthetic oligonucleotide
  Sense strand starting at position 1499 of SEQ ID NO: 1585
cagccagcccguuaacuaa

SEQ ID NO: 124095 - RNA, 19 nt, Artificial Sequence
  Description of Artificial Sequence: Synthetic oligonucleotide
  Antisense strand to SEQ ID NO: 124094
uuaguuaacgggcuggcug

SEQ ID NO: 124096 - RNA, 19 nt, Artificial Sequence
  Description of Artificial Sequence: Synthetic oligonucleotide
  Sense strand starting at position 1510 of SEQ ID NO: 1585
uuaacuaauucucuagggu

SEQ ID NO: 124097 - RNA, 19 nt, Artificial Sequence
  Description of Artificial Sequence: Synthetic oligonucleotide
  Antisense strand to SEQ ID NO: 124096
acccuagagaauuaguuaa

SEQ ID NO: 124098 - RNA, 19 nt, Artificial Sequence
  Description of Artificial Sequence: Synthetic oligonucleotide
  Sense strand starting at position 1527 of SEQ ID NO: 1585
guuaguuucgagcugucuu

SEQ ID NO: 124099 - RNA, 19 nt, Artificial Sequence
  Description of Artificial Sequence: Synthetic oligonucleotide
  Antisense strand to SEQ ID NO: 124098
aagacagcucgaaacuaac

SEQ ID NO: 124100 - RNA, 19 nt, Artificial Sequence
  Description of Artificial Sequence: Synthetic oligonucleotide
  Sense strand starting at position 1551 of SEQ ID NO: 1585
gccauaaccuguuuggaga

SEQ ID NO: 124101 - RNA, 19 nt, Artificial Sequence
  Description of Artificial Sequence: Synthetic oligonucleotide
  Antisense strand to SEQ ID NO: 124100
ucuccaaacagguuauggc

SEQ ID NO: 124102 - RNA, 19 nt, Artificial Sequence
  Description of Artificial Sequence: Synthetic oligonucleotide
  Sense strand starting at position 1772 of SEQ ID NO: 1585
acauguggugcuggaguaa

SEQ ID NO: 124103 - RNA, 19 nt, Artificial Sequence
  Description of Artificial Sequence: Synthetic oligonucleotide
  Antisense strand to SEQ ID NO: 124102
uuacuccagcaccacaugu

SEQ ID NO: 124104 - RNA, 19 nt, Artificial Sequence
  Description of Artificial Sequence: Synthetic oligonucleotide
  Sense strand starting at position 1784 of SEQ ID NO: 1585
ggaguaaaggccugcacaa

SEQ ID NO: 124105 - RNA, 19 nt, Artificial Sequence
  Description of Artificial Sequence: Synthetic oligonucleotide
  Antisense strand to SEQ ID NO: 124104
uugugcaggccuuuacucc

SEQ ID NO: 124106 - RNA, 19 nt, Artificial Sequence
  Description of Artificial Sequence: Synthetic oligonucleotide
  Sense strand starting at position 2474 of SEQ ID NO: 1585
augugagaucauuggaagu

SEQ ID NO: 124107 - RNA, 19 nt, Artificial Sequence
  Description of Artificial Sequence: Synthetic oligonucleotide
  Antisense strand to SEQ ID NO: 124106
acuuccaaugaucucacau

SEQ ID NO: 124108 - RNA, 19 nt, Artificial Sequence
  Description of Artificial Sequence: Synthetic oligonucleotide
  Sense strand starting at position 2476 of SEQ ID NO: 1585
gugagaucauuggaaguug

SEQ ID NO: 124109 - RNA, 19 nt, Artificial Sequence
  Description of Artificial Sequence: Synthetic oligonucleotide
  Antisense strand to SEQ ID NO: 124108
caacuuccaaugaucucac

SEQ ID NO: 124110 - RNA, 19 nt, Artificial Sequence
  Description of Artificial Sequence: Synthetic oligonucleotide
  Sense strand starting at position 2544 of SEQ ID NO: 1585
ggucuugucccuuagccua

SEQ ID NO: 124111 - RNA, 19 nt, Artificial Sequence
  Description of Artificial Sequence: Synthetic oligonucleotide
  Antisense strand to SEQ ID NO: 124110
uaggcuaagggacaagacc

SEQ ID NO: 124112 - RNA, 19 nt, Artificial Sequence
  Description of Artificial Sequence: Synthetic oligonucleotide
  Sense strand starting at position 2643 of SEQ ID NO: 1585
gucagagaauccuagaaau

SEQ ID NO: 124113 - RNA, 19 nt, Artificial Sequence
  Description of Artificial Sequence: Synthetic oligonucleotide
  Antisense strand to SEQ ID NO: 124112
auuucuaggauucucugac

SEQ ID NO: 124114 - RNA, 19 nt, Artificial Sequence
  Description of Artificial Sequence: Synthetic oligonucleotide
  Sense strand starting at position 2654 of SEQ ID NO: 1585
cuagaaauuuauugcuuga

SEQ ID NO: 124115 - RNA, 19 nt, Artificial Sequence
  Description of Artificial Sequence: Synthetic oligonucleotide
  Antisense strand to SEQ ID NO: 124114
ucaagcaauaaauuucuag

SEQ ID NO: 124116 - RNA, 19 nt, Artificial Sequence
  Description of Artificial Sequence: Synthetic oligonucleotide
  Sense strand starting at position 2837 of SEQ ID NO: 1585
gcacuuagaugcucaguuu

SEQ ID NO: 124117 - RNA, 19 nt, Artificial Sequence
  Description of Artificial Sequence: Synthetic oligonucleotide
  Antisense strand to SEQ ID NO: 124116
aaacugagcaucuaagugc

SEQ ID NO: 124118 - RNA, 19 nt, Artificial Sequence
  Description of Artificial Sequence: Synthetic oligonucleotide
  Sense strand starting at position 2840 of SEQ ID NO: 1585
cuuagaugcucaguuuguu

SEQ ID NO: 124119 - RNA, 19 nt, Artificial Sequence
  Description of Artificial Sequence: Synthetic oligonucleotide
  Antisense strand to SEQ ID NO: 124118
aacaaacugagcaucuaag

SEQ ID NO: 124120 - RNA, 19 nt, Artificial Sequence
  Description of Artificial Sequence: Synthetic oligonucleotide
  Sense strand starting at position 2843 of SEQ ID NO: 1585
agaugcucaguuuguuaaa

SEQ ID NO: 124121 - RNA, 19 nt, Artificial Sequence
  Description of Artificial Sequence: Synthetic oligonucleotide
  Antisense strand to SEQ ID NO: 124120
uuuaacaaacugagcaucu

SEQ ID NO: 124122 - RNA, 19 nt, Artificial Sequence
  Description of Artificial Sequence: Synthetic oligonucleotide
  Sense strand starting at position 2844 of SEQ ID NO: 1585
gaugcucaguuuguuaaau

SEQ ID NO: 124123 - RNA, 19 nt, Artificial Sequence
  Description of Artificial Sequence: Synthetic oligonucleotide
  Antisense strand to SEQ ID NO: 124122
auuuaacaaacugagcauc

SEQ ID NO: 124124 - RNA, 19 nt, Artificial Sequence
  Description of Artificial Sequence: Synthetic oligonucleotide
  Sense strand starting at position 2929 of SEQ ID NO: 1585
gucaacgugcccuguaaga

SEQ ID NO: 124125 - RNA, 19 nt, Artificial Sequence
  Description of Artificial Sequence: Synthetic oligonucleotide
  Antisense strand to SEQ ID NO: 124124
ucuuacagggcacguugac

SEQ ID NO: 124126 - RNA, 19 nt, Artificial Sequence
  Description of Artificial Sequence: Synthetic oligonucleotide
  Sense strand starting at position 2939 of SEQ ID NO: 1585
ccuguaagagcaugaucaa

SEQ ID NO: 124127 - RNA, 19 nt, Artificial Sequence
  Description of Artificial Sequence: Synthetic oligonucleotide
  Antisense strand to SEQ ID NO: 124126
uugaucaugcucuuacagg

SEQ ID NO: 124128 - RNA, 19 nt, Artificial Sequence
  Description of Artificial Sequence: Synthetic oligonucleotide
  Sense strand starting at position 3012 of SEQ ID NO: 1585
uucccugugcuaugaaauc

SEQ ID NO: 124129 - RNA, 19 nt, Artificial Sequence
  Description of Artificial Sequence: Synthetic oligonucleotide
  Antisense strand to SEQ ID NO: 124128
gauuucauagcacagggaa

SEQ ID NO: 124130 - RNA, 19 nt, Artificial Sequence
  Description of Artificial Sequence: Synthetic oligonucleotide
  Sense strand starting at position 3031 of SEQ ID NO: 1585
ugagaauccugccuaugcu

SEQ ID NO: 124131 - RNA, 19 nt, Artificial Sequence
  Description of Artificial Sequence: Synthetic oligonucleotide
  Antisense strand to SEQ ID NO: 124130
agcauaggcaggauucuca

SEQ ID NO: 124132 - RNA, 19 nt, Artificial Sequence
  Description of Artificial Sequence: Synthetic oligonucleotide
  Sense strand starting at position 3337 of SEQ ID NO: 1585
gguagaaucuuuguuggac

SEQ ID NO: 124133 - RNA, 19 nt, Artificial Sequence
  Description of Artificial Sequence: Synthetic oligonucleotide
  Antisense strand to SEQ ID NO: 124132
guccaacaaagauucuacc

SEQ ID NO: 124134 - RNA, 19 nt, Artificial Sequence
  Description of Artificial Sequence: Synthetic oligonucleotide
  Sense strand starting at position 3338 of SEQ ID NO: 1585
guagaaucuuuguuggaca

SEQ ID NO: 124135 - RNA, 19 nt, Artificial Sequence
  Description of Artificial Sequence: Synthetic oligonucleotide
  Antisense strand to SEQ ID NO: 124134
uguccaacaaagauucuac

SEQ ID NO: 124136 - RNA, 19 nt, Artificial Sequence
  Description of Artificial Sequence: Synthetic oligonucleotide
  Sense strand starting at position 3340 of SEQ ID NO: 1585
agaaucuuuguuggacagu

SEQ ID NO: 124137 - RNA, 19 nt, Artificial Sequence
  Description of Artificial Sequence: Synthetic oligonucleotide
  Antisense strand to SEQ ID NO: 124136
acuguccaacaaagauucu

SEQ ID NO: 124138 - RNA, 19 nt, Artificial Sequence
  Description of Artificial Sequence: Synthetic oligonucleotide
  Sense strand starting at position 3380 of SEQ ID NO: 1585
aggguagagccuugagaag

SEQ ID NO: 124139 - RNA, 19 nt, Artificial Sequence
  Description of Artificial Sequence: Synthetic oligonucleotide
  Antisense strand to SEQ ID NO: 124138
cuucucaaggcucuacccu

SEQ ID NO: 124140 - RNA, 19 nt, Artificial Sequence
  Description of Artificial Sequence: Synthetic oligonucleotide
  Sense strand starting at position 3391 of SEQ ID NO: 1585
uugagaagucagugaagag

SEQ ID NO: 124141 - RNA, 19 nt, Artificial Sequence
  Description of Artificial Sequence: Synthetic oligonucleotide
  Antisense strand to SEQ ID NO: 124140
cucuucacugacuucucaa

SEQ ID NO: 124142 - RNA, 19 nt, Artificial Sequence
  Description of Artificial Sequence: Synthetic oligonucleotide
  Sense strand starting at position 3401 of SEQ ID NO: 1585
agugaagaguugucagugu

SEQ ID NO: 124143 - RNA, 19 nt, Artificial Sequence
  Description of Artificial Sequence: Synthetic oligonucleotide
  Antisense strand to SEQ ID NO: 124142
acacugacaacucuucacu

SEQ ID NO: 124144 - RNA, 19 nt, Artificial Sequence
  Description of Artificial Sequence: Synthetic oligonucleotide
  Sense strand starting at position 3405 of SEQ ID NO: 1585
aagaguugucagugucccu

SEQ ID NO: 124145 - RNA, 19 nt, Artificial Sequence
  Description of Artificial Sequence: Synthetic oligonucleotide
  Antisense strand to SEQ ID NO: 124144
agggacacugacaacucuu

SEQ ID NO: 124146 - RNA, 19 nt, Artificial Sequence
  Description of Artificial Sequence: Synthetic oligonucleotide
  Sense strand starting at position 3529 of SEQ ID NO: 1585
cagcaaaggugagacuuua

SEQ ID NO: 124147 - RNA, 19 nt, Artificial Sequence
  Description of Artificial Sequence: Synthetic oligonucleotide
  Antisense strand to SEQ ID NO: 124146
uaaagucucaccuuugcug

SEQ ID NO: 124148 - RNA, 19 nt, Artificial Sequence
  Description of Artificial Sequence: Synthetic oligonucleotide
  Sense strand starting at position 3584 of SEQ ID NO: 1585
cuagauucuccagaauugu

SEQ ID NO: 124149 - RNA, 19 nt, Artificial Sequence
  Description of Artificial Sequence: Synthetic oligonucleotide
  Antisense strand to SEQ ID NO: 124148
acaauucuggagaaucuag

SEQ ID NO: 124150 - RNA, 19 nt, Artificial Sequence
  Description of Artificial Sequence: Synthetic oligonucleotide
  Sense strand starting at position 3873 of SEQ ID NO: 1585
caagguaggaguugugaaa

SEQ ID NO: 124151 - RNA, 19 nt, Artificial Sequence
  Description of Artificial Sequence: Synthetic oligonucleotide
  Antisense strand to SEQ ID NO: 124150
uuucacaacuccuaccuug

SEQ ID NO: 124152 - RNA, 19 nt, Artificial Sequence
  Description of Artificial Sequence: Synthetic oligonucleotide
  Sense strand starting at position 3876 of SEQ ID NO: 1585
gguaggaguugugaaagga

SEQ ID NO: 124153 - RNA, 19 nt, Artificial Sequence
  Description of Artificial Sequence: Synthetic oligonucleotide
  Antisense strand to SEQ ID NO: 124152
uccuuucacaacuccuacc

SEQ ID NO: 124154 - RNA, 19 nt, Artificial Sequence
  Description of Artificial Sequence: Synthetic oligonucleotide
  Sense strand starting at position 3895 of SEQ ID NO: 1586
cuaugauucuguuucuccu

SEQ ID NO: 124155 - RNA, 19 nt, Artificial Sequence
  Description of Artificial Sequence: Synthetic oligonucleotide
  Antisense strand to SEQ ID NO: 124154
aggagaaacagaaucauag

SEQ ID NO: 124156 - RNA, 19 nt, Artificial Sequence
  Description of Artificial Sequence: Synthetic oligonucleotide
  Sense strand starting at position 3889 of SEQ ID NO: 1586
ugugaacuaugauucuguu

SEQ ID NO: 124157 - RNA, 19 nt, Artificial Sequence
  Description of Artificial Sequence: Synthetic oligonucleotide
  Antisense strand to SEQ ID NO: 124156
aacagaaucauaguucaca

SEQ ID NO: 124158 - RNA, 19 nt, Artificial Sequence
  Description of Artificial Sequence: Synthetic oligonucleotide
  Sense strand starting at position 3884 of SEQ ID NO: 1586
ugcguugugaacuaugauu

SEQ ID NO: 124159 - RNA, 19 nt, Artificial Sequence
  Description of Artificial Sequence: Synthetic oligonucleotide
  Antisense strand to SEQ ID NO: 124158
aaucauaguucacaacgca

SEQ ID NO: 124160 - RNA, 19 nt, Artificial Sequence
  Description of Artificial Sequence: Synthetic oligonucleotide
  Sense strand starting at position 3878 of SEQ ID NO: 1586
uucguuugcguugugaacu

SEQ ID NO: 124161 - RNA, 19 nt, Artificial Sequence
  Description of Artificial Sequence: Synthetic oligonucleotide
  Antisense strand to SEQ ID NO: 124160
aguucacaacgcaaacgaa

SEQ ID NO: 124162 - RNA, 19 nt, Artificial Sequence
  Description of Artificial Sequence: Synthetic oligonucleotide
  Sense strand starting at position 3841 of SEQ ID NO: 1586
uuugacugguccuuugacu

SEQ ID NO: 124163 - RNA, 19 nt, Artificial Sequence
  Description of Artificial Sequence: Synthetic oligonucleotide
  Antisense strand to SEQ ID NO: 124162
agucaaaggaccagucaaa

SEQ ID NO: 124164 - RNA, 19 nt, Artificial Sequence
  Description of Artificial Sequence: Synthetic oligonucleotide
  Sense strand starting at position 3819 of SEQ ID NO: 1586
ucuagucacaagugugauu

SEQ ID NO: 124165 - RNA, 19 nt, Artificial Sequence
  Description of Artificial Sequence: Synthetic oligonucleotide
  Antisense strand to SEQ ID NO: 124164
aaucacacuugugacuaga

SEQ ID NO: 124166 - RNA, 19 nt, Artificial Sequence
  Description of Artificial Sequence: Synthetic oligonucleotide
  Sense strand starting at position 3812 of SEQ ID NO: 1586
ccacgagucuagucacaag

SEQ ID NO: 124167 - RNA, 19 nt, Artificial Sequence
  Description of Artificial Sequence: Synthetic oligonucleotide
  Antisense strand to SEQ ID NO: 124166
cuugugacuagacucgugg

SEQ ID NO: 124168 - RNA, 19 nt, Artificial Sequence
  Description of Artificial Sequence: Synthetic oligonucleotide
  Sense strand starting at position 3792 of SEQ ID NO: 1586
ugagucaauguuuaaugca

SEQ ID NO: 124169 - RNA, 19 nt, Artificial Sequence
  Description of Artificial Sequence: Synthetic oligonucleotide
  Antisense strand to SEQ ID NO: 124168
ugcauuaaacauugacuca

SEQ ID NO: 124170 - RNA, 19 nt, Artificial Sequence
  Description of Artificial Sequence: Synthetic oligonucleotide
  Sense strand starting at position 3686 of SEQ ID NO: 1586
cccagaugcugaccucaua

SEQ ID NO: 124171 - RNA, 19 nt, Artificial Sequence
  Description of Artificial Sequence: Synthetic oligonucleotide
  Antisense strand to SEQ ID NO: 124170
uaugaggucagcaucuggg

SEQ ID NO: 124172 - RNA, 19 nt, Artificial Sequence
  Description of Artificial Sequence: Synthetic oligonucleotide
  Sense strand starting at position 3188 of SEQ ID NO: 1586
cugaaucccggcuggauaa

SEQ ID NO: 124173 - RNA, 19 nt, Artificial Sequence
  Description of Artificial Sequence: Synthetic oligonucleotide
  Antisense strand to SEQ ID NO: 124172
uuauccagccgggauucag

SEQ ID NO: 124174 - RNA, 19 nt, Artificial Sequence
  Description of Artificial Sequence: Synthetic oligonucleotide
  Sense strand starting at position 3092 of SEQ ID NO: 1586
gugaguuugcaccaaguga

SEQ ID NO: 124175 - RNA, 19 nt, Artificial Sequence
  Description of Artificial Sequence: Synthetic oligonucleotide
  Antisense strand to SEQ ID NO: 124174
ucacuuggugcaaacucac

SEQ ID NO: 124176 - RNA, 19 nt, Artificial Sequence
  Description of Artificial Sequence: Synthetic oligonucleotide
  Sense strand starting at position 3088 of SEQ ID NO: 1586
ggaggugaguuugcaccaa

SEQ ID NO: 124177 - RNA, 19 nt, Artificial Sequence
  Description of Artificial Sequence: Synthetic oligonucleotide
  Antisense strand to SEQ ID NO: 124176
uuggugcaaacucaccucc

SEQ ID NO: 124178 - RNA, 19 nt, Artificial Sequence
  Description of Artificial Sequence: Synthetic oligonucleotide
  Sense strand starting at position 2970 of SEQ ID NO: 1586
agucgucuugaagaaccaa

SEQ ID NO: 124179 - RNA, 19 nt, Artificial Sequence
  Description of Artificial Sequence: Synthetic oligonucleotide
  Antisense strand to SEQ ID NO: 124178
uugguucuucaagacgacu

SEQ ID NO: 124180 - RNA, 19 nt, Artificial Sequence
  Description of Artificial Sequence: Synthetic oligonucleotide
  Sense strand starting at position 2967 of SEQ ID NO: 1586
ugcagucgucuugaagaac

SEQ ID NO: 124181 - RNA, 19 nt, Artificial Sequence
  Description of Artificial Sequence: Synthetic oligonucleotide
  Antisense strand to SEQ ID NO: 124180
guucuucaagacgacugca

SEQ ID NO: 124182 - RNA, 19 nt, Artificial Sequence
  Description of Artificial Sequence: Synthetic oligonucleotide
  Sense strand starting at position 2954 of SEQ ID NO: 1586
cuguaucauccguugcagu

SEQ ID NO: 124183 - RNA, 19 nt, Artificial Sequence
  Description of Artificial Sequence: Synthetic oligonucleotide
  Antisense strand to SEQ ID NO: 124182
acugcaacggaugauacag

SEQ ID NO: 124184 - RNA, 19 nt, Artificial Sequence
  Description of Artificial Sequence: Synthetic oligonucleotide
  Sense strand starting at position 2469 of SEQ ID NO: 1586
ugccuuaggguguauacau

SEQ ID NO: 124185 - RNA, 19 nt, Artificial Sequence
  Description of Artificial Sequence: Synthetic oligonucleotide
  Antisense strand to SEQ ID NO: 124184
auguauacacccuaaggca

SEQ ID NO: 124186 - RNA, 19 nt, Artificial Sequence
  Description of Artificial Sequence: Synthetic oligonucleotide
  Sense strand starting at position 2409 of SEQ ID NO: 1586
gaacguaagcuuuaaagau

SEQ ID NO: 124187 - RNA, 19 nt, Artificial Sequence
  Description of Artificial Sequence: Synthetic oligonucleotide
  Antisense strand to SEQ ID NO: 124186
aucuuuaaagcuuacguuc

SEQ ID NO: 124188 - RNA, 19 nt, Artificial Sequence
  Description of Artificial Sequence: Synthetic oligonucleotide
  Sense strand starting at position 2405 of SEQ ID NO: 1586
augggaacguaagcuuuaa

SEQ ID NO: 124189 - RNA, 19 nt, Artificial Sequence
  Description of Artificial Sequence: Synthetic oligonucleotide
  Antisense strand to SEQ ID NO: 124188
uuaaagcuuacguucccau

SEQ ID NO: 124190 - RNA, 19 nt, Artificial Sequence
  Description of Artificial Sequence: Synthetic oligonucleotide
  Sense strand starting at position 2381 of SEQ ID NO: 1586
agcagaaccucauuagauc

SEQ ID NO: 124191 - RNA, 19 nt, Artificial Sequence
  Description of Artificial Sequence: Synthetic oligonucleotide
  Antisense strand to SEQ ID NO: 124190
gaucuaaugagguucugcu

SEQ ID NO: 124192 - RNA, 19 nt, Artificial Sequence
  Description of Artificial Sequence: Synthetic oligonucleotide
  Sense strand starting at position 2291 of SEQ ID NO: 1586
agaguagacuauucgguag

SEQ ID NO: 124193 - RNA, 19 nt, Artificial Sequence
  Description of Artificial Sequence: Synthetic oligonucleotide
  Antisense strand to SEQ ID NO: 124192
cuaccgaauagucuacucu

SEQ ID NO: 124194 - RNA, 19 nt, Artificial Sequence
  Description of Artificial Sequence: Synthetic oligonucleotide
  Sense strand starting at position 2280 of SEQ ID NO: 1586
ugacucucgcgagaguaga

SEQ ID NO: 124195 - RNA, 19 nt, Artificial Sequence
  Description of Artificial Sequence: Synthetic oligonucleotide
  Antisense strand to SEQ ID NO: 124194
ucuacucucgcgagaguca

SEQ ID NO: 124196 - RNA, 19 nt, Artificial Sequence
  Description of Artificial Sequence: Synthetic oligonucleotide
  Sense strand starting at position 2278 of SEQ ID NO: 1586
ucugacucucgcgagagua

SEQ ID NO: 124197 - RNA, 19 nt, Artificial Sequence
  Description of Artificial Sequence: Synthetic oligonucleotide
  Antisense strand to SEQ ID NO: 124196
uacucucgcgagagucaga

SEQ ID NO: 124198 - RNA, 19 nt, Artificial Sequence
  Description of Artificial Sequence: Synthetic oligonucleotide
  Sense strand starting at position 1722 of SEQ ID NO: 1586
acacgauuccuuuacugac

SEQ ID NO: 124199 - RNA, 19 nt, Artificial Sequence
  Description of Artificial Sequence: Synthetic oligonucleotide
  Antisense strand to SEQ ID NO: 124198
gucaguaaaggaaucgugu

SEQ ID NO: 124200 - RNA, 19 nt, Artificial Sequence
  Description of Artificial Sequence: Synthetic oligonucleotide
  Sense strand starting at position 1640 of SEQ ID NO: 1586
ugggaaaguccugagcuca

SEQ ID NO: 124201 - RNA, 19 nt, Artificial Sequence
  Description of Artificial Sequence: Synthetic oligonucleotide
  Antisense strand to SEQ ID NO: 124200
ugagcucaggacuuuccca

SEQ ID NO: 124202 - RNA, 19 nt, Artificial Sequence
  Description of Artificial Sequence: Synthetic oligonucleotide
  Sense strand starting at position 1484 of SEQ ID NO: 1586
cgucauuucuccucuagug

SEQ ID NO: 124203 - RNA, 19 nt, Artificial Sequence
  Description of Artificial Sequence: Synthetic oligonucleotide
  Antisense strand to SEQ ID NO: 124202
cacuagaggagaaaugacg

SEQ ID NO: 124204 - RNA, 19 nt, Artificial Sequence
  Description of Artificial Sequence: Synthetic oligonucleotide
  Sense strand starting at position 1481 of SEQ ID NO: 1586
cgucgucauuucuccucua

SEQ ID NO: 124205 - RNA, 19 nt, Artificial Sequence
  Description of Artificial Sequence: Synthetic oligonucleotide
  Antisense strand to SEQ ID NO: 124204
uagaggagaaaugacgacg

SEQ ID NO: 124206 - RNA, 19 nt, Artificial Sequence
  Description of Artificial Sequence: Synthetic oligonucleotide
  Sense strand starting at position 998 of SEQ ID NO: 1586
ggguuauguauagacgaag

SEQ ID NO: 124207 - RNA, 19 nt, Artificial Sequence
  Description of Artificial Sequence: Synthetic oligonucleotide
  Antisense strand to SEQ ID NO: 124206
cuucgucuauacauaaccc

SEQ ID NO: 124208 - RNA, 19 nt, Artificial Sequence
  Description of Artificial Sequence: Synthetic oligonucleotide
  Sense strand starting at position 996 of SEQ ID NO: 1586
guggguuauguauagacga

SEQ ID NO: 124209 - RNA, 19 nt, Artificial Sequence
  Description of Artificial Sequence: Synthetic oligonucleotide
  Antisense strand to SEQ ID NO: 124208
ucgucuauacauaacccac

SEQ ID NO: 124210 - RNA, 19 nt, Artificial Sequence
  Description of Artificial Sequence: Synthetic oligonucleotide
  Sense strand starting at position 956 of SEQ ID NO: 1586
uuaagaaucugggcagagu

SEQ ID NO: 124211 - RNA, 19 nt, Artificial Sequence
  Description of Artificial Sequence: Synthetic oligonucleotide
  Antisense strand to SEQ ID NO: 124210
acucugcccagauucuuaa

SEQ ID NO: 124212 - RNA, 19 nt, Artificial Sequence
  Description of Artificial Sequence: Synthetic oligonucleotide
  Sense strand starting at position 916 of SEQ ID NO: 1586
aaguguccugcucaagguu

SEQ ID NO: 124213 - RNA, 19 nt, Artificial Sequence
  Description of Artificial Sequence: Synthetic oligonucleotide
  Antisense strand to SEQ ID NO: 124212
aaccuugagcaggacacuu

SEQ ID NO: 124214 - RNA, 19 nt, Artificial Sequence
  Description of Artificial Sequence: Synthetic oligonucleotide
  Sense strand starting at position 841 of SEQ ID NO: 1586
ucuuguaauuaggcagauu

SEQ ID NO: 124215 - RNA, 19 nt, Artificial Sequence
  Description of Artificial Sequence: Synthetic oligonucleotide
  Antisense strand to SEQ ID NO: 124214
aaucugccuaauuacaaga

SEQ ID NO: 124216 - RNA, 19 nt, Artificial Sequence
  Description of Artificial Sequence: Synthetic oligonucleotide
  Sense strand starting at position 837 of SEQ ID NO: 1586
auaaucuuguaauuaggca

SEQ ID NO: 124217 - RNA, 19 nt, Artificial Sequence
  Description of Artificial Sequence: Synthetic oligonucleotide
  Antisense strand to SEQ ID NO: 124216
ugccuaauuacaagauuau

SEQ ID NO: 124218 - RNA, 19 nt, Artificial Sequence
  Description of Artificial Sequence: Synthetic oligonucleotide
  Sense strand starting at position 780 of SEQ ID NO: 1586
uuuaucuucugacuuacga

SEQ ID NO: 124219 - RNA, 19 nt, Artificial Sequence
  Description of Artificial Sequence: Synthetic oligonucleotide
  Antisense strand to SEQ ID NO: 124218
ucguaagucagaagauaaa

SEQ ID NO: 124220 - RNA, 19 nt, Artificial Sequence
  Description of Artificial Sequence: Synthetic oligonucleotide
  Sense strand starting at position 652 of SEQ ID NO: 1586
auccgugugguauaaguaa

SEQ ID NO: 124221 - RNA, 19 nt, Artificial Sequence
  Description of Artificial Sequence: Synthetic oligonucleotide
  Antisense strand to SEQ ID NO: 124220
uuacuuauaccacacggau

SEQ ID NO: 124222 - RNA, 19 nt, Artificial Sequence
  Description of Artificial Sequence: Synthetic oligonucleotide
  Sense strand starting at position 337 of SEQ ID NO: 1586
ccuggagacuuugcauuaa

SEQ ID NO: 124223 - RNA, 19 nt, Artificial Sequence
  Description of Artificial Sequence: Synthetic oligonucleotide
  Antisense strand to SEQ ID NO: 124222
uuaaugcaaagucuccagg

SEQ ID NO: 124224 - RNA, 19 nt, Artificial Sequence
  Description of Artificial Sequence: Synthetic oligonucleotide
  Sense strand starting at position 328 of SEQ ID NO: 1586
acauucuacccuggagacu

SEQ ID NO: 124225 - RNA, 19 nt, Artificial Sequence
  Description of Artificial Sequence: Synthetic oligonucleotide
  Antisense strand to SEQ ID NO: 124224
agucuccaggguagaaugu

SEQ ID NO: 124226 - RNA, 19 nt, Artificial Sequence
  Description of Artificial Sequence: Synthetic oligonucleotide
  Sense strand starting at position 211 of SEQ ID NO: 1586
gcaaacaucccaggagaca

SEQ ID NO: 124227 - RNA, 19 nt, Artificial Sequence
  Description of Artificial Sequence: Synthetic oligonucleotide
  Antisense strand to SEQ ID NO: 124226
ugucuccugggauguuugc

SEQ ID NO: 124228 - RNA, 19 nt, Artificial Sequence
  Description of Artificial Sequence: Synthetic oligonucleotide
  Sense strand starting at position 163 of SEQ ID NO: 1586
uuguguguacaauaauguu

SEQ ID NO: 124229 - RNA, 19 nt, Artificial Sequence
  Description of Artificial Sequence: Synthetic oligonucleotide
  Antisense strand to SEQ ID NO: 124228
aacauuauuguacacacaa

SEQ ID NO: 124230 - RNA, 19 nt, Artificial Sequence
  Description of Artificial Sequence: Synthetic oligonucleotide
  Sense strand starting at position 158 of SEQ ID NO: 1586
acucauuguguguacaaua

SEQ ID NO: 124231 - RNA, 19 nt, Artificial Sequence
  Description of Artificial Sequence: Synthetic oligonucleotide
  Antisense strand to SEQ ID NO: 124230
uauuguacacacaaugagu

SEQ ID NO: 124232 - RNA, 19 nt, Artificial Sequence
  Description of Artificial Sequence: Synthetic oligonucleotide
  Sense strand starting at position 98 of SEQ ID NO: 1586
acagauaaagcugguaaca

SEQ ID NO: 124233 - RNA, 19 nt, Artificial Sequence
  Description of Artificial Sequence: Synthetic oligonucleotide
  Antisense strand to SEQ ID NO: 124232
uguuaccagcuuuaucugu

SEQ ID NO: 124234 - RNA, 19 nt, Artificial Sequence
  Description of Artificial Sequence: Synthetic oligonucleotide
  Sense strand starting at position 3979 of SEQ ID NO: 1587
gcuagaauccuuugaggaa

SEQ ID NO: 124235 - RNA, 19 nt, Artificial Sequence
  Description of Artificial Sequence: Synthetic oligonucleotide
  Antisense strand to SEQ ID NO: 124234
uuccucaaaggauucuagc

SEQ ID NO: 124236 - RNA, 19 nt, Artificial Sequence
  Description of Artificial Sequence: Synthetic oligonucleotide
  Sense strand starting at position 3964 of SEQ ID NO: 1587
aauuuagcccguuaagcua

SEQ ID NO: 124237 - RNA, 19 nt, Artificial Sequence
  Description of Artificial Sequence: Synthetic oligonucleotide
  Antisense strand to SEQ ID NO: 124236
uagcuuaacgggcuaaauu

SEQ ID NO: 124238 - RNA, 19 nt, Artificial Sequence
  Description of Artificial Sequence: Synthetic oligonucleotide
  Sense strand starting at position 3859 of SEQ ID NO: 1587
ugaauaaagcuacguuuaa

SEQ ID NO: 124239 - RNA, 19 nt, Artificial Sequence
  Description of Artificial Sequence: Synthetic oligonucleotide
  Antisense strand to SEQ ID NO: 124238
uuaaacguagcuuuauuca

SEQ ID NO: 124240 - RNA, 19 nt, Artificial Sequence
  Description of Artificial Sequence: Synthetic oligonucleotide
  Sense strand starting at position 3809 of SEQ ID NO: 1587
uguuuauggagcugcaaag

SEQ ID NO: 124241 - RNA, 19 nt, Artificial Sequence
  Description of Artificial Sequence: Synthetic oligonucleotide
  Antisense strand to SEQ ID NO: 124240
cuuugcagcuccauaaaca

SEQ ID NO: 124242 - RNA, 19 nt, Artificial Sequence
  Description of Artificial Sequence: Synthetic oligonucleotide
  Sense strand starting at position 3801 of SEQ ID NO: 1587
aguguaaguguuuauggag

SEQ ID NO: 124243 - RNA, 19 nt, Artificial Sequence
  Description of Artificial Sequence: Synthetic oligonucleotide
  Antisense strand to SEQ ID NO: 124242
cuccauaaacacuuacacu

SEQ ID NO: 124244 - RNA, 19 nt, Artificial Sequence
  Description of Artificial Sequence: Synthetic oligonucleotide
  Sense strand starting at position 3800 of SEQ ID NO: 1587
aaguguaaguguuuaugga

SEQ ID NO: 124245 - RNA, 19 nt, Artificial Sequence
  Description of Artificial Sequence: Synthetic oligonucleotide
  Antisense strand to SEQ ID NO: 124244
uccauaaacacuuacacuu

SEQ ID NO: 124246 - RNA, 19 nt, Artificial Sequence
  Description of Artificial Sequence: Synthetic oligonucleotide
  Sense strand starting at position 3796 of SEQ ID NO: 1587
gaccaaguguaaguguuua

SEQ ID NO: 124247 - RNA, 19 nt, Artificial Sequence
  Description of Artificial Sequence: Synthetic oligonucleotide
  Antisense strand to SEQ ID NO: 124246
uaaacacuuacacuugguc

SEQ ID NO: 124248 - RNA, 19 nt, Artificial Sequence
  Description of Artificial Sequence: Synthetic oligonucleotide
  Sense strand starting at position 3754 of SEQ ID NO: 1587
uggauacuugcauauguaa

SEQ ID NO: 124249 - RNA, 19 nt, Artificial Sequence
  Description of Artificial Sequence: Synthetic oligonucleotide
  Antisense strand to SEQ ID NO: 124248
uuacauaugcaaguaucca

SEQ ID NO: 124250 - RNA, 19 nt, Artificial Sequence
  Description of Artificial Sequence: Synthetic oligonucleotide
  Sense strand starting at position 3734 of SEQ ID NO: 1587
agagaauucucacugcaau

SEQ ID NO: 124251 - RNA, 19 nt, Artificial Sequence
  Description of Artificial Sequence: Synthetic oligonucleotide
  Antisense strand to SEQ ID NO: 124250
auugcagugagaauucucu

SEQ ID NO: 124252 - RNA, 19 nt, Artificial Sequence
  Description of Artificial Sequence: Synthetic oligonucleotide
  Sense strand starting at position 3619 of SEQ ID NO: 1587
uugagaauggcuggagaca

SEQ ID NO: 124253 - RNA, 19 nt, Artificial Sequence
  Description of Artificial Sequence: Synthetic oligonucleotide
  Antisense strand to SEQ ID NO: 124252
ugucuccagccauucucaa

SEQ ID NO: 124254 - RNA, 19 nt, Artificial Sequence
  Description of Artificial Sequence: Synthetic oligonucleotide
  Sense strand starting at position 3570 of SEQ ID NO: 1587
gagagaauggcaugugcaa

SEQ ID NO: 124255 - RNA, 19 nt, Artificial Sequence
  Description of Artificial Sequence: Synthetic oligonucleotide
  Antisense strand to SEQ ID NO: 124254
uugcacaugccauucucuc

SEQ ID NO: 124256 - RNA, 19 nt, Artificial Sequence
  Description of Artificial Sequence: Synthetic oligonucleotide
  Sense strand starting at position 3488 of SEQ ID NO: 1587
aagguuguauuugagggaa

SEQ ID NO: 124257 - RNA, 19 nt, Artificial Sequence
  Description of Artificial Sequence: Synthetic oligonucleotide
  Antisense strand to SEQ ID NO: 124256
uucccucaaauacaaccuu

SEQ ID NO: 124258 - RNA, 19 nt, Artificial Sequence
  Description of Artificial Sequence: Synthetic oligonucleotide
  Sense strand starting at position 3483 of SEQ ID NO: 1587
gugagaagguuguauuuga

SEQ ID NO: 124259 - RNA, 19 nt, Artificial Sequence
  Description of Artificial Sequence: Synthetic oligonucleotide
  Antisense strand to SEQ ID NO: 124258
ucaaauacaaccuucucac

SEQ ID NO: 124260 - RNA, 19 nt, Artificial Sequence
  Description of Artificial Sequence: Synthetic oligonucleotide
  Sense strand starting at position 3471 of SEQ ID NO: 1587
gaagguugguaagugagaa

SEQ ID NO: 124261 - RNA, 19 nt, Artificial Sequence
  Description of Artificial Sequence: Synthetic oligonucleotide
  Antisense strand to SEQ ID NO: 124260
uucucacuuaccaaccuuc

SEQ ID NO: 124262 - RNA, 19 nt, Artificial Sequence
  Description of Artificial Sequence: Synthetic oligonucleotide
  Sense strand starting at position 3239 of SEQ ID NO: 1587
ucaaguguuaaaugagugu

SEQ ID NO: 124263 - RNA, 19 nt, Artificial Sequence
  Description of Artificial Sequence: Synthetic oligonucleotide
  Antisense strand to SEQ ID NO: 124262
acacucauuuaacacuuga

SEQ ID NO: 124264 - RNA, 19 nt, Artificial Sequence
  Description of Artificial Sequence: Synthetic oligonucleotide
  Sense strand starting at position 3166 of SEQ ID NO: 1587
ugcuacucuagguaaggua

SEQ ID NO: 124265 - RNA, 19 nt, Artificial Sequence
  Description of Artificial Sequence: Synthetic oligonucleotide
  Antisense strand to SEQ ID NO: 124264
uaccuuaccuagaguagca

SEQ ID NO: 124266 - RNA, 19 nt, Artificial Sequence
  Description of Artificial Sequence: Synthetic oligonucleotide
  Sense strand starting at position 3140 of SEQ ID NO: 1587
ggcaauaagccaugggaaa

SEQ ID NO: 124267 - RNA, 19 nt, Artificial Sequence
  Description of Artificial Sequence: Synthetic oligonucleotide
  Antisense strand to SEQ ID NO: 124266
uuucccauggcuuauugcc

SEQ ID NO: 124268 - RNA, 19 nt, Artificial Sequence
  Description of Artificial Sequence: Synthetic oligonucleotide
  Sense strand starting at position 3090 of SEQ ID NO: 1587
gcacguauuaguuugucau

SEQ ID NO: 124269 - RNA, 19 nt, Artificial Sequence
  Description of Artificial Sequence: Synthetic oligonucleotide
  Antisense strand to SEQ ID NO: 124268
augacaaacuaauacgugc

SEQ ID NO: 124270 - RNA, 19 nt, Artificial Sequence
  Description of Artificial Sequence: Synthetic oligonucleotide
  Sense strand starting at position 3081 of SEQ ID NO: 1587
aagugaagggcacguauua

SEQ ID NO: 124271 - RNA, 19 nt, Artificial Sequence
  Description of Artificial Sequence: Synthetic oligonucleotide
  Antisense strand to SEQ ID NO: 124270
uaauacgugcccuucacuu

SEQ ID NO: 124272 - RNA, 19 nt, Artificial Sequence
  Description of Artificial Sequence: Synthetic oligonucleotide
  Sense strand starting at position 2971 of SEQ ID NO: 1587
guauuugcuucuccacacu

SEQ ID NO: 124273 - RNA, 19 nt, Artificial Sequence
  Description of Artificial Sequence: Synthetic oligonucleotide
  Antisense strand to SEQ ID NO: 124272
aguguggagaagcaaauac

SEQ ID NO: 124274 - RNA, 19 nt, Artificial Sequence
  Description of Artificial Sequence: Synthetic oligonucleotide
  Sense strand starting at position 2967 of SEQ ID NO: 1587
guuuguauuugcuucucca

SEQ ID NO: 124275 - RNA, 19 nt, Artificial Sequence
  Description of Artificial Sequence: Synthetic oligonucleotide
  Antisense strand to SEQ ID NO: 124274
uggagaagcaaauacaaac

SEQ ID NO: 124276 - RNA, 19 nt, Artificial Sequence
  Description of Artificial Sequence: Synthetic oligonucleotide
  Sense strand starting at position 2950 of SEQ ID NO: 1587
gggccacuuagugaagagu

SEQ ID NO: 124277 - RNA, 19 nt, Artificial Sequence
  Description of Artificial Sequence: Synthetic oligonucleotide
  Antisense strand to SEQ ID NO: 124276
acucuucacuaaguggccc

SEQ ID NO: 124278 - RNA, 19 nt, Artificial Sequence
  Description of Artificial Sequence: Synthetic oligonucleotide
  Sense strand starting at position 2910 of SEQ ID NO: 1587
agaaaucccugggaccaaa

SEQ ID NO: 124279 - RNA, 19 nt, Artificial Sequence
  Description of Artificial Sequence: Synthetic oligonucleotide
  Antisense strand to SEQ ID NO: 124278
uuuggucccagggauuucu

SEQ ID NO: 124280 - RNA, 19 nt, Artificial Sequence
  Description of Artificial Sequence: Synthetic oligonucleotide
  Sense strand starting at position 2844 of SEQ ID NO: 1587
gcccauuagguauauagga

SEQ ID NO: 124281 - RNA, 19 nt, Artificial Sequence
  Description of Artificial Sequence: Synthetic oligonucleotide
  Antisense strand to SEQ ID NO: 124280
uccuauauaccuaaugggc

SEQ ID NO: 124282 - RNA, 19 nt, Artificial Sequence
  Description of Artificial Sequence: Synthetic oligonucleotide
  Sense strand starting at position 2841 of SEQ ID NO: 1587
guagcccauuagguauaua

SEQ ID NO: 124283 - RNA, 19 nt, Artificial Sequence
  Description of Artificial Sequence: Synthetic oligonucleotide
  Antisense strand to SEQ ID NO: 124282
uauauaccuaaugggcuac

SEQ ID NO: 124284 - RNA, 19 nt, Artificial Sequence
  Description of Artificial Sequence: Synthetic oligonucleotide
  Sense strand starting at position 2838 of SEQ ID NO: 1587
ccaguagcccauuagguau

SEQ ID NO: 124285 - RNA, 19 nt, Artificial Sequence
  Description of Artificial Sequence: Synthetic oligonucleotide
  Antisense strand to SEQ ID NO: 124284
auaccuaaugggcuacugg

SEQ ID NO: 124286 - RNA, 19 nt, Artificial Sequence
  Description of Artificial Sequence: Synthetic oligonucleotide
  Sense strand starting at position 2506 of SEQ ID NO: 1587
gauaauucuuuguugagag

SEQ ID NO: 124287 - RNA, 19 nt, Artificial Sequence
  Description of Artificial Sequence: Synthetic oligonucleotide
  Antisense strand to SEQ ID NO: 124286
cucucaacaaagaauuauc

SEQ ID NO: 124288 - RNA, 19 nt, Artificial Sequence
  Description of Artificial Sequence: Synthetic oligonucleotide
  Sense strand starting at position 2423 of SEQ ID NO: 1587
guaauugugguacaaacua

SEQ ID NO: 124289 - RNA, 19 nt, Artificial Sequence
  Description of Artificial Sequence: Synthetic oligonucleotide
  Antisense strand to SEQ ID NO: 124288
uaguuuguaccacaauuac

SEQ ID NO: 124290 - RNA, 19 nt, Artificial Sequence
  Description of Artificial Sequence: Synthetic oligonucleotide
  Sense strand starting at position 2416 of SEQ ID NO: 1587
ccugaagguaauuguggua

SEQ ID NO: 124291 - RNA, 19 nt, Artificial Sequence
  Description of Artificial Sequence: Synthetic oligonucleotide
  Antisense strand to SEQ ID NO: 124290
uaccacaauuaccuucagg

SEQ ID NO: 124292 - RNA, 19 nt, Artificial Sequence
  Description of Artificial Sequence: Synthetic oligonucleotide
  Sense strand starting at position 2145 of SEQ ID NO: 1587
gccagaacggccgaaauaa

SEQ ID NO: 124293 - RNA, 19 nt, Artificial Sequence
  Description of Artificial Sequence: Synthetic oligonucleotide
  Antisense strand to SEQ ID NO: 124292
uuauuucggccguucuggc

SEQ ID NO: 124294 - RNA, 19 nt, Artificial Sequence
  Description of Artificial Sequence: Synthetic oligonucleotide
  Sense strand starting at position 1289 of SEQ ID NO: 1587
caagauaucccacaggugu

SEQ ID NO: 124295 - RNA, 19 nt, Artificial Sequence
  Description of Artificial Sequence: Synthetic oligonucleotide
  Antisense strand to SEQ ID NO: 124294
acaccugugggauaucuug

SEQ ID NO: 124296 - RNA, 19 nt, Artificial Sequence
  Description of Artificial Sequence: Synthetic oligonucleotide
  Sense strand starting at position 1227 of SEQ ID NO: 1587
gugguuucucuauacuuug

SEQ ID NO: 124297 - RNA, 19 nt, Artificial Sequence
  Description of Artificial Sequence: Synthetic oligonucleotide
  Antisense strand to SEQ ID NO: 124296
caaaguauagagaaaccac

SEQ ID NO: 124298 - RNA, 19 nt, Artificial Sequence
  Description of Artificial Sequence: Synthetic oligonucleotide
  Sense strand starting at position 976 of SEQ ID NO: 1587
ugaaauguuugggcagaga

SEQ ID NO: 124299 - RNA, 19 nt, Artificial Sequence
  Description of Artificial Sequence: Synthetic oligonucleotide
  Antisense strand to SEQ ID NO: 124298
ucucugcccaaacauuuca

SEQ ID NO: 124300 - RNA, 19 nt, Artificial Sequence
  Description of Artificial Sequence: Synthetic oligonucleotide
  Sense strand starting at position 853 of SEQ ID NO: 1587
cugaaugucuccguacaaa

SEQ ID NO: 124301 - RNA, 19 nt, Artificial Sequence
  Description of Artificial Sequence: Synthetic oligonucleotide
  Antisense strand to SEQ ID NO: 124300
uuuguacggagacauucag

SEQ ID NO: 124302 - RNA, 19 nt, Artificial Sequence
  Description of Artificial Sequence: Synthetic oligonucleotide
  Sense strand starting at position 852 of SEQ ID NO: 1587
acugaaugucuccguacaa

SEQ ID NO: 124303 - RNA, 19 nt, Artificial Sequence
  Description of Artificial Sequence: Synthetic oligonucleotide
  Antisense strand to SEQ ID NO: 124302
uuguacggagacauucagu

SEQ ID NO: 124304 - RNA, 19 nt, Artificial Sequence
  Description of Artificial Sequence: Synthetic oligonucleotide
  Sense strand starting at position 851 of SEQ ID NO: 1587
aacugaaugucuccguaca

SEQ ID NO: 124305 - RNA, 19 nt, Artificial Sequence
  Description of Artificial Sequence: Synthetic oligonucleotide
  Antisense strand to SEQ ID NO: 124304
uguacggagacauucaguu

SEQ ID NO: 124306 - RNA, 19 nt, Artificial Sequence
  Description of Artificial Sequence: Synthetic oligonucleotide
  Sense strand starting at position 628 of SEQ ID NO: 1587
ggcgcaaugcaccaugaaa

SEQ ID NO: 124307 - RNA, 19 nt, Artificial Sequence
  Description of Artificial Sequence: Synthetic oligonucleotide
  Antisense strand to SEQ ID NO: 124306
uuucauggugcauugcgcc

SEQ ID NO: 124308 - RNA, 19 nt, Artificial Sequence
  Description of Artificial Sequence: Synthetic oligonucleotide
  Sense strand starting at position 547 of SEQ ID NO: 1587
ggacaugucuuguuaacaa

SEQ ID NO: 124309 - RNA, 19 nt, Artificial Sequence
  Description of Artificial Sequence: Synthetic oligonucleotide
  Antisense strand to SEQ ID NO: 124308
uuguuaacaagacaugucc

SEQ ID NO: 124310 - RNA, 19 nt, Artificial Sequence
  Description of Artificial Sequence: Synthetic oligonucleotide
  Sense strand starting at position 129 of SEQ ID NO: 1587
gaauaaggccuguaggugu

SEQ ID NO: 124311 - RNA, 19 nt, Artificial Sequence
  Description of Artificial Sequence: Synthetic oligonucleotide
  Antisense strand to SEQ ID NO: 124310
acaccuacaggccuuauuc

SEQ ID NO: 124312 - RNA, 19 nt, Artificial Sequence
  Description of Artificial Sequence: Synthetic oligonucleotide
  Sense strand starting at position 69 of SEQ ID NO: 1587
acuaaaugcugucuuggaa

SEQ ID NO: 124313 - RNA, 19 nt, Artificial Sequence
  Description of Artificial Sequence: Synthetic oligonucleotide
  Antisense strand to SEQ ID NO: 124312
uuccaagacagcauuuagu

SEQ ID NO: 124314 - RNA, 19 nt, Artificial Sequence
  Description of Artificial Sequence: Synthetic oligonucleotide
  Sense strand starting at position 196 of SEQ ID NO: 1588
ucaaauguuccaggaucga

SEQ ID NO: 124315 - RNA, 19 nt, Artificial Sequence
  Description of Artificial Sequence: Synthetic oligonucleotide
  Antisense strand to SEQ ID NO: 124314
ucgauccuggaacauuuga

SEQ ID NO: 124316 - RNA, 19 nt, Artificial Sequence
  Description of Artificial Sequence: Synthetic oligonucleotide
  Sense strand starting at position 200 of SEQ ID NO: 1588
auguuccaggaucgaaauu

SEQ ID NO: 124317 - RNA, 19 nt, Artificial Sequence
  Description of Artificial Sequence: Synthetic oligonucleotide
  Antisense strand to SEQ ID NO: 124316
aauuucgauccuggaacau

SEQ ID NO: 124318 - RNA, 19 nt, Artificial Sequence
  Description of Artificial Sequence: Synthetic oligonucleotide
  Sense strand starting at position 224 of SEQ ID NO: 1588
acagaugcucacggcauaa

SEQ ID NO: 124319 - RNA, 19 nt, Artificial Sequence
  Description of Artificial Sequence: Synthetic oligonucleotide
  Antisense strand to SEQ ID NO: 124318
uuaugccgugagcaucugu

SEQ ID NO: 124320 - RNA, 19 nt, Artificial Sequence
  Description of Artificial Sequence: Synthetic oligonucleotide
  Sense strand starting at position 235 of SEQ ID NO: 1588
cggcauaaagucugccaaa

SEQ ID NO: 124321 - RNA, 19 nt, Artificial Sequence
  Description of Artificial Sequence: Synthetic oligonucleotide
  Antisense strand to SEQ ID NO: 124320
uuuggcagacuuuaugccg

SEQ ID NO: 124322 - RNA, 19 nt, Artificial Sequence
  Description of Artificial Sequence: Synthetic oligonucleotide
  Sense strand starting at position 236 of SEQ ID NO: 1588
ggcauaaagucugccaaac

SEQ ID NO: 124323 - RNA, 19 nt, Artificial Sequence
  Description of Artificial Sequence: Synthetic oligonucleotide
  Antisense strand to SEQ ID NO: 124322
guuuggcagacuuuaugcc

SEQ ID NO: 124324 - RNA, 19 nt, Artificial Sequence
  Description of Artificial Sequence: Synthetic oligonucleotide
  Sense strand starting at position 267 of SEQ ID NO: 1588
cugguacaauucuuaaaga

SEQ ID NO: 124325 - RNA, 19 nt, Artificial Sequence
  Description of Artificial Sequence: Synthetic oligonucleotide
  Antisense strand to SEQ ID NO: 124324
ucuuuaagaauuguaccag

SEQ ID NO: 124326 - RNA, 19 nt, Artificial Sequence
  Description of Artificial Sequence: Synthetic oligonucleotide
  Sense strand starting at position 579 of SEQ ID NO: 1588
gcaugaugcccagauccaa

SEQ ID NO: 124327 - RNA, 19 nt, Artificial Sequence
  Description of Artificial Sequence: Synthetic oligonucleotide
  Antisense strand to SEQ ID NO: 124326
uuggaucugggcaucaugc

SEQ ID NO: 124328 - RNA, 19 nt, Artificial Sequence
  Description of Artificial Sequence: Synthetic oligonucleotide
  Sense strand starting at position 649 of SEQ ID NO: 1588
uccugaccgguugaacaau

SEQ ID NO: 124329 - RNA, 19 nt, Artificial Sequence
  Description of Artificial Sequence: Synthetic oligonucleotide
  Antisense strand to SEQ ID NO: 124328
auuguucaaccggucagga

SEQ ID NO: 124330 - RNA, 19 nt, Artificial Sequence
  Description of Artificial Sequence: Synthetic oligonucleotide
  Sense strand starting at position 661 of SEQ ID NO: 1588
gaacaauaaucagagaagg

SEQ ID NO: 124331 - RNA, 19 nt, Artificial Sequence
  Description of Artificial Sequence: Synthetic oligonucleotide
  Antisense strand to SEQ ID NO: 124330
ccuucucugauuauuguuc

SEQ ID NO: 124332 - RNA, 19 nt, Artificial Sequence
  Description of Artificial Sequence: Synthetic oligonucleotide
  Sense strand starting at position 744 of SEQ ID NO: 1588
cgcacuucuacggaagaac

SEQ ID NO: 124333 - RNA, 19 nt, Artificial Sequence
  Description of Artificial Sequence: Synthetic oligonucleotide
  Antisense strand to SEQ ID NO: 124332
guucuuccguagaagugcg

SEQ ID NO: 124334 - RNA, 19 nt, Artificial Sequence
  Description of Artificial Sequence: Synthetic oligonucleotide
  Sense strand starting at position 873 of SEQ ID NO: 1588
ugcagaggaaguggugaua

SEQ ID NO: 124335 - RNA, 19 nt, Artificial Sequence
  Description of Artificial Sequence: Synthetic oligonucleotide
  Antisense strand to SEQ ID NO: 124334
uaucaccacuuccucugca

SEQ ID NO: 124336 - RNA, 19 nt, Artificial Sequence
  Description of Artificial Sequence: Synthetic oligonucleotide
  Sense strand starting at position 1009 of SEQ ID NO: 1588
gcaggacacaccugaaagu

SEQ ID NO: 124337 - RNA, 19 nt, Artificial Sequence
  Description of Artificial Sequence: Synthetic oligonucleotide
  Antisense strand to SEQ ID NO: 124336
acuuucagguguguccugc

SEQ ID NO: 124338 - RNA, 19 nt, Artificial Sequence
  Description of Artificial Sequence: Synthetic oligonucleotide
  Sense strand starting at position 1123 of SEQ ID NO: 1588
cagggaaaguuucucagau

SEQ ID NO: 124339 - RNA, 19 nt, Artificial Sequence
  Description of Artificial Sequence: Synthetic oligonucleotide
  Antisense strand to SEQ ID NO: 124338
aucugagaaacuuucccug

SEQ ID NO: 124340 - RNA, 19 nt, Artificial Sequence
  Description of Artificial Sequence: Synthetic oligonucleotide
  Sense strand starting at position 1124 of SEQ ID NO: 1588
agggaaaguuucucagauu

SEQ ID NO: 124341 - RNA, 19 nt, Artificial Sequence
  Description of Artificial Sequence: Synthetic oligonucleotide
  Antisense strand to SEQ ID NO: 124340
aaucugagaaacuuucccu

SEQ ID NO: 124342 - RNA, 19 nt, Artificial Sequence
  Description of Artificial Sequence: Synthetic oligonucleotide
  Sense strand starting at position 1432 of SEQ ID NO: 1588
acgacauugucacuggaaa

SEQ ID NO: 124343 - RNA, 19 nt, Artificial Sequence
  Description of Artificial Sequence: Synthetic oligonucleotide
  Antisense strand to SEQ ID NO: 124342
uuuccagugacaaugucgu

SEQ ID NO: 124344 - RNA, 19 nt, Artificial Sequence
  Description of Artificial Sequence: Synthetic oligonucleotide
  Sense strand starting at position 2914 of SEQ ID NO: 1588
cgccgcaugcucccauaaa

SEQ ID NO: 124345 - RNA, 19 nt, Artificial Sequence
  Description of Artificial Sequence: Synthetic oligonucleotide
  Antisense strand to SEQ ID NO: 124344
uuuaugggagcaugcggcg

SEQ ID NO: 124346 - RNA, 19 nt, Artificial Sequence
  Description of Artificial Sequence: Synthetic oligonucleotide
  Sense strand starting at position 2952 of SEQ ID NO: 1588
cugggaaucucgcucuaau

SEQ ID NO: 124347 - RNA, 19 nt, Artificial Sequence
  Description of Artificial Sequence: Synthetic oligonucleotide
  Antisense strand to SEQ ID NO: 124346
auuagagcgagauucccag

SEQ ID NO: 124348 - RNA, 19 nt, Artificial Sequence
  Description of Artificial Sequence: Synthetic oligonucleotide
  Sense strand starting at position 2955 of SEQ ID NO: 1588
ggaaucucgcucuaauuag

SEQ ID NO: 124349 - RNA, 19 nt, Artificial Sequence
  Description of Artificial Sequence: Synthetic oligonucleotide
  Antisense strand to SEQ ID NO: 124348
cuaauuagagcgagauucc

SEQ ID NO: 124350 - RNA, 19 nt, Artificial Sequence
  Description of Artificial Sequence: Synthetic oligonucleotide
  Sense strand starting at position 3064 of SEQ ID NO: 1588
ggaguuaaguagcuaguca

SEQ ID NO: 124351 - RNA, 19 nt, Artificial Sequence
  Description of Artificial Sequence: Synthetic oligonucleotide
  Antisense strand to SEQ ID NO: 124350
ugacuagcuacuuaacucc

SEQ ID NO: 124352 - RNA, 19 nt, Artificial Sequence
  Description of Artificial Sequence: Synthetic oligonucleotide
  Sense strand starting at position 3075 of SEQ ID NO: 1588
gcuagucauuccucaucau

SEQ ID NO: 124353 - RNA, 19 nt, Artificial Sequence
  Description of Artificial Sequence: Synthetic oligonucleotide
  Antisense strand to SEQ ID NO: 124352
augaugaggaaugacuagc

SEQ ID NO: 124354 - RNA, 19 nt, Artificial Sequence
  Description of Artificial Sequence: Synthetic oligonucleotide
  Sense strand starting at position 3078 of SEQ ID NO: 1588
agucauuccucaucaucgu

SEQ ID NO: 124355 - RNA, 19 nt, Artificial Sequence
  Description of Artificial Sequence: Synthetic oligonucleotide
  Antisense strand to SEQ ID NO: 124354
acgaugaugaggaaugacu

SEQ ID NO: 124356 - RNA, 19 nt, Artificial Sequence
  Description of Artificial Sequence: Synthetic oligonucleotide
  Sense strand starting at position 3208 of SEQ ID NO: 1588
ugaaauauugcaugaucac

SEQ ID NO: 124357 - RNA, 19 nt, Artificial Sequence
  Description of Artificial Sequence: Synthetic oligonucleotide
  Antisense strand to SEQ ID NO: 124356
gugaucaugcaauauuuca

SEQ ID NO: 124358 - RNA, 19 nt, Artificial Sequence
  Description of Artificial Sequence: Synthetic oligonucleotide
  Sense strand starting at position 3307 of SEQ ID NO: 1588
cauccuguugauggcgaua

SEQ ID NO: 124359 - RNA, 19 nt, Artificial Sequence
  Description of Artificial Sequence: Synthetic oligonucleotide
  Antisense strand to SEQ ID NO: 124358
uaucgccaucaacaggaug

SEQ ID NO: 124360 - RNA, 19 nt, Artificial Sequence
  Description of Artificial Sequence: Synthetic oligonucleotide
  Sense strand starting at position 3364 of SEQ ID NO: 1588
uccuccuucgaauaaugca

SEQ ID NO: 124361 - RNA, 19 nt, Artificial Sequence
  Description of Artificial Sequence: Synthetic oligonucleotide
  Antisense strand to SEQ ID NO: 124360
ugcauuauucgaaggagga

SEQ ID NO: 124362 - RNA, 19 nt, Artificial Sequence
  Description of Artificial Sequence: Synthetic oligonucleotide
  Sense strand starting at position 3372 of SEQ ID NO: 1588
cgaauaaugcaauaaguca

SEQ ID NO: 124363 - RNA, 19 nt, Artificial Sequence
  Description of Artificial Sequence: Synthetic oligonucleotide
  Antisense strand to SEQ ID NO: 124362
ugacuuauugcauuauucg

SEQ ID NO: 124364 - RNA, 19 nt, Artificial Sequence
  Description of Artificial Sequence: Synthetic oligonucleotide
  Sense strand starting at position 3399 of SEQ ID NO: 1588
guaaaugggccauaaaguc

SEQ ID NO: 124365 - RNA, 19 nt, Artificial Sequence
  Description of Artificial Sequence: Synthetic oligonucleotide
  Antisense strand to SEQ ID NO: 124364
gacuuuauggcccauuuac

SEQ ID NO: 124366 - RNA, 19 nt, Artificial Sequence
  Description of Artificial Sequence: Synthetic oligonucleotide
  Sense strand starting at position 3446 of SEQ ID NO: 1588
cagagaugugaagggcuua

SEQ ID NO: 124367 - RNA, 19 nt, Artificial Sequence
  Description of Artificial Sequence: Synthetic oligonucleotide
  Antisense strand to SEQ ID NO: 124366
uaagcccuucacaucucug

SEQ ID NO: 124368 - RNA, 19 nt, Artificial Sequence
  Description of Artificial Sequence: Synthetic oligonucleotide
  Sense strand starting at position 3484 of SEQ ID NO: 1588
acuaaauuguaguuacaug

SEQ ID NO: 124369 - RNA, 19 nt, Artificial Sequence
  Description of Artificial Sequence: Synthetic oligonucleotide
  Antisense strand to SEQ ID NO: 124368
cauguaacuacaauuuagu

SEQ ID NO: 124370 - RNA, 19 nt, Artificial Sequence
  Description of Artificial Sequence: Synthetic oligonucleotide
  Sense strand starting at position 3518 of SEQ ID NO: 1588
uugcgauuucuacgaaugc

SEQ ID NO: 124371 - RNA, 19 nt, Artificial Sequence
  Description of Artificial Sequence: Synthetic oligonucleotide
  Antisense strand to SEQ ID NO: 124370
gcauucguagaaaucgcaa

SEQ ID NO: 124372 - RNA, 19 nt, Artificial Sequence
  Description of Artificial Sequence: Synthetic oligonucleotide
  Sense strand starting at position 3715 of SEQ ID NO: 1588
auggaacuuuccuugcuau

SEQ ID NO: 124373 - RNA, 19 nt, Artificial Sequence
  Description of Artificial Sequence: Synthetic oligonucleotide
  Antisense strand to SEQ ID NO: 124372
auagcaaggaaaguuccau

SEQ ID NO: 124374 - RNA, 19 nt, Artificial Sequence
  Description of Artificial Sequence: Synthetic oligonucleotide
  Sense strand starting at position 3730 of SEQ ID NO: 1588
cuauguggauuggcugaaa

SEQ ID NO: 124375 - RNA, 19 nt, Artificial Sequence
  Description of Artificial Sequence: Synthetic oligonucleotide
  Antisense strand to SEQ ID NO: 124374
uuucagccaauccacauag

SEQ ID NO: 124376 - RNA, 19 nt, Artificial Sequence
  Description of Artificial Sequence: Synthetic oligonucleotide
  Sense strand starting at position 3751 of SEQ ID NO: 1588
ugaggaagugcuugcaaag

SEQ ID NO: 124377 - RNA, 19 nt, Artificial Sequence
  Description of Artificial Sequence: Synthetic oligonucleotide
  Antisense strand to SEQ ID NO: 124376
cuuugcaagcacuuccuca

SEQ ID NO: 124378 - RNA, 19 nt, Artificial Sequence
  Description of Artificial Sequence: Synthetic oligonucleotide
  Sense strand starting at position 3835 of SEQ ID NO: 1588
gugcuaaccagcugaaagu

SEQ ID NO: 124379 - RNA, 19 nt, Artificial Sequence
  Description of Artificial Sequence: Synthetic oligonucleotide
  Antisense strand to SEQ ID NO: 124378
acuuucagcugguuagcac

SEQ ID NO: 124380 - RNA, 19 nt, Artificial Sequence
  Description of Artificial Sequence: Synthetic oligonucleotide
  Sense strand starting at position 3836 of SEQ ID NO: 1588
ugcuaaccagcugaaaguu

SEQ ID NO: 124381 - RNA, 19 nt, Artificial Sequence
  Description of Artificial Sequence: Synthetic oligonucleotide
  Antisense strand to SEQ ID NO: 124380
aacuuucagcugguuagca

SEQ ID NO: 124382 - RNA, 19 nt, Artificial Sequence
  Description of Artificial Sequence: Synthetic oligonucleotide
  Sense strand starting at position 3851 of SEQ ID NO: 1588
aguuguugaagagaguaca

SEQ ID NO: 124383 - RNA, 19 nt, Artificial Sequence
  Description of Artificial Sequence: Synthetic oligonucleotide
  Antisense strand to SEQ ID NO: 124382
uguacucucuucaacaacu

SEQ ID NO: 124384 - RNA, 19 nt, Artificial Sequence
  Description of Artificial Sequence: Synthetic oligonucleotide
  Sense strand starting at position 3863 of SEQ ID NO: 1588
gaguacagguaaucugacu

SEQ ID NO: 124385 - RNA, 19 nt, Artificial Sequence
  Description of Artificial Sequence: Synthetic oligonucleotide
  Antisense strand to SEQ ID NO: 124384
agucagauuaccuguacuc

SEQ ID NO: 124386 - RNA, 19 nt, Artificial Sequence
  Description of Artificial Sequence: Synthetic oligonucleotide
  Sense strand starting at position 3900 of SEQ ID NO: 1588
uaaagcauagguugaagau

SEQ ID NO: 124387 - RNA, 19 nt, Artificial Sequence
  Description of Artificial Sequence: Synthetic oligonucleotide
  Antisense strand to SEQ ID NO: 124386
aucuucaaccuaugcuuua

SEQ ID NO: 124388 - RNA, 19 nt, Artificial Sequence
  Description of Artificial Sequence: Synthetic oligonucleotide
  Sense strand starting at position 3928 of SEQ ID NO: 1588
agaguaagacuccauagcu

SEQ ID NO: 124389 - RNA, 19 nt, Artificial Sequence
  Description of Artificial Sequence: Synthetic oligonucleotide
  Antisense strand to SEQ ID NO: 124388
agcuauggagucuuacucu

SEQ ID NO: 124390 - RNA, 19 nt, Artificial Sequence
  Description of Artificial Sequence: Synthetic oligonucleotide
  Sense strand starting at position 3961 of SEQ ID NO: 1588
gcaauuaggaauuguguga

SEQ ID NO: 124391 - RNA, 19 nt, Artificial Sequence
  Description of Artificial Sequence: Synthetic oligonucleotide
  Antisense strand to SEQ ID NO: 124390
ucacacaauuccuaauugc

SEQ ID NO: 124392 - RNA, 19 nt, Artificial Sequence
  Description of Artificial Sequence: Synthetic oligonucleotide
  Sense strand starting at position 3965 of SEQ ID NO: 1588
uuaggaauugugugaggcu

SEQ ID NO: 124393 - RNA, 19 nt, Artificial Sequence
  Description of Artificial Sequence: Synthetic oligonucleotide
  Antisense strand to SEQ ID NO: 124392
agccucacacaauuccuaa

SEQ ID NO: 124394 - RNA, 19 nt, Artificial Sequence
  Description of Artificial Sequence: Synthetic oligonucleotide
  Sense strand starting at position 3978 of SEQ ID NO: 1589
gucaucauuugcuuaucca

SEQ ID NO: 124395 - RNA, 19 nt, Artificial Sequence
  Description of Artificial Sequence: Synthetic oligonucleotide
  Antisense strand to SEQ ID NO: 124394
uggauaagcaaaugaugac

SEQ ID NO: 124396 - RNA, 19 nt, Artificial Sequence
  Description of Artificial Sequence: Synthetic oligonucleotide
  Sense strand starting at position 3976 of SEQ ID NO: 1589
gugucaucauuugcuuauc

SEQ ID NO: 124397 - RNA, 19 nt, Artificial Sequence
  Description of Artificial Sequence: Synthetic oligonucleotide
  Antisense strand to SEQ ID NO: 124396
gauaagcaaaugaugacac

SEQ ID NO: 124398 - RNA, 19 nt, Artificial Sequence
  Description of Artificial Sequence: Synthetic oligonucleotide
  Sense strand starting at position 3970 of SEQ ID NO: 1589
gcaauugugucaucauuug

SEQ ID NO: 124399 - RNA, 19 nt, Artificial Sequence
  Description of Artificial Sequence: Synthetic oligonucleotide
  Antisense strand to SEQ ID NO: 124398
caaaugaugacacaauugc

SEQ ID NO: 124400 - RNA, 19 nt, Artificial Sequence
  Description of Artificial Sequence: Synthetic oligonucleotide
  Sense strand starting at position 3954 of SEQ ID NO: 1589
gugguauuccauuaaugca

SEQ ID NO: 124401 - RNA, 19 nt, Artificial Sequence
  Description of Artificial Sequence: Synthetic oligonucleotide
  Antisense strand to SEQ ID NO: 124400
ugcauuaauggaauaccac

SEQ ID NO: 124402 - RNA, 19 nt, Artificial Sequence
  Description of Artificial Sequence: Synthetic oligonucleotide
  Sense strand starting at position 3925 of SEQ ID NO: 1589
augagugguuuguuccuuu

SEQ ID NO: 124403 - RNA, 19 nt, Artificial Sequence
  Description of Artificial Sequence: Synthetic oligonucleotide
  Antisense strand to SEQ ID NO: 124402
aaaggaacaaaccacucau

SEQ ID NO: 124404 - RNA, 19 nt, Artificial Sequence
  Description of Artificial Sequence: Synthetic oligonucleotide
  Sense strand starting at position 3912 of SEQ ID NO: 1589
cuguguuguagguaugagu

SEQ ID NO: 124405 - RNA, 19 nt, Artificial Sequence
  Description of Artificial Sequence: Synthetic oligonucleotide
  Antisense strand to SEQ ID NO: 124404
acucauaccuacaacacag

SEQ ID NO: 124406 - RNA, 19 nt, Artificial Sequence
  Description of Artificial Sequence: Synthetic oligonucleotide
  Sense strand starting at position 3910 of SEQ ID NO: 1589
aucuguguuguagguauga

SEQ ID NO: 124407 - RNA, 19 nt, Artificial Sequence
  Description of Artificial Sequence: Synthetic oligonucleotide
  Antisense strand to SEQ ID NO: 124406
ucauaccuacaacacagau

SEQ ID NO: 124408 - RNA, 19 nt, Artificial Sequence
  Description of Artificial Sequence: Synthetic oligonucleotide
  Sense strand starting at position 3755 of SEQ ID NO: 1589
gccuauuuguagucagucu

SEQ ID NO: 124409 - RNA, 19 nt, Artificial Sequence
  Description of Artificial Sequence: Synthetic oligonucleotide
  Antisense strand to SEQ ID NO: 124408
agacugacuacaaauaggc

SEQ ID NO: 124410 - RNA, 19 nt, Artificial Sequence
  Description of Artificial Sequence: Synthetic oligonucleotide
  Sense strand starting at position 3692 of SEQ ID NO: 1589
uuguguagccaucaccaua

SEQ ID NO: 124411 - RNA, 19 nt, Artificial Sequence
  Description of Artificial Sequence: Synthetic oligonucleotide
  Antisense strand to SEQ ID NO: 124410
uauggugauggcuacacaa

SEQ ID NO: 124412 - RNA, 19 nt, Artificial Sequence
  Description of Artificial Sequence: Synthetic oligonucleotide
  Sense strand starting at position 3622 of SEQ ID NO: 1589
ugagauaauuuacauguca

SEQ ID NO: 124413 - RNA, 19 nt, Artificial Sequence
  Description of Artificial Sequence: Synthetic oligonucleotide
  Antisense strand to SEQ ID NO: 124412
ugacauguaaauuaucuca

SEQ ID NO: 124414 - RNA, 19 nt, Artificial Sequence
  Description of Artificial Sequence: Synthetic oligonucleotide
  Sense strand starting at position 3403 of SEQ ID NO: 1589
uuauaaagaccaggucuuu

SEQ ID NO: 124415 - RNA, 19 nt, Artificial Sequence
  Description of Artificial Sequence: Synthetic oligonucleotide
  Antisense strand to SEQ ID NO: 124414
aaagaccuggucuuuauaa

SEQ ID NO: 124416 - RNA, 19 nt, Artificial Sequence
  Description of Artificial Sequence: Synthetic oligonucleotide
  Sense strand starting at position 2756 of SEQ ID NO: 1589
cuaggaggaaauuguuauu

SEQ ID NO: 124417 - RNA, 19 nt, Artificial Sequence
  Description of Artificial Sequence: Synthetic oligonucleotide
  Antisense strand to SEQ ID NO: 124416
aauaacaauuuccuccuag

SEQ ID NO: 124418 - RNA, 19 nt, Artificial Sequence
  Description of Artificial Sequence: Synthetic oligonucleotide
  Sense strand starting at position 2747 of SEQ ID NO: 1589
cccuucuugcuaggaggaa

SEQ ID NO: 124419 - RNA, 19 nt, Artificial Sequence
  Description of Artificial Sequence: Synthetic oligonucleotide
  Antisense strand to SEQ ID NO: 124418
uuccuccuagcaagaaggg

SEQ ID NO: 124420 - RNA, 19 nt, Artificial Sequence
  Description of Artificial Sequence: Synthetic oligonucleotide
  Sense strand starting at position 2699 of SEQ ID NO: 1589
gccagacauuugcaaagua

SEQ ID NO: 124421 - RNA, 19 nt, Artificial Sequence
  Description of Artificial Sequence: Synthetic oligonucleotide
  Antisense strand to SEQ ID NO: 124420
uacuuugcaaaugucuggc

SEQ ID NO: 124422 - RNA, 19 nt, Artificial Sequence
  Description of Artificial Sequence: Synthetic oligonucleotide
  Sense strand starting at position 2646 of SEQ ID NO: 1589
cgagauggaccagguuaaa

SEQ ID NO: 124423 - RNA, 19 nt, Artificial Sequence
  Description of Artificial Sequence: Synthetic oligonucleotide
  Antisense strand to SEQ ID NO: 124422
uuuaaccugguccaucucg

SEQ ID NO: 124424 - RNA, 19 nt, Artificial Sequence
  Description of Artificial Sequence: Synthetic oligonucleotide
  Sense strand starting at position 2594 of SEQ ID NO: 1589
cggaguuaacgguauugaa

SEQ ID NO: 124425 - RNA, 19 nt, Artificial Sequence
  Description of Artificial Sequence: Synthetic oligonucleotide
  Antisense strand to SEQ ID NO: 124424
uucaauaccguuaacuccg

SEQ ID NO: 124426 - RNA, 19 nt, Artificial Sequence
  Description of Artificial Sequence: Synthetic oligonucleotide
  Sense strand starting at position 2541 of SEQ ID NO: 1589
uauguauugguuggaguau

SEQ ID NO: 124427 - RNA, 19 nt, Artificial Sequence
  Description of Artificial Sequence: Synthetic oligonucleotide
  Antisense strand to SEQ ID NO: 124426
auacuccaaccaauacaua

SEQ ID NO: 124428 - RNA, 19 nt, Artificial Sequence
  Description of Artificial Sequence: Synthetic oligonucleotide
  Sense strand starting at position 2540 of SEQ ID NO: 1589
guauguauugguuggagua

SEQ ID NO: 124429 - RNA, 19 nt, Artificial Sequence
  Description of Artificial Sequence: Synthetic oligonucleotide
  Antisense strand to SEQ ID NO: 124428
uacuccaaccaauacauac

SEQ ID NO: 124430 - RNA, 19 nt, Artificial Sequence
  Description of Artificial Sequence: Synthetic oligonucleotide
  Sense strand starting at position 2146 of SEQ ID NO: 1589
cgagcaccuagaugacauu

SEQ ID NO: 124431 - RNA, 19 nt, Artificial Sequence
  Description of Artificial Sequence: Synthetic oligonucleotide
  Antisense strand to SEQ ID NO: 124430
aaugucaucuaggugcucg

SEQ ID NO: 124432 - RNA, 19 nt, Artificial Sequence
  Description of Artificial Sequence: Synthetic oligonucleotide
  Sense strand starting at position 1474 of SEQ ID NO: 1589
uccacauuuggccgugacu

SEQ ID NO: 124433 - RNA, 19 nt, Artificial Sequence
  Description of Artificial Sequence: Synthetic oligonucleotide
  Antisense strand to SEQ ID NO: 124432
agucacggccaaaugugga

SEQ ID NO: 124434 - RNA, 19 nt, Artificial Sequence
  Description of Artificial Sequence: Synthetic oligonucleotide
  Sense strand starting at position 1390 of SEQ ID NO: 1589
cgaugucagcucuagagag

SEQ ID NO: 124435 - RNA, 19 nt, Artificial Sequence
  Description of Artificial Sequence: Synthetic oligonucleotide
  Antisense strand to SEQ ID NO: 124434
cucucuagagcugacaucg

SEQ ID NO: 124436 - RNA, 19 nt, Artificial Sequence
  Description of Artificial Sequence: Synthetic oligonucleotide
  Sense strand starting at position 1387 of SEQ ID NO: 1589
gcgcgaugucagcucuaga

SEQ ID NO: 124437 - RNA, 19 nt, Artificial Sequence
  Description of Artificial Sequence: Synthetic oligonucleotide
  Antisense strand to SEQ ID NO: 124436
ucuagagcugacaucgcgc

SEQ ID NO: 124438 - RNA, 19 nt, Artificial Sequence
  Description of Artificial Sequence: Synthetic oligonucleotide
  Sense strand starting at position 1088 of SEQ ID NO: 1589
ucguucauucgggcuguga

SEQ ID NO: 124439 - RNA, 19 nt, Artificial Sequence
  Description of Artificial Sequence: Synthetic oligonucleotide
  Antisense strand to SEQ ID NO: 124438
ucacagcccgaaugaacga

SEQ ID NO: 124440 - RNA, 19 nt, Artificial Sequence
  Description of Artificial Sequence: Synthetic oligonucleotide
  Sense strand starting at position 1019 of SEQ ID NO: 1589
aaguuagagcucuacacag

SEQ ID NO: 124441 - RNA, 19 nt, Artificial Sequence
  Description of Artificial Sequence: Synthetic oligonucleotide
  Antisense strand to SEQ ID NO: 124440
cuguguagagcucuaacuu

SEQ ID NO: 124442 - RNA, 19 nt, Artificial Sequence
  Description of Artificial Sequence: Synthetic oligonucleotide
  Sense strand starting at position 998 of SEQ ID NO: 1589
cccagaucucaucaggcaa

SEQ ID NO: 124443 - RNA, 19 nt, Artificial Sequence
  Description of Artificial Sequence: Synthetic oligonucleotide
  Antisense strand to SEQ ID NO: 124442
uugccugaugagaucuggg

SEQ ID NO: 124444 - RNA, 19 nt, Artificial Sequence
  Description of Artificial Sequence: Synthetic oligonucleotide
  Sense strand starting at position 934 of SEQ ID NO: 1589
uguuguuauugaucauccu

SEQ ID NO: 124445 - RNA, 19 nt, Artificial Sequence
  Description of Artificial Sequence: Synthetic oligonucleotide
  Antisense strand to SEQ ID NO: 124444
aggaugaucaauaacaaca

SEQ ID NO: 124446 - RNA, 19 nt, Artificial Sequence
  Description of Artificial Sequence: Synthetic oligonucleotide
  Sense strand starting at position 927 of SEQ ID NO: 1589
cucuaucuguuguuauuga

SEQ ID NO: 124447 - RNA, 19 nt, Artificial Sequence
  Description of Artificial Sequence: Synthetic oligonucleotide
  Antisense strand to SEQ ID NO: 124446
ucaauaacaacagauagag

SEQ ID NO: 124448 - RNA, 19 nt, Artificial Sequence
  Description of Artificial Sequence: Synthetic oligonucleotide
  Sense strand starting at position 854 of SEQ ID NO: 1589
gugugucagguagaaucca

SEQ ID NO: 124449 - RNA, 19 nt, Artificial Sequence
  Description of Artificial Sequence: Synthetic oligonucleotide
  Antisense strand to SEQ ID NO: 124448
uggauucuaccugacacac

SEQ ID NO: 124450 - RNA, 19 nt, Artificial Sequence
  Description of Artificial Sequence: Synthetic oligonucleotide
  Sense strand starting at position 852 of SEQ ID NO: 1589
cggugugucagguagaauc

SEQ ID NO: 124451 - RNA, 19 nt, Artificial Sequence
  Description of Artificial Sequence: Synthetic oligonucleotide
  Antisense strand to SEQ ID NO: 124450
gauucuaccugacacaccg

SEQ ID NO: 124452 - RNA, 19 nt, Artificial Sequence
  Description of Artificial Sequence: Synthetic oligonucleotide
  Sense strand starting at position 795 of SEQ ID NO: 1589
uaugucaccucaguaggau

SEQ ID NO: 124453 - RNA, 19 nt, Artificial Sequence
  Description of Artificial Sequence: Synthetic oligonucleotide
  Antisense strand to SEQ ID NO: 124452
auccuacugaggugacaua

SEQ ID NO: 124454 - RNA, 19 nt, Artificial Sequence
  Description of Artificial Sequence: Synthetic oligonucleotide
  Sense strand starting at position 777 of SEQ ID NO: 1589
ggaggcucacuguaaaguu

SEQ ID NO: 124455 - RNA, 19 nt, Artificial Sequence
  Description of Artificial Sequence: Synthetic oligonucleotide
  Antisense strand to SEQ ID NO: 124454
aacuuuacagugagccucc

SEQ ID NO: 124456 - RNA, 19 nt, Artificial Sequence
  Description of Artificial Sequence: Synthetic oligonucleotide
  Sense strand starting at position 774 of SEQ ID NO: 1589
gugggaggcucacuguaaa

SEQ ID NO: 124457 - RNA, 19 nt, Artificial Sequence
  Description of Artificial Sequence: Synthetic oligonucleotide
  Antisense strand to SEQ ID NO: 124456
uuuacagugagccucccac

SEQ ID NO: 124458 - RNA, 19 nt, Artificial Sequence
  Description of Artificial Sequence: Synthetic oligonucleotide
  Sense strand starting at position 453 of SEQ ID NO: 1589
ucaccaauuucucgaugaa

SEQ ID NO: 124459 - RNA, 19 nt, Artificial Sequence
  Description of Artificial Sequence: Synthetic oligonucleotide
  Antisense strand to SEQ ID NO: 124458
uucaucgagaaauugguga

SEQ ID NO: 124460 - RNA, 19 nt, Artificial Sequence
  Description of Artificial Sequence: Synthetic oligonucleotide
  Sense strand starting at position 330 of SEQ ID NO: 1589
aucauuuggucagagcuua

SEQ ID NO: 124461 - RNA, 19 nt, Artificial Sequence
  Description of Artificial Sequence: Synthetic oligonucleotide
  Antisense strand to SEQ ID NO: 124460
uaagcucugaccaaaugau

SEQ ID NO: 124462 - RNA, 19 nt, Artificial Sequence
  Description of Artificial Sequence: Synthetic oligonucleotide
  Sense strand starting at position 325 of SEQ ID NO: 1589
aagcaaucauuuggucaga

SEQ ID NO: 124463 - RNA, 19 nt, Artificial Sequence
  Description of Artificial Sequence: Synthetic oligonucleotide
  Antisense strand to SEQ ID NO: 124462
ucugaccaaaugauugcuu

SEQ ID NO: 124464 - RNA, 19 nt, Artificial Sequence
  Description of Artificial Sequence: Synthetic oligonucleotide
  Sense strand starting at position 241 of SEQ ID NO: 1589
cuguuaguauucucagaau

SEQ ID NO: 124465 - RNA, 19 nt, Artificial Sequence
  Description of Artificial Sequence: Synthetic oligonucleotide
  Antisense strand to SEQ ID NO: 124464
auucugagaauacuaacag

SEQ ID NO: 124466 - RNA, 19 nt, Artificial Sequence
  Description of Artificial Sequence: Synthetic oligonucleotide
  Sense strand starting at position 239 of SEQ ID NO: 1589
gucuguuaguauucucaga

SEQ ID NO: 124467 - RNA, 19 nt, Artificial Sequence
  Description of Artificial Sequence: Synthetic oligonucleotide
  Antisense strand to SEQ ID NO: 124466
ucugagaauacuaacagac

SEQ ID NO: 124468 - RNA, 19 nt, Artificial Sequence
  Description of Artificial Sequence: Synthetic oligonucleotide
  Sense strand starting at position 231 of SEQ ID NO: 1589
auugaaaugucuguuagua

SEQ ID NO: 124469 - RNA, 19 nt, Artificial Sequence
  Description of Artificial Sequence: Synthetic oligonucleotide
  Antisense strand to SEQ ID NO: 124468
uacuaacagacauuucaau

SEQ ID NO: 124470 - RNA, 19 nt, Artificial Sequence
  Description of Artificial Sequence: Synthetic oligonucleotide
  Sense strand starting at position 230 of SEQ ID NO: 1589
uauugaaaugucuguuagu

SEQ ID NO: 124471 - RNA, 19 nt, Artificial Sequence
  Description of Artificial Sequence: Synthetic oligonucleotide
  Antisense strand to SEQ ID NO: 124470
acuaacagacauuucaaua

SEQ ID NO: 124472 - RNA, 19 nt, Artificial Sequence
  Description of Artificial Sequence: Synthetic oligonucleotide
  Sense strand starting at position 218 of SEQ ID NO: 1589
cgccuuaauguuuauugaa

SEQ ID NO: 124473 - RNA, 19 nt, Artificial Sequence
  Description of Artificial Sequence: Synthetic oligonucleotide
  Antisense strand to SEQ ID NO: 124472
uucaauaaacauuaaggcg

SEQ ID NO: 124474 - RNA, 19 nt, Artificial Sequence
  Description of Artificial Sequence: Synthetic oligonucleotide
  Sense strand starting at position 237 of SEQ ID NO: 1590
cagagugucccauaccaag

SEQ ID NO: 124475 - RNA, 19 nt, Artificial Sequence
  Description of Artificial Sequence: Synthetic oligonucleotide
  Antisense strand to SEQ ID NO: 124474
cuugguaugggacacucug

SEQ ID NO: 124476 - RNA, 19 nt, Artificial Sequence
  Description of Artificial Sequence: Synthetic oligonucleotide
  Sense strand starting at position 260 of SEQ ID NO: 1590
uugugacauguugagcuaa

SEQ ID NO: 124477 - RNA, 19 nt, Artificial Sequence
  Description of Artificial Sequence: Synthetic oligonucleotide
  Antisense strand to SEQ ID NO: 124476
uuagcucaacaugucacaa

SEQ ID NO: 124478 - RNA, 19 nt, Artificial Sequence
  Description of Artificial Sequence: Synthetic oligonucleotide
  Sense strand starting at position 307 of SEQ ID NO: 1590
cagacaagguucuugaaac

SEQ ID NO: 124479 - RNA, 19 nt, Artificial Sequence
  Description of Artificial Sequence: Synthetic oligonucleotide
  Antisense strand to SEQ ID NO: 124478
guuucaagaaccuugucug

SEQ ID NO: 124480 - RNA, 19 nt, Artificial Sequence
  Description of Artificial Sequence: Synthetic oligonucleotide
  Sense strand starting at position 585 of SEQ ID NO: 1590
cuaugcugucuauagagaa

SEQ ID NO: 124481 - RNA, 19 nt, Artificial Sequence
  Description of Artificial Sequence: Synthetic oligonucleotide
  Antisense strand to SEQ ID NO: 124480
uucucuauagacagcauag

SEQ ID NO: 124482 - RNA, 19 nt, Artificial Sequence
  Description of Artificial Sequence: Synthetic oligonucleotide
  Sense strand starting at position 618 of SEQ ID NO: 1590
uagggaaguuagguuacuu

SEQ ID NO: 124483 - RNA, 19 nt, Artificial Sequence
  Description of Artificial Sequence: Synthetic oligonucleotide
  Antisense strand to SEQ ID NO: 124482
aaguaaccuaacuucccua

SEQ ID NO: 124484 - RNA, 19 nt, Artificial Sequence
  Description of Artificial Sequence: Synthetic oligonucleotide
  Sense strand starting at position 626 of SEQ ID NO: 1590
uuagguuacuugucuaaca

SEQ ID NO: 124485 - RNA, 19 nt, Artificial Sequence
  Description of Artificial Sequence: Synthetic oligonucleotide
  Antisense strand to SEQ ID NO: 124484
uguuagacaaguaaccuaa

SEQ ID NO: 124486 - RNA, 19 nt, Artificial Sequence
  Description of Artificial Sequence: Synthetic oligonucleotide
  Sense strand starting at position 628 of SEQ ID NO: 1590
agguuacuugucuaacaua

SEQ ID NO: 124487 - RNA, 19 nt, Artificial Sequence
  Description of Artificial Sequence: Synthetic oligonucleotide
  Antisense strand to SEQ ID NO: 124486
uauguuagacaaguaaccu

SEQ ID NO: 124488 - RNA, 19 nt, Artificial Sequence
  Description of Artificial Sequence: Synthetic oligonucleotide
  Sense strand starting at position 742 of SEQ ID NO: 1590
gucagaugaacuuggguua

SEQ ID NO: 124489 - RNA, 19 nt, Artificial Sequence
  Description of Artificial Sequence: Synthetic oligonucleotide
  Antisense strand to SEQ ID NO: 124488
uaacccaaguucaucugac

SEQ ID NO: 124490 - RNA, 19 nt, Artificial Sequence
  Description of Artificial Sequence: Synthetic oligonucleotide
  Sense strand starting at position 1176 of SEQ ID NO: 1590
caaugaaaggccugugagu

SEQ ID NO: 124491 - RNA, 19 nt, Artificial Sequence
  Description of Artificial Sequence: Synthetic oligonucleotide
  Antisense strand to SEQ ID NO: 124490
acucacaggccuuucauug

SEQ ID NO: 124492 - RNA, 19 nt, Artificial Sequence
  Description of Artificial Sequence: Synthetic oligonucleotide
  Sense strand starting at position 1225 of SEQ ID NO: 1590
uaaauuugcugucugagua

SEQ ID NO: 124493 - RNA, 19 nt, Artificial Sequence
  Description of Artificial Sequence: Synthetic oligonucleotide
  Antisense strand to SEQ ID NO: 124492
uacucagacagcaaauuua

SEQ ID NO: 124494 - RNA, 19 nt, Artificial Sequence
  Description of Artificial Sequence: Synthetic oligonucleotide
  Sense strand starting at position 1492 of SEQ ID NO: 1590
aagugcuggguuuaacuau

SEQ ID NO: 124495 - RNA, 19 nt, Artificial Sequence
  Description of Artificial Sequence: Synthetic oligonucleotide
  Antisense strand to SEQ ID NO: 124494
auaguuaaacccagcacuu

SEQ ID NO: 124496 - RNA, 19 nt, Artificial Sequence
  Description of Artificial Sequence: Synthetic oligonucleotide
  Sense strand starting at position 1501 of SEQ ID NO: 1590
guuuaacuaugacugguau

SEQ ID NO: 124497 - RNA, 19 nt, Artificial Sequence
  Description of Artificial Sequence: Synthetic oligonucleotide
  Antisense strand to SEQ ID NO: 124496
auaccagucauaguuaaac

SEQ ID NO: 124498 - RNA, 19 nt, Artificial Sequence
  Description of Artificial Sequence: Synthetic oligonucleotide
  Sense strand starting at position 1502 of SEQ ID NO: 1590
uuuaacuaugacugguaua

SEQ ID NO: 124499 - RNA, 19 nt, Artificial Sequence
  Description of Artificial Sequence: Synthetic oligonucleotide
  Antisense strand to SEQ ID NO: 124498
uauaccagucauaguuaaa

SEQ ID NO: 124500 - RNA, 19 nt, Artificial Sequence
  Description of Artificial Sequence: Synthetic oligonucleotide
  Sense strand starting at position 1516 of SEQ ID NO: 1590
guauaauaacgauggugac

SEQ ID NO: 124501 - RNA, 19 nt, Artificial Sequence
  Description of Artificial Sequence: Synthetic oligonucleotide
  Antisense strand to SEQ ID NO: 124500
gucaccaucguuauuauac

SEQ ID NO: 124502 - RNA, 19 nt, Artificial Sequence
  Description of Artificial Sequence: Synthetic oligonucleotide
  Sense strand starting at position 1517 of SEQ ID NO: 1590
uauaauaacgauggugaca

SEQ ID NO: 124503 - RNA, 19 nt, Artificial Sequence
  Description of Artificial Sequence: Synthetic oligonucleotide
  Antisense strand to SEQ ID NO: 124502
ugucaccaucguuauuaua

SEQ ID NO: 124504 - RNA, 19 nt, Artificial Sequence
  Description of Artificial Sequence: Synthetic oligonucleotide
  Sense strand starting at position 1690 of SEQ ID NO: 1590
uugaauaacuuguugaaga

SEQ ID NO: 124505 - RNA, 19 nt, Artificial Sequence
  Description of Artificial Sequence: Synthetic oligonucleotide
  Antisense strand to SEQ ID NO: 124504
ucuucaacaaguuauucaa

SEQ ID NO: 124506 - RNA, 19 nt, Artificial Sequence
  Description of Artificial Sequence: Synthetic oligonucleotide
  Sense strand starting at position 1815 of SEQ ID NO: 1590
ggguuucuauuauuaaacu

SEQ ID NO: 124507 - RNA, 19 nt, Artificial Sequence
  Description of Artificial Sequence: Synthetic oligonucleotide
  Antisense strand to SEQ ID NO: 124506
aguuuaauaauagaaaccc

SEQ ID NO: 124508 - RNA, 19 nt, Artificial Sequence
  Description of Artificial Sequence: Synthetic oligonucleotide
  Sense strand starting at position 1957 of SEQ ID NO: 1590
ggacucugaccgggagagu

SEQ ID NO: 124509 - RNA, 19 nt, Artificial Sequence
  Description of Artificial Sequence: Synthetic oligonucleotide
  Antisense strand to SEQ ID NO: 124508
acucucccggucagagucc

SEQ ID NO: 124510 - RNA, 19 nt, Artificial Sequence
  Description of Artificial Sequence: Synthetic oligonucleotide
  Sense strand starting at position 2141 of SEQ ID NO: 1590
ucagguucccaauaaaugu

SEQ ID NO: 124511 - RNA, 19 nt, Artificial Sequence
  Description of Artificial Sequence: Synthetic oligonucleotide
  Antisense strand to SEQ ID NO: 124510
acauuuauugggaaccuga

SEQ ID NO: 124512 - RNA, 19 nt, Artificial Sequence
  Description of Artificial Sequence: Synthetic oligonucleotide
  Sense strand starting at position 2221 of SEQ ID NO: 1590
acuccugguuccucauaga

SEQ ID NO: 124513 - RNA, 19 nt, Artificial Sequence
  Description of Artificial Sequence: Synthetic oligonucleotide
  Antisense strand to SEQ ID NO: 124512
ucuaugaggaaccaggagu

SEQ ID NO: 124514 - RNA, 19 nt, Artificial Sequence
  Description of Artificial Sequence: Synthetic oligonucleotide
  Sense strand starting at position 2451 of SEQ ID NO: 1590
gagagucccagguauguaa

SEQ ID NO: 124515 - RNA, 19 nt, Artificial Sequence
  Description of Artificial Sequence: Synthetic oligonucleotide
  Antisense strand to SEQ ID NO: 124514
uuacauaccugggacucuc

SEQ ID NO: 124516 - RNA, 19 nt, Artificial Sequence
  Description of Artificial Sequence: Synthetic oligonucleotide
  Sense strand starting at position 2484 of SEQ ID NO: 1590
gucaucuacucugcaaaga

SEQ ID NO: 124517 - RNA, 19 nt, Artificial Sequence
  Description of Artificial Sequence: Synthetic oligonucleotide
  Antisense strand to SEQ ID NO: 124516
ucuuugcagaguagaugac

SEQ ID NO: 124518 - RNA, 19 nt, Artificial Sequence
  Description of Artificial Sequence: Synthetic oligonucleotide
  Sense strand starting at position 2495 of SEQ ID NO: 1590
ugcaaagaucccugacagu

SEQ ID NO: 124519 - RNA, 19 nt, Artificial Sequence
  Description of Artificial Sequence: Synthetic oligonucleotide
  Antisense strand to SEQ ID NO: 124518
acugucagggaucuuugca

SEQ ID NO: 124520 - RNA, 19 nt, Artificial Sequence
  Description of Artificial Sequence: Synthetic oligonucleotide
  Sense strand starting at position 2518 of SEQ ID NO: 1590
cgacuaaccucuucuuuag

SEQ ID NO: 124521 - RNA, 19 nt, Artificial Sequence
  Description of Artificial Sequence: Synthetic oligonucleotide
  Antisense strand to SEQ ID NO: 124520
cuaaagaagagguuagucg

SEQ ID NO: 124522 - RNA, 19 nt, Artificial Sequence
  Description of Artificial Sequence: Synthetic oligonucleotide
  Sense strand starting at position 2524 of SEQ ID NO: 1590
accucuucuuuagugagaa

SEQ ID NO: 124523 - RNA, 19 nt, Artificial Sequence
  Description of Artificial Sequence: Synthetic oligonucleotide
  Antisense strand to SEQ ID NO: 124522
uucucacuaaagaagaggu

SEQ ID NO: 124524 - RNA, 19 nt, Artificial Sequence
  Description of Artificial Sequence: Synthetic oligonucleotide
  Sense strand starting at position 2593 of SEQ ID NO: 1590
ugcugaggacuccauggau

SEQ ID NO: 124525 - RNA, 19 nt, Artificial Sequence
  Description of Artificial Sequence: Synthetic oligonucleotide
  Antisense strand to SEQ ID NO: 124524
auccauggaguccucagca

SEQ ID NO: 124526 - RNA, 19 nt, Artificial Sequence
  Description of Artificial Sequence: Synthetic oligonucleotide
  Sense strand starting at position 2621 of SEQ ID NO: 1590
guagucucacaaugaccua

SEQ ID NO: 124527 - RNA, 19 nt, Artificial Sequence
  Description of Artificial Sequence: Synthetic oligonucleotide
  Antisense strand to SEQ ID NO: 124526
uaggucauugugagacuac

SEQ ID NO: 124528 - RNA, 19 nt, Artificial Sequence
  Description of Artificial Sequence: Synthetic oligonucleotide
  Sense strand starting at position 2637 of SEQ ID NO: 1590
cuaugagacccgcacuuau

SEQ ID NO: 124529 - RNA, 19 nt, Artificial Sequence
  Description of Artificial Sequence: Synthetic oligonucleotide
  Antisense strand to SEQ ID NO: 124528
auaagugcgggucucauag

SEQ ID NO: 124530 - RNA, 19 nt, Artificial Sequence
  Description of Artificial Sequence: Synthetic oligonucleotide
  Sense strand starting at position 2647 of SEQ ID NO: 1590
cgcacuuaucaucagaaca

SEQ ID NO: 124531 - RNA, 19 nt, Artificial Sequence
  Description of Artificial Sequence: Synthetic oligonucleotide
  Antisense strand to SEQ ID NO: 124530
uguucugaugauaagugcg

SEQ ID NO: 124532 - RNA, 19 nt, Artificial Sequence
  Description of Artificial Sequence: Synthetic oligonucleotide
  Sense strand starting at position 2715 of SEQ ID NO: 1590
gggucagagccagauucau

SEQ ID NO: 124533 - RNA, 19 nt, Artificial Sequence
  Description of Artificial Sequence: Synthetic oligonucleotide
  Antisense strand to SEQ ID NO: 124532
augaaucuggcucugaccc

SEQ ID NO: 124534 - RNA, 19 nt, Artificial Sequence
  Description of Artificial Sequence: Synthetic oligonucleotide
  Sense strand starting at position 2813 of SEQ ID NO: 1590
ggcccaagagguugaacua

SEQ ID NO: 124535 - RNA, 19 nt, Artificial Sequence
  Description of Artificial Sequence: Synthetic oligonucleotide
  Antisense strand to SEQ ID NO: 124534
uaguucaaccucuugggcc

SEQ ID NO: 124536 - RNA, 19 nt, Artificial Sequence
  Description of Artificial Sequence: Synthetic oligonucleotide
  Sense strand starting at position 2814 of SEQ ID NO: 1590
gcccaagagguugaacuau

SEQ ID NO: 124537 - RNA, 19 nt, Artificial Sequence
  Description of Artificial Sequence: Synthetic oligonucleotide
  Antisense strand to SEQ ID NO: 124536
auaguucaaccucuugggc

SEQ ID NO: 124538 - RNA, 19 nt, Artificial Sequence
  Description of Artificial Sequence: Synthetic oligonucleotide
  Sense strand starting at position 2828 of SEQ ID NO: 1590
acuauaggaucacuauagu

SEQ ID NO: 124539 - RNA, 19 nt, Artificial Sequence
  Description of Artificial Sequence: Synthetic oligonucleotide
  Antisense strand to SEQ ID NO: 124538
acuauagugauccuauagu

SEQ ID NO: 124540 - RNA, 19 nt, Artificial Sequence
  Description of Artificial Sequence: Synthetic oligonucleotide
  Sense strand starting at position 2916 of SEQ ID NO: 1590
acugaaacuuuagcuguau

SEQ ID NO: 124541 - RNA, 19 nt, Artificial Sequence
  Description of Artificial Sequence: Synthetic oligonucleotide
  Antisense strand to SEQ ID NO: 124540
auacagcuaaaguuucagu

SEQ ID NO: 124542 - RNA, 19 nt, Artificial Sequence
  Description of Artificial Sequence: Synthetic oligonucleotide
  Sense strand starting at position 3001 of SEQ ID NO: 1590
gaaaccaaaugggauagau

SEQ ID NO: 124543 - RNA, 19 nt, Artificial Sequence
  Description of Artificial Sequence: Synthetic oligonucleotide
  Antisense strand to SEQ ID NO: 124542
aucuaucccauuugguuuc

SEQ ID NO: 124544 - RNA, 19 nt, Artificial Sequence
  Description of Artificial Sequence: Synthetic oligonucleotide
  Sense strand starting at position 3390 of SEQ ID NO: 1590
augaaacgucaguauggca

SEQ ID NO: 124545 - RNA, 19 nt, Artificial Sequence
  Description of Artificial Sequence: Synthetic oligonucleotide
  Antisense strand to SEQ ID NO: 124544
ugccauacugacguuucau

SEQ ID NO: 124546 - RNA, 19 nt, Artificial Sequence
  Description of Artificial Sequence: Synthetic oligonucleotide
  Sense strand starting at position 3582 of SEQ ID NO: 1590
gugcauccuguauacugaa

SEQ ID NO: 124547 - RNA, 19 nt, Artificial Sequence
  Description of Artificial Sequence: Synthetic oligonucleotide
  Antisense strand to SEQ ID NO: 124546
uucaguauacaggaugcac

SEQ ID NO: 124548 - RNA, 19 nt, Artificial Sequence
  Description of Artificial Sequence: Synthetic oligonucleotide
  Sense strand starting at position 3713 of SEQ ID NO: 1590
agauccagcaguggugaaa

SEQ ID NO: 124549 - RNA, 19 nt, Artificial Sequence
  Description of Artificial Sequence: Synthetic oligonucleotide
  Antisense strand to SEQ ID NO: 124548
uuucaccacugcuggaucu

SEQ ID NO: 124550 - RNA, 19 nt, Artificial Sequence
  Description of Artificial Sequence: Synthetic oligonucleotide
  Sense strand starting at position 3807 of SEQ ID NO: 1590
gggagcuuucccuaccaug

SEQ ID NO: 124551 - RNA, 19 nt, Artificial Sequence
  Description of Artificial Sequence: Synthetic oligonucleotide
  Antisense strand to SEQ ID NO: 124550
caugguagggaaagcuccc

SEQ ID NO: 124552 - RNA, 19 nt, Artificial Sequence
  Description of Artificial Sequence: Synthetic oligonucleotide
  Sense strand starting at position 3851 of SEQ ID NO: 1590
cgucccauugcugaaugaa

SEQ ID NO: 124553 - RNA, 19 nt, Artificial Sequence
  Description of Artificial Sequence: Synthetic oligonucleotide
  Antisense strand to SEQ ID NO: 124552
uucauucagcaaugggacg

SEQ ID NO: 124554 - RNA, 19 nt, Artificial Sequence
  Description of Artificial Sequence: Synthetic oligonucleotide
  Sense strand starting at position 12 of SEQ ID NO: 1591
gggaagcgugugugaagaa

SEQ ID NO: 124555 - RNA, 19 nt, Artificial Sequence
  Description of Artificial Sequence: Synthetic oligonucleotide
  Antisense strand to SEQ ID NO: 124554
uucuucacacacgcuuccc

SEQ ID NO: 124556 - RNA, 19 nt, Artificial Sequence
  Description of Artificial Sequence: Synthetic oligonucleotide
  Sense strand starting at position 203 of SEQ ID NO: 1591
gcuggacucugauugacau

SEQ ID NO: 124557 - RNA, 19 nt, Artificial Sequence
  Description of Artificial Sequence: Synthetic oligonucleotide
  Antisense strand to SEQ ID NO: 124556
augucaaucagaguccagc

SEQ ID NO: 124558 - RNA, 19 nt, Artificial Sequence
  Description of Artificial Sequence: Synthetic oligonucleotide
  Sense strand starting at position 289 of SEQ ID NO: 1591
ucaggugcauuaucucauu

SEQ ID NO: 124559 - RNA, 19 nt, Artificial Sequence
  Description of Artificial Sequence: Synthetic oligonucleotide
  Antisense strand to SEQ ID NO: 124558
aaugagauaaugcaccuga

SEQ ID NO: 124560 - RNA, 19 nt, Artificial Sequence
  Description of Artificial Sequence: Synthetic oligonucleotide
  Sense strand starting at position 305 of SEQ ID NO: 1591
auuuaauccucacagugag

SEQ ID NO: 124561 - RNA, 19 nt, Artificial Sequence
  Description of Artificial Sequence: Synthetic oligonucleotide
  Antisense strand to SEQ ID NO: 124560
cucacugugaggauuaaau

SEQ ID NO: 124562 - RNA, 19 nt, Artificial Sequence
  Description of Artificial Sequence: Synthetic oligonucleotide
  Sense strand starting at position 376 of SEQ ID NO: 1591
gagcuuaauugcuuguuua

SEQ ID NO: 124563 - RNA, 19 nt, Artificial Sequence
  Description of Artificial Sequence: Synthetic oligonucleotide
  Antisense strand to SEQ ID NO: 124562
uaaacaagcaauuaagcuc

SEQ ID NO: 124564 - RNA, 19 nt, Artificial Sequence
  Description of Artificial Sequence: Synthetic oligonucleotide
  Sense strand starting at position 377 of SEQ ID NO: 1591
agcuuaauugcuuguuuaa

SEQ ID NO: 124565 - RNA, 19 nt, Artificial Sequence
  Description of Artificial Sequence: Synthetic oligonucleotide
  Antisense strand to SEQ ID NO: 124564
uuaaacaagcaauuaagcu

SEQ ID NO: 124566 - RNA, 19 nt, Artificial Sequence
  Description of Artificial Sequence: Synthetic oligonucleotide
  Sense strand starting at position 442 of SEQ ID NO: 1591
cuccaaguucugugcucua

SEQ ID NO: 124567 - RNA, 19 nt, Artificial Sequence
  Description of Artificial Sequence: Synthetic oligonucleotide
  Antisense strand to SEQ ID NO: 124566
uagagcacagaacuuggag

SEQ ID NO: 124568 - RNA, 19 nt, Artificial Sequence
  Description of Artificial Sequence: Synthetic oligonucleotide
  Sense strand starting at position 449 of SEQ ID NO: 1591
uucugugcucuauguacaa

SEQ ID NO: 124569 - RNA, 19 nt, Artificial Sequence
  Description of Artificial Sequence: Synthetic oligonucleotide
  Antisense strand to SEQ ID NO: 124568
uuguacauagagcacagaa

SEQ ID NO: 124570 - RNA, 19 nt, Artificial Sequence
  Description of Artificial Sequence: Synthetic oligonucleotide
  Sense strand starting at position 453 of SEQ ID NO: 1591
gugcucuauguacaaucua

SEQ ID NO: 124571 - RNA, 19 nt, Artificial Sequence
  Description of Artificial Sequence: Synthetic oligonucleotide
  Antisense strand to SEQ ID NO: 124570
uagauuguacauagagcac

SEQ ID NO: 124572 - RNA, 19 nt, Artificial Sequence
  Description of Artificial Sequence: Synthetic oligonucleotide
  Sense strand starting at position 793 of SEQ ID NO: 1591
aagagagaauggguuuguu

SEQ ID NO: 124573 - RNA, 19 nt, Artificial Sequence
  Description of Artificial Sequence: Synthetic oligonucleotide
  Antisense strand to SEQ ID NO: 124572
aacaaacccauucucucuu

SEQ ID NO: 124574 - RNA, 19 nt, Artificial Sequence
  Description of Artificial Sequence: Synthetic oligonucleotide
  Sense strand starting at position 1441 of SEQ ID NO: 1591
gacgcugacaguuguuaac

SEQ ID NO: 124575 - RNA, 19 nt, Artificial Sequence
  Description of Artificial Sequence: Synthetic oligonucleotide
  Antisense strand to SEQ ID NO: 124574
guuaacaacugucagcguc

SEQ ID NO: 124576 - RNA, 19 nt, Artificial Sequence
  Description of Artificial Sequence: Synthetic oligonucleotide
  Sense strand starting at position 1443 of SEQ ID NO: 1591
cgcugacaguuguuaacau

SEQ ID NO: 124577 - RNA, 19 nt, Artificial Sequence
  Description of Artificial Sequence: Synthetic oligonucleotide
  Antisense strand to SEQ ID NO: 124576
auguuaacaacugucagcg

SEQ ID NO: 124578 - RNA, 19 nt, Artificial Sequence
  Description of Artificial Sequence: Synthetic oligonucleotide
  Sense strand starting at position 1450 of SEQ ID NO: 1591
aguuguuaacaugaccauu

SEQ ID NO: 124579 - RNA, 19 nt, Artificial Sequence
  Description of Artificial Sequence: Synthetic oligonucleotide
  Antisense strand to SEQ ID NO: 124578
aauggucauguuaacaacu

SEQ ID NO: 124580 - RNA, 19 nt, Artificial Sequence
  Description of Artificial Sequence: Synthetic oligonucleotide
  Sense strand starting at position 1608 of SEQ ID NO: 1591
uccuauuauuacccgagga

SEQ ID NO: 124581 - RNA, 19 nt, Artificial Sequence
  Description of Artificial Sequence: Synthetic oligonucleotide
  Antisense strand to SEQ ID NO: 124580
uccucggguaauaauagga

SEQ ID NO: 124582 - RNA, 19 nt, Artificial Sequence
  Description of Artificial Sequence: Synthetic oligonucleotide
  Sense strand starting at position 1612 of SEQ ID NO: 1591
auuauuacccgaggaacuc

SEQ ID NO: 124583 - RNA, 19 nt, Artificial Sequence
  Description of Artificial Sequence: Synthetic oligonucleotide
  Antisense strand to SEQ ID NO: 124582
gaguuccucggguaauaau

SEQ ID NO: 124584 - RNA, 19 nt, Artificial Sequence
  Description of Artificial Sequence: Synthetic oligonucleotide
  Sense strand starting at position 1791 of SEQ ID NO: 1591
gacucauauggaugggucu

SEQ ID NO: 124585 - RNA, 19 nt, Artificial Sequence
  Description of Artificial Sequence: Synthetic oligonucleotide
  Antisense strand to SEQ ID NO: 124584
agacccauccauaugaguc

SEQ ID NO: 124586 - RNA, 19 nt, Artificial Sequence
  Description of Artificial Sequence: Synthetic oligonucleotide
  Sense strand starting at position 1793 of SEQ ID NO: 1591
cucauauggaugggucuua

SEQ ID NO: 124587 - RNA, 19 nt, Artificial Sequence
  Description of Artificial Sequence: Synthetic oligonucleotide
  Antisense strand to SEQ ID NO: 124586
uaagacccauccauaugag

SEQ ID NO: 124588 - RNA, 19 nt, Artificial Sequence
  Description of Artificial Sequence: Synthetic oligonucleotide
  Sense strand starting at position 1804 of SEQ ID NO: 1591
gggucuuaugcagagaauc

SEQ ID NO: 124589 - RNA, 19 nt, Artificial Sequence
  Description of Artificial Sequence: Synthetic oligonucleotide
  Antisense strand to SEQ ID NO: 124588
gauucucugcauaagaccc

SEQ ID NO: 124590 - RNA, 19 nt, Artificial Sequence
  Description of Artificial Sequence: Synthetic oligonucleotide
  Sense strand starting at position 1832 of SEQ ID NO: 1591
cugggaauaugccagauga

SEQ ID NO: 124591 - RNA, 19 nt, Artificial Sequence
  Description of Artificial Sequence: Synthetic oligonucleotide
  Antisense strand to SEQ ID NO: 124590
ucaucuggcauauucccag

SEQ ID NO: 124592 - RNA, 19 nt, Artificial Sequence
  Description of Artificial Sequence: Synthetic oligonucleotide
  Sense strand starting at position 1874 of SEQ ID NO: 1591
uuccuaguucuagggcaga

SEQ ID NO: 124593 - RNA, 19 nt, Artificial Sequence
  Description of Artificial Sequence: Synthetic oligonucleotide
  Antisense strand to SEQ ID NO: 124592
ucugcccuagaacuaggaa

SEQ ID NO: 124594 - RNA, 19 nt, Artificial Sequence
  Description of Artificial Sequence: Synthetic oligonucleotide
  Sense strand starting at position 2178 of SEQ ID NO: 1591
ggcucuagcuucccagaga

SEQ ID NO: 124595 - RNA, 19 nt, Artificial Sequence
  Description of Artificial Sequence: Synthetic oligonucleotide
  Antisense strand to SEQ ID NO: 124594
ucucugggaagcuagagcc

SEQ ID NO: 124596 - RNA, 19 nt, Artificial Sequence
  Description of Artificial Sequence: Synthetic oligonucleotide
  Sense strand starting at position 2436 of SEQ ID NO: 1591
gaggguugugucugcaaca

SEQ ID NO: 124597 - RNA, 19 nt, Artificial Sequence
  Description of Artificial Sequence: Synthetic oligonucleotide
  Antisense strand to SEQ ID NO: 124596
uguugcagacacaacccuc

SEQ ID NO: 124598 - RNA, 19 nt, Artificial Sequence
  Description of Artificial Sequence: Synthetic oligonucleotide
  Sense strand starting at position 2437 of SEQ ID NO: 1591
aggguugugucugcaacau

SEQ ID NO: 124599 - RNA, 19 nt, Artificial Sequence
  Description of Artificial Sequence: Synthetic oligonucleotide
  Antisense strand to SEQ ID NO: 124598
auguugcagacacaacccu

SEQ ID NO: 124600 - RNA, 19 nt, Artificial Sequence
  Description of Artificial Sequence: Synthetic oligonucleotide
  Sense strand starting at position 2459 of SEQ ID NO: 1591
gaaacuuccugccugugaa

SEQ ID NO: 124601 - RNA, 19 nt, Artificial Sequence
  Description of Artificial Sequence: Synthetic oligonucleotide
  Antisense strand to SEQ ID NO: 124600
uucacaggcaggaaguuuc

SEQ ID NO: 124602 - RNA, 19 nt, Artificial Sequence
  Description of Artificial Sequence: Synthetic oligonucleotide
  Sense strand starting at position 2460 of SEQ ID NO: 1591
aaacuuccugccugugaag

SEQ ID NO: 124603 - RNA, 19 nt, Artificial Sequence
  Description of Artificial Sequence: Synthetic oligonucleotide
  Antisense strand to SEQ ID NO: 124602
cuucacaggcaggaaguuu

SEQ ID NO: 124604 - RNA, 19 nt, Artificial Sequence
  Description of Artificial Sequence: Synthetic oligonucleotide
  Sense strand starting at position 2462 of SEQ ID NO: 1591
acuuccugccugugaaguu

SEQ ID NO: 124605 - RNA, 19 nt, Artificial Sequence
  Description of Artificial Sequence: Synthetic oligonucleotide
  Antisense strand to SEQ ID NO: 124604
aacuucacaggcaggaagu

SEQ ID NO: 124606 - RNA, 19 nt, Artificial Sequence
  Description of Artificial Sequence: Synthetic oligonucleotide
  Sense strand starting at position 2492 of SEQ ID NO: 1591
gccugaagacuguggauug

SEQ ID NO: 124607 - RNA, 19 nt, Artificial Sequence
  Description of Artificial Sequence: Synthetic oligonucleotide
  Antisense strand to SEQ ID NO: 124606
caauccacagucuucaggc

SEQ ID NO: 124608 - RNA, 19 nt, Artificial Sequence
  Description of Artificial Sequence: Synthetic oligonucleotide
  Sense strand starting at position 2579 of SEQ ID NO: 1591
gagguacaaucucaggaaa

SEQ ID NO: 124609 - RNA, 19 nt, Artificial Sequence
  Description of Artificial Sequence: Synthetic oligonucleotide
  Antisense strand to SEQ ID NO: 124608
uuuccugagauuguaccuc

SEQ ID NO: 124610 - RNA, 19 nt, Artificial Sequence
  Description of Artificial Sequence: Synthetic oligonucleotide
  Sense strand starting at position 2630 of SEQ ID NO: 1591
uuacaugucugcccaucau

SEQ ID NO: 124611 - RNA, 19 nt, Artificial Sequence
  Description of Artificial Sequence: Synthetic oligonucleotide
  Antisense strand to SEQ ID NO: 124610
augaugggcagacauguaa

SEQ ID NO: 124612 - RNA, 19 nt, Artificial Sequence
  Description of Artificial Sequence: Synthetic oligonucleotide
  Sense strand starting at position 2734 of SEQ ID NO: 1591
cgccauguuccaguuguca

SEQ ID NO: 124613 - RNA, 19 nt, Artificial Sequence
  Description of Artificial Sequence: Synthetic oligonucleotide
  Antisense strand to SEQ ID NO: 124612
ugacaacuggaacauggcg

SEQ ID NO: 124614 - RNA, 19 nt, Artificial Sequence
  Description of Artificial Sequence: Synthetic oligonucleotide
  Sense strand starting at position 2746 of SEQ ID NO: 1591
guugucaccuaaucucauu

SEQ ID NO: 124615 - RNA, 19 nt, Artificial Sequence
  Description of Artificial Sequence: Synthetic oligonucleotide
  Antisense strand to SEQ ID NO: 124614
aaugagauuaggugacaac

SEQ ID NO: 124616 - RNA, 19 nt, Artificial Sequence
  Description of Artificial Sequence: Synthetic oligonucleotide
  Sense strand starting at position 2809 of SEQ ID NO: 1591
ggaaacucugcaugacacu

SEQ ID NO: 124617 - RNA, 19 nt, Artificial Sequence
  Description of Artificial Sequence: Synthetic oligonucleotide
  Antisense strand to SEQ ID NO: 124616
agugucaugcagaguuucc

SEQ ID NO: 124618 - RNA, 19 nt, Artificial Sequence
  Description of Artificial Sequence: Synthetic oligonucleotide
  Sense strand starting at position 2818 of SEQ ID NO: 1591
gcaugacacuuuccaagaa

SEQ ID NO: 124619 - RNA, 19 nt, Artificial Sequence
  Description of Artificial Sequence: Synthetic oligonucleotide
  Antisense strand to SEQ ID NO: 124618
uucuuggaaagugucaugc

SEQ ID NO: 124620 - RNA, 19 nt, Artificial Sequence
  Description of Artificial Sequence: Synthetic oligonucleotide
  Sense strand starting at position 3281 of SEQ ID NO: 1591
gaagguuucugggcuugca

SEQ ID NO: 124621 - RNA, 19 nt, Artificial Sequence
  Description of Artificial Sequence: Synthetic oligonucleotide
  Antisense strand to SEQ ID NO: 124620
ugcaagcccagaaaccuuc

SEQ ID NO: 124622 - RNA, 19 nt, Artificial Sequence
  Description of Artificial Sequence: Synthetic oligonucleotide
  Sense strand starting at position 3431 of SEQ ID NO: 1591
acagauucuugaggacuaa

SEQ ID NO: 124623 - RNA, 19 nt, Artificial Sequence
  Description of Artificial Sequence: Synthetic oligonucleotide
  Antisense strand to SEQ ID NO: 124622
uuaguccucaagaaucugu

SEQ ID NO: 124624 - RNA, 19 nt, Artificial Sequence
  Description of Artificial Sequence: Synthetic oligonucleotide
  Sense strand starting at position 3513 of SEQ ID NO: 1591
cucucugauucugugaacu

SEQ ID NO: 124625 - RNA, 19 nt, Artificial Sequence
  Description of Artificial Sequence: Synthetic oligonucleotide
  Antisense strand to SEQ ID NO: 124624
aguucacagaaucagagag

SEQ ID NO: 124626 - RNA, 19 nt, Artificial Sequence
  Description of Artificial Sequence: Synthetic oligonucleotide
  Sense strand starting at position 3730 of SEQ ID NO: 1591
acuaguugggacugguaga

SEQ ID NO: 124627 - RNA, 19 nt, Artificial Sequence
  Description of Artificial Sequence: Synthetic oligonucleotide
  Antisense strand to SEQ ID NO: 124626
ucuaccagucccaacuagu

SEQ ID NO: 124628 - RNA, 19 nt, Artificial Sequence
  Description of Artificial Sequence: Synthetic oligonucleotide
  Sense strand starting at position 3894 of SEQ ID NO: 1591
ucccuccagcugugaauuu

SEQ ID NO: 124629 - RNA, 19 nt, Artificial Sequence
  Description of Artificial Sequence: Synthetic oligonucleotide
  Antisense strand to SEQ ID NO: 124628
aaauucacagcuggaggga

SEQ ID NO: 124630 - RNA, 19 nt, Artificial Sequence
  Description of Artificial Sequence: Synthetic oligonucleotide
  Sense strand starting at position 3954 of SEQ ID NO: 1591
uagcuuagugucuggcaua

SEQ ID NO: 124631 - RNA, 19 nt, Artificial Sequence
  Description of Artificial Sequence: Synthetic oligonucleotide
  Antisense strand to SEQ ID NO: 124630
uaugccagacacuaagcua

SEQ ID NO: 124632 - RNA, 19 nt, Artificial Sequence
  Description of Artificial Sequence: Synthetic oligonucleotide
  Sense strand starting at position 3966 of SEQ ID NO: 1591
uggcauaaugcugacacau

SEQ ID NO: 124633 - RNA, 19 nt, Artificial Sequence
  Description of Artificial Sequence: Synthetic oligonucleotide
  Antisense strand to SEQ ID NO: 124632
augugucagcauuaugcca

SEQ ID NO: 124634 - RNA, 19 nt, Artificial Sequence
  Description of Artificial Sequence: Synthetic oligonucleotide
  Sense strand starting at position 3978 of SEQ ID NO: 1592
gcagaauuacgagagcaac

SEQ ID NO: 124635 - RNA, 19 nt, Artificial Sequence
  Description of Artificial Sequence: Synthetic oligonucleotide
  Antisense strand to SEQ ID NO: 124634
guugcucucguaauucugc

SEQ ID NO: 124636 - RNA, 19 nt, Artificial Sequence
  Description of Artificial Sequence: Synthetic oligonucleotide
  Sense strand starting at position 3967 of SEQ ID NO: 1592
ucuuucugagggcagaauu

SEQ ID NO: 124637 - RNA, 19 nt, Artificial Sequence
  Description of Artificial Sequence: Synthetic oligonucleotide
  Antisense strand to SEQ ID NO: 124636
aauucugcccucagaaaga

SEQ ID NO: 124638 - RNA, 19 nt, Artificial Sequence
  Description of Artificial Sequence: Synthetic oligonucleotide
  Sense strand starting at position 3965 of SEQ ID NO: 1592
guucuuucugagggcagaa

SEQ ID NO: 124639 - RNA, 19 nt, Artificial Sequence
  Description of Artificial Sequence: Synthetic oligonucleotide
  Antisense strand to SEQ ID NO: 124638
uucugcccucagaaagaac

SEQ ID NO: 124640 - RNA, 19 nt, Artificial Sequence
  Description of Artificial Sequence: Synthetic oligonucleotide
  Sense strand starting at position 3854 of SEQ ID NO: 1592
gguacuugggcacaaggau

SEQ ID NO: 124641 - RNA, 19 nt, Artificial Sequence
  Description of Artificial Sequence: Synthetic oligonucleotide
  Antisense strand to SEQ ID NO: 124640
auccuugugcccaaguacc

SEQ ID NO: 124642 - RNA, 19 nt, Artificial Sequence
  Description of Artificial Sequence: Synthetic oligonucleotide
  Sense strand starting at position 3829 of SEQ ID NO: 1592
cuugaaaucccaggguaaa

SEQ ID NO: 124643 - RNA, 19 nt, Artificial Sequence
  Description of Artificial Sequence: Synthetic oligonucleotide
  Antisense strand to SEQ ID NO: 124642
uuuacccugggauuucaag

SEQ ID NO: 124644 - RNA, 19 nt, Artificial Sequence
  Description of Artificial Sequence: Synthetic oligonucleotide
  Sense strand starting at position 3715 of SEQ ID NO: 1592
ugugucuugacauauccga

SEQ ID NO: 124645 - RNA, 19 nt, Artificial Sequence
  Description of Artificial Sequence: Synthetic oligonucleotide
  Antisense strand to SEQ ID NO: 124644
ucggauaugucaagacaca

SEQ ID NO: 124646 - RNA, 19 nt, Artificial Sequence
  Description of Artificial Sequence: Synthetic oligonucleotide
  Sense strand starting at position 3684 of SEQ ID NO: 1592
uuuauaugggcuugugaau

SEQ ID NO: 124647 - RNA, 19 nt, Artificial Sequence
  Description of Artificial Sequence: Synthetic oligonucleotide
  Antisense strand to SEQ ID NO: 124646
auucacaagcccauauaaa

SEQ ID NO: 124648 - RNA, 19 nt, Artificial Sequence
  Description of Artificial Sequence: Synthetic oligonucleotide
  Sense strand starting at position 3579 of SEQ ID NO: 1592
gcaagcaugcuuuauuaac

SEQ ID NO: 124649 - RNA, 19 nt, Artificial Sequence
  Description of Artificial Sequence: Synthetic oligonucleotide
  Antisense strand to SEQ ID NO: 124648
guuaauaaagcaugcuugc

SEQ ID NO: 124650 - RNA, 19 nt, Artificial Sequence
  Description of Artificial Sequence: Synthetic oligonucleotide
  Sense strand starting at position 3415 of SEQ ID NO: 1592
ggcccaugugcaggaaaua

SEQ ID NO: 124651 - RNA, 19 nt, Artificial Sequence
  Description of Artificial Sequence: Synthetic oligonucleotide
  Antisense strand to SEQ ID NO: 124650
uauuuccugcacaugggcc

SEQ ID NO: 124652 - RNA, 19 nt, Artificial Sequence
  Description of Artificial Sequence: Synthetic oligonucleotide
  Sense strand starting at position 3300 of SEQ ID NO: 1592
ucaagaaugccgcuguguu

SEQ ID NO: 124653 - RNA, 19 nt, Artificial Sequence
  Description of Artificial Sequence: Synthetic oligonucleotide
  Antisense strand to SEQ ID NO: 124652
aacacagcggcauucuuga

SEQ ID NO: 124654 - RNA, 19 nt, Artificial Sequence
  Description of Artificial Sequence: Synthetic oligonucleotide
  Sense strand starting at position 3200 of SEQ ID NO: 1592
ugaaucaucccuugagcaa

SEQ ID NO: 124655 - RNA, 19 nt, Artificial Sequence
  Description of Artificial Sequence: Synthetic oligonucleotide
  Antisense strand to SEQ ID NO: 124654
uugcucaagggaugauuca

SEQ ID NO: 124656 - RNA, 19 nt, Artificial Sequence
  Description of Artificial Sequence: Synthetic oligonucleotide
  Sense strand starting at position 2883 of SEQ ID NO: 1592
guguguucucagccaggca

SEQ ID NO: 124657 - RNA, 19 nt, Artificial Sequence
  Description of Artificial Sequence: Synthetic oligonucleotide
  Antisense strand to SEQ ID NO: 124656
ugccuggcugagaacacac

SEQ ID NO: 124658 - RNA, 19 nt, Artificial Sequence
  Description of Artificial Sequence: Synthetic oligonucleotide
  Sense strand starting at position 2769 of SEQ ID NO: 1592
uccuuuguauuugaagaaa

SEQ ID NO: 124659 - RNA, 19 nt, Artificial Sequence
  Description of Artificial Sequence: Synthetic oligonucleotide
  Antisense strand to SEQ ID NO: 124658
uuucuucaaauacaaagga

SEQ ID NO: 124660 - RNA, 19 nt, Artificial Sequence
  Description of Artificial Sequence: Synthetic oligonucleotide
  Sense strand starting at position 2762 of SEQ ID NO: 1592
guuuaaguccuuuguauuu

SEQ ID NO: 124661 - RNA, 19 nt, Artificial Sequence
  Description of Artificial Sequence: Synthetic oligonucleotide
  Antisense strand to SEQ ID NO: 124660
aaauacaaaggacuuaaac

SEQ ID NO: 124662 - RNA, 19 nt, Artificial Sequence
  Description of Artificial Sequence: Synthetic oligonucleotide
  Sense strand starting at position 2542 of SEQ ID NO: 1592
cuuggucauuccuuugaau

SEQ ID NO: 124663 - RNA, 19 nt, Artificial Sequence
  Description of Artificial Sequence: Synthetic oligonucleotide
  Antisense strand to SEQ ID NO: 124662
auucaaaggaaugaccaag

SEQ ID NO: 124664 - RNA, 19 nt, Artificial Sequence
  Description of Artificial Sequence: Synthetic oligonucleotide
  Sense strand starting at position 2514 of SEQ ID NO: 1592
cuccaaaguugcccugaau

SEQ ID NO: 124665 - RNA, 19 nt, Artificial Sequence
  Description of Artificial Sequence: Synthetic oligonucleotide
  Antisense strand to SEQ ID NO: 124664
auucagggcaacuuuggag

SEQ ID NO: 124666 - RNA, 19 nt, Artificial Sequence
  Description of Artificial Sequence: Synthetic oligonucleotide
  Sense strand starting at position 2185 of SEQ ID NO: 1592
gaagcagauuugugaacaa

SEQ ID NO: 124667 - RNA, 19 nt, Artificial Sequence
  Description of Artificial Sequence: Synthetic oligonucleotide
  Antisense strand to SEQ ID NO: 124666
uuguucacaaaucugcuuc

SEQ ID NO: 124668 - RNA, 19 nt, Artificial Sequence
  Description of Artificial Sequence: Synthetic oligonucleotide
  Sense strand starting at position 2007 of SEQ ID NO: 1592
ggacacuucugcccacuua

SEQ ID NO: 124669 - RNA, 19 nt, Artificial Sequence
  Description of Artificial Sequence: Synthetic oligonucleotide
  Antisense strand to SEQ ID NO: 124668
uaagugggcagaagugucc

SEQ ID NO: 124670 - RNA, 19 nt, Artificial Sequence
  Description of Artificial Sequence: Synthetic oligonucleotide
  Sense strand starting at position 1348 of SEQ ID NO: 1592
guagaauugaaguguauac

SEQ ID NO: 124671 - RNA, 19 nt, Artificial Sequence
  Description of Artificial Sequence: Synthetic oligonucleotide
  Antisense strand to SEQ ID NO: 124670
guauacacuucaauucuac

SEQ ID NO: 124672 - RNA, 19 nt, Artificial Sequence
  Description of Artificial Sequence: Synthetic oligonucleotide
  Sense strand starting at position 1344 of SEQ ID NO: 1592
guuaguagaauugaagugu

SEQ ID NO: 124673 - RNA, 19 nt, Artificial Sequence
  Description of Artificial Sequence: Synthetic oligonucleotide
  Antisense strand to SEQ ID NO: 124672
acacuucaauucuacuaac

SEQ ID NO: 124674 - RNA, 19 nt, Artificial Sequence
  Description of Artificial Sequence: Synthetic oligonucleotide
  Sense strand starting at position 1331 of SEQ ID NO: 1592
aacuuagcuggauguuagu

SEQ ID NO: 124675 - RNA, 19 nt, Artificial Sequence
  Description of Artificial Sequence: Synthetic oligonucleotide
  Antisense strand to SEQ ID NO: 124674
acuaacauccagcuaaguu

SEQ ID NO: 124676 - RNA, 19 nt, Artificial Sequence
  Description of Artificial Sequence: Synthetic oligonucleotide
  Sense strand starting at position 1329 of SEQ ID NO: 1592
gaaacuuagcuggauguua

SEQ ID NO: 124677 - RNA, 19 nt, Artificial Sequence
  Description of Artificial Sequence: Synthetic oligonucleotide
  Antisense strand to SEQ ID NO: 124676
uaacauccagcuaaguuuc

SEQ ID NO: 124678 - RNA, 19 nt, Artificial Sequence
  Description of Artificial Sequence: Synthetic oligonucleotide
  Sense strand starting at position 1328 of SEQ ID NO: 1592
ugaaacuuagcuggauguu

SEQ ID NO: 124679 - RNA, 19 nt, Artificial Sequence
  Description of Artificial Sequence: Synthetic oligonucleotide
  Antisense strand to SEQ ID NO: 124678
aacauccagcuaaguuuca

SEQ ID NO: 124680 - RNA, 19 nt, Artificial Sequence
  Description of Artificial Sequence: Synthetic oligonucleotide
  Sense strand starting at position 1327 of SEQ ID NO: 1592
augaaacuuagcuggaugu

SEQ ID NO: 124681 - RNA, 19 nt, Artificial Sequence
  Description of Artificial Sequence: Synthetic oligonucleotide
  Antisense strand to SEQ ID NO: 124680
acauccagcuaaguuucau

SEQ ID NO: 124682 - RNA, 19 nt, Artificial Sequence
  Description of Artificial Sequence: Synthetic oligonucleotide
  Sense strand starting at position 1200 of SEQ ID NO: 1592
acagguacuuugucaagca

SEQ ID NO: 124683 - RNA, 19 nt, Artificial Sequence
  Description of Artificial Sequence: Synthetic oligonucleotide
  Antisense strand to SEQ ID NO: 124682
ugcuugacaaaguaccugu

SEQ ID NO: 124684 - RNA, 19 nt, Artificial Sequence
  Description of Artificial Sequence: Synthetic oligonucleotide
  Sense strand starting at position 1171 of SEQ ID NO: 1592
gggagugugcuuuaaaugu

SEQ ID NO: 124685 - RNA, 19 nt, Artificial Sequence
  Description of Artificial Sequence: Synthetic oligonucleotide
  Antisense strand to SEQ ID NO: 124684
acauuuaaagcacacuccc

SEQ ID NO: 124686 - RNA, 19 nt, Artificial Sequence
  Description of Artificial Sequence: Synthetic oligonucleotide
  Sense strand starting at position 1131 of SEQ ID NO: 1592
cuugaagcuaguuagaaug

SEQ ID NO: 124687 - RNA, 19 nt, Artificial Sequence
  Description of Artificial Sequence: Synthetic oligonucleotide
  Antisense strand to SEQ ID NO: 124686
cauucuaacuagcuucaag

SEQ ID NO: 124688 - RNA, 19 nt, Artificial Sequence
  Description of Artificial Sequence: Synthetic oligonucleotide
  Sense strand starting at position 1130 of SEQ ID NO: 1592
ccuugaagcuaguuagaau

SEQ ID NO: 124689 - RNA, 19 nt, Artificial Sequence
  Description of Artificial Sequence: Synthetic oligonucleotide
  Antisense strand to SEQ ID NO: 124688
auucuaacuagcuucaagg

SEQ ID NO: 124690 - RNA, 19 nt, Artificial Sequence
  Description of Artificial Sequence: Synthetic oligonucleotide
  Sense strand starting at position 1030 of SEQ ID NO: 1592
uugacaagugacugaacuu

SEQ ID NO: 124691 - RNA, 19 nt, Artificial Sequence
  Description of Artificial Sequence: Synthetic oligonucleotide
  Antisense strand to SEQ ID NO: 124690
aaguucagucacuugucaa

SEQ ID NO: 124692 - RNA, 19 nt, Artificial Sequence
  Description of Artificial Sequence: Synthetic oligonucleotide
  Sense strand starting at position 1026 of SEQ ID NO: 1592
cuguuugacaagugacuga

SEQ ID NO: 124693 - RNA, 19 nt, Artificial Sequence
  Description of Artificial Sequence: Synthetic oligonucleotide
  Antisense strand to SEQ ID NO: 124692
ucagucacuugucaaacag

SEQ ID NO: 124694 - RNA, 19 nt, Artificial Sequence
  Description of Artificial Sequence: Synthetic oligonucleotide
  Sense strand starting at position 967 of SEQ ID NO: 1592
agcauuucugcgugacuac

SEQ ID NO: 124695 - RNA, 19 nt, Artificial Sequence
  Description of Artificial Sequence: Synthetic oligonucleotide
  Antisense strand to SEQ ID NO: 124694
guagucacgcagaaaugcu

SEQ ID NO: 124696 - RNA, 19 nt, Artificial Sequence
  Description of Artificial Sequence: Synthetic oligonucleotide
  Sense strand starting at position 966 of SEQ ID NO: 1592
uagcauuucugcgugacua

SEQ ID NO: 124697 - RNA, 19 nt, Artificial Sequence
  Description of Artificial Sequence: Synthetic oligonucleotide
  Antisense strand to SEQ ID NO: 124696
uagucacgcagaaaugcua

SEQ ID NO: 124698 - RNA, 19 nt, Artificial Sequence
  Description of Artificial Sequence: Synthetic oligonucleotide
  Sense strand starting at position 965 of SEQ ID NO: 1592
cuagcauuucugcgugacu

SEQ ID NO: 124699 - RNA, 19 nt, Artificial Sequence
  Description of Artificial Sequence: Synthetic oligonucleotide
  Antisense strand to SEQ ID NO: 124698
agucacgcagaaaugcuag

SEQ ID NO: 124700 - RNA, 19 nt, Artificial Sequence
  Description of Artificial Sequence: Synthetic oligonucleotide
  Sense strand starting at position 887 of SEQ ID NO: 1592
uguccaaggucauuauaag

SEQ ID NO: 124701 - RNA, 19 nt, Artificial Sequence
  Description of Artificial Sequence: Synthetic oligonucleotide
  Antisense strand to SEQ ID NO: 124700
cuuauaaugaccuuggaca

SEQ ID NO: 124702 - RNA, 19 nt, Artificial Sequence
  Description of Artificial Sequence: Synthetic oligonucleotide
  Sense strand starting at position 885 of SEQ ID NO: 1592
uguguccaaggucauuaua

SEQ ID NO: 124703 - RNA, 19 nt, Artificial Sequence
  Description of Artificial Sequence: Synthetic oligonucleotide
  Antisense strand to SEQ ID NO: 124702
uauaaugaccuuggacaca

SEQ ID NO: 124704 - RNA, 19 nt, Artificial Sequence
  Description of Artificial Sequence: Synthetic oligonucleotide
  Sense strand starting at position 822 of SEQ ID NO: 1592
auagucuuacaggaguuau

SEQ ID NO: 124705 - RNA, 19 nt, Artificial Sequence
  Description of Artificial Sequence: Synthetic oligonucleotide
  Antisense strand to SEQ ID NO: 124704
auaacuccuguaagacuau

SEQ ID NO: 124706 - RNA, 19 nt, Artificial Sequence
  Description of Artificial Sequence: Synthetic oligonucleotide
  Sense strand starting at position 573 of SEQ ID NO: 1592
aggacuaugugcuccaacu

SEQ ID NO: 124707 - RNA, 19 nt, Artificial Sequence
  Description of Artificial Sequence: Synthetic oligonucleotide
  Antisense strand to SEQ ID NO: 124706
aguuggagcacauaguccu

SEQ ID NO: 124708 - RNA, 19 nt, Artificial Sequence
  Description of Artificial Sequence: Synthetic oligonucleotide
  Sense strand starting at position 571 of SEQ ID NO: 1592
gaaggacuaugugcuccaa

SEQ ID NO: 124709 - RNA, 19 nt, Artificial Sequence
  Description of Artificial Sequence: Synthetic oligonucleotide
  Antisense strand to SEQ ID NO: 124708
uuggagcacauaguccuuc

SEQ ID NO: 124710 - RNA, 19 nt, Artificial Sequence
  Description of Artificial Sequence: Synthetic oligonucleotide
  Sense strand starting at position 320 of SEQ ID NO: 1592
gaaacugaguaucaggaaa

SEQ ID NO: 124711 - RNA, 19 nt, Artificial Sequence
  Description of Artificial Sequence: Synthetic oligonucleotide
  Antisense strand to SEQ ID NO: 124710
uuuccugauacucaguuuc

SEQ ID NO: 124712 - RNA, 19 nt, Artificial Sequence
  Description of Artificial Sequence: Synthetic oligonucleotide
  Sense strand starting at position 194 of SEQ ID NO: 1592
ugcagcucuccucaaagaa

SEQ ID NO: 124713 - RNA, 19 nt, Artificial Sequence
  Description of Artificial Sequence: Synthetic oligonucleotide
  Antisense strand to SEQ ID NO: 124712
uucuuugaggagagcugca

SEQ ID NO: 124714 - RNA, 19 nt, Artificial Sequence
  Description of Artificial Sequence: Synthetic oligonucleotide
  Sense strand starting at position 3941 of SEQ ID NO: 1593
guagucacuauagaugagu

SEQ ID NO: 124715 - RNA, 19 nt, Artificial Sequence
  Description of Artificial Sequence: Synthetic oligonucleotide
  Antisense strand to SEQ ID NO: 124714
acucaucuauagugacuac

SEQ ID NO: 124716 - RNA, 19 nt, Artificial Sequence
  Description of Artificial Sequence: Synthetic oligonucleotide
  Sense strand starting at position 3937 of SEQ ID NO: 1593
ugauguagucacuauagau

SEQ ID NO: 124717 - RNA, 19 nt, Artificial Sequence
  Description of Artificial Sequence: Synthetic oligonucleotide
  Antisense strand to SEQ ID NO: 124716
aucuauagugacuacauca

SEQ ID NO: 124718 - RNA, 19 nt, Artificial Sequence
  Description of Artificial Sequence: Synthetic oligonucleotide
  Sense strand starting at position 3934 of SEQ ID NO: 1593
uguugauguagucacuaua

SEQ ID NO: 124719 - RNA, 19 nt, Artificial Sequence
  Description of Artificial Sequence: Synthetic oligonucleotide
  Antisense strand to SEQ ID NO: 124718
uauagugacuacaucaaca

SEQ ID NO: 124720 - RNA, 19 nt, Artificial Sequence
  Description of Artificial Sequence: Synthetic oligonucleotide
  Sense strand starting at position 3910 of SEQ ID NO: 1593
aguacaugcuauguagaua

SEQ ID NO: 124721 - RNA, 19 nt, Artificial Sequence
  Description of Artificial Sequence: Synthetic oligonucleotide
  Antisense strand to SEQ ID NO: 124720
uaucuacauagcauguacu

SEQ ID NO: 124722 - RNA, 19 nt, Artificial Sequence
  Description of Artificial Sequence: Synthetic oligonucleotide
  Sense strand starting at position 3823 of SEQ ID NO: 1593
uugguaugucuugaucaag

SEQ ID NO: 124723 - RNA, 19 nt, Artificial Sequence
  Description of Artificial Sequence: Synthetic oligonucleotide
  Antisense strand to SEQ ID NO: 124722
cuugaucaagacauaccaa

SEQ ID NO: 124724 - RNA, 19 nt, Artificial Sequence
  Description of Artificial Sequence: Synthetic oligonucleotide
  Sense strand starting at position 3634 of SEQ ID NO: 1593
aguagaauuacuugaggug

SEQ ID NO: 124725 - RNA, 19 nt, Artificial Sequence
  Description of Artificial Sequence: Synthetic oligonucleotide
  Antisense strand to SEQ ID NO: 124724
caccucaaguaauucuacu

SEQ ID NO: 124726 - RNA, 19 nt, Artificial Sequence
  Description of Artificial Sequence: Synthetic oligonucleotide
  Sense strand starting at position 3624 of SEQ ID NO: 1593
ccaugcucacaguagaauu

SEQ ID NO: 124727 - RNA, 19 nt, Artificial Sequence
  Description of Artificial Sequence: Synthetic oligonucleotide
  Antisense strand to SEQ ID NO: 124726
aauucuacugugagcaugg

SEQ ID NO: 124728 - RNA, 19 nt, Artificial Sequence
  Description of Artificial Sequence: Synthetic oligonucleotide
  Sense strand starting at position 3585 of SEQ ID NO: 1593
auucucagucauggauaca

SEQ ID NO: 124729 - RNA, 19 nt, Artificial Sequence
  Description of Artificial Sequence: Synthetic oligonucleotide
  Antisense strand to SEQ ID NO: 124728
uguauccaugacugagaau

SEQ ID NO: 124730 - RNA, 19 nt, Artificial Sequence
  Description of Artificial Sequence: Synthetic oligonucleotide
  Sense strand starting at position 3580 of SEQ ID NO: 1593
cagaaauucucagucaugg

SEQ ID NO: 124731 - RNA, 19 nt, Artificial Sequence
  Description of Artificial Sequence: Synthetic oligonucleotide
  Antisense strand to SEQ ID NO: 124730
ccaugacugagaauuucug

SEQ ID NO: 124732 - RNA, 19 nt, Artificial Sequence
  Description of Artificial Sequence: Synthetic oligonucleotide
  Sense strand starting at position 3477 of SEQ ID NO: 1593
gggaaaguuaguuaauguc

SEQ ID NO: 124733 - RNA, 19 nt, Artificial Sequence
  Description of Artificial Sequence: Synthetic oligonucleotide
  Antisense strand to SEQ ID NO: 124732
gacauuaacuaacuuuccc

SEQ ID NO: 124734 - RNA, 19 nt, Artificial Sequence
  Description of Artificial Sequence: Synthetic oligonucleotide
  Sense strand starting at position 3476 of SEQ ID NO: 1593
ugggaaaguuaguuaaugu

SEQ ID NO: 124735 - RNA, 19 nt, Artificial Sequence
  Description of Artificial Sequence: Synthetic oligonucleotide
  Antisense strand to SEQ ID NO: 124734
acauuaacuaacuuuccca

SEQ ID NO: 124736 - RNA, 19 nt, Artificial Sequence
  Description of Artificial Sequence: Synthetic oligonucleotide
  Sense strand starting at position 3475 of SEQ ID NO: 1593
uugggaaaguuaguuaaug

SEQ ID NO: 124737 - RNA, 19 nt, Artificial Sequence
  Description of Artificial Sequence: Synthetic oligonucleotide
  Antisense strand to SEQ ID NO: 124736
cauuaacuaacuuucccaa

SEQ ID NO: 124738 - RNA, 19 nt, Artificial Sequence
  Description of Artificial Sequence: Synthetic oligonucleotide
  Sense strand starting at position 3394 of SEQ ID NO: 1593
gagagugauugucuccucu

SEQ ID NO: 124739 - RNA, 19 nt, Artificial Sequence
  Description of Artificial Sequence: Synthetic oligonucleotide
  Antisense strand to SEQ ID NO: 124738
agaggagacaaucacucuc

SEQ ID NO: 124740 - RNA, 19 nt, Artificial Sequence
  Description of Artificial Sequence: Synthetic oligonucleotide
  Sense strand starting at position 3384 of SEQ ID NO: 1593
uuaauuugaugagagugau

SEQ ID NO: 124741 - RNA, 19 nt, Artificial Sequence
  Description of Artificial Sequence: Synthetic oligonucleotide
  Antisense strand to SEQ ID NO: 124740
aucacucucaucaaauuaa

SEQ ID NO: 124742 - RNA, 19 nt, Artificial Sequence
  Description of Artificial Sequence: Synthetic oligonucleotide
  Sense strand starting at position 3379 of SEQ ID NO: 1593
cucccuuaauuugaugaga

SEQ ID NO: 124743 - RNA, 19 nt, Artificial Sequence
  Description of Artificial Sequence: Synthetic oligonucleotide
  Antisense strand to SEQ ID NO: 124742
ucucaucaaauuaagggag

SEQ ID NO: 124744 - RNA, 19 nt, Artificial Sequence
  Description of Artificial Sequence: Synthetic oligonucleotide
  Sense strand starting at position 3331 of SEQ ID NO: 1593
gauuauuaaguaggaaucu

SEQ ID NO: 124745 - RNA, 19 nt, Artificial Sequence
  Description of Artificial Sequence: Synthetic oligonucleotide
  Antisense strand to SEQ ID NO: 124744
agauuccuacuuaauaauc

SEQ ID NO: 124746 - RNA, 19 nt, Artificial Sequence
  Description of Artificial Sequence: Synthetic oligonucleotide
  Sense strand starting at position 3325 of SEQ ID NO: 1593
ggauuugauuauuaaguag

SEQ ID NO: 124747 - RNA, 19 nt, Artificial Sequence
  Description of Artificial Sequence: Synthetic oligonucleotide
  Antisense strand to SEQ ID NO: 124746
cuacuuaauaaucaaaucc

SEQ ID NO: 124748 - RNA, 19 nt, Artificial Sequence
  Description of Artificial Sequence: Synthetic oligonucleotide
  Sense strand starting at position 3117 of SEQ ID NO: 1593
ugauuugcccgcugugaca

SEQ ID NO: 124749 - RNA, 19 nt, Artificial Sequence
  Description of Artificial Sequence: Synthetic oligonucleotide
  Antisense strand to SEQ ID NO: 124748
ugucacagcgggcaaauca

SEQ ID NO: 124750 - RNA, 19 nt, Artificial Sequence
  Description of Artificial Sequence: Synthetic oligonucleotide
  Sense strand starting at position 2968 of SEQ ID NO: 1593
cuuacuaaacucuggguuu

SEQ ID NO: 124751 - RNA, 19 nt, Artificial Sequence
  Description of Artificial Sequence: Synthetic oligonucleotide
  Antisense strand to SEQ ID NO: 124750
aaacccagaguuuaguaag

SEQ ID NO: 124752 - RNA, 19 nt, Artificial Sequence
  Description of Artificial Sequence: Synthetic oligonucleotide
  Sense strand starting at position 2937 of SEQ ID NO: 1593
cuaugacuugcugagugua

SEQ ID NO: 124753 - RNA, 19 nt, Artificial Sequence
  Description of Artificial Sequence: Synthetic oligonucleotide
  Antisense strand to SEQ ID NO: 124752
uacacucagcaagucauag

SEQ ID NO: 124754 - RNA, 19 nt, Artificial Sequence
  Description of Artificial Sequence: Synthetic oligonucleotide
  Sense strand starting at position 2928 of SEQ ID NO: 1593
gugacuuagcuaugacuug

SEQ ID NO: 124755 - RNA, 19 nt, Artificial Sequence
  Description of Artificial Sequence: Synthetic oligonucleotide
  Antisense strand to SEQ ID NO: 124754
caagucauagcuaagucac

SEQ ID NO: 124756 - RNA, 19 nt, Artificial Sequence
  Description of Artificial Sequence: Synthetic oligonucleotide
  Sense strand starting at position 2926 of SEQ ID NO: 1593
cggugacuuagcuaugacu

SEQ ID NO: 124757 - RNA, 19 nt, Artificial Sequence
  Description of Artificial Sequence: Synthetic oligonucleotide
  Antisense strand to SEQ ID NO: 124756
agucauagcuaagucaccg

SEQ ID NO: 124758 - RNA, 19 nt, Artificial Sequence
  Description of Artificial Sequence: Synthetic oligonucleotide
  Sense strand starting at position 2924 of SEQ ID NO: 1593
gacggugacuuagcuauga

SEQ ID NO: 124759 - RNA, 19 nt, Artificial Sequence
  Description of Artificial Sequence: Synthetic oligonucleotide
  Antisense strand to SEQ ID NO: 124758
ucauagcuaagucaccguc

SEQ ID NO: 124760 - RNA, 19 nt, Artificial Sequence
  Description of Artificial Sequence: Synthetic oligonucleotide
  Sense strand starting at position 2871 of SEQ ID NO: 1593
aggagucgacuccaaaugu

SEQ ID NO: 124761 - RNA, 19 nt, Artificial Sequence
  Description of Artificial Sequence: Synthetic oligonucleotide
  Antisense strand to SEQ ID NO: 124760
acauuuggagucgacuccu

SEQ ID NO: 124762 - RNA, 19 nt, Artificial Sequence
  Description of Artificial Sequence: Synthetic oligonucleotide
  Sense strand starting at position 2807 of SEQ ID NO: 1593
ucgauuucaugagucguaa

SEQ ID NO: 124763 - RNA, 19 nt, Artificial Sequence
  Description of Artificial Sequence: Synthetic oligonucleotide
  Antisense strand to SEQ ID NO: 124762
uuacgacucaugaaaucga

SEQ ID NO: 124764 - RNA, 19 nt, Artificial Sequence
  Description of Artificial Sequence: Synthetic oligonucleotide
  Sense strand starting at position 2805 of SEQ ID NO: 1593
gcucgauuucaugagucgu

SEQ ID NO: 124765 - RNA, 19 nt, Artificial Sequence
  Description of Artificial Sequence: Synthetic oligonucleotide
  Antisense strand to SEQ ID NO: 124764
acgacucaugaaaucgagc

SEQ ID NO: 124766 - RNA, 19 nt, Artificial Sequence
  Description of Artificial Sequence: Synthetic oligonucleotide
  Sense strand starting at position 2755 of SEQ ID NO: 1593
guaaauagcuuucuggaaa

SEQ ID NO: 124767 - RNA, 19 nt, Artificial Sequence
  Description of Artificial Sequence: Synthetic oligonucleotide
  Antisense strand to SEQ ID NO: 124766
uuuccagaaagcuauuuac

SEQ ID NO: 124768 - RNA, 19 nt, Artificial Sequence
  Description of Artificial Sequence: Synthetic oligonucleotide
  Sense strand starting at position 2739 of SEQ ID NO: 1593
ggcgaaugcaucgugugua

SEQ ID NO: 124769 - RNA, 19 nt, Artificial Sequence
  Description of Artificial Sequence: Synthetic oligonucleotide
  Antisense strand to SEQ ID NO: 124768
uacacacgaugcauucgcc

SEQ ID NO: 124770 - RNA, 19 nt, Artificial Sequence
  Description of Artificial Sequence: Synthetic oligonucleotide
  Sense strand starting at position 1592 of SEQ ID NO: 1593
ccaguccuagccgagaaua

SEQ ID NO: 124771 - RNA, 19 nt, Artificial Sequence
  Description of Artificial Sequence: Synthetic oligonucleotide
  Antisense strand to SEQ ID NO: 124770
uauucucggcuaggacugg

SEQ ID NO: 124772 - RNA, 19 nt, Artificial Sequence
  Description of Artificial Sequence: Synthetic oligonucleotide
  Sense strand starting at position 694 of SEQ ID NO: 1593
ggaugcguuccagaagaau

SEQ ID NO: 124773 - RNA, 19 nt, Artificial Sequence
  Description of Artificial Sequence: Synthetic oligonucleotide
  Antisense strand to SEQ ID NO: 124772
auucuucuggaacgcaucc

SEQ ID NO: 124774 - RNA, 19 nt, Artificial Sequence
  Description of Artificial Sequence: Synthetic oligonucleotide
  Sense strand starting at position 619 of SEQ ID NO: 1593
ggcaaauaguacucaaugu

SEQ ID NO: 124775 - RNA, 19 nt, Artificial Sequence
  Description of Artificial Sequence: Synthetic oligonucleotide
  Antisense strand to SEQ ID NO: 124774
acauugaguacuauuugcc

SEQ ID NO: 124776 - RNA, 19 nt, Artificial Sequence
  Description of Artificial Sequence: Synthetic oligonucleotide
  Sense strand starting at position 438 of SEQ ID NO: 1593
uugggauuggcagaucuau

SEQ ID NO: 124777 - RNA, 19 nt, Artificial Sequence
  Description of Artificial Sequence: Synthetic oligonucleotide
  Antisense strand to SEQ ID NO: 124776
auagaucugccaaucccaa

SEQ ID NO: 124778 - RNA, 19 nt, Artificial Sequence
  Description of Artificial Sequence: Synthetic oligonucleotide
  Sense strand starting at position 434 of SEQ ID NO: 1593
guucuugggauuggcagau

SEQ ID NO: 124779 - RNA, 19 nt, Artificial Sequence
  Description of Artificial Sequence: Synthetic oligonucleotide
  Antisense strand to SEQ ID NO: 124778
aucugccaaucccaagaac

SEQ ID NO: 124780 - RNA, 19 nt, Artificial Sequence
  Description of Artificial Sequence: Synthetic oligonucleotide
  Sense strand starting at position 433 of SEQ ID NO: 1593
aguucuugggauuggcaga

SEQ ID NO: 124781 - RNA, 19 nt, Artificial Sequence
  Description of Artificial Sequence: Synthetic oligonucleotide
  Antisense strand to SEQ ID NO: 124780
ucugccaaucccaagaacu

SEQ ID NO: 124782 - RNA, 19 nt, Artificial Sequence
  Description of Artificial Sequence: Synthetic oligonucleotide
  Sense strand starting at position 428 of SEQ ID NO: 1593
guucaaguucuugggauug

SEQ ID NO: 124783 - RNA, 19 nt, Artificial Sequence
  Description of Artificial Sequence: Synthetic oligonucleotide
  Antisense strand to SEQ ID NO: 124782
caaucccaagaacuugaac

SEQ ID NO: 124784 - RNA, 19 nt, Artificial Sequence
  Description of Artificial Sequence: Synthetic oligonucleotide
  Sense strand starting at position 344 of SEQ ID NO: 1593
guagauagagcccaguuua

SEQ ID NO: 124785 - RNA, 19 nt, Artificial Sequence
  Description of Artificial Sequence: Synthetic oligonucleotide
  Antisense strand to SEQ ID NO: 124784
uaaacugggcucuaucuac

SEQ ID NO: 124786 - RNA, 19 nt, Artificial Sequence
  Description of Artificial Sequence: Synthetic oligonucleotide
  Sense strand starting at position 331 of SEQ ID NO: 1593
caggaaggcagauguagau

SEQ ID NO: 124787 - RNA, 19 nt, Artificial Sequence
  Description of Artificial Sequence: Synthetic oligonucleotide
  Antisense strand to SEQ ID NO: 124786
aucuacaucugccuuccug

SEQ ID NO: 124788 - RNA, 19 nt, Artificial Sequence
  Description of Artificial Sequence: Synthetic oligonucleotide
  Sense strand starting at position 244 of SEQ ID NO: 1593
ggaauuugcgcuugucuga

SEQ ID NO: 124789 - RNA, 19 nt, Artificial Sequence
  Description of Artificial Sequence: Synthetic oligonucleotide
  Antisense strand to SEQ ID NO: 124788
ucagacaagcgcaaauucc

SEQ ID NO: 124790 - RNA, 19 nt, Artificial Sequence
  Description of Artificial Sequence: Synthetic oligonucleotide
  Sense strand starting at position 127 of SEQ ID NO: 1593
ggaucuguugaaugacuga

SEQ ID NO: 124791 - RNA, 19 nt, Artificial Sequence
  Description of Artificial Sequence: Synthetic oligonucleotide
  Antisense strand to SEQ ID NO: 124790
ucagucauucaacagaucc

SEQ ID NO: 124792 - RNA, 19 nt, Artificial Sequence
  Description of Artificial Sequence: Synthetic oligonucleotide
  Sense strand starting at position 121 of SEQ ID NO: 1593
ucaacaggaucuguugaau

SEQ ID NO: 124793 - RNA, 19 nt, Artificial Sequence
  Description of Artificial Sequence: Synthetic oligonucleotide
  Antisense strand to SEQ ID NO: 124792
auucaacagauccuguuga

SEQ ID NO: 124794 - RNA, 19 nt, Artificial Sequence
  Description of Artificial Sequence: Synthetic oligonucleotide
  Sense strand starting at position 3935 of SEQ ID NO: 1594
augauucuaugaguuaacu

SEQ ID NO: 124795 - RNA, 19 nt, Artificial Sequence
  Description of Artificial Sequence: Synthetic oligonucleotide
  Antisense strand to SEQ ID NO: 124794
aguuaacucauagaaucau

SEQ ID NO: 124796 - RNA, 19 nt, Artificial Sequence
  Description of Artificial Sequence: Synthetic oligonucleotide
  Sense strand starting at position 3893 of SEQ ID NO: 1594
aucugaguggcuuaagaca

SEQ ID NO: 124797 - RNA, 19 nt, Artificial Sequence
  Description of Artificial Sequence: Synthetic oligonucleotide
  Antisense strand to SEQ ID NO: 124796
ugucuuaagccacucagau

SEQ ID NO: 124798 - RNA, 19 nt, Artificial Sequence
  Description of Artificial Sequence: Synthetic oligonucleotide
  Sense strand starting at position 3891 of SEQ ID NO: 1594
aaaucugaguggcuuaaga

SEQ ID NO: 124799 - RNA, 19 nt, Artificial Sequence
  Description of Artificial Sequence: Synthetic oligonucleotide
  Antisense strand to SEQ ID NO: 124798
ucuuaagccacucagauuu

SEQ ID NO: 124800 - RNA, 19 nt, Artificial Sequence
  Description of Artificial Sequence: Synthetic oligonucleotide
  Sense strand starting at position 3791 of SEQ ID NO: 1594
uggaaauaugauggagcuu

SEQ ID NO: 124801 - RNA, 19 nt, Artificial Sequence
  Description of Artificial Sequence: Synthetic oligonucleotide
  Antisense strand to SEQ ID NO: 124800
aagcuccaucauauuucca

SEQ ID NO: 124802 - RNA, 19 nt, Artificial Sequence
  Description of Artificial Sequence: Synthetic oligonucleotide
  Sense strand starting at position 3701 of SEQ ID NO: 1594
gcuaauaaguaagucauca

SEQ ID NO: 124803 - RNA, 19 nt, Artificial Sequence
  Description of Artificial Sequence: Synthetic oligonucleotide
  Antisense strand to SEQ ID NO: 124802
ugaugacuuacuuauuagc

SEQ ID NO: 124804 - RNA, 19 nt, Artificial Sequence
  Description of Artificial Sequence: Synthetic oligonucleotide
  Sense strand starting at position 3658 of SEQ ID NO: 1594
aguuguaugguuuagauag

SEQ ID NO: 124805 - RNA, 19 nt, Artificial Sequence
  Description of Artificial Sequence: Synthetic oligonucleotide
  Antisense strand to SEQ ID NO: 124804
cuaucuaaaccauacaacu

SEQ ID NO: 124806 - RNA, 19 nt, Artificial Sequence
  Description of Artificial Sequence: Synthetic oligonucleotide
  Sense strand starting at position 3656 of SEQ ID NO: 1594
agaguuguaugguuuagau

SEQ ID NO: 124807 - RNA, 19 nt, Artificial Sequence
  Description of Artificial Sequence: Synthetic oligonucleotide
  Antisense strand to SEQ ID NO: 124806
aucuaaaccauacaacucu

SEQ ID NO: 124808 - RNA, 19 nt, Artificial Sequence
  Description of Artificial Sequence: Synthetic oligonucleotide
  Sense strand starting at position 3582 of SEQ ID NO: 1594
uguaaucaagguuaucuaa

SEQ ID NO: 124809 - RNA, 19 nt, Artificial Sequence
  Description of Artificial Sequence: Synthetic oligonucleotide
  Antisense strand to SEQ ID NO: 124808
uuagauaaccuugauuaca

SEQ ID NO: 124810 - RNA, 19 nt, Artificial Sequence
  Description of Artificial Sequence: Synthetic oligonucleotide
  Sense strand starting at position 3579 of SEQ ID NO: 1594
gaauguaaucaagguuauc

SEQ ID NO: 124811 - RNA, 19 nt, Artificial Sequence
  Description of Artificial Sequence: Synthetic oligonucleotide
  Antisense strand to SEQ ID NO: 124810
gauaaccuugauuacauuc

SEQ ID NO: 124812 - RNA, 19 nt, Artificial Sequence
  Description of Artificial Sequence: Synthetic oligonucleotide
  Sense strand starting at position 3576 of SEQ ID NO: 1594
ggugaauguaaucaagguu

SEQ ID NO: 124813 - RNA, 19 nt, Artificial Sequence
  Description of Artificial Sequence: Synthetic oligonucleotide
  Antisense strand to SEQ ID NO: 124812
aaccuugauuacauucacc

SEQ ID NO: 124814 - RNA, 19 nt, Artificial Sequence
  Description of Artificial Sequence: Synthetic oligonucleotide
  Sense strand starting at position 3575 of SEQ ID NO: 1594
uggugaauguaaucaaggu

SEQ ID NO: 124815 - RNA, 19 nt, Artificial Sequence
  Description of Artificial Sequence: Synthetic oligonucleotide
  Antisense strand to SEQ ID NO: 124814
accuugauuacauucacca

SEQ ID NO: 124816 - RNA, 19 nt, Artificial Sequence
  Description of Artificial Sequence: Synthetic oligonucleotide
  Sense strand starting at position 3495 of SEQ ID NO: 1594
gaguuuacagagcagugua

SEQ ID NO: 124817 - RNA, 19 nt, Artificial Sequence
  Description of Artificial Sequence: Synthetic oligonucleotide
  Antisense strand to SEQ ID NO: 124816
uacacugcucuguaaacuc

SEQ ID NO: 124818 - RNA, 19 nt, Artificial Sequence
  Description of Artificial Sequence: Synthetic oligonucleotide
  Sense strand starting at position 3408 of SEQ ID NO: 1594
guagucacuauagaugagu

SEQ ID NO: 124819 - RNA, 19 nt, Artificial Sequence
  Description of Artificial Sequence: Synthetic oligonucleotide
  Antisense strand to SEQ ID NO: 124818
acucaucuauagugacuac

SEQ ID NO: 124820 - RNA, 19 nt, Artificial Sequence
  Description of Artificial Sequence: Synthetic oligonucleotide
  Sense strand starting at position 3404 of SEQ ID NO: 1594
ugauguagucacuauagau

SEQ ID NO: 124821 - RNA, 19 nt, Artificial Sequence
  Description of Artificial Sequence: Synthetic oligonucleotide
  Antisense strand to SEQ ID NO: 124820
aucuauagugacuacauca

SEQ ID NO: 124822 - RNA, 19 nt, Artificial Sequence
  Description of Artificial Sequence: Synthetic oligonucleotide
  Sense strand starting at position 3401 of SEQ ID NO: 1594
uguugauguagucacuaua

SEQ ID NO: 124823 - RNA, 19 nt, Artificial Sequence
  Description of Artificial Sequence: Synthetic oligonucleotide
  Antisense strand to SEQ ID NO: 124822
uauagugacuacaucaaca

SEQ ID NO: 124824 - RNA, 19 nt, Artificial Sequence
  Description of Artificial Sequence: Synthetic oligonucleotide
  Sense strand starting at position 3377 of SEQ ID NO: 1594
aguacaugcuauguagaua

SEQ ID NO: 124825 - RNA, 19 nt, Artificial Sequence
  Description of Artificial Sequence: Synthetic oligonucleotide
  Antisense strand to SEQ ID NO: 124824
uaucuacauagcauguacu

SEQ ID NO: 124826 - RNA, 19 nt, Artificial Sequence
  Description of Artificial Sequence: Synthetic oligonucleotide
  Sense strand starting at position 3290 of SEQ ID NO: 1594
uugguaugucuugaucaag

SEQ ID NO: 124827 - RNA, 19 nt, Artificial Sequence
  Description of Artificial Sequence: Synthetic oligonucleotide
  Antisense strand to SEQ ID NO: 124826
cuugaucaagacauaccaa

SEQ ID NO: 124828 - RNA, 19 nt, Artificial Sequence
  Description of Artificial Sequence: Synthetic oligonucleotide
  Sense strand starting at position 3101 of SEQ ID NO: 1594
aguagaauuacuugaggug

SEQ ID NO: 124829 - RNA, 19 nt, Artificial Sequence
  Description of Artificial Sequence: Synthetic oligonucleotide
  Antisense strand to SEQ ID NO: 124828
caccucaaguaauucuacu

SEQ ID NO: 124830 - RNA, 19 nt, Artificial Sequence
  Description of Artificial Sequence: Synthetic oligonucleotide
  Sense strand starting at position 3091 of SEQ ID NO: 1594
ccaugcucacaguagaauu

SEQ ID NO: 124831 - RNA, 19 nt, Artificial Sequence
  Description of Artificial Sequence: Synthetic oligonucleotide
  Antisense strand to SEQ ID NO: 124830
aauucuacugugagcaugg

SEQ ID NO: 124832 - RNA, 19 nt, Artificial Sequence
  Description of Artificial Sequence: Synthetic oligonucleotide
  Sense strand starting at position 3052 of SEQ ID NO: 1594
auucucagucauggauaca

SEQ ID NO: 124833 - RNA, 19 nt, Artificial Sequence
  Description of Artificial Sequence: Synthetic oligonucleotide
  Antisense strand to SEQ ID NO: 124832
uguauccaugacugagaau

SEQ ID NO: 124834 - RNA, 19 nt, Artificial Sequence
  Description of Artificial Sequence: Synthetic oligonucleotide
  Sense strand starting at position 3047 of SEQ ID NO: 1594
cagaaauucucagucaugg

SEQ ID NO: 124835 - RNA, 19 nt, Artificial Sequence
  Description of Artificial Sequence: Synthetic oligonucleotide
  Antisense strand to SEQ ID NO: 124834
ccaugacugagaauuucug

SEQ ID NO: 124836 - RNA, 19 nt, Artificial Sequence
  Description of Artificial Sequence: Synthetic oligonucleotide
  Sense strand starting at position 2944 of SEQ ID NO: 1594
gggaaaguuaguuaauguc

SEQ ID NO: 124837 - RNA, 19 nt, Artificial Sequence
  Description of Artificial Sequence: Synthetic oligonucleotide
  Antisense strand to SEQ ID NO: 124836
gacauuaacuaacuuuccc

SEQ ID NO: 124838 - RNA, 19 nt, Artificial Sequence
  Description of Artificial Sequence: Synthetic oligonucleotide
  Sense strand starting at position 2943 of SEQ ID NO: 1594
ugggaaaguuaguuaaugu

SEQ ID NO: 124839 - RNA, 19 nt, Artificial Sequence
  Description of Artificial Sequence: Synthetic oligonucleotide
  Antisense strand to SEQ ID NO: 124838
acauuaacuaacuuuccca

SEQ ID NO: 124840 - RNA, 19 nt, Artificial Sequence
  Description of Artificial Sequence: Synthetic oligonucleotide
  Sense strand starting at position 2942 of SEQ ID NO: 1594
uugggaaaguuaguuaaug

SEQ ID NO: 124841 - RNA, 19 nt, Artificial Sequence
  Description of Artificial Sequence: Synthetic oligonucleotide
  Antisense strand to SEQ ID NO: 124840
cauuaacuaacuuucccaa

SEQ ID NO: 124842 - RNA, 19 nt, Artificial Sequence
  Description of Artificial Sequence: Synthetic oligonucleotide
  Sense strand starting at position 2851 of SEQ ID NO: 1594
uuaauuugaugagagugau

SEQ ID NO: 124843 - RNA, 19 nt, Artificial Sequence
  Description of Artificial Sequence: Synthetic oligonucleotide
  Antisense strand to SEQ ID NO: 124842
aucacucucaucaaauuaa

SEQ ID NO: 124844 - RNA, 19 nt, Artificial Sequence
  Description of Artificial Sequence: Synthetic oligonucleotide
  Sense strand starting at position 2846 of SEQ ID NO: 1594
cucccuuaauuugaugaga

SEQ ID NO: 124845 - RNA, 19 nt, Artificial Sequence
  Description of Artificial Sequence: Synthetic oligonucleotide
  Antisense strand to SEQ ID NO: 124844
ucucaucaaauuaagggag

SEQ ID NO: 124846 - RNA, 19 nt, Artificial Sequence
  Description of Artificial Sequence: Synthetic oligonucleotide
  Sense strand starting at position 2798 of SEQ ID NO: 1594
gauuauuaaguaggaaucu

SEQ ID NO: 124847 - RNA, 19 nt, Artificial Sequence
  Description of Artificial Sequence: Synthetic oligonucleotide
  Antisense strand to SEQ ID NO: 124846
agauuccuacuuaauaauc

SEQ ID NO: 124848 - RNA, 19 nt, Artificial Sequence
  Description of Artificial Sequence: Synthetic oligonucleotide
  Sense strand starting at position 2792 of SEQ ID NO: 1594
ggauuugauuauuaaguag

SEQ ID NO: 124849 - RNA, 19 nt, Artificial Sequence
  Description of Artificial Sequence: Synthetic oligonucleotide
  Antisense strand to SEQ ID NO: 124848
cuacuuaauaaucaaaucc

SEQ ID NO: 124850 - RNA, 19 nt, Artificial Sequence
  Description of Artificial Sequence: Synthetic oligonucleotide
  Sense strand starting at position 2584 of SEQ ID NO: 1594
ugauuugcccgcugugaca

SEQ ID NO: 124851 - RNA, 19 nt, Artificial Sequence
  Description of Artificial Sequence: Synthetic oligonucleotide
  Antisense strand to SEQ ID NO: 124850
ugucacagcgggcaaauca

SEQ ID NO: 124852 - RNA, 19 nt, Artificial Sequence
  Description of Artificial Sequence: Synthetic oligonucleotide
  Sense strand starting at position 2435 of SEQ ID NO: 1594
cuuacuaaacucuggguuu

SEQ ID NO: 124853 - RNA, 19 nt, Artificial Sequence
  Description of Artificial Sequence: Synthetic oligonucleotide
  Antisense strand to SEQ ID NO: 124852
aaacccagaguuuaguaag

SEQ ID NO: 124854 - RNA, 19 nt, Artificial Sequence
  Description of Artificial Sequence: Synthetic oligonucleotide
  Sense strand starting at position 2404 of SEQ ID NO: 1594
cuaugacuugcugagugua

SEQ ID NO: 124855 - RNA, 19 nt, Artificial Sequence
  Description of Artificial Sequence: Synthetic oligonucleotide
  Antisense strand to SEQ ID NO: 124854
uacacucagcaagucauag

SEQ ID NO: 124856 - RNA, 19 nt, Artificial Sequence
  Description of Artificial Sequence: Synthetic oligonucleotide
  Sense strand starting at position 2393 of SEQ ID NO: 1594
cggugacuuagcuaugacu

SEQ ID NO: 124857 - RNA, 19 nt, Artificial Sequence
  Description of Artificial Sequence: Synthetic oligonucleotide
  Antisense strand to SEQ ID NO: 124856
agucauagcuaagucaccg

SEQ ID NO: 124858 - RNA, 19 nt, Artificial Sequence
  Description of Artificial Sequence: Synthetic oligonucleotide
  Sense strand starting at position 2338 of SEQ ID NO: 1594
aggagucgacuccaaaugu

SEQ ID NO: 124859 - RNA, 19 nt, Artificial Sequence
  Description of Artificial Sequence: Synthetic oligonucleotide
  Antisense strand to SEQ ID NO: 124858
acauuuggagucgacuccu

SEQ ID NO: 124860 - RNA, 19 nt, Artificial Sequence
  Description of Artificial Sequence: Synthetic oligonucleotide
  Sense strand starting at position 2274 of SEQ ID NO: 1594
ucgauuucaugagucguaa

SEQ ID NO: 124861 - RNA, 19 nt, Artificial Sequence
  Description of Artificial Sequence: Synthetic oligonucleotide
  Antisense strand to SEQ ID NO: 124860
uuacgacucaugaaaucga

SEQ ID NO: 124862 - RNA, 19 nt, Artificial Sequence
  Description of Artificial Sequence: Synthetic oligonucleotide
  Sense strand starting at position 2272 of SEQ ID NO: 1594
gcucgauuucaugagucgu

SEQ ID NO: 124863 - RNA, 19 nt, Artificial Sequence
  Description of Artificial Sequence: Synthetic oligonucleotide
  Antisense strand to SEQ ID NO: 124862
acgacucaugaaaucgagc

SEQ ID NO: 124864 - RNA, 19 nt, Artificial Sequence
  Description of Artificial Sequence: Synthetic oligonucleotide
  Sense strand starting at position 2222 of SEQ ID NO: 1594
guaaauagcuuucuggaaa

SEQ ID NO: 124865 - RNA, 19 nt, Artificial Sequence
  Description of Artificial Sequence: Synthetic oligonucleotide
  Antisense strand to SEQ ID NO: 124864
uuuccagaaagcuauuuac

SEQ ID NO: 124866 - RNA, 19 nt, Artificial Sequence
  Description of Artificial Sequence: Synthetic oligonucleotide
  Sense strand starting at position 2206 of SEQ ID NO: 1594
ggcgaaugcaucgugugua

SEQ ID NO: 124867 - RNA, 19 nt, Artificial Sequence
  Description of Artificial Sequence: Synthetic oligonucleotide
  Antisense strand to SEQ ID NO: 124866
uacacacgaugcauucgcc

SEQ ID NO: 124868 - RNA, 19 nt, Artificial Sequence
  Description of Artificial Sequence: Synthetic oligonucleotide
  Sense strand starting at position 1059 of SEQ ID NO: 1594
ccaguccuagccgagaaua

SEQ ID NO: 124869 - RNA, 19 nt, Artificial Sequence
  Description of Artificial Sequence: Synthetic oligonucleotide
  Antisense strand to SEQ ID NO: 124868
uauucucggcuaggacugg

SEQ ID NO: 124870 - RNA, 19 nt, Artificial Sequence
  Description of Artificial Sequence: Synthetic oligonucleotide
  Sense strand starting at position 161 of SEQ ID NO: 1594
ggaugcguuccagaagaau

SEQ ID NO: 124871 - RNA, 19 nt, Artificial Sequence
  Description of Artificial Sequence: Synthetic oligonucleotide
  Antisense strand to SEQ ID NO: 124870
auucuucuggaacgcaucc

SEQ ID NO: 124872 - RNA, 19 nt, Artificial Sequence
  Description of Artificial Sequence: Synthetic oligonucleotide
  Sense strand starting at position 86 of SEQ ID NO: 1594
ggcaaauaguacucaaugu

SEQ ID NO: 124873 - RNA, 19 nt, Artificial Sequence
  Description of Artificial Sequence: Synthetic oligonucleotide
  Antisense strand to SEQ ID NO: 124872
acauugaguacuauuugcc

SEQ ID NO: 124874 - RNA, 19 nt, Artificial Sequence
  Description of Artificial Sequence: Synthetic oligonucleotide
  Sense strand starting at position 3359 of SEQ ID NO: 1595
gagguugaggcugguagau

SEQ ID NO: 124875 - RNA, 19 nt, Artificial Sequence
  Description of Artificial Sequence: Synthetic oligonucleotide
  Antisense strand to SEQ ID NO: 124874
aucuaccagccucaaccuc

SEQ ID NO: 124876 - RNA, 19 nt, Artificial Sequence
  Description of Artificial Sequence: Synthetic oligonucleotide
  Sense strand starting at position 3236 of SEQ ID NO: 1595
agcugugauggugucgcua

SEQ ID NO: 124877 - RNA, 19 nt, Artificial Sequence
  Description of Artificial Sequence: Synthetic oligonucleotide
  Antisense strand to SEQ ID NO: 124876
uagcgacaccaucacagcu

SEQ ID NO: 124878 - RNA, 19 nt, Artificial Sequence
  Description of Artificial Sequence: Synthetic oligonucleotide
  Sense strand starting at position 2581 of SEQ ID NO: 1595
ggcacaucuagaggacauu

SEQ ID NO: 124879 - RNA, 19 nt, Artificial Sequence
  Description of Artificial Sequence: Synthetic oligonucleotide
  Antisense strand to SEQ ID NO: 124878
aauguccucuagaugugcc

SEQ ID NO: 124880 - RNA, 19 nt, Artificial Sequence
  Description of Artificial Sequence: Synthetic oligonucleotide
  Sense strand starting at position 2443 of SEQ ID NO: 1595
cuccaagucucaguaguuu

SEQ ID NO: 124881 - RNA, 19 nt, Artificial Sequence
  Description of Artificial Sequence: Synthetic oligonucleotide
  Antisense strand to SEQ ID NO: 124880
aaacuacugagacuuggag

SEQ ID NO: 124882 - RNA, 19 nt, Artificial Sequence
  Description of Artificial Sequence: Synthetic oligonucleotide
  Sense strand starting at position 2350 of SEQ ID NO: 1595
agccauuaaguccagucau

SEQ ID NO: 124883 - RNA, 19 nt, Artificial Sequence
  Description of Artificial Sequence: Synthetic oligonucleotide
  Antisense strand to SEQ ID NO: 124882
augacuggacuuaauggcu

SEQ ID NO: 124884 - RNA, 19 nt, Artificial Sequence
  Description of Artificial Sequence: Synthetic oligonucleotide
  Sense strand starting at position 2324 of SEQ ID NO: 1595
aggaaucauucuggacacu

SEQ ID NO: 124885 - RNA, 19 nt, Artificial Sequence
  Description of Artificial Sequence: Synthetic oligonucleotide
  Antisense strand to SEQ ID NO: 124884
aguguccagaaugauuccu

SEQ ID NO: 124886 - RNA, 19 nt, Artificial Sequence
  Description of Artificial Sequence: Synthetic oligonucleotide
  Sense strand starting at position 2311 of SEQ ID NO: 1595
gcguaagaaacccaggaau

SEQ ID NO: 124887 - RNA, 19 nt, Artificial Sequence
  Description of Artificial Sequence: Synthetic oligonucleotide
  Antisense strand to SEQ ID NO: 124886
auuccuggguuucuuacgc

SEQ ID NO: 124888 - RNA, 19 nt, Artificial Sequence
  Description of Artificial Sequence: Synthetic oligonucleotide
  Sense strand starting at position 2302 of SEQ ID NO: 1595
caguguugugcguaagaaa

SEQ ID NO: 124889 - RNA, 19 nt, Artificial Sequence
  Description of Artificial Sequence: Synthetic oligonucleotide
  Antisense strand to SEQ ID NO: 124888
uuucuuacgcacaacacug

SEQ ID NO: 124890 - RNA, 19 nt, Artificial Sequence
  Description of Artificial Sequence: Synthetic oligonucleotide
  Sense strand starting at position 2300 of SEQ ID NO: 1595
cucaguguugugcguaaga

SEQ ID NO: 124891 - RNA, 19 nt, Artificial Sequence
  Description of Artificial Sequence: Synthetic oligonucleotide
  Antisense strand to SEQ ID NO: 124890
ucuuacgcacaacacugag

SEQ ID NO: 124892 - RNA, 19 nt, Artificial Sequence
  Description of Artificial Sequence: Synthetic oligonucleotide
  Sense strand starting at position 2290 of SEQ ID NO: 1595
guuaucuacccucaguguu

SEQ ID NO: 124893 - RNA, 19 nt, Artificial Sequence
  Description of Artificial Sequence: Synthetic oligonucleotide
  Antisense strand to SEQ ID NO: 124892
aacacugaggguagauaac

SEQ ID NO: 124894 - RNA, 19 nt, Artificial Sequence
  Description of Artificial Sequence: Synthetic oligonucleotide
  Sense strand starting at position 2199 of SEQ ID NO: 1595
aucccugacuggccaaauu

SEQ ID NO: 124895 - RNA, 19 nt, Artificial Sequence
  Description of Artificial Sequence: Synthetic oligonucleotide
  Antisense strand to SEQ ID NO: 124894
aauuuggccagucagggau

SEQ ID NO: 124896 - RNA, 19 nt, Artificial Sequence
  Description of Artificial Sequence: Synthetic oligonucleotide
  Sense strand starting at position 2175 of SEQ ID NO: 1595
aagaguguuguuugagaaa

SEQ ID NO: 124897 - RNA, 19 nt, Artificial Sequence
  Description of Artificial Sequence: Synthetic oligonucleotide
  Antisense strand to SEQ ID NO: 124896
uuucucaaacaacacucuu

SEQ ID NO: 124898 - RNA, 19 nt, Artificial Sequence
  Description of Artificial Sequence: Synthetic oligonucleotide
  Sense strand starting at position 2173 of SEQ ID NO: 1595
acaagaguguuguuugaga

SEQ ID NO: 124899 - RNA, 19 nt, Artificial Sequence
  Description of Artificial Sequence: Synthetic oligonucleotide
  Antisense strand to SEQ ID NO: 124898
ucucaaacaacacucuugu

SEQ ID NO: 124900 - RNA, 19 nt, Artificial Sequence
  Description of Artificial Sequence: Synthetic oligonucleotide
  Sense strand starting at position 2168 of SEQ ID NO: 1595
cugauacaagaguguuguu

SEQ ID NO: 124901 - RNA, 19 nt, Artificial Sequence
  Description of Artificial Sequence: Synthetic oligonucleotide
  Antisense strand to SEQ ID NO: 124900
aacaacacucuuguaucag

SEQ ID NO: 124902 - RNA, 19 nt, Artificial Sequence
  Description of Artificial Sequence: Synthetic oligonucleotide
  Sense strand starting at position 2100 of SEQ ID NO: 1595
ggcaaaggucuuugggcuu

SEQ ID NO: 124903 - RNA, 19 nt, Artificial Sequence
  Description of Artificial Sequence: Synthetic oligonucleotide
  Antisense strand to SEQ ID NO: 124902
aagcccaaagaccuuugcc

SEQ ID NO: 124904 - RNA, 19 nt, Artificial Sequence
  Description of Artificial Sequence: Synthetic oligonucleotide
  Sense strand starting at position 2076 of SEQ ID NO: 1595
ggcaccuuuccugguacua

SEQ ID NO: 124905 - RNA, 19 nt, Artificial Sequence
  Description of Artificial Sequence: Synthetic oligonucleotide
  Antisense strand to SEQ ID NO: 124904
uaguaccaggaaaggugcc

SEQ ID NO: 124906 - RNA, 19 nt, Artificial Sequence
  Description of Artificial Sequence: Synthetic oligonucleotide
  Sense strand starting at position 1229 of SEQ ID NO: 1595
caggcugauguuugaaagu

SEQ ID NO: 124907 - RNA, 19 nt, Artificial Sequence
  Description of Artificial Sequence: Synthetic oligonucleotide
  Antisense strand to SEQ ID NO: 124906
acuuucaaacaucagccug

SEQ ID NO: 124908 - RNA, 19 nt, Artificial Sequence
  Description of Artificial Sequence: Synthetic oligonucleotide
  Sense strand starting at position 1205 of SEQ ID NO: 1595
ggaguuucgugcccugaag

SEQ ID NO: 124909 - RNA, 19 nt, Artificial Sequence
  Description of Artificial Sequence: Synthetic oligonucleotide
  Antisense strand to SEQ ID NO: 124908
cuucagggcacgaaacucc

SEQ ID NO: 124910 - RNA, 19 nt, Artificial Sequence
  Description of Artificial Sequence: Synthetic oligonucleotide
  Sense strand starting at position 1203 of SEQ ID NO: 1595
cgggaguuucgugcccuga

SEQ ID NO: 124911 - RNA, 19 nt, Artificial Sequence
  Description of Artificial Sequence: Synthetic oligonucleotide
  Antisense strand to SEQ ID NO: 124910
ucagggcacgaaacucccg

SEQ ID NO: 124912 - RNA, 19 nt, Artificial Sequence
  Description of Artificial Sequence: Synthetic oligonucleotide
  Sense strand starting at position 1054 of SEQ ID NO: 1595
gguucuuugguccaccgau

SEQ ID NO: 124913 - RNA, 19 nt, Artificial Sequence
  Description of Artificial Sequence: Synthetic oligonucleotide
  Antisense strand to SEQ ID NO: 124912
aucgguggaccaaagaacc

SEQ ID NO: 124914 - RNA, 19 nt, Artificial Sequence
  Description of Artificial Sequence: Synthetic oligonucleotide
  Sense strand starting at position 998 of SEQ ID NO: 1595
ucacucuccuccgagauuu

SEQ ID NO: 124915 - RNA, 19 nt, Artificial Sequence
  Description of Artificial Sequence: Synthetic oligonucleotide
  Antisense strand to SEQ ID NO: 124914
aaaucucggaggagaguga

SEQ ID NO: 124916 - RNA, 19 nt, Artificial Sequence
  Description of Artificial Sequence: Synthetic oligonucleotide
  Sense strand starting at position 997 of SEQ ID NO: 1595
gucacucuccuccgagauu

SEQ ID NO: 124917 - RNA, 19 nt, Artificial Sequence
  Description of Artificial Sequence: Synthetic oligonucleotide
  Antisense strand to SEQ ID NO: 124916
aaucucggaggagagugac

SEQ ID NO: 124918 - RNA, 19 nt, Artificial Sequence
  Description of Artificial Sequence: Synthetic oligonucleotide
  Sense strand starting at position 995 of SEQ ID NO: 1595
aagucacucuccuccgaga

SEQ ID NO: 124919 - RNA, 19 nt, Artificial Sequence
  Description of Artificial Sequence: Synthetic oligonucleotide
  Antisense strand to SEQ ID NO: 124918
ucucggaggagagugacuu

SEQ ID NO: 124920 - RNA, 19 nt, Artificial Sequence
  Description of Artificial Sequence: Synthetic oligonucleotide
  Sense strand starting at position 982 of SEQ ID NO: 1595
agugaugcccuguaaguca

SEQ ID NO: 124921 - RNA, 19 nt, Artificial Sequence
  Description of Artificial Sequence: Synthetic oligonucleotide
  Antisense strand to SEQ ID NO: 124920
ugacuuacagggcaucacu

SEQ ID NO: 124922 - RNA, 19 nt, Artificial Sequence
  Description of Artificial Sequence: Synthetic oligonucleotide
  Sense strand starting at position 826 of SEQ ID NO: 1595
guuucugguuccucuauaa

SEQ ID NO: 124923 - RNA, 19 nt, Artificial Sequence
  Description of Artificial Sequence: Synthetic oligonucleotide
  Antisense strand to SEQ ID NO: 124922
uuauagaggaaccagaaac

SEQ ID NO: 124924 - RNA, 19 nt, Artificial Sequence
  Description of Artificial Sequence: Synthetic oligonucleotide
  Sense strand starting at position 825 of SEQ ID NO: 1595
gguuucugguuccucuaua

SEQ ID NO: 124925 - RNA, 19 nt, Artificial Sequence
  Description of Artificial Sequence: Synthetic oligonucleotide
  Antisense strand to SEQ ID NO: 124924
uauagaggaaccagaaacc

SEQ ID NO: 124926 - RNA, 19 nt, Artificial Sequence
  Description of Artificial Sequence: Synthetic oligonucleotide
  Sense strand starting at position 803 of SEQ ID NO: 1595
aagugacuucuagaagcca

SEQ ID NO: 124927 - RNA, 19 nt, Artificial Sequence
  Description of Artificial Sequence: Synthetic oligonucleotide
  Antisense strand to SEQ ID NO: 124926
uggcuucuagaagucacuu

SEQ ID NO: 124928 - RNA, 19 nt, Artificial Sequence
  Description of Artificial Sequence: Synthetic oligonucleotide
  Sense strand starting at position 801 of SEQ ID NO: 1595
guaagugacuucuagaagc

SEQ ID NO: 124929 - RNA, 19 nt, Artificial Sequence
  Description of Artificial Sequence: Synthetic oligonucleotide
  Antisense strand to SEQ ID NO: 124928
gcuucuagaagucacuuac

SEQ ID NO: 124930 - RNA, 19 nt, Artificial Sequence
  Description of Artificial Sequence: Synthetic oligonucleotide
  Sense strand starting at position 780 of SEQ ID NO: 1595
uuucuuuaauuuggcgaaa

SEQ ID NO: 124931 - RNA, 19 nt, Artificial Sequence
  Description of Artificial Sequence: Synthetic oligonucleotide
  Antisense strand to SEQ ID NO: 124930
uuucgccaaauuaaagaaa

SEQ ID NO: 124932 - RNA, 19 nt, Artificial Sequence
  Description of Artificial Sequence: Synthetic oligonucleotide
  Sense strand starting at position 734 of SEQ ID NO: 1595
cagaauaguuggcauuaca

SEQ ID NO: 124933 - RNA, 19 nt, Artificial Sequence
  Description of Artificial Sequence: Synthetic oligonucleotide
  Antisense strand to SEQ ID NO: 124932
uguaaugccaacuauucug

SEQ ID NO: 124934 - RNA, 19 nt, Artificial Sequence
  Description of Artificial Sequence: Synthetic oligonucleotide
  Sense strand starting at position 733 of SEQ ID NO: 1595
ccagaauaguuggcauuac

SEQ ID NO: 124935 - RNA, 19 nt, Artificial Sequence
  Description of Artificial Sequence: Synthetic oligonucleotide
  Antisense strand to SEQ ID NO: 124934
guaaugccaacuauucugg

SEQ ID NO: 124936 - RNA, 19 nt, Artificial Sequence
  Description of Artificial Sequence: Synthetic oligonucleotide
  Sense strand starting at position 732 of SEQ ID NO: 1595
uccagaauaguuggcauua

SEQ ID NO: 124937 - RNA, 19 nt, Artificial Sequence
  Description of Artificial Sequence: Synthetic oligonucleotide
  Antisense strand to SEQ ID NO: 124936
uaaugccaacuauucugga

SEQ ID NO: 124938 - RNA, 19 nt, Artificial Sequence
  Description of Artificial Sequence: Synthetic oligonucleotide
  Sense strand starting at position 582 of SEQ ID NO: 1595
gguuuccgguaagaaucua

SEQ ID NO: 124939 - RNA, 19 nt, Artificial Sequence
  Description of Artificial Sequence: Synthetic oligonucleotide
  Antisense strand to SEQ ID NO: 124938
uagauucuuaccggaaacc

SEQ ID NO: 124940 - RNA, 19 nt, Artificial Sequence
  Description of Artificial Sequence: Synthetic oligonucleotide
  Sense strand starting at position 579 of SEQ ID NO: 1595
cgcgguuuccgguaagaau

SEQ ID NO: 124941 - RNA, 19 nt, Artificial Sequence
  Description of Artificial Sequence: Synthetic oligonucleotide
  Antisense strand to SEQ ID NO: 124940
auucuuaccggaaaccgcg

SEQ ID NO: 124942 - RNA, 19 nt, Artificial Sequence
  Description of Artificial Sequence: Synthetic oligonucleotide
  Sense strand starting at position 578 of SEQ ID NO: 1595
ccgcgguuuccgguaagaa

SEQ ID NO: 124943 - RNA, 19 nt, Artificial Sequence
  Description of Artificial Sequence: Synthetic oligonucleotide
  Antisense strand to SEQ ID NO: 124942
uucuuaccggaaaccgcgg

SEQ ID NO: 124944 - RNA, 19 nt, Artificial Sequence
  Description of Artificial Sequence: Synthetic oligonucleotide
  Sense strand starting at position 483 of SEQ ID NO: 1595
uuaagcugauucuagcaau

SEQ ID NO: 124945 - RNA, 19 nt, Artificial Sequence
  Description of Artificial Sequence: Synthetic oligonucleotide
  Antisense strand to SEQ ID NO: 124944
auugcuagaaucagcuuaa

SEQ ID NO: 124946 - RNA, 19 nt, Artificial Sequence
  Description of Artificial Sequence: Synthetic oligonucleotide
  Sense strand starting at position 438 of SEQ ID NO: 1595
gcuagacucuugucucuua

SEQ ID NO: 124947 - RNA, 19 nt, Artificial Sequence
  Description of Artificial Sequence: Synthetic oligonucleotide
  Antisense strand to SEQ ID NO: 124946
uaagagacaagagucuagc

SEQ ID NO: 124948 - RNA, 19 nt, Artificial Sequence
  Description of Artificial Sequence: Synthetic oligonucleotide
  Sense strand starting at position 400 of SEQ ID NO: 1595
cuaggagcucuccacugua

SEQ ID NO: 124949 - RNA, 19 nt, Artificial Sequence
  Description of Artificial Sequence: Synthetic oligonucleotide
  Antisense strand to SEQ ID NO: 124948
uacaguggagagcuccuag

SEQ ID NO: 124950 - RNA, 19 nt, Artificial Sequence
  Description of Artificial Sequence: Synthetic oligonucleotide
  Sense strand starting at position 376 of SEQ ID NO: 1595
caagaaguucgaggcuaca

SEQ ID NO: 124951 - RNA, 19 nt, Artificial Sequence
  Description of Artificial Sequence: Synthetic oligonucleotide
  Antisense strand to SEQ ID NO: 124950
uguagccucgaacuucuug

SEQ ID NO: 124952 - RNA, 19 nt, Artificial Sequence
  Description of Artificial Sequence: Synthetic oligonucleotide
  Sense strand starting at position 367 of SEQ ID NO: 1595
ggcuuaagccaagaaguuc

SEQ ID NO: 124953 - RNA, 19 nt, Artificial Sequence
  Description of Artificial Sequence: Synthetic oligonucleotide
  Antisense strand to SEQ ID NO: 124952
gaacuucuuggcuuaagcc

SEQ ID NO: 124954 - RNA, 19 nt, Artificial Sequence
  Description of Artificial Sequence: Synthetic oligonucleotide
  Sense strand starting at position 3977 of SEQ ID NO: 1596
ugaacuuuccuguacuuag

SEQ ID NO: 124955 - RNA, 19 nt, Artificial Sequence
  Description of Artificial Sequence: Synthetic oligonucleotide
  Antisense strand to SEQ ID NO: 124954
cuaaguacaggaaaguuca

SEQ ID NO: 124956 - RNA, 19 nt, Artificial Sequence
  Description of Artificial Sequence: Synthetic oligonucleotide
  Sense strand starting at position 3276 of SEQ ID NO: 1596
cuacaugcugggcauaaua

SEQ ID NO: 124957 - RNA, 19 nt, Artificial Sequence
  Description of Artificial Sequence: Synthetic oligonucleotide
  Antisense strand to SEQ ID NO: 124956
uauuaugcccagcauguag

SEQ ID NO: 124958 - RNA, 19 nt, Artificial Sequence
  Description of Artificial Sequence: Synthetic oligonucleotide
  Sense strand starting at position 3275 of SEQ ID NO: 1596
ccuacaugcugggcauaau

SEQ ID NO: 124959 - RNA, 19 nt, Artificial Sequence
  Description of Artificial Sequence: Synthetic oligonucleotide
  Antisense strand to SEQ ID NO: 124958
auuaugcccagcauguagg

SEQ ID NO: 124960 - RNA, 19 nt, Artificial Sequence
  Description of Artificial Sequence: Synthetic oligonucleotide
  Sense strand starting at position 3077 of SEQ ID NO: 1596
gggaauuaauaacauuaga

SEQ ID NO: 124961 - RNA, 19 nt, Artificial Sequence
  Description of Artificial Sequence: Synthetic oligonucleotide
  Antisense strand to SEQ ID NO: 124960
ucuaauguuauuaauuccc

SEQ ID NO: 124962 - RNA, 19 nt, Artificial Sequence
  Description of Artificial Sequence: Synthetic oligonucleotide
  Sense strand starting at position 3066 of SEQ ID NO: 1596
aucuauguacugggaauua

SEQ ID NO: 124963 - RNA, 19 nt, Artificial Sequence
  Description of Artificial Sequence: Synthetic oligonucleotide
  Antisense strand to SEQ ID NO: 124962
uaauucccaguacauagau

SEQ ID NO: 124964 - RNA, 19 nt, Artificial Sequence
  Description of Artificial Sequence: Synthetic oligonucleotide
  Sense strand starting at position 3059 of SEQ ID NO: 1596
aggugagaucuauguacug

SEQ ID NO: 124965 - RNA, 19 nt, Artificial Sequence
  Description of Artificial Sequence: Synthetic oligonucleotide
  Antisense strand to SEQ ID NO: 124964
caguacauagaucucaccu

SEQ ID NO: 124966 - RNA, 19 nt, Artificial Sequence
  Description of Artificial Sequence: Synthetic oligonucleotide
  Sense strand starting at position 3000 of SEQ ID NO: 1596
agacaugcugcuuauucua

SEQ ID NO: 124967 - RNA, 19 nt, Artificial Sequence
  Description of Artificial Sequence: Synthetic oligonucleotide
  Antisense strand to SEQ ID NO: 124966
uagaauaagcagcaugucu

SEQ ID NO: 124968 - RNA, 19 nt, Artificial Sequence
  Description of Artificial Sequence: Synthetic oligonucleotide
  Sense strand starting at position 2975 of SEQ ID NO: 1596
cuguuauaauagccugaac

SEQ ID NO: 124969 - RNA, 19 nt, Artificial Sequence
  Description of Artificial Sequence: Synthetic oligonucleotide
  Antisense strand to SEQ ID NO: 124968
guucaggcuauuauaacag

SEQ ID NO: 124970 - RNA, 19 nt, Artificial Sequence
  Description of Artificial Sequence: Synthetic oligonucleotide
  Sense strand starting at position 2411 of SEQ ID NO: 1596
uaauuaggucauugagggu

SEQ ID NO: 124971 - RNA, 19 nt, Artificial Sequence
  Description of Artificial Sequence: Synthetic oligonucleotide
  Antisense strand to SEQ ID NO: 124970
acccucaaugaccuaauua

SEQ ID NO: 124972 - RNA, 19 nt, Artificial Sequence
  Description of Artificial Sequence: Synthetic oligonucleotide
  Sense strand starting at position 2390 of SEQ ID NO: 1596
ggaaauggguucuuuggga

SEQ ID NO: 124973 - RNA, 19 nt, Artificial Sequence
  Description of Artificial Sequence: Synthetic oligonucleotide
  Antisense strand to SEQ ID NO: 124972
ucccaaagaacccauuucc

SEQ ID NO: 124974 - RNA, 19 nt, Artificial Sequence
  Description of Artificial Sequence: Synthetic oligonucleotide
  Sense strand starting at position 2371 of SEQ ID NO: 1596
gaccaaugugauggugaua

SEQ ID NO: 124975 - RNA, 19 nt, Artificial Sequence
  Description of Artificial Sequence: Synthetic oligonucleotide
  Antisense strand to SEQ ID NO: 124974
uaucaccaucacauugguc

SEQ ID NO: 124976 - RNA, 19 nt, Artificial Sequence
  Description of Artificial Sequence: Synthetic oligonucleotide
  Sense strand starting at position 2242 of SEQ ID NO: 1596
ggcuaauaggagcaguagu

SEQ ID NO: 124977 - RNA, 19 nt, Artificial Sequence
  Description of Artificial Sequence: Synthetic oligonucleotide
  Antisense strand to SEQ ID NO: 124976
acuacugcuccuauuagcc

SEQ ID NO: 124978 - RNA, 19 nt, Artificial Sequence
  Description of Artificial Sequence: Synthetic oligonucleotide
  Sense strand starting at position 2168 of SEQ ID NO: 1596
gagccugcucaagaguaca

SEQ ID NO: 124979 - RNA, 19 nt, Artificial Sequence
  Description of Artificial Sequence: Synthetic oligonucleotide
  Antisense strand to SEQ ID NO: 124978
uguacucuugagcaggcuc

SEQ ID NO: 124980 - RNA, 19 nt, Artificial Sequence
  Description of Artificial Sequence: Synthetic oligonucleotide
  Sense strand starting at position 2003 of SEQ ID NO: 1596
ccugucauuccagaaugca

SEQ ID NO: 124981 - RNA, 19 nt, Artificial Sequence
  Description of Artificial Sequence: Synthetic oligonucleotide
  Antisense strand to SEQ ID NO: 124980
ugcauucuggaaugacagg

SEQ ID NO: 124982 - RNA, 19 nt, Artificial Sequence
  Description of Artificial Sequence: Synthetic oligonucleotide
  Sense strand starting at position 1998 of SEQ ID NO: 1596
gaaugccugucauuccaga

SEQ ID NO: 124983 - RNA, 19 nt, Artificial Sequence
  Description of Artificial Sequence: Synthetic oligonucleotide
  Antisense strand to SEQ ID NO: 124982
ucuggaaugacaggcauuc

SEQ ID NO: 124984 - RNA, 19 nt, Artificial Sequence
  Description of Artificial Sequence: Synthetic oligonucleotide
  Sense strand starting at position 1485 of SEQ ID NO: 1596
aacugugagcgauaaauua

SEQ ID NO: 124985 - RNA, 19 nt, Artificial Sequence
  Description of Artificial Sequence: Synthetic oligonucleotide
  Antisense strand to SEQ ID NO: 124984
uaauuuaucgcucacaguu

SEQ ID NO: 124986 - RNA, 19 nt, Artificial Sequence
  Description of Artificial Sequence: Synthetic oligonucleotide
  Sense strand starting at position 1409 of SEQ ID NO: 1596
uaguaacggcaagaaauua

SEQ ID NO: 124987 - RNA, 19 nt, Artificial Sequence
  Description of Artificial Sequence: Synthetic oligonucleotide
  Antisense strand to SEQ ID NO: 124986
uaauuucuugccguuacua

SEQ ID NO: 124988 - RNA, 19 nt, Artificial Sequence
  Description of Artificial Sequence: Synthetic oligonucleotide
  Sense strand starting at position 1404 of SEQ ID NO: 1596
aucuuuaguaacggcaaga

SEQ ID NO: 124989 - RNA, 19 nt, Artificial Sequence
  Description of Artificial Sequence: Synthetic oligonucleotide
  Antisense strand to SEQ ID NO: 124988
ucuugccguuacuaaagau

SEQ ID NO: 124990 - RNA, 19 nt, Artificial Sequence
  Description of Artificial Sequence: Synthetic oligonucleotide
  Sense strand starting at position 1394 of SEQ ID NO: 1596
uguagcauuuaucuuuagu

SEQ ID NO: 124991 - RNA, 19 nt, Artificial Sequence
  Description of Artificial Sequence: Synthetic oligonucleotide
  Antisense strand to SEQ ID NO: 124990
acuaaagauaaaugcuaca

SEQ ID NO: 124992 - RNA, 19 nt, Artificial Sequence
  Description of Artificial Sequence: Synthetic oligonucleotide
  Sense strand starting at position 1309 of SEQ ID NO: 1596
ugguucugucuauagaagu

SEQ ID NO: 124993 - RNA, 19 nt, Artificial Sequence
  Description of Artificial Sequence: Synthetic oligonucleotide
  Antisense strand to SEQ ID NO: 124992
acuucuauagacagaacca

SEQ ID NO: 124994 - RNA, 19 nt, Artificial Sequence
  Description of Artificial Sequence: Synthetic oligonucleotide
  Sense strand starting at position 1307 of SEQ ID NO: 1596
agugguucugucuauagaa

SEQ ID NO: 124995 - RNA, 19 nt, Artificial Sequence
  Description of Artificial Sequence: Synthetic oligonucleotide
  Antisense strand to SEQ ID NO: 124994
uucuauagacagaaccacu

SEQ ID NO: 124996 - RNA, 19 nt, Artificial Sequence
  Description of Artificial Sequence: Synthetic oligonucleotide
  Sense strand starting at position 1111 of SEQ ID NO: 1596
uugaaacucugagcuauac

SEQ ID NO: 124997 - RNA, 19 nt, Artificial Sequence
  Description of Artificial Sequence: Synthetic oligonucleotide
  Antisense strand to SEQ ID NO: 124996
guauagcucagaguuucaa

SEQ ID NO: 124998 - RNA, 19 nt, Artificial Sequence
  Description of Artificial Sequence: Synthetic oligonucleotide
  Sense strand starting at position 1079 of SEQ ID NO: 1596
gugacaagugacuaccauu

SEQ ID NO: 124999 - RNA, 19 nt, Artificial Sequence
  Description of Artificial Sequence: Synthetic oligonucleotide
  Antisense strand to SEQ ID NO: 124998
aaugguagucacuugucac

SEQ ID NO: 125000 - RNA, 19 nt, Artificial Sequence
  Description of Artificial Sequence: Synthetic oligonucleotide
  Sense strand starting at position 1069 of SEQ ID NO: 1596
ugagcuugcagugacaagu

SEQ ID NO: 125001 - RNA, 19 nt, Artificial Sequence
  Description of Artificial Sequence: Synthetic oligonucleotide
  Antisense strand to SEQ ID NO: 125000
acuugucacugcaagcuca

SEQ ID NO: 125002 - RNA, 19 nt, Artificial Sequence
  Description of Artificial Sequence: Synthetic oligonucleotide
  Sense strand starting at position 769 of SEQ ID NO: 1596
ugaaacauuugggaguguu

SEQ ID NO: 125003 - RNA, 19 nt, Artificial Sequence
  Description of Artificial Sequence: Synthetic oligonucleotide
  Antisense strand to SEQ ID NO: 125002
aacacucccaaauguuuca

SEQ ID NO: 125004 - RNA, 19 nt, Artificial Sequence
  Description of Artificial Sequence: Synthetic oligonucleotide
  Sense strand starting at position 597 of SEQ ID NO: 1596
aagguaaagugagucaagu

SEQ ID NO: 125005 - RNA, 19 nt, Artificial Sequence
  Description of Artificial Sequence: Synthetic oligonucleotide
  Antisense strand to SEQ ID NO: 125004
acuugacucacuuuaccuu

SEQ ID NO: 125006 - RNA, 19 nt, Artificial Sequence
  Description of Artificial Sequence: Synthetic oligonucleotide
  Sense strand starting at position 589 of SEQ ID NO: 1596
uagugaucaagguaaagug

SEQ ID NO: 125007 - RNA, 19 nt, Artificial Sequence
  Description of Artificial Sequence: Synthetic oligonucleotide
  Antisense strand to SEQ ID NO: 125006
cacuuuaccuugaucacua

SEQ ID NO: 125008 - RNA, 19 nt, Artificial Sequence
  Description of Artificial Sequence: Synthetic oligonucleotide
  Sense strand starting at position 587 of SEQ ID NO: 1596
ccuagugaucaagguaaag

SEQ ID NO: 125009 - RNA, 19 nt, Artificial Sequence
  Description of Artificial Sequence: Synthetic oligonucleotide
  Antisense strand to SEQ ID NO: 125008
cuuuaccuugaucacuagg

SEQ ID NO: 125010 - RNA, 19 nt, Artificial Sequence
  Description of Artificial Sequence: Synthetic oligonucleotide
  Sense strand starting at position 584 of SEQ ID NO: 1596
agcccuagugaucaaggua

SEQ ID NO: 125011 - RNA, 19 nt, Artificial Sequence
  Description of Artificial Sequence: Synthetic oligonucleotide
  Antisense strand to SEQ ID NO: 125010
uaccuugaucacuagggcu

SEQ ID NO: 125012 - RNA, 19 nt, Artificial Sequence
  Description of Artificial Sequence: Synthetic oligonucleotide
  Sense strand starting at position 444 of SEQ ID NO: 1596
gagguuuaucuuuauguuc

SEQ ID NO: 125013 - RNA, 19 nt, Artificial Sequence
  Description of Artificial Sequence: Synthetic oligonucleotide
  Antisense strand to SEQ ID NO: 125012
gaacauaaagauaaaccuc

SEQ ID NO: 125014 - RNA, 19 nt, Artificial Sequence
  Description of Artificial Sequence: Synthetic oligonucleotide
  Sense strand starting at position 438 of SEQ ID NO: 1596
uagugugagguuuaucuuu

SEQ ID NO: 125015 - RNA, 19 nt, Artificial Sequence
  Description of Artificial Sequence: Synthetic oligonucleotide
  Antisense strand to SEQ ID NO: 125014
aaagauaaaccucacacua

SEQ ID NO: 125016 - RNA, 19 nt, Artificial Sequence
  Description of Artificial Sequence: Synthetic oligonucleotide
  Sense strand starting at position 373 of SEQ ID NO: 1596
gagaguguuuaauucugga

SEQ ID NO: 125017 - RNA, 19 nt, Artificial Sequence
  Description of Artificial Sequence: Synthetic oligonucleotide
  Antisense strand to SEQ ID NO: 125016
uccagaauuaaacacucuc

SEQ ID NO: 125018 - RNA, 19 nt, Artificial Sequence
  Description of Artificial Sequence: Synthetic oligonucleotide
  Sense strand starting at position 369 of SEQ ID NO: 1596
auaggagaguguuuaauuc

SEQ ID NO: 125019 - RNA, 19 nt, Artificial Sequence
  Description of Artificial Sequence: Synthetic oligonucleotide
  Antisense strand to SEQ ID NO: 125018
gaauuaaacacucuccuau

SEQ ID NO: 125020 - RNA, 19 nt, Artificial Sequence
  Description of Artificial Sequence: Synthetic oligonucleotide
  Sense strand starting at position 366 of SEQ ID NO: 1596
aauauaggagaguguuuaa

SEQ ID NO: 125021 - RNA, 19 nt, Artificial Sequence
  Description of Artificial Sequence: Synthetic oligonucleotide
  Antisense strand to SEQ ID NO: 125020
uuaaacacucuccuauauu

SEQ ID NO: 125022 - RNA, 19 nt, Artificial Sequence
  Description of Artificial Sequence: Synthetic oligonucleotide
  Sense strand starting at position 308 of SEQ ID NO: 1596
uaauguuuggcguagaaac

SEQ ID NO: 125023 - RNA, 19 nt, Artificial Sequence
  Description of Artificial Sequence: Synthetic oligonucleotide
  Antisense strand to SEQ ID NO: 125022
guuucuacgccaaacauua

SEQ ID NO: 125024 - RNA, 19 nt, Artificial Sequence
  Description of Artificial Sequence: Synthetic oligonucleotide
  Sense strand starting at position 272 of SEQ ID NO: 1596
agcauugaguccuuacuau

SEQ ID NO: 125025 - RNA, 19 nt, Artificial Sequence
  Description of Artificial Sequence: Synthetic oligonucleotide
  Antisense strand to SEQ ID NO: 125024
auaguaaggacucaaugcu

SEQ ID NO: 125026 - RNA, 19 nt, Artificial Sequence
  Description of Artificial Sequence: Synthetic oligonucleotide
  Sense strand starting at position 258 of SEQ ID NO: 1596
auagauaaaugccuagcau

SEQ ID NO: 125027 - RNA, 19 nt, Artificial Sequence
  Description of Artificial Sequence: Synthetic oligonucleotide
  Antisense strand to SEQ ID NO: 125026
augcuaggcauuuaucuau

SEQ ID NO: 125028 - RNA, 19 nt, Artificial Sequence
  Description of Artificial Sequence: Synthetic oligonucleotide
  Sense strand starting at position 222 of SEQ ID NO: 1596
auuuauuguuugucaaagc

SEQ ID NO: 125029 - RNA, 19 nt, Artificial Sequence
  Description of Artificial Sequence: Synthetic oligonucleotide
  Antisense strand to SEQ ID NO: 125028
gcuuugacaaacaauaaau

SEQ ID NO: 125030 - RNA, 19 nt, Artificial Sequence
  Description of Artificial Sequence: Synthetic oligonucleotide
  Sense strand starting at position 169 of SEQ ID NO: 1596
ugggcauucuucuuaaaua

SEQ ID NO: 125031 - RNA, 19 nt, Artificial Sequence
  Description of Artificial Sequence: Synthetic oligonucleotide
  Antisense strand to SEQ ID NO: 125030
uauuuaagaagaaugccca

SEQ ID NO: 125032 - RNA, 19 nt, Artificial Sequence
  Description of Artificial Sequence: Synthetic oligonucleotide
  Sense strand starting at position 157 of SEQ ID NO: 1596
auagaucuuagaugggcau

SEQ ID NO: 125033 - RNA, 19 nt, Artificial Sequence
  Description of Artificial Sequence: Synthetic oligonucleotide
  Antisense strand to SEQ ID NO: 125032
augcccaucuaagaucuau

SEQ ID NO: 125034 - RNA, 19 nt, Artificial Sequence
  Description of Artificial Sequence: Synthetic oligonucleotide
  Sense strand starting at position 35 of SEQ ID NO: 1597
aguuuaucagcugguuaga

SEQ ID NO: 125035 - RNA, 19 nt, Artificial Sequence
  Description of Artificial Sequence: Synthetic oligonucleotide
  Antisense strand to SEQ ID NO: 125034
ucuaaccagcugauaaacu

SEQ ID NO: 125036 - RNA, 19 nt, Artificial Sequence
  Description of Artificial Sequence: Synthetic oligonucleotide
  Sense strand starting at position 37 of SEQ ID NO: 1597
uuuaucagcugguuagaaa

SEQ ID NO: 125037 - RNA, 19 nt, Artificial Sequence
  Description of Artificial Sequence: Synthetic oligonucleotide
  Antisense strand to SEQ ID NO: 125036
uuucuaaccagcugauaaa

SEQ ID NO: 125038 - RNA, 19 nt, Artificial Sequence
  Description of Artificial Sequence: Synthetic oligonucleotide
  Sense strand starting at position 38 of SEQ ID NO: 1597
uuaucagcugguuagaaag

SEQ ID NO: 125039 - RNA, 19 nt, Artificial Sequence
  Description of Artificial Sequence: Synthetic oligonucleotide
  Antisense strand to SEQ ID NO: 125038
cuuucuaaccagcugauaa

SEQ ID NO: 125040 - RNA, 19 nt, Artificial Sequence
  Description of Artificial Sequence: Synthetic oligonucleotide
  Sense strand starting at position 45 of SEQ ID NO: 1597
cugguuagaaagggugaau

SEQ ID NO: 125041 - RNA, 19 nt, Artificial Sequence
  Description of Artificial Sequence: Synthetic oligonucleotide
  Antisense strand to SEQ ID NO: 125040
auucacccuuucuaaccag

SEQ ID NO: 125042 - RNA, 19 nt, Artificial Sequence
  Description of Artificial Sequence: Synthetic oligonucleotide
  Sense strand starting at position 131 of SEQ ID NO: 1597
agggcaguacuuuaccuaa

SEQ ID NO: 125043 - RNA, 19 nt, Artificial Sequence
  Description of Artificial Sequence: Synthetic oligonucleotide
  Antisense strand to SEQ ID NO: 125042
uuagguaaaguacugcccu

SEQ ID NO: 125044 - RNA, 19 nt, Artificial Sequence
  Description of Artificial Sequence: Synthetic oligonucleotide
  Sense strand starting at position 171 of SEQ ID NO: 1597
uguuaaaucuaacugaaug

SEQ ID NO: 125045 - RNA, 19 nt, Artificial Sequence
  Description of Artificial Sequence: Synthetic oligonucleotide
  Antisense strand to SEQ ID NO: 125044
cauucaguuagauuuaaca

SEQ ID NO: 125046 - RNA, 19 nt, Artificial Sequence
  Description of Artificial Sequence: Synthetic oligonucleotide
  Sense strand starting at position 237 of SEQ ID NO: 1597
ccucuugcccgauaaccaa

SEQ ID NO: 125047 - RNA, 19 nt, Artificial Sequence
  Description of Artificial Sequence: Synthetic oligonucleotide
  Antisense strand to SEQ ID NO: 125046
uugguuaucgggcaagagg

SEQ ID NO: 125048 - RNA, 19 nt, Artificial Sequence
  Description of Artificial Sequence: Synthetic oligonucleotide
  Sense strand starting at position 363 of SEQ ID NO: 1597
ugcccuguaccagaauaaa

SEQ ID NO: 125049 - RNA, 19 nt, Artificial Sequence
  Description of Artificial Sequence: Synthetic oligonucleotide
  Antisense strand to SEQ ID NO: 125048
uuuauucugguacagggca

SEQ ID NO: 125050 - RNA, 19 nt, Artificial Sequence
  Description of Artificial Sequence: Synthetic oligonucleotide
  Sense strand starting at position 439 of SEQ ID NO: 1597
cucauuagccuguaauguu

SEQ ID NO: 125051 - RNA, 19 nt, Artificial Sequence
  Description of Artificial Sequence: Synthetic oligonucleotide
  Antisense strand to SEQ ID NO: 125050
aacauuacaggcuaaugag

SEQ ID NO: 125052 - RNA, 19 nt, Artificial Sequence
  Description of Artificial Sequence: Synthetic oligonucleotide
  Sense strand starting at position 466 of SEQ ID NO: 1597
ccuagaaauccuggcaguu

SEQ ID NO: 125053 - RNA, 19 nt, Artificial Sequence
  Description of Artificial Sequence: Synthetic oligonucleotide
  Antisense strand to SEQ ID NO: 125052
aacugccaggauuucuagg

SEQ ID NO: 125054 - RNA, 19 nt, Artificial Sequence
  Description of Artificial Sequence: Synthetic oligonucleotide
  Sense strand starting at position 519 of SEQ ID NO: 1597
aucccaggugaaugauaau

SEQ ID NO: 125055 - RNA, 19 nt, Artificial Sequence
  Description of Artificial Sequence: Synthetic oligonucleotide
  Antisense strand to SEQ ID NO: 125054
auuaucauucaccugggau

SEQ ID NO: 125056 - RNA, 19 nt, Artificial Sequence
  Description of Artificial Sequence: Synthetic oligonucleotide
  Sense strand starting at position 548 of SEQ ID NO: 1597
aguuaugcuccagagccaa

SEQ ID NO: 125057 - RNA, 19 nt, Artificial Sequence
  Description of Artificial Sequence: Synthetic oligonucleotide
  Antisense strand to SEQ ID NO: 125056
uuggcucuggagcauaacu

SEQ ID NO: 125058 - RNA, 19 nt, Artificial Sequence
  Description of Artificial Sequence: Synthetic oligonucleotide
  Sense strand starting at position 595 of SEQ ID NO: 1597
ugugguacaaagugacauu

SEQ ID NO: 125059 - RNA, 19 nt, Artificial Sequence
  Description of Artificial Sequence: Synthetic oligonucleotide
  Antisense strand to SEQ ID NO: 125058
aaugucacuuuguaccaca

SEQ ID NO: 125060 - RNA, 19 nt, Artificial Sequence
  Description of Artificial Sequence: Synthetic oligonucleotide
  Sense strand starting at position 596 of SEQ ID NO: 1597
gugguacaaagugacauua

SEQ ID NO: 125061 - RNA, 19 nt, Artificial Sequence
  Description of Artificial Sequence: Synthetic oligonucleotide
  Antisense strand to SEQ ID NO: 125060
uaaugucacuuuguaccac

SEQ ID NO: 125062 - RNA, 19 nt, Artificial Sequence
  Description of Artificial Sequence: Synthetic oligonucleotide
  Sense strand starting at position 697 of SEQ ID NO: 1597
agggacauaugauggauuu

SEQ ID NO: 125063 - RNA, 19 nt, Artificial Sequence
  Description of Artificial Sequence: Synthetic oligonucleotide
  Antisense strand to SEQ ID NO: 125062
aaauccaucauaugucccu

SEQ ID NO: 125064 - RNA, 19 nt, Artificial Sequence
  Description of Artificial Sequence: Synthetic oligonucleotide
  Sense strand starting at position 809 of SEQ ID NO: 1597
ggcugucauugauuuguaa

SEQ ID NO: 125065 - RNA, 19 nt, Artificial Sequence
  Description of Artificial Sequence: Synthetic oligonucleotide
  Antisense strand to SEQ ID NO: 125064
uuacaaaucaaugacagcc

SEQ ID NO: 125066 - RNA, 19 nt, Artificial Sequence
  Description of Artificial Sequence: Synthetic oligonucleotide
  Sense strand starting at position 813 of SEQ ID NO: 1597
gucauugauuuguaaggga

SEQ ID NO: 125067 - RNA, 19 nt, Artificial Sequence
  Description of Artificial Sequence: Synthetic oligonucleotide
  Antisense strand to SEQ ID NO: 125066
ucccuuacaaaucaaugac

SEQ ID NO: 125068 - RNA, 19 nt, Artificial Sequence
  Description of Artificial Sequence: Synthetic oligonucleotide
  Sense strand starting at position 816 of SEQ ID NO: 1597
auugauuuguaagggaaga

SEQ ID NO: 125069 - RNA, 19 nt, Artificial Sequence
  Description of Artificial Sequence: Synthetic oligonucleotide
  Antisense strand to SEQ ID NO: 125068
ucuucccuuacaaaucaau

SEQ ID NO: 125070 - RNA, 19 nt, Artificial Sequence
  Description of Artificial Sequence: Synthetic oligonucleotide
  Sense strand starting at position 847 of SEQ ID NO: 1597
gaguguguuccguacacag

SEQ ID NO: 125071 - RNA, 19 nt, Artificial Sequence
  Description of Artificial Sequence: Synthetic oligonucleotide
  Antisense strand to SEQ ID NO: 125070
cuguguacggaacacacuc

SEQ ID NO: 125072 - RNA, 19 nt, Artificial Sequence
  Description of Artificial Sequence: Synthetic oligonucleotide
  Sense strand starting at position 876 of SEQ ID NO: 1597
uacauaucguagguaugga

SEQ ID NO: 125073 - RNA, 19 nt, Artificial Sequence
  Description of Artificial Sequence: Synthetic oligonucleotide
  Antisense strand to SEQ ID NO: 125072
uccauaccuacgauaugua

SEQ ID NO: 125074 - RNA, 19 nt, Artificial Sequence
  Description of Artificial Sequence: Synthetic oligonucleotide
  Sense strand starting at position 924 of SEQ ID NO: 1597
cgaaaguaugugggugaga

SEQ ID NO: 125075 - RNA, 19 nt, Artificial Sequence
  Description of Artificial Sequence: Synthetic oligonucleotide
  Antisense strand to SEQ ID NO: 125074
ucucacccacauacuuucg

SEQ ID NO: 125076 - RNA, 19 nt, Artificial Sequence
  Description of Artificial Sequence: Synthetic oligonucleotide
  Sense strand starting at position 925 of SEQ ID NO: 1597
gaaaguaugugggugagau

SEQ ID NO: 125077 - RNA, 19 nt, Artificial Sequence
  Description of Artificial Sequence: Synthetic oligonucleotide
  Antisense strand to SEQ ID NO: 125076
aucucacccacauacuuuc

SEQ ID NO: 125078 - RNA, 19 nt, Artificial Sequence
  Description of Artificial Sequence: Synthetic oligonucleotide
  Sense strand starting at position 926 of SEQ ID NO: 1597
aaaguaugugggugagauc

SEQ ID NO: 125079 - RNA, 19 nt, Artificial Sequence
  Description of Artificial Sequence: Synthetic oligonucleotide
  Antisense strand to SEQ ID NO: 125078
gaucucacccacauacuuu

SEQ ID NO: 125080 - RNA, 19 nt, Artificial Sequence
  Description of Artificial Sequence: Synthetic oligonucleotide
  Sense strand starting at position 927 of SEQ ID NO: 1597
aaguaugugggugagauca

SEQ ID NO: 125081 - RNA, 19 nt, Artificial Sequence
  Description of Artificial Sequence: Synthetic oligonucleotide
  Antisense strand to SEQ ID NO: 125080
ugaucucacccacauacuu

SEQ ID NO: 125082 - RNA, 19 nt, Artificial Sequence
  Description of Artificial Sequence: Synthetic oligonucleotide
  Sense strand starting at position 937 of SEQ ID NO: 1597
gugagaucaguucagguua

SEQ ID NO: 125083 - RNA, 19 nt, Artificial Sequence
  Description of Artificial Sequence: Synthetic oligonucleotide
  Antisense strand to SEQ ID NO: 125082
uaaccugaacugaucucac

SEQ ID NO: 125084 - RNA, 19 nt, Artificial Sequence
  Description of Artificial Sequence: Synthetic oligonucleotide
  Sense strand starting at position 2201 of SEQ ID NO: 1597
cgaggaggcugcccugaua

SEQ ID NO: 125085 - RNA, 19 nt, Artificial Sequence
  Description of Artificial Sequence: Synthetic oligonucleotide
  Antisense strand to SEQ ID NO: 125084
uaucagggcagccuccucg

SEQ ID NO: 125086 - RNA, 19 nt, Artificial Sequence
  Description of Artificial Sequence: Synthetic oligonucleotide
  Sense strand starting at position 2550 of SEQ ID NO: 1597
guaaguguugguuaucuuc

SEQ ID NO: 125087 - RNA, 19 nt, Artificial Sequence
  Description of Artificial Sequence: Synthetic oligonucleotide
  Antisense strand to SEQ ID NO: 125086
gaagauaaccaacacuuac

SEQ ID NO: 125088 - RNA, 19 nt, Artificial Sequence
  Description of Artificial Sequence: Synthetic oligonucleotide
  Sense strand starting at position 2593 of SEQ ID NO: 1597
gcugucguggcgaagcaua

SEQ ID NO: 125089 - RNA, 19 nt, Artificial Sequence
  Description of Artificial Sequence: Synthetic oligonucleotide
  Antisense strand to SEQ ID NO: 125088
uaugcuucgccacgacagc

SEQ ID NO: 125090 - RNA, 19 nt, Artificial Sequence
  Description of Artificial Sequence: Synthetic oligonucleotide
  Sense strand starting at position 2770 of SEQ ID NO: 1597
ucuugccuuccuuaguauu

SEQ ID NO: 125091 - RNA, 19 nt, Artificial Sequence
  Description of Artificial Sequence: Synthetic oligonucleotide
  Antisense strand to SEQ ID NO: 125090
aauacuaaggaaggcaaga

SEQ ID NO: 125092 - RNA, 19 nt, Artificial Sequence
  Description of Artificial Sequence: Synthetic oligonucleotide
  Sense strand starting at position 3013 of SEQ ID NO: 1597
acaggauuguauccucaac

SEQ ID NO: 125093 - RNA, 19 nt, Artificial Sequence
  Description of Artificial Sequence: Synthetic oligonucleotide
  Antisense strand to SEQ ID NO: 125092
guugaggauacaauccugu

SEQ ID NO: 125094 - RNA, 19 nt, Artificial Sequence
  Description of Artificial Sequence: Synthetic oligonucleotide
  Sense strand starting at position 3015 of SEQ ID NO: 1597
aggauuguauccucaacuc

SEQ ID NO: 125095 - RNA, 19 nt, Artificial Sequence
  Description of Artificial Sequence: Synthetic oligonucleotide
  Antisense strand to SEQ ID NO: 125094
gaguugaggauacaauccu

SEQ ID NO: 125096 - RNA, 19 nt, Artificial Sequence
  Description of Artificial Sequence: Synthetic oligonucleotide
  Sense strand starting at position 3084 of SEQ ID NO: 1597
caguucuuccuggaaugcu

SEQ ID NO: 125097 - RNA, 19 nt, Artificial Sequence
  Description of Artificial Sequence: Synthetic oligonucleotide
  Antisense strand to SEQ ID NO: 125096
agcauuccaggaagaacug

SEQ ID NO: 125098 - RNA, 19 nt, Artificial Sequence
  Description of Artificial Sequence: Synthetic oligonucleotide
  Sense strand starting at position 3207 of SEQ ID NO: 1597
uuagacuuuguaggucaca

SEQ ID NO: 125099 - RNA, 19 nt, Artificial Sequence
  Description of Artificial Sequence: Synthetic oligonucleotide
  Antisense strand to SEQ ID NO: 125098
ugugaccuacaaagucuaa

SEQ ID NO: 125100 - RNA, 19 nt, Artificial Sequence
  Description of Artificial Sequence: Synthetic oligonucleotide
  Sense strand starting at position 3276 of SEQ ID NO: 1597
agacaauauguacgugaag

SEQ ID NO: 125101 - RNA, 19 nt, Artificial Sequence
  Description of Artificial Sequence: Synthetic oligonucleotide
  Antisense strand to SEQ ID NO: 125100
cuucacguacauauugucu

SEQ ID NO: 125102 - RNA, 19 nt, Artificial Sequence
  Description of Artificial Sequence: Synthetic oligonucleotide
  Sense strand starting at position 3278 of SEQ ID NO: 1597
acaauauguacgugaagga

SEQ ID NO: 125103 - RNA, 19 nt, Artificial Sequence
  Description of Artificial Sequence: Synthetic oligonucleotide
  Antisense strand to SEQ ID NO: 125102
uccuucacguacauauugu

SEQ ID NO: 125104 - RNA, 19 nt, Artificial Sequence
  Description of Artificial Sequence: Synthetic oligonucleotide
  Sense strand starting at position 3329 of SEQ ID NO: 1597
gggcacuagaauuggaauu

SEQ ID NO: 125105 - RNA, 19 nt, Artificial Sequence
  Description of Artificial Sequence: Synthetic oligonucleotide
  Antisense strand to SEQ ID NO: 125104
aauuccaauucuagugccc

SEQ ID NO: 125106 - RNA, 19 nt, Artificial Sequence
  Description of Artificial Sequence: Synthetic oligonucleotide
  Sense strand starting at position 3411 of SEQ ID NO: 1597
uguagaaaucauuauuagc

SEQ ID NO: 125107 - RNA, 19 nt, Artificial Sequence
  Description of Artificial Sequence: Synthetic oligonucleotide
  Antisense strand to SEQ ID NO: 125106
gcuaauaaugauuucuaca

SEQ ID NO: 125108 - RNA, 19 nt, Artificial Sequence
  Description of Artificial Sequence: Synthetic oligonucleotide
  Sense strand starting at position 3486 of SEQ ID NO: 1597
gucaaccucugcucuagaa

SEQ ID NO: 125109 - RNA, 19 nt, Artificial Sequence
  Description of Artificial Sequence: Synthetic oligonucleotide
  Antisense strand to SEQ ID NO: 125108
uucuagagcagagguugac

SEQ ID NO: 125110 - RNA, 19 nt, Artificial Sequence
  Description of Artificial Sequence: Synthetic oligonucleotide
  Sense strand starting at position 3511 of SEQ ID NO: 1597
cucguccucccugaaaucu

SEQ ID NO: 125111 - RNA, 19 nt, Artificial Sequence
  Description of Artificial Sequence: Synthetic oligonucleotide
  Antisense strand to SEQ ID NO: 125110
agauuucagggaggacgag

SEQ ID NO: 125112 - RNA, 19 nt, Artificial Sequence
  Description of Artificial Sequence: Synthetic oligonucleotide
  Sense strand starting at position 3542 of SEQ ID NO: 1597
ucuaguuggcaguaacuuu

SEQ ID NO: 125113 - RNA, 19 nt, Artificial Sequence
  Description of Artificial Sequence: Synthetic oligonucleotide
  Antisense strand to SEQ ID NO: 125112
aaaguuacugccaacuaga

SEQ ID NO: 125114 - RNA, 19 nt, Artificial Sequence
  Description of Artificial Sequence: Synthetic oligonucleotide
  Sense strand starting at position 40 of SEQ ID NO: 1598
cugugagucccagagacau

SEQ ID NO: 125115 - RNA, 19 nt, Artificial Sequence
  Description of Artificial Sequence: Synthetic oligonucleotide
  Antisense strand to SEQ ID NO: 125114
augucucugggacucacag

SEQ ID NO: 125116 - RNA, 19 nt, Artificial Sequence
  Description of Artificial Sequence: Synthetic oligonucleotide
  Sense strand starting at position 278 of SEQ ID NO: 1598
ggcugacagcucuaggaca

SEQ ID NO: 125117 - RNA, 19 nt, Artificial Sequence
  Description of Artificial Sequence: Synthetic oligonucleotide
  Antisense strand to SEQ ID NO: 125116
uguccuagagcugucagcc

SEQ ID NO: 125118 - RNA, 19 nt, Artificial Sequence
  Description of Artificial Sequence: Synthetic oligonucleotide
  Sense strand starting at position 280 of SEQ ID NO: 1598
cugacagcucuaggacaaa

SEQ ID NO: 125119 - RNA, 19 nt, Artificial Sequence
  Description of Artificial Sequence: Synthetic oligonucleotide
  Antisense strand to SEQ ID NO: 125118
uuuguccuagagcugucag

SEQ ID NO: 125120 - RNA, 19 nt, Artificial Sequence
  Description of Artificial Sequence: Synthetic oligonucleotide
  Sense strand starting at position 497 of SEQ ID NO: 1598
ucagaauuaucugucugua

SEQ ID NO: 125121 - RNA, 19 nt, Artificial Sequence
  Description of Artificial Sequence: Synthetic oligonucleotide
  Antisense strand to SEQ ID NO: 125120
uacagacagauaauucuga

SEQ ID NO: 125122 - RNA, 19 nt, Artificial Sequence
  Description of Artificial Sequence: Synthetic oligonucleotide
  Sense strand starting at position 593 of SEQ ID NO: 1598
gugacccuuccucaugaga

SEQ ID NO: 125123 - RNA, 19 nt, Artificial Sequence
  Description of Artificial Sequence: Synthetic oligonucleotide
  Antisense strand to SEQ ID NO: 125122
ucucaugaggaagggucac

SEQ ID NO: 125124 - RNA, 19 nt, Artificial Sequence
  Description of Artificial Sequence: Synthetic oligonucleotide
  Sense strand starting at position 848 of SEQ ID NO: 1598
cuaagcacgagguagaaau

SEQ ID NO: 125125 - RNA, 19 nt, Artificial Sequence
  Description of Artificial Sequence: Synthetic oligonucleotide
  Antisense strand to SEQ ID NO: 125124
auuucuaccucgugcuuag

SEQ ID NO: 125126 - RNA, 19 nt, Artificial Sequence
  Description of Artificial Sequence: Synthetic oligonucleotide
  Sense strand starting at position 876 of SEQ ID NO: 1598
agggaagaguccaggguau

SEQ ID NO: 125127 - RNA, 19 nt, Artificial Sequence
  Description of Artificial Sequence: Synthetic oligonucleotide
  Antisense strand to SEQ ID NO: 125126
auacccuggacucuucccu

SEQ ID NO: 125128 - RNA, 19 nt, Artificial Sequence
  Description of Artificial Sequence: Synthetic oligonucleotide
  Sense strand starting at position 878 of SEQ ID NO: 1598
ggaagaguccaggguaucu

SEQ ID NO: 125129 - RNA, 19 nt, Artificial Sequence
  Description of Artificial Sequence: Synthetic oligonucleotide
  Antisense strand to SEQ ID NO: 125128
agauacccuggacucuucc

SEQ ID NO: 125130 - RNA, 19 nt, Artificial Sequence
  Description of Artificial Sequence: Synthetic oligonucleotide
  Sense strand starting at position 1025 of SEQ ID NO: 1598
uagcaaagucacugggagu

SEQ ID NO: 125131 - RNA, 19 nt, Artificial Sequence
  Description of Artificial Sequence: Synthetic oligonucleotide
  Antisense strand to SEQ ID NO: 125130
acucccagugacuuugcua

SEQ ID NO: 125132 - RNA, 19 nt, Artificial Sequence
  Description of Artificial Sequence: Synthetic oligonucleotide
  Sense strand starting at position 1026 of SEQ ID NO: 1598
agcaaagucacugggagua

SEQ ID NO: 125133 - RNA, 19 nt, Artificial Sequence
  Description of Artificial Sequence: Synthetic oligonucleotide
  Antisense strand to SEQ ID NO: 125132
uacucccagugacuuugcu

SEQ ID NO: 125134 - RNA, 19 nt, Artificial Sequence
  Description of Artificial Sequence: Synthetic oligonucleotide
  Sense strand starting at position 1077 of SEQ ID NO: 1598
cuguauuauccaggaaccu

SEQ ID NO: 125135 - RNA, 19 nt, Artificial Sequence
  Description of Artificial Sequence: Synthetic oligonucleotide
  Antisense strand to SEQ ID NO: 125134
agguuccuggauaauacag

SEQ ID NO: 125136 - RNA, 19 nt, Artificial Sequence
  Description of Artificial Sequence: Synthetic oligonucleotide
  Sense strand starting at position 1078 of SEQ ID NO: 1598
uguauuauccaggaaccuc

SEQ ID NO: 125137 - RNA, 19 nt, Artificial Sequence
  Description of Artificial Sequence: Synthetic oligonucleotide
  Antisense strand to SEQ ID NO: 125136
gagguuccuggauaauaca

SEQ ID NO: 125138 - RNA, 19 nt, Artificial Sequence
  Description of Artificial Sequence: Synthetic oligonucleotide
  Sense strand starting at position 1215 of SEQ ID NO: 1598
acagaauugugccuaauaa

SEQ ID NO: 125139 - RNA, 19 nt, Artificial Sequence
  Description of Artificial Sequence: Synthetic oligonucleotide
  Antisense strand to SEQ ID NO: 125138
uuauuaggcacaauucugu

SEQ ID NO: 125140 - RNA, 19 nt, Artificial Sequence
  Description of Artificial Sequence: Synthetic oligonucleotide
  Sense strand starting at position 1340 of SEQ ID NO: 1598
aggccuucuggaugacauu

SEQ ID NO: 125141 - RNA, 19 nt, Artificial Sequence
  Description of Artificial Sequence: Synthetic oligonucleotide
  Antisense strand to SEQ ID NO: 125140
aaugucauccagaaggccu

SEQ ID NO: 125142 - RNA, 19 nt, Artificial Sequence
  Description of Artificial Sequence: Synthetic oligonucleotide
  Sense strand starting at position 1517 of SEQ ID NO: 1598
ggucauguauuauuuguua

SEQ ID NO: 125143 - RNA, 19 nt, Artificial Sequence
  Description of Artificial Sequence: Synthetic oligonucleotide
  Antisense strand to SEQ ID NO: 125142
uaacaaauaauacaugacc

SEQ ID NO: 125144 - RNA, 19 nt, Artificial Sequence
  Description of Artificial Sequence: Synthetic oligonucleotide
  Sense strand starting at position 1628 of SEQ ID NO: 1598
acaaauguguaucuacgaa

SEQ ID NO: 125145 - RNA, 19 nt, Artificial Sequence
  Description of Artificial Sequence: Synthetic oligonucleotide
  Antisense strand to SEQ ID NO: 125144
uucguagauacacauuugu

SEQ ID NO: 125146 - RNA, 19 nt, Artificial Sequence
  Description of Artificial Sequence: Synthetic oligonucleotide
  Sense strand starting at position 1719 of SEQ ID NO: 1598
gcuagcccuggagaugauu

SEQ ID NO: 125147 - RNA, 19 nt, Artificial Sequence
  Description of Artificial Sequence: Synthetic oligonucleotide
  Antisense strand to SEQ ID NO: 125146
aaucaucuccagggcuagc

SEQ ID NO: 125148 - RNA, 19 nt, Artificial Sequence
  Description of Artificial Sequence: Synthetic oligonucleotide
  Sense strand starting at position 1740 of SEQ ID NO: 1598
ggaguauaauucccagauc

SEQ ID NO: 125149 - RNA, 19 nt, Artificial Sequence
  Description of Artificial Sequence: Synthetic oligonucleotide
  Antisense strand to SEQ ID NO: 125148
gaucugggaauuauacucc

SEQ ID NO: 125150 - RNA, 19 nt, Artificial Sequence
  Description of Artificial Sequence: Synthetic oligonucleotide
  Sense strand starting at position 1903 of SEQ ID NO: 1598
caggcacugcuagauguau

SEQ ID NO: 125151 - RNA, 19 nt, Artificial Sequence
  Description of Artificial Sequence: Synthetic oligonucleotide
  Antisense strand to SEQ ID NO: 125150
auacaucuagcagugccug

SEQ ID NO: 125152 - RNA, 19 nt, Artificial Sequence
  Description of Artificial Sequence: Synthetic oligonucleotide
  Sense strand starting at position 2030 of SEQ ID NO: 1598
uugacagacgcuuacuaga

SEQ ID NO: 125153 - RNA, 19 nt, Artificial Sequence
  Description of Artificial Sequence: Synthetic oligonucleotide
  Antisense strand to SEQ ID NO: 125152
ucuaguaagcgucugucaa

SEQ ID NO: 125154 - RNA, 19 nt, Artificial Sequence
  Description of Artificial Sequence: Synthetic oligonucleotide
  Sense strand starting at position 2032 of SEQ ID NO: 1598
gacagacgcuuacuagaga

SEQ ID NO: 125155 - RNA, 19 nt, Artificial Sequence
  Description of Artificial Sequence: Synthetic oligonucleotide
  Antisense strand to SEQ ID NO: 125154
ucucuaguaagcgucuguc

SEQ ID NO: 125156 - RNA, 19 nt, Artificial Sequence
  Description of Artificial Sequence: Synthetic oligonucleotide
  Sense strand starting at position 2037 of SEQ ID NO: 1598
acgcuuacuagagaauguu

SEQ ID NO: 125157 - RNA, 19 nt, Artificial Sequence
  Description of Artificial Sequence: Synthetic oligonucleotide
  Antisense strand to SEQ ID NO: 125156
aacauucucuaguaagcgu

SEQ ID NO: 125158 - RNA, 19 nt, Artificial Sequence
  Description of Artificial Sequence: Synthetic oligonucleotide
  Sense strand starting at position 2140 of SEQ ID NO: 1598
gucuguacugaacacguaa

SEQ ID NO: 125159 - RNA, 19 nt, Artificial Sequence
  Description of Artificial Sequence: Synthetic oligonucleotide
  Antisense strand to SEQ ID NO: 125158
uuacguguucaguacagac

SEQ ID NO: 125160 - RNA, 19 nt, Artificial Sequence
  Description of Artificial Sequence: Synthetic oligonucleotide
  Sense strand starting at position 2309 of SEQ ID NO: 1598
auauuagggacuugagcuu

SEQ ID NO: 125161 - RNA, 19 nt, Artificial Sequence
  Description of Artificial Sequence: Synthetic oligonucleotide
  Antisense strand to SEQ ID NO: 125160
aagcucaagucccuaauau

SEQ ID NO: 125162 - RNA, 19 nt, Artificial Sequence
  Description of Artificial Sequence: Synthetic oligonucleotide
  Sense strand starting at position 2320 of SEQ ID NO: 1598
uugagcuuccaugaauguu

SEQ ID NO: 125163 - RNA, 19 nt, Artificial Sequence
  Description of Artificial Sequence: Synthetic oligonucleotide
  Antisense strand to SEQ ID NO: 125162
aacauucauggaagcucaa

SEQ ID NO: 125164 - RNA, 19 nt, Artificial Sequence
  Description of Artificial Sequence: Synthetic oligonucleotide
  Sense strand starting at position 2794 of SEQ ID NO: 1598
cuugguucacuaggugaga

SEQ ID NO: 125165 - RNA, 19 nt, Artificial Sequence
  Description of Artificial Sequence: Synthetic oligonucleotide
  Antisense strand to SEQ ID NO: 125164
ucucaccuagugaaccaag

SEQ ID NO: 125166 - RNA, 19 nt, Artificial Sequence
  Description of Artificial Sequence: Synthetic oligonucleotide
  Sense strand starting at position 2795 of SEQ ID NO: 1598
uugguucacuaggugagau

SEQ ID NO: 125167 - RNA, 19 nt, Artificial Sequence
  Description of Artificial Sequence: Synthetic oligonucleotide
  Antisense strand to SEQ ID NO: 125166
aucucaccuagugaaccaa

SEQ ID NO: 125168 - RNA, 19 nt, Artificial Sequence
  Description of Artificial Sequence: Synthetic oligonucleotide
  Sense strand starting at position 2916 of SEQ ID NO: 1598
cagugaucucauggaucac

SEQ ID NO: 125169 - RNA, 19 nt, Artificial Sequence
  Description of Artificial Sequence: Synthetic oligonucleotide
  Antisense strand to SEQ ID NO: 125168
gugauccaugagaucacug

SEQ ID NO: 125170 - RNA, 19 nt, Artificial Sequence
  Description of Artificial Sequence: Synthetic oligonucleotide
  Sense strand starting at position 3342 of SEQ ID NO: 1598
ugagguguuuauuuaguuu

SEQ ID NO: 125171 - RNA, 19 nt, Artificial Sequence
  Description of Artificial Sequence: Synthetic oligonucleotide
  Antisense strand to SEQ ID NO: 125170
aaacuaaauaaacaccuca

SEQ ID NO: 125172 - RNA, 19 nt, Artificial Sequence
  Description of Artificial Sequence: Synthetic oligonucleotide
  Sense strand starting at position 3345 of SEQ ID NO: 1598
gguguuuauuuaguuuagu

SEQ ID NO: 125173 - RNA, 19 nt, Artificial Sequence
  Description of Artificial Sequence: Synthetic oligonucleotide
  Antisense strand to SEQ ID NO: 125172
acuaaacuaaauaaacacc

SEQ ID NO: 125174 - RNA, 19 nt, Artificial Sequence
  Description of Artificial Sequence: Synthetic oligonucleotide
  Sense strand starting at position 3371 of SEQ ID NO: 1598
gccagaagagcucaagugu

SEQ ID NO: 125175 - RNA, 19 nt, Artificial Sequence
  Description of Artificial Sequence: Synthetic oligonucleotide
  Antisense strand to SEQ ID NO: 125174
acacuugagcucuucuggc

SEQ ID NO: 125176 - RNA, 19 nt, Artificial Sequence
  Description of Artificial Sequence: Synthetic oligonucleotide
  Sense strand starting at position 3393 of SEQ ID NO: 1598
ugagguaucuaucuuuauu

SEQ ID NO: 125177 - RNA, 19 nt, Artificial Sequence
  Description of Artificial Sequence: Synthetic oligonucleotide
  Antisense strand to SEQ ID NO: 125176
aauaaagauagauaccuca

SEQ ID NO: 125178 - RNA, 19 nt, Artificial Sequence
  Description of Artificial Sequence: Synthetic oligonucleotide
  Sense strand starting at position 3395 of SEQ ID NO: 1598
agguaucuaucuuuauuag

SEQ ID NO: 125179 - RNA, 19 nt, Artificial Sequence
  Description of Artificial Sequence: Synthetic oligonucleotide
  Antisense strand to SEQ ID NO: 125178
cuaauaaagauagauaccu

SEQ ID NO: 125180 - RNA, 19 nt, Artificial Sequence
  Description of Artificial Sequence: Synthetic oligonucleotide
  Sense strand starting at position 3410 of SEQ ID NO: 1598
uuagguauguacuuacuga

SEQ ID NO: 125181 - RNA, 19 nt, Artificial Sequence
  Description of Artificial Sequence: Synthetic oligonucleotide
  Antisense strand to SEQ ID NO: 125180
ucaguaaguacauaccuaa

SEQ ID NO: 125182 - RNA, 19 nt, Artificial Sequence
  Description of Artificial Sequence: Synthetic oligonucleotide
  Sense strand starting at position 3427 of SEQ ID NO: 1598
gagugcccucuggaucuaa

SEQ ID NO: 125183 - RNA, 19 nt, Artificial Sequence
  Description of Artificial Sequence: Synthetic oligonucleotide
  Antisense strand to SEQ ID NO: 125182
uuagauccagagggcacuc

SEQ ID NO: 125184 - RNA, 19 nt, Artificial Sequence
  Description of Artificial Sequence: Synthetic oligonucleotide
  Sense strand starting at position 3531 of SEQ ID NO: 1598
acuuucuagccaggaaauc

SEQ ID NO: 125185 - RNA, 19 nt, Artificial Sequence
  Description of Artificial Sequence: Synthetic oligonucleotide
  Antisense strand to SEQ ID NO: 125184
gauuuccuggcuagaaagu

SEQ ID NO: 125186 - RNA, 19 nt, Artificial Sequence
  Description of Artificial Sequence: Synthetic oligonucleotide
  Sense strand starting at position 3600 of SEQ ID NO: 1598
ggauaugggcuguggugaa

SEQ ID NO: 125187 - RNA, 19 nt, Artificial Sequence
  Description of Artificial Sequence: Synthetic oligonucleotide
  Antisense strand to SEQ ID NO: 125186
uucaccacagcccauaucc

SEQ ID NO: 125188 - RNA, 19 nt, Artificial Sequence
  Description of Artificial Sequence: Synthetic oligonucleotide
  Sense strand starting at position 3604 of SEQ ID NO: 1598
augggcuguggugaacaua

SEQ ID NO: 125189 - RNA, 19 nt, Artificial Sequence
  Description of Artificial Sequence: Synthetic oligonucleotide
  Antisense strand to SEQ ID NO: 125188
uauguucaccacagcccau

SEQ ID NO: 125190 - RNA, 19 nt, Artificial Sequence
  Description of Artificial Sequence: Synthetic oligonucleotide
  Sense strand starting at position 3725 of SEQ ID NO: 1598
uagauagggucucuccuaa

SEQ ID NO: 125191 - RNA, 19 nt, Artificial Sequence
  Description of Artificial Sequence: Synthetic oligonucleotide
  Antisense strand to SEQ ID NO: 125190
uuaggagagacccuaucua

SEQ ID NO: 125192 - RNA, 19 nt, Artificial Sequence
  Description of Artificial Sequence: Synthetic oligonucleotide
  Sense strand starting at position 3814 of SEQ ID NO: 1598
cccauccuauggucugaau

SEQ ID NO: 125193 - RNA, 19 nt, Artificial Sequence
  Description of Artificial Sequence: Synthetic oligonucleotide
  Antisense strand to SEQ ID NO: 125192
auucagaccauaggauggg

SEQ ID NO: 125194 - RNA, 19 nt, Artificial Sequence
  Description of Artificial Sequence: Synthetic oligonucleotide
  Sense strand starting at position 3927 of SEQ ID NO: 1599
uguugaucccguugguagu

SEQ ID NO: 125195 - RNA, 19 nt, Artificial Sequence
  Description of Artificial Sequence: Synthetic oligonucleotide
  Antisense strand to SEQ ID NO: 125194
acuaccaacgggaucaaca

SEQ ID NO: 125196 - RNA, 19 nt, Artificial Sequence
  Description of Artificial Sequence: Synthetic oligonucleotide
  Sense strand starting at position 3861 of SEQ ID NO: 1599
uguauugcccaaggucaua

SEQ ID NO: 125197 - RNA, 19 nt, Artificial Sequence
  Description of Artificial Sequence: Synthetic oligonucleotide
  Antisense strand to SEQ ID NO: 125196
uaugaccuugggcaauaca

SEQ ID NO: 125198 - RNA, 19 nt, Artificial Sequence
  Description of Artificial Sequence: Synthetic oligonucleotide
  Sense strand starting at position 3811 of SEQ ID NO: 1599
uggaauguuaccugguuac

SEQ ID NO: 125199 - RNA, 19 nt, Artificial Sequence
  Description of Artificial Sequence: Synthetic oligonucleotide
  Antisense strand to SEQ ID NO: 125198
guaaccagguaacauucca

SEQ ID NO: 125200 - RNA, 19 nt, Artificial Sequence
  Description of Artificial Sequence: Synthetic oligonucleotide
  Sense strand starting at position 3810 of SEQ ID NO: 1599
uuggaauguuaccugguua

SEQ ID NO: 125201 - RNA, 19 nt, Artificial Sequence
  Description of Artificial Sequence: Synthetic oligonucleotide
  Antisense strand to SEQ ID NO: 125200
uaaccagguaacauuccaa

SEQ ID NO: 125202 - RNA, 19 nt, Artificial Sequence
  Description of Artificial Sequence: Synthetic oligonucleotide
  Sense strand starting at position 3809 of SEQ ID NO: 1599
uuuggaauguuaccugguu

SEQ ID NO: 125203 - RNA, 19 nt, Artificial Sequence
  Description of Artificial Sequence: Synthetic oligonucleotide
  Antisense strand to SEQ ID NO: 125202
aaccagguaacauuccaaa

SEQ ID NO: 125204 - RNA, 19 nt, Artificial Sequence
  Description of Artificial Sequence: Synthetic oligonucleotide
  Sense strand starting at position 3801 of SEQ ID NO: 1599
uagccagauuuggaauguu

SEQ ID NO: 125205 - RNA, 19 nt, Artificial Sequence
  Description of Artificial Sequence: Synthetic oligonucleotide
  Antisense strand to SEQ ID NO: 125204
aacauuccaaaucuggcua

SEQ ID NO: 125206 - RNA, 19 nt, Artificial Sequence
  Description of Artificial Sequence: Synthetic oligonucleotide
  Sense strand starting at position 3693 of SEQ ID NO: 1599
ugagguacuuuacaagaua

SEQ ID NO: 125207 - RNA, 19 nt, Artificial Sequence
  Description of Artificial Sequence: Synthetic oligonucleotide
  Antisense strand to SEQ ID NO: 125206
uaucuuguaaaguaccuca

SEQ ID NO: 125208 - RNA, 19 nt, Artificial Sequence
  Description of Artificial Sequence: Synthetic oligonucleotide
  Sense strand starting at position 3676 of SEQ ID NO: 1599
ucccaaaggugauaaauug

SEQ ID NO: 125209 - RNA, 19 nt, Artificial Sequence
  Description of Artificial Sequence: Synthetic oligonucleotide
  Antisense strand to SEQ ID NO: 125208
caauuuaucaccuuuggga

SEQ ID NO: 125210 - RNA, 19 nt, Artificial Sequence
  Description of Artificial Sequence: Synthetic oligonucleotide
  Sense strand starting at position 3671 of SEQ ID NO: 1599
gggcuucccaaaggugaua

SEQ ID NO: 125211 - RNA, 19 nt, Artificial Sequence
  Description of Artificial Sequence: Synthetic oligonucleotide
  Antisense strand to SEQ ID NO: 125210
uaucaccuuugggaagccc

SEQ ID NO: 125212 - RNA, 19 nt, Artificial Sequence
  Description of Artificial Sequence: Synthetic oligonucleotide
  Sense strand starting at position 3585 of SEQ ID NO: 1599
cguagugccuggcuaaaua

SEQ ID NO: 125213 - RNA, 19 nt, Artificial Sequence
  Description of Artificial Sequence: Synthetic oligonucleotide
  Antisense strand to SEQ ID NO: 125212
uauuuagccaggcacuacg

SEQ ID NO: 125214 - RNA, 19 nt, Artificial Sequence
  Description of Artificial Sequence: Synthetic oligonucleotide
  Sense strand starting at position 3558 of SEQ ID NO: 1599
ucaguuuccuaagcuguua

SEQ ID NO: 125215 - RNA, 19 nt, Artificial Sequence
  Description of Artificial Sequence: Synthetic oligonucleotide
  Antisense strand to SEQ ID NO: 125214
uaacagcuuaggaaacuga

SEQ ID NO: 125216 - RNA, 19 nt, Artificial Sequence
  Description of Artificial Sequence: Synthetic oligonucleotide
  Sense strand starting at position 3218 of SEQ ID NO: 1599
guguuaaucuuagaaauac

SEQ ID NO: 125217 - RNA, 19 nt, Artificial Sequence
  Description of Artificial Sequence: Synthetic oligonucleotide
  Antisense strand to SEQ ID NO: 125216
guauuucuaagauuaacac

SEQ ID NO: 125218 - RNA, 19 nt, Artificial Sequence
  Description of Artificial Sequence: Synthetic oligonucleotide
  Sense strand starting at position 3210 of SEQ ID NO: 1599
aggagaugguguuaaucuu

SEQ ID NO: 125219 - RNA, 19 nt, Artificial Sequence
  Description of Artificial Sequence: Synthetic oligonucleotide
  Antisense strand to SEQ ID NO: 125218
aagauuaacaccaucuccu

SEQ ID NO: 125220 - RNA, 19 nt, Artificial Sequence
  Description of Artificial Sequence: Synthetic oligonucleotide
  Sense strand starting at position 3205 of SEQ ID NO: 1599
uaguuaggagaugguguua

SEQ ID NO: 125221 - RNA, 19 nt, Artificial Sequence
  Description of Artificial Sequence: Synthetic oligonucleotide
  Antisense strand to SEQ ID NO: 125220
uaacaccaucuccuaacua

SEQ ID NO: 125222 - RNA, 19 nt, Artificial Sequence
  Description of Artificial Sequence: Synthetic oligonucleotide
  Sense strand starting at position 3204 of SEQ ID NO: 1599
auaguuaggagaugguguu

SEQ ID NO: 125223 - RNA, 19 nt, Artificial Sequence
  Description of Artificial Sequence: Synthetic oligonucleotide
  Antisense strand to SEQ ID NO: 125222
aacaccaucuccuaacuau

SEQ ID NO: 125224 - RNA, 19 nt, Artificial Sequence
  Description of Artificial Sequence: Synthetic oligonucleotide
  Sense strand starting at position 3199 of SEQ ID NO: 1599
auuuaauaguuaggagaug

SEQ ID NO: 125225 - RNA, 19 nt, Artificial Sequence
  Description of Artificial Sequence: Synthetic oligonucleotide
  Antisense strand to SEQ ID NO: 125224
caucuccuaacuauuaaau

SEQ ID NO: 125226 - RNA, 19 nt, Artificial Sequence
  Description of Artificial Sequence: Synthetic oligonucleotide
  Sense strand starting at position 3180 of SEQ ID NO: 1599
ugaucauucugaugaagau

SEQ ID NO: 125227 - RNA, 19 nt, Artificial Sequence
  Description of Artificial Sequence: Synthetic oligonucleotide
  Antisense strand to SEQ ID NO: 125226
aucuucaucagaaugauca

SEQ ID NO: 125228 - RNA, 19 nt, Artificial Sequence
  Description of Artificial Sequence: Synthetic oligonucleotide
  Sense strand starting at position 3174 of SEQ ID NO: 1599
ggguuaugaucauucugau

SEQ ID NO: 125229 - RNA, 19 nt, Artificial Sequence
  Description of Artificial Sequence: Synthetic oligonucleotide
  Antisense strand to SEQ ID NO: 125228
aucagaaugaucauaaccc

SEQ ID NO: 125230 - RNA, 19 nt, Artificial Sequence
  Description of Artificial Sequence: Synthetic oligonucleotide
  Sense strand starting at position 3136 of SEQ ID NO: 1599
cgccgaaugcuccaucaag

SEQ ID NO: 125231 - RNA, 19 nt, Artificial Sequence
  Description of Artificial Sequence: Synthetic oligonucleotide
  Antisense strand to SEQ ID NO: 125230
cuugauggagcauucggcg

SEQ ID NO: 125232 - RNA, 19 nt, Artificial Sequence
  Description of Artificial Sequence: Synthetic oligonucleotide
  Sense strand starting at position 3108 of SEQ ID NO: 1599
uggagauacuaguaagaua

SEQ ID NO: 125233 - RNA, 19 nt, Artificial Sequence
  Description of Artificial Sequence: Synthetic oligonucleotide
  Antisense strand to SEQ ID NO: 125232
uaucuuacuaguaucucca

SEQ ID NO: 125234 - RNA, 19 nt, Artificial Sequence
  Description of Artificial Sequence: Synthetic oligonucleotide
  Sense strand starting at position 3098 of SEQ ID NO: 1599
aacgaacucuuggagauac

SEQ ID NO: 125235 - RNA, 19 nt, Artificial Sequence
  Description of Artificial Sequence: Synthetic oligonucleotide
  Antisense strand to SEQ ID NO: 125234
guaucuccaagaguucguu

SEQ ID NO: 125236 - RNA, 19 nt, Artificial Sequence
  Description of Artificial Sequence: Synthetic oligonucleotide
  Sense strand starting at position 3042 of SEQ ID NO: 1599
gguagcuucgaagaaguua

SEQ ID NO: 125237 - RNA, 19 nt, Artificial Sequence
  Description of Artificial Sequence: Synthetic oligonucleotide
  Antisense strand to SEQ ID NO: 125236
uaacuucuucgaagcuacc

SEQ ID NO: 125238 - RNA, 19 nt, Artificial Sequence
  Description of Artificial Sequence: Synthetic oligonucleotide
  Sense strand starting at position 3035 of SEQ ID NO: 1599
ccuguuugguagcuucgaa

SEQ ID NO: 125239 - RNA, 19 nt, Artificial Sequence
  Description of Artificial Sequence: Synthetic oligonucleotide
  Antisense strand to SEQ ID NO: 125238
uucgaagcuaccaaacagg

SEQ ID NO: 125240 - RNA, 19 nt, Artificial Sequence
  Description of Artificial Sequence: Synthetic oligonucleotide
  Sense strand starting at position 2959 of SEQ ID NO: 1599
ggcggucugacgggaacau

SEQ ID NO: 125241 - RNA, 19 nt, Artificial Sequence
  Description of Artificial Sequence: Synthetic oligonucleotide
  Antisense strand to SEQ ID NO: 125240
auguucccgucagaccgcc

SEQ ID NO: 125242 - RNA, 19 nt, Artificial Sequence
  Description of Artificial Sequence: Synthetic oligonucleotide
  Sense strand starting at position 2895 of SEQ ID NO: 1599
gacagcuguacguguggaa

SEQ ID NO: 125243 - RNA, 19 nt, Artificial Sequence
  Description of Artificial Sequence: Synthetic oligonucleotide
  Antisense strand to SEQ ID NO: 125242
uuccacacguacagcuguc

SEQ ID NO: 125244 - RNA, 19 nt, Artificial Sequence
  Description of Artificial Sequence: Synthetic oligonucleotide
  Sense strand starting at position 2885 of SEQ ID NO: 1599
cagaguauccgacagcugu

SEQ ID NO: 125245 - RNA, 19 nt, Artificial Sequence
  Description of Artificial Sequence: Synthetic oligonucleotide
  Antisense strand to SEQ ID NO: 125244
acagcugucggauacucug

SEQ ID NO: 125246 - RNA, 19 nt, Artificial Sequence
  Description of Artificial Sequence: Synthetic oligonucleotide
  Sense strand starting at position 2842 of SEQ ID NO: 1599
agugguguuuaacugggau

SEQ ID NO: 125247 - RNA, 19 nt, Artificial Sequence
  Description of Artificial Sequence: Synthetic oligonucleotide
  Antisense strand to SEQ ID NO: 125246
aucccaguuaaacaccacu

SEQ ID NO: 125248 - RNA, 19 nt, Artificial Sequence
  Description of Artificial Sequence: Synthetic oligonucleotide
  Sense strand starting at position 2698 of SEQ ID NO: 1599
agaggugugcguucaguuu

SEQ ID NO: 125249 - RNA, 19 nt, Artificial Sequence
  Description of Artificial Sequence: Synthetic oligonucleotide
  Antisense strand to SEQ ID NO: 125248
aaacugaacgcacaccucu

SEQ ID NO: 125250 - RNA, 19 nt, Artificial Sequence
  Description of Artificial Sequence: Synthetic oligonucleotide
  Sense strand starting at position 2691 of SEQ ID NO: 1599
guucuaaagaggugugcgu

SEQ ID NO: 125251 - RNA, 19 nt, Artificial Sequence
  Description of Artificial Sequence: Synthetic oligonucleotide
  Antisense strand to SEQ ID NO: 125250
acgcacaccucuuuagaac

SEQ ID NO: 125252 - RNA, 19 nt, Artificial Sequence
  Description of Artificial Sequence: Synthetic oligonucleotide
  Sense strand starting at position 2687 of SEQ ID NO: 1599
caguguucuaaagaggugu

SEQ ID NO: 125253 - RNA, 19 nt, Artificial Sequence
  Description of Artificial Sequence: Synthetic oligonucleotide
  Antisense strand to SEQ ID NO: 125252
acaccucuuuagaacacug

SEQ ID NO: 125254 - RNA, 19 nt, Artificial Sequence
  Description of Artificial Sequence: Synthetic oligonucleotide
  Sense strand starting at position 2681 of SEQ ID NO: 1599
cguugucaguguucuaaag

SEQ ID NO: 125255 - RNA, 19 nt, Artificial Sequence
  Description of Artificial Sequence: Synthetic oligonucleotide
  Antisense strand to SEQ ID NO: 125254
cuuuagaacacugacaacg

SEQ ID NO: 125256 - RNA, 19 nt, Artificial Sequence
  Description of Artificial Sequence: Synthetic oligonucleotide
  Sense strand starting at position 2679 of SEQ ID NO: 1599
agcguugucaguguucuaa

SEQ ID NO: 125257 - RNA, 19 nt, Artificial Sequence
  Description of Artificial Sequence: Synthetic oligonucleotide
  Antisense strand to SEQ ID NO: 125256
uuagaacacugacaacgcu

SEQ ID NO: 125258 - RNA, 19 nt, Artificial Sequence
  Description of Artificial Sequence: Synthetic oligonucleotide
  Sense strand starting at position 2648 of SEQ ID NO: 1599
ggccggguucgugcauuaa

SEQ ID NO: 125259 - RNA, 19 nt, Artificial Sequence
  Description of Artificial Sequence: Synthetic oligonucleotide
  Antisense strand to SEQ ID NO: 125258
uuaaugcacgaacccggcc

SEQ ID NO: 125260 - RNA, 19 nt, Artificial Sequence
  Description of Artificial Sequence: Synthetic oligonucleotide
  Sense strand starting at position 2630 of SEQ ID NO: 1599
gcgggauucacucgaggug

SEQ ID NO: 125261 - RNA, 19 nt, Artificial Sequence
  Description of Artificial Sequence: Synthetic oligonucleotide
  Antisense strand to SEQ ID NO: 125260
caccucgagugaaucccgc

SEQ ID NO: 125262 - RNA, 19 nt, Artificial Sequence
  Description of Artificial Sequence: Synthetic oligonucleotide
  Sense strand starting at position 2531 of SEQ ID NO: 1599
cgggcucagcgaaguuguu

SEQ ID NO: 125263 - RNA, 19 nt, Artificial Sequence
  Description of Artificial Sequence: Synthetic oligonucleotide
  Antisense strand to SEQ ID NO: 125262
aacaacuucgcugagcccg

SEQ ID NO: 125264 - RNA, 19 nt, Artificial Sequence
  Description of Artificial Sequence: Synthetic oligonucleotide
  Sense strand starting at position 2055 of SEQ ID NO: 1599
gugccuugugggaguggua

SEQ ID NO: 125265 - RNA, 19 nt, Artificial Sequence
  Description of Artificial Sequence: Synthetic oligonucleotide
  Antisense strand to SEQ ID NO: 125264
uaccacucccacaaggcac

SEQ ID NO: 125266 - RNA, 19 nt, Artificial Sequence
  Description of Artificial Sequence: Synthetic oligonucleotide
  Sense strand starting at position 1987 of SEQ ID NO: 1599
cgggaaauguagucugggu

SEQ ID NO: 125267 - RNA, 19 nt, Artificial Sequence
  Description of Artificial Sequence: Synthetic oligonucleotide
  Antisense strand to SEQ ID NO: 125266
acccagacuacauuucccg

SEQ ID NO: 125268 - RNA, 19 nt, Artificial Sequence
  Description of Artificial Sequence: Synthetic oligonucleotide
  Sense strand starting at position 213 of SEQ ID NO: 1599
cgagaaagucggugcccuu

SEQ ID NO: 125269 - RNA, 19 nt, Artificial Sequence
  Description of Artificial Sequence: Synthetic oligonucleotide
  Antisense strand to SEQ ID NO: 125268
aagggcaccgacuuucucg

SEQ ID NO: 125270 - RNA, 19 nt, Artificial Sequence
  Description of Artificial Sequence: Synthetic oligonucleotide
  Sense strand starting at position 14 of SEQ ID NO: 1599
gccguauugcuguuuauuc

SEQ ID NO: 125271 - RNA, 19 nt, Artificial Sequence
  Description of Artificial Sequence: Synthetic oligonucleotide
  Antisense strand to SEQ ID NO: 125270
gaauaaacagcaauacggc

SEQ ID NO: 125272 - RNA, 19 nt, Artificial Sequence
  Description of Artificial Sequence: Synthetic oligonucleotide
  Sense strand starting at position 13 of SEQ ID NO: 1599
ugccguauugcuguuuauu

SEQ ID NO: 125273 - RNA, 19 nt, Artificial Sequence
  Description of Artificial Sequence: Synthetic oligonucleotide
  Antisense strand to SEQ ID NO: 125272
aauaaacagcaauacggca

SEQ ID NO: 125274 - RNA, 19 nt, Artificial Sequence
  Description of Artificial Sequence: Synthetic oligonucleotide
  Sense strand starting at position 3871 of SEQ ID NO: 1600
cucacagugccuuaagcaa

SEQ ID NO: 125275 - RNA, 19 nt, Artificial Sequence
  Description of Artificial Sequence: Synthetic oligonucleotide
  Antisense strand to SEQ ID NO: 125274
uugcuuaaggcacugugag

SEQ ID NO: 125276 - RNA, 19 nt, Artificial Sequence
  Description of Artificial Sequence: Synthetic oligonucleotide
  Sense strand starting at position 3808 of SEQ ID NO: 1600
auuguuacauaagucagaa

SEQ ID NO: 125277 - RNA, 19 nt, Artificial Sequence
  Description of Artificial Sequence: Synthetic oligonucleotide
  Antisense strand to SEQ ID NO: 125276
uucugacuuauguaacaau

SEQ ID NO: 125278 - RNA, 19 nt, Artificial Sequence
  Description of Artificial Sequence: Synthetic oligonucleotide
  Sense strand starting at position 3800 of SEQ ID NO: 1600
gugugauaauuguuacaua

SEQ ID NO: 125279 - RNA, 19 nt, Artificial Sequence
  Description of Artificial Sequence: Synthetic oligonucleotide
  Antisense strand to SEQ ID NO: 125278
uauguaacaauuaucacac

SEQ ID NO: 125280 - RNA, 19 nt, Artificial Sequence
  Description of Artificial Sequence: Synthetic oligonucleotide
  Sense strand starting at position 3790 of SEQ ID NO: 1600
aaaggagggugugugauaa

SEQ ID NO: 125281 - RNA, 19 nt, Artificial Sequence
  Description of Artificial Sequence: Synthetic oligonucleotide
  Antisense strand to SEQ ID NO: 125280
uuaucacacacccuccuuu

SEQ ID NO: 125282 - RNA, 19 nt, Artificial Sequence
  Description of Artificial Sequence: Synthetic oligonucleotide
  Sense strand starting at position 3607 of SEQ ID NO: 1600
gucaaacuucuuggauacu

SEQ ID NO: 125283 - RNA, 19 nt, Artificial Sequence
  Description of Artificial Sequence: Synthetic oligonucleotide
  Antisense strand to SEQ ID NO: 125282
aguauccaagaaguuugac

SEQ ID NO: 125284 - RNA, 19 nt, Artificial Sequence
  Description of Artificial Sequence: Synthetic oligonucleotide
  Sense strand starting at position 3452 of SEQ ID NO: 1600
gaccuaucccaggaggcuu

SEQ ID NO: 125285 - RNA, 19 nt, Artificial Sequence
  Description of Artificial Sequence: Synthetic oligonucleotide
  Antisense strand to SEQ ID NO: 125284
aagccuccugggauagguc

SEQ ID NO: 125286 - RNA, 19 nt, Artificial Sequence
  Description of Artificial Sequence: Synthetic oligonucleotide
  Sense strand starting at position 3420 of SEQ ID NO: 1600
agcaguacccuggagucua

SEQ ID NO: 125287 - RNA, 19 nt, Artificial Sequence
  Description of Artificial Sequence: Synthetic oligonucleotide
  Antisense strand to SEQ ID NO: 125286
uagacuccaggguacugcu

SEQ ID NO: 125288 - RNA, 19 nt, Artificial Sequence
  Description of Artificial Sequence: Synthetic oligonucleotide
  Sense strand starting at position 3343 of SEQ ID NO: 1600
gcuuguucggaugaauugu

SEQ ID NO: 125289 - RNA, 19 nt, Artificial Sequence
  Description of Artificial Sequence: Synthetic oligonucleotide
  Antisense strand to SEQ ID NO: 125288
acaauucauccgaacaagc

SEQ ID NO: 125290 - RNA, 19 nt, Artificial Sequence
  Description of Artificial Sequence: Synthetic oligonucleotide
  Sense strand starting at position 3300 of SEQ ID NO: 1600
caauguccucaguggguaa

SEQ ID NO: 125291 - RNA, 19 nt, Artificial Sequence
  Description of Artificial Sequence: Synthetic oligonucleotide
  Antisense strand to SEQ ID NO: 125290
uuacccacugaggacauug

SEQ ID NO: 125292 - RNA, 19 nt, Artificial Sequence
  Description of Artificial Sequence: Synthetic oligonucleotide
  Sense strand starting at position 3265 of SEQ ID NO: 1600
agauaauuccugggcacaa

SEQ ID NO: 125293 - RNA, 19 nt, Artificial Sequence
  Description of Artificial Sequence: Synthetic oligonucleotide
  Antisense strand to SEQ ID NO: 125292
uugugcccaggaauuaucu

SEQ ID NO: 125294 - RNA, 19 nt, Artificial Sequence
  Description of Artificial Sequence: Synthetic oligonucleotide
  Sense strand starting at position 3200 of SEQ ID NO: 1600
gugcuagauccuuauccua

SEQ ID NO: 125295 - RNA, 19 nt, Artificial Sequence
  Description of Artificial Sequence: Synthetic oligonucleotide
  Antisense strand to SEQ ID NO: 125294
uaggauaaggaucuagcac

SEQ ID NO: 125296 - RNA, 19 nt, Artificial Sequence
  Description of Artificial Sequence: Synthetic oligonucleotide
  Sense strand starting at position 3199 of SEQ ID NO: 1600
agugcuagauccuuauccu

SEQ ID NO: 125297 - RNA, 19 nt, Artificial Sequence
  Description of Artificial Sequence: Synthetic oligonucleotide
  Antisense strand to SEQ ID NO: 125296
aggauaaggaucuagcacu

SEQ ID NO: 125298 - RNA, 19 nt, Artificial Sequence
  Description of Artificial Sequence: Synthetic oligonucleotide
  Sense strand starting at position 3172 of SEQ ID NO: 1600
augucauccugagcuauuc

SEQ ID NO: 125299 - RNA, 19 nt, Artificial Sequence
  Description of Artificial Sequence: Synthetic oligonucleotide
  Antisense strand to SEQ ID NO: 125298
gaauagcucaggaugacau

SEQ ID NO: 125300 - RNA, 19 nt, Artificial Sequence
  Description of Artificial Sequence: Synthetic oligonucleotide
  Sense strand starting at position 3170 of SEQ ID NO: 1600
uuaugucauccugagcuau

SEQ ID NO: 125301 - RNA, 19 nt, Artificial Sequence
  Description of Artificial Sequence: Synthetic oligonucleotide
  Antisense strand to SEQ ID NO: 125300
auagcucaggaugacauaa

SEQ ID NO: 125302 - RNA, 19 nt, Artificial Sequence
  Description of Artificial Sequence: Synthetic oligonucleotide
  Sense strand starting at position 3152 of SEQ ID NO: 1600
ccaacuaaccauugugugu

SEQ ID NO: 125303 - RNA, 19 nt, Artificial Sequence
  Description of Artificial Sequence: Synthetic oligonucleotide
  Antisense strand to SEQ ID NO: 125302
acacacaaugguuaguugg

SEQ ID NO: 125304 - RNA, 19 nt, Artificial Sequence
  Description of Artificial Sequence: Synthetic oligonucleotide
  Sense strand starting at position 3105 of SEQ ID NO: 1600
agaugcucauaguugaauu

SEQ ID NO: 125305 - RNA, 19 nt, Artificial Sequence
  Description of Artificial Sequence: Synthetic oligonucleotide
  Antisense strand to SEQ ID NO: 125304
aauucaacuaugagcaucu

SEQ ID NO: 125306 - RNA, 19 nt, Artificial Sequence
  Description of Artificial Sequence: Synthetic oligonucleotide
  Sense strand starting at position 3100 of SEQ ID NO: 1600
aucagagaugcucauaguu

SEQ ID NO: 125307 - RNA, 19 nt, Artificial Sequence
  Description of Artificial Sequence: Synthetic oligonucleotide
  Antisense strand to SEQ ID NO: 125306
aacuaugagcaucucugau

SEQ ID NO: 125308 - RNA, 19 nt, Artificial Sequence
  Description of Artificial Sequence: Synthetic oligonucleotide
  Sense strand starting at position 2955 of SEQ ID NO: 1600
ugguuuaauugaccaagga

SEQ ID NO: 125309 - RNA, 19 nt, Artificial Sequence
  Description of Artificial Sequence: Synthetic oligonucleotide
  Antisense strand to SEQ ID NO: 125308
uccuuggucaauuaaacca

SEQ ID NO: 125310 - RNA, 19 nt, Artificial Sequence
  Description of Artificial Sequence: Synthetic oligonucleotide
  Sense strand starting at position 2866 of SEQ ID NO: 1600
aggcauacuuuguuaaagu

SEQ ID NO: 125311 - RNA, 19 nt, Artificial Sequence
  Description of Artificial Sequence: Synthetic oligonucleotide
  Antisense strand to SEQ ID NO: 125310
acuuuaacaaaguaugccu

SEQ ID NO: 125312 - RNA, 19 nt, Artificial Sequence
  Description of Artificial Sequence: Synthetic oligonucleotide
  Sense strand starting at position 2865 of SEQ ID NO: 1600
uaggcauacuuuguuaaag

SEQ ID NO: 125313 - RNA, 19 nt, Artificial Sequence
  Description of Artificial Sequence: Synthetic oligonucleotide
  Antisense strand to SEQ ID NO: 125312
cuuuaacaaaguaugccua

SEQ ID NO: 125314 - RNA, 19 nt, Artificial Sequence
  Description of Artificial Sequence: Synthetic oligonucleotide
  Sense strand starting at position 2864 of SEQ ID NO: 1600
cuaggcauacuuuguuaaa

SEQ ID NO: 125315 - RNA, 19 nt, Artificial Sequence
  Description of Artificial Sequence: Synthetic oligonucleotide
  Antisense strand to SEQ ID NO: 125314
uuuaacaaaguaugccuag

SEQ ID NO: 125316 - RNA, 19 nt, Artificial Sequence
  Description of Artificial Sequence: Synthetic oligonucleotide
  Sense strand starting at position 2778 of SEQ ID NO: 1600
acaccaaggagcugugauu

SEQ ID NO: 125317 - RNA, 19 nt, Artificial Sequence
  Description of Artificial Sequence: Synthetic oligonucleotide
  Antisense strand to SEQ ID NO: 125316
aaucacagcuccuuggugu

SEQ ID NO: 125318 - RNA, 19 nt, Artificial Sequence
  Description of Artificial Sequence: Synthetic oligonucleotide
  Sense strand starting at position 2761 of SEQ ID NO: 1600
auaggaagcuuucugagac

SEQ ID NO: 125319 - RNA, 19 nt, Artificial Sequence
  Description of Artificial Sequence: Synthetic oligonucleotide
  Antisense strand to SEQ ID NO: 125318
gucucagaaagcuuccuau

SEQ ID NO: 125320 - RNA, 19 nt, Artificial Sequence
  Description of Artificial Sequence: Synthetic oligonucleotide
  Sense strand starting at position 2737 of SEQ ID NO: 1600
uggaaaguuacguagugaa

SEQ ID NO: 125321 - RNA, 19 nt, Artificial Sequence
  Description of Artificial Sequence: Synthetic oligonucleotide
  Antisense strand to SEQ ID NO: 125320
uucacuacguaacuuucca

SEQ ID NO: 125322 - RNA, 19 nt, Artificial Sequence
  Description of Artificial Sequence: Synthetic oligonucleotide
  Sense strand starting at position 2736 of SEQ ID NO: 1600
uuggaaaguuacguaguga

SEQ ID NO: 125323 - RNA, 19 nt, Artificial Sequence
  Description of Artificial Sequence: Synthetic oligonucleotide
  Antisense strand to SEQ ID NO: 125322
ucacuacguaacuuuccaa

SEQ ID NO: 125324 - RNA, 19 nt, Artificial Sequence
  Description of Artificial Sequence: Synthetic oligonucleotide
  Sense strand starting at position 2098 of SEQ ID NO: 1600
gcugaugcauaucugaaau

SEQ ID NO: 125325 - RNA, 19 nt, Artificial Sequence
  Description of Artificial Sequence: Synthetic oligonucleotide
  Antisense strand to SEQ ID NO: 125324
auuucagauaugcaucagc

SEQ ID NO: 125326 - RNA, 19 nt, Artificial Sequence
  Description of Artificial Sequence: Synthetic oligonucleotide
  Sense strand starting at position 2012 of SEQ ID NO: 1600
auccucccgcgaugaauuu

SEQ ID NO: 125327 - RNA, 19 nt, Artificial Sequence
  Description of Artificial Sequence: Synthetic oligonucleotide
  Antisense strand to SEQ ID NO: 125326
aaauucaucgcgggaggau

SEQ ID NO: 125328 - RNA, 19 nt, Artificial Sequence
  Description of Artificial Sequence: Synthetic oligonucleotide
  Sense strand starting at position 2010 of SEQ ID NO: 1600
uuauccucccgcgaugaau

SEQ ID NO: 125329 - RNA, 19 nt, Artificial Sequence
  Description of Artificial Sequence: Synthetic oligonucleotide
  Antisense strand to SEQ ID NO: 125328
auucaucgcgggaggauaa

SEQ ID NO: 125330 - RNA, 19 nt, Artificial Sequence
  Description of Artificial Sequence: Synthetic oligonucleotide
  Sense strand starting at position 1396 of SEQ ID NO: 1600
gaggcaugccaacgugaaa

SEQ ID NO: 125331 - RNA, 19 nt, Artificial Sequence
  Description of Artificial Sequence: Synthetic oligonucleotide
  Antisense strand to SEQ ID NO: 125330
uuucacguuggcaugccuc

SEQ ID NO: 125332 - RNA, 19 nt, Artificial Sequence
  Description of Artificial Sequence: Synthetic oligonucleotide
  Sense strand starting at position 1159 of SEQ ID NO: 1600
cccagaacuugguugggaa

SEQ ID NO: 125333 - RNA, 19 nt, Artificial Sequence
  Description of Artificial Sequence: Synthetic oligonucleotide
  Antisense strand to SEQ ID NO: 125332
uucccaaccaaguucuggg

SEQ ID NO: 125334 - RNA, 19 nt, Artificial Sequence
  Description of Artificial Sequence: Synthetic oligonucleotide
  Sense strand starting at position 987 of SEQ ID NO: 1600
gcagucuugcaucagacga

SEQ ID NO: 125335 - RNA, 19 nt, Artificial Sequence
  Description of Artificial Sequence: Synthetic oligonucleotide
  Antisense strand to SEQ ID NO: 125334
ucgucugaugcaagacugc

SEQ ID NO: 125336 - RNA, 19 nt, Artificial Sequence
  Description of Artificial Sequence: Synthetic oligonucleotide
  Sense strand starting at position 754 of SEQ ID NO: 1600
ggauaaagauuugaaguag

SEQ ID NO: 125337 - RNA, 19 nt, Artificial Sequence
  Description of Artificial Sequence: Synthetic oligonucleotide
  Antisense strand to SEQ ID NO: 125336
cuacuucaaaucuuuaucc

SEQ ID NO: 125338 - RNA, 19 nt, Artificial Sequence
  Description of Artificial Sequence: Synthetic oligonucleotide
  Sense strand starting at position 479 of SEQ ID NO: 1600
gugguuguggcacaacuaa

SEQ ID NO: 125339 - RNA, 19 nt, Artificial Sequence
  Description of Artificial Sequence: Synthetic oligonucleotide
  Antisense strand to SEQ ID NO: 125338
uuaguugugccacaaccac

SEQ ID NO: 125340 - RNA, 19 nt, Artificial Sequence
  Description of Artificial Sequence: Synthetic oligonucleotide
  Sense strand starting at position 380 of SEQ ID NO: 1600
agagcuggauacuuggaua

SEQ ID NO: 125341 - RNA, 19 nt, Artificial Sequence
  Description of Artificial Sequence: Synthetic oligonucleotide
  Antisense strand to SEQ ID NO: 125340
uauccaaguauccagcucu

SEQ ID NO: 125342 - RNA, 19 nt, Artificial Sequence
  Description of Artificial Sequence: Synthetic oligonucleotide
  Sense strand starting at position 354 of SEQ ID NO: 1600
ggaccaaauucuucugagu

SEQ ID NO: 125343 - RNA, 19 nt, Artificial Sequence
  Description of Artificial Sequence: Synthetic oligonucleotide
  Antisense strand to SEQ ID NO: 125342
acucagaagaauuuggucc

SEQ ID NO: 125344 - RNA, 19 nt, Artificial Sequence
  Description of Artificial Sequence: Synthetic oligonucleotide
  Sense strand starting at position 270 of SEQ ID NO: 1600
ggcuaugcucuugugucau

SEQ ID NO: 125345 - RNA, 19 nt, Artificial Sequence
  Description of Artificial Sequence: Synthetic oligonucleotide
  Antisense strand to SEQ ID NO: 125344
augacacaagagcauagcc

SEQ ID NO: 125346 - RNA, 19 nt, Artificial Sequence
  Description of Artificial Sequence: Synthetic oligonucleotide
  Sense strand starting at position 248 of SEQ ID NO: 1600
ggagcuggauggucuaauu

SEQ ID NO: 125347 - RNA, 19 nt, Artificial Sequence
  Description of Artificial Sequence: Synthetic oligonucleotide
  Antisense strand to SEQ ID NO: 125346
aauuagaccauccagcucc

SEQ ID NO: 125348 - RNA, 19 nt, Artificial Sequence
  Description of Artificial Sequence: Synthetic oligonucleotide
  Sense strand starting at position 184 of SEQ ID NO: 1600
aauucugugcaugaugauu

SEQ ID NO: 125349 - RNA, 19 nt, Artificial Sequence
  Description of Artificial Sequence: Synthetic oligonucleotide
  Antisense strand to SEQ ID NO: 125348
aaucaucaugcacagaauu

SEQ ID NO: 125350 - RNA, 19 nt, Artificial Sequence
  Description of Artificial Sequence: Synthetic oligonucleotide
  Sense strand starting at position 183 of SEQ ID NO: 1600
caauucugugcaugaugau

SEQ ID NO: 125351 - RNA, 19 nt, Artificial Sequence
  Description of Artificial Sequence: Synthetic oligonucleotide
  Antisense strand to SEQ ID NO: 125350
aucaucaugcacagaauug

SEQ ID NO: 125352 - RNA, 19 nt, Artificial Sequence
  Description of Artificial Sequence: Synthetic oligonucleotide
  Sense strand starting at position 179 of SEQ ID NO: 1600
ccaccaauucugugcauga

SEQ ID NO: 125353 - RNA, 19 nt, Artificial Sequence
  Description of Artificial Sequence: Synthetic oligonucleotide
  Antisense strand to SEQ ID NO: 125352
ucaugcacagaauuggugg

SEQ ID NO: 125354 - RNA, 19 nt, Artificial Sequence
  Description of Artificial Sequence: Synthetic oligonucleotide
  Sense strand starting at position 640 of SEQ ID NO: 1601
cuucgccaucugggagaua

SEQ ID NO: 125355 - RNA, 19 nt, Artificial Sequence
  Description of Artificial Sequence: Synthetic oligonucleotide
  Antisense strand to SEQ ID NO: 125354
uaucucccagauggcgaag

SEQ ID NO: 125356 - RNA, 19 nt, Artificial Sequence
  Description of Artificial Sequence: Synthetic oligonucleotide
  Sense strand starting at position 651 of SEQ ID NO: 1601
gggagauacugucuuucua

SEQ ID NO: 125357 - RNA, 19 nt, Artificial Sequence
  Description of Artificial Sequence: Synthetic oligonucleotide
  Antisense strand to SEQ ID NO: 125356
uagaaagacaguaucuccc

SEQ ID NO: 125358 - RNA, 19 nt, Artificial Sequence
  Description of Artificial Sequence: Synthetic oligonucleotide
  Sense strand starting at position 682 of SEQ ID NO: 1601
gcucaaacuuuaugacaag

SEQ ID NO: 125359 - RNA, 19 nt, Artificial Sequence
  Description of Artificial Sequence: Synthetic oligonucleotide
  Antisense strand to SEQ ID NO: 125358
cuugucauaaaguuugagc

SEQ ID NO: 125360 - RNA, 19 nt, Artificial Sequence
  Description of Artificial Sequence: Synthetic oligonucleotide
  Sense strand starting at position 1070 of SEQ ID NO: 1601
gauguccggcucugaagua

SEQ ID NO: 125361 - RNA, 19 nt, Artificial Sequence
  Description of Artificial Sequence: Synthetic oligonucleotide
  Antisense strand to SEQ ID NO: 125360
uacuucagagccggacauc

SEQ ID NO: 125362 - RNA, 19 nt, Artificial Sequence
  Description of Artificial Sequence: Synthetic oligonucleotide
  Sense strand starting at position 1086 of SEQ ID NO: 1601
guagaaugcuaguccucau

SEQ ID NO: 125363 - RNA, 19 nt, Artificial Sequence
  Description of Artificial Sequence: Synthetic oligonucleotide
  Antisense strand to SEQ ID NO: 125362
augaggacuagcauucuac

SEQ ID NO: 125364 - RNA, 19 nt, Artificial Sequence
  Description of Artificial Sequence: Synthetic oligonucleotide
  Sense strand starting at position 1318 of SEQ ID NO: 1601
gggugaucugggcguucca

SEQ ID NO: 125365 - RNA, 19 nt, Artificial Sequence
  Description of Artificial Sequence: Synthetic oligonucleotide
  Antisense strand to SEQ ID NO: 125364
uggaacgcccagaucaccc

SEQ ID NO: 125366 - RNA, 19 nt, Artificial Sequence
  Description of Artificial Sequence: Synthetic oligonucleotide
  Sense strand starting at position 1384 of SEQ ID NO: 1601
cggucaccagcgugaagua

SEQ ID NO: 125367 - RNA, 19 nt, Artificial Sequence
  Description of Artificial Sequence: Synthetic oligonucleotide
  Antisense strand to SEQ ID NO: 125366
uacuucacgcuggugaccg

SEQ ID NO: 125368 - RNA, 19 nt, Artificial Sequence
  Description of Artificial Sequence: Synthetic oligonucleotide
  Sense strand starting at position 2288 of SEQ ID NO: 1601
gcgcaucuccucgauugga

SEQ ID NO: 125369 - RNA, 19 nt, Artificial Sequence
  Description of Artificial Sequence: Synthetic oligonucleotide
  Antisense strand to SEQ ID NO: 125368
uccaaucgaggagaugcgc

SEQ ID NO: 125370 - RNA, 19 nt, Artificial Sequence
  Description of Artificial Sequence: Synthetic oligonucleotide
  Sense strand starting at position 2362 of SEQ ID NO: 1601
uugcauguuaggcgucaga

SEQ ID NO: 125371 - RNA, 19 nt, Artificial Sequence
  Description of Artificial Sequence: Synthetic oligonucleotide
  Antisense strand to SEQ ID NO: 125370
ucugacgccuaacaugcaa

SEQ ID NO: 125372 - RNA, 19 nt, Artificial Sequence
  Description of Artificial Sequence: Synthetic oligonucleotide
  Sense strand starting at position 2455 of SEQ ID NO: 1601
gcccgauuucucugugcag

SEQ ID NO: 125373 - RNA, 19 nt, Artificial Sequence
  Description of Artificial Sequence: Synthetic oligonucleotide
  Antisense strand to SEQ ID NO: 125372
cugcacagagaaaucgggc

SEQ ID NO: 125374 - RNA, 19 nt, Artificial Sequence
  Description of Artificial Sequence: Synthetic oligonucleotide
  Sense strand starting at position 2457 of SEQ ID NO: 1601
ccgauuucucugugcagca

SEQ ID NO: 125375 - RNA, 19 nt, Artificial Sequence
  Description of Artificial Sequence: Synthetic oligonucleotide
  Antisense strand to SEQ ID NO: 125374
ugcugcacagagaaaucgg

SEQ ID NO: 125376 - RNA, 19 nt, Artificial Sequence
  Description of Artificial Sequence: Synthetic oligonucleotide
  Sense strand starting at position 2805 of SEQ ID NO: 1601
ggacuucucccgcauacag

SEQ ID NO: 125377 - RNA, 19 nt, Artificial Sequence
  Description of Artificial Sequence: Synthetic oligonucleotide
  Antisense strand to SEQ ID NO: 125376
cuguaugcgggagaagucc

SEQ ID NO: 125378 - RNA, 19 nt, Artificial Sequence
  Description of Artificial Sequence: Synthetic oligonucleotide
  Sense strand starting at position 2853 of SEQ ID NO: 1601
ucuuucuguucuggcuaga

SEQ ID NO: 125379 - RNA, 19 nt, Artificial Sequence
  Description of Artificial Sequence: Synthetic oligonucleotide
  Antisense strand to SEQ ID NO: 125378
ucuagccagaacagaaaga

SEQ ID NO: 125380 - RNA, 19 nt, Artificial Sequence
  Description of Artificial Sequence: Synthetic oligonucleotide
  Sense strand starting at position 2856 of SEQ ID NO: 1601
uucuguucuggcuagaaua

SEQ ID NO: 125381 - RNA, 19 nt, Artificial Sequence
  Description of Artificial Sequence: Synthetic oligonucleotide
  Antisense strand to SEQ ID NO: 125380
uauucuagccagaacagaa

SEQ ID NO: 125382 - RNA, 19 nt, Artificial Sequence
  Description of Artificial Sequence: Synthetic oligonucleotide
  Sense strand starting at position 2858 of SEQ ID NO: 1601
cuguucuggcuagaauauu

SEQ ID NO: 125383 - RNA, 19 nt, Artificial Sequence
  Description of Artificial Sequence: Synthetic oligonucleotide
  Antisense strand to SEQ ID NO: 125382
aauauucuagccagaacag

SEQ ID NO: 125384 - RNA, 19 nt, Artificial Sequence
  Description of Artificial Sequence: Synthetic oligonucleotide
  Sense strand starting at position 2864 of SEQ ID NO: 1601
uggcuagaauauuguguaa

SEQ ID NO: 125385 - RNA, 19 nt, Artificial Sequence
  Description of Artificial Sequence: Synthetic oligonucleotide
  Antisense strand to SEQ ID NO: 125384
uuacacaauauucuagcca

SEQ ID NO: 125386 - RNA, 19 nt, Artificial Sequence
  Description of Artificial Sequence: Synthetic oligonucleotide
  Sense strand starting at position 2866 of SEQ ID NO: 1601
gcuagaauauuguguaaac

SEQ ID NO: 125387 - RNA, 19 nt, Artificial Sequence
  Description of Artificial Sequence: Synthetic oligonucleotide
  Antisense strand to SEQ ID NO: 125386
guuuacacaauauucuagc

SEQ ID NO: 125388 - RNA, 19 nt, Artificial Sequence
  Description of Artificial Sequence: Synthetic oligonucleotide
  Sense strand starting at position 2867 of SEQ ID NO: 1601
cuagaauauuguguaaaca

SEQ ID NO: 125389 - RNA, 19 nt, Artificial Sequence
  Description of Artificial Sequence: Synthetic oligonucleotide
  Antisense strand to SEQ ID NO: 125388
uguuuacacaauauucuag

SEQ ID NO: 125390 - RNA, 19 nt, Artificial Sequence
  Description of Artificial Sequence: Synthetic oligonucleotide
  Sense strand starting at position 2885 of SEQ ID NO: 1601
acaagagcuuugcagaguu

SEQ ID NO: 125391 - RNA, 19 nt, Artificial Sequence
  Description of Artificial Sequence: Synthetic oligonucleotide
  Antisense strand to SEQ ID NO: 125390
aacucugcaaagcucuugu

SEQ ID NO: 125392 - RNA, 19 nt, Artificial Sequence
  Description of Artificial Sequence: Synthetic oligonucleotide
  Sense strand starting at position 2887 of SEQ ID NO: 1601
aagagcuuugcagaguuga

SEQ ID NO: 125393 - RNA, 19 nt, Artificial Sequence
  Description of Artificial Sequence: Synthetic oligonucleotide
  Antisense strand to SEQ ID NO: 125392
ucaacucugcaaagcucuu

SEQ ID NO: 125394 - RNA, 19 nt, Artificial Sequence
  Description of Artificial Sequence: Synthetic oligonucleotide
  Sense strand starting at position 2956 of SEQ ID NO: 1601
uuuacugaccuccgucaau

SEQ ID NO: 125395 - RNA, 19 nt, Artificial Sequence
  Description of Artificial Sequence: Synthetic oligonucleotide
  Antisense strand to SEQ ID NO: 125394
auugacggaggucaguaaa

SEQ ID NO: 125396 - RNA, 19 nt, Artificial Sequence
  Description of Artificial Sequence: Synthetic oligonucleotide
  Sense strand starting at position 2984 of SEQ ID NO: 1601
ugucgaauaggaggauuaa

SEQ ID NO: 125397 - RNA, 19 nt, Artificial Sequence
  Description of Artificial Sequence: Synthetic oligonucleotide
  Antisense strand to SEQ ID NO: 125396
uuaauccuccuauucgaca

SEQ ID NO: 125398 - RNA, 19 nt, Artificial Sequence
  Description of Artificial Sequence: Synthetic oligonucleotide
  Sense strand starting at position 3021 of SEQ ID NO: 1601
gguuguccugaugaauaag

SEQ ID NO: 125399 - RNA, 19 nt, Artificial Sequence
  Description of Artificial Sequence: Synthetic oligonucleotide
  Antisense strand to SEQ ID NO: 125398
cuuauucaucaggacaacc

SEQ ID NO: 125400 - RNA, 19 nt, Artificial Sequence
  Description of Artificial Sequence: Synthetic oligonucleotide
  Sense strand starting at position 3031 of SEQ ID NO: 1601
augaauaaguuggauaaca

SEQ ID NO: 125401 - RNA, 19 nt, Artificial Sequence
  Description of Artificial Sequence: Synthetic oligonucleotide
  Antisense strand to SEQ ID NO: 125400
uguuauccaacuuauucau

SEQ ID NO: 125402 - RNA, 19 nt, Artificial Sequence
  Description of Artificial Sequence: Synthetic oligonucleotide
  Sense strand starting at position 3042 of SEQ ID NO: 1601
ggauaacauuugugaaaga

SEQ ID NO: 125403 - RNA, 19 nt, Artificial Sequence
  Description of Artificial Sequence: Synthetic oligonucleotide
  Antisense strand to SEQ ID NO: 125402
ucuuucacaaauguuaucc

SEQ ID NO: 125404 - RNA, 19 nt, Artificial Sequence
  Description of Artificial Sequence: Synthetic oligonucleotide
  Sense strand starting at position 3043 of SEQ ID NO: 1601
gauaacauuugugaaagac

SEQ ID NO: 125405 - RNA, 19 nt, Artificial Sequence
  Description of Artificial Sequence: Synthetic oligonucleotide
  Antisense strand to SEQ ID NO: 125404
gucuuucacaaauguuauc

SEQ ID NO: 125406 - RNA, 19 nt, Artificial Sequence
  Description of Artificial Sequence: Synthetic oligonucleotide
  Sense strand starting at position 3073 of SEQ ID NO: 1601
ccugacaacucuugagucu

SEQ ID NO: 125407 - RNA, 19 nt, Artificial Sequence
  Description of Artificial Sequence: Synthetic oligonucleotide
  Antisense strand to SEQ ID NO: 125406
agacucaagaguugucagg

SEQ ID NO: 125408 - RNA, 19 nt, Artificial Sequence
  Description of Artificial Sequence: Synthetic oligonucleotide
  Sense strand starting at position 3080 of SEQ ID NO: 1601
acucuugagucucaagaaa

SEQ ID NO: 125409 - RNA, 19 nt, Artificial Sequence
  Description of Artificial Sequence: Synthetic oligonucleotide
  Antisense strand to SEQ ID NO: 125408
uuucuugagacucaagagu

SEQ ID NO: 125410 - RNA, 19 nt, Artificial Sequence
  Description of Artificial Sequence: Synthetic oligonucleotide
  Sense strand starting at position 3228 of SEQ ID NO: 1601
cccacaguuucuuaaaggu

SEQ ID NO: 125411 - RNA, 19 nt, Artificial Sequence
  Description of Artificial Sequence: Synthetic oligonucleotide
  Antisense strand to SEQ ID NO: 125410
accuuuaagaaacuguggg

SEQ ID NO: 125412 - RNA, 19 nt, Artificial Sequence
  Description of Artificial Sequence: Synthetic oligonucleotide
  Sense strand starting at position 3265 of SEQ ID NO: 1601
auaauagauucuuacggga

SEQ ID NO: 125413 - RNA, 19 nt, Artificial Sequence
  Description of Artificial Sequence: Synthetic oligonucleotide
  Antisense strand to SEQ ID NO: 125412
ucccguaagaaucuauuau

SEQ ID NO: 125414 - RNA, 19 nt, Artificial Sequence
  Description of Artificial Sequence: Synthetic oligonucleotide
  Sense strand starting at position 3267 of SEQ ID NO: 1601
aauagauucuuacgggagu

SEQ ID NO: 125415 - RNA, 19 nt, Artificial Sequence
  Description of Artificial Sequence: Synthetic oligonucleotide
  Antisense strand to SEQ ID NO: 125414
acucccguaagaaucuauu

SEQ ID NO: 125416 - RNA, 19 nt, Artificial Sequence
  Description of Artificial Sequence: Synthetic oligonucleotide
  Sense strand starting at position 3268 of SEQ ID NO: 1601
auagauucuuacgggagua

SEQ ID NO: 125417 - RNA, 19 nt, Artificial Sequence
  Description of Artificial Sequence: Synthetic oligonucleotide
  Antisense strand to SEQ ID NO: 125416
uacucccguaagaaucuau

SEQ ID NO: 125418 - RNA, 19 nt, Artificial Sequence
  Description of Artificial Sequence: Synthetic oligonucleotide
  Sense strand starting at position 3273 of SEQ ID NO: 1601
uucuuacgggaguaaugau

SEQ ID NO: 125419 - RNA, 19 nt, Artificial Sequence
  Description of Artificial Sequence: Synthetic oligonucleotide
  Antisense strand to SEQ ID NO: 125418
aucauuacucccguaagaa

SEQ ID NO: 125420 - RNA, 19 nt, Artificial Sequence
  Description of Artificial Sequence: Synthetic oligonucleotide
  Sense strand starting at position 3445 of SEQ ID NO: 1601
gggaacugucagugucuca

SEQ ID NO: 125421 - RNA, 19 nt, Artificial Sequence
  Description of Artificial Sequence: Synthetic oligonucleotide
  Antisense strand to SEQ ID NO: 125420
ugagacacugacaguuccc

SEQ ID NO: 125422 - RNA, 19 nt, Artificial Sequence
  Description of Artificial Sequence: Synthetic oligonucleotide
  Sense strand starting at position 3450 of SEQ ID NO: 1601
cugucagugucucauccau

SEQ ID NO: 125423 - RNA, 19 nt, Artificial Sequence
  Description of Artificial Sequence: Synthetic oligonucleotide
  Antisense strand to SEQ ID NO: 125422
auggaugagacacugacag

SEQ ID NO: 125424 - RNA, 19 nt, Artificial Sequence
  Description of Artificial Sequence: Synthetic oligonucleotide
  Sense strand starting at position 3452 of SEQ ID NO: 1601
gucagugucucauccauaa

SEQ ID NO: 125425 - RNA, 19 nt, Artificial Sequence
  Description of Artificial Sequence: Synthetic oligonucleotide
  Antisense strand to SEQ ID NO: 125424
uuauggaugagacacugac

SEQ ID NO: 125426 - RNA, 19 nt, Artificial Sequence
  Description of Artificial Sequence: Synthetic oligonucleotide
  Sense strand starting at position 3456 of SEQ ID NO: 1601
gugucucauccauaacucu

SEQ ID NO: 125427 - RNA, 19 nt, Artificial Sequence
  Description of Artificial Sequence: Synthetic oligonucleotide
  Antisense strand to SEQ ID NO: 125426
agaguuauggaugagacac

SEQ ID NO: 125428 - RNA, 19 nt, Artificial Sequence
  Description of Artificial Sequence: Synthetic oligonucleotide
  Sense strand starting at position 3554 of SEQ ID NO: 1601
gggaauagacaguggcauu

SEQ ID NO: 125429 - RNA, 19 nt, Artificial Sequence
  Description of Artificial Sequence: Synthetic oligonucleotide
  Antisense strand to SEQ ID NO: 125428
aaugccacugucuauuccc

SEQ ID NO: 125430 - RNA, 19 nt, Artificial Sequence
  Description of Artificial Sequence: Synthetic oligonucleotide
  Sense strand starting at position 3555 of SEQ ID NO: 1601
ggaauagacaguggcauua

SEQ ID NO: 125431 - RNA, 19 nt, Artificial Sequence
  Description of Artificial Sequence: Synthetic oligonucleotide
  Antisense strand to SEQ ID NO: 125430
uaaugccacugucuauucc

SEQ ID NO: 125432 - RNA, 19 nt, Artificial Sequence
  Description of Artificial Sequence: Synthetic oligonucleotide
  Sense strand starting at position 3557 of SEQ ID NO: 1601
aauagacaguggcauuaaa

SEQ ID NO: 125433 - RNA, 19 nt, Artificial Sequence
  Description of Artificial Sequence: Synthetic oligonucleotide
  Antisense strand to SEQ ID NO: 125432
uuuaaugccacugucuauu

SEQ ID NO: 125434 - RNA, 19 nt, Artificial Sequence
  Description of Artificial Sequence: Synthetic oligonucleotide
  Sense strand starting at position 50 of SEQ ID NO: 1602
acucuaagccagugauuga

SEQ ID NO: 125435 - RNA, 19 nt, Artificial Sequence
  Description of Artificial Sequence: Synthetic oligonucleotide
  Antisense strand to SEQ ID NO: 125434
ucaaucacuggcuuagagu

SEQ ID NO: 125436 - RNA, 19 nt, Artificial Sequence
  Description of Artificial Sequence: Synthetic oligonucleotide
  Sense strand starting at position 53 of SEQ ID NO: 1602
cuaagccagugauugaaua

SEQ ID NO: 125437 - RNA, 19 nt, Artificial Sequence
  Description of Artificial Sequence: Synthetic oligonucleotide
  Antisense strand to SEQ ID NO: 125436
uauucaaucacuggcuuag

SEQ ID NO: 125438 - RNA, 19 nt, Artificial Sequence
  Description of Artificial Sequence: Synthetic oligonucleotide
  Sense strand starting at position 299 of SEQ ID NO: 1602
cccuauuuauaugggacau

SEQ ID NO: 125439 - RNA, 19 nt, Artificial Sequence
  Description of Artificial Sequence: Synthetic oligonucleotide
  Antisense strand to SEQ ID NO: 125438
augucccauauaaauaggg

SEQ ID NO: 125440 - RNA, 19 nt, Artificial Sequence
  Description of Artificial Sequence: Synthetic oligonucleotide
  Sense strand starting at position 388 of SEQ ID NO: 1602
gucacuucucauuaugcuu

SEQ ID NO: 125441 - RNA, 19 nt, Artificial Sequence
  Description of Artificial Sequence: Synthetic oligonucleotide
  Antisense strand to SEQ ID NO: 125440
aagcauaaugagaagugac

SEQ ID NO: 125442 - RNA, 19 nt, Artificial Sequence
  Description of Artificial Sequence: Synthetic oligonucleotide
  Sense strand starting at position 436 of SEQ ID NO: 1602
uaaagaaugccauacuggu

SEQ ID NO: 125443 - RNA, 19 nt, Artificial Sequence
  Description of Artificial Sequence: Synthetic oligonucleotide
  Antisense strand to SEQ ID NO: 125442
accaguauggcauucuuua

SEQ ID NO: 125444 - RNA, 19 nt, Artificial Sequence
  Description of Artificial Sequence: Synthetic oligonucleotide
  Sense strand starting at position 445 of SEQ ID NO: 1602
ccauacugguaguuaaaug

SEQ ID NO: 125445 - RNA, 19 nt, Artificial Sequence
  Description of Artificial Sequence: Synthetic oligonucleotide
  Antisense strand to SEQ ID NO: 125444
cauuuaacuaccaguaugg

SEQ ID NO: 125446 - RNA, 19 nt, Artificial Sequence
  Description of Artificial Sequence: Synthetic oligonucleotide
  Sense strand starting at position 452 of SEQ ID NO: 1602
gguaguuaaaugcagaguu

SEQ ID NO: 125447 - RNA, 19 nt, Artificial Sequence
  Description of Artificial Sequence: Synthetic oligonucleotide
  Antisense strand to SEQ ID NO: 125446
aacucugcauuuaacuacc

SEQ ID NO: 125448 - RNA, 19 nt, Artificial Sequence
  Description of Artificial Sequence: Synthetic oligonucleotide
  Sense strand starting at position 454 of SEQ ID NO: 1602
uaguuaaaugcagaguuua

SEQ ID NO: 125449 - RNA, 19 nt, Artificial Sequence
  Description of Artificial Sequence: Synthetic oligonucleotide
  Antisense strand to SEQ ID NO: 125448
uaaacucugcauuuaacua

SEQ ID NO: 125450 - RNA, 19 nt, Artificial Sequence
  Description of Artificial Sequence: Synthetic oligonucleotide
  Sense strand starting at position 464 of SEQ ID NO: 1602
cagaguuuaccagguaagu

SEQ ID NO: 125451 - RNA, 19 nt, Artificial Sequence
  Description of Artificial Sequence: Synthetic oligonucleotide
  Antisense strand to SEQ ID NO: 125450
acuuaccugguaaacucug

SEQ ID NO: 125452 - RNA, 19 nt, Artificial Sequence
  Description of Artificial Sequence: Synthetic oligonucleotide
  Sense strand starting at position 498 of SEQ ID NO: 1602
auauuaaugcagugaaaca

SEQ ID NO: 125453 - RNA, 19 nt, Artificial Sequence
  Description of Artificial Sequence: Synthetic oligonucleotide
  Antisense strand to SEQ ID NO: 125452
uguuucacugcauuaauau

SEQ ID NO: 125454 - RNA, 19 nt, Artificial Sequence
  Description of Artificial Sequence: Synthetic oligonucleotide
  Sense strand starting at position 542 of SEQ ID NO: 1602
accuuaaucugagucuguu

SEQ ID NO: 125455 - RNA, 19 nt, Artificial Sequence
  Description of Artificial Sequence: Synthetic oligonucleotide
  Antisense strand to SEQ ID NO: 125454
aacagacucagauuaaggu

SEQ ID NO: 125456 - RNA, 19 nt, Artificial Sequence
  Description of Artificial Sequence: Synthetic oligonucleotide
  Sense strand starting at position 546 of SEQ ID NO: 1602
uaaucugagucuguucgau

SEQ ID NO: 125457 - RNA, 19 nt, Artificial Sequence
  Description of Artificial Sequence: Synthetic oligonucleotide
  Antisense strand to SEQ ID NO: 125456
aucgaacagacucagauua

SEQ ID NO: 125458 - RNA, 19 nt, Artificial Sequence
  Description of Artificial Sequence: Synthetic oligonucleotide
  Sense strand starting at position 573 of SEQ ID NO: 1602
cccauaucugcugaucgua

SEQ ID NO: 125459 - RNA, 19 nt, Artificial Sequence
  Description of Artificial Sequence: Synthetic oligonucleotide
  Antisense strand to SEQ ID NO: 125458
uacgaucagcagauauggg

SEQ ID NO: 125460 - RNA, 19 nt, Artificial Sequence
  Description of Artificial Sequence: Synthetic oligonucleotide
  Sense strand starting at position 607 of SEQ ID NO: 1602
gagggaguagucuauuagu

SEQ ID NO: 125461 - RNA, 19 nt, Artificial Sequence
  Description of Artificial Sequence: Synthetic oligonucleotide
  Antisense strand to SEQ ID NO: 125460
acuaauagacuacucccuc

SEQ ID NO: 125462 - RNA, 19 nt, Artificial Sequence
  Description of Artificial Sequence: Synthetic oligonucleotide
  Sense strand starting at position 612 of SEQ ID NO: 1602
aguagucuauuaguuaaac

SEQ ID NO: 125463 - RNA, 19 nt, Artificial Sequence
  Description of Artificial Sequence: Synthetic oligonucleotide
  Antisense strand to SEQ ID NO: 125462
guuuaacuaauagacuacu

SEQ ID NO: 125464 - RNA, 19 nt, Artificial Sequence
  Description of Artificial Sequence: Synthetic oligonucleotide
  Sense strand starting at position 621 of SEQ ID NO: 1602
uuaguuaaacgaugcaaag

SEQ ID NO: 125465 - RNA, 19 nt, Artificial Sequence
  Description of Artificial Sequence: Synthetic oligonucleotide
  Antisense strand to SEQ ID NO: 125464
cuuugcaucguuuaacuaa

SEQ ID NO: 125466 - RNA, 19 nt, Artificial Sequence
  Description of Artificial Sequence: Synthetic oligonucleotide
  Sense strand starting at position 673 of SEQ ID NO: 1602
aagucaugagccuauuaag

SEQ ID NO: 125467 - RNA, 19 nt, Artificial Sequence
  Description of Artificial Sequence: Synthetic oligonucleotide
  Antisense strand to SEQ ID NO: 125466
cuuaauaggcucaugacuu

SEQ ID NO: 125468 - RNA, 19 nt, Artificial Sequence
  Description of Artificial Sequence: Synthetic oligonucleotide
  Sense strand starting at position 693 of SEQ ID NO: 1602
aucaauaugcuauguggaa

SEQ ID NO: 125469 - RNA, 19 nt, Artificial Sequence
  Description of Artificial Sequence: Synthetic oligonucleotide
  Antisense strand to SEQ ID NO: 125468
uuccacauagcauauugau

SEQ ID NO: 125470 - RNA, 19 nt, Artificial Sequence
  Description of Artificial Sequence: Synthetic oligonucleotide
  Sense strand starting at position 694 of SEQ ID NO: 1602
ucaauaugcuauguggaaa

SEQ ID NO: 125471 - RNA, 19 nt, Artificial Sequence
  Description of Artificial Sequence: Synthetic oligonucleotide
  Antisense strand to SEQ ID NO: 125470
uuuccacauagcauauuga

SEQ ID NO: 125472 - RNA, 19 nt, Artificial Sequence
  Description of Artificial Sequence: Synthetic oligonucleotide
  Sense strand starting at position 1160 of SEQ ID NO: 1602
gcucaauaagauuguugau

SEQ ID NO: 125473 - RNA, 19 nt, Artificial Sequence
  Description of Artificial Sequence: Synthetic oligonucleotide
  Antisense strand to SEQ ID NO: 125472
aucaacaaucuuauugagc

SEQ ID NO: 125474 - RNA, 19 nt, Artificial Sequence
  Description of Artificial Sequence: Synthetic oligonucleotide
  Sense strand starting at position 1162 of SEQ ID NO: 1602
ucaauaagauuguugauag

SEQ ID NO: 125475 - RNA, 19 nt, Artificial Sequence
  Description of Artificial Sequence: Synthetic oligonucleotide
  Antisense strand to SEQ ID NO: 125474
cuaucaacaaucuuauuga

SEQ ID NO: 125476 - RNA, 19 nt, Artificial Sequence
  Description of Artificial Sequence: Synthetic oligonucleotide
  Sense strand starting at position 1228 of SEQ ID NO: 1602
uaagcaguuugaucagaag

SEQ ID NO: 125477 - RNA, 19 nt, Artificial Sequence
  Description of Artificial Sequence: Synthetic oligonucleotide
  Antisense strand to SEQ ID NO: 125476
cuucugaucaaacugcuua

SEQ ID NO: 125478 - RNA, 19 nt, Artificial Sequence
  Description of Artificial Sequence: Synthetic oligonucleotide
  Sense strand starting at position 1550 of SEQ ID NO: 1602
ugugucuccagccagagaa

SEQ ID NO: 125479 - RNA, 19 nt, Artificial Sequence
  Description of Artificial Sequence: Synthetic oligonucleotide
  Antisense strand to SEQ ID NO: 125478
uucucuggcuggagacaca

SEQ ID NO: 125480 - RNA, 19 nt, Artificial Sequence
  Description of Artificial Sequence: Synthetic oligonucleotide
  Sense strand starting at position 1618 of SEQ ID NO: 1602
gaagguuacucucccaguu

SEQ ID NO: 125481 - RNA, 19 nt, Artificial Sequence
  Description of Artificial Sequence: Synthetic oligonucleotide
  Antisense strand to SEQ ID NO: 125480
aacugggagaguaaccuuc

SEQ ID NO: 125482 - RNA, 19 nt, Artificial Sequence
  Description of Artificial Sequence: Synthetic oligonucleotide
  Sense strand starting at position 1750 of SEQ ID NO: 1602
cggagaagccucugcaaua

SEQ ID NO: 125483 - RNA, 19 nt, Artificial Sequence
  Description of Artificial Sequence: Synthetic oligonucleotide
  Antisense strand to SEQ ID NO: 125482
uauugcagaggcuucuccg

SEQ ID NO: 125484 - RNA, 19 nt, Artificial Sequence
  Description of Artificial Sequence: Synthetic oligonucleotide
  Sense strand starting at position 1751 of SEQ ID NO: 1602
ggagaagccucugcaauau

SEQ ID NO: 125485 - RNA, 19 nt, Artificial Sequence
  Description of Artificial Sequence: Synthetic oligonucleotide
  Antisense strand to SEQ ID NO: 125484
auauugcagaggcuucucc

SEQ ID NO: 125486 - RNA, 19 nt, Artificial Sequence
  Description of Artificial Sequence: Synthetic oligonucleotide
  Sense strand starting at position 2328 of SEQ ID NO: 1602
gucugagaucugggcuaga

SEQ ID NO: 125487 - RNA, 19 nt, Artificial Sequence
  Description of Artificial Sequence: Synthetic oligonucleotide
  Antisense strand to SEQ ID NO: 125486
ucuagcccagaucucagac

SEQ ID NO: 125488 - RNA, 19 nt, Artificial Sequence
  Description of Artificial Sequence: Synthetic oligonucleotide
  Sense strand starting at position 2592 of SEQ ID NO: 1602
cgguccugauacucuagua

SEQ ID NO: 125489 - RNA, 19 nt, Artificial Sequence
  Description of Artificial Sequence: Synthetic oligonucleotide
  Antisense strand to SEQ ID NO: 125488
uacuagaguaucaggaccg

SEQ ID NO: 125490 - RNA, 19 nt, Artificial Sequence
  Description of Artificial Sequence: Synthetic oligonucleotide
  Sense strand starting at position 2741 of SEQ ID NO: 1602
gagcgaacgaaucaauguu

SEQ ID NO: 125491 - RNA, 19 nt, Artificial Sequence
  Description of Artificial Sequence: Synthetic oligonucleotide
  Antisense strand to SEQ ID NO: 125490
aacauugauucguucgcuc

SEQ ID NO: 125492 - RNA, 19 nt, Artificial Sequence
  Description of Artificial Sequence: Synthetic oligonucleotide
  Sense strand starting at position 2749 of SEQ ID NO: 1602
gaaucaauguuugcgugaa

SEQ ID NO: 125493 - RNA, 19 nt, Artificial Sequence
  Description of Artificial Sequence: Synthetic oligonucleotide
  Antisense strand to SEQ ID NO: 125492
uucacgcaaacauugauuc

SEQ ID NO: 125494 - RNA, 19 nt, Artificial Sequence
  Description of Artificial Sequence: Synthetic oligonucleotide
  Sense strand starting at position 2852 of SEQ ID NO: 1602
cuuucuagugcucaaaggu

SEQ ID NO: 125495 - RNA, 19 nt, Artificial Sequence
  Description of Artificial Sequence: Synthetic oligonucleotide
  Antisense strand to SEQ ID NO: 125494
accuuugagcacuagaaag

SEQ ID NO: 125496 - RNA, 19 nt, Artificial Sequence
  Description of Artificial Sequence: Synthetic oligonucleotide
  Sense strand starting at position 2951 of SEQ ID NO: 1602
guuaauuagggccgauaga

SEQ ID NO: 125497 - RNA, 19 nt, Artificial Sequence
  Description of Artificial Sequence: Synthetic oligonucleotide
  Antisense strand to SEQ ID NO: 125496
ucuaucggcccuaauuaac

SEQ ID NO: 125498 - RNA, 19 nt, Artificial Sequence
  Description of Artificial Sequence: Synthetic oligonucleotide
  Sense strand starting at position 3162 of SEQ ID NO: 1602
gaaagcuaaugacagauga

SEQ ID NO: 125499 - RNA, 19 nt, Artificial Sequence
  Description of Artificial Sequence: Synthetic oligonucleotide
  Antisense strand to SEQ ID NO: 125498
ucaucugucauuagcuuuc

SEQ ID NO: 125500 - RNA, 19 nt, Artificial Sequence
  Description of Artificial Sequence: Synthetic oligonucleotide
  Sense strand starting at position 3407 of SEQ ID NO: 1602
ggaaauguagcuugagcac

SEQ ID NO: 125501 - RNA, 19 nt, Artificial Sequence
  Description of Artificial Sequence: Synthetic oligonucleotide
  Antisense strand to SEQ ID NO: 125500
gugcucaagcuacauuucc

SEQ ID NO: 125502 - RNA, 19 nt, Artificial Sequence
  Description of Artificial Sequence: Synthetic oligonucleotide
  Sense strand starting at position 3537 of SEQ ID NO: 1602
gcaggaggaucgucugagu

SEQ ID NO: 125503 - RNA, 19 nt, Artificial Sequence
  Description of Artificial Sequence: Synthetic oligonucleotide
  Antisense strand to SEQ ID NO: 125502
acucagacgauccuccugc

SEQ ID NO: 125504 - RNA, 19 nt, Artificial Sequence
  Description of Artificial Sequence: Synthetic oligonucleotide
  Sense strand starting at position 3546 of SEQ ID NO: 1602
ucgucugaguccacgaguu

SEQ ID NO: 125505 - RNA, 19 nt, Artificial Sequence
  Description of Artificial Sequence: Synthetic oligonucleotide
  Antisense strand to SEQ ID NO: 125504
aacucguggacucagacga

SEQ ID NO: 125506 - RNA, 19 nt, Artificial Sequence
  Description of Artificial Sequence: Synthetic oligonucleotide
  Sense strand starting at position 3558 of SEQ ID NO: 1602
acgaguucgaggcuguagu

SEQ ID NO: 125507 - RNA, 19 nt, Artificial Sequence
  Description of Artificial Sequence: Synthetic oligonucleotide
  Antisense strand to SEQ ID NO: 125506
acuacagccucgaacucgu

SEQ ID NO: 125508 - RNA, 19 nt, Artificial Sequence
  Description of Artificial Sequence: Synthetic oligonucleotide
  Sense strand starting at position 3779 of SEQ ID NO: 1602
agagauaaaugacaaguga

SEQ ID NO: 125509 - RNA, 19 nt, Artificial Sequence
  Description of Artificial Sequence: Synthetic oligonucleotide
  Antisense strand to SEQ ID NO: 125508
ucacuugucauuuaucucu

SEQ ID NO: 125510 - RNA, 19 nt, Artificial Sequence
  Description of Artificial Sequence: Synthetic oligonucleotide
  Sense strand starting at position 3865 of SEQ ID NO: 1602
cacuguuuggcacacagau

SEQ ID NO: 125511 - RNA, 19 nt, Artificial Sequence
  Description of Artificial Sequence: Synthetic oligonucleotide
  Antisense strand to SEQ ID NO: 125510
aucugugugccaaacagug

SEQ ID NO: 125512 - RNA, 19 nt, Artificial Sequence
  Description of Artificial Sequence: Synthetic oligonucleotide
  Sense strand starting at position 3889 of SEQ ID NO: 1602
gggagugucuggaggaacu

SEQ ID NO: 125513 - RNA, 19 nt, Artificial Sequence
  Description of Artificial Sequence: Synthetic oligonucleotide
  Antisense strand to SEQ ID NO: 125512
aguuccuccagacacuccc

SEQ ID NO: 125514 - RNA, 19 nt, Artificial Sequence
  Description of Artificial Sequence: Synthetic oligonucleotide
  Sense strand starting at position 28 of SEQ ID NO: 1604
cugguuguggacuagaaac

SEQ ID NO: 125515 - RNA, 19 nt, Artificial Sequence
  Description of Artificial Sequence: Synthetic oligonucleotide
  Antisense strand to SEQ ID NO: 125514
guuucuaguccacaaccag

SEQ ID NO: 125516 - RNA, 19 nt, Artificial Sequence
  Description of Artificial Sequence: Synthetic oligonucleotide
  Sense strand starting at position 41 of SEQ ID NO: 1604
agaaacaucugacagaaag

SEQ ID NO: 125517 - RNA, 19 nt, Artificial Sequence
  Description of Artificial Sequence: Synthetic oligonucleotide
  Antisense strand to SEQ ID NO: 125516
cuuucugucagauguuucu

SEQ ID NO: 125518 - RNA, 19 nt, Artificial Sequence
  Description of Artificial Sequence: Synthetic oligonucleotide
  Sense strand starting at position 287 of SEQ ID NO: 1604
cccgauucugaauguacaa

SEQ ID NO: 125519 - RNA, 19 nt, Artificial Sequence
  Description of Artificial Sequence: Synthetic oligonucleotide
  Antisense strand to SEQ ID NO: 125518
uuguacauucagaaucggg

SEQ ID NO: 125520 - RNA, 19 nt, Artificial Sequence
  Description of Artificial Sequence: Synthetic oligonucleotide
  Sense strand starting at position 359 of SEQ ID NO: 1604
aggccugaauucuuaugga

SEQ ID NO: 125521 - RNA, 19 nt, Artificial Sequence
  Description of Artificial Sequence: Synthetic oligonucleotide
  Antisense strand to SEQ ID NO: 125520
uccauaagaauucaggccu

SEQ ID NO: 125522 - RNA, 19 nt, Artificial Sequence
  Description of Artificial Sequence: Synthetic oligonucleotide
  Sense strand starting at position 567 of SEQ ID NO: 1604
ggaguagucaaccaagugu

SEQ ID NO: 125523 - RNA, 19 nt, Artificial Sequence
  Description of Artificial Sequence: Synthetic oligonucleotide
  Antisense strand to SEQ ID NO: 125522
acacuugguugacuacucc

SEQ ID NO: 125524 - RNA, 19 nt, Artificial Sequence
  Description of Artificial Sequence: Synthetic oligonucleotide
  Sense strand starting at position 583 of SEQ ID NO: 1604
uguaaucugauagggacuu

SEQ ID NO: 125525 - RNA, 19 nt, Artificial Sequence
  Description of Artificial Sequence: Synthetic oligonucleotide
  Antisense strand to SEQ ID NO: 125524
aagucccuaucagauuaca

SEQ ID NO: 125526 - RNA, 19 nt, Artificial Sequence
  Description of Artificial Sequence: Synthetic oligonucleotide
  Sense strand starting at position 703 of SEQ ID NO: 1604
agguuuaguugauccugaa

SEQ ID NO: 125527 - RNA, 19 nt, Artificial Sequence
  Description of Artificial Sequence: Synthetic oligonucleotide
  Antisense strand to SEQ ID NO: 125526
uucaggaucaacuaaaccu

SEQ ID NO: 125528 - RNA, 19 nt, Artificial Sequence
  Description of Artificial Sequence: Synthetic oligonucleotide
  Sense strand starting at position 715 of SEQ ID NO: 1604
uccugaaauaagugguaug

SEQ ID NO: 125529 - RNA, 19 nt, Artificial Sequence
  Description of Artificial Sequence: Synthetic oligonucleotide
  Antisense strand to SEQ ID NO: 125528
cauaccacuuauuucagga

SEQ ID NO: 125530 - RNA, 19 nt, Artificial Sequence
  Description of Artificial Sequence: Synthetic oligonucleotide
  Sense strand starting at position 722 of SEQ ID NO: 1604
auaagugguauguggagau

SEQ ID NO: 125531 - RNA, 19 nt, Artificial Sequence
  Description of Artificial Sequence: Synthetic oligonucleotide
  Antisense strand to SEQ ID NO: 125530
aucuccacauaccacuuau

SEQ ID NO: 125532 - RNA, 19 nt, Artificial Sequence
  Description of Artificial Sequence: Synthetic oligonucleotide
  Sense strand starting at position 818 of SEQ ID NO: 1604
acucgagggaggugucaaa

SEQ ID NO: 125533 - RNA, 19 nt, Artificial Sequence
  Description of Artificial Sequence: Synthetic oligonucleotide
  Antisense strand to SEQ ID NO: 125532
uuugacaccucccucgagu

SEQ ID NO: 125534 - RNA, 19 nt, Artificial Sequence
  Description of Artificial Sequence: Synthetic oligonucleotide
  Sense strand starting at position 827 of SEQ ID NO: 1604
aggugucaaaguuggaaau

SEQ ID NO: 125535 - RNA, 19 nt, Artificial Sequence
  Description of Artificial Sequence: Synthetic oligonucleotide
  Antisense strand to SEQ ID NO: 125534
auuuccaacuuugacaccu

SEQ ID NO: 125536 - RNA, 19 nt, Artificial Sequence
  Description of Artificial Sequence: Synthetic oligonucleotide
  Sense strand starting at position 852 of SEQ ID NO: 1604
ugggaagggcacugucaaa

SEQ ID NO: 125537 - RNA, 19 nt, Artificial Sequence
  Description of Artificial Sequence: Synthetic oligonucleotide
  Antisense strand to SEQ ID NO: 125536
uuugacagugcccuuccca

SEQ ID NO: 125538 - RNA, 19 nt, Artificial Sequence
  Description of Artificial Sequence: Synthetic oligonucleotide
  Sense strand starting at position 1139 of SEQ ID NO: 1604
ggaugcaaucuuuagcuca

SEQ ID NO: 125539 - RNA, 19 nt, Artificial Sequence
  Description of Artificial Sequence: Synthetic oligonucleotide
  Antisense strand to SEQ ID NO: 125538
ugagcuaaagauugcaucc

SEQ ID NO: 125540 - RNA, 19 nt, Artificial Sequence
  Description of Artificial Sequence: Synthetic oligonucleotide
  Sense strand starting at position 1147 of SEQ ID NO: 1604
ucuuuagcucagggaaaug

SEQ ID NO: 125541 - RNA, 19 nt, Artificial Sequence
  Description of Artificial Sequence: Synthetic oligonucleotide
  Antisense strand to SEQ ID NO: 125540
cauuucccugagcuaaaga

SEQ ID NO: 125542 - RNA, 19 nt, Artificial Sequence
  Description of Artificial Sequence: Synthetic oligonucleotide
  Sense strand starting at position 1179 of SEQ ID NO: 1604
ggaguugcacagggacaua

SEQ ID NO: 125543 - RNA, 19 nt, Artificial Sequence
  Description of Artificial Sequence: Synthetic oligonucleotide
  Antisense strand to SEQ ID NO: 125542
uaugucccugugcaacucc

SEQ ID NO: 125544 - RNA, 19 nt, Artificial Sequence
  Description of Artificial Sequence: Synthetic oligonucleotide
  Sense strand starting at position 1302 of SEQ ID NO: 1604
agucgucugauauggaaag

SEQ ID NO: 125545 - RNA, 19 nt, Artificial Sequence
  Description of Artificial Sequence: Synthetic oligonucleotide
  Antisense strand to SEQ ID NO: 125544
cuuuccauaucagacgacu

SEQ ID NO: 125546 - RNA, 19 nt, Artificial Sequence
  Description of Artificial Sequence: Synthetic oligonucleotide
  Sense strand starting at position 1340 of SEQ ID NO: 1604
agaauuauucgagacguag

SEQ ID NO: 125547 - RNA, 19 nt, Artificial Sequence
  Description of Artificial Sequence: Synthetic oligonucleotide
  Antisense strand to SEQ ID NO: 125546
cuacgucucgaauaauucu

SEQ ID NO: 125548 - RNA, 19 nt, Artificial Sequence
  Description of Artificial Sequence: Synthetic oligonucleotide
  Sense strand starting at position 1501 of SEQ ID NO: 1604
ggcaguuucguagucgaac

SEQ ID NO: 125549 - RNA, 19 nt, Artificial Sequence
  Description of Artificial Sequence: Synthetic oligonucleotide
  Antisense strand to SEQ ID NO: 125548
guucgacuacgaaacugcc

SEQ ID NO: 125550 - RNA, 19 nt, Artificial Sequence
  Description of Artificial Sequence: Synthetic oligonucleotide
  Sense strand starting at position 1579 of SEQ ID NO: 1604
gggcaaaggugacucauga

SEQ ID NO: 125551 - RNA, 19 nt, Artificial Sequence
  Description of Artificial Sequence: Synthetic oligonucleotide
  Antisense strand to SEQ ID NO: 125550
ucaugagucaccuuugccc

SEQ ID NO: 125552 - RNA, 19 nt, Artificial Sequence
  Description of Artificial Sequence: Synthetic oligonucleotide
  Sense strand starting at position 2071 of SEQ ID NO: 1604
gaagcucucgagggagaga

SEQ ID NO: 125553 - RNA, 19 nt, Artificial Sequence
  Description of Artificial Sequence: Synthetic oligonucleotide
  Antisense strand to SEQ ID NO: 125552
ucucucccucgagagcuuc

SEQ ID NO: 125554 - RNA, 19 nt, Artificial Sequence
  Description of Artificial Sequence: Synthetic oligonucleotide
  Sense strand starting at position 2155 of SEQ ID NO: 1604
gcguuugcgaggcuaaaga

SEQ ID NO: 125555 - RNA, 19 nt, Artificial Sequence
  Description of Artificial Sequence: Synthetic oligonucleotide
  Antisense strand to SEQ ID NO: 125554
ucuuuagccucgcaaacgc

SEQ ID NO: 125556 - RNA, 19 nt, Artificial Sequence
  Description of Artificial Sequence: Synthetic oligonucleotide
  Sense strand starting at position 2235 of SEQ ID NO: 1604
guuaaagaaguauggacau

SEQ ID NO: 125557 - RNA, 19 nt, Artificial Sequence
  Description of Artificial Sequence: Synthetic oligonucleotide
  Antisense strand to SEQ ID NO: 125556
auguccauacuucuuuaac

SEQ ID NO: 125558 - RNA, 19 nt, Artificial Sequence
  Description of Artificial Sequence: Synthetic oligonucleotide
  Sense strand starting at position 2255 of SEQ ID NO: 1604
ugcauacuuccagaaguau

SEQ ID NO: 125559 - RNA, 19 nt, Artificial Sequence
  Description of Artificial Sequence: Synthetic oligonucleotide
  Antisense strand to SEQ ID NO: 125558
auacuucuggaaguaugca

SEQ ID NO: 125560 - RNA, 19 nt, Artificial Sequence
  Description of Artificial Sequence: Synthetic oligonucleotide
  Sense strand starting at position 2282 of SEQ ID NO: 1604
gcaaguuauauguaaacga

SEQ ID NO: 125561 - RNA, 19 nt, Artificial Sequence
  Description of Artificial Sequence: Synthetic oligonucleotide
  Antisense strand to SEQ ID NO: 125560
ucguuuacauauaacuugc

SEQ ID NO: 125562 - RNA, 19 nt, Artificial Sequence
  Description of Artificial Sequence: Synthetic oligonucleotide
  Sense strand starting at position 2473 of SEQ ID NO: 1604
acuuaucuuggaggacgau

SEQ ID NO: 125563 - RNA, 19 nt, Artificial Sequence
  Description of Artificial Sequence: Synthetic oligonucleotide
  Antisense strand to SEQ ID NO: 125562
aucguccuccaagauaagu

SEQ ID NO: 125564 - RNA, 19 nt, Artificial Sequence
  Description of Artificial Sequence: Synthetic oligonucleotide
  Sense strand starting at position 2681 of SEQ ID NO: 1604
aggugagugaaacgacaaa

SEQ ID NO: 125565 - RNA, 19 nt, Artificial Sequence
  Description of Artificial Sequence: Synthetic oligonucleotide
  Antisense strand to SEQ ID NO: 125564
uuugucguuucacucaccu

SEQ ID NO: 125566 - RNA, 19 nt, Artificial Sequence
  Description of Artificial Sequence: Synthetic oligonucleotide
  Sense strand starting at position 3021 of SEQ ID NO: 1604
uuccuagggcuuuacuuaa

SEQ ID NO: 125567 - RNA, 19 nt, Artificial Sequence
  Description of Artificial Sequence: Synthetic oligonucleotide
  Antisense strand to SEQ ID NO: 125566
uuaaguaaagcccuaggaa

SEQ ID NO: 125568 - RNA, 19 nt, Artificial Sequence
  Description of Artificial Sequence: Synthetic oligonucleotide
  Sense strand starting at position 3071 of SEQ ID NO: 1604
auacauugaggcuaguuau

SEQ ID NO: 125569 - RNA, 19 nt, Artificial Sequence
  Description of Artificial Sequence: Synthetic oligonucleotide
  Antisense strand to SEQ ID NO: 125568
auaacuagccucaauguau

SEQ ID NO: 125570 - RNA, 19 nt, Artificial Sequence
  Description of Artificial Sequence: Synthetic oligonucleotide
  Sense strand starting at position 3174 of SEQ ID NO: 1604
aguuucuaugucuacaaag

SEQ ID NO: 125571 - RNA, 19 nt, Artificial Sequence
  Description of Artificial Sequence: Synthetic oligonucleotide
  Antisense strand to SEQ ID NO: 125570
cuuuguagacauagaaacu

SEQ ID NO: 125572 - RNA, 19 nt, Artificial Sequence
  Description of Artificial Sequence: Synthetic oligonucleotide
  Sense strand starting at position 3333 of SEQ ID NO: 1604
guuuaauuggaaggcagaa

SEQ ID NO: 125573 - RNA, 19 nt, Artificial Sequence
  Description of Artificial Sequence: Synthetic oligonucleotide
  Antisense strand to SEQ ID NO: 125572
uucugccuuccaauuaaac

SEQ ID NO: 125574 - RNA, 19 nt, Artificial Sequence
  Description of Artificial Sequence: Synthetic oligonucleotide
  Sense strand starting at position 3345 of SEQ ID NO: 1604
ggcagaauaaaguguaaua

SEQ ID NO: 125575 - RNA, 19 nt, Artificial Sequence
  Description of Artificial Sequence: Synthetic oligonucleotide
  Antisense strand to SEQ ID NO: 125574
uauuacacuuuauucugcc

SEQ ID NO: 125576 - RNA, 19 nt, Artificial Sequence
  Description of Artificial Sequence: Synthetic oligonucleotide
  Sense strand starting at position 3443 of SEQ ID NO: 1604
cauaguggaguuuaaguua

SEQ ID NO: 125577 - RNA, 19 nt, Artificial Sequence
  Description of Artificial Sequence: Synthetic oligonucleotide
  Antisense strand to SEQ ID NO: 125576
uaacuuaaacuccacuaug

SEQ ID NO: 125578 - RNA, 19 nt, Artificial Sequence
  Description of Artificial Sequence: Synthetic oligonucleotide
  Sense strand starting at position 3446 of SEQ ID NO: 1604
aguggaguuuaaguuaauu

SEQ ID NO: 125579 - RNA, 19 nt, Artificial Sequence
  Description of Artificial Sequence: Synthetic oligonucleotide
  Antisense strand to SEQ ID NO: 125578
aauuaacuuaaacuccacu

SEQ ID NO: 125580 - RNA, 19 nt, Artificial Sequence
  Description of Artificial Sequence: Synthetic oligonucleotide
  Sense strand starting at position 3470 of SEQ ID NO: 1604
ggccuauauguguauggac

SEQ ID NO: 125581 - RNA, 19 nt, Artificial Sequence
  Description of Artificial Sequence: Synthetic oligonucleotide
  Antisense strand to SEQ ID NO: 125580
guccauacacauauaggcc

SEQ ID NO: 125582 - RNA, 19 nt, Artificial Sequence
  Description of Artificial Sequence: Synthetic oligonucleotide
  Sense strand starting at position 3539 of SEQ ID NO: 1604
guauauggugaaugaauga

SEQ ID NO: 125583 - RNA, 19 nt, Artificial Sequence
  Description of Artificial Sequence: Synthetic oligonucleotide
  Antisense strand to SEQ ID NO: 125582
ucauucauucaccauauac

SEQ ID NO: 125584 - RNA, 19 nt, Artificial Sequence
  Description of Artificial Sequence: Synthetic oligonucleotide
  Sense strand starting at position 3558 of SEQ ID NO: 1604
auggaaggcuucuuagaaa

SEQ ID NO: 125585 - RNA, 19 nt, Artificial Sequence
  Description of Artificial Sequence: Synthetic oligonucleotide
  Antisense strand to SEQ ID NO: 125584
uuucuaagaagccuuccau

SEQ ID NO: 125586 - RNA, 19 nt, Artificial Sequence
  Description of Artificial Sequence: Synthetic oligonucleotide
  Sense strand starting at position 3573 of SEQ ID NO: 1604
gaaauauugugagucaggu

SEQ ID NO: 125587 - RNA, 19 nt, Artificial Sequence
  Description of Artificial Sequence: Synthetic oligonucleotide
  Antisense strand to SEQ ID NO: 125586
accugacucacaauauuuc

SEQ ID NO: 125588 - RNA, 19 nt, Artificial Sequence
  Description of Artificial Sequence: Synthetic oligonucleotide
  Sense strand starting at position 3713 of SEQ ID NO: 1604
gcagacaagcuagguuaaa

SEQ ID NO: 125589 - RNA, 19 nt, Artificial Sequence
  Description of Artificial Sequence: Synthetic oligonucleotide
  Antisense strand to SEQ ID NO: 125588
uuuaaccuagcuugucugc

SEQ ID NO: 125590 - RNA, 19 nt, Artificial Sequence
  Description of Artificial Sequence: Synthetic oligonucleotide
  Sense strand starting at position 3776 of SEQ ID NO: 1604
ugccaaagauaguuuaaau

SEQ ID NO: 125591 - RNA, 19 nt, Artificial Sequence
  Description of Artificial Sequence: Synthetic oligonucleotide
  Antisense strand to SEQ ID NO: 125590
auuuaaacuaucuuuggca

SEQ ID NO: 125592 - RNA, 19 nt, Artificial Sequence
  Description of Artificial Sequence: Synthetic oligonucleotide
  Sense strand starting at position 3786 of SEQ ID NO: 1604
aguuuaaauuugucagcug

SEQ ID NO: 125593 - RNA, 19 nt, Artificial Sequence
  Description of Artificial Sequence: Synthetic oligonucleotide
  Antisense strand to SEQ ID NO: 125592
cagcugacaaauuuaaacu

SEQ ID NO: 125594 - RNA, 19 nt, Artificial Sequence
  Description of Artificial Sequence: Synthetic oligonucleotide
  Sense strand starting at position 229 of SEQ ID NO: 1603
cccgauucugaauguacaa

SEQ ID NO: 125595 - RNA, 19 nt, Artificial Sequence
  Description of Artificial Sequence: Synthetic oligonucleotide
  Antisense strand to SEQ ID NO: 125594
uuguacauucagaaucggg

SEQ ID NO: 125596 - RNA, 19 nt, Artificial Sequence
  Description of Artificial Sequence: Synthetic oligonucleotide
  Sense strand starting at position 301 of SEQ ID NO: 1603
aggccugaauucuuaugga

SEQ ID NO: 125597 - RNA, 19 nt, Artificial Sequence
  Description of Artificial Sequence: Synthetic oligonucleotide
  Antisense strand to SEQ ID NO: 125596
uccauaagaauucaggccu

SEQ ID NO: 125598 - RNA, 19 nt, Artificial Sequence
  Description of Artificial Sequence: Synthetic oligonucleotide
  Sense strand starting at position 509 of SEQ ID NO: 1603
ggaguagucaaccaagugu

SEQ ID NO: 125599 - RNA, 19 nt, Artificial Sequence
  Description of Artificial Sequence: Synthetic oligonucleotide
  Antisense strand to SEQ ID NO: 125598
acacuugguugacuacucc

SEQ ID NO: 125600 - RNA, 19 nt, Artificial Sequence
  Description of Artificial Sequence: Synthetic oligonucleotide
  Sense strand starting at position 525 of SEQ ID NO: 1603
uguaaucugauagggacuu

SEQ ID NO: 125601 - RNA, 19 nt, Artificial Sequence
  Description of Artificial Sequence: Synthetic oligonucleotide
  Antisense strand to SEQ ID NO: 125600
aagucccuaucagauuaca

SEQ ID NO: 125602 - RNA, 19 nt, Artificial Sequence
  Description of Artificial Sequence: Synthetic oligonucleotide
  Sense strand starting at position 645 of SEQ ID NO: 1603
agguuuaguugauccugaa

SEQ ID NO: 125603 - RNA, 19 nt, Artificial Sequence
  Description of Artificial Sequence: Synthetic oligonucleotide
  Antisense strand to SEQ ID NO: 125602
uucaggaucaacuaaaccu

SEQ ID NO: 125604 - RNA, 19 nt, Artificial Sequence
  Description of Artificial Sequence: Synthetic oligonucleotide
  Sense strand starting at position 657 of SEQ ID NO: 1603
uccugaaauaagugguaug

SEQ ID NO: 125605 - RNA, 19 nt, Artificial Sequence
  Description of Artificial Sequence: Synthetic oligonucleotide
  Antisense strand to SEQ ID NO: 125604
cauaccacuuauuucagga

SEQ ID NO: 125606 - RNA, 19 nt, Artificial Sequence
  Description of Artificial Sequence: Synthetic oligonucleotide
  Sense strand starting at position 664 of SEQ ID NO: 1603
auaagugguauguggagau

SEQ ID NO: 125607 - RNA, 19 nt, Artificial Sequence
  Description of Artificial Sequence: Synthetic oligonucleotide
  Antisense strand to SEQ ID NO: 125606
aucuccacauaccacuuau

SEQ ID NO: 125608 - RNA, 19 nt, Artificial Sequence
  Description of Artificial Sequence: Synthetic oligonucleotide
  Sense strand starting at position 760 of SEQ ID NO: 1603
acucgagggaggugucaaa

SEQ ID NO: 125609 - RNA, 19 nt, Artificial Sequence
  Description of Artificial Sequence: Synthetic oligonucleotide
  Antisense strand to SEQ ID NO: 125608
uuugacaccucccucgagu

SEQ ID NO: 125610 - RNA, 19 nt, Artificial Sequence
  Description of Artificial Sequence: Synthetic oligonucleotide
  Sense strand starting at position 769 of SEQ ID NO: 1603
aggugucaaaguuggaaau

SEQ ID NO: 125611 - RNA, 19 nt, Artificial Sequence
  Description of Artificial Sequence: Synthetic oligonucleotide
  Antisense strand to SEQ ID NO: 125610
auuuccaacuuugacaccu

SEQ ID NO: 125612 - RNA, 19 nt, Artificial Sequence
  Description of Artificial Sequence: Synthetic oligonucleotide
  Sense strand starting at position 794 of SEQ ID NO: 1603
ugggaagggcacugucaaa

SEQ ID NO: 125613 - RNA, 19 nt, Artificial Sequence
  Description of Artificial Sequence: Synthetic oligonucleotide
  Antisense strand to SEQ ID NO: 125612
uuugacagugcccuuccca

SEQ ID NO: 125614 - RNA, 19 nt, Artificial Sequence
  Description of Artificial Sequence: Synthetic oligonucleotide
  Sense strand starting at position 1081 of SEQ ID NO: 1603
ggaugcaaucuuuagcuca

SEQ ID NO: 125615 - RNA, 19 nt, Artificial Sequence
  Description of Artificial Sequence: Synthetic oligonucleotide
  Antisense strand to SEQ ID NO: 125614
ugagcuaaagauugcaucc

SEQ ID NO: 125616 - RNA, 19 nt, Artificial Sequence
  Description of Artificial Sequence: Synthetic oligonucleotide
  Sense strand starting at position 1089 of SEQ ID NO: 1603
ucuuuagcucagggaaaug

SEQ ID NO: 125617 - RNA, 19 nt, Artificial Sequence
  Description of Artificial Sequence: Synthetic oligonucleotide
  Antisense strand to SEQ ID NO: 125616
cauuucccugagcuaaaga

SEQ ID NO: 125618 - RNA, 19 nt, Artificial Sequence
  Description of Artificial Sequence: Synthetic oligonucleotide
  Sense strand starting at position 1121 of SEQ ID NO: 1603
ggaguugcacagggacaua

SEQ ID NO: 125619 - RNA, 19 nt, Artificial Sequence
  Description of Artificial Sequence: Synthetic oligonucleotide
  Antisense strand to SEQ ID NO: 125618
uaugucccugugcaacucc

SEQ ID NO: 125620 - RNA, 19 nt, Artificial Sequence
  Description of Artificial Sequence: Synthetic oligonucleotide
  Sense strand starting at position 1244 of SEQ ID NO: 1603
agucgucugauauggaaag

SEQ ID NO: 125621 - RNA, 19 nt, Artificial Sequence
  Description of Artificial Sequence: Synthetic oligonucleotide
  Antisense strand to SEQ ID NO: 125620
cuuuccauaucagacgacu

SEQ ID NO: 125622 - RNA, 19 nt, Artificial Sequence
  Description of Artificial Sequence: Synthetic oligonucleotide
  Sense strand starting at position 1282 of SEQ ID NO: 1603
agaauuauucgagacguag

SEQ ID NO: 125623 - RNA, 19 nt, Artificial Sequence
  Description of Artificial Sequence: Synthetic oligonucleotide
  Antisense strand to SEQ ID NO: 125622
cuacgucucgaauaauucu

SEQ ID NO: 125624 - RNA, 19 nt, Artificial Sequence
  Description of Artificial Sequence: Synthetic oligonucleotide
  Sense strand starting at position 1443 of SEQ ID NO: 1603
ggcaguuucguagucgaac

SEQ ID NO: 125625 - RNA, 19 nt, Artificial Sequence
  Description of Artificial Sequence: Synthetic oligonucleotide
  Antisense strand to SEQ ID NO: 125624
guucgacuacgaaacugcc

SEQ ID NO: 125626 - RNA, 19 nt, Artificial Sequence
  Description of Artificial Sequence: Synthetic oligonucleotide
  Sense strand starting at position 1521 of SEQ ID NO: 1603
gggcaaaggugacucauga

SEQ ID NO: 125627 - RNA, 19 nt, Artificial Sequence
  Description of Artificial Sequence: Synthetic oligonucleotide
  Antisense strand to SEQ ID NO: 125626
ucaugagucaccuuugccc

SEQ ID NO: 125628 - RNA, 19 nt, Artificial Sequence
  Description of Artificial Sequence: Synthetic oligonucleotide
  Sense strand starting at position 2013 of SEQ ID NO: 1603
gaagcucucgagggagaga

SEQ ID NO: 125629 - RNA, 19 nt, Artificial Sequence
  Description of Artificial Sequence: Synthetic oligonucleotide
  Antisense strand to SEQ ID NO: 125628
ucucucccucgagagcuuc

SEQ ID NO: 125630 - RNA, 19 nt, Artificial Sequence
  Description of Artificial Sequence: Synthetic oligonucleotide
  Sense strand starting at position 2097 of SEQ ID NO: 1603
gcguuugcgaggcuaaaga

SEQ ID NO: 125631 - RNA, 19 nt, Artificial Sequence
  Description of Artificial Sequence: Synthetic oligonucleotide
  Antisense strand to SEQ ID NO: 125630
ucuuuagccucgcaaacgc

SEQ ID NO: 125632 - RNA, 19 nt, Artificial Sequence
  Description of Artificial Sequence: Synthetic oligonucleotide
  Sense strand starting at position 2177 of SEQ ID NO: 1603
guuaaagaaguauggacau

SEQ ID NO: 125633 - RNA, 19 nt, Artificial Sequence
  Description of Artificial Sequence: Synthetic oligonucleotide
  Antisense strand to SEQ ID NO: 125632
auguccauacuucuuuaac

SEQ ID NO: 125634 - RNA, 19 nt, Artificial Sequence
  Description of Artificial Sequence: Synthetic oligonucleotide
  Sense strand starting at position 2197 of SEQ ID NO: 1603
ugcauacuuccagaaguau

SEQ ID NO: 125635 - RNA, 19 nt, Artificial Sequence
  Description of Artificial Sequence: Synthetic oligonucleotide
  Antisense strand to SEQ ID NO: 125634
auacuucuggaaguaugca

SEQ ID NO: 125636 - RNA, 19 nt, Artificial Sequence
  Description of Artificial Sequence: Synthetic oligonucleotide
  Sense strand starting at position 2224 of SEQ ID NO: 1603
gcaaguuauauguaaacga

SEQ ID NO: 125637 - RNA, 19 nt, Artificial Sequence
  Description of Artificial Sequence: Synthetic oligonucleotide
  Antisense strand to SEQ ID NO: 125636
ucguuuacauauaacuugc

SEQ ID NO: 125638 - RNA, 19 nt, Artificial Sequence
  Description of Artificial Sequence: Synthetic oligonucleotide
  Sense strand starting at position 2384 of SEQ ID NO: 1603
ggaagacguucuuucugac

SEQ ID NO: 125639 - RNA, 19 nt, Artificial Sequence
  Description of Artificial Sequence: Synthetic oligonucleotide
  Antisense strand to SEQ ID NO: 125638
gucagaaagaacgucuucc

SEQ ID NO: 125640 - RNA, 19 nt, Artificial Sequence
  Description of Artificial Sequence: Synthetic oligonucleotide
  Sense strand starting at position 2415 of SEQ ID NO: 1603
acuuaucuuggaggacgau

SEQ ID NO: 125641 - RNA, 19 nt, Artificial Sequence
  Description of Artificial Sequence: Synthetic oligonucleotide
  Antisense strand to SEQ ID NO: 125640
aucguccuccaagauaagu

SEQ ID NO: 125642 - RNA, 19 nt, Artificial Sequence
  Description of Artificial Sequence: Synthetic oligonucleotide
  Sense strand starting at position 2623 of SEQ ID NO: 1603
aggugagugaaacgacaaa

SEQ ID NO: 125643 - RNA, 19 nt, Artificial Sequence
  Description of Artificial Sequence: Synthetic oligonucleotide
  Antisense strand to SEQ ID NO: 125642
uuugucguuucacucaccu

SEQ ID NO: 125644 - RNA, 19 nt, Artificial Sequence
  Description of Artificial Sequence: Synthetic oligonucleotide
  Sense strand starting at position 2963 of SEQ ID NO: 1603
uuccuagggcuuuacuuaa

SEQ ID NO: 125645 - RNA, 19 nt, Artificial Sequence
  Description of Artificial Sequence: Synthetic oligonucleotide
  Antisense strand to SEQ ID NO: 125644
uuaaguaaagcccuaggaa

SEQ ID NO: 125646 - RNA, 19 nt, Artificial Sequence
  Description of Artificial Sequence: Synthetic oligonucleotide
  Sense strand starting at position 3013 of SEQ ID NO: 1603
auacauugaggcuaguuau

SEQ ID NO: 125647 - RNA, 19 nt, Artificial Sequence
  Description of Artificial Sequence: Synthetic oligonucleotide
  Antisense strand to SEQ ID NO: 125646
auaacuagccucaauguau

SEQ ID NO: 125648 - RNA, 19 nt, Artificial Sequence
  Description of Artificial Sequence: Synthetic oligonucleotide
  Sense strand starting at position 3116 of SEQ ID NO: 1603
aguuucuaugucuacaaag

SEQ ID NO: 125649 - RNA, 19 nt, Artificial Sequence
  Description of Artificial Sequence: Synthetic oligonucleotide
  Antisense strand to SEQ ID NO: 125648
cuuuguagacauagaaacu

SEQ ID NO: 125650 - RNA, 19 nt, Artificial Sequence
  Description of Artificial Sequence: Synthetic oligonucleotide
  Sense strand starting at position 3259 of SEQ ID NO: 1603
gagucacugcuacaauguu

SEQ ID NO: 125651 - RNA, 19 nt, Artificial Sequence
  Description of Artificial Sequence: Synthetic oligonucleotide
  Antisense strand to SEQ ID NO: 125650
aacauuguagcagugacuc

SEQ ID NO: 125652 - RNA, 19 nt, Artificial Sequence
  Description of Artificial Sequence: Synthetic oligonucleotide
  Sense strand starting at position 3275 of SEQ ID NO: 1603
guuuaauuggaaggcagaa

SEQ ID NO: 125653 - RNA, 19 nt, Artificial Sequence
  Description of Artificial Sequence: Synthetic oligonucleotide
  Antisense strand to SEQ ID NO: 125652
uucugccuuccaauuaaac

SEQ ID NO: 125654 - RNA, 19 nt, Artificial Sequence
  Description of Artificial Sequence: Synthetic oligonucleotide
  Sense strand starting at position 3287 of SEQ ID NO: 1603
ggcagaauaaaguguaaua

SEQ ID NO: 125655 - RNA, 19 nt, Artificial Sequence
  Description of Artificial Sequence: Synthetic oligonucleotide
  Antisense strand to SEQ ID NO: 125654
uauuacacuuuauucugcc

SEQ ID NO: 125656 - RNA, 19 nt, Artificial Sequence
  Description of Artificial Sequence: Synthetic oligonucleotide
  Sense strand starting at position 3385 of SEQ ID NO: 1603
cauaguggaguuuaaguua

SEQ ID NO: 125657 - RNA, 19 nt, Artificial Sequence
  Description of Artificial Sequence: Synthetic oligonucleotide
  Antisense strand to SEQ ID NO: 125656
uaacuuaaacuccacuaug

SEQ ID NO: 125658 - RNA, 19 nt, Artificial Sequence
  Description of Artificial Sequence: Synthetic oligonucleotide
  Sense strand starting at position 3388 of SEQ ID NO: 1603
aguggaguuuaaguuaauu

SEQ ID NO: 125659 - RNA, 19 nt, Artificial Sequence
  Description of Artificial Sequence: Synthetic oligonucleotide
  Antisense strand to SEQ ID NO: 125658
aauuaacuuaaacuccacu

SEQ ID NO: 125660 - RNA, 19 nt, Artificial Sequence
  Description of Artificial Sequence: Synthetic oligonucleotide
  Sense strand starting at position 3412 of SEQ ID NO: 1603
ggccuauauguguauggac

SEQ ID NO: 125661 - RNA, 19 nt, Artificial Sequence
  Description of Artificial Sequence: Synthetic oligonucleotide
  Antisense strand to SEQ ID NO: 125660
guccauacacauauaggcc

SEQ ID NO: 125662 - RNA, 19 nt, Artificial Sequence
  Description of Artificial Sequence: Synthetic oligonucleotide
  Sense strand starting at position 3481 of SEQ ID NO: 1603
guauauggugaaugaauga

SEQ ID NO: 125663 - RNA, 19 nt, Artificial Sequence
  Description of Artificial Sequence: Synthetic oligonucleotide
  Antisense strand to SEQ ID NO: 125662
ucauucauucaccauauac

SEQ ID NO: 125664 - RNA, 19 nt, Artificial Sequence
  Description of Artificial Sequence: Synthetic oligonucleotide
  Sense strand starting at position 3500 of SEQ ID NO: 1603
auggaaggcuucuuagaaa

SEQ ID NO: 125665 - RNA, 19 nt, Artificial Sequence
  Description of Artificial Sequence: Synthetic oligonucleotide
  Antisense strand to SEQ ID NO: 125664
uuucuaagaagccuuccau

SEQ ID NO: 125666 - RNA, 19 nt, Artificial Sequence
  Description of Artificial Sequence: Synthetic oligonucleotide
  Sense strand starting at position 3515 of SEQ ID NO: 1603
gaaauauugugagucaggu

SEQ ID NO: 125667 - RNA, 19 nt, Artificial Sequence
  Description of Artificial Sequence: Synthetic oligonucleotide
  Antisense strand to SEQ ID NO: 125666
accugacucacaauauuuc

SEQ ID NO: 125668 - RNA, 19 nt, Artificial Sequence
  Description of Artificial Sequence: Synthetic oligonucleotide
  Sense strand starting at position 3655 of SEQ ID NO: 1603
gcagacaagcuagguuaaa

SEQ ID NO: 125669 - RNA, 19 nt, Artificial Sequence
  Description of Artificial Sequence: Synthetic oligonucleotide
  Antisense strand to SEQ ID NO: 125668
uuuaaccuagcuugucugc

SEQ ID NO: 125670 - RNA, 19 nt, Artificial Sequence
  Description of Artificial Sequence: Synthetic oligonucleotide
  Sense strand starting at position 3718 of SEQ ID NO: 1603
ugccaaagauaguuuaaau

SEQ ID NO: 125671 - RNA, 19 nt, Artificial Sequence
  Description of Artificial Sequence: Synthetic oligonucleotide
  Antisense strand to SEQ ID NO: 125670
auuuaaacuaucuuuggca

SEQ ID NO: 125672 - RNA, 19 nt, Artificial Sequence
  Description of Artificial Sequence: Synthetic oligonucleotide
  Sense strand starting at position 3728 of SEQ ID NO: 1603
aguuuaaauuugucagcug

SEQ ID NO: 125673 - RNA, 19 nt, Artificial Sequence
  Description of Artificial Sequence: Synthetic oligonucleotide
  Antisense strand to SEQ ID NO: 125672
cagcugacaaauuuaaacu

SEQ ID NO: 125674 - RNA, 19 nt, Artificial Sequence
  Description of Artificial Sequence: Synthetic oligonucleotide
  Sense strand starting at position 24 of SEQ ID NO: 1605
cagcacugaugggaaagau

SEQ ID NO: 125675 - RNA, 19 nt, Artificial Sequence
  Description of Artificial Sequence: Synthetic oligonucleotide
  Antisense strand to SEQ ID NO: 125674
aucuuucccaucagugcug

SEQ ID NO: 125676 - RNA, 19 nt, Artificial Sequence
  Description of Artificial Sequence: Synthetic oligonucleotide
  Sense strand starting at position 60 of SEQ ID NO: 1605
ggauuacugccagguaguc

SEQ ID NO: 125677 - RNA, 19 nt, Artificial Sequence
  Description of Artificial Sequence: Synthetic oligonucleotide
  Antisense strand to SEQ ID NO: 125676
gacuaccuggcaguaaucc

SEQ ID NO: 125678 - RNA, 19 nt, Artificial Sequence
  Description of Artificial Sequence: Synthetic oligonucleotide
  Sense strand starting at position 426 of SEQ ID NO: 1605
ggaggauugugcccuucag

SEQ ID NO: 125679 - RNA, 19 nt, Artificial Sequence
  Description of Artificial Sequence: Synthetic oligonucleotide
  Antisense strand to SEQ ID NO: 125678
cugaagggcacaauccucc

SEQ ID NO: 125680 - RNA, 19 nt, Artificial Sequence
  Description of Artificial Sequence: Synthetic oligonucleotide
  Sense strand starting at position 548 of SEQ ID NO: 1605
cccagauccuuucuuggaa

SEQ ID NO: 125681 - RNA, 19 nt, Artificial Sequence
  Description of Artificial Sequence: Synthetic oligonucleotide
  Antisense strand to SEQ ID NO: 125680
uuccaagaaaggaucuggg

SEQ ID NO: 125682 - RNA, 19 nt, Artificial Sequence
  Description of Artificial Sequence: Synthetic oligonucleotide
  Sense strand starting at position 549 of SEQ ID NO: 1605
ccagauccuuucuuggaau

SEQ ID NO: 125683 - RNA, 19 nt, Artificial Sequence
  Description of Artificial Sequence: Synthetic oligonucleotide
  Antisense strand to SEQ ID NO: 125682
auuccaagaaaggaucugg

SEQ ID NO: 125684 - RNA, 19 nt, Artificial Sequence
  Description of Artificial Sequence: Synthetic oligonucleotide
  Sense strand starting at position 560 of SEQ ID NO: 1605
cuuggaaucguuuauauaa

SEQ ID NO: 125685 - RNA, 19 nt, Artificial Sequence
  Description of Artificial Sequence: Synthetic oligonucleotide
  Antisense strand to SEQ ID NO: 125684
uuauauaaacgauuccaag

SEQ ID NO: 125686 - RNA, 19 nt, Artificial Sequence
  Description of Artificial Sequence: Synthetic oligonucleotide
  Sense strand starting at position 955 of SEQ ID NO: 1605
ggaugaacucgguaguuug

SEQ ID NO: 125687 - RNA, 19 nt, Artificial Sequence
  Description of Artificial Sequence: Synthetic oligonucleotide
  Antisense strand to SEQ ID NO: 125686
caaacuaccgaguucaucc

SEQ ID NO: 125688 - RNA, 19 nt, Artificial Sequence
  Description of Artificial Sequence: Synthetic oligonucleotide
  Sense strand starting at position 975 of SEQ ID NO: 1605
gguucuaugagauguccuc

SEQ ID NO: 125689 - RNA, 19 nt, Artificial Sequence
  Description of Artificial Sequence: Synthetic oligonucleotide
  Antisense strand to SEQ ID NO: 125688
gaggacaucucauagaacc

SEQ ID NO: 125690 - RNA, 19 nt, Artificial Sequence
  Description of Artificial Sequence: Synthetic oligonucleotide
  Sense strand starting at position 1032 of SEQ ID NO: 1605
gagcgcucuccuuagaaga

SEQ ID NO: 125691 - RNA, 19 nt, Artificial Sequence
  Description of Artificial Sequence: Synthetic oligonucleotide
  Antisense strand to SEQ ID NO: 125690
ucuucuaaggagagcgcuc

SEQ ID NO: 125692 - RNA, 19 nt, Artificial Sequence
  Description of Artificial Sequence: Synthetic oligonucleotide
  Sense strand starting at position 1059 of SEQ ID NO: 1605
ugugaaucucuaggagauc

SEQ ID NO: 125693 - RNA, 19 nt, Artificial Sequence
  Description of Artificial Sequence: Synthetic oligonucleotide
  Antisense strand to SEQ ID NO: 125692
gaucuccuagagauucaca

SEQ ID NO: 125694 - RNA, 19 nt, Artificial Sequence
  Description of Artificial Sequence: Synthetic oligonucleotide
  Sense strand starting at position 1092 of SEQ ID NO: 1605
gcuugcuagcccuacacaa

SEQ ID NO: 125695 - RNA, 19 nt, Artificial Sequence
  Description of Artificial Sequence: Synthetic oligonucleotide
  Antisense strand to SEQ ID NO: 125694
uuguguagggcuagcaagc

SEQ ID NO: 125696 - RNA, 19 nt, Artificial Sequence
  Description of Artificial Sequence: Synthetic oligonucleotide
  Sense strand starting at position 1158 of SEQ ID NO: 1605
ugagaaacuugcuccucuu

SEQ ID NO: 125697 - RNA, 19 nt, Artificial Sequence
  Description of Artificial Sequence: Synthetic oligonucleotide
  Antisense strand to SEQ ID NO: 125696
aagaggagcaaguuucuca

SEQ ID NO: 125698 - RNA, 19 nt, Artificial Sequence
  Description of Artificial Sequence: Synthetic oligonucleotide
  Sense strand starting at position 1347 of SEQ ID NO: 1605
cgagguaucggcccgcaca

SEQ ID NO: 125699 - RNA, 19 nt, Artificial Sequence
  Description of Artificial Sequence: Synthetic oligonucleotide
  Antisense strand to SEQ ID NO: 125698
ugugcgggccgauaccucg

SEQ ID NO: 125700 - RNA, 19 nt, Artificial Sequence
  Description of Artificial Sequence: Synthetic oligonucleotide
  Sense strand starting at position 1393 of SEQ ID NO: 1605
acugguauuucccaaagcu

SEQ ID NO: 125701 - RNA, 19 nt, Artificial Sequence
  Description of Artificial Sequence: Synthetic oligonucleotide
  Antisense strand to SEQ ID NO: 125700
agcuuugggaaauaccagu

SEQ ID NO: 125702 - RNA, 19 nt, Artificial Sequence
  Description of Artificial Sequence: Synthetic oligonucleotide
  Sense strand starting at position 1522 of SEQ ID NO: 1605
aucucuuggccuugaucga

SEQ ID NO: 125703 - RNA, 19 nt, Artificial Sequence
  Description of Artificial Sequence: Synthetic oligonucleotide
  Antisense strand to SEQ ID NO: 125702
ucgaucaaggccaagagau

SEQ ID NO: 125704 - RNA, 19 nt, Artificial Sequence
  Description of Artificial Sequence: Synthetic oligonucleotide
  Sense strand starting at position 1905 of SEQ ID NO: 1605
gccaucuugagacaucgca

SEQ ID NO: 125705 - RNA, 19 nt, Artificial Sequence
  Description of Artificial Sequence: Synthetic oligonucleotide
  Antisense strand to SEQ ID NO: 125704
ugcgaugucucaagauggc

SEQ ID NO: 125706 - RNA, 19 nt, Artificial Sequence
  Description of Artificial Sequence: Synthetic oligonucleotide
  Sense strand starting at position 2292 of SEQ ID NO: 1605
agggaaaguaucgggaacu

SEQ ID NO: 125707 - RNA, 19 nt, Artificial Sequence
  Description of Artificial Sequence: Synthetic oligonucleotide
  Antisense strand to SEQ ID NO: 125706
aguucccgauacuuucccu

SEQ ID NO: 125708 - RNA, 19 nt, Artificial Sequence
  Description of Artificial Sequence: Synthetic oligonucleotide
  Sense strand starting at position 2308 of SEQ ID NO: 1605
acugcuagagcucagagaa

SEQ ID NO: 125709 - RNA, 19 nt, Artificial Sequence
  Description of Artificial Sequence: Synthetic oligonucleotide
  Antisense strand to SEQ ID NO: 125708
uucucugagcucuagcagu

SEQ ID NO: 125710 - RNA, 19 nt, Artificial Sequence
  Description of Artificial Sequence: Synthetic oligonucleotide
  Sense strand starting at position 2405 of SEQ ID NO: 1605
ggucuuccaacucgggaaa

SEQ ID NO: 125711 - RNA, 19 nt, Artificial Sequence
  Description of Artificial Sequence: Synthetic oligonucleotide
  Antisense strand to SEQ ID NO: 125710
uuucccgaguuggaagacc

SEQ ID NO: 125712 - RNA, 19 nt, Artificial Sequence
  Description of Artificial Sequence: Synthetic oligonucleotide
  Sense strand starting at position 2406 of SEQ ID NO: 1605
gucuuccaacucgggaaau

SEQ ID NO: 125713 - RNA, 19 nt, Artificial Sequence
  Description of Artificial Sequence: Synthetic oligonucleotide
  Antisense strand to SEQ ID NO: 125712
auuucccgaguuggaagac

SEQ ID NO: 125714 - RNA, 19 nt, Artificial Sequence
  Description of Artificial Sequence: Synthetic oligonucleotide
  Sense strand starting at position 2585 of SEQ ID NO: 1605
agcacaauugugggaaaug

SEQ ID NO: 125715 - RNA, 19 nt, Artificial Sequence
  Description of Artificial Sequence: Synthetic oligonucleotide
  Antisense strand to SEQ ID NO: 125714
cauuucccacaauugugcu

SEQ ID NO: 125716 - RNA, 19 nt, Artificial Sequence
  Description of Artificial Sequence: Synthetic oligonucleotide
  Sense strand starting at position 2841 of SEQ ID NO: 1605
ggacucagagcucgacguu

SEQ ID NO: 125717 - RNA, 19 nt, Artificial Sequence
  Description of Artificial Sequence: Synthetic oligonucleotide
  Antisense strand to SEQ ID NO: 125716
aacgucgagcucugagucc

SEQ ID NO: 125718 - RNA, 19 nt, Artificial Sequence
  Description of Artificial Sequence: Synthetic oligonucleotide
  Sense strand starting at position 2851 of SEQ ID NO: 1605
cucgacguuggagagauua

SEQ ID NO: 125719 - RNA, 19 nt, Artificial Sequence
  Description of Artificial Sequence: Synthetic oligonucleotide
  Antisense strand to SEQ ID NO: 125718
uaaucucuccaacgucgag

SEQ ID NO: 125720 - RNA, 19 nt, Artificial Sequence
  Description of Artificial Sequence: Synthetic oligonucleotide
  Sense strand starting at position 2853 of SEQ ID NO: 1605
cgacguuggagagauuaac

SEQ ID NO: 125721 - RNA, 19 nt, Artificial Sequence
  Description of Artificial Sequence: Synthetic oligonucleotide
  Antisense strand to SEQ ID NO: 125720
guuaaucucuccaacgucg

SEQ ID NO: 125722 - RNA, 19 nt, Artificial Sequence
  Description of Artificial Sequence: Synthetic oligonucleotide
  Sense strand starting at position 2864 of SEQ ID NO: 1605
agauuaacuccugguguga

SEQ ID NO: 125723 - RNA, 19 nt, Artificial Sequence
  Description of Artificial Sequence: Synthetic oligonucleotide
  Antisense strand to SEQ ID NO: 125722
ucacaccaggaguuaaucu

SEQ ID NO: 125724 - RNA, 19 nt, Artificial Sequence
  Description of Artificial Sequence: Synthetic oligonucleotide
  Sense strand starting at position 2943 of SEQ ID NO: 1605
aacgcuuacguaugggauu

SEQ ID NO: 125725 - RNA, 19 nt, Artificial Sequence
  Description of Artificial Sequence: Synthetic oligonucleotide
  Antisense strand to SEQ ID NO: 125724
aaucccauacguaagcguu

SEQ ID NO: 125726 - RNA, 19 nt, Artificial Sequence
  Description of Artificial Sequence: Synthetic oligonucleotide
  Sense strand starting at position 2978 of SEQ ID NO: 1605
gcugcuaagccggugugaa

SEQ ID NO: 125727 - RNA, 19 nt, Artificial Sequence
  Description of Artificial Sequence: Synthetic oligonucleotide
  Antisense strand to SEQ ID NO: 125726
uucacaccggcuuagcagc

SEQ ID NO: 125728 - RNA, 19 nt, Artificial Sequence
  Description of Artificial Sequence: Synthetic oligonucleotide
  Sense strand starting at position 2986 of SEQ ID NO: 1605
gccggugugaaccagguau

SEQ ID NO: 125729 - RNA, 19 nt, Artificial Sequence
  Description of Artificial Sequence: Synthetic oligonucleotide
  Antisense strand to SEQ ID NO: 125728
auaccugguucacaccggc

SEQ ID NO: 125730 - RNA, 19 nt, Artificial Sequence
  Description of Artificial Sequence: Synthetic oligonucleotide
  Sense strand starting at position 2988 of SEQ ID NO: 1605
cggugugaaccagguaucu

SEQ ID NO: 125731 - RNA, 19 nt, Artificial Sequence
  Description of Artificial Sequence: Synthetic oligonucleotide
  Antisense strand to SEQ ID NO: 125730
agauaccugguucacaccg

SEQ ID NO: 125732 - RNA, 19 nt, Artificial Sequence
  Description of Artificial Sequence: Synthetic oligonucleotide
  Sense strand starting at position 2990 of SEQ ID NO: 1605
gugugaaccagguaucuga

SEQ ID NO: 125733 - RNA, 19 nt, Artificial Sequence
  Description of Artificial Sequence: Synthetic oligonucleotide
  Antisense strand to SEQ ID NO: 125732
ucagauaccugguucacac

SEQ ID NO: 125734 - RNA, 19 nt, Artificial Sequence
  Description of Artificial Sequence: Synthetic oligonucleotide
  Sense strand starting at position 3017 of SEQ ID NO: 1605
agcagucuuccuugaaaug

SEQ ID NO: 125735 - RNA, 19 nt, Artificial Sequence
  Description of Artificial Sequence: Synthetic oligonucleotide
  Antisense strand to SEQ ID NO: 125734
cauuucaaggaagacugcu

SEQ ID NO: 125736 - RNA, 19 nt, Artificial Sequence
  Description of Artificial Sequence: Synthetic oligonucleotide
  Sense strand starting at position 3018 of SEQ ID NO: 1605
gcagucuuccuugaaauga

SEQ ID NO: 125737 - RNA, 19 nt, Artificial Sequence
  Description of Artificial Sequence: Synthetic oligonucleotide
  Antisense strand to SEQ ID NO: 125736
ucauuucaaggaagacugc

SEQ ID NO: 125738 - RNA, 19 nt, Artificial Sequence
  Description of Artificial Sequence: Synthetic oligonucleotide
  Sense strand starting at position 3101 of SEQ ID NO: 1605
ccuagauacacgugcagaa

SEQ ID NO: 125739 - RNA, 19 nt, Artificial Sequence
  Description of Artificial Sequence: Synthetic oligonucleotide
  Antisense strand to SEQ ID NO: 125738
uucugcacguguaucuagg

SEQ ID NO: 125740 - RNA, 19 nt, Artificial Sequence
  Description of Artificial Sequence: Synthetic oligonucleotide
  Sense strand starting at position 3103 of SEQ ID NO: 1605
uagauacacgugcagaaua

SEQ ID NO: 125741 - RNA, 19 nt, Artificial Sequence
  Description of Artificial Sequence: Synthetic oligonucleotide
  Antisense strand to SEQ ID NO: 125740
uauucugcacguguaucua

SEQ ID NO: 125742 - RNA, 19 nt, Artificial Sequence
  Description of Artificial Sequence: Synthetic oligonucleotide
  Sense strand starting at position 3312 of SEQ ID NO: 1605
uucuguauccauggaaaua

SEQ ID NO: 125743 - RNA, 19 nt, Artificial Sequence
  Description of Artificial Sequence: Synthetic oligonucleotide
  Antisense strand to SEQ ID NO: 125742
uauuuccauggauacagaa

SEQ ID NO: 125744 - RNA, 19 nt, Artificial Sequence
  Description of Artificial Sequence: Synthetic oligonucleotide
  Sense strand starting at position 3644 of SEQ ID NO: 1605
auaccaacuuaagggaaau

SEQ ID NO: 125745 - RNA, 19 nt, Artificial Sequence
  Description of Artificial Sequence: Synthetic oligonucleotide
  Antisense strand to SEQ ID NO: 125744
auuucccuuaaguugguau

SEQ ID NO: 125746 - RNA, 19 nt, Artificial Sequence
  Description of Artificial Sequence: Synthetic oligonucleotide
  Sense strand starting at position 3656 of SEQ ID NO: 1605
gggaaauguacccgcacua

SEQ ID NO: 125747 - RNA, 19 nt, Artificial Sequence
  Description of Artificial Sequence: Synthetic oligonucleotide
  Antisense strand to SEQ ID NO: 125746
uagugcggguacauuuccc

SEQ ID NO: 125748 - RNA, 19 nt, Artificial Sequence
  Description of Artificial Sequence: Synthetic oligonucleotide
  Sense strand starting at position 3733 of SEQ ID NO: 1605
agugcuuaucagggaucau

SEQ ID NO: 125749 - RNA, 19 nt, Artificial Sequence
  Description of Artificial Sequence: Synthetic oligonucleotide
  Antisense strand to SEQ ID NO: 125748
augaucccugauaagcacu

SEQ ID NO: 125750 - RNA, 19 nt, Artificial Sequence
  Description of Artificial Sequence: Synthetic oligonucleotide
  Sense strand starting at position 3734 of SEQ ID NO: 1605
gugcuuaucagggaucauu

SEQ ID NO: 125751 - RNA, 19 nt, Artificial Sequence
  Description of Artificial Sequence: Synthetic oligonucleotide
  Antisense strand to SEQ ID NO: 125750
aaugaucccugauaagcac

SEQ ID NO: 125752 - RNA, 19 nt, Artificial Sequence
  Description of Artificial Sequence: Synthetic oligonucleotide
  Sense strand starting at position 3935 of SEQ ID NO: 1605
gccaguugaacuggaacua

SEQ ID NO: 125753 - RNA, 19 nt, Artificial Sequence
  Description of Artificial Sequence: Synthetic oligonucleotide
  Antisense strand to SEQ ID NO: 125752
uaguuccaguucaacuggc

SEQ ID NO: 125754 - RNA, 19 nt, Artificial Sequence
  Description of Artificial Sequence: Synthetic oligonucleotide
  Sense strand starting at position 3936 of SEQ ID NO: 1606
agacuaauucuccagcuga

SEQ ID NO: 125755 - RNA, 19 nt, Artificial Sequence
  Description of Artificial Sequence: Synthetic oligonucleotide
  Antisense strand to SEQ ID NO: 125754
ucagcuggagaauuagucu

SEQ ID NO: 125756 - RNA, 19 nt, Artificial Sequence
  Description of Artificial Sequence: Synthetic oligonucleotide
  Sense strand starting at position 3905 of SEQ ID NO: 1606
ccauucuuacuuugguaga

SEQ ID NO: 125757 - RNA, 19 nt, Artificial Sequence
  Description of Artificial Sequence: Synthetic oligonucleotide
  Antisense strand to SEQ ID NO: 125756
ucuaccaaaguaagaaugg

SEQ ID NO: 125758 - RNA, 19 nt, Artificial Sequence
  Description of Artificial Sequence: Synthetic oligonucleotide
  Sense strand starting at position 3761 of SEQ ID NO: 1606
ugguauggauuugaugauu

SEQ ID NO: 125759 - RNA, 19 nt, Artificial Sequence
  Description of Artificial Sequence: Synthetic oligonucleotide
  Antisense strand to SEQ ID NO: 125758
aaucaucaaauccauacca

SEQ ID NO: 125760 - RNA, 19 nt, Artificial Sequence
  Description of Artificial Sequence: Synthetic oligonucleotide
  Sense strand starting at position 3440 of SEQ ID NO: 1606
gcgaacgucauagacuaua

SEQ ID NO: 125761 - RNA, 19 nt, Artificial Sequence
  Description of Artificial Sequence: Synthetic oligonucleotide
  Antisense strand to SEQ ID NO: 125760
uauagucuaugacguucgc

SEQ ID NO: 125762 - RNA, 19 nt, Artificial Sequence
  Description of Artificial Sequence: Synthetic oligonucleotide
  Sense strand starting at position 3388 of SEQ ID NO: 1606
cuuagugaugaggauguuu

SEQ ID NO: 125763 - RNA, 19 nt, Artificial Sequence
  Description of Artificial Sequence: Synthetic oligonucleotide
  Antisense strand to SEQ ID NO: 125762
aaacauccucaucacuaag

SEQ ID NO: 125764 - RNA, 19 nt, Artificial Sequence
  Description of Artificial Sequence: Synthetic oligonucleotide
  Sense strand starting at position 3380 of SEQ ID NO: 1606
acccauuacuuagugauga

SEQ ID NO: 125765 - RNA, 19 nt, Artificial Sequence
  Description of Artificial Sequence: Synthetic oligonucleotide
  Antisense strand to SEQ ID NO: 125764
ucaucacuaaguaaugggu

SEQ ID NO: 125766 - RNA, 19 nt, Artificial Sequence
  Description of Artificial Sequence: Synthetic oligonucleotide
  Sense strand starting at position 2998 of SEQ ID NO: 1606
uuggaaauuuguggaagaa

SEQ ID NO: 125767 - RNA, 19 nt, Artificial Sequence
  Description of Artificial Sequence: Synthetic oligonucleotide
  Antisense strand to SEQ ID NO: 125766
uucuuccacaaauuuccaa

SEQ ID NO: 125768 - RNA, 19 nt, Artificial Sequence
  Description of Artificial Sequence: Synthetic oligonucleotide
  Sense strand starting at position 2827 of SEQ ID NO: 1606
gguguuagagguuaacaga

SEQ ID NO: 125769 - RNA, 19 nt, Artificial Sequence
  Description of Artificial Sequence: Synthetic oligonucleotide
  Antisense strand to SEQ ID NO: 125768
ucuguuaaccucuaacacc

SEQ ID NO: 125770 - RNA, 19 nt, Artificial Sequence
  Description of Artificial Sequence: Synthetic oligonucleotide
  Sense strand starting at position 2821 of SEQ ID NO: 1606
uguccagguguuagagguu

SEQ ID NO: 125771 - RNA, 19 nt, Artificial Sequence
  Description of Artificial Sequence: Synthetic oligonucleotide
  Antisense strand to SEQ ID NO: 125770
aaccucuaacaccuggaca

SEQ ID NO: 125772 - RNA, 19 nt, Artificial Sequence
  Description of Artificial Sequence: Synthetic oligonucleotide
  Sense strand starting at position 2802 of SEQ ID NO: 1606
uuaggauggcuuuaggagu

SEQ ID NO: 125773 - RNA, 19 nt, Artificial Sequence
  Description of Artificial Sequence: Synthetic oligonucleotide
  Antisense strand to SEQ ID NO: 125772
acuccuaaagccauccuaa

SEQ ID NO: 125774 - RNA, 19 nt, Artificial Sequence
  Description of Artificial Sequence: Synthetic oligonucleotide
  Sense strand starting at position 2760 of SEQ ID NO: 1606
cuuugucauggauauuaac

SEQ ID NO: 125775 - RNA, 19 nt, Artificial Sequence
  Description of Artificial Sequence: Synthetic oligonucleotide
  Antisense strand to SEQ ID NO: 125774
guuaauauccaugacaaag

SEQ ID NO: 125776 - RNA, 19 nt, Artificial Sequence
  Description of Artificial Sequence: Synthetic oligonucleotide
  Sense strand starting at position 2693 of SEQ ID NO: 1606
gguuauuaucacugaagau

SEQ ID NO: 125777 - RNA, 19 nt, Artificial Sequence
  Description of Artificial Sequence: Synthetic oligonucleotide
  Antisense strand to SEQ ID NO: 125776
aucuucagugauaauaacc

SEQ ID NO: 125778 - RNA, 19 nt, Artificial Sequence
  Description of Artificial Sequence: Synthetic oligonucleotide
  Sense strand starting at position 2692 of SEQ ID NO: 1606
agguuauuaucacugaaga

SEQ ID NO: 125779 - RNA, 19 nt, Artificial Sequence
  Description of Artificial Sequence: Synthetic oligonucleotide
  Antisense strand to SEQ ID NO: 125778
ucuucagugauaauaaccu

SEQ ID NO: 125780 - RNA, 19 nt, Artificial Sequence
  Description of Artificial Sequence: Synthetic oligonucleotide
  Sense strand starting at position 2681 of SEQ ID NO: 1606
ugacauacgacagguuauu

SEQ ID NO: 125781 - RNA, 19 nt, Artificial Sequence
  Description of Artificial Sequence: Synthetic oligonucleotide
  Antisense strand to SEQ ID NO: 125780
aauaaccugucguauguca

SEQ ID NO: 125782 - RNA, 19 nt, Artificial Sequence
  Description of Artificial Sequence: Synthetic oligonucleotide
  Sense strand starting at position 2679 of SEQ ID NO: 1606
ggugacauacgacagguua

SEQ ID NO: 125783 - RNA, 19 nt, Artificial Sequence
  Description of Artificial Sequence: Synthetic oligonucleotide
  Antisense strand to SEQ ID NO: 125782
uaaccugucguaugucacc

SEQ ID NO: 125784 - RNA, 19 nt, Artificial Sequence
  Description of Artificial Sequence: Synthetic oligonucleotide
  Sense strand starting at position 2501 of SEQ ID NO: 1606
guagaaugccacggaauca

SEQ ID NO: 125785 - RNA, 19 nt, Artificial Sequence
  Description of Artificial Sequence: Synthetic oligonucleotide
  Antisense strand to SEQ ID NO: 125784
ugauuccguggcauucuac

SEQ ID NO: 125786 - RNA, 19 nt, Artificial Sequence
  Description of Artificial Sequence: Synthetic oligonucleotide
  Sense strand starting at position 2363 of SEQ ID NO: 1606
cagcuaguuccauauuagg

SEQ ID NO: 125787 - RNA, 19 nt, Artificial Sequence
  Description of Artificial Sequence: Synthetic oligonucleotide
  Antisense strand to SEQ ID NO: 125786
ccuaauauggaacuagcug

SEQ ID NO: 125788 - RNA, 19 nt, Artificial Sequence
  Description of Artificial Sequence: Synthetic oligonucleotide
  Sense strand starting at position 2236 of SEQ ID NO: 1606
ucagaaugucccgaagucu

SEQ ID NO: 125789 - RNA, 19 nt, Artificial Sequence
  Description of Artificial Sequence: Synthetic oligonucleotide
  Antisense strand to SEQ ID NO: 125788
agacuucgggacauucuga

SEQ ID NO: 125790 - RNA, 19 nt, Artificial Sequence
  Description of Artificial Sequence: Synthetic oligonucleotide
  Sense strand starting at position 1496 of SEQ ID NO: 1606
ggaggugaauacucacauc

SEQ ID NO: 125791 - RNA, 19 nt, Artificial Sequence
  Description of Artificial Sequence: Synthetic oligonucleotide
  Antisense strand to SEQ ID NO: 125790
gaugugaguauucaccucc

SEQ ID NO: 125792 - RNA, 19 nt, Artificial Sequence
  Description of Artificial Sequence: Synthetic oligonucleotide
  Sense strand starting at position 1178 of SEQ ID NO: 1606
agcugaacuuacucuaaug

SEQ ID NO: 125793 - RNA, 19 nt, Artificial Sequence
  Description of Artificial Sequence: Synthetic oligonucleotide
  Antisense strand to SEQ ID NO: 125792
cauuagaguaaguucagcu

SEQ ID NO: 125794 - RNA, 19 nt, Artificial Sequence
  Description of Artificial Sequence: Synthetic oligonucleotide
  Sense strand starting at position 1131 of SEQ ID NO: 1606
aggacauugccauauauuc

SEQ ID NO: 125795 - RNA, 19 nt, Artificial Sequence
  Description of Artificial Sequence: Synthetic oligonucleotide
  Antisense strand to SEQ ID NO: 125794
gaauauauggcaauguccu

SEQ ID NO: 125796 - RNA, 19 nt, Artificial Sequence
  Description of Artificial Sequence: Synthetic oligonucleotide
  Sense strand starting at position 1126 of SEQ ID NO: 1606
acuauaggacauugccaua

SEQ ID NO: 125797 - RNA, 19 nt, Artificial Sequence
  Description of Artificial Sequence: Synthetic oligonucleotide
  Antisense strand to SEQ ID NO: 125796
uauggcaauguccuauagu

SEQ ID NO: 125798 - RNA, 19 nt, Artificial Sequence
  Description of Artificial Sequence: Synthetic oligonucleotide
  Sense strand starting at position 1113 of SEQ ID NO: 1606
gcuggauacguagacuaua

SEQ ID NO: 125799 - RNA, 19 nt, Artificial Sequence
  Description of Artificial Sequence: Synthetic oligonucleotide
  Antisense strand to SEQ ID NO: 125798
uauagucuacguauccagc

SEQ ID NO: 125800 - RNA, 19 nt, Artificial Sequence
  Description of Artificial Sequence: Synthetic oligonucleotide
  Sense strand starting at position 1106 of SEQ ID NO: 1606
ggguguggcuggauacgua

SEQ ID NO: 125801 - RNA, 19 nt, Artificial Sequence
  Description of Artificial Sequence: Synthetic oligonucleotide
  Antisense strand to SEQ ID NO: 125800
uacguauccagccacaccc

SEQ ID NO: 125802 - RNA, 19 nt, Artificial Sequence
  Description of Artificial Sequence: Synthetic oligonucleotide
  Sense strand starting at position 1027 of SEQ ID NO: 1606
gggauuauucuuuauuguc

SEQ ID NO: 125803 - RNA, 19 nt, Artificial Sequence
  Description of Artificial Sequence: Synthetic oligonucleotide
  Antisense strand to SEQ ID NO: 125802
gacaauaaagaauaauccc

SEQ ID NO: 125804 - RNA, 19 nt, Artificial Sequence
  Description of Artificial Sequence: Synthetic oligonucleotide
  Sense strand starting at position 1026 of SEQ ID NO: 1606
agggauuauucuuuauugu

SEQ ID NO: 125805 - RNA, 19 nt, Artificial Sequence
  Description of Artificial Sequence: Synthetic oligonucleotide
  Antisense strand to SEQ ID NO: 125804
acaauaaagaauaaucccu

SEQ ID NO: 125806 - RNA, 19 nt, Artificial Sequence
  Description of Artificial Sequence: Synthetic oligonucleotide
  Sense strand starting at position 1015 of SEQ ID NO: 1606
ccuucucugcaagggauua

SEQ ID NO: 125807 - RNA, 19 nt, Artificial Sequence
  Description of Artificial Sequence: Synthetic oligonucleotide
  Antisense strand to SEQ ID NO: 125806
uaaucccuugcagagaagg

SEQ ID NO: 125808 - RNA, 19 nt, Artificial Sequence
  Description of Artificial Sequence: Synthetic oligonucleotide
  Sense strand starting at position 985 of SEQ ID NO: 1606
uggagugagcuuagugugu

SEQ ID NO: 125809 - RNA, 19 nt, Artificial Sequence
  Description of Artificial Sequence: Synthetic oligonucleotide
  Antisense strand to SEQ ID NO: 125808
acacacuaagcucacucca

SEQ ID NO: 125810 - RNA, 19 nt, Artificial Sequence
  Description of Artificial Sequence: Synthetic oligonucleotide
  Sense strand starting at position 979 of SEQ ID NO: 1606
ucgaaauggagugagcuua

SEQ ID NO: 125811 - RNA, 19 nt, Artificial Sequence
  Description of Artificial Sequence: Synthetic oligonucleotide
  Antisense strand to SEQ ID NO: 125810
uaagcucacuccauuucga

SEQ ID NO: 125812 - RNA, 19 nt, Artificial Sequence
  Description of Artificial Sequence: Synthetic oligonucleotide
  Sense strand starting at position 953 of SEQ ID NO: 1606
cgcauagucagagaacauc

SEQ ID NO: 125813 - RNA, 19 nt, Artificial Sequence
  Description of Artificial Sequence: Synthetic oligonucleotide
  Antisense strand to SEQ ID NO: 125812
gauguucucugacuaugcg

SEQ ID NO: 125814 - RNA, 19 nt, Artificial Sequence
  Description of Artificial Sequence: Synthetic oligonucleotide
  Sense strand starting at position 603 of SEQ ID NO: 1606
gcauauuugcaauguuaau

SEQ ID NO: 125815 - RNA, 19 nt, Artificial Sequence
  Description of Artificial Sequence: Synthetic oligonucleotide
  Antisense strand to SEQ ID NO: 125814
auuaacauugcaaauaugc

SEQ ID NO: 125816 - RNA, 19 nt, Artificial Sequence
  Description of Artificial Sequence: Synthetic oligonucleotide
  Sense strand starting at position 378 of SEQ ID NO: 1606
aaugucguccaauaagaga

SEQ ID NO: 125817 - RNA, 19 nt, Artificial Sequence
  Description of Artificial Sequence: Synthetic oligonucleotide
  Antisense strand to SEQ ID NO: 125816
ucucuuauuggacgacauu

SEQ ID NO: 125818 - RNA, 19 nt, Artificial Sequence
  Description of Artificial Sequence: Synthetic oligonucleotide
  Sense strand starting at position 317 of SEQ ID NO: 1606
acaccucacugagagauuu

SEQ ID NO: 125819 - RNA, 19 nt, Artificial Sequence
  Description of Artificial Sequence: Synthetic oligonucleotide
  Antisense strand to SEQ ID NO: 125818
aaaucucucagugaggugu

SEQ ID NO: 125820 - RNA, 19 nt, Artificial Sequence
  Description of Artificial Sequence: Synthetic oligonucleotide
  Sense strand starting at position 184 of SEQ ID NO: 1606
auaagucuucgguagguag

SEQ ID NO: 125821 - RNA, 19 nt, Artificial Sequence
  Description of Artificial Sequence: Synthetic oligonucleotide
  Antisense strand to SEQ ID NO: 125820
cuaccuaccgaagacuuau

SEQ ID NO: 125822 - RNA, 19 nt, Artificial Sequence
  Description of Artificial Sequence: Synthetic oligonucleotide
  Sense strand starting at position 181 of SEQ ID NO: 1606
gaaauaagucuucgguagg

SEQ ID NO: 125823 - RNA, 19 nt, Artificial Sequence
  Description of Artificial Sequence: Synthetic oligonucleotide
  Antisense strand to SEQ ID NO: 125822
ccuaccgaagacuuauuuc

SEQ ID NO: 125824 - RNA, 19 nt, Artificial Sequence
  Description of Artificial Sequence: Synthetic oligonucleotide
  Sense strand starting at position 180 of SEQ ID NO: 1606
agaaauaagucuucgguag

SEQ ID NO: 125825 - RNA, 19 nt, Artificial Sequence
  Description of Artificial Sequence: Synthetic oligonucleotide
  Antisense strand to SEQ ID NO: 125824
cuaccgaagacuuauuucu

SEQ ID NO: 125826 - RNA, 19 nt, Artificial Sequence
  Description of Artificial Sequence: Synthetic oligonucleotide
  Sense strand starting at position 101 of SEQ ID NO: 1606
uaaagccuuccagguagaa

SEQ ID NO: 125827 - RNA, 19 nt, Artificial Sequence
  Description of Artificial Sequence: Synthetic oligonucleotide
  Antisense strand to SEQ ID NO: 125826
uucuaccuggaaggcuuua

SEQ ID NO: 125828 - RNA, 19 nt, Artificial Sequence
  Description of Artificial Sequence: Synthetic oligonucleotide
  Sense strand starting at position 69 of SEQ ID NO: 1606
auguuacagagugauaugu

SEQ ID NO: 125829 - RNA, 19 nt, Artificial Sequence
  Description of Artificial Sequence: Synthetic oligonucleotide
  Antisense strand to SEQ ID NO: 125828
acauaucacucuguaacau

SEQ ID NO: 125830 - RNA, 19 nt, Artificial Sequence
  Description of Artificial Sequence: Synthetic oligonucleotide
  Sense strand starting at position 68 of SEQ ID NO: 1606
uauguuacagagugauaug

SEQ ID NO: 125831 - RNA, 19 nt, Artificial Sequence
  Description of Artificial Sequence: Synthetic oligonucleotide
  Antisense strand to SEQ ID NO: 125830
cauaucacucuguaacaua

SEQ ID NO: 125832 - RNA, 19 nt, Artificial Sequence
  Description of Artificial Sequence: Synthetic oligonucleotide
  Sense strand starting at position 38 of SEQ ID NO: 1606
gucauuuccuguuuccaag

SEQ ID NO: 125833 - RNA, 19 nt, Artificial Sequence
  Description of Artificial Sequence: Synthetic oligonucleotide
  Antisense strand to SEQ ID NO: 125832
cuuggaaacaggaaaugac

SEQ ID NO: 125834 - RNA, 19 nt, Artificial Sequence
  Description of Artificial Sequence: Synthetic oligonucleotide
  Sense strand starting at position 516 of SEQ ID NO: 1607
acagguugagcauacauua

SEQ ID NO: 125835 - RNA, 19 nt, Artificial Sequence
  Description of Artificial Sequence: Synthetic oligonucleotide
  Antisense strand to SEQ ID NO: 125834
uaauguaugcucaaccugu

SEQ ID NO: 125836 - RNA, 19 nt, Artificial Sequence
  Description of Artificial Sequence: Synthetic oligonucleotide
  Sense strand starting at position 590 of SEQ ID NO: 1607
guucuuguucuuuaugaag

SEQ ID NO: 125837 - RNA, 19 nt, Artificial Sequence
  Description of Artificial Sequence: Synthetic oligonucleotide
  Antisense strand to SEQ ID NO: 125836
cuucauaaagaacaagaac

SEQ ID NO: 125838 - RNA, 19 nt, Artificial Sequence
  Description of Artificial Sequence: Synthetic oligonucleotide
  Sense strand starting at position 684 of SEQ ID NO: 1607
gggcuaggccuacaauaga

SEQ ID NO: 125839 - RNA, 19 nt, Artificial Sequence
  Description of Artificial Sequence: Synthetic oligonucleotide
  Antisense strand to SEQ ID NO: 125838
ucuauuguaggccuagccc

SEQ ID NO: 125840 - RNA, 19 nt, Artificial Sequence
  Description of Artificial Sequence: Synthetic oligonucleotide
  Sense strand starting at position 762 of SEQ ID NO: 1607
accuacgaaaguugugaaa

SEQ ID NO: 125841 - RNA, 19 nt, Artificial Sequence
  Description of Artificial Sequence: Synthetic oligonucleotide
  Antisense strand to SEQ ID NO: 125840
uuucacaacuuucguaggu

SEQ ID NO: 125842 - RNA, 19 nt, Artificial Sequence
  Description of Artificial Sequence: Synthetic oligonucleotide
  Sense strand starting at position 775 of SEQ ID NO: 1607
gugaaaggucaagaguagu

SEQ ID NO: 125843 - RNA, 19 nt, Artificial Sequence
  Description of Artificial Sequence: Synthetic oligonucleotide
  Antisense strand to SEQ ID NO: 125842
acuacucuugaccuuucac

SEQ ID NO: 125844 - RNA, 19 nt, Artificial Sequence
  Description of Artificial Sequence: Synthetic oligonucleotide
  Sense strand starting at position 789 of SEQ ID NO: 1607
guaguacugagauaaaguc

SEQ ID NO: 125845 - RNA, 19 nt, Artificial Sequence
  Description of Artificial Sequence: Synthetic oligonucleotide
  Antisense strand to SEQ ID NO: 125844
gacuuuaucucaguacuac

SEQ ID NO: 125846 - RNA, 19 nt, Artificial Sequence
  Description of Artificial Sequence: Synthetic oligonucleotide
  Sense strand starting at position 1056 of SEQ ID NO: 1607
guaacuuugcccuaaggua

SEQ ID NO: 125847 - RNA, 19 nt, Artificial Sequence
  Description of Artificial Sequence: Synthetic oligonucleotide
  Antisense strand to SEQ ID NO: 125846
uaccuuagggcaaaguuac

SEQ ID NO: 125848 - RNA, 19 nt, Artificial Sequence
  Description of Artificial Sequence: Synthetic oligonucleotide
  Sense strand starting at position 1167 of SEQ ID NO: 1607
ucacauaucccuuagguau

SEQ ID NO: 125849 - RNA, 19 nt, Artificial Sequence
  Description of Artificial Sequence: Synthetic oligonucleotide
  Antisense strand to SEQ ID NO: 125848
auaccuaagggauauguga

SEQ ID NO: 125850 - RNA, 19 nt, Artificial Sequence
  Description of Artificial Sequence: Synthetic oligonucleotide
  Sense strand starting at position 1225 of SEQ ID NO: 1607
uagggauaauauccauagu

SEQ ID NO: 125851 - RNA, 19 nt, Artificial Sequence
  Description of Artificial Sequence: Synthetic oligonucleotide
  Antisense strand to SEQ ID NO: 125850
acuauggauauuaucccua

SEQ ID NO: 125852 - RNA, 19 nt, Artificial Sequence
  Description of Artificial Sequence: Synthetic oligonucleotide
  Sense strand starting at position 1251 of SEQ ID NO: 1607
gguucucaaaggcauguua

SEQ ID NO: 125853 - RNA, 19 nt, Artificial Sequence
  Description of Artificial Sequence: Synthetic oligonucleotide
  Antisense strand to SEQ ID NO: 125852
uaacaugccuuugagaacc

SEQ ID NO: 125854 - RNA, 19 nt, Artificial Sequence
  Description of Artificial Sequence: Synthetic oligonucleotide
  Sense strand starting at position 1259 of SEQ ID NO: 1607
aaggcauguuauuuguauu

SEQ ID NO: 125855 - RNA, 19 nt, Artificial Sequence
  Description of Artificial Sequence: Synthetic oligonucleotide
  Antisense strand to SEQ ID NO: 125854
aauacaaauaacaugccuu

SEQ ID NO: 125856 - RNA, 19 nt, Artificial Sequence
  Description of Artificial Sequence: Synthetic oligonucleotide
  Sense strand starting at position 1325 of SEQ ID NO: 1607
agguaugagcucuauaguu

SEQ ID NO: 125857 - RNA, 19 nt, Artificial Sequence
  Description of Artificial Sequence: Synthetic oligonucleotide
  Antisense strand to SEQ ID NO: 125856
aacuauagagcucauaccu

SEQ ID NO: 125858 - RNA, 19 nt, Artificial Sequence
  Description of Artificial Sequence: Synthetic oligonucleotide
  Sense strand starting at position 1327 of SEQ ID NO: 1607
guaugagcucuauaguuua

SEQ ID NO: 125859 - RNA, 19 nt, Artificial Sequence
  Description of Artificial Sequence: Synthetic oligonucleotide
  Antisense strand to SEQ ID NO: 125858
uaaacuauagagcucauac

SEQ ID NO: 125860 - RNA, 19 nt, Artificial Sequence
  Description of Artificial Sequence: Synthetic oligonucleotide
  Sense strand starting at position 1380 of SEQ ID NO: 1607
cuuccauuagcugagcuua

SEQ ID NO: 125861 - RNA, 19 nt, Artificial Sequence
  Description of Artificial Sequence: Synthetic oligonucleotide
  Antisense strand to SEQ ID NO: 125860
uaagcucagcuaauggaag

SEQ ID NO: 125862 - RNA, 19 nt, Artificial Sequence
  Description of Artificial Sequence: Synthetic oligonucleotide
  Sense strand starting at position 1393 of SEQ ID NO: 1607
agcuuagcauccuuuaaag

SEQ ID NO: 125863 - RNA, 19 nt, Artificial Sequence
  Description of Artificial Sequence: Synthetic oligonucleotide
  Antisense strand to SEQ ID NO: 125862
cuuuaaaggaugcuaagcu

SEQ ID NO: 125864 - RNA, 19 nt, Artificial Sequence
  Description of Artificial Sequence: Synthetic oligonucleotide
  Sense strand starting at position 1395 of SEQ ID NO: 1607
cuuagcauccuuuaaagag

SEQ ID NO: 125865 - RNA, 19 nt, Artificial Sequence
  Description of Artificial Sequence: Synthetic oligonucleotide
  Antisense strand to SEQ ID NO: 125864
cucuuuaaaggaugcuaag

SEQ ID NO: 125866 - RNA, 19 nt, Artificial Sequence
  Description of Artificial Sequence: Synthetic oligonucleotide
  Sense strand starting at position 1580 of SEQ ID NO: 1607
acaaauauugcuuggcaag

SEQ ID NO: 125867 - RNA, 19 nt, Artificial Sequence
  Description of Artificial Sequence: Synthetic oligonucleotide
  Antisense strand to SEQ ID NO: 125866
cuugccaagcaauauuugu

SEQ ID NO: 125868 - RNA, 19 nt, Artificial Sequence
  Description of Artificial Sequence: Synthetic oligonucleotide
  Sense strand starting at position 2173 of SEQ ID NO: 1607
ggaugugccaucugaagga

SEQ ID NO: 125869 - RNA, 19 nt, Artificial Sequence
  Description of Artificial Sequence: Synthetic oligonucleotide
  Antisense strand to SEQ ID NO: 125868
uccuucagauggcacaucc

SEQ ID NO: 125870 - RNA, 19 nt, Artificial Sequence
  Description of Artificial Sequence: Synthetic oligonucleotide
  Sense strand starting at position 2255 of SEQ ID NO: 1607
uuuguugcgcuccuuuauu

SEQ ID NO: 125871 - RNA, 19 nt, Artificial Sequence
  Description of Artificial Sequence: Synthetic oligonucleotide
  Antisense strand to SEQ ID NO: 125870
aauaaaggagcgcaacaaa

SEQ ID NO: 125872 - RNA, 19 nt, Artificial Sequence
  Description of Artificial Sequence: Synthetic oligonucleotide
  Sense strand starting at position 2257 of SEQ ID NO: 1607
uguugcgcuccuuuauuaa

SEQ ID NO: 125873 - RNA, 19 nt, Artificial Sequence
  Description of Artificial Sequence: Synthetic oligonucleotide
  Antisense strand to SEQ ID NO: 125872
uuaauaaaggagcgcaaca

SEQ ID NO: 125874 - RNA, 19 nt, Artificial Sequence
  Description of Artificial Sequence: Synthetic oligonucleotide
  Sense strand starting at position 2332 of SEQ ID NO: 1607
auugaaugccugcauguaa

SEQ ID NO: 125875 - RNA, 19 nt, Artificial Sequence
  Description of Artificial Sequence: Synthetic oligonucleotide
  Antisense strand to SEQ ID NO: 125874
uuacaugcaggcauucaau

SEQ ID NO: 125876 - RNA, 19 nt, Artificial Sequence
  Description of Artificial Sequence: Synthetic oligonucleotide
  Sense strand starting at position 2372 of SEQ ID NO: 1607
augauacagccgugaauga

SEQ ID NO: 125877 - RNA, 19 nt, Artificial Sequence
  Description of Artificial Sequence: Synthetic oligonucleotide
  Antisense strand to SEQ ID NO: 125876
ucauucacggcuguaucau

SEQ ID NO: 125878 - RNA, 19 nt, Artificial Sequence
  Description of Artificial Sequence: Synthetic oligonucleotide
  Sense strand starting at position 2373 of SEQ ID NO: 1607
ugauacagccgugaaugaa

SEQ ID NO: 125879 - RNA, 19 nt, Artificial Sequence
  Description of Artificial Sequence: Synthetic oligonucleotide
  Antisense strand to SEQ ID NO: 125878
uucauucacggcuguauca

SEQ ID NO: 125880 - RNA, 19 nt, Artificial Sequence
  Description of Artificial Sequence: Synthetic oligonucleotide
  Sense strand starting at position 2610 of SEQ ID NO: 1607
ugaggacaagauugcuaau

SEQ ID NO: 125881 - RNA, 19 nt, Artificial Sequence
  Description of Artificial Sequence: Synthetic oligonucleotide
  Antisense strand to SEQ ID NO: 125880
auuagcaaucuuguccuca

SEQ ID NO: 125882 - RNA, 19 nt, Artificial Sequence
  Description of Artificial Sequence: Synthetic oligonucleotide
  Sense strand starting at position 2836 of SEQ ID NO: 1607
uacuuuauaggaugguuaa

SEQ ID NO: 125883 - RNA, 19 nt, Artificial Sequence
  Description of Artificial Sequence: Synthetic oligonucleotide
  Antisense strand to SEQ ID NO: 125882
uuaaccauccuauaaagua

SEQ ID NO: 125884 - RNA, 19 nt, Artificial Sequence
  Description of Artificial Sequence: Synthetic oligonucleotide
  Sense strand starting at position 2837 of SEQ ID NO: 1607
acuuuauaggaugguuaaa

SEQ ID NO: 125885 - RNA, 19 nt, Artificial Sequence
  Description of Artificial Sequence: Synthetic oligonucleotide
  Antisense strand to SEQ ID NO: 125884
uuuaaccauccuauaaagu

SEQ ID NO: 125886 - RNA, 19 nt, Artificial Sequence
  Description of Artificial Sequence: Synthetic oligonucleotide
  Sense strand starting at position 3120 of SEQ ID NO: 1607
augauuucuucuuaaggga

SEQ ID NO: 125887 - RNA, 19 nt, Artificial Sequence
  Description of Artificial Sequence: Synthetic oligonucleotide
  Antisense strand to SEQ ID NO: 125886
ucccuuaagaagaaaucau

SEQ ID NO: 125888 - RNA, 19 nt, Artificial Sequence
  Description of Artificial Sequence: Synthetic oligonucleotide
  Sense strand starting at position 3201 of SEQ ID NO: 1607
auagaaauaauccggguuu

SEQ ID NO: 125889 - RNA, 19 nt, Artificial Sequence
  Description of Artificial Sequence: Synthetic oligonucleotide
  Antisense strand to SEQ ID NO: 125888
aaacccggauuauuucuau

SEQ ID NO: 125890 - RNA, 19 nt, Artificial Sequence
  Description of Artificial Sequence: Synthetic oligonucleotide
  Sense strand starting at position 3203 of SEQ ID NO: 1607
agaaauaauccggguuucu

SEQ ID NO: 125891 - RNA, 19 nt, Artificial Sequence
  Description of Artificial Sequence: Synthetic oligonucleotide
  Antisense strand to SEQ ID NO: 125890
agaaacccggauuauuucu

SEQ ID NO: 125892 - RNA, 19 nt, Artificial Sequence
  Description of Artificial Sequence: Synthetic oligonucleotide
  Sense strand starting at position 3447 of SEQ ID NO: 1607
auagaauaguaacucugua

SEQ ID NO: 125893 - RNA, 19 nt, Artificial Sequence
  Description of Artificial Sequence: Synthetic oligonucleotide
  Antisense strand to SEQ ID NO: 125892
uacagaguuacuauucuau

SEQ ID NO: 125894 - RNA, 19 nt, Artificial Sequence
  Description of Artificial Sequence: Synthetic oligonucleotide
  Sense strand starting at position 3452 of SEQ ID NO: 1607
auaguaacucuguauguaa

SEQ ID NO: 125895 - RNA, 19 nt, Artificial Sequence
  Description of Artificial Sequence: Synthetic oligonucleotide
  Antisense strand to SEQ ID NO: 125894
uuacauacagaguuacuau

SEQ ID NO: 125896 - RNA, 19 nt, Artificial Sequence
  Description of Artificial Sequence: Synthetic oligonucleotide
  Sense strand starting at position 3562 of SEQ ID NO: 1607
auuacauaucuagggagca

SEQ ID NO: 125897 - RNA, 19 nt, Artificial Sequence
  Description of Artificial Sequence: Synthetic oligonucleotide
  Antisense strand to SEQ ID NO: 125896
ugcucccuagauauguaau

SEQ ID NO: 125898 - RNA, 19 nt, Artificial Sequence
  Description of Artificial Sequence: Synthetic oligonucleotide
  Sense strand starting at position 3633 of SEQ ID NO: 1607
augaaaugguuccuaagug

SEQ ID NO: 125899 - RNA, 19 nt, Artificial Sequence
  Description of Artificial Sequence: Synthetic oligonucleotide
  Antisense strand to SEQ ID NO: 125898
cacuuaggaaccauuucau

SEQ ID NO: 125900 - RNA, 19 nt, Artificial Sequence
  Description of Artificial Sequence: Synthetic oligonucleotide
  Sense strand starting at position 3640 of SEQ ID NO: 1607
gguuccuaaguguagugau

SEQ ID NO: 125901 - RNA, 19 nt, Artificial Sequence
  Description of Artificial Sequence: Synthetic oligonucleotide
  Antisense strand to SEQ ID NO: 125900
aucacuacacuuaggaacc

SEQ ID NO: 125902 - RNA, 19 nt, Artificial Sequence
  Description of Artificial Sequence: Synthetic oligonucleotide
  Sense strand starting at position 3689 of SEQ ID NO: 1607
gaaggguaggugugaggua

SEQ ID NO: 125903 - RNA, 19 nt, Artificial Sequence
  Description of Artificial Sequence: Synthetic oligonucleotide
  Antisense strand to SEQ ID NO: 125902
uaccucacaccuacccuuc

SEQ ID NO: 125904 - RNA, 19 nt, Artificial Sequence
  Description of Artificial Sequence: Synthetic oligonucleotide
  Sense strand starting at position 3802 of SEQ ID NO: 1607
aggaaugacuccuuggcau

SEQ ID NO: 125905 - RNA, 19 nt, Artificial Sequence
  Description of Artificial Sequence: Synthetic oligonucleotide
  Antisense strand to SEQ ID NO: 125904
augccaaggagucauuccu

SEQ ID NO: 125906 - RNA, 19 nt, Artificial Sequence
  Description of Artificial Sequence: Synthetic oligonucleotide
  Sense strand starting at position 3822 of SEQ ID NO: 1607
cgaaacagcucguuagaaa

SEQ ID NO: 125907 - RNA, 19 nt, Artificial Sequence
  Description of Artificial Sequence: Synthetic oligonucleotide
  Antisense strand to SEQ ID NO: 125906
uuucuaacgagcuguuucg

SEQ ID NO: 125908 - RNA, 19 nt, Artificial Sequence
  Description of Artificial Sequence: Synthetic oligonucleotide
  Sense strand starting at position 3891 of SEQ ID NO: 1607
cccuccugcccauggauaa

SEQ ID NO: 125909 - RNA, 19 nt, Artificial Sequence
  Description of Artificial Sequence: Synthetic oligonucleotide
  Antisense strand to SEQ ID NO: 125908
uuauccaugggcaggaggg

SEQ ID NO: 125910 - RNA, 19 nt, Artificial Sequence
  Description of Artificial Sequence: Synthetic oligonucleotide
  Sense strand starting at position 3974 of SEQ ID NO: 1607
cuuugucuacuguacauua

SEQ ID NO: 125911 - RNA, 19 nt, Artificial Sequence
  Description of Artificial Sequence: Synthetic oligonucleotide
  Antisense strand to SEQ ID NO: 125910
uaauguacaguagacaaag

SEQ ID NO: 125912 - RNA, 19 nt, Artificial Sequence
  Description of Artificial Sequence: Synthetic oligonucleotide
  Sense strand starting at position 3976 of SEQ ID NO: 1607
uugucuacuguacauuaaa

SEQ ID NO: 125913 - RNA, 19 nt, Artificial Sequence
  Description of Artificial Sequence: Synthetic oligonucleotide
  Antisense strand to SEQ ID NO: 125912
uuuaauguacaguagacaa

SEQ ID NO: 125914 - RNA, 19 nt, Artificial Sequence
  Description of Artificial Sequence: Synthetic oligonucleotide
  Sense strand starting at position 61 of SEQ ID NO: 1608
ggucaugguggagaguuua

SEQ ID NO: 125915 - RNA, 19 nt, Artificial Sequence
  Description of Artificial Sequence: Synthetic oligonucleotide
  Antisense strand to SEQ ID NO: 125914
uaaacucuccaccaugacc

SEQ ID NO: 125916 - RNA, 19 nt, Artificial Sequence
  Description of Artificial Sequence: Synthetic oligonucleotide
  Sense strand starting at position 122 of SEQ ID NO: 1608
gggugacaugauuggaacu

SEQ ID NO: 125917 - RNA, 19 nt, Artificial Sequence
  Description of Artificial Sequence: Synthetic oligonucleotide
  Antisense strand to SEQ ID NO: 125916
aguuccaaucaugucaccc

SEQ ID NO: 125918 - RNA, 19 nt, Artificial Sequence
  Description of Artificial Sequence: Synthetic oligonucleotide
  Sense strand starting at position 232 of SEQ ID NO: 1608
uccuaucucuaagugagau

SEQ ID NO: 125919 - RNA, 19 nt, Artificial Sequence
  Description of Artificial Sequence: Synthetic oligonucleotide
  Antisense strand to SEQ ID NO: 125918
aucucacuuagagauagga

SEQ ID NO: 125920 - RNA, 19 nt, Artificial Sequence
  Description of Artificial Sequence: Synthetic oligonucleotide
  Sense strand starting at position 272 of SEQ ID NO: 1608
ccauacacggguuauagua

SEQ ID NO: 125921 - RNA, 19 nt, Artificial Sequence
  Description of Artificial Sequence: Synthetic oligonucleotide
  Antisense strand to SEQ ID NO: 125920
uacuauaacccguguaugg

SEQ ID NO: 125922 - RNA, 19 nt, Artificial Sequence
  Description of Artificial Sequence: Synthetic oligonucleotide
  Sense strand starting at position 290 of SEQ ID NO: 1608
aaaugagugcuguaucaag

SEQ ID NO: 125923 - RNA, 19 nt, Artificial Sequence
  Description of Artificial Sequence: Synthetic oligonucleotide
  Antisense strand to SEQ ID NO: 125922
cuugauacagcacucauuu

SEQ ID NO: 125924 - RNA, 19 nt, Artificial Sequence
  Description of Artificial Sequence: Synthetic oligonucleotide
  Sense strand starting at position 299 of SEQ ID NO: 1608
cuguaucaaguguacaaau

SEQ ID NO: 125925 - RNA, 19 nt, Artificial Sequence
  Description of Artificial Sequence: Synthetic oligonucleotide
  Antisense strand to SEQ ID NO: 125924
auuuguacacuugauacag

SEQ ID NO: 125926 - RNA, 19 nt, Artificial Sequence
  Description of Artificial Sequence: Synthetic oligonucleotide
  Sense strand starting at position 301 of SEQ ID NO: 1608
guaucaaguguacaaauua

SEQ ID NO: 125927 - RNA, 19 nt, Artificial Sequence
  Description of Artificial Sequence: Synthetic oligonucleotide
  Antisense strand to SEQ ID NO: 125926
uaauuuguacacuugauac

SEQ ID NO: 125928 - RNA, 19 nt, Artificial Sequence
  Description of Artificial Sequence: Synthetic oligonucleotide
  Sense strand starting at position 341 of SEQ ID NO: 1608
gagauagggaaacguucua

SEQ ID NO: 125929 - RNA, 19 nt, Artificial Sequence
  Description of Artificial Sequence: Synthetic oligonucleotide
  Antisense strand to SEQ ID NO: 125928
uagaacguuucccuaucuc

SEQ ID NO: 125930 - RNA, 19 nt, Artificial Sequence
  Description of Artificial Sequence: Synthetic oligonucleotide
  Sense strand starting at position 478 of SEQ ID NO: 1608
agaugaagcagucaaaguu

SEQ ID NO: 125931 - RNA, 19 nt, Artificial Sequence
  Description of Artificial Sequence: Synthetic oligonucleotide
  Antisense strand to SEQ ID NO: 125930
aacuuugacugcuucaucu

SEQ ID NO: 125932 - RNA, 19 nt, Artificial Sequence
  Description of Artificial Sequence: Synthetic oligonucleotide
  Sense strand starting at position 747 of SEQ ID NO: 1608
ggucauaacguuuagacuu

SEQ ID NO: 125933 - RNA, 19 nt, Artificial Sequence
  Description of Artificial Sequence: Synthetic oligonucleotide
  Antisense strand to SEQ ID NO: 125932
aagucuaaacguuaugacc

SEQ ID NO: 125934 - RNA, 19 nt, Artificial Sequence
  Description of Artificial Sequence: Synthetic oligonucleotide
  Sense strand starting at position 809 of SEQ ID NO: 1608
agaauaaccugaucaggcu

SEQ ID NO: 125935 - RNA, 19 nt, Artificial Sequence
  Description of Artificial Sequence: Synthetic oligonucleotide
  Antisense strand to SEQ ID NO: 125934
agccugaucagguuauucu

SEQ ID NO: 125936 - RNA, 19 nt, Artificial Sequence
  Description of Artificial Sequence: Synthetic oligonucleotide
  Sense strand starting at position 824 of SEQ ID NO: 1608
ggcuuacauuucguguaga

SEQ ID NO: 125937 - RNA, 19 nt, Artificial Sequence
  Description of Artificial Sequence: Synthetic oligonucleotide
  Antisense strand to SEQ ID NO: 125936
ucuacacgaaauguaagcc

SEQ ID NO: 125938 - RNA, 19 nt, Artificial Sequence
  Description of Artificial Sequence: Synthetic oligonucleotide
  Sense strand starting at position 852 of SEQ ID NO: 1608
caccaaacucagggaguau

SEQ ID NO: 125939 - RNA, 19 nt, Artificial Sequence
  Description of Artificial Sequence: Synthetic oligonucleotide
  Antisense strand to SEQ ID NO: 125938
auacucccugaguuuggug

SEQ ID NO: 125940 - RNA, 19 nt, Artificial Sequence
  Description of Artificial Sequence: Synthetic oligonucleotide
  Sense strand starting at position 889 of SEQ ID NO: 1608
agauaaaguaaucgcaaga

SEQ ID NO: 125941 - RNA, 19 nt, Artificial Sequence
  Description of Artificial Sequence: Synthetic oligonucleotide
  Antisense strand to SEQ ID NO: 125940
ucuugcgauuacuuuaucu

SEQ ID NO: 125942 - RNA, 19 nt, Artificial Sequence
  Description of Artificial Sequence: Synthetic oligonucleotide
  Sense strand starting at position 894 of SEQ ID NO: 1608
aaguaaucgcaagagucua

SEQ ID NO: 125943 - RNA, 19 nt, Artificial Sequence
  Description of Artificial Sequence: Synthetic oligonucleotide
  Antisense strand to SEQ ID NO: 125942
uagacucuugcgauuacuu

SEQ ID NO: 125944 - RNA, 19 nt, Artificial Sequence
  Description of Artificial Sequence: Synthetic oligonucleotide
  Sense strand starting at position 899 of SEQ ID NO: 1608
aucgcaagagucuagacaa

SEQ ID NO: 125945 - RNA, 19 nt, Artificial Sequence
  Description of Artificial Sequence: Synthetic oligonucleotide
  Antisense strand to SEQ ID NO: 125944
uugucuagacucuugcgau

SEQ ID NO: 125946 - RNA, 19 nt, Artificial Sequence
  Description of Artificial Sequence: Synthetic oligonucleotide
  Sense strand starting at position 933 of SEQ ID NO: 1608
ugaauuaagucaguggaac

SEQ ID NO: 125947 - RNA, 19 nt, Artificial Sequence
  Description of Artificial Sequence: Synthetic oligonucleotide
  Antisense strand to SEQ ID NO: 125946
guuccacugacuuaauuca

SEQ ID NO: 125948 - RNA, 19 nt, Artificial Sequence
  Description of Artificial Sequence: Synthetic oligonucleotide
  Sense strand starting at position 934 of SEQ ID NO: 1608
gaauuaagucaguggaacu

SEQ ID NO: 125949 - RNA, 19 nt, Artificial Sequence
  Description of Artificial Sequence: Synthetic oligonucleotide
  Antisense strand to SEQ ID NO: 125948
aguuccacugacuuaauuc

SEQ ID NO: 125950 - RNA, 19 nt, Artificial Sequence
  Description of Artificial Sequence: Synthetic oligonucleotide
  Sense strand starting at position 1053 of SEQ ID NO: 1608
cagcacaucugguugagaa

SEQ ID NO: 125951 - RNA, 19 nt, Artificial Sequence
  Description of Artificial Sequence: Synthetic oligonucleotide
  Antisense strand to SEQ ID NO: 125950
uucucaaccagaugugcug

SEQ ID NO: 125952 - RNA, 19 nt, Artificial Sequence
  Description of Artificial Sequence: Synthetic oligonucleotide
  Sense strand starting at position 1054 of SEQ ID NO: 1608
agcacaucugguugagaaa

SEQ ID NO: 125953 - RNA, 19 nt, Artificial Sequence
  Description of Artificial Sequence: Synthetic oligonucleotide
  Antisense strand to SEQ ID NO: 125952
uuucucaaccagaugugcu

SEQ ID NO: 125954 - RNA, 19 nt, Artificial Sequence
  Description of Artificial Sequence: Synthetic oligonucleotide
  Sense strand starting at position 1055 of SEQ ID NO: 1608
gcacaucugguugagaaau

SEQ ID NO: 125955 - RNA, 19 nt, Artificial Sequence
  Description of Artificial Sequence: Synthetic oligonucleotide
  Antisense strand to SEQ ID NO: 125954
auuucucaaccagaugugc

SEQ ID NO: 125956 - RNA, 19 nt, Artificial Sequence
  Description of Artificial Sequence: Synthetic oligonucleotide
  Sense strand starting at position 1170 of SEQ ID NO: 1608
cugacuaucccggauucuu

SEQ ID NO: 125957 - RNA, 19 nt, Artificial Sequence
  Description of Artificial Sequence: Synthetic oligonucleotide
  Antisense strand to SEQ ID NO: 125956
aagaauccgggauagucag

SEQ ID NO: 125958 - RNA, 19 nt, Artificial Sequence
  Description of Artificial Sequence: Synthetic oligonucleotide
  Sense strand starting at position 1854 of SEQ ID NO: 1608
gacuccuaccucgauauga

SEQ ID NO: 125959 - RNA, 19 nt, Artificial Sequence
  Description of Artificial Sequence: Synthetic oligonucleotide
  Antisense strand to SEQ ID NO: 125958
ucauaucgagguaggaguc

SEQ ID NO: 125960 - RNA, 19 nt, Artificial Sequence
  Description of Artificial Sequence: Synthetic oligonucleotide
  Sense strand starting at position 1856 of SEQ ID NO: 1608
cuccuaccucgauaugacu

SEQ ID NO: 125961 - RNA, 19 nt, Artificial Sequence
  Description of Artificial Sequence: Synthetic oligonucleotide
  Antisense strand to SEQ ID NO: 125960
agucauaucgagguaggag

SEQ ID NO: 125962 - RNA, 19 nt, Artificial Sequence
  Description of Artificial Sequence: Synthetic oligonucleotide
  Sense strand starting at position 2111 of SEQ ID NO: 1608
aagguagacgcaggauauu

SEQ ID NO: 125963 - RNA, 19 nt, Artificial Sequence
  Description of Artificial Sequence: Synthetic oligonucleotide
  Antisense strand to SEQ ID NO: 125962
aauauccugcgucuaccuu

SEQ ID NO: 125964 - RNA, 19 nt, Artificial Sequence
  Description of Artificial Sequence: Synthetic oligonucleotide
  Sense strand starting at position 2341 of SEQ ID NO: 1608
gcuggauguggugggaaga

SEQ ID NO: 125965 - RNA, 19 nt, Artificial Sequence
  Description of Artificial Sequence: Synthetic oligonucleotide
  Antisense strand to SEQ ID NO: 125964
ucuucccaccacauccagc

SEQ ID NO: 125966 - RNA, 19 nt, Artificial Sequence
  Description of Artificial Sequence: Synthetic oligonucleotide
  Sense strand starting at position 2443 of SEQ ID NO: 1608
gggucuacuaccuggugaa

SEQ ID NO: 125967 - RNA, 19 nt, Artificial Sequence
  Description of Artificial Sequence: Synthetic oligonucleotide
  Antisense strand to SEQ ID NO: 125966
uucaccagguaguagaccc

SEQ ID NO: 125968 - RNA, 19 nt, Artificial Sequence
  Description of Artificial Sequence: Synthetic oligonucleotide
  Sense strand starting at position 2444 of SEQ ID NO: 1608
ggucuacuaccuggugaaa

SEQ ID NO: 125969 - RNA, 19 nt, Artificial Sequence
  Description of Artificial Sequence: Synthetic oligonucleotide
  Antisense strand to SEQ ID NO: 125968
uuucaccagguaguagacc

SEQ ID NO: 125970 - RNA, 19 nt, Artificial Sequence
  Description of Artificial Sequence: Synthetic oligonucleotide
  Sense strand starting at position 2556 of SEQ ID NO: 1608
auauguaugguccaccauu

SEQ ID NO: 125971 - RNA, 19 nt, Artificial Sequence
  Description of Artificial Sequence: Synthetic oligonucleotide
  Antisense strand to SEQ ID NO: 125970
aaugguggaccauacauau

SEQ ID NO: 125972 - RNA, 19 nt, Artificial Sequence
  Description of Artificial Sequence: Synthetic oligonucleotide
  Sense strand starting at position 2912 of SEQ ID NO: 1608
agcuuacagcacuaucaga

SEQ ID NO: 125973 - RNA, 19 nt, Artificial Sequence
  Description of Artificial Sequence: Synthetic oligonucleotide
  Antisense strand to SEQ ID NO: 125972
ucugauagugcuguaagcu

SEQ ID NO: 125974 - RNA, 19 nt, Artificial Sequence
  Description of Artificial Sequence: Synthetic oligonucleotide
  Sense strand starting at position 2968 of SEQ ID NO: 1608
aauucuuugguaugaaaug

SEQ ID NO: 125975 - RNA, 19 nt, Artificial Sequence
  Description of Artificial Sequence: Synthetic oligonucleotide
  Antisense strand to SEQ ID NO: 125974
cauuucauaccaaagaauu

SEQ ID NO: 125976 - RNA, 19 nt, Artificial Sequence
  Description of Artificial Sequence: Synthetic oligonucleotide
  Sense strand starting at position 3278 of SEQ ID NO: 1608
acgugaauccuagaaagua

SEQ ID NO: 125977 - RNA, 19 nt, Artificial Sequence
  Description of Artificial Sequence: Synthetic oligonucleotide
  Antisense strand to SEQ ID NO: 125976
uacuuucuaggauucacgu

SEQ ID NO: 125978 - RNA, 19 nt, Artificial Sequence
  Description of Artificial Sequence: Synthetic oligonucleotide
  Sense strand starting at position 3341 of SEQ ID NO: 1608
auaucuauuggaugcugau

SEQ ID NO: 125979 - RNA, 19 nt, Artificial Sequence
  Description of Artificial Sequence: Synthetic oligonucleotide
  Antisense strand to SEQ ID NO: 125978
aucagcauccaauagauau

SEQ ID NO: 125980 - RNA, 19 nt, Artificial Sequence
  Description of Artificial Sequence: Synthetic oligonucleotide
  Sense strand starting at position 3350 of SEQ ID NO: 1608
ggaugcugaugauuaugaa

SEQ ID NO: 125981 - RNA, 19 nt, Artificial Sequence
  Description of Artificial Sequence: Synthetic oligonucleotide
  Antisense strand to SEQ ID NO: 125980
uucauaaucaucagcaucc

SEQ ID NO: 125982 - RNA, 19 nt, Artificial Sequence
  Description of Artificial Sequence: Synthetic oligonucleotide
  Sense strand starting at position 3454 of SEQ ID NO: 1608
agcagccuuguggaagaau

SEQ ID NO: 125983 - RNA, 19 nt, Artificial Sequence
  Description of Artificial Sequence: Synthetic oligonucleotide
  Antisense strand to SEQ ID NO: 125982
auucuuccacaaggcugcu

SEQ ID NO: 125984 - RNA, 19 nt, Artificial Sequence
  Description of Artificial Sequence: Synthetic oligonucleotide
  Sense strand starting at position 3463 of SEQ ID NO: 1608
guggaagaaugccuugaag

SEQ ID NO: 125985 - RNA, 19 nt, Artificial Sequence
  Description of Artificial Sequence: Synthetic oligonucleotide
  Antisense strand to SEQ ID NO: 125984
cuucaaggcauucuuccac

SEQ ID NO: 125986 - RNA, 19 nt, Artificial Sequence
  Description of Artificial Sequence: Synthetic oligonucleotide
  Sense strand starting at position 3496 of SEQ ID NO: 1608
agggaauagguuugcacau

SEQ ID NO: 125987 - RNA, 19 nt, Artificial Sequence
  Description of Artificial Sequence: Synthetic oligonucleotide
  Antisense strand to SEQ ID NO: 125986
augugcaaaccuauucccu

SEQ ID NO: 125988 - RNA, 19 nt, Artificial Sequence
  Description of Artificial Sequence: Synthetic oligonucleotide
  Sense strand starting at position 3497 of SEQ ID NO: 1608
gggaauagguuugcacauc

SEQ ID NO: 125989 - RNA, 19 nt, Artificial Sequence
  Description of Artificial Sequence: Synthetic oligonucleotide
  Antisense strand to SEQ ID NO: 125988
gaugugcaaaccuauuccc

SEQ ID NO: 125990 - RNA, 19 nt, Artificial Sequence
  Description of Artificial Sequence: Synthetic oligonucleotide
  Sense strand starting at position 3518 of SEQ ID NO: 1608
uugccugaaucacugaauu

SEQ ID NO: 125991 - RNA, 19 nt, Artificial Sequence
  Description of Artificial Sequence: Synthetic oligonucleotide
  Antisense strand to SEQ ID NO: 125990
aauucagugauucaggcaa

SEQ ID NO: 125992 - RNA, 19 nt, Artificial Sequence
  Description of Artificial Sequence: Synthetic oligonucleotide
  Sense strand starting at position 3660 of SEQ ID NO: 1608
augagacuuuacuuguauu

SEQ ID NO: 125993 - RNA, 19 nt, Artificial Sequence
  Description of Artificial Sequence: Synthetic oligonucleotide
  Antisense strand to SEQ ID NO: 125992
aauacaaguaaagucucau

SEQ ID NO: 125994 - RNA, 19 nt, Artificial Sequence
  Description of Artificial Sequence: Synthetic oligonucleotide
  Sense strand starting at position 148 of SEQ ID NO: 1609
uggcuuaaaccugaugucu

SEQ ID NO: 125995 - RNA, 19 nt, Artificial Sequence
  Description of Artificial Sequence: Synthetic oligonucleotide
  Antisense strand to SEQ ID NO: 125994
agacaucagguuuaagcca

SEQ ID NO: 125996 - RNA, 19 nt, Artificial Sequence
  Description of Artificial Sequence: Synthetic oligonucleotide
  Sense strand starting at position 343 of SEQ ID NO: 1609
uuaaguucuguuggaacau

SEQ ID NO: 125997 - RNA, 19 nt, Artificial Sequence
  Description of Artificial Sequence: Synthetic oligonucleotide
  Antisense strand to SEQ ID NO: 125996
auguuccaacagaacuuaa

SEQ ID NO: 125998 - RNA, 19 nt, Artificial Sequence
  Description of Artificial Sequence: Synthetic oligonucleotide
  Sense strand starting at position 370 of SEQ ID NO: 1609
ucacuagaaugcuuagaau

SEQ ID NO: 125999 - RNA, 19 nt, Artificial Sequence
  Description of Artificial Sequence: Synthetic oligonucleotide
  Antisense strand to SEQ ID NO: 125998
auucuaagcauucuaguga

SEQ ID NO: 126000 - RNA, 19 nt, Artificial Sequence
  Description of Artificial Sequence: Synthetic oligonucleotide
  Sense strand starting at position 414 of SEQ ID NO: 1609
ucuucugguccauacaaga

SEQ ID NO: 126001 - RNA, 19 nt, Artificial Sequence
  Description of Artificial Sequence: Synthetic oligonucleotide
  Antisense strand to SEQ ID NO: 126000
ucuuguauggaccagaaga

SEQ ID NO: 126002 - RNA, 19 nt, Artificial Sequence
  Description of Artificial Sequence: Synthetic oligonucleotide
  Sense strand starting at position 470 of SEQ ID NO: 1609
auacacuagucauauuuga

SEQ ID NO: 126003 - RNA, 19 nt, Artificial Sequence
  Description of Artificial Sequence: Synthetic oligonucleotide
  Antisense strand to SEQ ID NO: 126002
ucaaauaugacuaguguau

SEQ ID NO: 126004 - RNA, 19 nt, Artificial Sequence
  Description of Artificial Sequence: Synthetic oligonucleotide
  Sense strand starting at position 525 of SEQ ID NO: 1609
uaauuugaaucaggaugga

SEQ ID NO: 126005 - RNA, 19 nt, Artificial Sequence
  Description of Artificial Sequence: Synthetic oligonucleotide
  Antisense strand to SEQ ID NO: 126004
uccauccugauucaaauua

SEQ ID NO: 126006 - RNA, 19 nt, Artificial Sequence
  Description of Artificial Sequence: Synthetic oligonucleotide
  Sense strand starting at position 591 of SEQ ID NO: 1609
agguguucuuuccuugaaa

SEQ ID NO: 126007 - RNA, 19 nt, Artificial Sequence
  Description of Artificial Sequence: Synthetic oligonucleotide
  Antisense strand to SEQ ID NO: 126006
uuucaaggaaagaacaccu

SEQ ID NO: 126008 - RNA, 19 nt, Artificial Sequence
  Description of Artificial Sequence: Synthetic oligonucleotide
  Sense strand starting at position 592 of SEQ ID NO: 1609
gguguucuuuccuugaaac

SEQ ID NO: 126009 - RNA, 19 nt, Artificial Sequence
  Description of Artificial Sequence: Synthetic oligonucleotide
  Antisense strand to SEQ ID NO: 126008
guuucaaggaaagaacacc

SEQ ID NO: 126010 - RNA, 19 nt, Artificial Sequence
  Description of Artificial Sequence: Synthetic oligonucleotide
  Sense strand starting at position 750 of SEQ ID NO: 1609
aggugcagacuuuguuaaa

SEQ ID NO: 126011 - RNA, 19 nt, Artificial Sequence
  Description of Artificial Sequence: Synthetic oligonucleotide
  Antisense strand to SEQ ID NO: 126010
uuuaacaaagucugcaccu

SEQ ID NO: 126012 - RNA, 19 nt, Artificial Sequence
  Description of Artificial Sequence: Synthetic oligonucleotide
  Sense strand starting at position 804 of SEQ ID NO: 1609
aaacgaggucucuguaaua

SEQ ID NO: 126013 - RNA, 19 nt, Artificial Sequence
  Description of Artificial Sequence: Synthetic oligonucleotide
  Antisense strand to SEQ ID NO: 126012
uauuacagagaccucguuu

SEQ ID NO: 126014 - RNA, 19 nt, Artificial Sequence
  Description of Artificial Sequence: Synthetic oligonucleotide
  Sense strand starting at position 813 of SEQ ID NO: 1609
cucuguaauaggcgaaaga

SEQ ID NO: 126015 - RNA, 19 nt, Artificial Sequence
  Description of Artificial Sequence: Synthetic oligonucleotide
  Antisense strand to SEQ ID NO: 126014
ucuuucgccuauuacagag

SEQ ID NO: 126016 - RNA, 19 nt, Artificial Sequence
  Description of Artificial Sequence: Synthetic oligonucleotide
  Sense strand starting at position 906 of SEQ ID NO: 1609
ucaaauacagcauguagaa

SEQ ID NO: 126017 - RNA, 19 nt, Artificial Sequence
  Description of Artificial Sequence: Synthetic oligonucleotide
  Antisense strand to SEQ ID NO: 126016
uucuacaugcuguauuuga

SEQ ID NO: 126018 - RNA, 19 nt, Artificial Sequence
  Description of Artificial Sequence: Synthetic oligonucleotide
  Sense strand starting at position 1114 of SEQ ID NO: 1609
gaaaguguaccggaauuga

SEQ ID NO: 126019 - RNA, 19 nt, Artificial Sequence
  Description of Artificial Sequence: Synthetic oligonucleotide
  Antisense strand to SEQ ID NO: 126018
ucaauuccgguacacuuuc

SEQ ID NO: 126020 - RNA, 19 nt, Artificial Sequence
  Description of Artificial Sequence: Synthetic oligonucleotide
  Sense strand starting at position 1173 of SEQ ID NO: 1609
ggguuaugggaaggaugua

SEQ ID NO: 126021 - RNA, 19 nt, Artificial Sequence
  Description of Artificial Sequence: Synthetic oligonucleotide
  Antisense strand to SEQ ID NO: 126020
uacauccuucccauaaccc

SEQ ID NO: 126022 - RNA, 19 nt, Artificial Sequence
  Description of Artificial Sequence: Synthetic oligonucleotide
  Sense strand starting at position 1185 of SEQ ID NO: 1609
ggauguaagucacuggaua

SEQ ID NO: 126023 - RNA, 19 nt, Artificial Sequence
  Description of Artificial Sequence: Synthetic oligonucleotide
  Antisense strand to SEQ ID NO: 126022
uauccagugacuuacaucc

SEQ ID NO: 126024 - RNA, 19 nt, Artificial Sequence
  Description of Artificial Sequence: Synthetic oligonucleotide
  Sense strand starting at position 1186 of SEQ ID NO: 1609
gauguaagucacuggauau

SEQ ID NO: 126025 - RNA, 19 nt, Artificial Sequence
  Description of Artificial Sequence: Synthetic oligonucleotide
  Antisense strand to SEQ ID NO: 126024
auauccagugacuuacauc

SEQ ID NO: 126026 - RNA, 19 nt, Artificial Sequence
  Description of Artificial Sequence: Synthetic oligonucleotide
  Sense strand starting at position 1297 of SEQ ID NO: 1609
gacaauagaguccgcauua

SEQ ID NO: 126027 - RNA, 19 nt, Artificial Sequence
  Description of Artificial Sequence: Synthetic oligonucleotide
  Antisense strand to SEQ ID NO: 126026
uaaugcggacucuauuguc

SEQ ID NO: 126028 - RNA, 19 nt, Artificial Sequence
  Description of Artificial Sequence: Synthetic oligonucleotide
  Sense strand starting at position 1310 of SEQ ID NO: 1609
gcauuaccgcggcuggaua

SEQ ID NO: 126029 - RNA, 19 nt, Artificial Sequence
  Description of Artificial Sequence: Synthetic oligonucleotide
  Antisense strand to SEQ ID NO: 126028
uauccagccgcgguaaugc

SEQ ID NO: 126030 - RNA, 19 nt, Artificial Sequence
  Description of Artificial Sequence: Synthetic oligonucleotide
  Sense strand starting at position 1653 of SEQ ID NO: 1609
gggcgacucuggcuagaaa

SEQ ID NO: 126031 - RNA, 19 nt, Artificial Sequence
  Description of Artificial Sequence: Synthetic oligonucleotide
  Antisense strand to SEQ ID NO: 126030
uuucuagccagagucgccc

SEQ ID NO: 126032 - RNA, 19 nt, Artificial Sequence
  Description of Artificial Sequence: Synthetic oligonucleotide
  Sense strand starting at position 2086 of SEQ ID NO: 1609
uauggaguggagugagauu

SEQ ID NO: 126033 - RNA, 19 nt, Artificial Sequence
  Description of Artificial Sequence: Synthetic oligonucleotide
  Antisense strand to SEQ ID NO: 126032
aaucucacuccacuccaua

SEQ ID NO: 126034 - RNA, 19 nt, Artificial Sequence
  Description of Artificial Sequence: Synthetic oligonucleotide
  Sense strand starting at position 2097 of SEQ ID NO: 1609
gugagauuucuuuguaagu

SEQ ID NO: 126035 - RNA, 19 nt, Artificial Sequence
  Description of Artificial Sequence: Synthetic oligonucleotide
  Antisense strand to SEQ ID NO: 126034
acuuacaaagaaaucucac

SEQ ID NO: 126036 - RNA, 19 nt, Artificial Sequence
  Description of Artificial Sequence: Synthetic oligonucleotide
  Sense strand starting at position 2099 of SEQ ID NO: 1609
gagauuucuuuguaaguga

SEQ ID NO: 126037 - RNA, 19 nt, Artificial Sequence
  Description of Artificial Sequence: Synthetic oligonucleotide
  Antisense strand to SEQ ID NO: 126036
ucacuuacaaagaaaucuc

SEQ ID NO: 126038 - RNA, 19 nt, Artificial Sequence
  Description of Artificial Sequence: Synthetic oligonucleotide
  Sense strand starting at position 2408 of SEQ ID NO: 1609
acuaguugguaaucagaga

SEQ ID NO: 126039 - RNA, 19 nt, Artificial Sequence
  Description of Artificial Sequence: Synthetic oligonucleotide
  Antisense strand to SEQ ID NO: 126038
ucucugauuaccaacuagu

SEQ ID NO: 126040 - RNA, 19 nt, Artificial Sequence
  Description of Artificial Sequence: Synthetic oligonucleotide
  Sense strand starting at position 2541 of SEQ ID NO: 1609
guaucucuguauuugcuau

SEQ ID NO: 126041 - RNA, 19 nt, Artificial Sequence
  Description of Artificial Sequence: Synthetic oligonucleotide
  Antisense strand to SEQ ID NO: 126040
auagcaaauacagagauac

SEQ ID NO: 126042 - RNA, 19 nt, Artificial Sequence
  Description of Artificial Sequence: Synthetic oligonucleotide
  Sense strand starting at position 2552 of SEQ ID NO: 1609
uuugcuauuucuucuguca

SEQ ID NO: 126043 - RNA, 19 nt, Artificial Sequence
  Description of Artificial Sequence: Synthetic oligonucleotide
  Antisense strand to SEQ ID NO: 126042
ugacagaagaaauagcaaa

SEQ ID NO: 126044 - RNA, 19 nt, Artificial Sequence
  Description of Artificial Sequence: Synthetic oligonucleotide
  Sense strand starting at position 2555 of SEQ ID NO: 1609
gcuauuucuucugucaaag

SEQ ID NO: 126045 - RNA, 19 nt, Artificial Sequence
  Description of Artificial Sequence: Synthetic oligonucleotide
  Antisense strand to SEQ ID NO: 126044
cuuugacagaagaaauagc

SEQ ID NO: 126046 - RNA, 19 nt, Artificial Sequence
  Description of Artificial Sequence: Synthetic oligonucleotide
  Sense strand starting at position 2663 of SEQ ID NO: 1609
ccucaucacgcagaaugaa

SEQ ID NO: 126047 - RNA, 19 nt, Artificial Sequence
  Description of Artificial Sequence: Synthetic oligonucleotide
  Antisense strand to SEQ ID NO: 126046
uucauucugcgugaugagg

SEQ ID NO: 126048 - RNA, 19 nt, Artificial Sequence
  Description of Artificial Sequence: Synthetic oligonucleotide
  Sense strand starting at position 2804 of SEQ ID NO: 1609
uccagaacucccuggucau

SEQ ID NO: 126049 - RNA, 19 nt, Artificial Sequence
  Description of Artificial Sequence: Synthetic oligonucleotide
  Antisense strand to SEQ ID NO: 126048
augaccagggaguucugga

SEQ ID NO: 126050 - RNA, 19 nt, Artificial Sequence
  Description of Artificial Sequence: Synthetic oligonucleotide
  Sense strand starting at position 2805 of SEQ ID NO: 1609
ccagaacucccuggucauu

SEQ ID NO: 126051 - RNA, 19 nt, Artificial Sequence
  Description of Artificial Sequence: Synthetic oligonucleotide
  Antisense strand to SEQ ID NO: 126050
aaugaccagggaguucugg

SEQ ID NO: 126052 - RNA, 19 nt, Artificial Sequence
  Description of Artificial Sequence: Synthetic oligonucleotide
  Sense strand starting at position 2906 of SEQ ID NO: 1609
ucaauucuucgguaucaga

SEQ ID NO: 126053 - RNA, 19 nt, Artificial Sequence
  Description of Artificial Sequence: Synthetic oligonucleotide
  Antisense strand to SEQ ID NO: 126052
ucugauaccgaagaauuga

SEQ ID NO: 126054 - RNA, 19 nt, Artificial Sequence
  Description of Artificial Sequence: Synthetic oligonucleotide
  Sense strand starting at position 2913 of SEQ ID NO: 1609
uucgguaucagagauuauc

SEQ ID NO: 126055 - RNA, 19 nt, Artificial Sequence
  Description of Artificial Sequence: Synthetic oligonucleotide
  Antisense strand to SEQ ID NO: 126054
gauaaucucugauaccgaa

SEQ ID NO: 126056 - RNA, 19 nt, Artificial Sequence
  Description of Artificial Sequence: Synthetic oligonucleotide
  Sense strand starting at position 3014 of SEQ ID NO: 1609
ccagaauauuucuagagug

SEQ ID NO: 126057 - RNA, 19 nt, Artificial Sequence
  Description of Artificial Sequence: Synthetic oligonucleotide
  Antisense strand to SEQ ID NO: 126056
cacucuagaaauauucugg

SEQ ID NO: 126058 - RNA, 19 nt, Artificial Sequence
  Description of Artificial Sequence: Synthetic oligonucleotide
  Sense strand starting at position 3079 of SEQ ID NO: 1609
auccuuuauguaugucaag

SEQ ID NO: 126059 - RNA, 19 nt, Artificial Sequence
  Description of Artificial Sequence: Synthetic oligonucleotide
  Antisense strand to SEQ ID NO: 126058
cuugacauacauaaaggau

SEQ ID NO: 126060 - RNA, 19 nt, Artificial Sequence
  Description of Artificial Sequence: Synthetic oligonucleotide
  Sense strand starting at position 3333 of SEQ ID NO: 1609
uagucuuaggcacauggua

SEQ ID NO: 126061 - RNA, 19 nt, Artificial Sequence
  Description of Artificial Sequence: Synthetic oligonucleotide
  Antisense strand to SEQ ID NO: 126060
uaccaugugccuaagacua

SEQ ID NO: 126062 - RNA, 19 nt, Artificial Sequence
  Description of Artificial Sequence: Synthetic oligonucleotide
  Sense strand starting at position 3335 of SEQ ID NO: 1609
gucuuaggcacaugguaaa

SEQ ID NO: 126063 - RNA, 19 nt, Artificial Sequence
  Description of Artificial Sequence: Synthetic oligonucleotide
  Antisense strand to SEQ ID NO: 126062
uuuaccaugugccuaagac

SEQ ID NO: 126064 - RNA, 19 nt, Artificial Sequence
  Description of Artificial Sequence: Synthetic oligonucleotide
  Sense strand starting at position 3345 of SEQ ID NO: 1609
caugguaaaugcuuaguaa

SEQ ID NO: 126065 - RNA, 19 nt, Artificial Sequence
  Description of Artificial Sequence: Synthetic oligonucleotide
  Antisense strand to SEQ ID NO: 126064
uuacuaagcauuuaccaug

SEQ ID NO: 126066 - RNA, 19 nt, Artificial Sequence
  Description of Artificial Sequence: Synthetic oligonucleotide
  Sense strand starting at position 3506 of SEQ ID NO: 1609
auuuaucccuuggagauga

SEQ ID NO: 126067 - RNA, 19 nt, Artificial Sequence
  Description of Artificial Sequence: Synthetic oligonucleotide
  Antisense strand to SEQ ID NO: 126066
ucaucuccaagggauaaau

SEQ ID NO: 126068 - RNA, 19 nt, Artificial Sequence
  Description of Artificial Sequence: Synthetic oligonucleotide
  Sense strand starting at position 3517 of SEQ ID NO: 1609
ggagaugaacuguguuaau

SEQ ID NO: 126069 - RNA, 19 nt, Artificial Sequence
  Description of Artificial Sequence: Synthetic oligonucleotide
  Antisense strand to SEQ ID NO: 126068
auuaacacaguucaucucc

SEQ ID NO: 126070 - RNA, 19 nt, Artificial Sequence
  Description of Artificial Sequence: Synthetic oligonucleotide
  Sense strand starting at position 3890 of SEQ ID NO: 1609
cagucugucugaccuagaa

SEQ ID NO: 126071 - RNA, 19 nt, Artificial Sequence
  Description of Artificial Sequence: Synthetic oligonucleotide
  Antisense strand to SEQ ID NO: 126070
uucuaggucagacagacug

SEQ ID NO: 126072 - RNA, 19 nt, Artificial Sequence
  Description of Artificial Sequence: Synthetic oligonucleotide
  Sense strand starting at position 3894 of SEQ ID NO: 1609
cugucugaccuagaauauc

SEQ ID NO: 126073 - RNA, 19 nt, Artificial Sequence
  Description of Artificial Sequence: Synthetic oligonucleotide
  Antisense strand to SEQ ID NO: 126072
gauauucuaggucagacag

SEQ ID NO: 126074 - RNA, 19 nt, Artificial Sequence
  Description of Artificial Sequence: Synthetic oligonucleotide
  Sense strand starting at position 106 of SEQ ID NO: 1610
gcaccuaccauguguagga

SEQ ID NO: 126075 - RNA, 19 nt, Artificial Sequence
  Description of Artificial Sequence: Synthetic oligonucleotide
  Antisense strand to SEQ ID NO: 126074
uccuacacaugguaggugc

SEQ ID NO: 126076 - RNA, 19 nt, Artificial Sequence
  Description of Artificial Sequence: Synthetic oligonucleotide
  Sense strand starting at position 113 of SEQ ID NO: 1610
ccauguguaggauauguua

SEQ ID NO: 126077 - RNA, 19 nt, Artificial Sequence
  Description of Artificial Sequence: Synthetic oligonucleotide
  Antisense strand to SEQ ID NO: 126076
uaacauauccuacacaugg

SEQ ID NO: 126078 - RNA, 19 nt, Artificial Sequence
  Description of Artificial Sequence: Synthetic oligonucleotide
  Sense strand starting at position 115 of SEQ ID NO: 1610
auguguaggauauguuaca

SEQ ID NO: 126079 - RNA, 19 nt, Artificial Sequence
  Description of Artificial Sequence: Synthetic oligonucleotide
  Antisense strand to SEQ ID NO: 126078
uguaacauauccuacacau

SEQ ID NO: 126080 - RNA, 19 nt, Artificial Sequence
  Description of Artificial Sequence: Synthetic oligonucleotide
  Sense strand starting at position 116 of SEQ ID NO: 1610
uguguaggauauguuacau

SEQ ID NO: 126081 - RNA, 19 nt, Artificial Sequence
  Description of Artificial Sequence: Synthetic oligonucleotide
  Antisense strand to SEQ ID NO: 126080
auguaacauauccuacaca

SEQ ID NO: 126082 - RNA, 19 nt, Artificial Sequence
  Description of Artificial Sequence: Synthetic oligonucleotide
  Sense strand starting at position 128 of SEQ ID NO: 1610
guuacauaaccauggguau

SEQ ID NO: 126083 - RNA, 19 nt, Artificial Sequence
  Description of Artificial Sequence: Synthetic oligonucleotide
  Antisense strand to SEQ ID NO: 126082
auacccaugguuauguaac

SEQ ID NO: 126084 - RNA, 19 nt, Artificial Sequence
  Description of Artificial Sequence: Synthetic oligonucleotide
  Sense strand starting at position 129 of SEQ ID NO: 1610
uuacauaaccauggguaua

SEQ ID NO: 126085 - RNA, 19 nt, Artificial Sequence
  Description of Artificial Sequence: Synthetic oligonucleotide
  Antisense strand to SEQ ID NO: 126084
uauacccaugguuauguaa

SEQ ID NO: 126086 - RNA, 19 nt, Artificial Sequence
  Description of Artificial Sequence: Synthetic oligonucleotide
  Sense strand starting at position 253 of SEQ ID NO: 1610
agaugaaggucucugcuga

SEQ ID NO: 126087 - RNA, 19 nt, Artificial Sequence
  Description of Artificial Sequence: Synthetic oligonucleotide
  Antisense strand to SEQ ID NO: 126086
ucagcagagaccuucaucu

SEQ ID NO: 126088 - RNA, 19 nt, Artificial Sequence
  Description of Artificial Sequence: Synthetic oligonucleotide
  Sense strand starting at position 270 of SEQ ID NO: 1610
gagcacaaugcauagguau

SEQ ID NO: 126089 - RNA, 19 nt, Artificial Sequence
  Description of Artificial Sequence: Synthetic oligonucleotide
  Antisense strand to SEQ ID NO: 126088
auaccuaugcauugugcuc

SEQ ID NO: 126090 - RNA, 19 nt, Artificial Sequence
  Description of Artificial Sequence: Synthetic oligonucleotide
  Sense strand starting at position 478 of SEQ ID NO: 1610
guugguaucaagggagaau

SEQ ID NO: 126091 - RNA, 19 nt, Artificial Sequence
  Description of Artificial Sequence: Synthetic oligonucleotide
  Antisense strand to SEQ ID NO: 126090
auucucccuugauaccaac

SEQ ID NO: 126092 - RNA, 19 nt, Artificial Sequence
  Description of Artificial Sequence: Synthetic oligonucleotide
  Sense strand starting at position 495 of SEQ ID NO: 1610
augagacgaaggugugaaa

SEQ ID NO: 126093 - RNA, 19 nt, Artificial Sequence
  Description of Artificial Sequence: Synthetic oligonucleotide
  Antisense strand to SEQ ID NO: 126092
uuucacaccuucgucucau

SEQ ID NO: 126094 - RNA, 19 nt, Artificial Sequence
  Description of Artificial Sequence: Synthetic oligonucleotide
  Sense strand starting at position 611 of SEQ ID NO: 1610
gagaguugcuuuccugacu

SEQ ID NO: 126095 - RNA, 19 nt, Artificial Sequence
  Description of Artificial Sequence: Synthetic oligonucleotide
  Antisense strand to SEQ ID NO: 126094
agucaggaaagcaacucuc

SEQ ID NO: 126096 - RNA, 19 nt, Artificial Sequence
  Description of Artificial Sequence: Synthetic oligonucleotide
  Sense strand starting at position 639 of SEQ ID NO: 1610
guguucuuucugcuacuuu

SEQ ID NO: 126097 - RNA, 19 nt, Artificial Sequence
  Description of Artificial Sequence: Synthetic oligonucleotide
  Antisense strand to SEQ ID NO: 126096
aaaguagcagaaagaacac

SEQ ID NO: 126098 - RNA, 19 nt, Artificial Sequence
  Description of Artificial Sequence: Synthetic oligonucleotide
  Sense strand starting at position 769 of SEQ ID NO: 1610
aucuccucuccagauguua

SEQ ID NO: 126099 - RNA, 19 nt, Artificial Sequence
  Description of Artificial Sequence: Synthetic oligonucleotide
  Antisense strand to SEQ ID NO: 126098
uaacaucuggagaggagau

SEQ ID NO: 126100 - RNA, 19 nt, Artificial Sequence
  Description of Artificial Sequence: Synthetic oligonucleotide
  Sense strand starting at position 993 of SEQ ID NO: 1610
gagaucugcuggcugcaga

SEQ ID NO: 126101 - RNA, 19 nt, Artificial Sequence
  Description of Artificial Sequence: Synthetic oligonucleotide
  Antisense strand to SEQ ID NO: 126100
ucugcagccagcagaucuc

SEQ ID NO: 126102 - RNA, 19 nt, Artificial Sequence
  Description of Artificial Sequence: Synthetic oligonucleotide
  Sense strand starting at position 1228 of SEQ ID NO: 1610
ugaacaugccuuugccaga

SEQ ID NO: 126103 - RNA, 19 nt, Artificial Sequence
  Description of Artificial Sequence: Synthetic oligonucleotide
  Antisense strand to SEQ ID NO: 126102
ucuggcaaaggcauguuca

SEQ ID NO: 126104 - RNA, 19 nt, Artificial Sequence
  Description of Artificial Sequence: Synthetic oligonucleotide
  Sense strand starting at position 1300 of SEQ ID NO: 1610
cuuuaugcgcacuaucuaa

SEQ ID NO: 126105 - RNA, 19 nt, Artificial Sequence
  Description of Artificial Sequence: Synthetic oligonucleotide
  Antisense strand to SEQ ID NO: 126104
uuagauagugcgcauaaag

SEQ ID NO: 126106 - RNA, 19 nt, Artificial Sequence
  Description of Artificial Sequence: Synthetic oligonucleotide
  Sense strand starting at position 1441 of SEQ ID NO: 1610
ccacauugacccugaauga

SEQ ID NO: 126107 - RNA, 19 nt, Artificial Sequence
  Description of Artificial Sequence: Synthetic oligonucleotide
  Antisense strand to SEQ ID NO: 126106
ucauucagggucaaugugg

SEQ ID NO: 126108 - RNA, 19 nt, Artificial Sequence
  Description of Artificial Sequence: Synthetic oligonucleotide
  Sense strand starting at position 1450 of SEQ ID NO: 1610
cccugaaugauagguguua

SEQ ID NO: 126109 - RNA, 19 nt, Artificial Sequence
  Description of Artificial Sequence: Synthetic oligonucleotide
  Antisense strand to SEQ ID NO: 126108
uaacaccuaucauucaggg

SEQ ID NO: 126110 - RNA, 19 nt, Artificial Sequence
  Description of Artificial Sequence: Synthetic oligonucleotide
  Sense strand starting at position 1451 of SEQ ID NO: 1610
ccugaaugauagguguuau

SEQ ID NO: 126111 - RNA, 19 nt, Artificial Sequence
  Description of Artificial Sequence: Synthetic oligonucleotide
  Antisense strand to SEQ ID NO: 126110
auaacaccuaucauucagg

SEQ ID NO: 126112 - RNA, 19 nt, Artificial Sequence
  Description of Artificial Sequence: Synthetic oligonucleotide
  Sense strand starting at position 1452 of SEQ ID NO: 1610
cugaaugauagguguuauu

SEQ ID NO: 126113 - RNA, 19 nt, Artificial Sequence
  Description of Artificial Sequence: Synthetic oligonucleotide
  Antisense strand to SEQ ID NO: 126112
aauaacaccuaucauucag

SEQ ID NO: 126114 - RNA, 19 nt, Artificial Sequence
  Description of Artificial Sequence: Synthetic oligonucleotide
  Sense strand starting at position 1455 of SEQ ID NO: 1610
aaugauagguguuauuucu

SEQ ID NO: 126115 - RNA, 19 nt, Artificial Sequence
  Description of Artificial Sequence: Synthetic oligonucleotide
  Antisense strand to SEQ ID NO: 126114
agaaauaacaccuaucauu

SEQ ID NO: 126116 - RNA, 19 nt, Artificial Sequence
  Description of Artificial Sequence: Synthetic oligonucleotide
  Sense strand starting at position 1694 of SEQ ID NO: 1610
ugcgauaugcacgcuuacu

SEQ ID NO: 126117 - RNA, 19 nt, Artificial Sequence
  Description of Artificial Sequence: Synthetic oligonucleotide
  Antisense strand to SEQ ID NO: 126116
aguaagcgugcauaucgca

SEQ ID NO: 126118 - RNA, 19 nt, Artificial Sequence
  Description of Artificial Sequence: Synthetic oligonucleotide
  Sense strand starting at position 1695 of SEQ ID NO: 1610
gcgauaugcacgcuuacuc

SEQ ID NO: 126119 - RNA, 19 nt, Artificial Sequence
  Description of Artificial Sequence: Synthetic oligonucleotide
  Antisense strand to SEQ ID NO: 126118
gaguaagcgugcauaucgc

SEQ ID NO: 126120 - RNA, 19 nt, Artificial Sequence
  Description of Artificial Sequence: Synthetic oligonucleotide
  Sense strand starting at position 1988 of SEQ ID NO: 1610
ugaaacucugcucaguguu

SEQ ID NO: 126121 - RNA, 19 nt, Artificial Sequence
  Description of Artificial Sequence: Synthetic oligonucleotide
  Antisense strand to SEQ ID NO: 126120
aacacugagcagaguuuca

SEQ ID NO: 126122 - RNA, 19 nt, Artificial Sequence
  Description of Artificial Sequence: Synthetic oligonucleotide
  Sense strand starting at position 2149 of SEQ ID NO: 1610
agacucuguuacuugggaa

SEQ ID NO: 126123 - RNA, 19 nt, Artificial Sequence
  Description of Artificial Sequence: Synthetic oligonucleotide
  Antisense strand to SEQ ID NO: 126122
uucccaaguaacagagucu

SEQ ID NO: 126124 - RNA, 19 nt, Artificial Sequence
  Description of Artificial Sequence: Synthetic oligonucleotide
  Sense strand starting at position 2161 of SEQ ID NO: 1610
uugggaauccuccaucguu

SEQ ID NO: 126125 - RNA, 19 nt, Artificial Sequence
  Description of Artificial Sequence: Synthetic oligonucleotide
  Antisense strand to SEQ ID NO: 126124
aacgauggaggauucccaa

SEQ ID NO: 126126 - RNA, 19 nt, Artificial Sequence
  Description of Artificial Sequence: Synthetic oligonucleotide
  Sense strand starting at position 2199 of SEQ ID NO: 1610
cagaaugucaagcgugaag

SEQ ID NO: 126127 - RNA, 19 nt, Artificial Sequence
  Description of Artificial Sequence: Synthetic oligonucleotide
  Antisense strand to SEQ ID NO: 126126
cuucacgcuugacauucug

SEQ ID NO: 126128 - RNA, 19 nt, Artificial Sequence
  Description of Artificial Sequence: Synthetic oligonucleotide
  Sense strand starting at position 2201 of SEQ ID NO: 1610
gaaugucaagcgugaagau

SEQ ID NO: 126129 - RNA, 19 nt, Artificial Sequence
  Description of Artificial Sequence: Synthetic oligonucleotide
  Antisense strand to SEQ ID NO: 126128
aucuucacgcuugacauuc

SEQ ID NO: 126130 - RNA, 19 nt, Artificial Sequence
  Description of Artificial Sequence: Synthetic oligonucleotide
  Sense strand starting at position 2289 of SEQ ID NO: 1610
gagggaugguaauaccaaa

SEQ ID NO: 126131 - RNA, 19 nt, Artificial Sequence
  Description of Artificial Sequence: Synthetic oligonucleotide
  Antisense strand to SEQ ID NO: 126130
uuugguauuaccaucccuc

SEQ ID NO: 126132 - RNA, 19 nt, Artificial Sequence
  Description of Artificial Sequence: Synthetic oligonucleotide
  Sense strand starting at position 2318 of SEQ ID NO: 1610
gaggauauagcccgguauu

SEQ ID NO: 126133 - RNA, 19 nt, Artificial Sequence
  Description of Artificial Sequence: Synthetic oligonucleotide
  Antisense strand to SEQ ID NO: 126132
aauaccgggcuauauccuc

SEQ ID NO: 126134 - RNA, 19 nt, Artificial Sequence
  Description of Artificial Sequence: Synthetic oligonucleotide
  Sense strand starting at position 2319 of SEQ ID NO: 1610
aggauauagcccgguauua

SEQ ID NO: 126135 - RNA, 19 nt, Artificial Sequence
  Description of Artificial Sequence: Synthetic oligonucleotide
  Antisense strand to SEQ ID NO: 126134
uaauaccgggcuauauccu

SEQ ID NO: 126136 - RNA, 19 nt, Artificial Sequence
  Description of Artificial Sequence: Synthetic oligonucleotide
  Sense strand starting at position 2468 of SEQ ID NO: 1610
gguuacuuagccuggacaa

SEQ ID NO: 126137 - RNA, 19 nt, Artificial Sequence
  Description of Artificial Sequence: Synthetic oligonucleotide
  Antisense strand to SEQ ID NO: 126136
uuguccaggcuaaguaacc

SEQ ID NO: 126138 - RNA, 19 nt, Artificial Sequence
  Description of Artificial Sequence: Synthetic oligonucleotide
  Sense strand starting at position 2469 of SEQ ID NO: 1610
guuacuuagccuggacaaa

SEQ ID NO: 126139 - RNA, 19 nt, Artificial Sequence
  Description of Artificial Sequence: Synthetic oligonucleotide
  Antisense strand to SEQ ID NO: 126138
uuuguccaggcuaaguaac

SEQ ID NO: 126140 - RNA, 19 nt, Artificial Sequence
  Description of Artificial Sequence: Synthetic oligonucleotide
  Sense strand starting at position 2629 of SEQ ID NO: 1610
cucagagucuuguuaggac

SEQ ID NO: 126141 - RNA, 19 nt, Artificial Sequence
  Description of Artificial Sequence: Synthetic oligonucleotide
  Antisense strand to SEQ ID NO: 126140
guccuaacaagacucugag

SEQ ID NO: 126142 - RNA, 19 nt, Artificial Sequence
  Description of Artificial Sequence: Synthetic oligonucleotide
  Sense strand starting at position 2855 of SEQ ID NO: 1610
agaaaugcugcccauccua

SEQ ID NO: 126143 - RNA, 19 nt, Artificial Sequence
  Description of Artificial Sequence: Synthetic oligonucleotide
  Antisense strand to SEQ ID NO: 126142
uaggaugggcagcauuucu

SEQ ID NO: 126144 - RNA, 19 nt, Artificial Sequence
  Description of Artificial Sequence: Synthetic oligonucleotide
  Sense strand starting at position 3756 of SEQ ID NO: 1610
ugucuacugagaugugacu

SEQ ID NO: 126145 - RNA, 19 nt, Artificial Sequence
  Description of Artificial Sequence: Synthetic oligonucleotide
  Antisense strand to SEQ ID NO: 126144
agucacaucucaguagaca

SEQ ID NO: 126146 - RNA, 19 nt, Artificial Sequence
  Description of Artificial Sequence: Synthetic oligonucleotide
  Sense strand starting at position 3917 of SEQ ID NO: 1610
gggugaguuuggcugauca

SEQ ID NO: 126147 - RNA, 19 nt, Artificial Sequence
  Description of Artificial Sequence: Synthetic oligonucleotide
  Antisense strand to SEQ ID NO: 126146
ugaucagccaaacucaccc

SEQ ID NO: 126148 - RNA, 19 nt, Artificial Sequence
  Description of Artificial Sequence: Synthetic oligonucleotide
  Sense strand starting at position 3919 of SEQ ID NO: 1610
gugaguuuggcugaucaca

SEQ ID NO: 126149 - RNA, 19 nt, Artificial Sequence
  Description of Artificial Sequence: Synthetic oligonucleotide
  Antisense strand to SEQ ID NO: 126148
ugugaucagccaaacucac

SEQ ID NO: 126150 - RNA, 19 nt, Artificial Sequence
  Description of Artificial Sequence: Synthetic oligonucleotide
  Sense strand starting at position 3921 of SEQ ID NO: 1610
gaguuuggcugaucacaga

SEQ ID NO: 126151 - RNA, 19 nt, Artificial Sequence
  Description of Artificial Sequence: Synthetic oligonucleotide
  Antisense strand to SEQ ID NO: 126150
ucugugaucagccaaacuc

SEQ ID NO: 126152 - RNA, 19 nt, Artificial Sequence
  Description of Artificial Sequence: Synthetic oligonucleotide
  Sense strand starting at position 3941 of SEQ ID NO: 1610
uccugaggccuuugggaga

SEQ ID NO: 126153 - RNA, 19 nt, Artificial Sequence
  Description of Artificial Sequence: Synthetic oligonucleotide
  Antisense strand to SEQ ID NO: 126152
ucucccaaaggccucagga

SEQ ID NO: 126154 - RNA, 19 nt, Artificial Sequence
  Description of Artificial Sequence: Synthetic oligonucleotide
  Sense strand starting at position 3907 of SEQ ID NO: 1611
cugguuucagauuggaaga

SEQ ID NO: 126155 - RNA, 19 nt, Artificial Sequence
  Description of Artificial Sequence: Synthetic oligonucleotide
  Antisense strand to SEQ ID NO: 126154
ucuuccaaucugaaaccag

SEQ ID NO: 126156 - RNA, 19 nt, Artificial Sequence
  Description of Artificial Sequence: Synthetic oligonucleotide
  Sense strand starting at position 3877 of SEQ ID NO: 1611
ugaaucuugugcucucaaa

SEQ ID NO: 126157 - RNA, 19 nt, Artificial Sequence
  Description of Artificial Sequence: Synthetic oligonucleotide
  Antisense strand to SEQ ID NO: 126156
uuugagagcacaagauuca

SEQ ID NO: 126158 - RNA, 19 nt, Artificial Sequence
  Description of Artificial Sequence: Synthetic oligonucleotide
  Sense strand starting at position 3843 of SEQ ID NO: 1611
ucugacuucugcucugaca

SEQ ID NO: 126159 - RNA, 19 nt, Artificial Sequence
  Description of Artificial Sequence: Synthetic oligonucleotide
  Antisense strand to SEQ ID NO: 126158
ugucagagcagaagucaga

SEQ ID NO: 126160 - RNA, 19 nt, Artificial Sequence
  Description of Artificial Sequence: Synthetic oligonucleotide
  Sense strand starting at position 3763 of SEQ ID NO: 1611
agcuguacuuuccugcaau

SEQ ID NO: 126161 - RNA, 19 nt, Artificial Sequence
  Description of Artificial Sequence: Synthetic oligonucleotide
  Antisense strand to SEQ ID NO: 126160
auugcaggaaaguacagcu

SEQ ID NO: 126162 - RNA, 19 nt, Artificial Sequence
  Description of Artificial Sequence: Synthetic oligonucleotide
  Sense strand starting at position 3741 of SEQ ID NO: 1611
guagaacuuuauccagauu

SEQ ID NO: 126163 - RNA, 19 nt, Artificial Sequence
  Description of Artificial Sequence: Synthetic oligonucleotide
  Antisense strand to SEQ ID NO: 126162
aaucuggauaaaguucuac

SEQ ID NO: 126164 - RNA, 19 nt, Artificial Sequence
  Description of Artificial Sequence: Synthetic oligonucleotide
  Sense strand starting at position 3740 of SEQ ID NO: 1611
gguagaacuuuauccagau

SEQ ID NO: 126165 - RNA, 19 nt, Artificial Sequence
  Description of Artificial Sequence: Synthetic oligonucleotide
  Antisense strand to SEQ ID NO: 126164
aucuggauaaaguucuacc

SEQ ID NO: 126166 - RNA, 19 nt, Artificial Sequence
  Description of Artificial Sequence: Synthetic oligonucleotide
  Sense strand starting at position 3582 of SEQ ID NO: 1611
guccuugcucuguaaauuc

SEQ ID NO: 126167 - RNA, 19 nt, Artificial Sequence
  Description of Artificial Sequence: Synthetic oligonucleotide
  Antisense strand to SEQ ID NO: 126166
gaauuuacagagcaaggac

SEQ ID NO: 126168 - RNA, 19 nt, Artificial Sequence
  Description of Artificial Sequence: Synthetic oligonucleotide
  Sense strand starting at position 3450 of SEQ ID NO: 1611
cugugaguaacguggcaaa

SEQ ID NO: 126169 - RNA, 19 nt, Artificial Sequence
  Description of Artificial Sequence: Synthetic oligonucleotide
  Antisense strand to SEQ ID NO: 126168
uuugccacguuacucacag

SEQ ID NO: 126170 - RNA, 19 nt, Artificial Sequence
  Description of Artificial Sequence: Synthetic oligonucleotide
  Sense strand starting at position 3441 of SEQ ID NO: 1611
uccagaggccugugaguaa

SEQ ID NO: 126171 - RNA, 19 nt, Artificial Sequence
  Description of Artificial Sequence: Synthetic oligonucleotide
  Antisense strand to SEQ ID NO: 126170
uuacucacaggccucugga

SEQ ID NO: 126172 - RNA, 19 nt, Artificial Sequence
  Description of Artificial Sequence: Synthetic oligonucleotide
  Sense strand starting at position 3349 of SEQ ID NO: 1611
auauuuagucguugugugu

SEQ ID NO: 126173 - RNA, 19 nt, Artificial Sequence
  Description of Artificial Sequence: Synthetic oligonucleotide
  Antisense strand to SEQ ID NO: 126172
acacacaacgacuaaauau

SEQ ID NO: 126174 - RNA, 19 nt, Artificial Sequence
  Description of Artificial Sequence: Synthetic oligonucleotide
  Sense strand starting at position 3253 of SEQ ID NO: 1611
gggacuguaucucuugacu

SEQ ID NO: 126175 - RNA, 19 nt, Artificial Sequence
  Description of Artificial Sequence: Synthetic oligonucleotide
  Antisense strand to SEQ ID NO: 126174
agucaagagauacaguccc

SEQ ID NO: 126176 - RNA, 19 nt, Artificial Sequence
  Description of Artificial Sequence: Synthetic oligonucleotide
  Sense strand starting at position 3052 of SEQ ID NO: 1611
cuuguuucucaggauucca

SEQ ID NO: 126177 - RNA, 19 nt, Artificial Sequence
  Description of Artificial Sequence: Synthetic oligonucleotide
  Antisense strand to SEQ ID NO: 126176
uggaauccugagaaacaag

SEQ ID NO: 126178 - RNA, 19 nt, Artificial Sequence
  Description of Artificial Sequence: Synthetic oligonucleotide
  Sense strand starting at position 3025 of SEQ ID NO: 1611
gauaaauccuucuccguug

SEQ ID NO: 126179 - RNA, 19 nt, Artificial Sequence
  Description of Artificial Sequence: Synthetic oligonucleotide
  Antisense strand to SEQ ID NO: 126178
caacggagaaggauuuauc

SEQ ID NO: 126180 - RNA, 19 nt, Artificial Sequence
  Description of Artificial Sequence: Synthetic oligonucleotide
  Sense strand starting at position 2977 of SEQ ID NO: 1611
aacggaaacuguuagaaca

SEQ ID NO: 126181 - RNA, 19 nt, Artificial Sequence
  Description of Artificial Sequence: Synthetic oligonucleotide
  Antisense strand to SEQ ID NO: 126180
uguucuaacaguuuccguu

SEQ ID NO: 126182 - RNA, 19 nt, Artificial Sequence
  Description of Artificial Sequence: Synthetic oligonucleotide
  Sense strand starting at position 2806 of SEQ ID NO: 1611
ggcuaaugaggauggugaa

SEQ ID NO: 126183 - RNA, 19 nt, Artificial Sequence
  Description of Artificial Sequence: Synthetic oligonucleotide
  Antisense strand to SEQ ID NO: 126182
uucaccauccucauuagcc

SEQ ID NO: 126184 - RNA, 19 nt, Artificial Sequence
  Description of Artificial Sequence: Synthetic oligonucleotide
  Sense strand starting at position 2705 of SEQ ID NO: 1611
gcguccugggugugaagaa

SEQ ID NO: 126185 - RNA, 19 nt, Artificial Sequence
  Description of Artificial Sequence: Synthetic oligonucleotide
  Antisense strand to SEQ ID NO: 126184
uucuucacacccaggacgc

SEQ ID NO: 126186 - RNA, 19 nt, Artificial Sequence
  Description of Artificial Sequence: Synthetic oligonucleotide
  Sense strand starting at position 2639 of SEQ ID NO: 1611
auagauguccucugaauag

SEQ ID NO: 126187 - RNA, 19 nt, Artificial Sequence
  Description of Artificial Sequence: Synthetic oligonucleotide
  Antisense strand to SEQ ID NO: 126186
cuauucagaggacaucuau

SEQ ID NO: 126188 - RNA, 19 nt, Artificial Sequence
  Description of Artificial Sequence: Synthetic oligonucleotide
  Sense strand starting at position 2393 of SEQ ID NO: 1611
ccugaagaguucucucgca

SEQ ID NO: 126189 - RNA, 19 nt, Artificial Sequence
  Description of Artificial Sequence: Synthetic oligonucleotide
  Antisense strand to SEQ ID NO: 126188
ugcgagagaacucuucagg

SEQ ID NO: 126190 - RNA, 19 nt, Artificial Sequence
  Description of Artificial Sequence: Synthetic oligonucleotide
  Sense strand starting at position 1189 of SEQ ID NO: 1611
cuuuccucucucgagucaa

SEQ ID NO: 126191 - RNA, 19 nt, Artificial Sequence
  Description of Artificial Sequence: Synthetic oligonucleotide
  Antisense strand to SEQ ID NO: 126190
uugacucgagagaggaaag

SEQ ID NO: 126192 - RNA, 19 nt, Artificial Sequence
  Description of Artificial Sequence: Synthetic oligonucleotide
  Sense strand starting at position 998 of SEQ ID NO: 1611
guaugacucgcugaaucga

SEQ ID NO: 126193 - RNA, 19 nt, Artificial Sequence
  Description of Artificial Sequence: Synthetic oligonucleotide
  Antisense strand to SEQ ID NO: 126192
ucgauucagcgagucauac

SEQ ID NO: 126194 - RNA, 19 nt, Artificial Sequence
  Description of Artificial Sequence: Synthetic oligonucleotide
  Sense strand starting at position 996 of SEQ ID NO: 1611
acguaugacucgcugaauc

SEQ ID NO: 126195 - RNA, 19 nt, Artificial Sequence
  Description of Artificial Sequence: Synthetic oligonucleotide
  Antisense strand to SEQ ID NO: 126194
gauucagcgagucauacgu

SEQ ID NO: 126196 - RNA, 19 nt, Artificial Sequence
  Description of Artificial Sequence: Synthetic oligonucleotide
  Sense strand starting at position 987 of SEQ ID NO: 1611
acguuuccaacguaugacu

SEQ ID NO: 126197 - RNA, 19 nt, Artificial Sequence
  Description of Artificial Sequence: Synthetic oligonucleotide
  Antisense strand to SEQ ID NO: 126196
agucauacguuggaaacgu

SEQ ID NO: 126198 - RNA, 19 nt, Artificial Sequence
  Description of Artificial Sequence: Synthetic oligonucleotide
  Sense strand starting at position 985 of SEQ ID NO: 1611
aaacguuuccaacguauga

SEQ ID NO: 126199 - RNA, 19 nt, Artificial Sequence
  Description of Artificial Sequence: Synthetic oligonucleotide
  Antisense strand to SEQ ID NO: 126198
ucauacguuggaaacguuu

SEQ ID NO: 126200 - RNA, 19 nt, Artificial Sequence
  Description of Artificial Sequence: Synthetic oligonucleotide
  Sense strand starting at position 965 of SEQ ID NO: 1611
uaacgauaguuugugaauc

SEQ ID NO: 126201 - RNA, 19 nt, Artificial Sequence
  Description of Artificial Sequence: Synthetic oligonucleotide
  Antisense strand to SEQ ID NO: 126200
gauucacaaacuaucguua

SEQ ID NO: 126202 - RNA, 19 nt, Artificial Sequence
  Description of Artificial Sequence: Synthetic oligonucleotide
  Sense strand starting at position 824 of SEQ ID NO: 1611
guacucuuuccuuggcaca

SEQ ID NO: 126203 - RNA, 19 nt, Artificial Sequence
  Description of Artificial Sequence: Synthetic oligonucleotide
  Antisense strand to SEQ ID NO: 126202
ugugccaaggaaagaguac

SEQ ID NO: 126204 - RNA, 19 nt, Artificial Sequence
  Description of Artificial Sequence: Synthetic oligonucleotide
  Sense strand starting at position 634 of SEQ ID NO: 1611
uguguucugaaugaaugga

SEQ ID NO: 126205 - RNA, 19 nt, Artificial Sequence
  Description of Artificial Sequence: Synthetic oligonucleotide
  Antisense strand to SEQ ID NO: 126204
uccauucauucagaacaca

SEQ ID NO: 126206 - RNA, 19 nt, Artificial Sequence
  Description of Artificial Sequence: Synthetic oligonucleotide
  Sense strand starting at position 627 of SEQ ID NO: 1611
uuaaaccuguguucugaau

SEQ ID NO: 126207 - RNA, 19 nt, Artificial Sequence
  Description of Artificial Sequence: Synthetic oligonucleotide
  Antisense strand to SEQ ID NO: 126206
auucagaacacagguuuaa

SEQ ID NO: 126208 - RNA, 19 nt, Artificial Sequence
  Description of Artificial Sequence: Synthetic oligonucleotide
  Sense strand starting at position 547 of SEQ ID NO: 1611
gcuauugcuuauuuaaguu

SEQ ID NO: 126209 - RNA, 19 nt, Artificial Sequence
  Description of Artificial Sequence: Synthetic oligonucleotide
  Antisense strand to SEQ ID NO: 126208
aacuuaaauaagcaauagc

SEQ ID NO: 126210 - RNA, 19 nt, Artificial Sequence
  Description of Artificial Sequence: Synthetic oligonucleotide
  Sense strand starting at position 546 of SEQ ID NO: 1611
ugcuauugcuuauuuaagu

SEQ ID NO: 126211 - RNA, 19 nt, Artificial Sequence
  Description of Artificial Sequence: Synthetic oligonucleotide
  Antisense strand to SEQ ID NO: 126210
acuuaaauaagcaauagca

SEQ ID NO: 126212 - RNA, 19 nt, Artificial Sequence
  Description of Artificial Sequence: Synthetic oligonucleotide
  Sense strand starting at position 539 of SEQ ID NO: 1611
ccguuauugcuauugcuua

SEQ ID NO: 126213 - RNA, 19 nt, Artificial Sequence
  Description of Artificial Sequence: Synthetic oligonucleotide
  Antisense strand to SEQ ID NO: 126212
uaagcaauagcaauaacgg

SEQ ID NO: 126214 - RNA, 19 nt, Artificial Sequence
  Description of Artificial Sequence: Synthetic oligonucleotide
  Sense strand starting at position 507 of SEQ ID NO: 1611
gugcuaugcccucauuaca

SEQ ID NO: 126215 - RNA, 19 nt, Artificial Sequence
  Description of Artificial Sequence: Synthetic oligonucleotide
  Antisense strand to SEQ ID NO: 126214
uguaaugagggcauagcac

SEQ ID NO: 126216 - RNA, 19 nt, Artificial Sequence
  Description of Artificial Sequence: Synthetic oligonucleotide
  Sense strand starting at position 505 of SEQ ID NO: 1611
gugugcuaugcccucauua

SEQ ID NO: 126217 - RNA, 19 nt, Artificial Sequence
  Description of Artificial Sequence: Synthetic oligonucleotide
  Antisense strand to SEQ ID NO: 126216
uaaugagggcauagcacac

SEQ ID NO: 126218 - RNA, 19 nt, Artificial Sequence
  Description of Artificial Sequence: Synthetic oligonucleotide
  Sense strand starting at position 480 of SEQ ID NO: 1611
ggaauucucugauccucac

SEQ ID NO: 126219 - RNA, 19 nt, Artificial Sequence
  Description of Artificial Sequence: Synthetic oligonucleotide
  Antisense strand to SEQ ID NO: 126218
gugaggaucagagaauucc

SEQ ID NO: 126220 - RNA, 19 nt, Artificial Sequence
  Description of Artificial Sequence: Synthetic oligonucleotide
  Sense strand starting at position 477 of SEQ ID NO: 1611
ucuggaauucucugauccu

SEQ ID NO: 126221 - RNA, 19 nt, Artificial Sequence
  Description of Artificial Sequence: Synthetic oligonucleotide
  Antisense strand to SEQ ID NO: 126220
aggaucagagaauuccaga

SEQ ID NO: 126222 - RNA, 19 nt, Artificial Sequence
  Description of Artificial Sequence: Synthetic oligonucleotide
  Sense strand starting at position 344 of SEQ ID NO: 1611
ucaucaauuugggaugaag

SEQ ID NO: 126223 - RNA, 19 nt, Artificial Sequence
  Description of Artificial Sequence: Synthetic oligonucleotide
  Antisense strand to SEQ ID NO: 126222
cuucaucccaaauugauga

SEQ ID NO: 126224 - RNA, 19 nt, Artificial Sequence
  Description of Artificial Sequence: Synthetic oligonucleotide
  Sense strand starting at position 343 of SEQ ID NO: 1611
cucaucaauuugggaugaa

SEQ ID NO: 126225 - RNA, 19 nt, Artificial Sequence
  Description of Artificial Sequence: Synthetic oligonucleotide
  Antisense strand to SEQ ID NO: 126224
uucaucccaaauugaugag

SEQ ID NO: 126226 - RNA, 19 nt, Artificial Sequence
  Description of Artificial Sequence: Synthetic oligonucleotide
  Sense strand starting at position 342 of SEQ ID NO: 1611
gcucaucaauuugggauga

SEQ ID NO: 126227 - RNA, 19 nt, Artificial Sequence
  Description of Artificial Sequence: Synthetic oligonucleotide
  Antisense strand to SEQ ID NO: 126226
ucaucccaaauugaugagc

SEQ ID NO: 126228 - RNA, 19 nt, Artificial Sequence
  Description of Artificial Sequence: Synthetic oligonucleotide
  Sense strand starting at position 181 of SEQ ID NO: 1611
gguagcaacguauaaacaa

SEQ ID NO: 126229 - RNA, 19 nt, Artificial Sequence
  Description of Artificial Sequence: Synthetic oligonucleotide
  Antisense strand to SEQ ID NO: 126228
uuguuuauacguugcuacc

SEQ ID NO: 126230 - RNA, 19 nt, Artificial Sequence
  Description of Artificial Sequence: Synthetic oligonucleotide
  Sense strand starting at position 162 of SEQ ID NO: 1611
gccaucucuuuguugggau

SEQ ID NO: 126231 - RNA, 19 nt, Artificial Sequence
  Description of Artificial Sequence: Synthetic oligonucleotide
  Antisense strand to SEQ ID NO: 126230
aucccaacaaagagauggc

SEQ ID NO: 126232 - RNA, 19 nt, Artificial Sequence
  Description of Artificial Sequence: Synthetic oligonucleotide
  Sense strand starting at position 126 of SEQ ID NO: 1611
agaguagacuaccagggau

SEQ ID NO: 126233 - RNA, 19 nt, Artificial Sequence
  Description of Artificial Sequence: Synthetic oligonucleotide
  Antisense strand to SEQ ID NO: 126232
aucccugguagucuacucu

SEQ ID NO: 126234 - RNA, 19 nt, Artificial Sequence
  Description of Artificial Sequence: Synthetic oligonucleotide
  Sense strand starting at position 3840 of SEQ ID NO: 1612
guggaaagcaagugagaaa

SEQ ID NO: 126235 - RNA, 19 nt, Artificial Sequence
  Description of Artificial Sequence: Synthetic oligonucleotide
  Antisense strand to SEQ ID NO: 126234
uuucucacuugcuuuccac

SEQ ID NO: 126236 - RNA, 19 nt, Artificial Sequence
  Description of Artificial Sequence: Synthetic oligonucleotide
  Sense strand starting at position 3763 of SEQ ID NO: 1612
cucucaguguucuuguaga

SEQ ID NO: 126237 - RNA, 19 nt, Artificial Sequence
  Description of Artificial Sequence: Synthetic oligonucleotide
  Antisense strand to SEQ ID NO: 126236
ucuacaagaacacugagag

SEQ ID NO: 126238 - RNA, 19 nt, Artificial Sequence
  Description of Artificial Sequence: Synthetic oligonucleotide
  Sense strand starting at position 3682 of SEQ ID NO: 1612
cugguuucagauuggaaga

SEQ ID NO: 126239 - RNA, 19 nt, Artificial Sequence
  Description of Artificial Sequence: Synthetic oligonucleotide
  Antisense strand to SEQ ID NO: 126238
ucuuccaaucugaaaccag

SEQ ID NO: 126240 - RNA, 19 nt, Artificial Sequence
  Description of Artificial Sequence: Synthetic oligonucleotide
  Sense strand starting at position 3652 of SEQ ID NO: 1612
ugaaucuugugcucucaaa

SEQ ID NO: 126241 - RNA, 19 nt, Artificial Sequence
  Description of Artificial Sequence: Synthetic oligonucleotide
  Antisense strand to SEQ ID NO: 126240
uuugagagcacaagauuca

SEQ ID NO: 126242 - RNA, 19 nt, Artificial Sequence
  Description of Artificial Sequence: Synthetic oligonucleotide
  Sense strand starting at position 3618 of SEQ ID NO: 1612
ucugacuucugcucugaca

SEQ ID NO: 126243 - RNA, 19 nt, Artificial Sequence
  Description of Artificial Sequence: Synthetic oligonucleotide
  Antisense strand to SEQ ID NO: 126242
ugucagagcagaagucaga

SEQ ID NO: 126244 - RNA, 19 nt, Artificial Sequence
  Description of Artificial Sequence: Synthetic oligonucleotide
  Sense strand starting at position 3538 of SEQ ID NO: 1612
agcuguacuuuccugcaau

SEQ ID NO: 126245 - RNA, 19 nt, Artificial Sequence
  Description of Artificial Sequence: Synthetic oligonucleotide
  Antisense strand to SEQ ID NO: 126244
auugcaggaaaguacagcu

SEQ ID NO: 126246 - RNA, 19 nt, Artificial Sequence
  Description of Artificial Sequence: Synthetic oligonucleotide
  Sense strand starting at position 3516 of SEQ ID NO: 1612
guagaacuuuauccagauu

SEQ ID NO: 126247 - RNA, 19 nt, Artificial Sequence
  Description of Artificial Sequence: Synthetic oligonucleotide
  Antisense strand to SEQ ID NO: 126246
aaucuggauaaaguucuac

SEQ ID NO: 126248 - RNA, 19 nt, Artificial Sequence
  Description of Artificial Sequence: Synthetic oligonucleotide
  Sense strand starting at position 3515 of SEQ ID NO: 1612
gguagaacuuuauccagau

SEQ ID NO: 126249 - RNA, 19 nt, Artificial Sequence
  Description of Artificial Sequence: Synthetic oligonucleotide
  Antisense strand to SEQ ID NO: 126248
aucuggauaaaguucuacc

SEQ ID NO: 126250 - RNA, 19 nt, Artificial Sequence
  Description of Artificial Sequence: Synthetic oligonucleotide
  Sense strand starting at position 3357 of SEQ ID NO: 1612
guccuugcucuguaaauuc

SEQ ID NO: 126251 - RNA, 19 nt, Artificial Sequence
  Description of Artificial Sequence: Synthetic oligonucleotide
  Antisense strand to SEQ ID NO: 126250
gaauuuacagagcaaggac

SEQ ID NO: 126252 - RNA, 19 nt, Artificial Sequence
  Description of Artificial Sequence: Synthetic oligonucleotide
  Sense strand starting at position 3225 of SEQ ID NO: 1612
cugugaguaacguggcaaa

SEQ ID NO: 126253 - RNA, 19 nt, Artificial Sequence
  Description of Artificial Sequence: Synthetic oligonucleotide
  Antisense strand to SEQ ID NO: 126252
uuugccacguuacucacag

SEQ ID NO: 126254 - RNA, 19 nt, Artificial Sequence
  Description of Artificial Sequence: Synthetic oligonucleotide
  Sense strand starting at position 3216 of SEQ ID NO: 1612
uccagaggccugugaguaa

SEQ ID NO: 126255 - RNA, 19 nt, Artificial Sequence
  Description of Artificial Sequence: Synthetic oligonucleotide
  Antisense strand to SEQ ID NO: 126254
uuacucacaggccucugga

SEQ ID NO: 126256 - RNA, 19 nt, Artificial Sequence
  Description of Artificial Sequence: Synthetic oligonucleotide
  Sense strand starting at position 3132 of SEQ ID NO: 1612
ucguuguguguuggagaag

SEQ ID NO: 126257 - RNA, 19 nt, Artificial Sequence
  Description of Artificial Sequence: Synthetic oligonucleotide
  Antisense strand to SEQ ID NO: 126256
cuucuccaacacacaacga

SEQ ID NO: 126258 - RNA, 19 nt, Artificial Sequence
  Description of Artificial Sequence: Synthetic oligonucleotide
  Sense strand starting at position 3124 of SEQ ID NO: 1612
auauuuagucguugugugu

SEQ ID NO: 126259 - RNA, 19 nt, Artificial Sequence
  Description of Artificial Sequence: Synthetic oligonucleotide
  Antisense strand to SEQ ID NO: 126258
acacacaacgacuaaauau

SEQ ID NO: 126260 - RNA, 19 nt, Artificial Sequence
  Description of Artificial Sequence: Synthetic oligonucleotide
  Sense strand starting at position 3028 of SEQ ID NO: 1612
gggacuguaucucuugacu

SEQ ID NO: 126261 - RNA, 19 nt, Artificial Sequence
  Description of Artificial Sequence: Synthetic oligonucleotide
  Antisense strand to SEQ ID NO: 126260
agucaagagauacaguccc

SEQ ID NO: 126262 - RNA, 19 nt, Artificial Sequence
  Description of Artificial Sequence: Synthetic oligonucleotide
  Sense strand starting at position 2827 of SEQ ID NO: 1612
cuuguuucucaggauucca

SEQ ID NO: 126263 - RNA, 19 nt, Artificial Sequence
  Description of Artificial Sequence: Synthetic oligonucleotide
  Antisense strand to SEQ ID NO: 126262
uggaauccugagaaacaag

SEQ ID NO: 126264 - RNA, 19 nt, Artificial Sequence
  Description of Artificial Sequence: Synthetic oligonucleotide
  Sense strand starting at position 2800 of SEQ ID NO: 1612
gauaaauccuucuccguug

SEQ ID NO: 126265 - RNA, 19 nt, Artificial Sequence
  Description of Artificial Sequence: Synthetic oligonucleotide
  Antisense strand to SEQ ID NO: 126264
caacggagaaggauuuauc

SEQ ID NO: 126266 - RNA, 19 nt, Artificial Sequence
  Description of Artificial Sequence: Synthetic oligonucleotide
  Sense strand starting at position 2752 of SEQ ID NO: 1612
aacggaaacuguuagaaca

SEQ ID NO: 126267 - RNA, 19 nt, Artificial Sequence
  Description of Artificial Sequence: Synthetic oligonucleotide
  Antisense strand to SEQ ID NO: 126266
uguucuaacaguuuccguu

SEQ ID NO: 126268 - RNA, 19 nt, Artificial Sequence
  Description of Artificial Sequence: Synthetic oligonucleotide
  Sense strand starting at position 2581 of SEQ ID NO: 1612
ggcuaaugaggauggugaa

SEQ ID NO: 126269 - RNA, 19 nt, Artificial Sequence
  Description of Artificial Sequence: Synthetic oligonucleotide
  Antisense strand to SEQ ID NO: 126268
uucaccauccucauuagcc

SEQ ID NO: 126270 - RNA, 19 nt, Artificial Sequence
  Description of Artificial Sequence: Synthetic oligonucleotide
  Sense strand starting at position 2480 of SEQ ID NO: 1612
gcguccugggugugaagaa

SEQ ID NO: 126271 - RNA, 19 nt, Artificial Sequence
  Description of Artificial Sequence: Synthetic oligonucleotide
  Antisense strand to SEQ ID NO: 126270
uucuucacacccaggacgc

SEQ ID NO: 126272 - RNA, 19 nt, Artificial Sequence
  Description of Artificial Sequence: Synthetic oligonucleotide
  Sense strand starting at position 2414 of SEQ ID NO: 1612
auagauguccucugaauag

SEQ ID NO: 126273 - RNA, 19 nt, Artificial Sequence
  Description of Artificial Sequence: Synthetic oligonucleotide
  Antisense strand to SEQ ID NO: 126272
cuauucagaggacaucuau

SEQ ID NO: 126274 - RNA, 19 nt, Artificial Sequence
  Description of Artificial Sequence: Synthetic oligonucleotide
  Sense strand starting at position 2168 of SEQ ID NO: 1612
ccugaagaguucucucgca

SEQ ID NO: 126275 - RNA, 19 nt, Artificial Sequence
  Description of Artificial Sequence: Synthetic oligonucleotide
  Antisense strand to SEQ ID NO: 126274
ugcgagagaacucuucagg

SEQ ID NO: 126276 - RNA, 19 nt, Artificial Sequence
  Description of Artificial Sequence: Synthetic oligonucleotide
  Sense strand starting at position 964 of SEQ ID NO: 1612
cuuuccucucucgagucaa

SEQ ID NO: 126277 - RNA, 19 nt, Artificial Sequence
  Description of Artificial Sequence: Synthetic oligonucleotide
  Antisense strand to SEQ ID NO: 126276
uugacucgagagaggaaag

SEQ ID NO: 126278 - RNA, 19 nt, Artificial Sequence
  Description of Artificial Sequence: Synthetic oligonucleotide
  Sense strand starting at position 773 of SEQ ID NO: 1612
guaugacucgcugaaucga

SEQ ID NO: 126279 - RNA, 19 nt, Artificial Sequence
  Description of Artificial Sequence: Synthetic oligonucleotide
  Antisense strand to SEQ ID NO: 126278
ucgauucagcgagucauac

SEQ ID NO: 126280 - RNA, 19 nt, Artificial Sequence
  Description of Artificial Sequence: Synthetic oligonucleotide
  Sense strand starting at position 771 of SEQ ID NO: 1612
acguaugacucgcugaauc

SEQ ID NO: 126281 - RNA, 19 nt, Artificial Sequence
  Description of Artificial Sequence: Synthetic oligonucleotide
  Antisense strand to SEQ ID NO: 126280
gauucagcgagucauacgu

SEQ ID NO: 126282 - RNA, 19 nt, Artificial Sequence
  Description of Artificial Sequence: Synthetic oligonucleotide
  Sense strand starting at position 762 of SEQ ID NO: 1612
acguuuccaacguaugacu

SEQ ID NO: 126283 - RNA, 19 nt, Artificial Sequence
  Description of Artificial Sequence: Synthetic oligonucleotide
  Antisense strand to SEQ ID NO: 126282
agucauacguuggaaacgu

SEQ ID NO: 126284 - RNA, 19 nt, Artificial Sequence
  Description of Artificial Sequence: Synthetic oligonucleotide
  Sense strand starting at position 760 of SEQ ID NO: 1612
aaacguuuccaacguauga

SEQ ID NO: 126285 - RNA, 19 nt, Artificial Sequence
  Description of Artificial Sequence: Synthetic oligonucleotide
  Antisense strand to SEQ ID NO: 126284
ucauacguuggaaacguuu

SEQ ID NO: 126286 - RNA, 19 nt, Artificial Sequence
  Description of Artificial Sequence: Synthetic oligonucleotide
  Sense strand starting at position 740 of SEQ ID NO: 1612
uaacgauaguuugugaauc

SEQ ID NO: 126287 - RNA, 19 nt, Artificial Sequence
  Description of Artificial Sequence: Synthetic oligonucleotide
  Antisense strand to SEQ ID NO: 126286
gauucacaaacuaucguua

SEQ ID NO: 126288 - RNA, 19 nt, Artificial Sequence
  Description of Artificial Sequence: Synthetic oligonucleotide
  Sense strand starting at position 599 of SEQ ID NO: 1612
guacucuuuccuuggcaca

SEQ ID NO: 126289 - RNA, 19 nt, Artificial Sequence
  Description of Artificial Sequence: Synthetic oligonucleotide
  Antisense strand to SEQ ID NO: 126288
ugugccaaggaaagaguac

SEQ ID NO: 126290 - RNA, 19 nt, Artificial Sequence
  Description of Artificial Sequence: Synthetic oligonucleotide
  Sense strand starting at position 409 of SEQ ID NO: 1612
uguguucugaaugaaugga

SEQ ID NO: 126291 - RNA, 19 nt, Artificial Sequence
  Description of Artificial Sequence: Synthetic oligonucleotide
  Antisense strand to SEQ ID NO: 126290
uccauucauucagaacaca

SEQ ID NO: 126292 - RNA, 19 nt, Artificial Sequence
  Description of Artificial Sequence: Synthetic oligonucleotide
  Sense strand starting at position 402 of SEQ ID NO: 1612
uuaaaccuguguucugaau

SEQ ID NO: 126293 - RNA, 19 nt, Artificial Sequence
  Description of Artificial Sequence: Synthetic oligonucleotide
  Antisense strand to SEQ ID NO: 126292
auucagaacacagguuuaa

SEQ ID NO: 126294 - RNA, 19 nt, Artificial Sequence
  Description of Artificial Sequence: Synthetic oligonucleotide
  Sense strand starting at position 322 of SEQ ID NO: 1612
gcuauugcuuauuuaaguu

SEQ ID NO: 126295 - RNA, 19 nt, Artificial Sequence
  Description of Artificial Sequence: Synthetic oligonucleotide
  Antisense strand to SEQ ID NO: 126294
aacuuaaauaagcaauagc

SEQ ID NO: 126296 - RNA, 19 nt, Artificial Sequence
  Description of Artificial Sequence: Synthetic oligonucleotide
  Sense strand starting at position 321 of SEQ ID NO: 1612
ugcuauugcuuauuuaagu

SEQ ID NO: 126297 - RNA, 19 nt, Artificial Sequence
  Description of Artificial Sequence: Synthetic oligonucleotide
  Antisense strand to SEQ ID NO: 126296
acuuaaauaagcaauagca

SEQ ID NO: 126298 - RNA, 19 nt, Artificial Sequence
  Description of Artificial Sequence: Synthetic oligonucleotide
  Sense strand starting at position 314 of SEQ ID NO: 1612
ccguuauugcuauugcuua

SEQ ID NO: 126299 - RNA, 19 nt, Artificial Sequence
  Description of Artificial Sequence: Synthetic oligonucleotide
  Antisense strand to SEQ ID NO: 126298
uaagcaauagcaauaacgg

SEQ ID NO: 126300 - RNA, 19 nt, Artificial Sequence
  Description of Artificial Sequence: Synthetic oligonucleotide
  Sense strand starting at position 282 of SEQ ID NO: 1612
gugcuaugcccucauuaca

SEQ ID NO: 126301 - RNA, 19 nt, Artificial Sequence
  Description of Artificial Sequence: Synthetic oligonucleotide
  Antisense strand to SEQ ID NO: 126300
uguaaugagggcauagcac

SEQ ID NO: 126302 - RNA, 19 nt, Artificial Sequence
  Description of Artificial Sequence: Synthetic oligonucleotide
  Sense strand starting at position 280 of SEQ ID NO: 1612
gugugcuaugcccucauua

SEQ ID NO: 126303 - RNA, 19 nt, Artificial Sequence
  Description of Artificial Sequence: Synthetic oligonucleotide
  Antisense strand to SEQ ID NO: 126302
uaaugagggcauagcacac

SEQ ID NO: 126304 - RNA, 19 nt, Artificial Sequence
  Description of Artificial Sequence: Synthetic oligonucleotide
  Sense strand starting at position 255 of SEQ ID NO: 1612
ggaauucucugauccucac

SEQ ID NO: 126305 - RNA, 19 nt, Artificial Sequence
  Description of Artificial Sequence: Synthetic oligonucleotide
  Antisense strand to SEQ ID NO: 126304
gugaggaucagagaauucc

SEQ ID NO: 126306 - RNA, 19 nt, Artificial Sequence
  Description of Artificial Sequence: Synthetic oligonucleotide
  Sense strand starting at position 252 of SEQ ID NO: 1612
ucuggaauucucugauccu

SEQ ID NO: 126307 - RNA, 19 nt, Artificial Sequence
  Description of Artificial Sequence: Synthetic oligonucleotide
  Antisense strand to SEQ ID NO: 126306
aggaucagagaauuccaga

SEQ ID NO: 126308 - RNA, 19 nt, Artificial Sequence
  Description of Artificial Sequence: Synthetic oligonucleotide
  Sense strand starting at position 119 of SEQ ID NO: 1612
ucaucaauuugggaugaag

SEQ ID NO: 126309 - RNA, 19 nt, Artificial Sequence
  Description of Artificial Sequence: Synthetic oligonucleotide
  Antisense strand to SEQ ID NO: 126308
cuucaucccaaauugauga

SEQ ID NO: 126310 - RNA, 19 nt, Artificial Sequence
  Description of Artificial Sequence: Synthetic oligonucleotide
  Sense strand starting at position 118 of SEQ ID NO: 1612
cucaucaauuugggaugaa

SEQ ID NO: 126311 - RNA, 19 nt, Artificial Sequence
  Description of Artificial Sequence: Synthetic oligonucleotide
  Antisense strand to SEQ ID NO: 126310
uucaucccaaauugaugag

SEQ ID NO: 126312 - RNA, 19 nt, Artificial Sequence
  Description of Artificial Sequence: Synthetic oligonucleotide
  Sense strand starting at position 117 of SEQ ID NO: 1612
gcucaucaauuugggauga

SEQ ID NO: 126313 - RNA, 19 nt, Artificial Sequence
  Description of Artificial Sequence: Synthetic oligonucleotide
  Antisense strand to SEQ ID NO: 126312
ucaucccaaauugaugagc

SEQ ID NO: 126314 - RNA, 19 nt, Artificial Sequence
  Description of Artificial Sequence: Synthetic oligonucleotide
  Sense strand starting at position 7 of SEQ ID NO: 1613
ucaugagaguccuucucaa

SEQ ID NO: 126315 - RNA, 19 nt, Artificial Sequence
  Description of Artificial Sequence: Synthetic oligonucleotide
  Antisense strand to SEQ ID NO: 126314
uugagaaggacucucauga

SEQ ID NO: 126316 - RNA, 19 nt, Artificial Sequence
  Description of Artificial Sequence: Synthetic oligonucleotide
  Sense strand starting at position 66 of SEQ ID NO: 1613
cccuaucuaucaguauaga

SEQ ID NO: 126317 - RNA, 19 nt, Artificial Sequence
  Description of Artificial Sequence: Synthetic oligonucleotide
  Antisense strand to SEQ ID NO: 126316
ucuauacugauagauaggg

SEQ ID NO: 126318 - RNA, 19 nt, Artificial Sequence
  Description of Artificial Sequence: Synthetic oligonucleotide
  Sense strand starting at position 113 of SEQ ID NO: 1613
guuuaauucuuagugaacu

SEQ ID NO: 126319 - RNA, 19 nt, Artificial Sequence
  Description of Artificial Sequence: Synthetic oligonucleotide
  Antisense strand to SEQ ID NO: 126318
aguucacuaagaauuaaac

SEQ ID NO: 126320 - RNA, 19 nt, Artificial Sequence
  Description of Artificial Sequence: Synthetic oligonucleotide
  Sense strand starting at position 127 of SEQ ID NO: 1613
gaacuacucuuaguggacu

SEQ ID NO: 126321 - RNA, 19 nt, Artificial Sequence
  Description of Artificial Sequence: Synthetic oligonucleotide
  Antisense strand to SEQ ID NO: 126320
aguccacuaagaguaguuc

SEQ ID NO: 126322 - RNA, 19 nt, Artificial Sequence
  Description of Artificial Sequence: Synthetic oligonucleotide
  Sense strand starting at position 302 of SEQ ID NO: 1613
guggcucuggcgagauuaa

SEQ ID NO: 126323 - RNA, 19 nt, Artificial Sequence
  Description of Artificial Sequence: Synthetic oligonucleotide
  Antisense strand to SEQ ID NO: 126322
uuaaucucgccagagccac

SEQ ID NO: 126324 - RNA, 19 nt, Artificial Sequence
  Description of Artificial Sequence: Synthetic oligonucleotide
  Sense strand starting at position 303 of SEQ ID NO: 1613
uggcucuggcgagauuaaa

SEQ ID NO: 126325 - RNA, 19 nt, Artificial Sequence
  Description of Artificial Sequence: Synthetic oligonucleotide
  Antisense strand to SEQ ID NO: 126324
uuuaaucucgccagagcca

SEQ ID NO: 126326 - RNA, 19 nt, Artificial Sequence
  Description of Artificial Sequence: Synthetic oligonucleotide
  Sense strand starting at position 413 of SEQ ID NO: 1613
cuccaagaagucugaccau

SEQ ID NO: 126327 - RNA, 19 nt, Artificial Sequence
  Description of Artificial Sequence: Synthetic oligonucleotide
  Antisense strand to SEQ ID NO: 126326
auggucagacuucuuggag

SEQ ID NO: 126328 - RNA, 19 nt, Artificial Sequence
  Description of Artificial Sequence: Synthetic oligonucleotide
  Sense strand starting at position 519 of SEQ ID NO: 1613
ucaagauguuagucaaauu

SEQ ID NO: 126329 - RNA, 19 nt, Artificial Sequence
  Description of Artificial Sequence: Synthetic oligonucleotide
  Antisense strand to SEQ ID NO: 126328
aauuugacuaacaucuuga

SEQ ID NO: 126330 - RNA, 19 nt, Artificial Sequence
  Description of Artificial Sequence: Synthetic oligonucleotide
  Sense strand starting at position 623 of SEQ ID NO: 1613
agaaccacuugugucauua

SEQ ID NO: 126331 - RNA, 19 nt, Artificial Sequence
  Description of Artificial Sequence: Synthetic oligonucleotide
  Antisense strand to SEQ ID NO: 126330
uaaugacacaagugguucu

SEQ ID NO: 126332 - RNA, 19 nt, Artificial Sequence
  Description of Artificial Sequence: Synthetic oligonucleotide
  Sense strand starting at position 744 of SEQ ID NO: 1613
gagguuuccugaccuagac

SEQ ID NO: 126333 - RNA, 19 nt, Artificial Sequence
  Description of Artificial Sequence: Synthetic oligonucleotide
  Antisense strand to SEQ ID NO: 126332
gucuaggucaggaaaccuc

SEQ ID NO: 126334 - RNA, 19 nt, Artificial Sequence
  Description of Artificial Sequence: Synthetic oligonucleotide
  Sense strand starting at position 777 of SEQ ID NO: 1613
cucucaaguuaauuguaca

SEQ ID NO: 126335 - RNA, 19 nt, Artificial Sequence
  Description of Artificial Sequence: Synthetic oligonucleotide
  Antisense strand to SEQ ID NO: 126334
uguacaauuaacuugagag

SEQ ID NO: 126336 - RNA, 19 nt, Artificial Sequence
  Description of Artificial Sequence: Synthetic oligonucleotide
  Sense strand starting at position 856 of SEQ ID NO: 1613
gugaaaccuggaugcaauc

SEQ ID NO: 126337 - RNA, 19 nt, Artificial Sequence
  Description of Artificial Sequence: Synthetic oligonucleotide
  Antisense strand to SEQ ID NO: 126336
gauugcauccagguuucac

SEQ ID NO: 126338 - RNA, 19 nt, Artificial Sequence
  Description of Artificial Sequence: Synthetic oligonucleotide
  Sense strand starting at position 872 of SEQ ID NO: 1613
aucagaguggugcaauuau

SEQ ID NO: 126339 - RNA, 19 nt, Artificial Sequence
  Description of Artificial Sequence: Synthetic oligonucleotide
  Antisense strand to SEQ ID NO: 126338
auaauugcaccacucugau

SEQ ID NO: 126340 - RNA, 19 nt, Artificial Sequence
  Description of Artificial Sequence: Synthetic oligonucleotide
  Sense strand starting at position 1378 of SEQ ID NO: 1613
cucuuagggagacgucaau

SEQ ID NO: 126341 - RNA, 19 nt, Artificial Sequence
  Description of Artificial Sequence: Synthetic oligonucleotide
  Antisense strand to SEQ ID NO: 126340
auugacgucucccuaagag

SEQ ID NO: 126342 - RNA, 19 nt, Artificial Sequence
  Description of Artificial Sequence: Synthetic oligonucleotide
  Sense strand starting at position 1384 of SEQ ID NO: 1613
gggagacgucaauaguuga

SEQ ID NO: 126343 - RNA, 19 nt, Artificial Sequence
  Description of Artificial Sequence: Synthetic oligonucleotide
  Antisense strand to SEQ ID NO: 126342
ucaacuauugacgucuccc

SEQ ID NO: 126344 - RNA, 19 nt, Artificial Sequence
  Description of Artificial Sequence: Synthetic oligonucleotide
  Sense strand starting at position 1398 of SEQ ID NO: 1613
guugaagggcuccaucauu

SEQ ID NO: 126345 - RNA, 19 nt, Artificial Sequence
  Description of Artificial Sequence: Synthetic oligonucleotide
  Antisense strand to SEQ ID NO: 126344
aaugauggagcccuucaac

SEQ ID NO: 126346 - RNA, 19 nt, Artificial Sequence
  Description of Artificial Sequence: Synthetic oligonucleotide
  Sense strand starting at position 1435 of SEQ ID NO: 1613
cuuaguuuauuaccugaga

SEQ ID NO: 126347 - RNA, 19 nt, Artificial Sequence
  Description of Artificial Sequence: Synthetic oligonucleotide
  Antisense strand to SEQ ID NO: 126346
ucucagguaauaaacuaag

SEQ ID NO: 126348 - RNA, 19 nt, Artificial Sequence
  Description of Artificial Sequence: Synthetic oligonucleotide
  Sense strand starting at position 1436 of SEQ ID NO: 1613
uuaguuuauuaccugagac

SEQ ID NO: 126349 - RNA, 19 nt, Artificial Sequence
  Description of Artificial Sequence: Synthetic oligonucleotide
  Antisense strand to SEQ ID NO: 126348
gucucagguaauaaacuaa

SEQ ID NO: 126350 - RNA, 19 nt, Artificial Sequence
  Description of Artificial Sequence: Synthetic oligonucleotide
  Sense strand starting at position 1606 of SEQ ID NO: 1613
aaagauguggcuggagaga

SEQ ID NO: 126351 - RNA, 19 nt, Artificial Sequence
  Description of Artificial Sequence: Synthetic oligonucleotide
  Antisense strand to SEQ ID NO: 126350
ucucuccagccacaucuuu

SEQ ID NO: 126352 - RNA, 19 nt, Artificial Sequence
  Description of Artificial Sequence: Synthetic oligonucleotide
  Sense strand starting at position 1608 of SEQ ID NO: 1613
agauguggcuggagagaau

SEQ ID NO: 126353 - RNA, 19 nt, Artificial Sequence
  Description of Artificial Sequence: Synthetic oligonucleotide
  Antisense strand to SEQ ID NO: 126352
auucucuccagccacaucu

SEQ ID NO: 126354 - RNA, 19 nt, Artificial Sequence
  Description of Artificial Sequence: Synthetic oligonucleotide
  Sense strand starting at position 1617 of SEQ ID NO: 1613
uggagagaaugcuuccacu

SEQ ID NO: 126355 - RNA, 19 nt, Artificial Sequence
  Description of Artificial Sequence: Synthetic oligonucleotide
  Antisense strand to SEQ ID NO: 126354
aguggaagcauucucucca

SEQ ID NO: 126356 - RNA, 19 nt, Artificial Sequence
  Description of Artificial Sequence: Synthetic oligonucleotide
  Sense strand starting at position 1740 of SEQ ID NO: 1613
gcaggagugacacagucau

SEQ ID NO: 126357 - RNA, 19 nt, Artificial Sequence
  Description of Artificial Sequence: Synthetic oligonucleotide
  Antisense strand to SEQ ID NO: 126356
augacugugucacuccugc

SEQ ID NO: 126358 - RNA, 19 nt, Artificial Sequence
  Description of Artificial Sequence: Synthetic oligonucleotide
  Sense strand starting at position 1793 of SEQ ID NO: 1613
aucuuuggcuucucugaaa

SEQ ID NO: 126359 - RNA, 19 nt, Artificial Sequence
  Description of Artificial Sequence: Synthetic oligonucleotide
  Antisense strand to SEQ ID NO: 126358
uuucagagaagccaaagau

SEQ ID NO: 126360 - RNA, 19 nt, Artificial Sequence
  Description of Artificial Sequence: Synthetic oligonucleotide
  Sense strand starting at position 1830 of SEQ ID NO: 1613
aggugagacuuccuacaga

SEQ ID NO: 126361 - RNA, 19 nt, Artificial Sequence
  Description of Artificial Sequence: Synthetic oligonucleotide
  Antisense strand to SEQ ID NO: 126360
ucuguaggaagucucaccu

SEQ ID NO: 126362 - RNA, 19 nt, Artificial Sequence
  Description of Artificial Sequence: Synthetic oligonucleotide
  Sense strand starting at position 1865 of SEQ ID NO: 1613
gaaggagugaauugcuaag

SEQ ID NO: 126363 - RNA, 19 nt, Artificial Sequence
  Description of Artificial Sequence: Synthetic oligonucleotide
  Antisense strand to SEQ ID NO: 126362
cuuagcaauucacuccuuc

SEQ ID NO: 126364 - RNA, 19 nt, Artificial Sequence
  Description of Artificial Sequence: Synthetic oligonucleotide
  Sense strand starting at position 2007 of SEQ ID NO: 1613
ccuuaaccagggugaugau

SEQ ID NO: 126365 - RNA, 19 nt, Artificial Sequence
  Description of Artificial Sequence: Synthetic oligonucleotide
  Antisense strand to SEQ ID NO: 126364
aucaucacccugguuaagg

SEQ ID NO: 126366 - RNA, 19 nt, Artificial Sequence
  Description of Artificial Sequence: Synthetic oligonucleotide
  Sense strand starting at position 2259 of SEQ ID NO: 1613
uuugauacucuaugugauc

SEQ ID NO: 126367 - RNA, 19 nt, Artificial Sequence
  Description of Artificial Sequence: Synthetic oligonucleotide
  Antisense strand to SEQ ID NO: 126366
gaucacauagaguaucaaa

SEQ ID NO: 126368 - RNA, 19 nt, Artificial Sequence
  Description of Artificial Sequence: Synthetic oligonucleotide
  Sense strand starting at position 2260 of SEQ ID NO: 1613
uugauacucuaugugaucu

SEQ ID NO: 126369 - RNA, 19 nt, Artificial Sequence
  Description of Artificial Sequence: Synthetic oligonucleotide
  Antisense strand to SEQ ID NO: 126368
agaucacauagaguaucaa

SEQ ID NO: 126370 - RNA, 19 nt, Artificial Sequence
  Description of Artificial Sequence: Synthetic oligonucleotide
  Sense strand starting at position 2369 of SEQ ID NO: 1613
gaaguucgagaucagucua

SEQ ID NO: 126371 - RNA, 19 nt, Artificial Sequence
  Description of Artificial Sequence: Synthetic oligonucleotide
  Antisense strand to SEQ ID NO: 126370
uagacugaucucgaacuuc

SEQ ID NO: 126372 - RNA, 19 nt, Artificial Sequence
  Description of Artificial Sequence: Synthetic oligonucleotide
  Sense strand starting at position 2439 of SEQ ID NO: 1613
agaauagucccucaaguuu

SEQ ID NO: 126373 - RNA, 19 nt, Artificial Sequence
  Description of Artificial Sequence: Synthetic oligonucleotide
  Antisense strand to SEQ ID NO: 126372
aaacuugagggacuauucu

SEQ ID NO: 126374 - RNA, 19 nt, Artificial Sequence
  Description of Artificial Sequence: Synthetic oligonucleotide
  Sense strand starting at position 2574 of SEQ ID NO: 1613
gcagcaauaugacuugauc

SEQ ID NO: 126375 - RNA, 19 nt, Artificial Sequence
  Description of Artificial Sequence: Synthetic oligonucleotide
  Antisense strand to SEQ ID NO: 126374
gaucaagucauauugcugc

SEQ ID NO: 126376 - RNA, 19 nt, Artificial Sequence
  Description of Artificial Sequence: Synthetic oligonucleotide
  Sense strand starting at position 2684 of SEQ ID NO: 1613
ccuacaugcccaugagaug

SEQ ID NO: 126377 - RNA, 19 nt, Artificial Sequence
  Description of Artificial Sequence: Synthetic oligonucleotide
  Antisense strand to SEQ ID NO: 126376
caucucaugggcauguagg

SEQ ID NO: 126378 - RNA, 19 nt, Artificial Sequence
  Description of Artificial Sequence: Synthetic oligonucleotide
  Sense strand starting at position 2751 of SEQ ID NO: 1613
gaauucugaggcuggacau

SEQ ID NO: 126379 - RNA, 19 nt, Artificial Sequence
  Description of Artificial Sequence: Synthetic oligonucleotide
  Antisense strand to SEQ ID NO: 126378
auguccagccucagaauuc

SEQ ID NO: 126380 - RNA, 19 nt, Artificial Sequence
  Description of Artificial Sequence: Synthetic oligonucleotide
  Sense strand starting at position 3057 of SEQ ID NO: 1613
aauucugaggcuggacaua

SEQ ID NO: 126381 - RNA, 19 nt, Artificial Sequence
  Description of Artificial Sequence: Synthetic oligonucleotide
  Antisense strand to SEQ ID NO: 126380
uauguccagccucagaauu

SEQ ID NO: 126382 - RNA, 19 nt, Artificial Sequence
  Description of Artificial Sequence: Synthetic oligonucleotide
  Sense strand starting at position 3376 of SEQ ID NO: 1613
ccaauaucucucugaguag

SEQ ID NO: 126383 - RNA, 19 nt, Artificial Sequence
  Description of Artificial Sequence: Synthetic oligonucleotide
  Antisense strand to SEQ ID NO: 126382
cuacucagagagauauugg

SEQ ID NO: 126384 - RNA, 19 nt, Artificial Sequence
  Description of Artificial Sequence: Synthetic oligonucleotide
  Sense strand starting at position 3478 of SEQ ID NO: 1613
gugaguguuagugauuaca

SEQ ID NO: 126385 - RNA, 19 nt, Artificial Sequence
  Description of Artificial Sequence: Synthetic oligonucleotide
  Antisense strand to SEQ ID NO: 126384
uguaaucacuaacacucac

SEQ ID NO: 126386 - RNA, 19 nt, Artificial Sequence
  Description of Artificial Sequence: Synthetic oligonucleotide
  Sense strand starting at position 3481 of SEQ ID NO: 1613
aguguuagugauuacauua

SEQ ID NO: 126387 - RNA, 19 nt, Artificial Sequence
  Description of Artificial Sequence: Synthetic oligonucleotide
  Antisense strand to SEQ ID NO: 126386
uaauguaaucacuaacacu

SEQ ID NO: 126388 - RNA, 19 nt, Artificial Sequence
  Description of Artificial Sequence: Synthetic oligonucleotide
  Sense strand starting at position 3512 of SEQ ID NO: 1613
gcauuauccucucuauagg

SEQ ID NO: 126389 - RNA, 19 nt, Artificial Sequence
  Description of Artificial Sequence: Synthetic oligonucleotide
  Antisense strand to SEQ ID NO: 126388
ccuauagagaggauaaugc

SEQ ID NO: 126390 - RNA, 19 nt, Artificial Sequence
  Description of Artificial Sequence: Synthetic oligonucleotide
  Sense strand starting at position 3779 of SEQ ID NO: 1613
ccuuaugugggaggcuaaa

SEQ ID NO: 126391 - RNA, 19 nt, Artificial Sequence
  Description of Artificial Sequence: Synthetic oligonucleotide
  Antisense strand to SEQ ID NO: 126390
uuuagccucccacauaagg

SEQ ID NO: 126392 - RNA, 19 nt, Artificial Sequence
  Description of Artificial Sequence: Synthetic oligonucleotide
  Sense strand starting at position 3852 of SEQ ID NO: 1613
acacaugauucuguuuagu

SEQ ID NO: 126393 - RNA, 19 nt, Artificial Sequence
  Description of Artificial Sequence: Synthetic oligonucleotide
  Antisense strand to SEQ ID NO: 126392
acuaaacagaaucaugugu

SEQ ID NO: 126394 - RNA, 19 nt, Artificial Sequence
  Description of Artificial Sequence: Synthetic oligonucleotide
  Sense strand starting at position 3732 of SEQ ID NO: 1614
guuaaucugccuuauguaa

SEQ ID NO: 126395 - RNA, 19 nt, Artificial Sequence
  Description of Artificial Sequence: Synthetic oligonucleotide
  Antisense strand to SEQ ID NO: 126394
uuacauaaggcagauuaac

SEQ ID NO: 126396 - RNA, 19 nt, Artificial Sequence
  Description of Artificial Sequence: Synthetic oligonucleotide
  Sense strand starting at position 3705 of SEQ ID NO: 1614
gucuuaguuacacaugguu

SEQ ID NO: 126397 - RNA, 19 nt, Artificial Sequence
  Description of Artificial Sequence: Synthetic oligonucleotide
  Antisense strand to SEQ ID NO: 126396
aaccauguguaacuaagac

SEQ ID NO: 126398 - RNA, 19 nt, Artificial Sequence
  Description of Artificial Sequence: Synthetic oligonucleotide
  Sense strand starting at position 3697 of SEQ ID NO: 1614
augcauaggucuuaguuac

SEQ ID NO: 126399 - RNA, 19 nt, Artificial Sequence
  Description of Artificial Sequence: Synthetic oligonucleotide
  Antisense strand to SEQ ID NO: 126398
guaacuaagaccuaugcau

SEQ ID NO: 126400 - RNA, 19 nt, Artificial Sequence
  Description of Artificial Sequence: Synthetic oligonucleotide
  Sense strand starting at position 3686 of SEQ ID NO: 1614
gugggauucccaugcauag

SEQ ID NO: 126401 - RNA, 19 nt, Artificial Sequence
  Description of Artificial Sequence: Synthetic oligonucleotide
  Antisense strand to SEQ ID NO: 126400
cuaugcaugggaaucccac

SEQ ID NO: 126402 - RNA, 19 nt, Artificial Sequence
  Description of Artificial Sequence: Synthetic oligonucleotide
  Sense strand starting at position 3636 of SEQ ID NO: 1614
gauguuauaugagcuuuau

SEQ ID NO: 126403 - RNA, 19 nt, Artificial Sequence
  Description of Artificial Sequence: Synthetic oligonucleotide
  Antisense strand to SEQ ID NO: 126402
auaaagcucauauaacauc

SEQ ID NO: 126404 - RNA, 19 nt, Artificial Sequence
  Description of Artificial Sequence: Synthetic oligonucleotide
  Sense strand starting at position 3629 of SEQ ID NO: 1614
cuuguaggauguuauauga

SEQ ID NO: 126405 - RNA, 19 nt, Artificial Sequence
  Description of Artificial Sequence: Synthetic oligonucleotide
  Antisense strand to SEQ ID NO: 126404
ucauauaacauccuacaag

SEQ ID NO: 126406 - RNA, 19 nt, Artificial Sequence
  Description of Artificial Sequence: Synthetic oligonucleotide
  Sense strand starting at position 3626 of SEQ ID NO: 1614
ucccuuguaggauguuaua

SEQ ID NO: 126407 - RNA, 19 nt, Artificial Sequence
  Description of Artificial Sequence: Synthetic oligonucleotide
  Antisense strand to SEQ ID NO: 126406
uauaacauccuacaaggga

SEQ ID NO: 126408 - RNA, 19 nt, Artificial Sequence
  Description of Artificial Sequence: Synthetic oligonucleotide
  Sense strand starting at position 3601 of SEQ ID NO: 1614
uuccuuucugaaggaaugu

SEQ ID NO: 126409 - RNA, 19 nt, Artificial Sequence
  Description of Artificial Sequence: Synthetic oligonucleotide
  Antisense strand to SEQ ID NO: 126408
acauuccuucagaaaggaa

SEQ ID NO: 126410 - RNA, 19 nt, Artificial Sequence
  Description of Artificial Sequence: Synthetic oligonucleotide
  Sense strand starting at position 3598 of SEQ ID NO: 1614
cuauuccuuucugaaggaa

SEQ ID NO: 126411 - RNA, 19 nt, Artificial Sequence
  Description of Artificial Sequence: Synthetic oligonucleotide
  Antisense strand to SEQ ID NO: 126410
uuccuucagaaaggaauag

SEQ ID NO: 126412 - RNA, 19 nt, Artificial Sequence
  Description of Artificial Sequence: Synthetic oligonucleotide
  Sense strand starting at position 3597 of SEQ ID NO: 1614
ccuauuccuuucugaagga

SEQ ID NO: 126413 - RNA, 19 nt, Artificial Sequence
  Description of Artificial Sequence: Synthetic oligonucleotide
  Antisense strand to SEQ ID NO: 126412
uccuucagaaaggaauagg

SEQ ID NO: 126414 - RNA, 19 nt, Artificial Sequence
  Description of Artificial Sequence: Synthetic oligonucleotide
  Sense strand starting at position 3315 of SEQ ID NO: 1614
gaggaaucuuguucuguug

SEQ ID NO: 126415 - RNA, 19 nt, Artificial Sequence
  Description of Artificial Sequence: Synthetic oligonucleotide
  Antisense strand to SEQ ID NO: 126414
caacagaacaagauuccuc

SEQ ID NO: 126416 - RNA, 19 nt, Artificial Sequence
  Description of Artificial Sequence: Synthetic oligonucleotide
  Sense strand starting at position 3314 of SEQ ID NO: 1614
ugaggaaucuuguucuguu

SEQ ID NO: 126417 - RNA, 19 nt, Artificial Sequence
  Description of Artificial Sequence: Synthetic oligonucleotide
  Antisense strand to SEQ ID NO: 126416
aacagaacaagauuccuca

SEQ ID NO: 126418 - RNA, 19 nt, Artificial Sequence
  Description of Artificial Sequence: Synthetic oligonucleotide
  Sense strand starting at position 3017 of SEQ ID NO: 1614
ucccuuaacuuguguacca

SEQ ID NO: 126419 - RNA, 19 nt, Artificial Sequence
  Description of Artificial Sequence: Synthetic oligonucleotide
  Antisense strand to SEQ ID NO: 126418
ugguacacaaguuaaggga

SEQ ID NO: 126420 - RNA, 19 nt, Artificial Sequence
  Description of Artificial Sequence: Synthetic oligonucleotide
  Sense strand starting at position 2925 of SEQ ID NO: 1614
gagggcugcucagagcuaa

SEQ ID NO: 126421 - RNA, 19 nt, Artificial Sequence
  Description of Artificial Sequence: Synthetic oligonucleotide
  Antisense strand to SEQ ID NO: 126420
uuagcucugagcagcccuc

SEQ ID NO: 126422 - RNA, 19 nt, Artificial Sequence
  Description of Artificial Sequence: Synthetic oligonucleotide
  Sense strand starting at position 2903 of SEQ ID NO: 1614
gguaaaguauuaguaucag

SEQ ID NO: 126423 - RNA, 19 nt, Artificial Sequence
  Description of Artificial Sequence: Synthetic oligonucleotide
  Antisense strand to SEQ ID NO: 126422
cugauacuaauacuuuacc

SEQ ID NO: 126424 - RNA, 19 nt, Artificial Sequence
  Description of Artificial Sequence: Synthetic oligonucleotide
  Sense strand starting at position 2785 of SEQ ID NO: 1614
uggcuugagccagggaaau

SEQ ID NO: 126425 - RNA, 19 nt, Artificial Sequence
  Description of Artificial Sequence: Synthetic oligonucleotide
  Antisense strand to SEQ ID NO: 126424
auuucccuggcucaagcca

SEQ ID NO: 126426 - RNA, 19 nt, Artificial Sequence
  Description of Artificial Sequence: Synthetic oligonucleotide
  Sense strand starting at position 2501 of SEQ ID NO: 1614
ggauuauucuuagaaacug

SEQ ID NO: 126427 - RNA, 19 nt, Artificial Sequence
  Description of Artificial Sequence: Synthetic oligonucleotide
  Antisense strand to SEQ ID NO: 126426
caguuucuaagaauaaucc

SEQ ID NO: 126428 - RNA, 19 nt, Artificial Sequence
  Description of Artificial Sequence: Synthetic oligonucleotide
  Sense strand starting at position 2499 of SEQ ID NO: 1614
agggauuauucuuagaaac

SEQ ID NO: 126429 - RNA, 19 nt, Artificial Sequence
  Description of Artificial Sequence: Synthetic oligonucleotide
  Antisense strand to SEQ ID NO: 126428
guuucuaagaauaaucccu

SEQ ID NO: 126430 - RNA, 19 nt, Artificial Sequence
  Description of Artificial Sequence: Synthetic oligonucleotide
  Sense strand starting at position 2290 of SEQ ID NO: 1614
cgccuucacgcaggaaaga

SEQ ID NO: 126431 - RNA, 19 nt, Artificial Sequence
  Description of Artificial Sequence: Synthetic oligonucleotide
  Antisense strand to SEQ ID NO: 126430
ucuuuccugcgugaaggcg

SEQ ID NO: 126432 - RNA, 19 nt, Artificial Sequence
  Description of Artificial Sequence: Synthetic oligonucleotide
  Sense strand starting at position 1534 of SEQ ID NO: 1614
cgcugagcgcuuccaguau

SEQ ID NO: 126433 - RNA, 19 nt, Artificial Sequence
  Description of Artificial Sequence: Synthetic oligonucleotide
  Antisense strand to SEQ ID NO: 126432
auacuggaagcgcucagcg

SEQ ID NO: 126434 - RNA, 19 nt, Artificial Sequence
  Description of Artificial Sequence: Synthetic oligonucleotide
  Sense strand starting at position 1130 of SEQ ID NO: 1614
cugaauuacggguaagagu

SEQ ID NO: 126435 - RNA, 19 nt, Artificial Sequence
  Description of Artificial Sequence: Synthetic oligonucleotide
  Antisense strand to SEQ ID NO: 126434
acucuuacccguaauucag

SEQ ID NO: 126436 - RNA, 19 nt, Artificial Sequence
  Description of Artificial Sequence: Synthetic oligonucleotide
  Sense strand starting at position 1128 of SEQ ID NO: 1614
ggcugaauuacggguaaga

SEQ ID NO: 126437 - RNA, 19 nt, Artificial Sequence
  Description of Artificial Sequence: Synthetic oligonucleotide
  Antisense strand to SEQ ID NO: 126436
ucuuacccguaauucagcc

SEQ ID NO: 126438 - RNA, 19 nt, Artificial Sequence
  Description of Artificial Sequence: Synthetic oligonucleotide
  Sense strand starting at position 1020 of SEQ ID NO: 1614
cacgaaaggucgucccagu

SEQ ID NO: 126439 - RNA, 19 nt, Artificial Sequence
  Description of Artificial Sequence: Synthetic oligonucleotide
  Antisense strand to SEQ ID NO: 126438
acugggacgaccuuucgug

SEQ ID NO: 126440 - RNA, 19 nt, Artificial Sequence
  Description of Artificial Sequence: Synthetic oligonucleotide
  Sense strand starting at position 691 of SEQ ID NO: 1614
caggaaucggcgggaagaa

SEQ ID NO: 126441 - RNA, 19 nt, Artificial Sequence
  Description of Artificial Sequence: Synthetic oligonucleotide
  Antisense strand to SEQ ID NO: 126440
uucuucccgccgauuccug

SEQ ID NO: 126442 - RNA, 19 nt, Artificial Sequence
  Description of Artificial Sequence: Synthetic oligonucleotide
  Sense strand starting at position 690 of SEQ ID NO: 1614
ucaggaaucggcgggaaga

SEQ ID NO: 126443 - RNA, 19 nt, Artificial Sequence
  Description of Artificial Sequence: Synthetic oligonucleotide
  Antisense strand to SEQ ID NO: 126442
ucuucccgccgauuccuga

SEQ ID NO: 126444 - RNA, 19 nt, Artificial Sequence
  Description of Artificial Sequence: Synthetic oligonucleotide
  Sense strand starting at position 669 of SEQ ID NO: 1614
gcaucucagagguaggacu

SEQ ID NO: 126445 - RNA, 19 nt, Artificial Sequence
  Description of Artificial Sequence: Synthetic oligonucleotide
  Antisense strand to SEQ ID NO: 126444
aguccuaccucugagaugc

SEQ ID NO: 126446 - RNA, 19 nt, Artificial Sequence
  Description of Artificial Sequence: Synthetic oligonucleotide
  Sense strand starting at position 536 of SEQ ID NO: 1614
ggguuagcccuugguuuca

SEQ ID NO: 126447 - RNA, 19 nt, Artificial Sequence
  Description of Artificial Sequence: Synthetic oligonucleotide
  Antisense strand to SEQ ID NO: 126446
ugaaaccaagggcuaaccc

SEQ ID NO: 126448 - RNA, 19 nt, Artificial Sequence
  Description of Artificial Sequence: Synthetic oligonucleotide
  Sense strand starting at position 443 of SEQ ID NO: 1614
gaguaaugucccgauggua

SEQ ID NO: 126449 - RNA, 19 nt, Artificial Sequence
  Description of Artificial Sequence: Synthetic oligonucleotide
  Antisense strand to SEQ ID NO: 126448
uaccaucgggacauuacuc

SEQ ID NO: 126450 - RNA, 19 nt, Artificial Sequence
  Description of Artificial Sequence: Synthetic oligonucleotide
  Sense strand starting at position 442 of SEQ ID NO: 1614
ggaguaaugucccgauggu

SEQ ID NO: 126451 - RNA, 19 nt, Artificial Sequence
  Description of Artificial Sequence: Synthetic oligonucleotide
  Antisense strand to SEQ ID NO: 126450
accaucgggacauuacucc

SEQ ID NO: 126452 - RNA, 19 nt, Artificial Sequence
  Description of Artificial Sequence: Synthetic oligonucleotide
  Sense strand starting at position 396 of SEQ ID NO: 1614
aguuguccagcugaaauca

SEQ ID NO: 126453 - RNA, 19 nt, Artificial Sequence
  Description of Artificial Sequence: Synthetic oligonucleotide
  Antisense strand to SEQ ID NO: 126452
ugauuucagcuggacaacu

SEQ ID NO: 126454 - RNA, 19 nt, Artificial Sequence
  Description of Artificial Sequence: Synthetic oligonucleotide
  Sense strand starting at position 316 of SEQ ID NO: 1614
guggguuggugaguuauuu

SEQ ID NO: 126455 - RNA, 19 nt, Artificial Sequence
  Description of Artificial Sequence: Synthetic oligonucleotide
  Antisense strand to SEQ ID NO: 126454
aaauaacucaccaacccac

SEQ ID NO: 126456 - RNA, 19 nt, Artificial Sequence
  Description of Artificial Sequence: Synthetic oligonucleotide
  Sense strand starting at position 314 of SEQ ID NO: 1614
guguggguuggugaguuau

SEQ ID NO: 126457 - RNA, 19 nt, Artificial Sequence
  Description of Artificial Sequence: Synthetic oligonucleotide
  Antisense strand to SEQ ID NO: 126456
auaacucaccaacccacac

SEQ ID NO: 126458 - RNA, 19 nt, Artificial Sequence
  Description of Artificial Sequence: Synthetic oligonucleotide
  Sense strand starting at position 313 of SEQ ID NO: 1614
uguguggguuggugaguua

SEQ ID NO: 126459 - RNA, 19 nt, Artificial Sequence
  Description of Artificial Sequence: Synthetic oligonucleotide
  Antisense strand to SEQ ID NO: 126458
uaacucaccaacccacaca

SEQ ID NO: 126460 - RNA, 19 nt, Artificial Sequence
  Description of Artificial Sequence: Synthetic oligonucleotide
  Sense strand starting at position 164 of SEQ ID NO: 1614
gggugccucucugaacagu

SEQ ID NO: 126461 - RNA, 19 nt, Artificial Sequence
  Description of Artificial Sequence: Synthetic oligonucleotide
  Antisense strand to SEQ ID NO: 126460
acuguucagagaggcaccc

SEQ ID NO: 126462 - RNA, 19 nt, Artificial Sequence
  Description of Artificial Sequence: Synthetic oligonucleotide
  Sense strand starting at position 162 of SEQ ID NO: 1614
gagggugccucucugaaca

SEQ ID NO: 126463 - RNA, 19 nt, Artificial Sequence
  Description of Artificial Sequence: Synthetic oligonucleotide
  Antisense strand to SEQ ID NO: 126462
uguucagagaggcacccuc

SEQ ID NO: 126464 - RNA, 19 nt, Artificial Sequence
  Description of Artificial Sequence: Synthetic oligonucleotide
  Sense strand starting at position 143 of SEQ ID NO: 1614
gagucucaaggguaucuua

SEQ ID NO: 126465 - RNA, 19 nt, Artificial Sequence
  Description of Artificial Sequence: Synthetic oligonucleotide
  Antisense strand to SEQ ID NO: 126464
uaagauacccuugagacuc

SEQ ID NO: 126466 - RNA, 19 nt, Artificial Sequence
  Description of Artificial Sequence: Synthetic oligonucleotide
  Sense strand starting at position 130 of SEQ ID NO: 1614
ggguguuacagaggagucu

SEQ ID NO: 126467 - RNA, 19 nt, Artificial Sequence
  Description of Artificial Sequence: Synthetic oligonucleotide
  Antisense strand to SEQ ID NO: 126466
agacuccucuguaacaccc

SEQ ID NO: 126468 - RNA, 19 nt, Artificial Sequence
  Description of Artificial Sequence: Synthetic oligonucleotide
  Sense strand starting at position 128 of SEQ ID NO: 1614
gcggguguuacagaggagu

SEQ ID NO: 126469 - RNA, 19 nt, Artificial Sequence
  Description of Artificial Sequence: Synthetic oligonucleotide
  Antisense strand to SEQ ID NO: 126468
acuccucuguaacacccgc

SEQ ID NO: 126470 - RNA, 19 nt, Artificial Sequence
  Description of Artificial Sequence: Synthetic oligonucleotide
  Sense strand starting at position 27 of SEQ ID NO: 1614
uuuauaucuccuugcguuu

SEQ ID NO: 126471 - RNA, 19 nt, Artificial Sequence
  Description of Artificial Sequence: Synthetic oligonucleotide
  Antisense strand to SEQ ID NO: 126470
aaacgcaaggagauauaaa

SEQ ID NO: 126472 - RNA, 19 nt, Artificial Sequence
  Description of Artificial Sequence: Synthetic oligonucleotide
  Sense strand starting at position 26 of SEQ ID NO: 1614
auuuauaucuccuugcguu

SEQ ID NO: 126473 - RNA, 19 nt, Artificial Sequence
  Description of Artificial Sequence: Synthetic oligonucleotide
  Antisense strand to SEQ ID NO: 126472
aacgcaaggagauauaaau

SEQ ID NO: 126474 - RNA, 19 nt, Artificial Sequence
  Description of Artificial Sequence: Synthetic oligonucleotide
  Sense strand starting at position 6 of SEQ ID NO: 1615
cguguauaggaacacauau

SEQ ID NO: 126475 - RNA, 19 nt, Artificial Sequence
  Description of Artificial Sequence: Synthetic oligonucleotide
  Antisense strand to SEQ ID NO: 126474
auauguguuccuauacacg

SEQ ID NO: 126476 - RNA, 19 nt, Artificial Sequence
  Description of Artificial Sequence: Synthetic oligonucleotide
  Sense strand starting at position 82 of SEQ ID NO: 1615
uucuuuauucuaggaauug

SEQ ID NO: 126477 - RNA, 19 nt, Artificial Sequence
  Description of Artificial Sequence: Synthetic oligonucleotide
  Antisense strand to SEQ ID NO: 126476
caauuccuagaauaaagaa

SEQ ID NO: 126478 - RNA, 19 nt, Artificial Sequence
  Description of Artificial Sequence: Synthetic oligonucleotide
  Sense strand starting at position 172 of SEQ ID NO: 1615
cguagauuucucugagcga

SEQ ID NO: 126479 - RNA, 19 nt, Artificial Sequence
  Description of Artificial Sequence: Synthetic oligonucleotide
  Antisense strand to SEQ ID NO: 126478
ucgcucagagaaaucuacg

SEQ ID NO: 126480 - RNA, 19 nt, Artificial Sequence
  Description of Artificial Sequence: Synthetic oligonucleotide
  Sense strand starting at position 185 of SEQ ID NO: 1615
gagcgacuaucuucugaga

SEQ ID NO: 126481 - RNA, 19 nt, Artificial Sequence
  Description of Artificial Sequence: Synthetic oligonucleotide
  Antisense strand to SEQ ID NO: 126480
ucucagaagauagucgcuc

SEQ ID NO: 126482 - RNA, 19 nt, Artificial Sequence
  Description of Artificial Sequence: Synthetic oligonucleotide
  Sense strand starting at position 218 of SEQ ID NO: 1615
cuaagaccauggcugaaua

SEQ ID NO: 126483 - RNA, 19 nt, Artificial Sequence
  Description of Artificial Sequence: Synthetic oligonucleotide
  Antisense strand to SEQ ID NO: 126482
uauucagccauggucuuag

SEQ ID NO: 126484 - RNA, 19 nt, Artificial Sequence
  Description of Artificial Sequence: Synthetic oligonucleotide
  Sense strand starting at position 271 of SEQ ID NO: 1615
gcauuuguuucugcaagag

SEQ ID NO: 126485 - RNA, 19 nt, Artificial Sequence
  Description of Artificial Sequence: Synthetic oligonucleotide
  Antisense strand to SEQ ID NO: 126484
cucuugcagaaacaaaugc

SEQ ID NO: 126486 - RNA, 19 nt, Artificial Sequence
  Description of Artificial Sequence: Synthetic oligonucleotide
  Sense strand starting at position 395 of SEQ ID NO: 1615
caagaauucgcccaaagug

SEQ ID NO: 126487 - RNA, 19 nt, Artificial Sequence
  Description of Artificial Sequence: Synthetic oligonucleotide
  Antisense strand to SEQ ID NO: 126486
cacuuugggcgaauucuug

SEQ ID NO: 126488 - RNA, 19 nt, Artificial Sequence
  Description of Artificial Sequence: Synthetic oligonucleotide
  Sense strand starting at position 443 of SEQ ID NO: 1615
acauccuuugcagguagaa

SEQ ID NO: 126489 - RNA, 19 nt, Artificial Sequence
  Description of Artificial Sequence: Synthetic oligonucleotide
  Antisense strand to SEQ ID NO: 126488
uucuaccugcaaaggaugu

SEQ ID NO: 126490 - RNA, 19 nt, Artificial Sequence
  Description of Artificial Sequence: Synthetic oligonucleotide
  Sense strand starting at position 445 of SEQ ID NO: 1615
auccuuugcagguagaaga

SEQ ID NO: 126491 - RNA, 19 nt, Artificial Sequence
  Description of Artificial Sequence: Synthetic oligonucleotide
  Antisense strand to SEQ ID NO: 126490
ucuucuaccugcaaaggau

SEQ ID NO: 126492 - RNA, 19 nt, Artificial Sequence
  Description of Artificial Sequence: Synthetic oligonucleotide
  Sense strand starting at position 456 of SEQ ID NO: 1615
guagaagagucuuuaauug

SEQ ID NO: 126493 - RNA, 19 nt, Artificial Sequence
  Description of Artificial Sequence: Synthetic oligonucleotide
  Antisense strand to SEQ ID NO: 126492
caauuaaagacucuucuac

SEQ ID NO: 126494 - RNA, 19 nt, Artificial Sequence
  Description of Artificial Sequence: Synthetic oligonucleotide
  Sense strand starting at position 603 of SEQ ID NO: 1615
ccaccuucgcaggacaaua

SEQ ID NO: 126495 - RNA, 19 nt, Artificial Sequence
  Description of Artificial Sequence: Synthetic oligonucleotide
  Antisense strand to SEQ ID NO: 126494
uauuguccugcgaaggugg

SEQ ID NO: 126496 - RNA, 19 nt, Artificial Sequence
  Description of Artificial Sequence: Synthetic oligonucleotide
  Sense strand starting at position 643 of SEQ ID NO: 1615
acuuuaaacguguaaacca

SEQ ID NO: 126497 - RNA, 19 nt, Artificial Sequence
  Description of Artificial Sequence: Synthetic oligonucleotide
  Antisense strand to SEQ ID NO: 126496
ugguuuacacguuuaaagu

SEQ ID NO: 126498 - RNA, 19 nt, Artificial Sequence
  Description of Artificial Sequence: Synthetic oligonucleotide
  Sense strand starting at position 772 of SEQ ID NO: 1615
gacccaucacgagauucuu

SEQ ID NO: 126499 - RNA, 19 nt, Artificial Sequence
  Description of Artificial Sequence: Synthetic oligonucleotide
  Antisense strand to SEQ ID NO: 126498
aagaaucucgugauggguc

SEQ ID NO: 126500 - RNA, 19 nt, Artificial Sequence
  Description of Artificial Sequence: Synthetic oligonucleotide
  Sense strand starting at position 878 of SEQ ID NO: 1615
ugcgucaucgcgguccaua

SEQ ID NO: 126501 - RNA, 19 nt, Artificial Sequence
  Description of Artificial Sequence: Synthetic oligonucleotide
  Antisense strand to SEQ ID NO: 126500
uauggaccgcgaugacgca

SEQ ID NO: 126502 - RNA, 19 nt, Artificial Sequence
  Description of Artificial Sequence: Synthetic oligonucleotide
  Sense strand starting at position 930 of SEQ ID NO: 1615
gcaggucgccaggagauau

SEQ ID NO: 126503 - RNA, 19 nt, Artificial Sequence
  Description of Artificial Sequence: Synthetic oligonucleotide
  Antisense strand to SEQ ID NO: 126502
auaucuccuggcgaccugc

SEQ ID NO: 126504 - RNA, 19 nt, Artificial Sequence
  Description of Artificial Sequence: Synthetic oligonucleotide
  Sense strand starting at position 1756 of SEQ ID NO: 1615
ugucaagugccugagaaca

SEQ ID NO: 126505 - RNA, 19 nt, Artificial Sequence
  Description of Artificial Sequence: Synthetic oligonucleotide
  Antisense strand to SEQ ID NO: 126504
uguucucaggcacuugaca

SEQ ID NO: 126506 - RNA, 19 nt, Artificial Sequence
  Description of Artificial Sequence: Synthetic oligonucleotide
  Sense strand starting at position 2132 of SEQ ID NO: 1615
aguuacuaagcgggacaaa

SEQ ID NO: 126507 - RNA, 19 nt, Artificial Sequence
  Description of Artificial Sequence: Synthetic oligonucleotide
  Antisense strand to SEQ ID NO: 126506
uuugucccgcuuaguaacu

SEQ ID NO: 126508 - RNA, 19 nt, Artificial Sequence
  Description of Artificial Sequence: Synthetic oligonucleotide
  Sense strand starting at position 2636 of SEQ ID NO: 1615
auuggacauuucugaggga

SEQ ID NO: 126509 - RNA, 19 nt, Artificial Sequence
  Description of Artificial Sequence: Synthetic oligonucleotide
  Antisense strand to SEQ ID NO: 126508
ucccucagaaauguccaau

SEQ ID NO: 126510 - RNA, 19 nt, Artificial Sequence
  Description of Artificial Sequence: Synthetic oligonucleotide
  Sense strand starting at position 2798 of SEQ ID NO: 1615
uacagugcauguguaauuu

SEQ ID NO: 126511 - RNA, 19 nt, Artificial Sequence
  Description of Artificial Sequence: Synthetic oligonucleotide
  Antisense strand to SEQ ID NO: 126510
aaauuacacaugcacugua

SEQ ID NO: 126512 - RNA, 19 nt, Artificial Sequence
  Description of Artificial Sequence: Synthetic oligonucleotide
  Sense strand starting at position 2820 of SEQ ID NO: 1615
agauaagucacagguguug

SEQ ID NO: 126513 - RNA, 19 nt, Artificial Sequence
  Description of Artificial Sequence: Synthetic oligonucleotide
  Antisense strand to SEQ ID NO: 126512
caacaccugugacuuaucu

SEQ ID NO: 126514 - RNA, 19 nt, Artificial Sequence
  Description of Artificial Sequence: Synthetic oligonucleotide
  Sense strand starting at position 2863 of SEQ ID NO: 1615
uucuguuucccugacagac

SEQ ID NO: 126515 - RNA, 19 nt, Artificial Sequence
  Description of Artificial Sequence: Synthetic oligonucleotide
  Antisense strand to SEQ ID NO: 126514
gucugucagggaaacagaa

SEQ ID NO: 126516 - RNA, 19 nt, Artificial Sequence
  Description of Artificial Sequence: Synthetic oligonucleotide
  Sense strand starting at position 2914 of SEQ ID NO: 1615
agcuuaaaucugggagauu

SEQ ID NO: 126517 - RNA, 19 nt, Artificial Sequence
  Description of Artificial Sequence: Synthetic oligonucleotide
  Antisense strand to SEQ ID NO: 126516
aaucucccagauuuaagcu

SEQ ID NO: 126518 - RNA, 19 nt, Artificial Sequence
  Description of Artificial Sequence: Synthetic oligonucleotide
  Sense strand starting at position 3016 of SEQ ID NO: 1615
gcagauuugugucuccuga

SEQ ID NO: 126519 - RNA, 19 nt, Artificial Sequence
  Description of Artificial Sequence: Synthetic oligonucleotide
  Antisense strand to SEQ ID NO: 126518
ucaggagacacaaaucugc

SEQ ID NO: 126520 - RNA, 19 nt, Artificial Sequence
  Description of Artificial Sequence: Synthetic oligonucleotide
  Sense strand starting at position 3032 of SEQ ID NO: 1615
ugaagauugugccuggaau

SEQ ID NO: 126521 - RNA, 19 nt, Artificial Sequence
  Description of Artificial Sequence: Synthetic oligonucleotide
  Antisense strand to SEQ ID NO: 126520
auuccaggcacaaucuuca

SEQ ID NO: 126522 - RNA, 19 nt, Artificial Sequence
  Description of Artificial Sequence: Synthetic oligonucleotide
  Sense strand starting at position 3033 of SEQ ID NO: 1615
gaagauugugccuggaauu

SEQ ID NO: 126523 - RNA, 19 nt, Artificial Sequence
  Description of Artificial Sequence: Synthetic oligonucleotide
  Antisense strand to SEQ ID NO: 126522
aauuccaggcacaaucuuc

SEQ ID NO: 126524 - RNA, 19 nt, Artificial Sequence
  Description of Artificial Sequence: Synthetic oligonucleotide
  Sense strand starting at position 3034 of SEQ ID NO: 1615
aagauugugccuggaauug

SEQ ID NO: 126525 - RNA, 19 nt, Artificial Sequence
  Description of Artificial Sequence: Synthetic oligonucleotide
  Antisense strand to SEQ ID NO: 126524
caauuccaggcacaaucuu

SEQ ID NO: 126526 - RNA, 19 nt, Artificial Sequence
  Description of Artificial Sequence: Synthetic oligonucleotide
  Sense strand starting at position 3199 of SEQ ID NO: 1615
uauugauucgccuauggaa

SEQ ID NO: 126527 - RNA, 19 nt, Artificial Sequence
  Description of Artificial Sequence: Synthetic oligonucleotide
  Antisense strand to SEQ ID NO: 126526
uuccauaggcgaaucaaua

SEQ ID NO: 126528 - RNA, 19 nt, Artificial Sequence
  Description of Artificial Sequence: Synthetic oligonucleotide
  Sense strand starting at position 3201 of SEQ ID NO: 1615
uugauucgccuauggaaga

SEQ ID NO: 126529 - RNA, 19 nt, Artificial Sequence
  Description of Artificial Sequence: Synthetic oligonucleotide
  Antisense strand to SEQ ID NO: 126528
ucuuccauaggcgaaucaa

SEQ ID NO: 126530 - RNA, 19 nt, Artificial Sequence
  Description of Artificial Sequence: Synthetic oligonucleotide
  Sense strand starting at position 3263 of SEQ ID NO: 1615
ccuuaaagaugcccugagu

SEQ ID NO: 126531 - RNA, 19 nt, Artificial Sequence
  Description of Artificial Sequence: Synthetic oligonucleotide
  Antisense strand to SEQ ID NO: 126530
acucagggcaucuuuaagg

SEQ ID NO: 126532 - RNA, 19 nt, Artificial Sequence
  Description of Artificial Sequence: Synthetic oligonucleotide
  Sense strand starting at position 3266 of SEQ ID NO: 1615
uaaagaugcccugaguuga

SEQ ID NO: 126533 - RNA, 19 nt, Artificial Sequence
  Description of Artificial Sequence: Synthetic oligonucleotide
  Antisense strand to SEQ ID NO: 126532
ucaacucagggcaucuuua

SEQ ID NO: 126534 - RNA, 19 nt, Artificial Sequence
  Description of Artificial Sequence: Synthetic oligonucleotide
  Sense strand starting at position 3283 of SEQ ID NO: 1615
gagacaguuccugagggca

SEQ ID NO: 126535 - RNA, 19 nt, Artificial Sequence
  Description of Artificial Sequence: Synthetic oligonucleotide
  Antisense strand to SEQ ID NO: 126534
ugcccucaggaacugucuc

SEQ ID NO: 126536 - RNA, 19 nt, Artificial Sequence
  Description of Artificial Sequence: Synthetic oligonucleotide
  Sense strand starting at position 3313 of SEQ ID NO: 1615
uguauauggacuggguaua

SEQ ID NO: 126537 - RNA, 19 nt, Artificial Sequence
  Description of Artificial Sequence: Synthetic oligonucleotide
  Antisense strand to SEQ ID NO: 126536
uauacccaguccauauaca

SEQ ID NO: 126538 - RNA, 19 nt, Artificial Sequence
  Description of Artificial Sequence: Synthetic oligonucleotide
  Sense strand starting at position 3326 of SEQ ID NO: 1615
gguauagaguaacugguuu

SEQ ID NO: 126539 - RNA, 19 nt, Artificial Sequence
  Description of Artificial Sequence: Synthetic oligonucleotide
  Antisense strand to SEQ ID NO: 126538
aaaccaguuacucuauacc

SEQ ID NO: 126540 - RNA, 19 nt, Artificial Sequence
  Description of Artificial Sequence: Synthetic oligonucleotide
  Sense strand starting at position 3364 of SEQ ID NO: 1615
gauggacaugguugagcua

SEQ ID NO: 126541 - RNA, 19 nt, Artificial Sequence
  Description of Artificial Sequence: Synthetic oligonucleotide
  Antisense strand to SEQ ID NO: 126540
uagcucaaccauguccauc

SEQ ID NO: 126542 - RNA, 19 nt, Artificial Sequence
  Description of Artificial Sequence: Synthetic oligonucleotide
  Sense strand starting at position 3367 of SEQ ID NO: 1615
ggacaugguugagcuaaga

SEQ ID NO: 126543 - RNA, 19 nt, Artificial Sequence
  Description of Artificial Sequence: Synthetic oligonucleotide
  Antisense strand to SEQ ID NO: 126542
ucuuagcucaaccaugucc

SEQ ID NO: 126544 - RNA, 19 nt, Artificial Sequence
  Description of Artificial Sequence: Synthetic oligonucleotide
  Sense strand starting at position 3574 of SEQ ID NO: 1615
agcacucaaguuugauaac

SEQ ID NO: 126545 - RNA, 19 nt, Artificial Sequence
  Description of Artificial Sequence: Synthetic oligonucleotide
  Antisense strand to SEQ ID NO: 126544
guuaucaaacuugagugcu

SEQ ID NO: 126546 - RNA, 19 nt, Artificial Sequence
  Description of Artificial Sequence: Synthetic oligonucleotide
  Sense strand starting at position 3810 of SEQ ID NO: 1615
cagcuaaggcuuugagaga

SEQ ID NO: 126547 - RNA, 19 nt, Artificial Sequence
  Description of Artificial Sequence: Synthetic oligonucleotide
  Antisense strand to SEQ ID NO: 126546
ucucucaaagccuuagcug

SEQ ID NO: 126548 - RNA, 19 nt, Artificial Sequence
  Description of Artificial Sequence: Synthetic oligonucleotide
  Sense strand starting at position 3817 of SEQ ID NO: 1615
ggcuuugagagaugaagug

SEQ ID NO: 126549 - RNA, 19 nt, Artificial Sequence
  Description of Artificial Sequence: Synthetic oligonucleotide
  Antisense strand to SEQ ID NO: 126548
cacuucaucucucaaagcc

SEQ ID NO: 126550 - RNA, 19 nt, Artificial Sequence
  Description of Artificial Sequence: Synthetic oligonucleotide
  Sense strand starting at position 3838 of SEQ ID NO: 1615
guccaagcacaguauauaa

SEQ ID NO: 126551 - RNA, 19 nt, Artificial Sequence
  Description of Artificial Sequence: Synthetic oligonucleotide
  Antisense strand to SEQ ID NO: 126550
uuauauacugugcuuggac

SEQ ID NO: 126552 - RNA, 19 nt, Artificial Sequence
  Description of Artificial Sequence: Synthetic oligonucleotide
  Sense strand starting at position 3880 of SEQ ID NO: 1615
ggaguaaagcugugauuca

SEQ ID NO: 126553 - RNA, 19 nt, Artificial Sequence
  Description of Artificial Sequence: Synthetic oligonucleotide
  Antisense strand to SEQ ID NO: 126552
ugaaucacagcuuuacucc

SEQ ID NO: 126554 - RNA, 19 nt, Artificial Sequence
  Description of Artificial Sequence: Synthetic oligonucleotide
  Sense strand starting at position 26 of SEQ ID NO: 1616
ucuguagacuuagccauaa

SEQ ID NO: 126555 - RNA, 19 nt, Artificial Sequence
  Description of Artificial Sequence: Synthetic oligonucleotide
  Antisense strand to SEQ ID NO: 126554
uuauggcuaagucuacaga

SEQ ID NO: 126556 - RNA, 19 nt, Artificial Sequence
  Description of Artificial Sequence: Synthetic oligonucleotide
  Sense strand starting at position 146 of SEQ ID NO: 1616
gcaaacaggguuugagaaa

SEQ ID NO: 126557 - RNA, 19 nt, Artificial Sequence
  Description of Artificial Sequence: Synthetic oligonucleotide
  Antisense strand to SEQ ID NO: 126556
uuucucaaacccuguuugc

SEQ ID NO: 126558 - RNA, 19 nt, Artificial Sequence
  Description of Artificial Sequence: Synthetic oligonucleotide
  Sense strand starting at position 269 of SEQ ID NO: 1616
cuguaauagcgucagacag

SEQ ID NO: 126559 - RNA, 19 nt, Artificial Sequence
  Description of Artificial Sequence: Synthetic oligonucleotide
  Antisense strand to SEQ ID NO: 126558
cugucugacgcuauuacag

SEQ ID NO: 126560 - RNA, 19 nt, Artificial Sequence
  Description of Artificial Sequence: Synthetic oligonucleotide
  Sense strand starting at position 326 of SEQ ID NO: 1616
uuacauuacguguauagga

SEQ ID NO: 126561 - RNA, 19 nt, Artificial Sequence
  Description of Artificial Sequence: Synthetic oligonucleotide
  Antisense strand to SEQ ID NO: 126560
uccuauacacguaauguaa

SEQ ID NO: 126562 - RNA, 19 nt, Artificial Sequence
  Description of Artificial Sequence: Synthetic oligonucleotide
  Sense strand starting at position 334 of SEQ ID NO: 1616
cguguauaggaacacauau

SEQ ID NO: 126563 - RNA, 19 nt, Artificial Sequence
  Description of Artificial Sequence: Synthetic oligonucleotide
  Antisense strand to SEQ ID NO: 126562
auauguguuccuauacacg

SEQ ID NO: 126564 - RNA, 19 nt, Artificial Sequence
  Description of Artificial Sequence: Synthetic oligonucleotide
  Sense strand starting at position 410 of SEQ ID NO: 1616
uucuuuauucuaggaauug

SEQ ID NO: 126565 - RNA, 19 nt, Artificial Sequence
  Description of Artificial Sequence: Synthetic oligonucleotide
  Antisense strand to SEQ ID NO: 126564
caauuccuagaauaaagaa

SEQ ID NO: 126566 - RNA, 19 nt, Artificial Sequence
  Description of Artificial Sequence: Synthetic oligonucleotide
  Sense strand starting at position 500 of SEQ ID NO: 1616
cguagauuucucugagcga

SEQ ID NO: 126567 - RNA, 19 nt, Artificial Sequence
  Description of Artificial Sequence: Synthetic oligonucleotide
  Antisense strand to SEQ ID NO: 126566
ucgcucagagaaaucuacg

SEQ ID NO: 126568 - RNA, 19 nt, Artificial Sequence
  Description of Artificial Sequence: Synthetic oligonucleotide
  Sense strand starting at position 513 of SEQ ID NO: 1616
gagcgacuaucuucugaga

SEQ ID NO: 126569 - RNA, 19 nt, Artificial Sequence
  Description of Artificial Sequence: Synthetic oligonucleotide
  Antisense strand to SEQ ID NO: 126568
ucucagaagauagucgcuc

SEQ ID NO: 126570 - RNA, 19 nt, Artificial Sequence
  Description of Artificial Sequence: Synthetic oligonucleotide
  Sense strand starting at position 546 of SEQ ID NO: 1616
cuaagaccauggcugaaua

SEQ ID NO: 126571 - RNA, 19 nt, Artificial Sequence
  Description of Artificial Sequence: Synthetic oligonucleotide
  Antisense strand to SEQ ID NO: 126570
uauucagccauggucuuag

SEQ ID NO: 126572 - RNA, 19 nt, Artificial Sequence
  Description of Artificial Sequence: Synthetic oligonucleotide
  Sense strand starting at position 599 of SEQ ID NO: 1616
gcauuuguuucugcaagag

SEQ ID NO: 126573 - RNA, 19 nt, Artificial Sequence
  Description of Artificial Sequence: Synthetic oligonucleotide
  Antisense strand to SEQ ID NO: 126572
cucuugcagaaacaaaugc

SEQ ID NO: 126574 - RNA, 19 nt, Artificial Sequence
  Description of Artificial Sequence: Synthetic oligonucleotide
  Sense strand starting at position 723 of SEQ ID NO: 1616
caagaauucgcccaaagug

SEQ ID NO: 126575 - RNA, 19 nt, Artificial Sequence
  Description of Artificial Sequence: Synthetic oligonucleotide
  Antisense strand to SEQ ID NO: 126574
cacuuugggcgaauucuug

SEQ ID NO: 126576 - RNA, 19 nt, Artificial Sequence
  Description of Artificial Sequence: Synthetic oligonucleotide
  Sense strand starting at position 771 of SEQ ID NO: 1616
acauccuuugcagguagaa

SEQ ID NO: 126577 - RNA, 19 nt, Artificial Sequence
  Description of Artificial Sequence: Synthetic oligonucleotide
  Antisense strand to SEQ ID NO: 126576
uucuaccugcaaaggaugu

SEQ ID NO: 126578 - RNA, 19 nt, Artificial Sequence
  Description of Artificial Sequence: Synthetic oligonucleotide
  Sense strand starting at position 773 of SEQ ID NO: 1616
auccuuugcagguagaaga

SEQ ID NO: 126579 - RNA, 19 nt, Artificial Sequence
  Description of Artificial Sequence: Synthetic oligonucleotide
  Antisense strand to SEQ ID NO: 126578
ucuucuaccugcaaaggau

SEQ ID NO: 126580 - RNA, 19 nt, Artificial Sequence
  Description of Artificial Sequence: Synthetic oligonucleotide
  Sense strand starting at position 784 of SEQ ID NO: 1616
guagaagagucuuuaauug

SEQ ID NO: 126581 - RNA, 19 nt, Artificial Sequence
  Description of Artificial Sequence: Synthetic oligonucleotide
  Antisense strand to SEQ ID NO: 126580
caauuaaagacucuucuac

SEQ ID NO: 126582 - RNA, 19 nt, Artificial Sequence
  Description of Artificial Sequence: Synthetic oligonucleotide
  Sense strand starting at position 931 of SEQ ID NO: 1616
ccaccuucgcaggacaaua

SEQ ID NO: 126583 - RNA, 19 nt, Artificial Sequence
  Description of Artificial Sequence: Synthetic oligonucleotide
  Antisense strand to SEQ ID NO: 126582
uauuguccugcgaaggugg

SEQ ID NO: 126584 - RNA, 19 nt, Artificial Sequence
  Description of Artificial Sequence: Synthetic oligonucleotide
  Sense strand starting at position 971 of SEQ ID NO: 1616
acuuuaaacguguaaacca

SEQ ID NO: 126585 - RNA, 19 nt, Artificial Sequence
  Description of Artificial Sequence: Synthetic oligonucleotide
  Antisense strand to SEQ ID NO: 126584
ugguuuacacguuuaaagu

SEQ ID NO: 126586 - RNA, 19 nt, Artificial Sequence
  Description of Artificial Sequence: Synthetic oligonucleotide
  Sense strand starting at position 1100 of SEQ ID NO: 1616
gacccaucacgagauucuu

SEQ ID NO: 126587 - RNA, 19 nt, Artificial Sequence
  Description of Artificial Sequence: Synthetic oligonucleotide
  Antisense strand to SEQ ID NO: 126586
aagaaucucgugauggguc

SEQ ID NO: 126588 - RNA, 19 nt, Artificial Sequence
  Description of Artificial Sequence: Synthetic oligonucleotide
  Sense strand starting at position 1206 of SEQ ID NO: 1616
ugcgucaucgcgguccaua

SEQ ID NO: 126589 - RNA, 19 nt, Artificial Sequence
  Description of Artificial Sequence: Synthetic oligonucleotide
  Antisense strand to SEQ ID NO: 126588
uauggaccgcgaugacgca

SEQ ID NO: 126590 - RNA, 19 nt, Artificial Sequence
  Description of Artificial Sequence: Synthetic oligonucleotide
  Sense strand starting at position 1258 of SEQ ID NO: 1616
gcaggucgccaggagauau

SEQ ID NO: 126591 - RNA, 19 nt, Artificial Sequence
  Description of Artificial Sequence: Synthetic oligonucleotide
  Antisense strand to SEQ ID NO: 126590
auaucuccuggcgaccugc

SEQ ID NO: 126592 - RNA, 19 nt, Artificial Sequence
  Description of Artificial Sequence: Synthetic oligonucleotide
  Sense strand starting at position 2084 of SEQ ID NO: 1616
ugucaagugccugagaaca

SEQ ID NO: 126593 - RNA, 19 nt, Artificial Sequence
  Description of Artificial Sequence: Synthetic oligonucleotide
  Antisense strand to SEQ ID NO: 126592
uguucucaggcacuugaca

SEQ ID NO: 126594 - RNA, 19 nt, Artificial Sequence
  Description of Artificial Sequence: Synthetic oligonucleotide
  Sense strand starting at position 2460 of SEQ ID NO: 1616
aguuacuaagcgggacaaa

SEQ ID NO: 126595 - RNA, 19 nt, Artificial Sequence
  Description of Artificial Sequence: Synthetic oligonucleotide
  Antisense strand to SEQ ID NO: 126594
uuugucccgcuuaguaacu

SEQ ID NO: 126596 - RNA, 19 nt, Artificial Sequence
  Description of Artificial Sequence: Synthetic oligonucleotide
  Sense strand starting at position 2964 of SEQ ID NO: 1616
auuggacauuucugaggga

SEQ ID NO: 126597 - RNA, 19 nt, Artificial Sequence
  Description of Artificial Sequence: Synthetic oligonucleotide
  Antisense strand to SEQ ID NO: 126596
ucccucagaaauguccaau

SEQ ID NO: 126598 - RNA, 19 nt, Artificial Sequence
  Description of Artificial Sequence: Synthetic oligonucleotide
  Sense strand starting at position 3126 of SEQ ID NO: 1616
uacagugcauguguaauuu

SEQ ID NO: 126599 - RNA, 19 nt, Artificial Sequence
  Description of Artificial Sequence: Synthetic oligonucleotide
  Antisense strand to SEQ ID NO: 126598
aaauuacacaugcacugua

SEQ ID NO: 126600 - RNA, 19 nt, Artificial Sequence
  Description of Artificial Sequence: Synthetic oligonucleotide
  Sense strand starting at position 3148 of SEQ ID NO: 1616
agauaagucacagguguug

SEQ ID NO: 126601 - RNA, 19 nt, Artificial Sequence
  Description of Artificial Sequence: Synthetic oligonucleotide
  Antisense strand to SEQ ID NO: 126600
caacaccugugacuuaucu

SEQ ID NO: 126602 - RNA, 19 nt, Artificial Sequence
  Description of Artificial Sequence: Synthetic oligonucleotide
  Sense strand starting at position 3191 of SEQ ID NO: 1616
uucuguuucccugacagac

SEQ ID NO: 126603 - RNA, 19 nt, Artificial Sequence
  Description of Artificial Sequence: Synthetic oligonucleotide
  Antisense strand to SEQ ID NO: 126602
gucugucagggaaacagaa

SEQ ID NO: 126604 - RNA, 19 nt, Artificial Sequence
  Description of Artificial Sequence: Synthetic oligonucleotide
  Sense strand starting at position 3242 of SEQ ID NO: 1616
agcuuaaaucugggagauu

SEQ ID NO: 126605 - RNA, 19 nt, Artificial Sequence
  Description of Artificial Sequence: Synthetic oligonucleotide
  Antisense strand to SEQ ID NO: 126604
aaucucccagauuuaagcu

SEQ ID NO: 126606 - RNA, 19 nt, Artificial Sequence
  Description of Artificial Sequence: Synthetic oligonucleotide
  Sense strand starting at position 3344 of SEQ ID NO: 1616
gcagauuugugucuccuga

SEQ ID NO: 126607 - RNA, 19 nt, Artificial Sequence
  Description of Artificial Sequence: Synthetic oligonucleotide
  Antisense strand to SEQ ID NO: 126606
ucaggagacacaaaucugc

SEQ ID NO: 126608 - RNA, 19 nt, Artificial Sequence
  Description of Artificial Sequence: Synthetic oligonucleotide
  Sense strand starting at position 3360 of SEQ ID NO: 1616
ugaagauugugccuggaau

SEQ ID NO: 126609 - RNA, 19 nt, Artificial Sequence
  Description of Artificial Sequence: Synthetic oligonucleotide
  Antisense strand to SEQ ID NO: 126608
auuccaggcacaaucuuca

SEQ ID NO: 126610 - RNA, 19 nt, Artificial Sequence
  Description of Artificial Sequence: Synthetic oligonucleotide
  Sense strand starting at position 3361 of SEQ ID NO: 1616
gaagauugugccuggaauu

SEQ ID NO: 126611 - RNA, 19 nt, Artificial Sequence
  Description of Artificial Sequence: Synthetic oligonucleotide
  Antisense strand to SEQ ID NO: 126610
aauuccaggcacaaucuuc

SEQ ID NO: 126612 - RNA, 19 nt, Artificial Sequence
  Description of Artificial Sequence: Synthetic oligonucleotide
  Sense strand starting at position 3362 of SEQ ID NO: 1616
aagauugugccuggaauug

SEQ ID NO: 126613 - RNA, 19 nt, Artificial Sequence
  Description of Artificial Sequence: Synthetic oligonucleotide
  Antisense strand to SEQ ID NO: 126612
caauuccaggcacaaucuu

SEQ ID NO: 126614 - RNA, 19 nt, Artificial Sequence
  Description of Artificial Sequence: Synthetic oligonucleotide
  Sense strand starting at position 3527 of SEQ ID NO: 1616
uauugauucgccuauggaa

SEQ ID NO: 126615 - RNA, 19 nt, Artificial Sequence
  Description of Artificial Sequence: Synthetic oligonucleotide
  Antisense strand to SEQ ID NO: 126614
uuccauaggcgaaucaaua

SEQ ID NO: 126616 - RNA, 19 nt, Artificial Sequence
  Description of Artificial Sequence: Synthetic oligonucleotide
  Sense strand starting at position 3529 of SEQ ID NO: 1616
uugauucgccuauggaaga

SEQ ID NO: 126617 - RNA, 19 nt, Artificial Sequence
  Description of Artificial Sequence: Synthetic oligonucleotide
  Antisense strand to SEQ ID NO: 126616
ucuuccauaggcgaaucaa

SEQ ID NO: 126618 - RNA, 19 nt, Artificial Sequence
  Description of Artificial Sequence: Synthetic oligonucleotide
  Sense strand starting at position 3591 of SEQ ID NO: 1616
ccuuaaagaugcccugagu

SEQ ID NO: 126619 - RNA, 19 nt, Artificial Sequence
  Description of Artificial Sequence: Synthetic oligonucleotide
  Antisense strand to SEQ ID NO: 126618
acucagggcaucuuuaagg

SEQ ID NO: 126620 - RNA, 19 nt, Artificial Sequence
  Description of Artificial Sequence: Synthetic oligonucleotide
  Sense strand starting at position 3594 of SEQ ID NO: 1616
uaaagaugcccugaguuga

SEQ ID NO: 126621 - RNA, 19 nt, Artificial Sequence
  Description of Artificial Sequence: Synthetic oligonucleotide
  Antisense strand to SEQ ID NO: 126620
ucaacucagggcaucuuua

SEQ ID NO: 126622 - RNA, 19 nt, Artificial Sequence
  Description of Artificial Sequence: Synthetic oligonucleotide
  Sense strand starting at position 3611 of SEQ ID NO: 1616
gagacaguuccugagggca

SEQ ID NO: 126623 - RNA, 19 nt, Artificial Sequence
  Description of Artificial Sequence: Synthetic oligonucleotide
  Antisense strand to SEQ ID NO: 126622
ugcccucaggaacugucuc

SEQ ID NO: 126624 - RNA, 19 nt, Artificial Sequence
  Description of Artificial Sequence: Synthetic oligonucleotide
  Sense strand starting at position 3641 of SEQ ID NO: 1616
uguauauggacuggguaua

SEQ ID NO: 126625 - RNA, 19 nt, Artificial Sequence
  Description of Artificial Sequence: Synthetic oligonucleotide
  Antisense strand to SEQ ID NO: 126624
uauacccaguccauauaca

SEQ ID NO: 126626 - RNA, 19 nt, Artificial Sequence
  Description of Artificial Sequence: Synthetic oligonucleotide
  Sense strand starting at position 3654 of SEQ ID NO: 1616
gguauagaguaacugguuu

SEQ ID NO: 126627 - RNA, 19 nt, Artificial Sequence
  Description of Artificial Sequence: Synthetic oligonucleotide
  Antisense strand to SEQ ID NO: 126626
aaaccaguuacucuauacc

SEQ ID NO: 126628 - RNA, 19 nt, Artificial Sequence
  Description of Artificial Sequence: Synthetic oligonucleotide
  Sense strand starting at position 3692 of SEQ ID NO: 1616
gauggacaugguugagcua

SEQ ID NO: 126629 - RNA, 19 nt, Artificial Sequence
  Description of Artificial Sequence: Synthetic oligonucleotide
  Antisense strand to SEQ ID NO: 126628
uagcucaaccauguccauc

SEQ ID NO: 126630 - RNA, 19 nt, Artificial Sequence
  Description of Artificial Sequence: Synthetic oligonucleotide
  Sense strand starting at position 3695 of SEQ ID NO: 1616
ggacaugguugagcuaaga

SEQ ID NO: 126631 - RNA, 19 nt, Artificial Sequence
  Description of Artificial Sequence: Synthetic oligonucleotide
  Antisense strand to SEQ ID NO: 126630
ucuuagcucaaccaugucc

SEQ ID NO: 126632 - RNA, 19 nt, Artificial Sequence
  Description of Artificial Sequence: Synthetic oligonucleotide
  Sense strand starting at position 3902 of SEQ ID NO: 1616
agcacucaaguuugauaac

SEQ ID NO: 126633 - RNA, 19 nt, Artificial Sequence
  Description of Artificial Sequence: Synthetic oligonucleotide
  Antisense strand to SEQ ID NO: 126632
guuaucaaacuugagugcu

SEQ ID NO: 126634 - RNA, 19 nt, Artificial Sequence
  Description of Artificial Sequence: Synthetic oligonucleotide
  Sense strand starting at position 3709 of SEQ ID NO: 1617
ccagguuugcagugguuca

SEQ ID NO: 126635 - RNA, 19 nt, Artificial Sequence
  Description of Artificial Sequence: Synthetic oligonucleotide
  Antisense strand to SEQ ID NO: 126634
ugaaccacugcaaaccugg

SEQ ID NO: 126636 - RNA, 19 nt, Artificial Sequence
  Description of Artificial Sequence: Synthetic oligonucleotide
  Sense strand starting at position 3639 of SEQ ID NO: 1617
aggcucacucauggaaacu

SEQ ID NO: 126637 - RNA, 19 nt, Artificial Sequence
  Description of Artificial Sequence: Synthetic oligonucleotide
  Antisense strand to SEQ ID NO: 126636
aguuuccaugagugagccu

SEQ ID NO: 126638 - RNA, 19 nt, Artificial Sequence
  Description of Artificial Sequence: Synthetic oligonucleotide
  Sense strand starting at position 3601 of SEQ ID NO: 1617
gaaagaaaguuggagaaau

SEQ ID NO: 126639 - RNA, 19 nt, Artificial Sequence
  Description of Artificial Sequence: Synthetic oligonucleotide
  Antisense strand to SEQ ID NO: 126638
auuucuccaacuuucuuuc

SEQ ID NO: 126640 - RNA, 19 nt, Artificial Sequence
  Description of Artificial Sequence: Synthetic oligonucleotide
  Sense strand starting at position 3587 of SEQ ID NO: 1617
gaagaaugauaagggaaag

SEQ ID NO: 126641 - RNA, 19 nt, Artificial Sequence
  Description of Artificial Sequence: Synthetic oligonucleotide
  Antisense strand to SEQ ID NO: 126640
cuuucccuuaucauucuuc

SEQ ID NO: 126642 - RNA, 19 nt, Artificial Sequence
  Description of Artificial Sequence: Synthetic oligonucleotide
  Sense strand starting at position 3528 of SEQ ID NO: 1617
ggaucaaccucagggaauu

SEQ ID NO: 126643 - RNA, 19 nt, Artificial Sequence
  Description of Artificial Sequence: Synthetic oligonucleotide
  Antisense strand to SEQ ID NO: 126642
aauucccugagguugaucc

SEQ ID NO: 126644 - RNA, 19 nt, Artificial Sequence
  Description of Artificial Sequence: Synthetic oligonucleotide
  Sense strand starting at position 3499 of SEQ ID NO: 1617
gcacaugaauaucagauau

SEQ ID NO: 126645 - RNA, 19 nt, Artificial Sequence
  Description of Artificial Sequence: Synthetic oligonucleotide
  Antisense strand to SEQ ID NO: 126644
auaucugauauucaugugc

SEQ ID NO: 126646 - RNA, 19 nt, Artificial Sequence
  Description of Artificial Sequence: Synthetic oligonucleotide
  Sense strand starting at position 2849 of SEQ ID NO: 1617
aaggaaugugacggacauu

SEQ ID NO: 126647 - RNA, 19 nt, Artificial Sequence
  Description of Artificial Sequence: Synthetic oligonucleotide
  Antisense strand to SEQ ID NO: 126646
aauguccgucacauuccuu

SEQ ID NO: 126648 - RNA, 19 nt, Artificial Sequence
  Description of Artificial Sequence: Synthetic oligonucleotide
  Sense strand starting at position 2832 of SEQ ID NO: 1617
gccuauaugcuauaggaaa

SEQ ID NO: 126649 - RNA, 19 nt, Artificial Sequence
  Description of Artificial Sequence: Synthetic oligonucleotide
  Antisense strand to SEQ ID NO: 126648
uuuccuauagcauauaggc

SEQ ID NO: 126650 - RNA, 19 nt, Artificial Sequence
  Description of Artificial Sequence: Synthetic oligonucleotide
  Sense strand starting at position 2533 of SEQ ID NO: 1617
gccacaccguuuguuuaau

SEQ ID NO: 126651 - RNA, 19 nt, Artificial Sequence
  Description of Artificial Sequence: Synthetic oligonucleotide
  Antisense strand to SEQ ID NO: 126650
auuaaacaaacgguguggc

SEQ ID NO: 126652 - RNA, 19 nt, Artificial Sequence
  Description of Artificial Sequence: Synthetic oligonucleotide
  Sense strand starting at position 2532 of SEQ ID NO: 1617
agccacaccguuuguuuaa

SEQ ID NO: 126653 - RNA, 19 nt, Artificial Sequence
  Description of Artificial Sequence: Synthetic oligonucleotide
  Antisense strand to SEQ ID NO: 126652
uuaaacaaacgguguggcu

SEQ ID NO: 126654 - RNA, 19 nt, Artificial Sequence
  Description of Artificial Sequence: Synthetic oligonucleotide
  Sense strand starting at position 2479 of SEQ ID NO: 1617
agacacaauuuaugaauga

SEQ ID NO: 126655 - RNA, 19 nt, Artificial Sequence
  Description of Artificial Sequence: Synthetic oligonucleotide
  Antisense strand to SEQ ID NO: 126654
ucauucauaaauugugucu

SEQ ID NO: 126656 - RNA, 19 nt, Artificial Sequence
  Description of Artificial Sequence: Synthetic oligonucleotide
  Sense strand starting at position 2323 of SEQ ID NO: 1617
gcagcauucgaggucuugu

SEQ ID NO: 126657 - RNA, 19 nt, Artificial Sequence
  Description of Artificial Sequence: Synthetic oligonucleotide
  Antisense strand to SEQ ID NO: 126656
acaagaccucgaaugcugc

SEQ ID NO: 126658 - RNA, 19 nt, Artificial Sequence
  Description of Artificial Sequence: Synthetic oligonucleotide
  Sense strand starting at position 2163 of SEQ ID NO: 1617
aucacugguccugggcaaa

SEQ ID NO: 126659 - RNA, 19 nt, Artificial Sequence
  Description of Artificial Sequence: Synthetic oligonucleotide
  Antisense strand to SEQ ID NO: 126658
uuugcccaggaccagugau

SEQ ID NO: 126660 - RNA, 19 nt, Artificial Sequence
  Description of Artificial Sequence: Synthetic oligonucleotide
  Sense strand starting at position 2146 of SEQ ID NO: 1617
agguccugaaugugaacau

SEQ ID NO: 126661 - RNA, 19 nt, Artificial Sequence
  Description of Artificial Sequence: Synthetic oligonucleotide
  Antisense strand to SEQ ID NO: 126660
auguucacauucaggaccu

SEQ ID NO: 126662 - RNA, 19 nt, Artificial Sequence
  Description of Artificial Sequence: Synthetic oligonucleotide
  Sense strand starting at position 1369 of SEQ ID NO: 1617
uggugaaauagaugagcuu

SEQ ID NO: 126663 - RNA, 19 nt, Artificial Sequence
  Description of Artificial Sequence: Synthetic oligonucleotide
  Antisense strand to SEQ ID NO: 126662
aagcucaucuauuucacca

SEQ ID NO: 126664 - RNA, 19 nt, Artificial Sequence
  Description of Artificial Sequence: Synthetic oligonucleotide
  Sense strand starting at position 1358 of SEQ ID NO: 1617
ccgaucaguaauggugaaa

SEQ ID NO: 126665 - RNA, 19 nt, Artificial Sequence
  Description of Artificial Sequence: Synthetic oligonucleotide
  Antisense strand to SEQ ID NO: 126664
uuucaccauuacugaucgg

SEQ ID NO: 126666 - RNA, 19 nt, Artificial Sequence
  Description of Artificial Sequence: Synthetic oligonucleotide
  Sense strand starting at position 1351 of SEQ ID NO: 1617
auagcagccgaucaguaau

SEQ ID NO: 126667 - RNA, 19 nt, Artificial Sequence
  Description of Artificial Sequence: Synthetic oligonucleotide
  Antisense strand to SEQ ID NO: 126666
auuacugaucggcugcuau

SEQ ID NO: 126668 - RNA, 19 nt, Artificial Sequence
  Description of Artificial Sequence: Synthetic oligonucleotide
  Sense strand starting at position 1278 of SEQ ID NO: 1617
agcuguaaucggcaacaug

SEQ ID NO: 126669 - RNA, 19 nt, Artificial Sequence
  Description of Artificial Sequence: Synthetic oligonucleotide
  Antisense strand to SEQ ID NO: 126668
cauguugccgauuacagcu

SEQ ID NO: 126670 - RNA, 19 nt, Artificial Sequence
  Description of Artificial Sequence: Synthetic oligonucleotide
  Sense strand starting at position 1276 of SEQ ID NO: 1617
ggagcuguaaucggcaaca

SEQ ID NO: 126671 - RNA, 19 nt, Artificial Sequence
  Description of Artificial Sequence: Synthetic oligonucleotide
  Antisense strand to SEQ ID NO: 126670
uguugccgauuacagcucc

SEQ ID NO: 126672 - RNA, 19 nt, Artificial Sequence
  Description of Artificial Sequence: Synthetic oligonucleotide
  Sense strand starting at position 1219 of SEQ ID NO: 1617
uuuaguuguccguacauuu

SEQ ID NO: 126673 - RNA, 19 nt, Artificial Sequence
  Description of Artificial Sequence: Synthetic oligonucleotide
  Antisense strand to SEQ ID NO: 126672
aaauguacggacaacuaaa

SEQ ID NO: 126674 - RNA, 19 nt, Artificial Sequence
  Description of Artificial Sequence: Synthetic oligonucleotide
  Sense strand starting at position 1217 of SEQ ID NO: 1617
gauuuaguuguccguacau

SEQ ID NO: 126675 - RNA, 19 nt, Artificial Sequence
  Description of Artificial Sequence: Synthetic oligonucleotide
  Antisense strand to SEQ ID NO: 126674
auguacggacaacuaaauc

SEQ ID NO: 126676 - RNA, 19 nt, Artificial Sequence
  Description of Artificial Sequence: Synthetic oligonucleotide
  Sense strand starting at position 1216 of SEQ ID NO: 1617
ugauuuaguuguccguaca

SEQ ID NO: 126677 - RNA, 19 nt, Artificial Sequence
  Description of Artificial Sequence: Synthetic oligonucleotide
  Antisense strand to SEQ ID NO: 126676
uguacggacaacuaaauca

SEQ ID NO: 126678 - RNA, 19 nt, Artificial Sequence
  Description of Artificial Sequence: Synthetic oligonucleotide
  Sense strand starting at position 1213 of SEQ ID NO: 1617
uuaugauuuaguuguccgu

SEQ ID NO: 126679 - RNA, 19 nt, Artificial Sequence
  Description of Artificial Sequence: Synthetic oligonucleotide
  Antisense strand to SEQ ID NO: 126678
acggacaacuaaaucauaa

SEQ ID NO: 126680 - RNA, 19 nt, Artificial Sequence
  Description of Artificial Sequence: Synthetic oligonucleotide
  Sense strand starting at position 1205 of SEQ ID NO: 1617
uaggaauguuaugauuuag

SEQ ID NO: 126681 - RNA, 19 nt, Artificial Sequence
  Description of Artificial Sequence: Synthetic oligonucleotide
  Antisense strand to SEQ ID NO: 126680
cuaaaucauaacauuccua

SEQ ID NO: 126682 - RNA, 19 nt, Artificial Sequence
  Description of Artificial Sequence: Synthetic oligonucleotide
  Sense strand starting at position 1155 of SEQ ID NO: 1617
ugaggacuuuccuucucca

SEQ ID NO: 126683 - RNA, 19 nt, Artificial Sequence
  Description of Artificial Sequence: Synthetic oligonucleotide
  Antisense strand to SEQ ID NO: 126682
uggagaaggaaaguccuca

SEQ ID NO: 126684 - RNA, 19 nt, Artificial Sequence
  Description of Artificial Sequence: Synthetic oligonucleotide
  Sense strand starting at position 965 of SEQ ID NO: 1617
ccagucagcagggauaacu

SEQ ID NO: 126685 - RNA, 19 nt, Artificial Sequence
  Description of Artificial Sequence: Synthetic oligonucleotide
  Antisense strand to SEQ ID NO: 126684
aguuaucccugcugacugg

SEQ ID NO: 126686 - RNA, 19 nt, Artificial Sequence
  Description of Artificial Sequence: Synthetic oligonucleotide
  Sense strand starting at position 891 of SEQ ID NO: 1617
cagacuuugguugggcaaa

SEQ ID NO: 126687 - RNA, 19 nt, Artificial Sequence
  Description of Artificial Sequence: Synthetic oligonucleotide
  Antisense strand to SEQ ID NO: 126686
uuugcccaaccaaagucug

SEQ ID NO: 126688 - RNA, 19 nt, Artificial Sequence
  Description of Artificial Sequence: Synthetic oligonucleotide
  Sense strand starting at position 684 of SEQ ID NO: 1617
agugaccucccuggaagaa

SEQ ID NO: 126689 - RNA, 19 nt, Artificial Sequence
  Description of Artificial Sequence: Synthetic oligonucleotide
  Antisense strand to SEQ ID NO: 126688
uucuuccagggaggucacu

SEQ ID NO: 126690 - RNA, 19 nt, Artificial Sequence
  Description of Artificial Sequence: Synthetic oligonucleotide
  Sense strand starting at position 683 of SEQ ID NO: 1617
gagugaccucccuggaaga

SEQ ID NO: 126691 - RNA, 19 nt, Artificial Sequence
  Description of Artificial Sequence: Synthetic oligonucleotide
  Antisense strand to SEQ ID NO: 126690
ucuuccagggaggucacuc

SEQ ID NO: 126692 - RNA, 19 nt, Artificial Sequence
  Description of Artificial Sequence: Synthetic oligonucleotide
  Sense strand starting at position 651 of SEQ ID NO: 1617
uuuagugagugguucuaca

SEQ ID NO: 126693 - RNA, 19 nt, Artificial Sequence
  Description of Artificial Sequence: Synthetic oligonucleotide
  Antisense strand to SEQ ID NO: 126692
uguagaaccacucacuaaa

SEQ ID NO: 126694 - RNA, 19 nt, Artificial Sequence
  Description of Artificial Sequence: Synthetic oligonucleotide
  Sense strand starting at position 648 of SEQ ID NO: 1617
uaauuuagugagugguucu

SEQ ID NO: 126695 - RNA, 19 nt, Artificial Sequence
  Description of Artificial Sequence: Synthetic oligonucleotide
  Antisense strand to SEQ ID NO: 126694
agaaccacucacuaaauua

SEQ ID NO: 126696 - RNA, 19 nt, Artificial Sequence
  Description of Artificial Sequence: Synthetic oligonucleotide
  Sense strand starting at position 639 of SEQ ID NO: 1617
gggcuaugcuaauuuagug

SEQ ID NO: 126697 - RNA, 19 nt, Artificial Sequence
  Description of Artificial Sequence: Synthetic oligonucleotide
  Antisense strand to SEQ ID NO: 126696
cacuaaauuagcauagccc

SEQ ID NO: 126698 - RNA, 19 nt, Artificial Sequence
  Description of Artificial Sequence: Synthetic oligonucleotide
  Sense strand starting at position 506 of SEQ ID NO: 1617
gacaguggugaugagcaau

SEQ ID NO: 126699 - RNA, 19 nt, Artificial Sequence
  Description of Artificial Sequence: Synthetic oligonucleotide
  Antisense strand to SEQ ID NO: 126698
auugcucaucaccacuguc

SEQ ID NO: 126700 - RNA, 19 nt, Artificial Sequence
  Description of Artificial Sequence: Synthetic oligonucleotide
  Sense strand starting at position 452 of SEQ ID NO: 1617
gggacuaggccagauguca

SEQ ID NO: 126701 - RNA, 19 nt, Artificial Sequence
  Description of Artificial Sequence: Synthetic oligonucleotide
  Antisense strand to SEQ ID NO: 126700
ugacaucuggccuaguccc

SEQ ID NO: 126702 - RNA, 19 nt, Artificial Sequence
  Description of Artificial Sequence: Synthetic oligonucleotide
  Sense strand starting at position 415 of SEQ ID NO: 1617
ccaguuaagcuguggcaaa

SEQ ID NO: 126703 - RNA, 19 nt, Artificial Sequence
  Description of Artificial Sequence: Synthetic oligonucleotide
  Antisense strand to SEQ ID NO: 126702
uuugccacagcuuaacugg

SEQ ID NO: 126704 - RNA, 19 nt, Artificial Sequence
  Description of Artificial Sequence: Synthetic oligonucleotide
  Sense strand starting at position 377 of SEQ ID NO: 1617
uaagcaggauuagucaaau

SEQ ID NO: 126705 - RNA, 19 nt, Artificial Sequence
  Description of Artificial Sequence: Synthetic oligonucleotide
  Antisense strand to SEQ ID NO: 126704
auuugacuaauccugcuua

SEQ ID NO: 126706 - RNA, 19 nt, Artificial Sequence
  Description of Artificial Sequence: Synthetic oligonucleotide
  Sense strand starting at position 340 of SEQ ID NO: 1617
ggaucaaucuccucaguua

SEQ ID NO: 126707 - RNA, 19 nt, Artificial Sequence
  Description of Artificial Sequence: Synthetic oligonucleotide
  Antisense strand to SEQ ID NO: 126706
uaacugaggagauugaucc

SEQ ID NO: 126708 - RNA, 19 nt, Artificial Sequence
  Description of Artificial Sequence: Synthetic oligonucleotide
  Sense strand starting at position 338 of SEQ ID NO: 1617
gaggaucaaucuccucagu

SEQ ID NO: 126709 - RNA, 19 nt, Artificial Sequence
  Description of Artificial Sequence: Synthetic oligonucleotide
  Antisense strand to SEQ ID NO: 126708
acugaggagauugauccuc

SEQ ID NO: 126710 - RNA, 19 nt, Artificial Sequence
  Description of Artificial Sequence: Synthetic oligonucleotide
  Sense strand starting at position 328 of SEQ ID NO: 1617
guaaguuuaggaggaucaa

SEQ ID NO: 126711 - RNA, 19 nt, Artificial Sequence
  Description of Artificial Sequence: Synthetic oligonucleotide
  Antisense strand to SEQ ID NO: 126710
uugauccuccuaaacuuac

SEQ ID NO: 126712 - RNA, 19 nt, Artificial Sequence
  Description of Artificial Sequence: Synthetic oligonucleotide
  Sense strand starting at position 295 of SEQ ID NO: 1617
gggugaagugugcgaagaa

SEQ ID NO: 126713 - RNA, 19 nt, Artificial Sequence
  Description of Artificial Sequence: Synthetic oligonucleotide
  Antisense strand to SEQ ID NO: 126712
uucuucgcacacuucaccc

SEQ ID NO: 126714 - RNA, 19 nt, Artificial Sequence
  Description of Artificial Sequence: Synthetic oligonucleotide
  Sense strand starting at position 3830 of SEQ ID NO: 1618
aguggagcauuccuguaau

SEQ ID NO: 126715 - RNA, 19 nt, Artificial Sequence
  Description of Artificial Sequence: Synthetic oligonucleotide
  Antisense strand to SEQ ID NO: 126714
auuacaggaaugcuccacu

SEQ ID NO: 126716 - RNA, 19 nt, Artificial Sequence
  Description of Artificial Sequence: Synthetic oligonucleotide
  Sense strand starting at position 3326 of SEQ ID NO: 1618
ucuuguggguccucauaaa

SEQ ID NO: 126717 - RNA, 19 nt, Artificial Sequence
  Description of Artificial Sequence: Synthetic oligonucleotide
  Antisense strand to SEQ ID NO: 126716
uuuaugaggacccacaaga

SEQ ID NO: 126718 - RNA, 19 nt, Artificial Sequence
  Description of Artificial Sequence: Synthetic oligonucleotide
  Sense strand starting at position 3310 of SEQ ID NO: 1618
auccucuuuccagaugucu

SEQ ID NO: 126719 - RNA, 19 nt, Artificial Sequence
  Description of Artificial Sequence: Synthetic oligonucleotide
  Antisense strand to SEQ ID NO: 126718
agacaucuggaaagaggau

SEQ ID NO: 126720 - RNA, 19 nt, Artificial Sequence
  Description of Artificial Sequence: Synthetic oligonucleotide
  Sense strand starting at position 3305 of SEQ ID NO: 1618
ugguuauccucuuuccaga

SEQ ID NO: 126721 - RNA, 19 nt, Artificial Sequence
  Description of Artificial Sequence: Synthetic oligonucleotide
  Antisense strand to SEQ ID NO: 126720
ucuggaaagaggauaacca

SEQ ID NO: 126722 - RNA, 19 nt, Artificial Sequence
  Description of Artificial Sequence: Synthetic oligonucleotide
  Sense strand starting at position 3294 of SEQ ID NO: 1618
ccagaaugaccugguuauc

SEQ ID NO: 126723 - RNA, 19 nt, Artificial Sequence
  Description of Artificial Sequence: Synthetic oligonucleotide
  Antisense strand to SEQ ID NO: 126722
gauaaccaggucauucugg

SEQ ID NO: 126724 - RNA, 19 nt, Artificial Sequence
  Description of Artificial Sequence: Synthetic oligonucleotide
  Sense strand starting at position 2927 of SEQ ID NO: 1618
acucauggcccaugaaaua

SEQ ID NO: 126725 - RNA, 19 nt, Artificial Sequence
  Description of Artificial Sequence: Synthetic oligonucleotide
  Antisense strand to SEQ ID NO: 126724
uauuucaugggccaugagu

SEQ ID NO: 126726 - RNA, 19 nt, Artificial Sequence
  Description of Artificial Sequence: Synthetic oligonucleotide
  Sense strand starting at position 2898 of SEQ ID NO: 1618
guaagagucggucagauag

SEQ ID NO: 126727 - RNA, 19 nt, Artificial Sequence
  Description of Artificial Sequence: Synthetic oligonucleotide
  Antisense strand to SEQ ID NO: 126726
cuaucugaccgacucuuac

SEQ ID NO: 126728 - RNA, 19 nt, Artificial Sequence
  Description of Artificial Sequence: Synthetic oligonucleotide
  Sense strand starting at position 2896 of SEQ ID NO: 1618
ggguaagagucggucagau

SEQ ID NO: 126729 - RNA, 19 nt, Artificial Sequence
  Description of Artificial Sequence: Synthetic oligonucleotide
  Antisense strand to SEQ ID NO: 126728
aucugaccgacucuuaccc

SEQ ID NO: 126730 - RNA, 19 nt, Artificial Sequence
  Description of Artificial Sequence: Synthetic oligonucleotide
  Sense strand starting at position 2852 of SEQ ID NO: 1618
uuaucuguggaaugaauaa

SEQ ID NO: 126731 - RNA, 19 nt, Artificial Sequence
  Description of Artificial Sequence: Synthetic oligonucleotide
  Antisense strand to SEQ ID NO: 126730
uuauucauuccacagauaa

SEQ ID NO: 126732 - RNA, 19 nt, Artificial Sequence
  Description of Artificial Sequence: Synthetic oligonucleotide
  Sense strand starting at position 2847 of SEQ ID NO: 1618
cauaauuaucuguggaaug

SEQ ID NO: 126733 - RNA, 19 nt, Artificial Sequence
  Description of Artificial Sequence: Synthetic oligonucleotide
  Antisense strand to SEQ ID NO: 126732
cauuccacagauaauuaug

SEQ ID NO: 126734 - RNA, 19 nt, Artificial Sequence
  Description of Artificial Sequence: Synthetic oligonucleotide
  Sense strand starting at position 2846 of SEQ ID NO: 1618
ccauaauuaucuguggaau

SEQ ID NO: 126735 - RNA, 19 nt, Artificial Sequence
  Description of Artificial Sequence: Synthetic oligonucleotide
  Antisense strand to SEQ ID NO: 126734
auuccacagauaauuaugg

SEQ ID NO: 126736 - RNA, 19 nt, Artificial Sequence
  Description of Artificial Sequence: Synthetic oligonucleotide
  Sense strand starting at position 2844 of SEQ ID NO: 1618
cuccauaauuaucugugga

SEQ ID NO: 126737 - RNA, 19 nt, Artificial Sequence
  Description of Artificial Sequence: Synthetic oligonucleotide
  Antisense strand to SEQ ID NO: 126736
uccacagauaauuauggag

SEQ ID NO: 126738 - RNA, 19 nt, Artificial Sequence
  Description of Artificial Sequence: Synthetic oligonucleotide
  Sense strand starting at position 2821 of SEQ ID NO: 1618
agugacuucguacauagua

SEQ ID NO: 126739 - RNA, 19 nt, Artificial Sequence
  Description of Artificial Sequence: Synthetic oligonucleotide
  Antisense strand to SEQ ID NO: 126738
uacuauguacgaagucacu

SEQ ID NO: 126740 - RNA, 19 nt, Artificial Sequence
  Description of Artificial Sequence: Synthetic oligonucleotide
  Sense strand starting at position 2818 of SEQ ID NO: 1618
uccagugacuucguacaua

SEQ ID NO: 126741 - RNA, 19 nt, Artificial Sequence
  Description of Artificial Sequence: Synthetic oligonucleotide
  Antisense strand to SEQ ID NO: 126740
uauguacgaagucacugga

SEQ ID NO: 126742 - RNA, 19 nt, Artificial Sequence
  Description of Artificial Sequence: Synthetic oligonucleotide
  Sense strand starting at position 2774 of SEQ ID NO: 1618
gggagcaaggacuguguuu

SEQ ID NO: 126743 - RNA, 19 nt, Artificial Sequence
  Description of Artificial Sequence: Synthetic oligonucleotide
  Antisense strand to SEQ ID NO: 126742
aaacacaguccuugcuccc

SEQ ID NO: 126744 - RNA, 19 nt, Artificial Sequence
  Description of Artificial Sequence: Synthetic oligonucleotide
  Sense strand starting at position 2561 of SEQ ID NO: 1618
ggaggcuaucagggacuua

SEQ ID NO: 126745 - RNA, 19 nt, Artificial Sequence
  Description of Artificial Sequence: Synthetic oligonucleotide
  Antisense strand to SEQ ID NO: 126744
uaagucccugauagccucc

SEQ ID NO: 126746 - RNA, 19 nt, Artificial Sequence
  Description of Artificial Sequence: Synthetic oligonucleotide
  Sense strand starting at position 2523 of SEQ ID NO: 1618
augcaugaaucagugaaga

SEQ ID NO: 126747 - RNA, 19 nt, Artificial Sequence
  Description of Artificial Sequence: Synthetic oligonucleotide
  Antisense strand to SEQ ID NO: 126746
ucuucacugauucaugcau

SEQ ID NO: 126748 - RNA, 19 nt, Artificial Sequence
  Description of Artificial Sequence: Synthetic oligonucleotide
  Sense strand starting at position 2440 of SEQ ID NO: 1618
uggcauucgaaauagaucu

SEQ ID NO: 126749 - RNA, 19 nt, Artificial Sequence
  Description of Artificial Sequence: Synthetic oligonucleotide
  Antisense strand to SEQ ID NO: 126748
agaucuauuucgaaugcca

SEQ ID NO: 126750 - RNA, 19 nt, Artificial Sequence
  Description of Artificial Sequence: Synthetic oligonucleotide
  Sense strand starting at position 2435 of SEQ ID NO: 1618
cggaauggcauucgaaaua

SEQ ID NO: 126751 - RNA, 19 nt, Artificial Sequence
  Description of Artificial Sequence: Synthetic oligonucleotide
  Antisense strand to SEQ ID NO: 126750
uauuucgaaugccauuccg

SEQ ID NO: 126752 - RNA, 19 nt, Artificial Sequence
  Description of Artificial Sequence: Synthetic oligonucleotide
  Sense strand starting at position 2422 of SEQ ID NO: 1618
gucuuaccuuccucggaau

SEQ ID NO: 126753 - RNA, 19 nt, Artificial Sequence
  Description of Artificial Sequence: Synthetic oligonucleotide
  Antisense strand to SEQ ID NO: 126752
auuccgaggaagguaagac

SEQ ID NO: 126754 - RNA, 19 nt, Artificial Sequence
  Description of Artificial Sequence: Synthetic oligonucleotide
  Sense strand starting at position 2421 of SEQ ID NO: 1618
ugucuuaccuuccucggaa

SEQ ID NO: 126755 - RNA, 19 nt, Artificial Sequence
  Description of Artificial Sequence: Synthetic oligonucleotide
  Antisense strand to SEQ ID NO: 126754
uuccgaggaagguaagaca

SEQ ID NO: 126756 - RNA, 19 nt, Artificial Sequence
  Description of Artificial Sequence: Synthetic oligonucleotide
  Sense strand starting at position 2387 of SEQ ID NO: 1618
acucuuguuuacuauuuga

SEQ ID NO: 126757 - RNA, 19 nt, Artificial Sequence
  Description of Artificial Sequence: Synthetic oligonucleotide
  Antisense strand to SEQ ID NO: 126756
ucaaauaguaaacaagagu

SEQ ID NO: 126758 - RNA, 19 nt, Artificial Sequence
  Description of Artificial Sequence: Synthetic oligonucleotide
  Sense strand starting at position 2318 of SEQ ID NO: 1618
uaaggugucgaauaucaca

SEQ ID NO: 126759 - RNA, 19 nt, Artificial Sequence
  Description of Artificial Sequence: Synthetic oligonucleotide
  Antisense strand to SEQ ID NO: 126758
ugugauauucgacaccuua

SEQ ID NO: 126760 - RNA, 19 nt, Artificial Sequence
  Description of Artificial Sequence: Synthetic oligonucleotide
  Sense strand starting at position 2315 of SEQ ID NO: 1618
cguuaaggugucgaauauc

SEQ ID NO: 126761 - RNA, 19 nt, Artificial Sequence
  Description of Artificial Sequence: Synthetic oligonucleotide
  Antisense strand to SEQ ID NO: 126760
gauauucgacaccuuaacg

SEQ ID NO: 126762 - RNA, 19 nt, Artificial Sequence
  Description of Artificial Sequence: Synthetic oligonucleotide
  Sense strand starting at position 2301 of SEQ ID NO: 1618
ugucaagucagagacguua

SEQ ID NO: 126763 - RNA, 19 nt, Artificial Sequence
  Description of Artificial Sequence: Synthetic oligonucleotide
  Antisense strand to SEQ ID NO: 126762
uaacgucucugacuugaca

SEQ ID NO: 126764 - RNA, 19 nt, Artificial Sequence
  Description of Artificial Sequence: Synthetic oligonucleotide
  Sense strand starting at position 2300 of SEQ ID NO: 1618
gugucaagucagagacguu

SEQ ID NO: 126765 - RNA, 19 nt, Artificial Sequence
  Description of Artificial Sequence: Synthetic oligonucleotide
  Antisense strand to SEQ ID NO: 126764
aacgucucugacuugacac

SEQ ID NO: 126766 - RNA, 19 nt, Artificial Sequence
  Description of Artificial Sequence: Synthetic oligonucleotide
  Sense strand starting at position 2275 of SEQ ID NO: 1618
gaaagaacucucugcggga

SEQ ID NO: 126767 - RNA, 19 nt, Artificial Sequence
  Description of Artificial Sequence: Synthetic oligonucleotide
  Antisense strand to SEQ ID NO: 126766
ucccgcagagaguucuuuc

SEQ ID NO: 126768 - RNA, 19 nt, Artificial Sequence
  Description of Artificial Sequence: Synthetic oligonucleotide
  Sense strand starting at position 2244 of SEQ ID NO: 1618
uccgccaaguccucugaaa

SEQ ID NO: 126769 - RNA, 19 nt, Artificial Sequence
  Description of Artificial Sequence: Synthetic oligonucleotide
  Antisense strand to SEQ ID NO: 126768
uuucagaggacuuggcgga

SEQ ID NO: 126770 - RNA, 19 nt, Artificial Sequence
  Description of Artificial Sequence: Synthetic oligonucleotide
  Sense strand starting at position 2218 of SEQ ID NO: 1618
ugaucugaacucgggacaa

SEQ ID NO: 126771 - RNA, 19 nt, Artificial Sequence
  Description of Artificial Sequence: Synthetic oligonucleotide
  Antisense strand to SEQ ID NO: 126770
uugucccgaguucagauca

SEQ ID NO: 126772 - RNA, 19 nt, Artificial Sequence
  Description of Artificial Sequence: Synthetic oligonucleotide
  Sense strand starting at position 2217 of SEQ ID NO: 1618
gugaucugaacucgggaca

SEQ ID NO: 126773 - RNA, 19 nt, Artificial Sequence
  Description of Artificial Sequence: Synthetic oligonucleotide
  Antisense strand to SEQ ID NO: 126772
ugucccgaguucagaucac

SEQ ID NO: 126774 - RNA, 19 nt, Artificial Sequence
  Description of Artificial Sequence: Synthetic oligonucleotide
  Sense strand starting at position 2211 of SEQ ID NO: 1618
ggucgagugaucugaacuc

SEQ ID NO: 126775 - RNA, 19 nt, Artificial Sequence
  Description of Artificial Sequence: Synthetic oligonucleotide
  Antisense strand to SEQ ID NO: 126774
gaguucagaucacucgacc

SEQ ID NO: 126776 - RNA, 19 nt, Artificial Sequence
  Description of Artificial Sequence: Synthetic oligonucleotide
  Sense strand starting at position 1066 of SEQ ID NO: 1618
cacuacuguccggauaauu

SEQ ID NO: 126777 - RNA, 19 nt, Artificial Sequence
  Description of Artificial Sequence: Synthetic oligonucleotide
  Antisense strand to SEQ ID NO: 126776
aauuauccggacaguagug

SEQ ID NO: 126778 - RNA, 19 nt, Artificial Sequence
  Description of Artificial Sequence: Synthetic oligonucleotide
  Sense strand starting at position 1064 of SEQ ID NO: 1618
gccacuacuguccggauaa

SEQ ID NO: 126779 - RNA, 19 nt, Artificial Sequence
  Description of Artificial Sequence: Synthetic oligonucleotide
  Antisense strand to SEQ ID NO: 126778
uuauccggacaguaguggc

SEQ ID NO: 126780 - RNA, 19 nt, Artificial Sequence
  Description of Artificial Sequence: Synthetic oligonucleotide
  Sense strand starting at position 829 of SEQ ID NO: 1618
cuaaguaguucucucuacu

SEQ ID NO: 126781 - RNA, 19 nt, Artificial Sequence
  Description of Artificial Sequence: Synthetic oligonucleotide
  Antisense strand to SEQ ID NO: 126780
aguagagagaacuacuuag

SEQ ID NO: 126782 - RNA, 19 nt, Artificial Sequence
  Description of Artificial Sequence: Synthetic oligonucleotide
  Sense strand starting at position 721 of SEQ ID NO: 1618
aucgaaagcguccaauaac

SEQ ID NO: 126783 - RNA, 19 nt, Artificial Sequence
  Description of Artificial Sequence: Synthetic oligonucleotide
  Antisense strand to SEQ ID NO: 126782
guuauuggacgcuuucgau

SEQ ID NO: 126784 - RNA, 19 nt, Artificial Sequence
  Description of Artificial Sequence: Synthetic oligonucleotide
  Sense strand starting at position 561 of SEQ ID NO: 1618
ugagaaaguauguaugugu

SEQ ID NO: 126785 - RNA, 19 nt, Artificial Sequence
  Description of Artificial Sequence: Synthetic oligonucleotide
  Antisense strand to SEQ ID NO: 126784
acacauacauacuuucuca

SEQ ID NO: 126786 - RNA, 19 nt, Artificial Sequence
  Description of Artificial Sequence: Synthetic oligonucleotide
  Sense strand starting at position 550 of SEQ ID NO: 1618
aggaauuagucugagaaag

SEQ ID NO: 126787 - RNA, 19 nt, Artificial Sequence
  Description of Artificial Sequence: Synthetic oligonucleotide
  Antisense strand to SEQ ID NO: 126786
cuuucucagacuaauuccu

SEQ ID NO: 126788 - RNA, 19 nt, Artificial Sequence
  Description of Artificial Sequence: Synthetic oligonucleotide
  Sense strand starting at position 525 of SEQ ID NO: 1618
gcaguuuagaguugggaau

SEQ ID NO: 126789 - RNA, 19 nt, Artificial Sequence
  Description of Artificial Sequence: Synthetic oligonucleotide
  Antisense strand to SEQ ID NO: 126788
auucccaacucuaaacugc

SEQ ID NO: 126790 - RNA, 19 nt, Artificial Sequence
  Description of Artificial Sequence: Synthetic oligonucleotide
  Sense strand starting at position 278 of SEQ ID NO: 1618
ccugauacagcguaagcau

SEQ ID NO: 126791 - RNA, 19 nt, Artificial Sequence
  Description of Artificial Sequence: Synthetic oligonucleotide
  Antisense strand to SEQ ID NO: 126790
augcuuacgcuguaucagg

SEQ ID NO: 126792 - RNA, 19 nt, Artificial Sequence
  Description of Artificial Sequence: Synthetic oligonucleotide
  Sense strand starting at position 230 of SEQ ID NO: 1618
cgcugagcucucuacauua

SEQ ID NO: 126793 - RNA, 19 nt, Artificial Sequence
  Description of Artificial Sequence: Synthetic oligonucleotide
  Antisense strand to SEQ ID NO: 126792
uaauguagagagcucagcg

SEQ ID NO: 126794 - RNA, 19 nt, Artificial Sequence
  Description of Artificial Sequence: Synthetic oligonucleotide
  Sense strand starting at position 3922 of SEQ ID NO: 1619
uagcucagugccgugaauu

SEQ ID NO: 126795 - RNA, 19 nt, Artificial Sequence
  Description of Artificial Sequence: Synthetic oligonucleotide
  Antisense strand to SEQ ID NO: 126794
aauucacggcacugagcua

SEQ ID NO: 126796 - RNA, 19 nt, Artificial Sequence
  Description of Artificial Sequence: Synthetic oligonucleotide
  Sense strand starting at position 3884 of SEQ ID NO: 1619
uuacuugugcaauaagcaa

SEQ ID NO: 126797 - RNA, 19 nt, Artificial Sequence
  Description of Artificial Sequence: Synthetic oligonucleotide
  Antisense strand to SEQ ID NO: 126796
uugcuuauugcacaaguaa

SEQ ID NO: 126798 - RNA, 19 nt, Artificial Sequence
  Description of Artificial Sequence: Synthetic oligonucleotide
  Sense strand starting at position 3880 of SEQ ID NO: 1619
uuaguuacuugugcaauaa

SEQ ID NO: 126799 - RNA, 19 nt, Artificial Sequence
  Description of Artificial Sequence: Synthetic oligonucleotide
  Antisense strand to SEQ ID NO: 126798
uuauugcacaaguaacuaa

SEQ ID NO: 126800 - RNA, 19 nt, Artificial Sequence
  Description of Artificial Sequence: Synthetic oligonucleotide
  Sense strand starting at position 3352 of SEQ ID NO: 1619
acuguuuagaggugaaaua

SEQ ID NO: 126801 - RNA, 19 nt, Artificial Sequence
  Description of Artificial Sequence: Synthetic oligonucleotide
  Antisense strand to SEQ ID NO: 126800
uauuucaccucuaaacagu

SEQ ID NO: 126802 - RNA, 19 nt, Artificial Sequence
  Description of Artificial Sequence: Synthetic oligonucleotide
  Sense strand starting at position 3317 of SEQ ID NO: 1619
cauauuguggguugagauc

SEQ ID NO: 126803 - RNA, 19 nt, Artificial Sequence
  Description of Artificial Sequence: Synthetic oligonucleotide
  Antisense strand to SEQ ID NO: 126802
gaucucaacccacaauaug

SEQ ID NO: 126804 - RNA, 19 nt, Artificial Sequence
  Description of Artificial Sequence: Synthetic oligonucleotide
  Sense strand starting at position 3315 of SEQ ID NO: 1619
uucauauuguggguugaga

SEQ ID NO: 126805 - RNA, 19 nt, Artificial Sequence
  Description of Artificial Sequence: Synthetic oligonucleotide
  Antisense strand to SEQ ID NO: 126804
ucucaacccacaauaugaa

SEQ ID NO: 126806 - RNA, 19 nt, Artificial Sequence
  Description of Artificial Sequence: Synthetic oligonucleotide
  Sense strand starting at position 3166 of SEQ ID NO: 1619
uccguuuauagagaauugu

SEQ ID NO: 126807 - RNA, 19 nt, Artificial Sequence
  Description of Artificial Sequence: Synthetic oligonucleotide
  Antisense strand to SEQ ID NO: 126806
acaauucucuauaaacgga

SEQ ID NO: 126808 - RNA, 19 nt, Artificial Sequence
  Description of Artificial Sequence: Synthetic oligonucleotide
  Sense strand starting at position 3142 of SEQ ID NO: 1619
guggccugucaauagguuu

SEQ ID NO: 126809 - RNA, 19 nt, Artificial Sequence
  Description of Artificial Sequence: Synthetic oligonucleotide
  Antisense strand to SEQ ID NO: 126808
aaaccuauugacaggccac

SEQ ID NO: 126810 - RNA, 19 nt, Artificial Sequence
  Description of Artificial Sequence: Synthetic oligonucleotide
  Sense strand starting at position 3135 of SEQ ID NO: 1619
gcugguuguggccugucaa

SEQ ID NO: 126811 - RNA, 19 nt, Artificial Sequence
  Description of Artificial Sequence: Synthetic oligonucleotide
  Antisense strand to SEQ ID NO: 126810
uugacaggccacaaccagc

SEQ ID NO: 126812 - RNA, 19 nt, Artificial Sequence
  Description of Artificial Sequence: Synthetic oligonucleotide
  Sense strand starting at position 3023 of SEQ ID NO: 1619
gugacuugaucuucugaga

SEQ ID NO: 126813 - RNA, 19 nt, Artificial Sequence
  Description of Artificial Sequence: Synthetic oligonucleotide
  Antisense strand to SEQ ID NO: 126812
ucucagaagaucaagucac

SEQ ID NO: 126814 - RNA, 19 nt, Artificial Sequence
  Description of Artificial Sequence: Synthetic oligonucleotide
  Sense strand starting at position 3017 of SEQ ID NO: 1619
gggcaagugacuugaucuu

SEQ ID NO: 126815 - RNA, 19 nt, Artificial Sequence
  Description of Artificial Sequence: Synthetic oligonucleotide
  Antisense strand to SEQ ID NO: 126814
aagaucaagucacuugccc

SEQ ID NO: 126816 - RNA, 19 nt, Artificial Sequence
  Description of Artificial Sequence: Synthetic oligonucleotide
  Sense strand starting at position 2576 of SEQ ID NO: 1619
ggaucacagugaguauuaa

SEQ ID NO: 126817 - RNA, 19 nt, Artificial Sequence
  Description of Artificial Sequence: Synthetic oligonucleotide
  Antisense strand to SEQ ID NO: 126816
uuaauacucacugugaucc

SEQ ID NO: 126818 - RNA, 19 nt, Artificial Sequence
  Description of Artificial Sequence: Synthetic oligonucleotide
  Sense strand starting at position 2573 of SEQ ID NO: 1619
auaggaucacagugaguau

SEQ ID NO: 126819 - RNA, 19 nt, Artificial Sequence
  Description of Artificial Sequence: Synthetic oligonucleotide
  Antisense strand to SEQ ID NO: 126818
auacucacugugauccuau

SEQ ID NO: 126820 - RNA, 19 nt, Artificial Sequence
  Description of Artificial Sequence: Synthetic oligonucleotide
  Sense strand starting at position 2145 of SEQ ID NO: 1619
cagcuuccuagguguggaa

SEQ ID NO: 126821 - RNA, 19 nt, Artificial Sequence
  Description of Artificial Sequence: Synthetic oligonucleotide
  Antisense strand to SEQ ID NO: 126820
uuccacaccuaggaagcug

SEQ ID NO: 126822 - RNA, 19 nt, Artificial Sequence
  Description of Artificial Sequence: Synthetic oligonucleotide
  Sense strand starting at position 1207 of SEQ ID NO: 1619
cugaaaggcagguguuuau

SEQ ID NO: 126823 - RNA, 19 nt, Artificial Sequence
  Description of Artificial Sequence: Synthetic oligonucleotide
  Antisense strand to SEQ ID NO: 126822
auaaacaccugccuuucag

SEQ ID NO: 126824 - RNA, 19 nt, Artificial Sequence
  Description of Artificial Sequence: Synthetic oligonucleotide
  Sense strand starting at position 1189 of SEQ ID NO: 1619
agccuucugaagugugaac

SEQ ID NO: 126825 - RNA, 19 nt, Artificial Sequence
  Description of Artificial Sequence: Synthetic oligonucleotide
  Antisense strand to SEQ ID NO: 126824
guucacacuucagaaggcu

SEQ ID NO: 126826 - RNA, 19 nt, Artificial Sequence
  Description of Artificial Sequence: Synthetic oligonucleotide
  Sense strand starting at position 1139 of SEQ ID NO: 1619
acuggaagguucuuaacaa

SEQ ID NO: 126827 - RNA, 19 nt, Artificial Sequence
  Description of Artificial Sequence: Synthetic oligonucleotide
  Antisense strand to SEQ ID NO: 126826
uuguuaagaaccuuccagu

SEQ ID NO: 126828 - RNA, 19 nt, Artificial Sequence
  Description of Artificial Sequence: Synthetic oligonucleotide
  Sense strand starting at position 867 of SEQ ID NO: 1619
gccuauuuagccugaggua

SEQ ID NO: 126829 - RNA, 19 nt, Artificial Sequence
  Description of Artificial Sequence: Synthetic oligonucleotide
  Antisense strand to SEQ ID NO: 126828
uaccucaggcuaaauaggc

SEQ ID NO: 126830 - RNA, 19 nt, Artificial Sequence
  Description of Artificial Sequence: Synthetic oligonucleotide
  Sense strand starting at position 824 of SEQ ID NO: 1619
ucuugacaccagugaauga

SEQ ID NO: 126831 - RNA, 19 nt, Artificial Sequence
  Description of Artificial Sequence: Synthetic oligonucleotide
  Antisense strand to SEQ ID NO: 126830
ucauucacuggugucaaga

SEQ ID NO: 126832 - RNA, 19 nt, Artificial Sequence
  Description of Artificial Sequence: Synthetic oligonucleotide
  Sense strand starting at position 821 of SEQ ID NO: 1619
ugcucuugacaccagugaa

SEQ ID NO: 126833 - RNA, 19 nt, Artificial Sequence
  Description of Artificial Sequence: Synthetic oligonucleotide
  Antisense strand to SEQ ID NO: 126832
uucacuggugucaagagca

SEQ ID NO: 126834 - RNA, 19 nt, Artificial Sequence
  Description of Artificial Sequence: Synthetic oligonucleotide
  Sense strand starting at position 750 of SEQ ID NO: 1619
ccaagaaagcuaugaugcu

SEQ ID NO: 126835 - RNA, 19 nt, Artificial Sequence
  Description of Artificial Sequence: Synthetic oligonucleotide
  Antisense strand to SEQ ID NO: 126834
agcaucauagcuuucuugg

SEQ ID NO: 126836 - RNA, 19 nt, Artificial Sequence
  Description of Artificial Sequence: Synthetic oligonucleotide
  Sense strand starting at position 739 of SEQ ID NO: 1619
uccagucugcaccaagaaa

SEQ ID NO: 126837 - RNA, 19 nt, Artificial Sequence
  Description of Artificial Sequence: Synthetic oligonucleotide
  Antisense strand to SEQ ID NO: 126836
uuucuuggugcagacugga

SEQ ID NO: 126838 - RNA, 19 nt, Artificial Sequence
  Description of Artificial Sequence: Synthetic oligonucleotide
  Sense strand starting at position 713 of SEQ ID NO: 1619
guuauuguucuacaaauac

SEQ ID NO: 126839 - RNA, 19 nt, Artificial Sequence
  Description of Artificial Sequence: Synthetic oligonucleotide
  Antisense strand to SEQ ID NO: 126838
guauuuguagaacaauaac

SEQ ID NO: 126840 - RNA, 19 nt, Artificial Sequence
  Description of Artificial Sequence: Synthetic oligonucleotide
  Sense strand starting at position 709 of SEQ ID NO: 1619
cucaguuauuguucuacaa

SEQ ID NO: 126841 - RNA, 19 nt, Artificial Sequence
  Description of Artificial Sequence: Synthetic oligonucleotide
  Antisense strand to SEQ ID NO: 126840
uuguagaacaauaacugag

SEQ ID NO: 126842 - RNA, 19 nt, Artificial Sequence
  Description of Artificial Sequence: Synthetic oligonucleotide
  Sense strand starting at position 661 of SEQ ID NO: 1619
ccugucuaccucuagcauu

SEQ ID NO: 126843 - RNA, 19 nt, Artificial Sequence
  Description of Artificial Sequence: Synthetic oligonucleotide
  Antisense strand to SEQ ID NO: 126842
aaugcuagagguagacagg

SEQ ID NO: 126844 - RNA, 19 nt, Artificial Sequence
  Description of Artificial Sequence: Synthetic oligonucleotide
  Sense strand starting at position 620 of SEQ ID NO: 1619
guuuacucaucugucaacu

SEQ ID NO: 126845 - RNA, 19 nt, Artificial Sequence
  Description of Artificial Sequence: Synthetic oligonucleotide
  Antisense strand to SEQ ID NO: 126844
aguugacagaugaguaaac

SEQ ID NO: 126846 - RNA, 19 nt, Artificial Sequence
  Description of Artificial Sequence: Synthetic oligonucleotide
  Sense strand starting at position 558 of SEQ ID NO: 1619
gaguuugaauaccuguuua

SEQ ID NO: 126847 - RNA, 19 nt, Artificial Sequence
  Description of Artificial Sequence: Synthetic oligonucleotide
  Antisense strand to SEQ ID NO: 126846
uaaacagguauucaaacuc

SEQ ID NO: 126848 - RNA, 19 nt, Artificial Sequence
  Description of Artificial Sequence: Synthetic oligonucleotide
  Sense strand starting at position 548 of SEQ ID NO: 1619
ugucaaaccugaguuugaa

SEQ ID NO: 126849 - RNA, 19 nt, Artificial Sequence
  Description of Artificial Sequence: Synthetic oligonucleotide
  Antisense strand to SEQ ID NO: 126848
uucaaacucagguuugaca

SEQ ID NO: 126850 - RNA, 19 nt, Artificial Sequence
  Description of Artificial Sequence: Synthetic oligonucleotide
  Sense strand starting at position 545 of SEQ ID NO: 1619
gguugucaaaccugaguuu

SEQ ID NO: 126851 - RNA, 19 nt, Artificial Sequence
  Description of Artificial Sequence: Synthetic oligonucleotide
  Antisense strand to SEQ ID NO: 126850
aaacucagguuugacaacc

SEQ ID NO: 126852 - RNA, 19 nt, Artificial Sequence
  Description of Artificial Sequence: Synthetic oligonucleotide
  Sense strand starting at position 518 of SEQ ID NO: 1619
guaaaucugccagaaugca

SEQ ID NO: 126853 - RNA, 19 nt, Artificial Sequence
  Description of Artificial Sequence: Synthetic oligonucleotide
  Antisense strand to SEQ ID NO: 126852
ugcauucuggcagauuuac

SEQ ID NO: 126854 - RNA, 19 nt, Artificial Sequence
  Description of Artificial Sequence: Synthetic oligonucleotide
  Sense strand starting at position 507 of SEQ ID NO: 1619
ugacauugcccguaaaucu

SEQ ID NO: 126855 - RNA, 19 nt, Artificial Sequence
  Description of Artificial Sequence: Synthetic oligonucleotide
  Antisense strand to SEQ ID NO: 126854
agauuuacgggcaauguca

SEQ ID NO: 126856 - RNA, 19 nt, Artificial Sequence
  Description of Artificial Sequence: Synthetic oligonucleotide
  Sense strand starting at position 441 of SEQ ID NO: 1619
cuuacagucucaucucaga

SEQ ID NO: 126857 - RNA, 19 nt, Artificial Sequence
  Description of Artificial Sequence: Synthetic oligonucleotide
  Antisense strand to SEQ ID NO: 126856
ucugagaugagacuguaag

SEQ ID NO: 126858 - RNA, 19 nt, Artificial Sequence
  Description of Artificial Sequence: Synthetic oligonucleotide
  Sense strand starting at position 244 of SEQ ID NO: 1619
gccuaaagaugcuuaaucu

SEQ ID NO: 126859 - RNA, 19 nt, Artificial Sequence
  Description of Artificial Sequence: Synthetic oligonucleotide
  Antisense strand to SEQ ID NO: 126858
agauuaagcaucuuuaggc

SEQ ID NO: 126860 - RNA, 19 nt, Artificial Sequence
  Description of Artificial Sequence: Synthetic oligonucleotide
  Sense strand starting at position 235 of SEQ ID NO: 1619
cgcuguugggccuaaagau

SEQ ID NO: 126861 - RNA, 19 nt, Artificial Sequence
  Description of Artificial Sequence: Synthetic oligonucleotide
  Antisense strand to SEQ ID NO: 126860
aucuuuaggcccaacagcg

SEQ ID NO: 126862 - RNA, 19 nt, Artificial Sequence
  Description of Artificial Sequence: Synthetic oligonucleotide
  Sense strand starting at position 180 of SEQ ID NO: 1619
acacaaugcucucugaaug

SEQ ID NO: 126863 - RNA, 19 nt, Artificial Sequence
  Description of Artificial Sequence: Synthetic oligonucleotide
  Antisense strand to SEQ ID NO: 126862
cauucagagagcauugugu

SEQ ID NO: 126864 - RNA, 19 nt, Artificial Sequence
  Description of Artificial Sequence: Synthetic oligonucleotide
  Sense strand starting at position 152 of SEQ ID NO: 1619
acugcagagucaucaacaa

SEQ ID NO: 126865 - RNA, 19 nt, Artificial Sequence
  Description of Artificial Sequence: Synthetic oligonucleotide
  Antisense strand to SEQ ID NO: 126864
uuguugaugacucugcagu

SEQ ID NO: 126866 - RNA, 19 nt, Artificial Sequence
  Description of Artificial Sequence: Synthetic oligonucleotide
  Sense strand starting at position 132 of SEQ ID NO: 1619
ugcagcuaguuauuaagaa

SEQ ID NO: 126867 - RNA, 19 nt, Artificial Sequence
  Description of Artificial Sequence: Synthetic oligonucleotide
  Antisense strand to SEQ ID NO: 126866
uucuuaauaacuagcugca

SEQ ID NO: 126868 - RNA, 19 nt, Artificial Sequence
  Description of Artificial Sequence: Synthetic oligonucleotide
  Sense strand starting at position 111 of SEQ ID NO: 1619
ccauaaagaucauaugaga

SEQ ID NO: 126869 - RNA, 19 nt, Artificial Sequence
  Description of Artificial Sequence: Synthetic oligonucleotide
  Antisense strand to SEQ ID NO: 126868
ucucauaugaucuuuaugg

SEQ ID NO: 126870 - RNA, 19 nt, Artificial Sequence
  Description of Artificial Sequence: Synthetic oligonucleotide
  Sense strand starting at position 54 of SEQ ID NO: 1619
auaagaucauuacuguaug

SEQ ID NO: 126871 - RNA, 19 nt, Artificial Sequence
  Description of Artificial Sequence: Synthetic oligonucleotide
  Antisense strand to SEQ ID NO: 126870
cauacaguaaugaucuuau

SEQ ID NO: 126872 - RNA, 19 nt, Artificial Sequence
  Description of Artificial Sequence: Synthetic oligonucleotide
  Sense strand starting at position 28 of SEQ ID NO: 1619
ggagcaauuccaugucaac

SEQ ID NO: 126873 - RNA, 19 nt, Artificial Sequence
  Description of Artificial Sequence: Synthetic oligonucleotide
  Antisense strand to SEQ ID NO: 126872
guugacauggaauugcucc

SEQ ID NO: 126874 - RNA, 19 nt, Artificial Sequence
  Description of Artificial Sequence: Synthetic oligonucleotide
  Sense strand starting at position 421 of SEQ ID NO: 1620
gcuuacuauuuauugucau

SEQ ID NO: 126875 - RNA, 19 nt, Artificial Sequence
  Description of Artificial Sequence: Synthetic oligonucleotide
  Antisense strand to SEQ ID NO: 126874
augacaauaaauaguaagc

SEQ ID NO: 126876 - RNA, 19 nt, Artificial Sequence
  Description of Artificial Sequence: Synthetic oligonucleotide
  Sense strand starting at position 433 of SEQ ID NO: 1620
uugucauacucagcuagac

SEQ ID NO: 126877 - RNA, 19 nt, Artificial Sequence
  Description of Artificial Sequence: Synthetic oligonucleotide
  Antisense strand to SEQ ID NO: 126876
gucuagcugaguaugacaa

SEQ ID NO: 126878 - RNA, 19 nt, Artificial Sequence
  Description of Artificial Sequence: Synthetic oligonucleotide
  Sense strand starting at position 553 of SEQ ID NO: 1620
augaaugacugugucaaac

SEQ ID NO: 126879 - RNA, 19 nt, Artificial Sequence
  Description of Artificial Sequence: Synthetic oligonucleotide
  Antisense strand to SEQ ID NO: 126878
guuugacacagucauucau

SEQ ID NO: 126880 - RNA, 19 nt, Artificial Sequence
  Description of Artificial Sequence: Synthetic oligonucleotide
  Sense strand starting at position 561 of SEQ ID NO: 1620
cugugucaaacauggagaa

SEQ ID NO: 126881 - RNA, 19 nt, Artificial Sequence
  Description of Artificial Sequence: Synthetic oligonucleotide
  Antisense strand to SEQ ID NO: 126880
uucuccauguuugacacag

SEQ ID NO: 126882 - RNA, 19 nt, Artificial Sequence
  Description of Artificial Sequence: Synthetic oligonucleotide
  Sense strand starting at position 563 of SEQ ID NO: 1620
gugucaaacauggagaagu

SEQ ID NO: 126883 - RNA, 19 nt, Artificial Sequence
  Description of Artificial Sequence: Synthetic oligonucleotide
  Antisense strand to SEQ ID NO: 126882
acuucuccauguuugacac

SEQ ID NO: 126884 - RNA, 19 nt, Artificial Sequence
  Description of Artificial Sequence: Synthetic oligonucleotide
  Sense strand starting at position 727 of SEQ ID NO: 1620
agagguguuccaggaaggu

SEQ ID NO: 126885 - RNA, 19 nt, Artificial Sequence
  Description of Artificial Sequence: Synthetic oligonucleotide
  Antisense strand to SEQ ID NO: 126884
accuuccuggaacaccucu

SEQ ID NO: 126886 - RNA, 19 nt, Artificial Sequence
  Description of Artificial Sequence: Synthetic oligonucleotide
  Sense strand starting at position 736 of SEQ ID NO: 1620
ccaggaaggugucugccau

SEQ ID NO: 126887 - RNA, 19 nt, Artificial Sequence
  Description of Artificial Sequence: Synthetic oligonucleotide
  Antisense strand to SEQ ID NO: 126886
auggcagacaccuuccugg

SEQ ID NO: 126888 - RNA, 19 nt, Artificial Sequence
  Description of Artificial Sequence: Synthetic oligonucleotide
  Sense strand starting at position 737 of SEQ ID NO: 1620
caggaaggugucugccaua

SEQ ID NO: 126889 - RNA, 19 nt, Artificial Sequence
  Description of Artificial Sequence: Synthetic oligonucleotide
  Antisense strand to SEQ ID NO: 126888
uauggcagacaccuuccug

SEQ ID NO: 126890 - RNA, 19 nt, Artificial Sequence
  Description of Artificial Sequence: Synthetic oligonucleotide
  Sense strand starting at position 933 of SEQ ID NO: 1620
cuucuuaugagcugggcau

SEQ ID NO: 126891 - RNA, 19 nt, Artificial Sequence
  Description of Artificial Sequence: Synthetic oligonucleotide
  Antisense strand to SEQ ID NO: 126890
augcccagcucauaagaag

SEQ ID NO: 126892 - RNA, 19 nt, Artificial Sequence
  Description of Artificial Sequence: Synthetic oligonucleotide
  Sense strand starting at position 946 of SEQ ID NO: 1620
gggcaucaugcauauauua

SEQ ID NO: 126893 - RNA, 19 nt, Artificial Sequence
  Description of Artificial Sequence: Synthetic oligonucleotide
  Antisense strand to SEQ ID NO: 126892
uaauauaugcaugaugccc

SEQ ID NO: 126894 - RNA, 19 nt, Artificial Sequence
  Description of Artificial Sequence: Synthetic oligonucleotide
  Sense strand starting at position 975 of SEQ ID NO: 1620
ucacaaggauccuauaaag

SEQ ID NO: 126895 - RNA, 19 nt, Artificial Sequence
  Description of Artificial Sequence: Synthetic oligonucleotide
  Antisense strand to SEQ ID NO: 126894
cuuuauaggauccuuguga

SEQ ID NO: 126896 - RNA, 19 nt, Artificial Sequence
  Description of Artificial Sequence: Synthetic oligonucleotide
  Sense strand starting at position 996 of SEQ ID NO: 1620
gguacuguuaaauguucua

SEQ ID NO: 126897 - RNA, 19 nt, Artificial Sequence
  Description of Artificial Sequence: Synthetic oligonucleotide
  Antisense strand to SEQ ID NO: 126896
uagaacauuuaacaguacc

SEQ ID NO: 126898 - RNA, 19 nt, Artificial Sequence
  Description of Artificial Sequence: Synthetic oligonucleotide
  Sense strand starting at position 1506 of SEQ ID NO: 1620
uggguugucagaggcauga

SEQ ID NO: 126899 - RNA, 19 nt, Artificial Sequence
  Description of Artificial Sequence: Synthetic oligonucleotide
  Antisense strand to SEQ ID NO: 126898
ucaugccucugacaaccca

SEQ ID NO: 126900 - RNA, 19 nt, Artificial Sequence
  Description of Artificial Sequence: Synthetic oligonucleotide
  Sense strand starting at position 1540 of SEQ ID NO: 1620
gggaucaguucugcagacu

SEQ ID NO: 126901 - RNA, 19 nt, Artificial Sequence
  Description of Artificial Sequence: Synthetic oligonucleotide
  Antisense strand to SEQ ID NO: 126900
agucugcagaacugauccc

SEQ ID NO: 126902 - RNA, 19 nt, Artificial Sequence
  Description of Artificial Sequence: Synthetic oligonucleotide
  Sense strand starting at position 1541 of SEQ ID NO: 1620
ggaucaguucugcagacug

SEQ ID NO: 126903 - RNA, 19 nt, Artificial Sequence
  Description of Artificial Sequence: Synthetic oligonucleotide
  Antisense strand to SEQ ID NO: 126902
cagucugcagaacugaucc

SEQ ID NO: 126904 - RNA, 19 nt, Artificial Sequence
  Description of Artificial Sequence: Synthetic oligonucleotide
  Sense strand starting at position 1546 of SEQ ID NO: 1620
aguucugcagacugguuaa

SEQ ID NO: 126905 - RNA, 19 nt, Artificial Sequence
  Description of Artificial Sequence: Synthetic oligonucleotide
  Antisense strand to SEQ ID NO: 126904
uuaaccagucugcagaacu

SEQ ID NO: 126906 - RNA, 19 nt, Artificial Sequence
  Description of Artificial Sequence: Synthetic oligonucleotide
  Sense strand starting at position 1549 of SEQ ID NO: 1620
ucugcagacugguuaaagu

SEQ ID NO: 126907 - RNA, 19 nt, Artificial Sequence
  Description of Artificial Sequence: Synthetic oligonucleotide
  Antisense strand to SEQ ID NO: 126906
acuuuaaccagucugcaga

SEQ ID NO: 126908 - RNA, 19 nt, Artificial Sequence
  Description of Artificial Sequence: Synthetic oligonucleotide
  Sense strand starting at position 1560 of SEQ ID NO: 1620
guuaaagugucaccacugu

SEQ ID NO: 126909 - RNA, 19 nt, Artificial Sequence
  Description of Artificial Sequence: Synthetic oligonucleotide
  Antisense strand to SEQ ID NO: 126908
acaguggugacacuuuaac

SEQ ID NO: 126910 - RNA, 19 nt, Artificial Sequence
  Description of Artificial Sequence: Synthetic oligonucleotide
  Sense strand starting at position 1766 of SEQ ID NO: 1620
guggcugauguggaucauu

SEQ ID NO: 126911 - RNA, 19 nt, Artificial Sequence
  Description of Artificial Sequence: Synthetic oligonucleotide
  Antisense strand to SEQ ID NO: 126910
aaugauccacaucagccac

SEQ ID NO: 126912 - RNA, 19 nt, Artificial Sequence
  Description of Artificial Sequence: Synthetic oligonucleotide
  Sense strand starting at position 1890 of SEQ ID NO: 1620
ugcuaagucucuuugggac

SEQ ID NO: 126913 - RNA, 19 nt, Artificial Sequence
  Description of Artificial Sequence: Synthetic oligonucleotide
  Antisense strand to SEQ ID NO: 126912
gucccaaagagacuuagca

SEQ ID NO: 126914 - RNA, 19 nt, Artificial Sequence
  Description of Artificial Sequence: Synthetic oligonucleotide
  Sense strand starting at position 1924 of SEQ ID NO: 1620
cgaagcugcagggaugaua

SEQ ID NO: 126915 - RNA, 19 nt, Artificial Sequence
  Description of Artificial Sequence: Synthetic oligonucleotide
  Antisense strand to SEQ ID NO: 126914
uaucaucccugcagcuucg

SEQ ID NO: 126916 - RNA, 19 nt, Artificial Sequence
  Description of Artificial Sequence: Synthetic oligonucleotide
  Sense strand starting at position 1936 of SEQ ID NO: 1620
gaugauauguucuccugga

SEQ ID NO: 126917 - RNA, 19 nt, Artificial Sequence
  Description of Artificial Sequence: Synthetic oligonucleotide
  Antisense strand to SEQ ID NO: 126916
uccaggagaacauaucauc

SEQ ID NO: 126918 - RNA, 19 nt, Artificial Sequence
  Description of Artificial Sequence: Synthetic oligonucleotide
  Sense strand starting at position 1937 of SEQ ID NO: 1620
augauauguucuccuggau

SEQ ID NO: 126919 - RNA, 19 nt, Artificial Sequence
  Description of Artificial Sequence: Synthetic oligonucleotide
  Antisense strand to SEQ ID NO: 126918
auccaggagaacauaucau

SEQ ID NO: 126920 - RNA, 19 nt, Artificial Sequence
  Description of Artificial Sequence: Synthetic oligonucleotide
  Sense strand starting at position 1940 of SEQ ID NO: 1620
auauguucuccuggaucga

SEQ ID NO: 126921 - RNA, 19 nt, Artificial Sequence
  Description of Artificial Sequence: Synthetic oligonucleotide
  Antisense strand to SEQ ID NO: 126920
ucgauccaggagaacauau

SEQ ID NO: 126922 - RNA, 19 nt, Artificial Sequence
  Description of Artificial Sequence: Synthetic oligonucleotide
  Sense strand starting at position 2023 of SEQ ID NO: 1620
gcuggucuuaucuaaggga

SEQ ID NO: 126923 - RNA, 19 nt, Artificial Sequence
  Description of Artificial Sequence: Synthetic oligonucleotide
  Antisense strand to SEQ ID NO: 126922
ucccuuagauaagaccagc

SEQ ID NO: 126924 - RNA, 19 nt, Artificial Sequence
  Description of Artificial Sequence: Synthetic oligonucleotide
  Sense strand starting at position 2027 of SEQ ID NO: 1620
gucuuaucuaagggagaca

SEQ ID NO: 126925 - RNA, 19 nt, Artificial Sequence
  Description of Artificial Sequence: Synthetic oligonucleotide
  Antisense strand to SEQ ID NO: 126924
ugucucccuuagauaagac

SEQ ID NO: 126926 - RNA, 19 nt, Artificial Sequence
  Description of Artificial Sequence: Synthetic oligonucleotide
  Sense strand starting at position 2186 of SEQ ID NO: 1620
ucuggucauccacgugaau

SEQ ID NO: 126927 - RNA, 19 nt, Artificial Sequence
  Description of Artificial Sequence: Synthetic oligonucleotide
  Antisense strand to SEQ ID NO: 126926
auucacguggaugaccaga

SEQ ID NO: 126928 - RNA, 19 nt, Artificial Sequence
  Description of Artificial Sequence: Synthetic oligonucleotide
  Sense strand starting at position 2188 of SEQ ID NO: 1620
uggucauccacgugaauag

SEQ ID NO: 126929 - RNA, 19 nt, Artificial Sequence
  Description of Artificial Sequence: Synthetic oligonucleotide
  Antisense strand to SEQ ID NO: 126928
cuauucacguggaugacca

SEQ ID NO: 126930 - RNA, 19 nt, Artificial Sequence
  Description of Artificial Sequence: Synthetic oligonucleotide
  Sense strand starting at position 2189 of SEQ ID NO: 1620
ggucauccacgugaauaga

SEQ ID NO: 126931 - RNA, 19 nt, Artificial Sequence
  Description of Artificial Sequence: Synthetic oligonucleotide
  Antisense strand to SEQ ID NO: 126930
ucuauucacguggaugacc

SEQ ID NO: 126932 - RNA, 19 nt, Artificial Sequence
  Description of Artificial Sequence: Synthetic oligonucleotide
  Sense strand starting at position 2192 of SEQ ID NO: 1620
cauccacgugaauagauau

SEQ ID NO: 126933 - RNA, 19 nt, Artificial Sequence
  Description of Artificial Sequence: Synthetic oligonucleotide
  Antisense strand to SEQ ID NO: 126932
auaucuauucacguggaug

SEQ ID NO: 126934 - RNA, 19 nt, Artificial Sequence
  Description of Artificial Sequence: Synthetic oligonucleotide
  Sense strand starting at position 2243 of SEQ ID NO: 1620
cuuuguacuuuacugaagu

SEQ ID NO: 126935 - RNA, 19 nt, Artificial Sequence
  Description of Artificial Sequence: Synthetic oligonucleotide
  Antisense strand to SEQ ID NO: 126934
acuucaguaaaguacaaag

SEQ ID NO: 126936 - RNA, 19 nt, Artificial Sequence
  Description of Artificial Sequence: Synthetic oligonucleotide
  Sense strand starting at position 2256 of SEQ ID NO: 1620
ugaaguuagcucuagugaa

SEQ ID NO: 126937 - RNA, 19 nt, Artificial Sequence
  Description of Artificial Sequence: Synthetic oligonucleotide
  Antisense strand to SEQ ID NO: 126936
uucacuagagcuaacuuca

SEQ ID NO: 126938 - RNA, 19 nt, Artificial Sequence
  Description of Artificial Sequence: Synthetic oligonucleotide
  Sense strand starting at position 2325 of SEQ ID NO: 1620
agggaucacugugauaaua

SEQ ID NO: 126939 - RNA, 19 nt, Artificial Sequence
  Description of Artificial Sequence: Synthetic oligonucleotide
  Antisense strand to SEQ ID NO: 126938
uauuaucacagugaucccu

SEQ ID NO: 126940 - RNA, 19 nt, Artificial Sequence
  Description of Artificial Sequence: Synthetic oligonucleotide
  Sense strand starting at position 2496 of SEQ ID NO: 1620
ugauaaacuugauuagguu

SEQ ID NO: 126941 - RNA, 19 nt, Artificial Sequence
  Description of Artificial Sequence: Synthetic oligonucleotide
  Antisense strand to SEQ ID NO: 126940
aaccuaaucaaguuuauca

SEQ ID NO: 126942 - RNA, 19 nt, Artificial Sequence
  Description of Artificial Sequence: Synthetic oligonucleotide
  Sense strand starting at position 3503 of SEQ ID NO: 1620
guuggucuugaacaccuau

SEQ ID NO: 126943 - RNA, 19 nt, Artificial Sequence
  Description of Artificial Sequence: Synthetic oligonucleotide
  Antisense strand to SEQ ID NO: 126942
auagguguucaagaccaac

SEQ ID NO: 126944 - RNA, 19 nt, Artificial Sequence
  Description of Artificial Sequence: Synthetic oligonucleotide
  Sense strand starting at position 3566 of SEQ ID NO: 1620
acaagugugagccauagua

SEQ ID NO: 126945 - RNA, 19 nt, Artificial Sequence
  Description of Artificial Sequence: Synthetic oligonucleotide
  Antisense strand to SEQ ID NO: 126944
uacuauggcucacacuugu

SEQ ID NO: 126946 - RNA, 19 nt, Artificial Sequence
  Description of Artificial Sequence: Synthetic oligonucleotide
  Sense strand starting at position 3568 of SEQ ID NO: 1620
aagugugagccauaguacu

SEQ ID NO: 126947 - RNA, 19 nt, Artificial Sequence
  Description of Artificial Sequence: Synthetic oligonucleotide
  Antisense strand to SEQ ID NO: 126946
aguacuauggcucacacuu

SEQ ID NO: 126948 - RNA, 19 nt, Artificial Sequence
  Description of Artificial Sequence: Synthetic oligonucleotide
  Sense strand starting at position 3696 of SEQ ID NO: 1620
guagcuguucuguagguaa

SEQ ID NO: 126949 - RNA, 19 nt, Artificial Sequence
  Description of Artificial Sequence: Synthetic oligonucleotide
  Antisense strand to SEQ ID NO: 126948
uuaccuacagaacagcuac

SEQ ID NO: 126950 - RNA, 19 nt, Artificial Sequence
  Description of Artificial Sequence: Synthetic oligonucleotide
  Sense strand starting at position 3857 of SEQ ID NO: 1620
guggguucagcugauacua

SEQ ID NO: 126951 - RNA, 19 nt, Artificial Sequence
  Description of Artificial Sequence: Synthetic oligonucleotide
  Antisense strand to SEQ ID NO: 126950
uaguaucagcugaacccac

SEQ ID NO: 126952 - RNA, 19 nt, Artificial Sequence
  Description of Artificial Sequence: Synthetic oligonucleotide
  Sense strand starting at position 3958 of SEQ ID NO: 1620
guccaaucuuuaucgagca

SEQ ID NO: 126953 - RNA, 19 nt, Artificial Sequence
  Description of Artificial Sequence: Synthetic oligonucleotide
  Antisense strand to SEQ ID NO: 126952
ugcucgauaaagauuggac

SEQ ID NO: 126954 - RNA, 19 nt, Artificial Sequence
  Description of Artificial Sequence: Synthetic oligonucleotide
  Sense strand starting at position 854 of SEQ ID NO: 1621
gcuuacuauuuauugucau

SEQ ID NO: 126955 - RNA, 19 nt, Artificial Sequence
  Description of Artificial Sequence: Synthetic oligonucleotide
  Antisense strand to SEQ ID NO: 126954
augacaauaaauaguaagc

SEQ ID NO: 126956 - RNA, 19 nt, Artificial Sequence
  Description of Artificial Sequence: Synthetic oligonucleotide
  Sense strand starting at position 866 of SEQ ID NO: 1621
uugucauacucagcuagac

SEQ ID NO: 126957 - RNA, 19 nt, Artificial Sequence
  Description of Artificial Sequence: Synthetic oligonucleotide
  Antisense strand to SEQ ID NO: 126956
gucuagcugaguaugacaa

SEQ ID NO: 126958 - RNA, 19 nt, Artificial Sequence
  Description of Artificial Sequence: Synthetic oligonucleotide
  Sense strand starting at position 986 of SEQ ID NO: 1621
augaaugacugugucaaac

SEQ ID NO: 126959 - RNA, 19 nt, Artificial Sequence
  Description of Artificial Sequence: Synthetic oligonucleotide
  Antisense strand to SEQ ID NO: 126958
guuugacacagucauucau

SEQ ID NO: 126960 - RNA, 19 nt, Artificial Sequence
  Description of Artificial Sequence: Synthetic oligonucleotide
  Sense strand starting at position 988 of SEQ ID NO: 1621
gaaugacugugucaaacau

SEQ ID NO: 126961 - RNA, 19 nt, Artificial Sequence
  Description of Artificial Sequence: Synthetic oligonucleotide
  Antisense strand to SEQ ID NO: 126960
auguuugacacagucauuc

SEQ ID NO: 126962 - RNA, 19 nt, Artificial Sequence
  Description of Artificial Sequence: Synthetic oligonucleotide
  Sense strand starting at position 994 of SEQ ID NO: 1621
cugugucaaacauggagaa

SEQ ID NO: 126963 - RNA, 19 nt, Artificial Sequence
  Description of Artificial Sequence: Synthetic oligonucleotide
  Antisense strand to SEQ ID NO: 126962
uucuccauguuugacacag

SEQ ID NO: 126964 - RNA, 19 nt, Artificial Sequence
  Description of Artificial Sequence: Synthetic oligonucleotide
  Sense strand starting at position 996 of SEQ ID NO: 1621
gugucaaacauggagaagu

SEQ ID NO: 126965 - RNA, 19 nt, Artificial Sequence
  Description of Artificial Sequence: Synthetic oligonucleotide
  Antisense strand to SEQ ID NO: 126964
acuucuccauguuugacac

SEQ ID NO: 126966 - RNA, 19 nt, Artificial Sequence
  Description of Artificial Sequence: Synthetic oligonucleotide
  Sense strand starting at position 1160 of SEQ ID NO: 1621
agagguguuccaggaaggu

SEQ ID NO: 126967 - RNA, 19 nt, Artificial Sequence
  Description of Artificial Sequence: Synthetic oligonucleotide
  Antisense strand to SEQ ID NO: 126966
accuuccuggaacaccucu

SEQ ID NO: 126968 - RNA, 19 nt, Artificial Sequence
  Description of Artificial Sequence: Synthetic oligonucleotide
  Sense strand starting at position 1169 of SEQ ID NO: 1621
ccaggaaggugucugccau

SEQ ID NO: 126969 - RNA, 19 nt, Artificial Sequence
  Description of Artificial Sequence: Synthetic oligonucleotide
  Antisense strand to SEQ ID NO: 126968
auggcagacaccuuccugg

SEQ ID NO: 126970 - RNA, 19 nt, Artificial Sequence
  Description of Artificial Sequence: Synthetic oligonucleotide
  Sense strand starting at position 1170 of SEQ ID NO: 1621
caggaaggugucugccaua

SEQ ID NO: 126971 - RNA, 19 nt, Artificial Sequence
  Description of Artificial Sequence: Synthetic oligonucleotide
  Antisense strand to SEQ ID NO: 126970
uauggcagacaccuuccug

SEQ ID NO: 126972 - RNA, 19 nt, Artificial Sequence
  Description of Artificial Sequence: Synthetic oligonucleotide
  Sense strand starting at position 1366 of SEQ ID NO: 1621
cuucuuaugagcugggcau

SEQ ID NO: 126973 - RNA, 19 nt, Artificial Sequence
  Description of Artificial Sequence: Synthetic oligonucleotide
  Antisense strand to SEQ ID NO: 126972
augcccagcucauaagaag

SEQ ID NO: 126974 - RNA, 19 nt, Artificial Sequence
  Description of Artificial Sequence: Synthetic oligonucleotide
  Sense strand starting at position 1379 of SEQ ID NO: 1621
gggcaucaugcauauauua

SEQ ID NO: 126975 - RNA, 19 nt, Artificial Sequence
  Description of Artificial Sequence: Synthetic oligonucleotide
  Antisense strand to SEQ ID NO: 126974
uaauauaugcaugaugccc

SEQ ID NO: 126976 - RNA, 19 nt, Artificial Sequence
  Description of Artificial Sequence: Synthetic oligonucleotide
  Sense strand starting at position 1399 of SEQ ID NO: 1621
uuuauuaugucacaaggau

SEQ ID NO: 126977 - RNA, 19 nt, Artificial Sequence
  Description of Artificial Sequence: Synthetic oligonucleotide
  Antisense strand to SEQ ID NO: 126976
auccuugugacauaauaaa

SEQ ID NO: 126978 - RNA, 19 nt, Artificial Sequence
  Description of Artificial Sequence: Synthetic oligonucleotide
  Sense strand starting at position 1408 of SEQ ID NO: 1621
ucacaaggauccuauaaag

SEQ ID NO: 126979 - RNA, 19 nt, Artificial Sequence
  Description of Artificial Sequence: Synthetic oligonucleotide
  Antisense strand to SEQ ID NO: 126978
cuuuauaggauccuuguga

SEQ ID NO: 126980 - RNA, 19 nt, Artificial Sequence
  Description of Artificial Sequence: Synthetic oligonucleotide
  Sense strand starting at position 1429 of SEQ ID NO: 1621
gguacuguuaaauguucua

SEQ ID NO: 126981 - RNA, 19 nt, Artificial Sequence
  Description of Artificial Sequence: Synthetic oligonucleotide
  Antisense strand to SEQ ID NO: 126980
uagaacauuuaacaguacc

SEQ ID NO: 126982 - RNA, 19 nt, Artificial Sequence
  Description of Artificial Sequence: Synthetic oligonucleotide
  Sense strand starting at position 1939 of SEQ ID NO: 1621
uggguugucagaggcauga

SEQ ID NO: 126983 - RNA, 19 nt, Artificial Sequence
  Description of Artificial Sequence: Synthetic oligonucleotide
  Antisense strand to SEQ ID NO: 126982
ucaugccucugacaaccca

SEQ ID NO: 126984 - RNA, 19 nt, Artificial Sequence
  Description of Artificial Sequence: Synthetic oligonucleotide
  Sense strand starting at position 1973 of SEQ ID NO: 1621
gggaucaguucugcagacu

SEQ ID NO: 126985 - RNA, 19 nt, Artificial Sequence
  Description of Artificial Sequence: Synthetic oligonucleotide
  Antisense strand to SEQ ID NO: 126984
agucugcagaacugauccc

SEQ ID NO: 126986 - RNA, 19 nt, Artificial Sequence
  Description of Artificial Sequence: Synthetic oligonucleotide
  Sense strand starting at position 1974 of SEQ ID NO: 1621
ggaucaguucugcagacug

SEQ ID NO: 126987 - RNA, 19 nt, Artificial Sequence
  Description of Artificial Sequence: Synthetic oligonucleotide
  Antisense strand to SEQ ID NO: 126986
cagucugcagaacugaucc

SEQ ID NO: 126988 - RNA, 19 nt, Artificial Sequence
  Description of Artificial Sequence: Synthetic oligonucleotide
  Sense strand starting at position 1979 of SEQ ID NO: 1621
aguucugcagacugguuaa

SEQ ID NO: 126989 - RNA, 19 nt, Artificial Sequence
  Description of Artificial Sequence: Synthetic oligonucleotide
  Antisense strand to SEQ ID NO: 126988
uuaaccagucugcagaacu

SEQ ID NO: 126990 - RNA, 19 nt, Artificial Sequence
  Description of Artificial Sequence: Synthetic oligonucleotide
  Sense strand starting at position 1982 of SEQ ID NO: 1621
ucugcagacugguuaaagu

SEQ ID NO: 126991 - RNA, 19 nt, Artificial Sequence
  Description of Artificial Sequence: Synthetic oligonucleotide
  Antisense strand to SEQ ID NO: 126990
acuuuaaccagucugcaga

SEQ ID NO: 126992 - RNA, 19 nt, Artificial Sequence
  Description of Artificial Sequence: Synthetic oligonucleotide
  Sense strand starting at position 1993 of SEQ ID NO: 1621
guuaaagugucaccacugu

SEQ ID NO: 126993 - RNA, 19 nt, Artificial Sequence
  Description of Artificial Sequence: Synthetic oligonucleotide
  Antisense strand to SEQ ID NO: 126992
acaguggugacacuuuaac

SEQ ID NO: 126994 - RNA, 19 nt, Artificial Sequence
  Description of Artificial Sequence: Synthetic oligonucleotide
  Sense strand starting at position 2199 of SEQ ID NO: 1621
guggcugauguggaucauu

SEQ ID NO: 126995 - RNA, 19 nt, Artificial Sequence
  Description of Artificial Sequence: Synthetic oligonucleotide
  Antisense strand to SEQ ID NO: 126994
aaugauccacaucagccac

SEQ ID NO: 126996 - RNA, 19 nt, Artificial Sequence
  Description of Artificial Sequence: Synthetic oligonucleotide
  Sense strand starting at position 2323 of SEQ ID NO: 1621
ugcuaagucucuuugggac

SEQ ID NO: 126997 - RNA, 19 nt, Artificial Sequence
  Description of Artificial Sequence: Synthetic oligonucleotide
  Antisense strand to SEQ ID NO: 126996
gucccaaagagacuuagca

SEQ ID NO: 126998 - RNA, 19 nt, Artificial Sequence
  Description of Artificial Sequence: Synthetic oligonucleotide
  Sense strand starting at position 2357 of SEQ ID NO: 1621
cgaagcugcagggaugaua

SEQ ID NO: 126999 - RNA, 19 nt, Artificial Sequence
  Description of Artificial Sequence: Synthetic oligonucleotide
  Antisense strand to SEQ ID NO: 126998
uaucaucccugcagcuucg

SEQ ID NO: 127000 - RNA, 19 nt, Artificial Sequence
  Description of Artificial Sequence: Synthetic oligonucleotide
  Sense strand starting at position 2369 of SEQ ID NO: 1621
gaugauauguucuccugga

SEQ ID NO: 127001 - RNA, 19 nt, Artificial Sequence
  Description of Artificial Sequence: Synthetic oligonucleotide
  Antisense strand to SEQ ID NO: 127000
uccaggagaacauaucauc

SEQ ID NO: 127002 - RNA, 19 nt, Artificial Sequence
  Description of Artificial Sequence: Synthetic oligonucleotide
  Sense strand starting at position 2370 of SEQ ID NO: 1621
augauauguucuccuggau

SEQ ID NO: 127003 - RNA, 19 nt, Artificial Sequence
  Description of Artificial Sequence: Synthetic oligonucleotide
  Antisense strand to SEQ ID NO: 127002
auccaggagaacauaucau

SEQ ID NO: 127004 - RNA, 19 nt, Artificial Sequence
  Description of Artificial Sequence: Synthetic oligonucleotide
  Sense strand starting at position 2373 of SEQ ID NO: 1621
auauguucuccuggaucga

SEQ ID NO: 127005 - RNA, 19 nt, Artificial Sequence
  Description of Artificial Sequence: Synthetic oligonucleotide
  Antisense strand to SEQ ID NO: 127004
ucgauccaggagaacauau

SEQ ID NO: 127006 - RNA, 19 nt, Artificial Sequence
  Description of Artificial Sequence: Synthetic oligonucleotide
  Sense strand starting at position 2456 of SEQ ID NO: 1621
gcuggucuuaucuaaggga

SEQ ID NO: 127007 - RNA, 19 nt, Artificial Sequence
  Description of Artificial Sequence: Synthetic oligonucleotide
  Antisense strand to SEQ ID NO: 127006
ucccuuagauaagaccagc

SEQ ID NO: 127008 - RNA, 19 nt, Artificial Sequence
  Description of Artificial Sequence: Synthetic oligonucleotide
  Sense strand starting at position 2460 of SEQ ID NO: 1621
gucuuaucuaagggagaca

SEQ ID NO: 127009 - RNA, 19 nt, Artificial Sequence
  Description of Artificial Sequence: Synthetic oligonucleotide
  Antisense strand to SEQ ID NO: 127008
ugucucccuuagauaagac

SEQ ID NO: 127010 - RNA, 19 nt, Artificial Sequence
  Description of Artificial Sequence: Synthetic oligonucleotide
  Sense strand starting at position 2619 of SEQ ID NO: 1621
ucuggucauccacgugaau

SEQ ID NO: 127011 - RNA, 19 nt, Artificial Sequence
  Description of Artificial Sequence: Synthetic oligonucleotide
  Antisense strand to SEQ ID NO: 127010
auucacguggaugaccaga

SEQ ID NO: 127012 - RNA, 19 nt, Artificial Sequence
  Description of Artificial Sequence: Synthetic oligonucleotide
  Sense strand starting at position 2621 of SEQ ID NO: 1621
uggucauccacgugaauag

SEQ ID NO: 127013 - RNA, 19 nt, Artificial Sequence
  Description of Artificial Sequence: Synthetic oligonucleotide
  Antisense strand to SEQ ID NO: 127012
cuauucacguggaugacca

SEQ ID NO: 127014 - RNA, 19 nt, Artificial Sequence
  Description of Artificial Sequence: Synthetic oligonucleotide
  Sense strand starting at position 2622 of SEQ ID NO: 1621
ggucauccacgugaauaga

SEQ ID NO: 127015 - RNA, 19 nt, Artificial Sequence
  Description of Artificial Sequence: Synthetic oligonucleotide
  Antisense strand to SEQ ID NO: 127014
ucuauucacguggaugacc

SEQ ID NO: 127016 - RNA, 19 nt, Artificial Sequence
  Description of Artificial Sequence: Synthetic oligonucleotide
  Sense strand starting at position 2625 of SEQ ID NO: 1621
cauccacgugaauagauau

SEQ ID NO: 127017 - RNA, 19 nt, Artificial Sequence
  Description of Artificial Sequence: Synthetic oligonucleotide
  Antisense strand to SEQ ID NO: 127016
auaucuauucacguggaug

SEQ ID NO: 127018 - RNA, 19 nt, Artificial Sequence
  Description of Artificial Sequence: Synthetic oligonucleotide
  Sense strand starting at position 2676 of SEQ ID NO: 1621
cuuuguacuuuacugaagu

SEQ ID NO: 127019 - RNA, 19 nt, Artificial Sequence
  Description of Artificial Sequence: Synthetic oligonucleotide
  Antisense strand to SEQ ID NO: 127018
acuucaguaaaguacaaag

SEQ ID NO: 127020 - RNA, 19 nt, Artificial Sequence
  Description of Artificial Sequence: Synthetic oligonucleotide
  Sense strand starting at position 2689 of SEQ ID NO: 1621
ugaaguuagcucuagugaa

SEQ ID NO: 127021 - RNA, 19 nt, Artificial Sequence
  Description of Artificial Sequence: Synthetic oligonucleotide
  Antisense strand to SEQ ID NO: 127020
uucacuagagcuaacuuca

SEQ ID NO: 127022 - RNA, 19 nt, Artificial Sequence
  Description of Artificial Sequence: Synthetic oligonucleotide
  Sense strand starting at position 2758 of SEQ ID NO: 1621
agggaucacugugauaaua

SEQ ID NO: 127023 - RNA, 19 nt, Artificial Sequence
  Description of Artificial Sequence: Synthetic oligonucleotide
  Antisense strand to SEQ ID NO: 127022
uauuaucacagugaucccu

SEQ ID NO: 127024 - RNA, 19 nt, Artificial Sequence
  Description of Artificial Sequence: Synthetic oligonucleotide
  Sense strand starting at position 2760 of SEQ ID NO: 1621
ggaucacugugauaauaug

SEQ ID NO: 127025 - RNA, 19 nt, Artificial Sequence
  Description of Artificial Sequence: Synthetic oligonucleotide
  Antisense strand to SEQ ID NO: 127024
cauauuaucacagugaucc

SEQ ID NO: 127026 - RNA, 19 nt, Artificial Sequence
  Description of Artificial Sequence: Synthetic oligonucleotide
  Sense strand starting at position 2912 of SEQ ID NO: 1621
ugaacauucucagacacug

SEQ ID NO: 127027 - RNA, 19 nt, Artificial Sequence
  Description of Artificial Sequence: Synthetic oligonucleotide
  Antisense strand to SEQ ID NO: 127026
cagugucugagaauguuca

SEQ ID NO: 127028 - RNA, 19 nt, Artificial Sequence
  Description of Artificial Sequence: Synthetic oligonucleotide
  Sense strand starting at position 2929 of SEQ ID NO: 1621
ugauaaacuugauuagguu

SEQ ID NO: 127029 - RNA, 19 nt, Artificial Sequence
  Description of Artificial Sequence: Synthetic oligonucleotide
  Antisense strand to SEQ ID NO: 127028
aaccuaaucaaguuuauca

SEQ ID NO: 127030 - RNA, 19 nt, Artificial Sequence
  Description of Artificial Sequence: Synthetic oligonucleotide
  Sense strand starting at position 3722 of SEQ ID NO: 1621
agugcacucgugugaucau

SEQ ID NO: 127031 - RNA, 19 nt, Artificial Sequence
  Description of Artificial Sequence: Synthetic oligonucleotide
  Antisense strand to SEQ ID NO: 127030
augaucacacgagugcacu

SEQ ID NO: 127032 - RNA, 19 nt, Artificial Sequence
  Description of Artificial Sequence: Synthetic oligonucleotide
  Sense strand starting at position 3936 of SEQ ID NO: 1621
guuggucuugaacaccuau

SEQ ID NO: 127033 - RNA, 19 nt, Artificial Sequence
  Description of Artificial Sequence: Synthetic oligonucleotide
  Antisense strand to SEQ ID NO: 127032
auagguguucaagaccaac

SEQ ID NO: 127034 - RNA, 19 nt, Artificial Sequence
  Description of Artificial Sequence: Synthetic oligonucleotide
  Sense strand starting at position 3820 of SEQ ID NO: 1622
gggagcacugcaugcauuu

SEQ ID NO: 127035 - RNA, 19 nt, Artificial Sequence
  Description of Artificial Sequence: Synthetic oligonucleotide
  Antisense strand to SEQ ID NO: 127034
aaaugcaugcagugcuccc

SEQ ID NO: 127036 - RNA, 19 nt, Artificial Sequence
  Description of Artificial Sequence: Synthetic oligonucleotide
  Sense strand starting at position 3765 of SEQ ID NO: 1622
ccaacuuauguccgaacaa

SEQ ID NO: 127037 - RNA, 19 nt, Artificial Sequence
  Description of Artificial Sequence: Synthetic oligonucleotide
  Antisense strand to SEQ ID NO: 127036
uuguucggacauaaguugg

SEQ ID NO: 127038 - RNA, 19 nt, Artificial Sequence
  Description of Artificial Sequence: Synthetic oligonucleotide
  Sense strand starting at position 3385 of SEQ ID NO: 1622
ugauuaccuuuacugguaa

SEQ ID NO: 127039 - RNA, 19 nt, Artificial Sequence
  Description of Artificial Sequence: Synthetic oligonucleotide
  Antisense strand to SEQ ID NO: 127038
uuaccaguaaagguaauca

SEQ ID NO: 127040 - RNA, 19 nt, Artificial Sequence
  Description of Artificial Sequence: Synthetic oligonucleotide
  Sense strand starting at position 3380 of SEQ ID NO: 1622
ggauaugauuaccuuuacu

SEQ ID NO: 127041 - RNA, 19 nt, Artificial Sequence
  Description of Artificial Sequence: Synthetic oligonucleotide
  Antisense strand to SEQ ID NO: 127040
aguaaagguaaucauaucc

SEQ ID NO: 127042 - RNA, 19 nt, Artificial Sequence
  Description of Artificial Sequence: Synthetic oligonucleotide
  Sense strand starting at position 3379 of SEQ ID NO: 1622
gggauaugauuaccuuuac

SEQ ID NO: 127043 - RNA, 19 nt, Artificial Sequence
  Description of Artificial Sequence: Synthetic oligonucleotide
  Antisense strand to SEQ ID NO: 127042
guaaagguaaucauauccc

SEQ ID NO: 127044 - RNA, 19 nt, Artificial Sequence
  Description of Artificial Sequence: Synthetic oligonucleotide
  Sense strand starting at position 3377 of SEQ ID NO: 1622
ccgggauaugauuaccuuu

SEQ ID NO: 127045 - RNA, 19 nt, Artificial Sequence
  Description of Artificial Sequence: Synthetic oligonucleotide
  Antisense strand to SEQ ID NO: 127044
aaagguaaucauaucccgg

SEQ ID NO: 127046 - RNA, 19 nt, Artificial Sequence
  Description of Artificial Sequence: Synthetic oligonucleotide
  Sense strand starting at position 3330 of SEQ ID NO: 1622
cuugguugaagaugauaau

SEQ ID NO: 127047 - RNA, 19 nt, Artificial Sequence
  Description of Artificial Sequence: Synthetic oligonucleotide
  Antisense strand to SEQ ID NO: 127046
auuaucaucuucaaccaag

SEQ ID NO: 127048 - RNA, 19 nt, Artificial Sequence
  Description of Artificial Sequence: Synthetic oligonucleotide
  Sense strand starting at position 3306 of SEQ ID NO: 1622
cuauuuaugugucuaguau

SEQ ID NO: 127049 - RNA, 19 nt, Artificial Sequence
  Description of Artificial Sequence: Synthetic oligonucleotide
  Antisense strand to SEQ ID NO: 127048
auacuagacacauaaauag

SEQ ID NO: 127050 - RNA, 19 nt, Artificial Sequence
  Description of Artificial Sequence: Synthetic oligonucleotide
  Sense strand starting at position 3280 of SEQ ID NO: 1622
ugguguguacuucacaagu

SEQ ID NO: 127051 - RNA, 19 nt, Artificial Sequence
  Description of Artificial Sequence: Synthetic oligonucleotide
  Antisense strand to SEQ ID NO: 127050
acuugugaaguacacacca

SEQ ID NO: 127052 - RNA, 19 nt, Artificial Sequence
  Description of Artificial Sequence: Synthetic oligonucleotide
  Sense strand starting at position 3251 of SEQ ID NO: 1622
cuuaucauaugugugauaa

SEQ ID NO: 127053 - RNA, 19 nt, Artificial Sequence
  Description of Artificial Sequence: Synthetic oligonucleotide
  Antisense strand to SEQ ID NO: 127052
uuaucacacauaugauaag

SEQ ID NO: 127054 - RNA, 19 nt, Artificial Sequence
  Description of Artificial Sequence: Synthetic oligonucleotide
  Sense strand starting at position 3149 of SEQ ID NO: 1622
ggacuuaacgucuauccuu

SEQ ID NO: 127055 - RNA, 19 nt, Artificial Sequence
  Description of Artificial Sequence: Synthetic oligonucleotide
  Antisense strand to SEQ ID NO: 127054
aaggauagacguuaagucc

SEQ ID NO: 127056 - RNA, 19 nt, Artificial Sequence
  Description of Artificial Sequence: Synthetic oligonucleotide
  Sense strand starting at position 3138 of SEQ ID NO: 1622
gccugaugccaggacuuaa

SEQ ID NO: 127057 - RNA, 19 nt, Artificial Sequence
  Description of Artificial Sequence: Synthetic oligonucleotide
  Antisense strand to SEQ ID NO: 127056
uuaaguccuggcaucaggc

SEQ ID NO: 127058 - RNA, 19 nt, Artificial Sequence
  Description of Artificial Sequence: Synthetic oligonucleotide
  Sense strand starting at position 3076 of SEQ ID NO: 1622
ugacauauuucuuaggaag

SEQ ID NO: 127059 - RNA, 19 nt, Artificial Sequence
  Description of Artificial Sequence: Synthetic oligonucleotide
  Antisense strand to SEQ ID NO: 127058
cuuccuaagaaauauguca

SEQ ID NO: 127060 - RNA, 19 nt, Artificial Sequence
  Description of Artificial Sequence: Synthetic oligonucleotide
  Sense strand starting at position 3065 of SEQ ID NO: 1622
agggcauucguugacauau

SEQ ID NO: 127061 - RNA, 19 nt, Artificial Sequence
  Description of Artificial Sequence: Synthetic oligonucleotide
  Antisense strand to SEQ ID NO: 127060
auaugucaacgaaugcccu

SEQ ID NO: 127062 - RNA, 19 nt, Artificial Sequence
  Description of Artificial Sequence: Synthetic oligonucleotide
  Sense strand starting at position 3064 of SEQ ID NO: 1622
aagggcauucguugacaua

SEQ ID NO: 127063 - RNA, 19 nt, Artificial Sequence
  Description of Artificial Sequence: Synthetic oligonucleotide
  Antisense strand to SEQ ID NO: 127062
uaugucaacgaaugcccuu

SEQ ID NO: 127064 - RNA, 19 nt, Artificial Sequence
  Description of Artificial Sequence: Synthetic oligonucleotide
  Sense strand starting at position 3035 of SEQ ID NO: 1622
aggguuauuuagguacguu

SEQ ID NO: 127065 - RNA, 19 nt, Artificial Sequence
  Description of Artificial Sequence: Synthetic oligonucleotide
  Antisense strand to SEQ ID NO: 127064
aacguaccuaaauaacccu

SEQ ID NO: 127066 - RNA, 19 nt, Artificial Sequence
  Description of Artificial Sequence: Synthetic oligonucleotide
  Sense strand starting at position 3025 of SEQ ID NO: 1622
gagagugguaaggguuauu

SEQ ID NO: 127067 - RNA, 19 nt, Artificial Sequence
  Description of Artificial Sequence: Synthetic oligonucleotide
  Antisense strand to SEQ ID NO: 127066
aauaacccuuaccacucuc

SEQ ID NO: 127068 - RNA, 19 nt, Artificial Sequence
  Description of Artificial Sequence: Synthetic oligonucleotide
  Sense strand starting at position 2996 of SEQ ID NO: 1622
guacaauaccuuuguuaaa

SEQ ID NO: 127069 - RNA, 19 nt, Artificial Sequence
  Description of Artificial Sequence: Synthetic oligonucleotide
  Antisense strand to SEQ ID NO: 127068
uuuaacaaagguauuguac

SEQ ID NO: 127070 - RNA, 19 nt, Artificial Sequence
  Description of Artificial Sequence: Synthetic oligonucleotide
  Sense strand starting at position 2855 of SEQ ID NO: 1622
aaaguaaaucuagguguuu

SEQ ID NO: 127071 - RNA, 19 nt, Artificial Sequence
  Description of Artificial Sequence: Synthetic oligonucleotide
  Antisense strand to SEQ ID NO: 127070
aaacaccuagauuuacuuu

SEQ ID NO: 127072 - RNA, 19 nt, Artificial Sequence
  Description of Artificial Sequence: Synthetic oligonucleotide
  Sense strand starting at position 2764 of SEQ ID NO: 1622
gggauuacccucgggaaag

SEQ ID NO: 127073 - RNA, 19 nt, Artificial Sequence
  Description of Artificial Sequence: Synthetic oligonucleotide
  Antisense strand to SEQ ID NO: 127072
cuuucccgaggguaauccc

SEQ ID NO: 127074 - RNA, 19 nt, Artificial Sequence
  Description of Artificial Sequence: Synthetic oligonucleotide
  Sense strand starting at position 2763 of SEQ ID NO: 1622
cgggauuacccucgggaaa

SEQ ID NO: 127075 - RNA, 19 nt, Artificial Sequence
  Description of Artificial Sequence: Synthetic oligonucleotide
  Antisense strand to SEQ ID NO: 127074
uuucccgaggguaaucccg

SEQ ID NO: 127076 - RNA, 19 nt, Artificial Sequence
  Description of Artificial Sequence: Synthetic oligonucleotide
  Sense strand starting at position 2701 of SEQ ID NO: 1622
cugagaauuagcuggguuu

SEQ ID NO: 127077 - RNA, 19 nt, Artificial Sequence
  Description of Artificial Sequence: Synthetic oligonucleotide
  Antisense strand to SEQ ID NO: 127076
aaacccagcuaauucucag

SEQ ID NO: 127078 - RNA, 19 nt, Artificial Sequence
  Description of Artificial Sequence: Synthetic oligonucleotide
  Sense strand starting at position 2691 of SEQ ID NO: 1622
cuguacagagcugagaauu

SEQ ID NO: 127079 - RNA, 19 nt, Artificial Sequence
  Description of Artificial Sequence: Synthetic oligonucleotide
  Antisense strand to SEQ ID NO: 127078
aauucucagcucuguacag

SEQ ID NO: 127080 - RNA, 19 nt, Artificial Sequence
  Description of Artificial Sequence: Synthetic oligonucleotide
  Sense strand starting at position 2690 of SEQ ID NO: 1622
acuguacagagcugagaau

SEQ ID NO: 127081 - RNA, 19 nt, Artificial Sequence
  Description of Artificial Sequence: Synthetic oligonucleotide
  Antisense strand to SEQ ID NO: 127080
auucucagcucuguacagu

SEQ ID NO: 127082 - RNA, 19 nt, Artificial Sequence
  Description of Artificial Sequence: Synthetic oligonucleotide
  Sense strand starting at position 2676 of SEQ ID NO: 1622
gcuuguacuggagaacugu

SEQ ID NO: 127083 - RNA, 19 nt, Artificial Sequence
  Description of Artificial Sequence: Synthetic oligonucleotide
  Antisense strand to SEQ ID NO: 127082
acaguucuccaguacaagc

SEQ ID NO: 127084 - RNA, 19 nt, Artificial Sequence
  Description of Artificial Sequence: Synthetic oligonucleotide
  Sense strand starting at position 2674 of SEQ ID NO: 1622
uugcuuguacuggagaacu

SEQ ID NO: 127085 - RNA, 19 nt, Artificial Sequence
  Description of Artificial Sequence: Synthetic oligonucleotide
  Antisense strand to SEQ ID NO: 127084
aguucuccaguacaagcaa

SEQ ID NO: 127086 - RNA, 19 nt, Artificial Sequence
  Description of Artificial Sequence: Synthetic oligonucleotide
  Sense strand starting at position 2535 of SEQ ID NO: 1622
gcgccuucucgaccaguua

SEQ ID NO: 127087 - RNA, 19 nt, Artificial Sequence
  Description of Artificial Sequence: Synthetic oligonucleotide
  Antisense strand to SEQ ID NO: 127086
uaacuggucgagaaggcgc

SEQ ID NO: 127088 - RNA, 19 nt, Artificial Sequence
  Description of Artificial Sequence: Synthetic oligonucleotide
  Sense strand starting at position 2275 of SEQ ID NO: 1622
cacugugaacgcuagaacu

SEQ ID NO: 127089 - RNA, 19 nt, Artificial Sequence
  Description of Artificial Sequence: Synthetic oligonucleotide
  Antisense strand to SEQ ID NO: 127088
aguucuagcguucacagug

SEQ ID NO: 127090 - RNA, 19 nt, Artificial Sequence
  Description of Artificial Sequence: Synthetic oligonucleotide
  Sense strand starting at position 1475 of SEQ ID NO: 1622
gagugacaucccggaguuu

SEQ ID NO: 127091 - RNA, 19 nt, Artificial Sequence
  Description of Artificial Sequence: Synthetic oligonucleotide
  Antisense strand to SEQ ID NO: 127090
aaacuccgggaugucacuc

SEQ ID NO: 127092 - RNA, 19 nt, Artificial Sequence
  Description of Artificial Sequence: Synthetic oligonucleotide
  Sense strand starting at position 1466 of SEQ ID NO: 1622
gcauuucccgagugacauc

SEQ ID NO: 127093 - RNA, 19 nt, Artificial Sequence
  Description of Artificial Sequence: Synthetic oligonucleotide
  Antisense strand to SEQ ID NO: 127092
gaugucacucgggaaaugc

SEQ ID NO: 127094 - RNA, 19 nt, Artificial Sequence
  Description of Artificial Sequence: Synthetic oligonucleotide
  Sense strand starting at position 1055 of SEQ ID NO: 1622
gcugaagugaagcaaacau

SEQ ID NO: 127095 - RNA, 19 nt, Artificial Sequence
  Description of Artificial Sequence: Synthetic oligonucleotide
  Antisense strand to SEQ ID NO: 127094
auguuugcuucacuucagc

SEQ ID NO: 127096 - RNA, 19 nt, Artificial Sequence
  Description of Artificial Sequence: Synthetic oligonucleotide
  Sense strand starting at position 1030 of SEQ ID NO: 1622
gaaacucugucaccugaag

SEQ ID NO: 127097 - RNA, 19 nt, Artificial Sequence
  Description of Artificial Sequence: Synthetic oligonucleotide
  Antisense strand to SEQ ID NO: 127096
cuucaggugacagaguuuc

SEQ ID NO: 127098 - RNA, 19 nt, Artificial Sequence
  Description of Artificial Sequence: Synthetic oligonucleotide
  Sense strand starting at position 954 of SEQ ID NO: 1622
cuguauuuaucacucgguu

SEQ ID NO: 127099 - RNA, 19 nt, Artificial Sequence
  Description of Artificial Sequence: Synthetic oligonucleotide
  Antisense strand to SEQ ID NO: 127098
aaccgagugauaaauacag

SEQ ID NO: 127100 - RNA, 19 nt, Artificial Sequence
  Description of Artificial Sequence: Synthetic oligonucleotide
  Sense strand starting at position 860 of SEQ ID NO: 1622
uucucuggugcucaaauga

SEQ ID NO: 127101 - RNA, 19 nt, Artificial Sequence
  Description of Artificial Sequence: Synthetic oligonucleotide
  Antisense strand to SEQ ID NO: 127100
ucauuugagcaccagagaa

SEQ ID NO: 127102 - RNA, 19 nt, Artificial Sequence
  Description of Artificial Sequence: Synthetic oligonucleotide
  Sense strand starting at position 742 of SEQ ID NO: 1622
gcuacucgacaugacuuaa

SEQ ID NO: 127103 - RNA, 19 nt, Artificial Sequence
  Description of Artificial Sequence: Synthetic oligonucleotide
  Antisense strand to SEQ ID NO: 127102
uuaagucaugucgaguagc

SEQ ID NO: 127104 - RNA, 19 nt, Artificial Sequence
  Description of Artificial Sequence: Synthetic oligonucleotide
  Sense strand starting at position 739 of SEQ ID NO: 1622
auugcuacucgacaugacu

SEQ ID NO: 127105 - RNA, 19 nt, Artificial Sequence
  Description of Artificial Sequence: Synthetic oligonucleotide
  Antisense strand to SEQ ID NO: 127104
agucaugucgaguagcaau

SEQ ID NO: 127106 - RNA, 19 nt, Artificial Sequence
  Description of Artificial Sequence: Synthetic oligonucleotide
  Sense strand starting at position 729 of SEQ ID NO: 1622
gggaaauaacauugcuacu

SEQ ID NO: 127107 - RNA, 19 nt, Artificial Sequence
  Description of Artificial Sequence: Synthetic oligonucleotide
  Antisense strand to SEQ ID NO: 127106
aguagcaauguuauuuccc

SEQ ID NO: 127108 - RNA, 19 nt, Artificial Sequence
  Description of Artificial Sequence: Synthetic oligonucleotide
  Sense strand starting at position 695 of SEQ ID NO: 1622
ucgugccuacauuaucaaa

SEQ ID NO: 127109 - RNA, 19 nt, Artificial Sequence
  Description of Artificial Sequence: Synthetic oligonucleotide
  Antisense strand to SEQ ID NO: 127108
uuugauaauguaggcacga

SEQ ID NO: 127110 - RNA, 19 nt, Artificial Sequence
  Description of Artificial Sequence: Synthetic oligonucleotide
  Sense strand starting at position 543 of SEQ ID NO: 1622
acaaucuuugaguagcuaa

SEQ ID NO: 127111 - RNA, 19 nt, Artificial Sequence
  Description of Artificial Sequence: Synthetic oligonucleotide
  Antisense strand to SEQ ID NO: 127110
uuagcuacucaaagauugu

SEQ ID NO: 127112 - RNA, 19 nt, Artificial Sequence
  Description of Artificial Sequence: Synthetic oligonucleotide
  Sense strand starting at position 256 of SEQ ID NO: 1622
gcaacacugcauugauaua

SEQ ID NO: 127113 - RNA, 19 nt, Artificial Sequence
  Description of Artificial Sequence: Synthetic oligonucleotide
  Antisense strand to SEQ ID NO: 127112
uauaucaaugcaguguugc

SEQ ID NO: 127114 - RNA, 19 nt, Artificial Sequence
  Description of Artificial Sequence: Synthetic oligonucleotide
  Sense strand starting at position 3851 of SEQ ID NO: 1623
cccaauguacuguaaagua

SEQ ID NO: 127115 - RNA, 19 nt, Artificial Sequence
  Description of Artificial Sequence: Synthetic oligonucleotide
  Antisense strand to SEQ ID NO: 127114
uacuuuacaguacauuggg

SEQ ID NO: 127116 - RNA, 19 nt, Artificial Sequence
  Description of Artificial Sequence: Synthetic oligonucleotide
  Sense strand starting at position 3828 of SEQ ID NO: 1623
gugcacaccgauuauauaa

SEQ ID NO: 127117 - RNA, 19 nt, Artificial Sequence
  Description of Artificial Sequence: Synthetic oligonucleotide
  Antisense strand to SEQ ID NO: 127116
uuauauaaucggugugcac

SEQ ID NO: 127118 - RNA, 19 nt, Artificial Sequence
  Description of Artificial Sequence: Synthetic oligonucleotide
  Sense strand starting at position 3628 of SEQ ID NO: 1623
uggacagagccuuggacuu

SEQ ID NO: 127119 - RNA, 19 nt, Artificial Sequence
  Description of Artificial Sequence: Synthetic oligonucleotide
  Antisense strand to SEQ ID NO: 127118
aaguccaaggcucugucca

SEQ ID NO: 127120 - RNA, 19 nt, Artificial Sequence
  Description of Artificial Sequence: Synthetic oligonucleotide
  Sense strand starting at position 3542 of SEQ ID NO: 1623
ugucauagauguguacaaa

SEQ ID NO: 127121 - RNA, 19 nt, Artificial Sequence
  Description of Artificial Sequence: Synthetic oligonucleotide
  Antisense strand to SEQ ID NO: 127120
uuuguacacaucuaugaca

SEQ ID NO: 127122 - RNA, 19 nt, Artificial Sequence
  Description of Artificial Sequence: Synthetic oligonucleotide
  Sense strand starting at position 3541 of SEQ ID NO: 1623
augucauagauguguacaa

SEQ ID NO: 127123 - RNA, 19 nt, Artificial Sequence
  Description of Artificial Sequence: Synthetic oligonucleotide
  Antisense strand to SEQ ID NO: 127122
uuguacacaucuaugacau

SEQ ID NO: 127124 - RNA, 19 nt, Artificial Sequence
  Description of Artificial Sequence: Synthetic oligonucleotide
  Sense strand starting at position 3539 of SEQ ID NO: 1623
auaugucauagauguguac

SEQ ID NO: 127125 - RNA, 19 nt, Artificial Sequence
  Description of Artificial Sequence: Synthetic oligonucleotide
  Antisense strand to SEQ ID NO: 127124
guacacaucuaugacauau

SEQ ID NO: 127126 - RNA, 19 nt, Artificial Sequence
  Description of Artificial Sequence: Synthetic oligonucleotide
  Sense strand starting at position 3516 of SEQ ID NO: 1623
guaaaccagagaugugaua

SEQ ID NO: 127127 - RNA, 19 nt, Artificial Sequence
  Description of Artificial Sequence: Synthetic oligonucleotide
  Antisense strand to SEQ ID NO: 127126
uaucacaucucugguuuac

SEQ ID NO: 127128 - RNA, 19 nt, Artificial Sequence
  Description of Artificial Sequence: Synthetic oligonucleotide
  Sense strand starting at position 3450 of SEQ ID NO: 1623
agauuauaguuuccaauag

SEQ ID NO: 127129 - RNA, 19 nt, Artificial Sequence
  Description of Artificial Sequence: Synthetic oligonucleotide
  Antisense strand to SEQ ID NO: 127128
cuauuggaaacuauaaucu

SEQ ID NO: 127130 - RNA, 19 nt, Artificial Sequence
  Description of Artificial Sequence: Synthetic oligonucleotide
  Sense strand starting at position 3447 of SEQ ID NO: 1623
agcagauuauaguuuccaa

SEQ ID NO: 127131 - RNA, 19 nt, Artificial Sequence
  Description of Artificial Sequence: Synthetic oligonucleotide
  Antisense strand to SEQ ID NO: 127130
uuggaaacuauaaucugcu

SEQ ID NO: 127132 - RNA, 19 nt, Artificial Sequence
  Description of Artificial Sequence: Synthetic oligonucleotide
  Sense strand starting at position 3427 of SEQ ID NO: 1623
ugcagagcagauuauugua

SEQ ID NO: 127133 - RNA, 19 nt, Artificial Sequence
  Description of Artificial Sequence: Synthetic oligonucleotide
  Antisense strand to SEQ ID NO: 127132
uacaauaaucugcucugca

SEQ ID NO: 127134 - RNA, 19 nt, Artificial Sequence
  Description of Artificial Sequence: Synthetic oligonucleotide
  Sense strand starting at position 3401 of SEQ ID NO: 1623
caaggaagguauuccuagu

SEQ ID NO: 127135 - RNA, 19 nt, Artificial Sequence
  Description of Artificial Sequence: Synthetic oligonucleotide
  Antisense strand to SEQ ID NO: 127134
acuaggaauaccuuccuug

SEQ ID NO: 127136 - RNA, 19 nt, Artificial Sequence
  Description of Artificial Sequence: Synthetic oligonucleotide
  Sense strand starting at position 3393 of SEQ ID NO: 1623
agcuuucccaaggaaggua

SEQ ID NO: 127137 - RNA, 19 nt, Artificial Sequence
  Description of Artificial Sequence: Synthetic oligonucleotide
  Antisense strand to SEQ ID NO: 127136
uaccuuccuugggaaagcu

SEQ ID NO: 127138 - RNA, 19 nt, Artificial Sequence
  Description of Artificial Sequence: Synthetic oligonucleotide
  Sense strand starting at position 3392 of SEQ ID NO: 1623
cagcuuucccaaggaaggu

SEQ ID NO: 127139 - RNA, 19 nt, Artificial Sequence
  Description of Artificial Sequence: Synthetic oligonucleotide
  Antisense strand to SEQ ID NO: 127138
accuuccuugggaaagcug

SEQ ID NO: 127140 - RNA, 19 nt, Artificial Sequence
  Description of Artificial Sequence: Synthetic oligonucleotide
  Sense strand starting at position 3361 of SEQ ID NO: 1623
cugagauguggguguuaca

SEQ ID NO: 127141 - RNA, 19 nt, Artificial Sequence
  Description of Artificial Sequence: Synthetic oligonucleotide
  Antisense strand to SEQ ID NO: 127140
uguaacacccacaucucag

SEQ ID NO: 127142 - RNA, 19 nt, Artificial Sequence
  Description of Artificial Sequence: Synthetic oligonucleotide
  Sense strand starting at position 3351 of SEQ ID NO: 1623
cacgcaacuccugagaugu

SEQ ID NO: 127143 - RNA, 19 nt, Artificial Sequence
  Description of Artificial Sequence: Synthetic oligonucleotide
  Antisense strand to SEQ ID NO: 127142
acaucucaggaguugcgug

SEQ ID NO: 127144 - RNA, 19 nt, Artificial Sequence
  Description of Artificial Sequence: Synthetic oligonucleotide
  Sense strand starting at position 3110 of SEQ ID NO: 1623
cgugcuguccggucaguuu

SEQ ID NO: 127145 - RNA, 19 nt, Artificial Sequence
  Description of Artificial Sequence: Synthetic oligonucleotide
  Antisense strand to SEQ ID NO: 127144
aaacugaccggacagcacg

SEQ ID NO: 127146 - RNA, 19 nt, Artificial Sequence
  Description of Artificial Sequence: Synthetic oligonucleotide
  Sense strand starting at position 3068 of SEQ ID NO: 1623
cuggguuucucauucugga

SEQ ID NO: 127147 - RNA, 19 nt, Artificial Sequence
  Description of Artificial Sequence: Synthetic oligonucleotide
  Antisense strand to SEQ ID NO: 127146
uccagaaugagaaacccag

SEQ ID NO: 127148 - RNA, 19 nt, Artificial Sequence
  Description of Artificial Sequence: Synthetic oligonucleotide
  Sense strand starting at position 2970 of SEQ ID NO: 1623
aguauuuacuuugauggaa

SEQ ID NO: 127149 - RNA, 19 nt, Artificial Sequence
  Description of Artificial Sequence: Synthetic oligonucleotide
  Antisense strand to SEQ ID NO: 127148
uuccaucaaaguaaauacu

SEQ ID NO: 127150 - RNA, 19 nt, Artificial Sequence
  Description of Artificial Sequence: Synthetic oligonucleotide
  Sense strand starting at position 2924 of SEQ ID NO: 1623
gugaauuugguguguaaca

SEQ ID NO: 127151 - RNA, 19 nt, Artificial Sequence
  Description of Artificial Sequence: Synthetic oligonucleotide
  Antisense strand to SEQ ID NO: 127150
uguuacacaccaaauucac

SEQ ID NO: 127152 - RNA, 19 nt, Artificial Sequence
  Description of Artificial Sequence: Synthetic oligonucleotide
  Sense strand starting at position 2912 of SEQ ID NO: 1623
gagcccacaucagugaauu

SEQ ID NO: 127153 - RNA, 19 nt, Artificial Sequence
  Description of Artificial Sequence: Synthetic oligonucleotide
  Antisense strand to SEQ ID NO: 127152
aauucacugaugugggcuc

SEQ ID NO: 127154 - RNA, 19 nt, Artificial Sequence
  Description of Artificial Sequence: Synthetic oligonucleotide
  Sense strand starting at position 2802 of SEQ ID NO: 1623
uggacuuauuauucuggga

SEQ ID NO: 127155 - RNA, 19 nt, Artificial Sequence
  Description of Artificial Sequence: Synthetic oligonucleotide
  Antisense strand to SEQ ID NO: 127154
ucccagaauaauaagucca

SEQ ID NO: 127156 - RNA, 19 nt, Artificial Sequence
  Description of Artificial Sequence: Synthetic oligonucleotide
  Sense strand starting at position 2702 of SEQ ID NO: 1623
cgugaaugcuaguuaauuu

SEQ ID NO: 127157 - RNA, 19 nt, Artificial Sequence
  Description of Artificial Sequence: Synthetic oligonucleotide
  Antisense strand to SEQ ID NO: 127156
aaauuaacuagcauucacg

SEQ ID NO: 127158 - RNA, 19 nt, Artificial Sequence
  Description of Artificial Sequence: Synthetic oligonucleotide
  Sense strand starting at position 2693 of SEQ ID NO: 1623
aggugaauacgugaaugcu

SEQ ID NO: 127159 - RNA, 19 nt, Artificial Sequence
  Description of Artificial Sequence: Synthetic oligonucleotide
  Antisense strand to SEQ ID NO: 127158
agcauucacguauucaccu

SEQ ID NO: 127160 - RNA, 19 nt, Artificial Sequence
  Description of Artificial Sequence: Synthetic oligonucleotide
  Sense strand starting at position 2661 of SEQ ID NO: 1623
auauuaggcgcuuaauaaa

SEQ ID NO: 127161 - RNA, 19 nt, Artificial Sequence
  Description of Artificial Sequence: Synthetic oligonucleotide
  Antisense strand to SEQ ID NO: 127160
uuuauuaagcgccuaauau

SEQ ID NO: 127162 - RNA, 19 nt, Artificial Sequence
  Description of Artificial Sequence: Synthetic oligonucleotide
  Sense strand starting at position 2605 of SEQ ID NO: 1623
agcggauccucucugaaac

SEQ ID NO: 127163 - RNA, 19 nt, Artificial Sequence
  Description of Artificial Sequence: Synthetic oligonucleotide
  Antisense strand to SEQ ID NO: 127162
guuucagagaggauccgcu

SEQ ID NO: 127164 - RNA, 19 nt, Artificial Sequence
  Description of Artificial Sequence: Synthetic oligonucleotide
  Sense strand starting at position 2555 of SEQ ID NO: 1623
ggugguuauuuguuguuca

SEQ ID NO: 127165 - RNA, 19 nt, Artificial Sequence
  Description of Artificial Sequence: Synthetic oligonucleotide
  Antisense strand to SEQ ID NO: 127164
ugaacaacaaauaaccacc

SEQ ID NO: 127166 - RNA, 19 nt, Artificial Sequence
  Description of Artificial Sequence: Synthetic oligonucleotide
  Sense strand starting at position 2455 of SEQ ID NO: 1623
aggagcuuccucugaagaa

SEQ ID NO: 127167 - RNA, 19 nt, Artificial Sequence
  Description of Artificial Sequence: Synthetic oligonucleotide
  Antisense strand to SEQ ID NO: 127166
uucuucagaggaagcuccu

SEQ ID NO: 127168 - RNA, 19 nt, Artificial Sequence
  Description of Artificial Sequence: Synthetic oligonucleotide
  Sense strand starting at position 2412 of SEQ ID NO: 1623
aaaggagugcuccaucuua

SEQ ID NO: 127169 - RNA, 19 nt, Artificial Sequence
  Description of Artificial Sequence: Synthetic oligonucleotide
  Antisense strand to SEQ ID NO: 127168
uaagauggagcacuccuuu

SEQ ID NO: 127170 - RNA, 19 nt, Artificial Sequence
  Description of Artificial Sequence: Synthetic oligonucleotide
  Sense strand starting at position 1540 of SEQ ID NO: 1623
agccuuuaccucgauugga

SEQ ID NO: 127171 - RNA, 19 nt, Artificial Sequence
  Description of Artificial Sequence: Synthetic oligonucleotide
  Antisense strand to SEQ ID NO: 127170
uccaaucgagguaaaggcu

SEQ ID NO: 127172 - RNA, 19 nt, Artificial Sequence
  Description of Artificial Sequence: Synthetic oligonucleotide
  Sense strand starting at position 1283 of SEQ ID NO: 1623
ggcugugucccggugaauc

SEQ ID NO: 127173 - RNA, 19 nt, Artificial Sequence
  Description of Artificial Sequence: Synthetic oligonucleotide
  Antisense strand to SEQ ID NO: 127172
gauucaccgggacacagcc

SEQ ID NO: 127174 - RNA, 19 nt, Artificial Sequence
  Description of Artificial Sequence: Synthetic oligonucleotide
  Sense strand starting at position 879 of SEQ ID NO: 1623
gauaaagugcccuggaguu

SEQ ID NO: 127175 - RNA, 19 nt, Artificial Sequence
  Description of Artificial Sequence: Synthetic oligonucleotide
  Antisense strand to SEQ ID NO: 127174
aacuccagggcacuuuauc

SEQ ID NO: 127176 - RNA, 19 nt, Artificial Sequence
  Description of Artificial Sequence: Synthetic oligonucleotide
  Sense strand starting at position 869 of SEQ ID NO: 1623
ggaggcucucgauaaagug

SEQ ID NO: 127177 - RNA, 19 nt, Artificial Sequence
  Description of Artificial Sequence: Synthetic oligonucleotide
  Antisense strand to SEQ ID NO: 127176
cacuuuaucgagagccucc

SEQ ID NO: 127178 - RNA, 19 nt, Artificial Sequence
  Description of Artificial Sequence: Synthetic oligonucleotide
  Sense strand starting at position 760 of SEQ ID NO: 1623
ggauuucugcauuggcuau

SEQ ID NO: 127179 - RNA, 19 nt, Artificial Sequence
  Description of Artificial Sequence: Synthetic oligonucleotide
  Antisense strand to SEQ ID NO: 127178
auagccaaugcagaaaucc

SEQ ID NO: 127180 - RNA, 19 nt, Artificial Sequence
  Description of Artificial Sequence: Synthetic oligonucleotide
  Sense strand starting at position 706 of SEQ ID NO: 1623
agacacuuguuucuaccua

SEQ ID NO: 127181 - RNA, 19 nt, Artificial Sequence
  Description of Artificial Sequence: Synthetic oligonucleotide
  Antisense strand to SEQ ID NO: 127180
uagguagaaacaagugucu

SEQ ID NO: 127182 - RNA, 19 nt, Artificial Sequence
  Description of Artificial Sequence: Synthetic oligonucleotide
  Sense strand starting at position 703 of SEQ ID NO: 1623
augagacacuuguuucuac

SEQ ID NO: 127183 - RNA, 19 nt, Artificial Sequence
  Description of Artificial Sequence: Synthetic oligonucleotide
  Antisense strand to SEQ ID NO: 127182
guagaaacaagugucucau

SEQ ID NO: 127184 - RNA, 19 nt, Artificial Sequence
  Description of Artificial Sequence: Synthetic oligonucleotide
  Sense strand starting at position 461 of SEQ ID NO: 1623
guaucaaaguguuuacuug

SEQ ID NO: 127185 - RNA, 19 nt, Artificial Sequence
  Description of Artificial Sequence: Synthetic oligonucleotide
  Antisense strand to SEQ ID NO: 127184
caaguaaacacuuugauac

SEQ ID NO: 127186 - RNA, 19 nt, Artificial Sequence
  Description of Artificial Sequence: Synthetic oligonucleotide
  Sense strand starting at position 417 of SEQ ID NO: 1623
ggaaucuuugcucacuugu

SEQ ID NO: 127187 - RNA, 19 nt, Artificial Sequence
  Description of Artificial Sequence: Synthetic oligonucleotide
  Antisense strand to SEQ ID NO: 127186
acaagugagcaaagauucc

SEQ ID NO: 127188 - RNA, 19 nt, Artificial Sequence
  Description of Artificial Sequence: Synthetic oligonucleotide
  Sense strand starting at position 414 of SEQ ID NO: 1623
aguggaaucuuugcucacu

SEQ ID NO: 127189 - RNA, 19 nt, Artificial Sequence
  Description of Artificial Sequence: Synthetic oligonucleotide
  Antisense strand to SEQ ID NO: 127188
agugagcaaagauuccacu

SEQ ID NO: 127190 - RNA, 19 nt, Artificial Sequence
  Description of Artificial Sequence: Synthetic oligonucleotide
  Sense strand starting at position 353 of SEQ ID NO: 1623
gguaaagucuuauuagcau

SEQ ID NO: 127191 - RNA, 19 nt, Artificial Sequence
  Description of Artificial Sequence: Synthetic oligonucleotide
  Antisense strand to SEQ ID NO: 127190
augcuaauaagacuuuacc

SEQ ID NO: 127192 - RNA, 19 nt, Artificial Sequence
  Description of Artificial Sequence: Synthetic oligonucleotide
  Sense strand starting at position 340 of SEQ ID NO: 1623
cuguuugguaauggguaaa

SEQ ID NO: 127193 - RNA, 19 nt, Artificial Sequence
  Description of Artificial Sequence: Synthetic oligonucleotide
  Antisense strand to SEQ ID NO: 127192
uuuacccauuaccaaacag

SEQ ID NO: 127194 - RNA, 19 nt, Artificial Sequence
  Description of Artificial Sequence: Synthetic oligonucleotide
  Sense strand starting at position 36 of SEQ ID NO: 1624
cuugaucauucuguggaaa

SEQ ID NO: 127195 - RNA, 19 nt, Artificial Sequence
  Description of Artificial Sequence: Synthetic oligonucleotide
  Antisense strand to SEQ ID NO: 127194
uuuccacagaaugaucaag

SEQ ID NO: 127196 - RNA, 19 nt, Artificial Sequence
  Description of Artificial Sequence: Synthetic oligonucleotide
  Sense strand starting at position 37 of SEQ ID NO: 1624
uugaucauucuguggaaau

SEQ ID NO: 127197 - RNA, 19 nt, Artificial Sequence
  Description of Artificial Sequence: Synthetic oligonucleotide
  Antisense strand to SEQ ID NO: 127196
auuuccacagaaugaucaa

SEQ ID NO: 127198 - RNA, 19 nt, Artificial Sequence
  Description of Artificial Sequence: Synthetic oligonucleotide
  Sense strand starting at position 90 of SEQ ID NO: 1624
aaggaaauuugggaguugu

SEQ ID NO: 127199 - RNA, 19 nt, Artificial Sequence
  Description of Artificial Sequence: Synthetic oligonucleotide
  Antisense strand to SEQ ID NO: 127198
acaacucccaaauuuccuu

SEQ ID NO: 127200 - RNA, 19 nt, Artificial Sequence
  Description of Artificial Sequence: Synthetic oligonucleotide
  Sense strand starting at position 203 of SEQ ID NO: 1624
ggaucacugcaaugggaga

SEQ ID NO: 127201 - RNA, 19 nt, Artificial Sequence
  Description of Artificial Sequence: Synthetic oligonucleotide
  Antisense strand to SEQ ID NO: 127200
ucucccauugcagugaucc

SEQ ID NO: 127202 - RNA, 19 nt, Artificial Sequence
  Description of Artificial Sequence: Synthetic oligonucleotide
  Sense strand starting at position 298 of SEQ ID NO: 1624
agaucaugaucacugccaa

SEQ ID NO: 127203 - RNA, 19 nt, Artificial Sequence
  Description of Artificial Sequence: Synthetic oligonucleotide
  Antisense strand to SEQ ID NO: 127202
uuggcagugaucaugaucu

SEQ ID NO: 127204 - RNA, 19 nt, Artificial Sequence
  Description of Artificial Sequence: Synthetic oligonucleotide
  Sense strand starting at position 338 of SEQ ID NO: 1624
aagaguucuugggugacaa

SEQ ID NO: 127205 - RNA, 19 nt, Artificial Sequence
  Description of Artificial Sequence: Synthetic oligonucleotide
  Antisense strand to SEQ ID NO: 127204
uugucacccaagaacucuu

SEQ ID NO: 127206 - RNA, 19 nt, Artificial Sequence
  Description of Artificial Sequence: Synthetic oligonucleotide
  Sense strand starting at position 339 of SEQ ID NO: 1624
agaguucuugggugacaaa

SEQ ID NO: 127207 - RNA, 19 nt, Artificial Sequence
  Description of Artificial Sequence: Synthetic oligonucleotide
  Antisense strand to SEQ ID NO: 127206
uuugucacccaagaacucu

SEQ ID NO: 127208 - RNA, 19 nt, Artificial Sequence
  Description of Artificial Sequence: Synthetic oligonucleotide
  Sense strand starting at position 340 of SEQ ID NO: 1624
gaguucuugggugacaaau

SEQ ID NO: 127209 - RNA, 19 nt, Artificial Sequence
  Description of Artificial Sequence: Synthetic oligonucleotide
  Antisense strand to SEQ ID NO: 127208
auuugucacccaagaacuc

SEQ ID NO: 127210 - RNA, 19 nt, Artificial Sequence
  Description of Artificial Sequence: Synthetic oligonucleotide
  Sense strand starting at position 346 of SEQ ID NO: 1624
uugggugacaaaugcagau

SEQ ID NO: 127211 - RNA, 19 nt, Artificial Sequence
  Description of Artificial Sequence: Synthetic oligonucleotide
  Antisense strand to SEQ ID NO: 127210
aucugcauuugucacccaa

SEQ ID NO: 127212 - RNA, 19 nt, Artificial Sequence
  Description of Artificial Sequence: Synthetic oligonucleotide
  Sense strand starting at position 515 of SEQ ID NO: 1624
aggagugcccuccagcaau

SEQ ID NO: 127213 - RNA, 19 nt, Artificial Sequence
  Description of Artificial Sequence: Synthetic oligonucleotide
  Antisense strand to SEQ ID NO: 127212
auugcuggagggcacuccu

SEQ ID NO: 127214 - RNA, 19 nt, Artificial Sequence
  Description of Artificial Sequence: Synthetic oligonucleotide
  Sense strand starting at position 659 of SEQ ID NO: 1624
cccuguaccucaucagacu

SEQ ID NO: 127215 - RNA, 19 nt, Artificial Sequence
  Description of Artificial Sequence: Synthetic oligonucleotide
  Antisense strand to SEQ ID NO: 127214
agucugaugagguacaggg

SEQ ID NO: 127216 - RNA, 19 nt, Artificial Sequence
  Description of Artificial Sequence: Synthetic oligonucleotide
  Sense strand starting at position 665 of SEQ ID NO: 1624
accucaucagacugagagu

SEQ ID NO: 127217 - RNA, 19 nt, Artificial Sequence
  Description of Artificial Sequence: Synthetic oligonucleotide
  Antisense strand to SEQ ID NO: 127216
acucucagucugaugaggu

SEQ ID NO: 127218 - RNA, 19 nt, Artificial Sequence
  Description of Artificial Sequence: Synthetic oligonucleotide
  Sense strand starting at position 674 of SEQ ID NO: 1624
gacugagaguucuugggag

SEQ ID NO: 127219 - RNA, 19 nt, Artificial Sequence
  Description of Artificial Sequence: Synthetic oligonucleotide
  Antisense strand to SEQ ID NO: 127218
cucccaagaacucucaguc

SEQ ID NO: 127220 - RNA, 19 nt, Artificial Sequence
  Description of Artificial Sequence: Synthetic oligonucleotide
  Sense strand starting at position 676 of SEQ ID NO: 1624
cugagaguucuugggaggu

SEQ ID NO: 127221 - RNA, 19 nt, Artificial Sequence
  Description of Artificial Sequence: Synthetic oligonucleotide
  Antisense strand to SEQ ID NO: 127220
accucccaagaacucucag

SEQ ID NO: 127222 - RNA, 19 nt, Artificial Sequence
  Description of Artificial Sequence: Synthetic oligonucleotide
  Sense strand starting at position 680 of SEQ ID NO: 1624
gaguucuugggagguugga

SEQ ID NO: 127223 - RNA, 19 nt, Artificial Sequence
  Description of Artificial Sequence: Synthetic oligonucleotide
  Antisense strand to SEQ ID NO: 127222
uccaaccucccaagaacuc

SEQ ID NO: 127224 - RNA, 19 nt, Artificial Sequence
  Description of Artificial Sequence: Synthetic oligonucleotide
  Sense strand starting at position 1086 of SEQ ID NO: 1624
gcgaaugagcaggaauucu

SEQ ID NO: 127225 - RNA, 19 nt, Artificial Sequence
  Description of Artificial Sequence: Synthetic oligonucleotide
  Antisense strand to SEQ ID NO: 127224
agaauuccugcucauucgc

SEQ ID NO: 127226 - RNA, 19 nt, Artificial Sequence
  Description of Artificial Sequence: Synthetic oligonucleotide
  Sense strand starting at position 1409 of SEQ ID NO: 1624
cagucuuuccauggaguaa

SEQ ID NO: 127227 - RNA, 19 nt, Artificial Sequence
  Description of Artificial Sequence: Synthetic oligonucleotide
  Antisense strand to SEQ ID NO: 127226
uuacuccauggaaagacug

SEQ ID NO: 127228 - RNA, 19 nt, Artificial Sequence
  Description of Artificial Sequence: Synthetic oligonucleotide
  Sense strand starting at position 1420 of SEQ ID NO: 1624
uggaguaaauucccauaac

SEQ ID NO: 127229 - RNA, 19 nt, Artificial Sequence
  Description of Artificial Sequence: Synthetic oligonucleotide
  Antisense strand to SEQ ID NO: 127228
guuaugggaauuuacucca

SEQ ID NO: 127230 - RNA, 19 nt, Artificial Sequence
  Description of Artificial Sequence: Synthetic oligonucleotide
  Sense strand starting at position 1550 of SEQ ID NO: 1624
ccaauugcugagcaaggau

SEQ ID NO: 127231 - RNA, 19 nt, Artificial Sequence
  Description of Artificial Sequence: Synthetic oligonucleotide
  Antisense strand to SEQ ID NO: 127230
auccuugcucagcaauugg

SEQ ID NO: 127232 - RNA, 19 nt, Artificial Sequence
  Description of Artificial Sequence: Synthetic oligonucleotide
  Sense strand starting at position 1864 of SEQ ID NO: 1624
agaggcuauccuugaaguu

SEQ ID NO: 127233 - RNA, 19 nt, Artificial Sequence
  Description of Artificial Sequence: Synthetic oligonucleotide
  Antisense strand to SEQ ID NO: 127232
aacuucaaggauagccucu

SEQ ID NO: 127234 - RNA, 19 nt, Artificial Sequence
  Description of Artificial Sequence: Synthetic oligonucleotide
  Sense strand starting at position 1865 of SEQ ID NO: 1624
gaggcuauccuugaaguuc

SEQ ID NO: 127235 - RNA, 19 nt, Artificial Sequence
  Description of Artificial Sequence: Synthetic oligonucleotide
  Antisense strand to SEQ ID NO: 127234
gaacuucaaggauagccuc

SEQ ID NO: 127236 - RNA, 19 nt, Artificial Sequence
  Description of Artificial Sequence: Synthetic oligonucleotide
  Sense strand starting at position 2129 of SEQ ID NO: 1624
ggugcuugugaacauucca

SEQ ID NO: 127237 - RNA, 19 nt, Artificial Sequence
  Description of Artificial Sequence: Synthetic oligonucleotide
  Antisense strand to SEQ ID NO: 127236
uggaauguucacaagcacc

SEQ ID NO: 127238 - RNA, 19 nt, Artificial Sequence
  Description of Artificial Sequence: Synthetic oligonucleotide
  Sense strand starting at position 2261 of SEQ ID NO: 1624
gggacuaugagaugcaacu

SEQ ID NO: 127239 - RNA, 19 nt, Artificial Sequence
  Description of Artificial Sequence: Synthetic oligonucleotide
  Antisense strand to SEQ ID NO: 127238
aguugcaucucauaguccc

SEQ ID NO: 127240 - RNA, 19 nt, Artificial Sequence
  Description of Artificial Sequence: Synthetic oligonucleotide
  Sense strand starting at position 2331 of SEQ ID NO: 1624
ggguguaagaaucauggca

SEQ ID NO: 127241 - RNA, 19 nt, Artificial Sequence
  Description of Artificial Sequence: Synthetic oligonucleotide
  Antisense strand to SEQ ID NO: 127240
ugccaugauucuuacaccc

SEQ ID NO: 127242 - RNA, 19 nt, Artificial Sequence
  Description of Artificial Sequence: Synthetic oligonucleotide
  Sense strand starting at position 2338 of SEQ ID NO: 1624
agaaucauggcacggaaga

SEQ ID NO: 127243 - RNA, 19 nt, Artificial Sequence
  Description of Artificial Sequence: Synthetic oligonucleotide
  Antisense strand to SEQ ID NO: 127242
ucuuccgugccaugauucu

SEQ ID NO: 127244 - RNA, 19 nt, Artificial Sequence
  Description of Artificial Sequence: Synthetic oligonucleotide
  Sense strand starting at position 2349 of SEQ ID NO: 1624
acggaagacaguuguccua

SEQ ID NO: 127245 - RNA, 19 nt, Artificial Sequence
  Description of Artificial Sequence: Synthetic oligonucleotide
  Antisense strand to SEQ ID NO: 127244
uaggacaacugucuuccgu

SEQ ID NO: 127246 - RNA, 19 nt, Artificial Sequence
  Description of Artificial Sequence: Synthetic oligonucleotide
  Sense strand starting at position 2351 of SEQ ID NO: 1624
ggaagacaguuguccuaga

SEQ ID NO: 127247 - RNA, 19 nt, Artificial Sequence
  Description of Artificial Sequence: Synthetic oligonucleotide
  Antisense strand to SEQ ID NO: 127246
ucuaggacaacugucuucc

SEQ ID NO: 127248 - RNA, 19 nt, Artificial Sequence
  Description of Artificial Sequence: Synthetic oligonucleotide
  Sense strand starting at position 2352 of SEQ ID NO: 1624
gaagacaguuguccuagaa

SEQ ID NO: 127249 - RNA, 19 nt, Artificial Sequence
  Description of Artificial Sequence: Synthetic oligonucleotide
  Antisense strand to SEQ ID NO: 127248
uucuaggacaacugucuuc

SEQ ID NO: 127250 - RNA, 19 nt, Artificial Sequence
  Description of Artificial Sequence: Synthetic oligonucleotide
  Sense strand starting at position 2356 of SEQ ID NO: 1624
acaguuguccuagaaaguc

SEQ ID NO: 127251 - RNA, 19 nt, Artificial Sequence
  Description of Artificial Sequence: Synthetic oligonucleotide
  Antisense strand to SEQ ID NO: 127250
gacuuucuaggacaacugu

SEQ ID NO: 127252 - RNA, 19 nt, Artificial Sequence
  Description of Artificial Sequence: Synthetic oligonucleotide
  Sense strand starting at position 2392 of SEQ ID NO: 1624
cuuagugugagugagaaau

SEQ ID NO: 127253 - RNA, 19 nt, Artificial Sequence
  Description of Artificial Sequence: Synthetic oligonucleotide
  Antisense strand to SEQ ID NO: 127252
auuucucacucacacuaag

SEQ ID NO: 127254 - RNA, 19 nt, Artificial Sequence
  Description of Artificial Sequence: Synthetic oligonucleotide
  Sense strand starting at position 2428 of SEQ ID NO: 1624
agcugaugauaauugagau

SEQ ID NO: 127255 - RNA, 19 nt, Artificial Sequence
  Description of Artificial Sequence: Synthetic oligonucleotide
  Antisense strand to SEQ ID NO: 127254
aucucaauuaucaucagcu

SEQ ID NO: 127256 - RNA, 19 nt, Artificial Sequence
  Description of Artificial Sequence: Synthetic oligonucleotide
  Sense strand starting at position 2429 of SEQ ID NO: 1624
gcugaugauaauugagaug

SEQ ID NO: 127257 - RNA, 19 nt, Artificial Sequence
  Description of Artificial Sequence: Synthetic oligonucleotide
  Antisense strand to SEQ ID NO: 127256
caucucaauuaucaucagc

SEQ ID NO: 127258 - RNA, 19 nt, Artificial Sequence
  Description of Artificial Sequence: Synthetic oligonucleotide
  Sense strand starting at position 2436 of SEQ ID NO: 1624
auaauugagaugggcaguu

SEQ ID NO: 127259 - RNA, 19 nt, Artificial Sequence
  Description of Artificial Sequence: Synthetic oligonucleotide
  Antisense strand to SEQ ID NO: 127258
aacugcccaucucaauuau

SEQ ID NO: 127260 - RNA, 19 nt, Artificial Sequence
  Description of Artificial Sequence: Synthetic oligonucleotide
  Sense strand starting at position 2494 of SEQ ID NO: 1624
agcuuuccucucgagaaua

SEQ ID NO: 127261 - RNA, 19 nt, Artificial Sequence
  Description of Artificial Sequence: Synthetic oligonucleotide
  Antisense strand to SEQ ID NO: 127260
uauucucgagaggaaagcu

SEQ ID NO: 127262 - RNA, 19 nt, Artificial Sequence
  Description of Artificial Sequence: Synthetic oligonucleotide
  Sense strand starting at position 2522 of SEQ ID NO: 1624
uccagugcucgacugugua

SEQ ID NO: 127263 - RNA, 19 nt, Artificial Sequence
  Description of Artificial Sequence: Synthetic oligonucleotide
  Antisense strand to SEQ ID NO: 127262
uacacagucgagcacugga

SEQ ID NO: 127264 - RNA, 19 nt, Artificial Sequence
  Description of Artificial Sequence: Synthetic oligonucleotide
  Sense strand starting at position 2770 of SEQ ID NO: 1624
cagagaucagggugaagcu

SEQ ID NO: 127265 - RNA, 19 nt, Artificial Sequence
  Description of Artificial Sequence: Synthetic oligonucleotide
  Antisense strand to SEQ ID NO: 127264
agcuucacccugaucucug

SEQ ID NO: 127266 - RNA, 19 nt, Artificial Sequence
  Description of Artificial Sequence: Synthetic oligonucleotide
  Sense strand starting at position 2942 of SEQ ID NO: 1624
uuguguaagccacaaagua

SEQ ID NO: 127267 - RNA, 19 nt, Artificial Sequence
  Description of Artificial Sequence: Synthetic oligonucleotide
  Antisense strand to SEQ ID NO: 127266
uacuuuguggcuuacacaa

SEQ ID NO: 127268 - RNA, 19 nt, Artificial Sequence
  Description of Artificial Sequence: Synthetic oligonucleotide
  Sense strand starting at position 3172 of SEQ ID NO: 1624
cucucuguauaucuggaua

SEQ ID NO: 127269 - RNA, 19 nt, Artificial Sequence
  Description of Artificial Sequence: Synthetic oligonucleotide
  Antisense strand to SEQ ID NO: 127268
uauccagauauacagagag

SEQ ID NO: 127270 - RNA, 19 nt, Artificial Sequence
  Description of Artificial Sequence: Synthetic oligonucleotide
  Sense strand starting at position 3678 of SEQ ID NO: 1624
agagggagguguucggaaa

SEQ ID NO: 127271 - RNA, 19 nt, Artificial Sequence
  Description of Artificial Sequence: Synthetic oligonucleotide
  Antisense strand to SEQ ID NO: 127270
uuuccgaacaccucccucu

SEQ ID NO: 127272 - RNA, 19 nt, Artificial Sequence
  Description of Artificial Sequence: Synthetic oligonucleotide
  Sense strand starting at position 3679 of SEQ ID NO: 1624
gagggagguguucggaaag

SEQ ID NO: 127273 - RNA, 19 nt, Artificial Sequence
  Description of Artificial Sequence: Synthetic oligonucleotide
  Antisense strand to SEQ ID NO: 127272
cuuuccgaacaccucccuc

SEQ ID NO: 127274 - RNA, 19 nt, Artificial Sequence
  Description of Artificial Sequence: Synthetic oligonucleotide
  Sense strand starting at position 382 of SEQ ID NO: 1625
cuaaacuuguagcucagaa

SEQ ID NO: 127275 - RNA, 19 nt, Artificial Sequence
  Description of Artificial Sequence: Synthetic oligonucleotide
  Antisense strand to SEQ ID NO: 127274
uucugagcuacaaguuuag

SEQ ID NO: 127276 - RNA, 19 nt, Artificial Sequence
  Description of Artificial Sequence: Synthetic oligonucleotide
  Sense strand starting at position 440 of SEQ ID NO: 1625
aacagucaugagugacaca

SEQ ID NO: 127277 - RNA, 19 nt, Artificial Sequence
  Description of Artificial Sequence: Synthetic oligonucleotide
  Antisense strand to SEQ ID NO: 127276
ugugucacucaugacuguu

SEQ ID NO: 127278 - RNA, 19 nt, Artificial Sequence
  Description of Artificial Sequence: Synthetic oligonucleotide
  Sense strand starting at position 557 of SEQ ID NO: 1625
gugacuuugcaacagucua

SEQ ID NO: 127279 - RNA, 19 nt, Artificial Sequence
  Description of Artificial Sequence: Synthetic oligonucleotide
  Antisense strand to SEQ ID NO: 127278
uagacuguugcaaagucac

SEQ ID NO: 127280 - RNA, 19 nt, Artificial Sequence
  Description of Artificial Sequence: Synthetic oligonucleotide
  Sense strand starting at position 816 of SEQ ID NO: 1625
cuugaucauucuguggaaa

SEQ ID NO: 127281 - RNA, 19 nt, Artificial Sequence
  Description of Artificial Sequence: Synthetic oligonucleotide
  Antisense strand to SEQ ID NO: 127280
uuuccacagaaugaucaag

SEQ ID NO: 127282 - RNA, 19 nt, Artificial Sequence
  Description of Artificial Sequence: Synthetic oligonucleotide
  Sense strand starting at position 817 of SEQ ID NO: 1625
uugaucauucuguggaaau

SEQ ID NO: 127283 - RNA, 19 nt, Artificial Sequence
  Description of Artificial Sequence: Synthetic oligonucleotide
  Antisense strand to SEQ ID NO: 127282
auuuccacagaaugaucaa

SEQ ID NO: 127284 - RNA, 19 nt, Artificial Sequence
  Description of Artificial Sequence: Synthetic oligonucleotide
  Sense strand starting at position 870 of SEQ ID NO: 1625
aaggaaauuugggaguugu

SEQ ID NO: 127285 - RNA, 19 nt, Artificial Sequence
  Description of Artificial Sequence: Synthetic oligonucleotide
  Antisense strand to SEQ ID NO: 127284
acaacucccaaauuuccuu

SEQ ID NO: 127286 - RNA, 19 nt, Artificial Sequence
  Description of Artificial Sequence: Synthetic oligonucleotide
  Sense strand starting at position 983 of SEQ ID NO: 1625
ggaucacugcaaugggaga

SEQ ID NO: 127287 - RNA, 19 nt, Artificial Sequence
  Description of Artificial Sequence: Synthetic oligonucleotide
  Antisense strand to SEQ ID NO: 127286
ucucccauugcagugaucc

SEQ ID NO: 127288 - RNA, 19 nt, Artificial Sequence
  Description of Artificial Sequence: Synthetic oligonucleotide
  Sense strand starting at position 1078 of SEQ ID NO: 1625
agaucaugaucacugccaa

SEQ ID NO: 127289 - RNA, 19 nt, Artificial Sequence
  Description of Artificial Sequence: Synthetic oligonucleotide
  Antisense strand to SEQ ID NO: 127288
uuggcagugaucaugaucu

SEQ ID NO: 127290 - RNA, 19 nt, Artificial Sequence
  Description of Artificial Sequence: Synthetic oligonucleotide
  Sense strand starting at position 1118 of SEQ ID NO: 1625
aagaguucuugggugacaa

SEQ ID NO: 127291 - RNA, 19 nt, Artificial Sequence
  Description of Artificial Sequence: Synthetic oligonucleotide
  Antisense strand to SEQ ID NO: 127290
uugucacccaagaacucuu

SEQ ID NO: 127292 - RNA, 19 nt, Artificial Sequence
  Description of Artificial Sequence: Synthetic oligonucleotide
  Sense strand starting at position 1119 of SEQ ID NO: 1625
agaguucuugggugacaaa

SEQ ID NO: 127293 - RNA, 19 nt, Artificial Sequence
  Description of Artificial Sequence: Synthetic oligonucleotide
  Antisense strand to SEQ ID NO: 127292
uuugucacccaagaacucu

SEQ ID NO: 127294 - RNA, 19 nt, Artificial Sequence
  Description of Artificial Sequence: Synthetic oligonucleotide
  Sense strand starting at position 1120 of SEQ ID NO: 1625
gaguucuugggugacaaau

SEQ ID NO: 127295 - RNA, 19 nt, Artificial Sequence
  Description of Artificial Sequence: Synthetic oligonucleotide
  Antisense strand to SEQ ID NO: 127294
auuugucacccaagaacuc

SEQ ID NO: 127296 - RNA, 19 nt, Artificial Sequence
  Description of Artificial Sequence: Synthetic oligonucleotide
  Sense strand starting at position 1126 of SEQ ID NO: 1625
uugggugacaaaugcagau

SEQ ID NO: 127297 - RNA, 19 nt, Artificial Sequence
  Description of Artificial Sequence: Synthetic oligonucleotide
  Antisense strand to SEQ ID NO: 127296
aucugcauuugucacccaa

SEQ ID NO: 127298 - RNA, 19 nt, Artificial Sequence
  Description of Artificial Sequence: Synthetic oligonucleotide
  Sense strand starting at position 1295 of SEQ ID NO: 1625
aggagugcccuccagcaau

SEQ ID NO: 127299 - RNA, 19 nt, Artificial Sequence
  Description of Artificial Sequence: Synthetic oligonucleotide
  Antisense strand to SEQ ID NO: 127298
auugcuggagggcacuccu

SEQ ID NO: 127300 - RNA, 19 nt, Artificial Sequence
  Description of Artificial Sequence: Synthetic oligonucleotide
  Sense strand starting at position 1439 of SEQ ID NO: 1625
cccuguaccucaucagacu

SEQ ID NO: 127301 - RNA, 19 nt, Artificial Sequence
  Description of Artificial Sequence: Synthetic oligonucleotide
  Antisense strand to SEQ ID NO: 127300
agucugaugagguacaggg

SEQ ID NO: 127302 - RNA, 19 nt, Artificial Sequence
  Description of Artificial Sequence: Synthetic oligonucleotide
  Sense strand starting at position 1445 of SEQ ID NO: 1625
accucaucagacugagagu

SEQ ID NO: 127303 - RNA, 19 nt, Artificial Sequence
  Description of Artificial Sequence: Synthetic oligonucleotide
  Antisense strand to SEQ ID NO: 127302
acucucagucugaugaggu

SEQ ID NO: 127304 - RNA, 19 nt, Artificial Sequence
  Description of Artificial Sequence: Synthetic oligonucleotide
  Sense strand starting at position 1454 of SEQ ID NO: 1625
gacugagaguucuugggag

SEQ ID NO: 127305 - RNA, 19 nt, Artificial Sequence
  Description of Artificial Sequence: Synthetic oligonucleotide
  Antisense strand to SEQ ID NO: 127304
cucccaagaacucucaguc

SEQ ID NO: 127306 - RNA, 19 nt, Artificial Sequence
  Description of Artificial Sequence: Synthetic oligonucleotide
  Sense strand starting at position 1456 of SEQ ID NO: 1625
cugagaguucuugggaggu

SEQ ID NO: 127307 - RNA, 19 nt, Artificial Sequence
  Description of Artificial Sequence: Synthetic oligonucleotide
  Antisense strand to SEQ ID NO: 127306
accucccaagaacucucag

SEQ ID NO: 127308 - RNA, 19 nt, Artificial Sequence
  Description of Artificial Sequence: Synthetic oligonucleotide
  Sense strand starting at position 1460 of SEQ ID NO: 1625
gaguucuugggagguugga

SEQ ID NO: 127309 - RNA, 19 nt, Artificial Sequence
  Description of Artificial Sequence: Synthetic oligonucleotide
  Antisense strand to SEQ ID NO: 127308
uccaaccucccaagaacuc

SEQ ID NO: 127310 - RNA, 19 nt, Artificial Sequence
  Description of Artificial Sequence: Synthetic oligonucleotide
  Sense strand starting at position 1866 of SEQ ID NO: 1625
gcgaaugagcaggaauucu

SEQ ID NO: 127311 - RNA, 19 nt, Artificial Sequence
  Description of Artificial Sequence: Synthetic oligonucleotide
  Antisense strand to SEQ ID NO: 127310
agaauuccugcucauucgc

SEQ ID NO: 127312 - RNA, 19 nt, Artificial Sequence
  Description of Artificial Sequence: Synthetic oligonucleotide
  Sense strand starting at position 2189 of SEQ ID NO: 1625
cagucuuuccauggaguaa

SEQ ID NO: 127313 - RNA, 19 nt, Artificial Sequence
  Description of Artificial Sequence: Synthetic oligonucleotide
  Antisense strand to SEQ ID NO: 127312
uuacuccauggaaagacug

SEQ ID NO: 127314 - RNA, 19 nt, Artificial Sequence
  Description of Artificial Sequence: Synthetic oligonucleotide
  Sense strand starting at position 2200 of SEQ ID NO: 1625
uggaguaaauucccauaac

SEQ ID NO: 127315 - RNA, 19 nt, Artificial Sequence
  Description of Artificial Sequence: Synthetic oligonucleotide
  Antisense strand to SEQ ID NO: 127314
guuaugggaauuuacucca

SEQ ID NO: 127316 - RNA, 19 nt, Artificial Sequence
  Description of Artificial Sequence: Synthetic oligonucleotide
  Sense strand starting at position 2330 of SEQ ID NO: 1625
ccaauugcugagcaaggau

SEQ ID NO: 127317 - RNA, 19 nt, Artificial Sequence
  Description of Artificial Sequence: Synthetic oligonucleotide
  Antisense strand to SEQ ID NO: 127316
auccuugcucagcaauugg

SEQ ID NO: 127318 - RNA, 19 nt, Artificial Sequence
  Description of Artificial Sequence: Synthetic oligonucleotide
  Sense strand starting at position 2644 of SEQ ID NO: 1625
agaggcuauccuugaaguu

SEQ ID NO: 127319 - RNA, 19 nt, Artificial Sequence
  Description of Artificial Sequence: Synthetic oligonucleotide
  Antisense strand to SEQ ID NO: 127318
aacuucaaggauagccucu

SEQ ID NO: 127320 - RNA, 19 nt, Artificial Sequence
  Description of Artificial Sequence: Synthetic oligonucleotide
  Sense strand starting at position 2645 of SEQ ID NO: 1625
gaggcuauccuugaaguuc

SEQ ID NO: 127321 - RNA, 19 nt, Artificial Sequence
  Description of Artificial Sequence: Synthetic oligonucleotide
  Antisense strand to SEQ ID NO: 127320
gaacuucaaggauagccuc

SEQ ID NO: 127322 - RNA, 19 nt, Artificial Sequence
  Description of Artificial Sequence: Synthetic oligonucleotide
  Sense strand starting at position 3041 of SEQ ID NO: 1625
gggacuaugagaugcaacu

SEQ ID NO: 127323 - RNA, 19 nt, Artificial Sequence
  Description of Artificial Sequence: Synthetic oligonucleotide
  Antisense strand to SEQ ID NO: 127322
aguugcaucucauaguccc

SEQ ID NO: 127324 - RNA, 19 nt, Artificial Sequence
  Description of Artificial Sequence: Synthetic oligonucleotide
  Sense strand starting at position 3111 of SEQ ID NO: 1625
ggguguaagaaucauggca

SEQ ID NO: 127325 - RNA, 19 nt, Artificial Sequence
  Description of Artificial Sequence: Synthetic oligonucleotide
  Antisense strand to SEQ ID NO: 127324
ugccaugauucuuacaccc

SEQ ID NO: 127326 - RNA, 19 nt, Artificial Sequence
  Description of Artificial Sequence: Synthetic oligonucleotide
  Sense strand starting at position 3118 of SEQ ID NO: 1625
agaaucauggcacggaaga

SEQ ID NO: 127327 - RNA, 19 nt, Artificial Sequence
  Description of Artificial Sequence: Synthetic oligonucleotide
  Antisense strand to SEQ ID NO: 127326
ucuuccgugccaugauucu

SEQ ID NO: 127328 - RNA, 19 nt, Artificial Sequence
  Description of Artificial Sequence: Synthetic oligonucleotide
  Sense strand starting at position 3129 of SEQ ID NO: 1625
acggaagacaguuguccua

SEQ ID NO: 127329 - RNA, 19 nt, Artificial Sequence
  Description of Artificial Sequence: Synthetic oligonucleotide
  Antisense strand to SEQ ID NO: 127328
uaggacaacugucuuccgu

SEQ ID NO: 127330 - RNA, 19 nt, Artificial Sequence
  Description of Artificial Sequence: Synthetic oligonucleotide
  Sense strand starting at position 3131 of SEQ ID NO: 1625
ggaagacaguuguccuaga

SEQ ID NO: 127331 - RNA, 19 nt, Artificial Sequence
  Description of Artificial Sequence: Synthetic oligonucleotide
  Antisense strand to SEQ ID NO: 127330
ucuaggacaacugucuucc

SEQ ID NO: 127332 - RNA, 19 nt, Artificial Sequence
  Description of Artificial Sequence: Synthetic oligonucleotide
  Sense strand starting at position 3132 of SEQ ID NO: 1625
gaagacaguuguccuagaa

SEQ ID NO: 127333 - RNA, 19 nt, Artificial Sequence
  Description of Artificial Sequence: Synthetic oligonucleotide
  Antisense strand to SEQ ID NO: 127332
uucuaggacaacugucuuc

SEQ ID NO: 127334 - RNA, 19 nt, Artificial Sequence
  Description of Artificial Sequence: Synthetic oligonucleotide
  Sense strand starting at position 3136 of SEQ ID NO: 1625
acaguuguccuagaaaguc

SEQ ID NO: 127335 - RNA, 19 nt, Artificial Sequence
  Description of Artificial Sequence: Synthetic oligonucleotide
  Antisense strand to SEQ ID NO: 127334
gacuuucuaggacaacugu

SEQ ID NO: 127336 - RNA, 19 nt, Artificial Sequence
  Description of Artificial Sequence: Synthetic oligonucleotide
  Sense strand starting at position 3172 of SEQ ID NO: 1625
cuuagugugagugagaaau

SEQ ID NO: 127337 - RNA, 19 nt, Artificial Sequence
  Description of Artificial Sequence: Synthetic oligonucleotide
  Antisense strand to SEQ ID NO: 127336
auuucucacucacacuaag

SEQ ID NO: 127338 - RNA, 19 nt, Artificial Sequence
  Description of Artificial Sequence: Synthetic oligonucleotide
  Sense strand starting at position 3208 of SEQ ID NO: 1625
agcugaugauaauugagau

SEQ ID NO: 127339 - RNA, 19 nt, Artificial Sequence
  Description of Artificial Sequence: Synthetic oligonucleotide
  Antisense strand to SEQ ID NO: 127338
aucucaauuaucaucagcu

SEQ ID NO: 127340 - RNA, 19 nt, Artificial Sequence
  Description of Artificial Sequence: Synthetic oligonucleotide
  Sense strand starting at position 3209 of SEQ ID NO: 1625
gcugaugauaauugagaug

SEQ ID NO: 127341 - RNA, 19 nt, Artificial Sequence
  Description of Artificial Sequence: Synthetic oligonucleotide
  Antisense strand to SEQ ID NO: 127340
caucucaauuaucaucagc

SEQ ID NO: 127342 - RNA, 19 nt, Artificial Sequence
  Description of Artificial Sequence: Synthetic oligonucleotide
  Sense strand starting at position 3216 of SEQ ID NO: 1625
auaauugagaugggcaguu

SEQ ID NO: 127343 - RNA, 19 nt, Artificial Sequence
  Description of Artificial Sequence: Synthetic oligonucleotide
  Antisense strand to SEQ ID NO: 127342
aacugcccaucucaauuau

SEQ ID NO: 127344 - RNA, 19 nt, Artificial Sequence
  Description of Artificial Sequence: Synthetic oligonucleotide
  Sense strand starting at position 3274 of SEQ ID NO: 1625
agcuuuccucucgagaaua

SEQ ID NO: 127345 - RNA, 19 nt, Artificial Sequence
  Description of Artificial Sequence: Synthetic oligonucleotide
  Antisense strand to SEQ ID NO: 127344
uauucucgagaggaaagcu

SEQ ID NO: 127346 - RNA, 19 nt, Artificial Sequence
  Description of Artificial Sequence: Synthetic oligonucleotide
  Sense strand starting at position 3302 of SEQ ID NO: 1625
uccagugcucgacugugua

SEQ ID NO: 127347 - RNA, 19 nt, Artificial Sequence
  Description of Artificial Sequence: Synthetic oligonucleotide
  Antisense strand to SEQ ID NO: 127346
uacacagucgagcacugga

SEQ ID NO: 127348 - RNA, 19 nt, Artificial Sequence
  Description of Artificial Sequence: Synthetic oligonucleotide
  Sense strand starting at position 3550 of SEQ ID NO: 1625
cagagaucagggugaagcu

SEQ ID NO: 127349 - RNA, 19 nt, Artificial Sequence
  Description of Artificial Sequence: Synthetic oligonucleotide
  Antisense strand to SEQ ID NO: 127348
agcuucacccugaucucug

SEQ ID NO: 127350 - RNA, 19 nt, Artificial Sequence
  Description of Artificial Sequence: Synthetic oligonucleotide
  Sense strand starting at position 3722 of SEQ ID NO: 1625
uuguguaagccacaaagua

SEQ ID NO: 127351 - RNA, 19 nt, Artificial Sequence
  Description of Artificial Sequence: Synthetic oligonucleotide
  Antisense strand to SEQ ID NO: 127350
uacuuuguggcuuacacaa

SEQ ID NO: 127352 - RNA, 19 nt, Artificial Sequence
  Description of Artificial Sequence: Synthetic oligonucleotide
  Sense strand starting at position 3952 of SEQ ID NO: 1625
cucucuguauaucuggaua

SEQ ID NO: 127353 - RNA, 19 nt, Artificial Sequence
  Description of Artificial Sequence: Synthetic oligonucleotide
  Antisense strand to SEQ ID NO: 127352
uauccagauauacagagag

SEQ ID NO: 127354 - RNA, 19 nt, Artificial Sequence
  Description of Artificial Sequence: Synthetic oligonucleotide
  Sense strand starting at position 161 of SEQ ID NO: 1626
guagcauuuccugagcccu

SEQ ID NO: 127355 - RNA, 19 nt, Artificial Sequence
  Description of Artificial Sequence: Synthetic oligonucleotide
  Antisense strand to SEQ ID NO: 127354
agggcucaggaaaugcuac

SEQ ID NO: 127356 - RNA, 19 nt, Artificial Sequence
  Description of Artificial Sequence: Synthetic oligonucleotide
  Sense strand starting at position 296 of SEQ ID NO: 1626
gcagcuggagaaugauaga

SEQ ID NO: 127357 - RNA, 19 nt, Artificial Sequence
  Description of Artificial Sequence: Synthetic oligonucleotide
  Antisense strand to SEQ ID NO: 127356
ucuaucauucuccagcugc

SEQ ID NO: 127358 - RNA, 19 nt, Artificial Sequence
  Description of Artificial Sequence: Synthetic oligonucleotide
  Sense strand starting at position 401 of SEQ ID NO: 1626
ggagacaacugucuguaaa

SEQ ID NO: 127359 - RNA, 19 nt, Artificial Sequence
  Description of Artificial Sequence: Synthetic oligonucleotide
  Antisense strand to SEQ ID NO: 127358
uuuacagacaguugucucc

SEQ ID NO: 127360 - RNA, 19 nt, Artificial Sequence
  Description of Artificial Sequence: Synthetic oligonucleotide
  Sense strand starting at position 649 of SEQ ID NO: 1626
aucagcuuuggcuaaugau

SEQ ID NO: 127361 - RNA, 19 nt, Artificial Sequence
  Description of Artificial Sequence: Synthetic oligonucleotide
  Antisense strand to SEQ ID NO: 127360
aucauuagccaaagcugau

SEQ ID NO: 127362 - RNA, 19 nt, Artificial Sequence
  Description of Artificial Sequence: Synthetic oligonucleotide
  Sense strand starting at position 855 of SEQ ID NO: 1626
cgugcauucccugcgagaa

SEQ ID NO: 127363 - RNA, 19 nt, Artificial Sequence
  Description of Artificial Sequence: Synthetic oligonucleotide
  Antisense strand to SEQ ID NO: 127362
uucucgcagggaaugcacg

SEQ ID NO: 127364 - RNA, 19 nt, Artificial Sequence
  Description of Artificial Sequence: Synthetic oligonucleotide
  Sense strand starting at position 936 of SEQ ID NO: 1626
gcgucaguugcccuuccaa

SEQ ID NO: 127365 - RNA, 19 nt, Artificial Sequence
  Description of Artificial Sequence: Synthetic oligonucleotide
  Antisense strand to SEQ ID NO: 127364
uuggaagggcaacugacgc

SEQ ID NO: 127366 - RNA, 19 nt, Artificial Sequence
  Description of Artificial Sequence: Synthetic oligonucleotide
  Sense strand starting at position 1002 of SEQ ID NO: 1626
gagcuccaggagugauauu

SEQ ID NO: 127367 - RNA, 19 nt, Artificial Sequence
  Description of Artificial Sequence: Synthetic oligonucleotide
  Antisense strand to SEQ ID NO: 127366
aauaucacuccuggagcuc

SEQ ID NO: 127368 - RNA, 19 nt, Artificial Sequence
  Description of Artificial Sequence: Synthetic oligonucleotide
  Sense strand starting at position 1036 of SEQ ID NO: 1626
gggacauguuucuccauac

SEQ ID NO: 127369 - RNA, 19 nt, Artificial Sequence
  Description of Artificial Sequence: Synthetic oligonucleotide
  Antisense strand to SEQ ID NO: 127368
guauggagaaacauguccc

SEQ ID NO: 127370 - RNA, 19 nt, Artificial Sequence
  Description of Artificial Sequence: Synthetic oligonucleotide
  Sense strand starting at position 1037 of SEQ ID NO: 1626
ggacauguuucuccauacu

SEQ ID NO: 127371 - RNA, 19 nt, Artificial Sequence
  Description of Artificial Sequence: Synthetic oligonucleotide
  Antisense strand to SEQ ID NO: 127370
aguauggagaaacaugucc

SEQ ID NO: 127372 - RNA, 19 nt, Artificial Sequence
  Description of Artificial Sequence: Synthetic oligonucleotide
  Sense strand starting at position 1048 of SEQ ID NO: 1626
uccauacuagguuaaaugu

SEQ ID NO: 127373 - RNA, 19 nt, Artificial Sequence
  Description of Artificial Sequence: Synthetic oligonucleotide
  Antisense strand to SEQ ID NO: 127372
acauuuaaccuaguaugga

SEQ ID NO: 127374 - RNA, 19 nt, Artificial Sequence
  Description of Artificial Sequence: Synthetic oligonucleotide
  Sense strand starting at position 1283 of SEQ ID NO: 1626
uggauucccucuccuagaa

SEQ ID NO: 127375 - RNA, 19 nt, Artificial Sequence
  Description of Artificial Sequence: Synthetic oligonucleotide
  Antisense strand to SEQ ID NO: 127374
uucuaggagagggaaucca

SEQ ID NO: 127376 - RNA, 19 nt, Artificial Sequence
  Description of Artificial Sequence: Synthetic oligonucleotide
  Sense strand starting at position 1312 of SEQ ID NO: 1626
ggacuagugagucaguugu

SEQ ID NO: 127377 - RNA, 19 nt, Artificial Sequence
  Description of Artificial Sequence: Synthetic oligonucleotide
  Antisense strand to SEQ ID NO: 127376
acaacugacucacuagucc

SEQ ID NO: 127378 - RNA, 19 nt, Artificial Sequence
  Description of Artificial Sequence: Synthetic oligonucleotide
  Sense strand starting at position 1322 of SEQ ID NO: 1626
gucaguugugcugugccua

SEQ ID NO: 127379 - RNA, 19 nt, Artificial Sequence
  Description of Artificial Sequence: Synthetic oligonucleotide
  Antisense strand to SEQ ID NO: 127378
uaggcacagcacaacugac

SEQ ID NO: 127380 - RNA, 19 nt, Artificial Sequence
  Description of Artificial Sequence: Synthetic oligonucleotide
  Sense strand starting at position 1424 of SEQ ID NO: 1626
ggcauaauugcagagacua

SEQ ID NO: 127381 - RNA, 19 nt, Artificial Sequence
  Description of Artificial Sequence: Synthetic oligonucleotide
  Antisense strand to SEQ ID NO: 127380
uagucucugcaauuaugcc

SEQ ID NO: 127382 - RNA, 19 nt, Artificial Sequence
  Description of Artificial Sequence: Synthetic oligonucleotide
  Sense strand starting at position 1459 of SEQ ID NO: 1626
ugaggcccuuuauuaagaa

SEQ ID NO: 127383 - RNA, 19 nt, Artificial Sequence
  Description of Artificial Sequence: Synthetic oligonucleotide
  Antisense strand to SEQ ID NO: 127382
uucuuaauaaagggccuca

SEQ ID NO: 127384 - RNA, 19 nt, Artificial Sequence
  Description of Artificial Sequence: Synthetic oligonucleotide
  Sense strand starting at position 1498 of SEQ ID NO: 1626
agcaguaaaccauguuuag

SEQ ID NO: 127385 - RNA, 19 nt, Artificial Sequence
  Description of Artificial Sequence: Synthetic oligonucleotide
  Antisense strand to SEQ ID NO: 127384
cuaaacaugguuuacugcu

SEQ ID NO: 127386 - RNA, 19 nt, Artificial Sequence
  Description of Artificial Sequence: Synthetic oligonucleotide
  Sense strand starting at position 1572 of SEQ ID NO: 1626
ggcccugacccuuaugagu

SEQ ID NO: 127387 - RNA, 19 nt, Artificial Sequence
  Description of Artificial Sequence: Synthetic oligonucleotide
  Antisense strand to SEQ ID NO: 127386
acucauaagggucagggcc

SEQ ID NO: 127388 - RNA, 19 nt, Artificial Sequence
  Description of Artificial Sequence: Synthetic oligonucleotide
  Sense strand starting at position 1640 of SEQ ID NO: 1626
gacccuggguuucucaaga

SEQ ID NO: 127389 - RNA, 19 nt, Artificial Sequence
  Description of Artificial Sequence: Synthetic oligonucleotide
  Antisense strand to SEQ ID NO: 127388
ucuugagaaacccaggguc

SEQ ID NO: 127390 - RNA, 19 nt, Artificial Sequence
  Description of Artificial Sequence: Synthetic oligonucleotide
  Sense strand starting at position 1645 of SEQ ID NO: 1626
uggguuucucaagacccau

SEQ ID NO: 127391 - RNA, 19 nt, Artificial Sequence
  Description of Artificial Sequence: Synthetic oligonucleotide
  Antisense strand to SEQ ID NO: 127390
augggucuugagaaaccca

SEQ ID NO: 127392 - RNA, 19 nt, Artificial Sequence
  Description of Artificial Sequence: Synthetic oligonucleotide
  Sense strand starting at position 1709 of SEQ ID NO: 1626
uucuguuauuugccaggca

SEQ ID NO: 127393 - RNA, 19 nt, Artificial Sequence
  Description of Artificial Sequence: Synthetic oligonucleotide
  Antisense strand to SEQ ID NO: 127392
ugccuggcaaauaacagaa

SEQ ID NO: 127394 - RNA, 19 nt, Artificial Sequence
  Description of Artificial Sequence: Synthetic oligonucleotide
  Sense strand starting at position 1712 of SEQ ID NO: 1626
uguuauuugccaggcaaga

SEQ ID NO: 127395 - RNA, 19 nt, Artificial Sequence
  Description of Artificial Sequence: Synthetic oligonucleotide
  Antisense strand to SEQ ID NO: 127394
ucuugccuggcaaauaaca

SEQ ID NO: 127396 - RNA, 19 nt, Artificial Sequence
  Description of Artificial Sequence: Synthetic oligonucleotide
  Sense strand starting at position 1750 of SEQ ID NO: 1626
ggcuuugagcaugaacuuu

SEQ ID NO: 127397 - RNA, 19 nt, Artificial Sequence
  Description of Artificial Sequence: Synthetic oligonucleotide
  Antisense strand to SEQ ID NO: 127396
aaaguucaugcucaaagcc

SEQ ID NO: 127398 - RNA, 19 nt, Artificial Sequence
  Description of Artificial Sequence: Synthetic oligonucleotide
  Sense strand starting at position 1780 of SEQ ID NO: 1626
aaugauaaguggccuuaga

SEQ ID NO: 127399 - RNA, 19 nt, Artificial Sequence
  Description of Artificial Sequence: Synthetic oligonucleotide
  Antisense strand to SEQ ID NO: 127398
ucuaaggccacuuaucauu

SEQ ID NO: 127400 - RNA, 19 nt, Artificial Sequence
  Description of Artificial Sequence: Synthetic oligonucleotide
  Sense strand starting at position 1861 of SEQ ID NO: 1626
cagccauauccguaauaug

SEQ ID NO: 127401 - RNA, 19 nt, Artificial Sequence
  Description of Artificial Sequence: Synthetic oligonucleotide
  Antisense strand to SEQ ID NO: 127400
cauauuacggauauggcug

SEQ ID NO: 127402 - RNA, 19 nt, Artificial Sequence
  Description of Artificial Sequence: Synthetic oligonucleotide
  Sense strand starting at position 1907 of SEQ ID NO: 1626
guuugacccuccucugaaa

SEQ ID NO: 127403 - RNA, 19 nt, Artificial Sequence
  Description of Artificial Sequence: Synthetic oligonucleotide
  Antisense strand to SEQ ID NO: 127402
uuucagaggagggucaaac

SEQ ID NO: 127404 - RNA, 19 nt, Artificial Sequence
  Description of Artificial Sequence: Synthetic oligonucleotide
  Sense strand starting at position 2044 of SEQ ID NO: 1626
uucgaaauaucaccagauc

SEQ ID NO: 127405 - RNA, 19 nt, Artificial Sequence
  Description of Artificial Sequence: Synthetic oligonucleotide
  Antisense strand to SEQ ID NO: 127404
gaucuggugauauuucgaa

SEQ ID NO: 127406 - RNA, 19 nt, Artificial Sequence
  Description of Artificial Sequence: Synthetic oligonucleotide
  Sense strand starting at position 2158 of SEQ ID NO: 1626
uuugcuaacccagaugaau

SEQ ID NO: 127407 - RNA, 19 nt, Artificial Sequence
  Description of Artificial Sequence: Synthetic oligonucleotide
  Antisense strand to SEQ ID NO: 127406
auucaucuggguuagcaaa

SEQ ID NO: 127408 - RNA, 19 nt, Artificial Sequence
  Description of Artificial Sequence: Synthetic oligonucleotide
  Sense strand starting at position 2245 of SEQ ID NO: 1626
accacaguucuaggcagaa

SEQ ID NO: 127409 - RNA, 19 nt, Artificial Sequence
  Description of Artificial Sequence: Synthetic oligonucleotide
  Antisense strand to SEQ ID NO: 127408
uucugccuagaacuguggu

SEQ ID NO: 127410 - RNA, 19 nt, Artificial Sequence
  Description of Artificial Sequence: Synthetic oligonucleotide
  Sense strand starting at position 2378 of SEQ ID NO: 1626
caggaaagguauccucaau

SEQ ID NO: 127411 - RNA, 19 nt, Artificial Sequence
  Description of Artificial Sequence: Synthetic oligonucleotide
  Antisense strand to SEQ ID NO: 127410
auugaggauaccuuuccug

SEQ ID NO: 127412 - RNA, 19 nt, Artificial Sequence
  Description of Artificial Sequence: Synthetic oligonucleotide
  Sense strand starting at position 2498 of SEQ ID NO: 1626
gaagcauuaucugugauau

SEQ ID NO: 127413 - RNA, 19 nt, Artificial Sequence
  Description of Artificial Sequence: Synthetic oligonucleotide
  Antisense strand to SEQ ID NO: 127412
auaucacagauaaugcuuc

SEQ ID NO: 127414 - RNA, 19 nt, Artificial Sequence
  Description of Artificial Sequence: Synthetic oligonucleotide
  Sense strand starting at position 2697 of SEQ ID NO: 1626
gcguguguucccuuuccuu

SEQ ID NO: 127415 - RNA, 19 nt, Artificial Sequence
  Description of Artificial Sequence: Synthetic oligonucleotide
  Antisense strand to SEQ ID NO: 127414
aaggaaagggaacacacgc

SEQ ID NO: 127416 - RNA, 19 nt, Artificial Sequence
  Description of Artificial Sequence: Synthetic oligonucleotide
  Sense strand starting at position 2865 of SEQ ID NO: 1626
acugccaugcuugacuaau

SEQ ID NO: 127417 - RNA, 19 nt, Artificial Sequence
  Description of Artificial Sequence: Synthetic oligonucleotide
  Antisense strand to SEQ ID NO: 127416
auuagucaagcauggcagu

SEQ ID NO: 127418 - RNA, 19 nt, Artificial Sequence
  Description of Artificial Sequence: Synthetic oligonucleotide
  Sense strand starting at position 3067 of SEQ ID NO: 1626
ggguaaacgcuguauagag

SEQ ID NO: 127419 - RNA, 19 nt, Artificial Sequence
  Description of Artificial Sequence: Synthetic oligonucleotide
  Antisense strand to SEQ ID NO: 127418
cucuauacagcguuuaccc

SEQ ID NO: 127420 - RNA, 19 nt, Artificial Sequence
  Description of Artificial Sequence: Synthetic oligonucleotide
  Sense strand starting at position 3074 of SEQ ID NO: 1626
cgcuguauagaggauguau

SEQ ID NO: 127421 - RNA, 19 nt, Artificial Sequence
  Description of Artificial Sequence: Synthetic oligonucleotide
  Antisense strand to SEQ ID NO: 127420
auacauccucuauacagcg

SEQ ID NO: 127422 - RNA, 19 nt, Artificial Sequence
  Description of Artificial Sequence: Synthetic oligonucleotide
  Sense strand starting at position 3076 of SEQ ID NO: 1626
cuguauagaggauguauau

SEQ ID NO: 127423 - RNA, 19 nt, Artificial Sequence
  Description of Artificial Sequence: Synthetic oligonucleotide
  Antisense strand to SEQ ID NO: 127422
auauacauccucuauacag

SEQ ID NO: 127424 - RNA, 19 nt, Artificial Sequence
  Description of Artificial Sequence: Synthetic oligonucleotide
  Sense strand starting at position 3100 of SEQ ID NO: 1626
ucuuaagaguggucacauc

SEQ ID NO: 127425 - RNA, 19 nt, Artificial Sequence
  Description of Artificial Sequence: Synthetic oligonucleotide
  Antisense strand to SEQ ID NO: 127424
gaugugaccacucuuaaga

SEQ ID NO: 127426 - RNA, 19 nt, Artificial Sequence
  Description of Artificial Sequence: Synthetic oligonucleotide
  Sense strand starting at position 3603 of SEQ ID NO: 1626
ucuaucagucuccaguaga

SEQ ID NO: 127427 - RNA, 19 nt, Artificial Sequence
  Description of Artificial Sequence: Synthetic oligonucleotide
  Antisense strand to SEQ ID NO: 127426
ucuacuggagacugauaga

SEQ ID NO: 127428 - RNA, 19 nt, Artificial Sequence
  Description of Artificial Sequence: Synthetic oligonucleotide
  Sense strand starting at position 3661 of SEQ ID NO: 1626
gagguaagcaaucggaucu

SEQ ID NO: 127429 - RNA, 19 nt, Artificial Sequence
  Description of Artificial Sequence: Synthetic oligonucleotide
  Antisense strand to SEQ ID NO: 127428
agauccgauugcuuaccuc

SEQ ID NO: 127430 - RNA, 19 nt, Artificial Sequence
  Description of Artificial Sequence: Synthetic oligonucleotide
  Sense strand starting at position 3758 of SEQ ID NO: 1626
cuuaaauuagcuggauaua

SEQ ID NO: 127431 - RNA, 19 nt, Artificial Sequence
  Description of Artificial Sequence: Synthetic oligonucleotide
  Antisense strand to SEQ ID NO: 127430
uauauccagcuaauuuaag

SEQ ID NO: 127432 - RNA, 19 nt, Artificial Sequence
  Description of Artificial Sequence: Synthetic oligonucleotide
  Sense strand starting at position 3761 of SEQ ID NO: 1626
aaauuagcuggauauaugu

SEQ ID NO: 127433 - RNA, 19 nt, Artificial Sequence
  Description of Artificial Sequence: Synthetic oligonucleotide
  Antisense strand to SEQ ID NO: 127432
acauauauccagcuaauuu

SEQ ID NO: 127434 - RNA, 19 nt, Artificial Sequence
  Description of Artificial Sequence: Synthetic oligonucleotide
  Sense strand starting at position 31 of SEQ ID NO: 1627
ugaauucaagugggagguu

SEQ ID NO: 127435 - RNA, 19 nt, Artificial Sequence
  Description of Artificial Sequence: Synthetic oligonucleotide
  Antisense strand to SEQ ID NO: 127434
aaccucccacuugaauuca

SEQ ID NO: 127436 - RNA, 19 nt, Artificial Sequence
  Description of Artificial Sequence: Synthetic oligonucleotide
  Sense strand starting at position 90 of SEQ ID NO: 1627
gugcaacuccuagagauga

SEQ ID NO: 127437 - RNA, 19 nt, Artificial Sequence
  Description of Artificial Sequence: Synthetic oligonucleotide
  Antisense strand to SEQ ID NO: 127436
ucaucucuaggaguugcac

SEQ ID NO: 127438 - RNA, 19 nt, Artificial Sequence
  Description of Artificial Sequence: Synthetic oligonucleotide
  Sense strand starting at position 100 of SEQ ID NO: 1627
uagagaugauuagagaaug

SEQ ID NO: 127439 - RNA, 19 nt, Artificial Sequence
  Description of Artificial Sequence: Synthetic oligonucleotide
  Antisense strand to SEQ ID NO: 127438
cauucucuaaucaucucua

SEQ ID NO: 127440 - RNA, 19 nt, Artificial Sequence
  Description of Artificial Sequence: Synthetic oligonucleotide
  Sense strand starting at position 175 of SEQ ID NO: 1627
cccucuucgagugaguuua

SEQ ID NO: 127441 - RNA, 19 nt, Artificial Sequence
  Description of Artificial Sequence: Synthetic oligonucleotide
  Antisense strand to SEQ ID NO: 127440
uaaacucacucgaagaggg

SEQ ID NO: 127442 - RNA, 19 nt, Artificial Sequence
  Description of Artificial Sequence: Synthetic oligonucleotide
  Sense strand starting at position 183 of SEQ ID NO: 1627
gagugaguuuacuuaugga

SEQ ID NO: 127443 - RNA, 19 nt, Artificial Sequence
  Description of Artificial Sequence: Synthetic oligonucleotide
  Antisense strand to SEQ ID NO: 127442
uccauaaguaaacucacuc

SEQ ID NO: 127444 - RNA, 19 nt, Artificial Sequence
  Description of Artificial Sequence: Synthetic oligonucleotide
  Sense strand starting at position 219 of SEQ ID NO: 1627
ggcaaaugaagucaauagu

SEQ ID NO: 127445 - RNA, 19 nt, Artificial Sequence
  Description of Artificial Sequence: Synthetic oligonucleotide
  Antisense strand to SEQ ID NO: 127444
acuauugacuucauuugcc

SEQ ID NO: 127446 - RNA, 19 nt, Artificial Sequence
  Description of Artificial Sequence: Synthetic oligonucleotide
  Sense strand starting at position 456 of SEQ ID NO: 1627
agagaagacuugcuaagcu

SEQ ID NO: 127447 - RNA, 19 nt, Artificial Sequence
  Description of Artificial Sequence: Synthetic oligonucleotide
  Antisense strand to SEQ ID NO: 127446
agcuuagcaagucuucucu

SEQ ID NO: 127448 - RNA, 19 nt, Artificial Sequence
  Description of Artificial Sequence: Synthetic oligonucleotide
  Sense strand starting at position 570 of SEQ ID NO: 1627
gagaguccaccuugcagau

SEQ ID NO: 127449 - RNA, 19 nt, Artificial Sequence
  Description of Artificial Sequence: Synthetic oligonucleotide
  Antisense strand to SEQ ID NO: 127448
aucugcaagguggacucuc

SEQ ID NO: 127450 - RNA, 19 nt, Artificial Sequence
  Description of Artificial Sequence: Synthetic oligonucleotide
  Sense strand starting at position 720 of SEQ ID NO: 1627
ucuuucuugccaugugaaa

SEQ ID NO: 127451 - RNA, 19 nt, Artificial Sequence
  Description of Artificial Sequence: Synthetic oligonucleotide
  Antisense strand to SEQ ID NO: 127450
uuucacauggcaagaaaga

SEQ ID NO: 127452 - RNA, 19 nt, Artificial Sequence
  Description of Artificial Sequence: Synthetic oligonucleotide
  Sense strand starting at position 773 of SEQ ID NO: 1627
uggucuuacuugccauaau

SEQ ID NO: 127453 - RNA, 19 nt, Artificial Sequence
  Description of Artificial Sequence: Synthetic oligonucleotide
  Antisense strand to SEQ ID NO: 127452
auuauggcaaguaagacca

SEQ ID NO: 127454 - RNA, 19 nt, Artificial Sequence
  Description of Artificial Sequence: Synthetic oligonucleotide
  Sense strand starting at position 1106 of SEQ ID NO: 1627
uauugaaagguuuggugau

SEQ ID NO: 127455 - RNA, 19 nt, Artificial Sequence
  Description of Artificial Sequence: Synthetic oligonucleotide
  Antisense strand to SEQ ID NO: 127454
aucaccaaaccuuucaaua

SEQ ID NO: 127456 - RNA, 19 nt, Artificial Sequence
  Description of Artificial Sequence: Synthetic oligonucleotide
  Sense strand starting at position 1182 of SEQ ID NO: 1627
cuguguauuugaucucuac

SEQ ID NO: 127457 - RNA, 19 nt, Artificial Sequence
  Description of Artificial Sequence: Synthetic oligonucleotide
  Antisense strand to SEQ ID NO: 127456
guagagaucaaauacacag

SEQ ID NO: 127458 - RNA, 19 nt, Artificial Sequence
  Description of Artificial Sequence: Synthetic oligonucleotide
  Sense strand starting at position 1247 of SEQ ID NO: 1627
uugcaaauuuccuaauggu

SEQ ID NO: 127459 - RNA, 19 nt, Artificial Sequence
  Description of Artificial Sequence: Synthetic oligonucleotide
  Antisense strand to SEQ ID NO: 127458
accauuaggaaauuugcaa

SEQ ID NO: 127460 - RNA, 19 nt, Artificial Sequence
  Description of Artificial Sequence: Synthetic oligonucleotide
  Sense strand starting at position 1269 of SEQ ID NO: 1627
ugcuguaauccuggagaca

SEQ ID NO: 127461 - RNA, 19 nt, Artificial Sequence
  Description of Artificial Sequence: Synthetic oligonucleotide
  Antisense strand to SEQ ID NO: 127460
ugucuccaggauuacagca

SEQ ID NO: 127462 - RNA, 19 nt, Artificial Sequence
  Description of Artificial Sequence: Synthetic oligonucleotide
  Sense strand starting at position 1270 of SEQ ID NO: 1627
gcuguaauccuggagacau

SEQ ID NO: 127463 - RNA, 19 nt, Artificial Sequence
  Description of Artificial Sequence: Synthetic oligonucleotide
  Antisense strand to SEQ ID NO: 127462
augucuccaggauuacagc

SEQ ID NO: 127464 - RNA, 19 nt, Artificial Sequence
  Description of Artificial Sequence: Synthetic oligonucleotide
  Sense strand starting at position 1272 of SEQ ID NO: 1627
uguaauccuggagacaugu

SEQ ID NO: 127465 - RNA, 19 nt, Artificial Sequence
  Description of Artificial Sequence: Synthetic oligonucleotide
  Antisense strand to SEQ ID NO: 127464
acaugucuccaggauuaca

SEQ ID NO: 127466 - RNA, 19 nt, Artificial Sequence
  Description of Artificial Sequence: Synthetic oligonucleotide
  Sense strand starting at position 1281 of SEQ ID NO: 1627
ggagacauguuccucuaga

SEQ ID NO: 127467 - RNA, 19 nt, Artificial Sequence
  Description of Artificial Sequence: Synthetic oligonucleotide
  Antisense strand to SEQ ID NO: 127466
ucuagaggaacaugucucc

SEQ ID NO: 127468 - RNA, 19 nt, Artificial Sequence
  Description of Artificial Sequence: Synthetic oligonucleotide
  Sense strand starting at position 1282 of SEQ ID NO: 1627
gagacauguuccucuagag

SEQ ID NO: 127469 - RNA, 19 nt, Artificial Sequence
  Description of Artificial Sequence: Synthetic oligonucleotide
  Antisense strand to SEQ ID NO: 127468
cucuagaggaacaugucuc

SEQ ID NO: 127470 - RNA, 19 nt, Artificial Sequence
  Description of Artificial Sequence: Synthetic oligonucleotide
  Sense strand starting at position 1413 of SEQ ID NO: 1627
cuuuauauuuggucugcuu

SEQ ID NO: 127471 - RNA, 19 nt, Artificial Sequence
  Description of Artificial Sequence: Synthetic oligonucleotide
  Antisense strand to SEQ ID NO: 127470
aagcagaccaaauauaaag

SEQ ID NO: 127472 - RNA, 19 nt, Artificial Sequence
  Description of Artificial Sequence: Synthetic oligonucleotide
  Sense strand starting at position 1415 of SEQ ID NO: 1627
uuauauuuggucugcuuaa

SEQ ID NO: 127473 - RNA, 19 nt, Artificial Sequence
  Description of Artificial Sequence: Synthetic oligonucleotide
  Antisense strand to SEQ ID NO: 127472
uuaagcagaccaaauauaa

SEQ ID NO: 127474 - RNA, 19 nt, Artificial Sequence
  Description of Artificial Sequence: Synthetic oligonucleotide
  Sense strand starting at position 1555 of SEQ ID NO: 1627
gcuccuauucagugggaga

SEQ ID NO: 127475 - RNA, 19 nt, Artificial Sequence
  Description of Artificial Sequence: Synthetic oligonucleotide
  Antisense strand to SEQ ID NO: 127474
ucucccacugaauaggagc

SEQ ID NO: 127476 - RNA, 19 nt, Artificial Sequence
  Description of Artificial Sequence: Synthetic oligonucleotide
  Sense strand starting at position 1582 of SEQ ID NO: 1627
ugaagugaccuguguccaa

SEQ ID NO: 127477 - RNA, 19 nt, Artificial Sequence
  Description of Artificial Sequence: Synthetic oligonucleotide
  Antisense strand to SEQ ID NO: 127476
uuggacacaggucacuuca

SEQ ID NO: 127478 - RNA, 19 nt, Artificial Sequence
  Description of Artificial Sequence: Synthetic oligonucleotide
  Sense strand starting at position 1596 of SEQ ID NO: 1627
uccaaagcgucaucaucau

SEQ ID NO: 127479 - RNA, 19 nt, Artificial Sequence
  Description of Artificial Sequence: Synthetic oligonucleotide
  Antisense strand to SEQ ID NO: 127478
augaugaugacgcuuugga

SEQ ID NO: 127480 - RNA, 19 nt, Artificial Sequence
  Description of Artificial Sequence: Synthetic oligonucleotide
  Sense strand starting at position 1635 of SEQ ID NO: 1627
cuggacuucuaguuugaac

SEQ ID NO: 127481 - RNA, 19 nt, Artificial Sequence
  Description of Artificial Sequence: Synthetic oligonucleotide
  Antisense strand to SEQ ID NO: 127480
guucaaacuagaaguccag

SEQ ID NO: 127482 - RNA, 19 nt, Artificial Sequence
  Description of Artificial Sequence: Synthetic oligonucleotide
  Sense strand starting at position 1637 of SEQ ID NO: 1627
ggacuucuaguuugaacuu

SEQ ID NO: 127483 - RNA, 19 nt, Artificial Sequence
  Description of Artificial Sequence: Synthetic oligonucleotide
  Antisense strand to SEQ ID NO: 127482
aaguucaaacuagaagucc

SEQ ID NO: 127484 - RNA, 19 nt, Artificial Sequence
  Description of Artificial Sequence: Synthetic oligonucleotide
  Sense strand starting at position 1739 of SEQ ID NO: 1627
acugaaggcucuuugcaga

SEQ ID NO: 127485 - RNA, 19 nt, Artificial Sequence
  Description of Artificial Sequence: Synthetic oligonucleotide
  Antisense strand to SEQ ID NO: 127484
ucugcaaagagccuucagu

SEQ ID NO: 127486 - RNA, 19 nt, Artificial Sequence
  Description of Artificial Sequence: Synthetic oligonucleotide
  Sense strand starting at position 2491 of SEQ ID NO: 1627
acauacacucaguguagaa

SEQ ID NO: 127487 - RNA, 19 nt, Artificial Sequence
  Description of Artificial Sequence: Synthetic oligonucleotide
  Antisense strand to SEQ ID NO: 127486
uucuacacugaguguaugu

SEQ ID NO: 127488 - RNA, 19 nt, Artificial Sequence
  Description of Artificial Sequence: Synthetic oligonucleotide
  Sense strand starting at position 3253 of SEQ ID NO: 1627
aauguagacuugcugaauc

SEQ ID NO: 127489 - RNA, 19 nt, Artificial Sequence
  Description of Artificial Sequence: Synthetic oligonucleotide
  Antisense strand to SEQ ID NO: 127488
gauucagcaagucuacauu

SEQ ID NO: 127490 - RNA, 19 nt, Artificial Sequence
  Description of Artificial Sequence: Synthetic oligonucleotide
  Sense strand starting at position 3255 of SEQ ID NO: 1627
uguagacuugcugaaucaa

SEQ ID NO: 127491 - RNA, 19 nt, Artificial Sequence
  Description of Artificial Sequence: Synthetic oligonucleotide
  Antisense strand to SEQ ID NO: 127490
uugauucagcaagucuaca

SEQ ID NO: 127492 - RNA, 19 nt, Artificial Sequence
  Description of Artificial Sequence: Synthetic oligonucleotide
  Sense strand starting at position 3296 of SEQ ID NO: 1627
aggcaauugauauguguug

SEQ ID NO: 127493 - RNA, 19 nt, Artificial Sequence
  Description of Artificial Sequence: Synthetic oligonucleotide
  Antisense strand to SEQ ID NO: 127492
caacacauaucaauugccu

SEQ ID NO: 127494 - RNA, 19 nt, Artificial Sequence
  Description of Artificial Sequence: Synthetic oligonucleotide
  Sense strand starting at position 3297 of SEQ ID NO: 1627
ggcaauugauauguguuga

SEQ ID NO: 127495 - RNA, 19 nt, Artificial Sequence
  Description of Artificial Sequence: Synthetic oligonucleotide
  Antisense strand to SEQ ID NO: 127494
ucaacacauaucaauugcc

SEQ ID NO: 127496 - RNA, 19 nt, Artificial Sequence
  Description of Artificial Sequence: Synthetic oligonucleotide
  Sense strand starting at position 3298 of SEQ ID NO: 1627
gcaauugauauguguugac

SEQ ID NO: 127497 - RNA, 19 nt, Artificial Sequence
  Description of Artificial Sequence: Synthetic oligonucleotide
  Antisense strand to SEQ ID NO: 127496
gucaacacauaucaauugc

SEQ ID NO: 127498 - RNA, 19 nt, Artificial Sequence
  Description of Artificial Sequence: Synthetic oligonucleotide
  Sense strand starting at position 3302 of SEQ ID NO: 1627
uugauauguguugacaacu

SEQ ID NO: 127499 - RNA, 19 nt, Artificial Sequence
  Description of Artificial Sequence: Synthetic oligonucleotide
  Antisense strand to SEQ ID NO: 127498
aguugucaacacauaucaa

SEQ ID NO: 127500 - RNA, 19 nt, Artificial Sequence
  Description of Artificial Sequence: Synthetic oligonucleotide
  Sense strand starting at position 3330 of SEQ ID NO: 1627
gaaggucugcccuaguuua

SEQ ID NO: 127501 - RNA, 19 nt, Artificial Sequence
  Description of Artificial Sequence: Synthetic oligonucleotide
  Antisense strand to SEQ ID NO: 127500
uaaacuagggcagaccuuc

SEQ ID NO: 127502 - RNA, 19 nt, Artificial Sequence
  Description of Artificial Sequence: Synthetic oligonucleotide
  Sense strand starting at position 3493 of SEQ ID NO: 1627
cuguuagauggcugucuaa

SEQ ID NO: 127503 - RNA, 19 nt, Artificial Sequence
  Description of Artificial Sequence: Synthetic oligonucleotide
  Antisense strand to SEQ ID NO: 127502
uuagacagccaucuaacag

SEQ ID NO: 127504 - RNA, 19 nt, Artificial Sequence
  Description of Artificial Sequence: Synthetic oligonucleotide
  Sense strand starting at position 3496 of SEQ ID NO: 1627
uuagauggcugucuaagga

SEQ ID NO: 127505 - RNA, 19 nt, Artificial Sequence
  Description of Artificial Sequence: Synthetic oligonucleotide
  Antisense strand to SEQ ID NO: 127504
uccuuagacagccaucuaa

SEQ ID NO: 127506 - RNA, 19 nt, Artificial Sequence
  Description of Artificial Sequence: Synthetic oligonucleotide
  Sense strand starting at position 3727 of SEQ ID NO: 1627
agcagaugccucuggcaca

SEQ ID NO: 127507 - RNA, 19 nt, Artificial Sequence
  Description of Artificial Sequence: Synthetic oligonucleotide
  Antisense strand to SEQ ID NO: 127506
ugugccagaggcaucugcu

SEQ ID NO: 127508 - RNA, 19 nt, Artificial Sequence
  Description of Artificial Sequence: Synthetic oligonucleotide
  Sense strand starting at position 3799 of SEQ ID NO: 1627
ugugguaccuuacccuaua

SEQ ID NO: 127509 - RNA, 19 nt, Artificial Sequence
  Description of Artificial Sequence: Synthetic oligonucleotide
  Antisense strand to SEQ ID NO: 127508
uauaggguaagguaccaca

SEQ ID NO: 127510 - RNA, 19 nt, Artificial Sequence
  Description of Artificial Sequence: Synthetic oligonucleotide
  Sense strand starting at position 3916 of SEQ ID NO: 1627
ccacaagcccuuuguugau

SEQ ID NO: 127511 - RNA, 19 nt, Artificial Sequence
  Description of Artificial Sequence: Synthetic oligonucleotide
  Antisense strand to SEQ ID NO: 127510
aucaacaaagggcuugugg

SEQ ID NO: 127512 - RNA, 19 nt, Artificial Sequence
  Description of Artificial Sequence: Synthetic oligonucleotide
  Sense strand starting at position 3922 of SEQ ID NO: 1627
gcccuuuguugauuccaga

SEQ ID NO: 127513 - RNA, 19 nt, Artificial Sequence
  Description of Artificial Sequence: Synthetic oligonucleotide
  Antisense strand to SEQ ID NO: 127512
ucuggaaucaacaaagggc

SEQ ID NO: 127514 - RNA, 19 nt, Artificial Sequence
  Description of Artificial Sequence: Synthetic oligonucleotide
  Sense strand starting at position 255 of SEQ ID NO: 1628
ggagucagccuuuggaaac

SEQ ID NO: 127515 - RNA, 19 nt, Artificial Sequence
  Description of Artificial Sequence: Synthetic oligonucleotide
  Antisense strand to SEQ ID NO: 127514
guuuccaaaggcugacucc

SEQ ID NO: 127516 - RNA, 19 nt, Artificial Sequence
  Description of Artificial Sequence: Synthetic oligonucleotide
  Sense strand starting at position 303 of SEQ ID NO: 1628
gcucguucuguccgaagga

SEQ ID NO: 127517 - RNA, 19 nt, Artificial Sequence
  Description of Artificial Sequence: Synthetic oligonucleotide
  Antisense strand to SEQ ID NO: 127516
uccuucggacagaacgagc

SEQ ID NO: 127518 - RNA, 19 nt, Artificial Sequence
  Description of Artificial Sequence: Synthetic oligonucleotide
  Sense strand starting at position 525 of SEQ ID NO: 1628
uccacuguuacgugguaac

SEQ ID NO: 127519 - RNA, 19 nt, Artificial Sequence
  Description of Artificial Sequence: Synthetic oligonucleotide
  Antisense strand to SEQ ID NO: 127518
guuaccacguaacagugga

SEQ ID NO: 127520 - RNA, 19 nt, Artificial Sequence
  Description of Artificial Sequence: Synthetic oligonucleotide
  Sense strand starting at position 567 of SEQ ID NO: 1628
agggucuggcucugauaag

SEQ ID NO: 127521 - RNA, 19 nt, Artificial Sequence
  Description of Artificial Sequence: Synthetic oligonucleotide
  Antisense strand to SEQ ID NO: 127520
cuuaucagagccagacccu

SEQ ID NO: 127522 - RNA, 19 nt, Artificial Sequence
  Description of Artificial Sequence: Synthetic oligonucleotide
  Sense strand starting at position 1048 of SEQ ID NO: 1628
cagccauagucguuguacu

SEQ ID NO: 127523 - RNA, 19 nt, Artificial Sequence
  Description of Artificial Sequence: Synthetic oligonucleotide
  Antisense strand to SEQ ID NO: 127522
aguacaacgacuauggcug

SEQ ID NO: 127524 - RNA, 19 nt, Artificial Sequence
  Description of Artificial Sequence: Synthetic oligonucleotide
  Sense strand starting at position 1071 of SEQ ID NO: 1628
ggcggacuugccugucauc

SEQ ID NO: 127525 - RNA, 19 nt, Artificial Sequence
  Description of Artificial Sequence: Synthetic oligonucleotide
  Antisense strand to SEQ ID NO: 127524
gaugacaggcaaguccgcc

SEQ ID NO: 127526 - RNA, 19 nt, Artificial Sequence
  Description of Artificial Sequence: Synthetic oligonucleotide
  Sense strand starting at position 1081 of SEQ ID NO: 1628
ccugucaucuucucgauca

SEQ ID NO: 127527 - RNA, 19 nt, Artificial Sequence
  Description of Artificial Sequence: Synthetic oligonucleotide
  Antisense strand to SEQ ID NO: 127526
ugaucgagaagaugacagg

SEQ ID NO: 127528 - RNA, 19 nt, Artificial Sequence
  Description of Artificial Sequence: Synthetic oligonucleotide
  Sense strand starting at position 1083 of SEQ ID NO: 1628
ugucaucuucucgaucauc

SEQ ID NO: 127529 - RNA, 19 nt, Artificial Sequence
  Description of Artificial Sequence: Synthetic oligonucleotide
  Antisense strand to SEQ ID NO: 127528
gaugaucgagaagaugaca

SEQ ID NO: 127530 - RNA, 19 nt, Artificial Sequence
  Description of Artificial Sequence: Synthetic oligonucleotide
  Sense strand starting at position 1229 of SEQ ID NO: 1628
cucuccaguuguccaguua

SEQ ID NO: 127531 - RNA, 19 nt, Artificial Sequence
  Description of Artificial Sequence: Synthetic oligonucleotide
  Antisense strand to SEQ ID NO: 127530
uaacuggacaacuggagag

SEQ ID NO: 127532 - RNA, 19 nt, Artificial Sequence
  Description of Artificial Sequence: Synthetic oligonucleotide
  Sense strand starting at position 1230 of SEQ ID NO: 1628
ucuccaguuguccaguuaa

SEQ ID NO: 127533 - RNA, 19 nt, Artificial Sequence
  Description of Artificial Sequence: Synthetic oligonucleotide
  Antisense strand to SEQ ID NO: 127532
uuaacuggacaacuggaga

SEQ ID NO: 127534 - RNA, 19 nt, Artificial Sequence
  Description of Artificial Sequence: Synthetic oligonucleotide
  Sense strand starting at position 1276 of SEQ ID NO: 1628
caacaacaaccgugguaau

SEQ ID NO: 127535 - RNA, 19 nt, Artificial Sequence
  Description of Artificial Sequence: Synthetic oligonucleotide
  Antisense strand to SEQ ID NO: 127534
auuaccacgguuguuguug

SEQ ID NO: 127536 - RNA, 19 nt, Artificial Sequence
  Description of Artificial Sequence: Synthetic oligonucleotide
  Sense strand starting at position 1277 of SEQ ID NO: 1628
aacaacaaccgugguaaua

SEQ ID NO: 127537 - RNA, 19 nt, Artificial Sequence
  Description of Artificial Sequence: Synthetic oligonucleotide
  Antisense strand to SEQ ID NO: 127536
uauuaccacgguuguuguu

SEQ ID NO: 127538 - RNA, 19 nt, Artificial Sequence
  Description of Artificial Sequence: Synthetic oligonucleotide
  Sense strand starting at position 1286 of SEQ ID NO: 1628
cgugguaauaaguaauaau

SEQ ID NO: 127539 - RNA, 19 nt, Artificial Sequence
  Description of Artificial Sequence: Synthetic oligonucleotide
  Antisense strand to SEQ ID NO: 127538
auuauuacuuauuaccacg

SEQ ID NO: 127540 - RNA, 19 nt, Artificial Sequence
  Description of Artificial Sequence: Synthetic oligonucleotide
  Sense strand starting at position 1297 of SEQ ID NO: 1628
guaauaauauugccaguga

SEQ ID NO: 127541 - RNA, 19 nt, Artificial Sequence
  Description of Artificial Sequence: Synthetic oligonucleotide
  Antisense strand to SEQ ID NO: 127540
ucacuggcaauauuauuac

SEQ ID NO: 127542 - RNA, 19 nt, Artificial Sequence
  Description of Artificial Sequence: Synthetic oligonucleotide
  Sense strand starting at position 1308 of SEQ ID NO: 1628
gccagugacauccguugca

SEQ ID NO: 127543 - RNA, 19 nt, Artificial Sequence
  Description of Artificial Sequence: Synthetic oligonucleotide
  Antisense strand to SEQ ID NO: 127542
ugcaacggaugucacuggc

SEQ ID NO: 127544 - RNA, 19 nt, Artificial Sequence
  Description of Artificial Sequence: Synthetic oligonucleotide
  Sense strand starting at position 1454 of SEQ ID NO: 1628
ggugucagcccuuaucuca

SEQ ID NO: 127545 - RNA, 19 nt, Artificial Sequence
  Description of Artificial Sequence: Synthetic oligonucleotide
  Antisense strand to SEQ ID NO: 127544
ugagauaagggcugacacc

SEQ ID NO: 127546 - RNA, 19 nt, Artificial Sequence
  Description of Artificial Sequence: Synthetic oligonucleotide
  Sense strand starting at position 1461 of SEQ ID NO: 1628
gcccuuaucucacccagga

SEQ ID NO: 127547 - RNA, 19 nt, Artificial Sequence
  Description of Artificial Sequence: Synthetic oligonucleotide
  Antisense strand to SEQ ID NO: 127546
uccugggugagauaagggc

SEQ ID NO: 127548 - RNA, 19 nt, Artificial Sequence
  Description of Artificial Sequence: Synthetic oligonucleotide
  Sense strand starting at position 1496 of SEQ ID NO: 1628
ggucucaucagauggcacu

SEQ ID NO: 127549 - RNA, 19 nt, Artificial Sequence
  Description of Artificial Sequence: Synthetic oligonucleotide
  Antisense strand to SEQ ID NO: 127548
agugccaucugaugagacc

SEQ ID NO: 127550 - RNA, 19 nt, Artificial Sequence
  Description of Artificial Sequence: Synthetic oligonucleotide
  Sense strand starting at position 1604 of SEQ ID NO: 1628
gcagguuggagccaaacau

SEQ ID NO: 127551 - RNA, 19 nt, Artificial Sequence
  Description of Artificial Sequence: Synthetic oligonucleotide
  Antisense strand to SEQ ID NO: 127550
auguuuggcuccaaccugc

SEQ ID NO: 127552 - RNA, 19 nt, Artificial Sequence
  Description of Artificial Sequence: Synthetic oligonucleotide
  Sense strand starting at position 1877 of SEQ ID NO: 1628
ggcugaaggucacaaagau

SEQ ID NO: 127553 - RNA, 19 nt, Artificial Sequence
  Description of Artificial Sequence: Synthetic oligonucleotide
  Antisense strand to SEQ ID NO: 127552
aucuuugugaccuucagcc

SEQ ID NO: 127554 - RNA, 19 nt, Artificial Sequence
  Description of Artificial Sequence: Synthetic oligonucleotide
  Sense strand starting at position 2019 of SEQ ID NO: 1628
cagggagccuccuaauuag

SEQ ID NO: 127555 - RNA, 19 nt, Artificial Sequence
  Description of Artificial Sequence: Synthetic oligonucleotide
  Antisense strand to SEQ ID NO: 127554
cuaauuaggaggcucccug

SEQ ID NO: 127556 - RNA, 19 nt, Artificial Sequence
  Description of Artificial Sequence: Synthetic oligonucleotide
  Sense strand starting at position 2022 of SEQ ID NO: 1628
ggagccuccuaauuaguua

SEQ ID NO: 127557 - RNA, 19 nt, Artificial Sequence
  Description of Artificial Sequence: Synthetic oligonucleotide
  Antisense strand to SEQ ID NO: 127556
uaacuaauuaggaggcucc

SEQ ID NO: 127558 - RNA, 19 nt, Artificial Sequence
  Description of Artificial Sequence: Synthetic oligonucleotide
  Sense strand starting at position 2053 of SEQ ID NO: 1628
cuguccacucccugucauu

SEQ ID NO: 127559 - RNA, 19 nt, Artificial Sequence
  Description of Artificial Sequence: Synthetic oligonucleotide
  Antisense strand to SEQ ID NO: 127558
aaugacagggaguggacag

SEQ ID NO: 127560 - RNA, 19 nt, Artificial Sequence
  Description of Artificial Sequence: Synthetic oligonucleotide
  Sense strand starting at position 2064 of SEQ ID NO: 1628
cugucauuaacccgugagu

SEQ ID NO: 127561 - RNA, 19 nt, Artificial Sequence
  Description of Artificial Sequence: Synthetic oligonucleotide
  Antisense strand to SEQ ID NO: 127560
acucacggguuaaugacag

SEQ ID NO: 127562 - RNA, 19 nt, Artificial Sequence
  Description of Artificial Sequence: Synthetic oligonucleotide
  Sense strand starting at position 2075 of SEQ ID NO: 1628
ccgugagugcccagugaug

SEQ ID NO: 127563 - RNA, 19 nt, Artificial Sequence
  Description of Artificial Sequence: Synthetic oligonucleotide
  Antisense strand to SEQ ID NO: 127562
caucacugggcacucacgg

SEQ ID NO: 127564 - RNA, 19 nt, Artificial Sequence
  Description of Artificial Sequence: Synthetic oligonucleotide
  Sense strand starting at position 2077 of SEQ ID NO: 1628
gugagugcccagugaugca

SEQ ID NO: 127565 - RNA, 19 nt, Artificial Sequence
  Description of Artificial Sequence: Synthetic oligonucleotide
  Antisense strand to SEQ ID NO: 127564
ugcaucacugggcacucac

SEQ ID NO: 127566 - RNA, 19 nt, Artificial Sequence
  Description of Artificial Sequence: Synthetic oligonucleotide
  Sense strand starting at position 2082 of SEQ ID NO: 1628
ugcccagugaugcaacgau

SEQ ID NO: 127567 - RNA, 19 nt, Artificial Sequence
  Description of Artificial Sequence: Synthetic oligonucleotide
  Antisense strand to SEQ ID NO: 127566
aucguugcaucacugggca

SEQ ID NO: 127568 - RNA, 19 nt, Artificial Sequence
  Description of Artificial Sequence: Synthetic oligonucleotide
  Sense strand starting at position 2096 of SEQ ID NO: 1628
acgauucuuccaggucuga

SEQ ID NO: 127569 - RNA, 19 nt, Artificial Sequence
  Description of Artificial Sequence: Synthetic oligonucleotide
  Antisense strand to SEQ ID NO: 127568
ucagaccuggaagaaucgu

SEQ ID NO: 127570 - RNA, 19 nt, Artificial Sequence
  Description of Artificial Sequence: Synthetic oligonucleotide
  Sense strand starting at position 2189 of SEQ ID NO: 1628
gggcaaucucguggcucuu

SEQ ID NO: 127571 - RNA, 19 nt, Artificial Sequence
  Description of Artificial Sequence: Synthetic oligonucleotide
  Antisense strand to SEQ ID NO: 127570
aagagccacgagauugccc

SEQ ID NO: 127572 - RNA, 19 nt, Artificial Sequence
  Description of Artificial Sequence: Synthetic oligonucleotide
  Sense strand starting at position 2291 of SEQ ID NO: 1628
uugucauucuugguaucuu

SEQ ID NO: 127573 - RNA, 19 nt, Artificial Sequence
  Description of Artificial Sequence: Synthetic oligonucleotide
  Antisense strand to SEQ ID NO: 127572
aagauaccaagaaugacaa

SEQ ID NO: 127574 - RNA, 19 nt, Artificial Sequence
  Description of Artificial Sequence: Synthetic oligonucleotide
  Sense strand starting at position 2388 of SEQ ID NO: 1628
guccguccuguuucagagu

SEQ ID NO: 127575 - RNA, 19 nt, Artificial Sequence
  Description of Artificial Sequence: Synthetic oligonucleotide
  Antisense strand to SEQ ID NO: 127574
acucugaaacaggacggac

SEQ ID NO: 127576 - RNA, 19 nt, Artificial Sequence
  Description of Artificial Sequence: Synthetic oligonucleotide
  Sense strand starting at position 2562 of SEQ ID NO: 1628
cugguuccacugcguauua

SEQ ID NO: 127577 - RNA, 19 nt, Artificial Sequence
  Description of Artificial Sequence: Synthetic oligonucleotide
  Antisense strand to SEQ ID NO: 127576
uaauacgcaguggaaccag

SEQ ID NO: 127578 - RNA, 19 nt, Artificial Sequence
  Description of Artificial Sequence: Synthetic oligonucleotide
  Sense strand starting at position 2630 of SEQ ID NO: 1628
ccuguauuaugaggauaga

SEQ ID NO: 127579 - RNA, 19 nt, Artificial Sequence
  Description of Artificial Sequence: Synthetic oligonucleotide
  Antisense strand to SEQ ID NO: 127578
ucuauccucauaauacagg

SEQ ID NO: 127580 - RNA, 19 nt, Artificial Sequence
  Description of Artificial Sequence: Synthetic oligonucleotide
  Sense strand starting at position 2643 of SEQ ID NO: 1628
gauagaaggugucccucuu

SEQ ID NO: 127581 - RNA, 19 nt, Artificial Sequence
  Description of Artificial Sequence: Synthetic oligonucleotide
  Antisense strand to SEQ ID NO: 127580
aagagggacaccuucuauc

SEQ ID NO: 127582 - RNA, 19 nt, Artificial Sequence
  Description of Artificial Sequence: Synthetic oligonucleotide
  Sense strand starting at position 2944 of SEQ ID NO: 1628
ccaacagaauguguuacuu

SEQ ID NO: 127583 - RNA, 19 nt, Artificial Sequence
  Description of Artificial Sequence: Synthetic oligonucleotide
  Antisense strand to SEQ ID NO: 127582
aaguaacacauucuguugg

SEQ ID NO: 127584 - RNA, 19 nt, Artificial Sequence
  Description of Artificial Sequence: Synthetic oligonucleotide
  Sense strand starting at position 3281 of SEQ ID NO: 1628
gagguuucgccuuggagua

SEQ ID NO: 127585 - RNA, 19 nt, Artificial Sequence
  Description of Artificial Sequence: Synthetic oligonucleotide
  Antisense strand to SEQ ID NO: 127584
uacuccaaggcgaaaccuc

SEQ ID NO: 127586 - RNA, 19 nt, Artificial Sequence
  Description of Artificial Sequence: Synthetic oligonucleotide
  Sense strand starting at position 3282 of SEQ ID NO: 1628
agguuucgccuuggaguaa

SEQ ID NO: 127587 - RNA, 19 nt, Artificial Sequence
  Description of Artificial Sequence: Synthetic oligonucleotide
  Antisense strand to SEQ ID NO: 127586
uuacuccaaggcgaaaccu

SEQ ID NO: 127588 - RNA, 19 nt, Artificial Sequence
  Description of Artificial Sequence: Synthetic oligonucleotide
  Sense strand starting at position 3308 of SEQ ID NO: 1628
agggcugaguguucauacu

SEQ ID NO: 127589 - RNA, 19 nt, Artificial Sequence
  Description of Artificial Sequence: Synthetic oligonucleotide
  Antisense strand to SEQ ID NO: 127588
aguaugaacacucagcccu

SEQ ID NO: 127590 - RNA, 19 nt, Artificial Sequence
  Description of Artificial Sequence: Synthetic oligonucleotide
  Sense strand starting at position 3929 of SEQ ID NO: 1628
gugaaucacugaggaguua

SEQ ID NO: 127591 - RNA, 19 nt, Artificial Sequence
  Description of Artificial Sequence: Synthetic oligonucleotide
  Antisense strand to SEQ ID NO: 127590
uaacuccucagugauucac

SEQ ID NO: 127592 - RNA, 19 nt, Artificial Sequence
  Description of Artificial Sequence: Synthetic oligonucleotide
  Sense strand starting at position 3971 of SEQ ID NO: 1628
cgucgauucccuaguaggu

SEQ ID NO: 127593 - RNA, 19 nt, Artificial Sequence
  Description of Artificial Sequence: Synthetic oligonucleotide
  Antisense strand to SEQ ID NO: 127592
accuacuagggaaucgacg

SEQ ID NO: 127594 - RNA, 19 nt, Artificial Sequence
  Description of Artificial Sequence: Synthetic oligonucleotide
  Sense strand starting at position 3765 of SEQ ID NO: 1629
gcacaaaguuuggcuucua

SEQ ID NO: 127595 - RNA, 19 nt, Artificial Sequence
  Description of Artificial Sequence: Synthetic oligonucleotide
  Antisense strand to SEQ ID NO: 127594
uagaagccaaacuuugugc

SEQ ID NO: 127596 - RNA, 19 nt, Artificial Sequence
  Description of Artificial Sequence: Synthetic oligonucleotide
  Sense strand starting at position 3708 of SEQ ID NO: 1629
gcuucaucagacugggagu

SEQ ID NO: 127597 - RNA, 19 nt, Artificial Sequence
  Description of Artificial Sequence: Synthetic oligonucleotide
  Antisense strand to SEQ ID NO: 127596
acucccagucugaugaagc

SEQ ID NO: 127598 - RNA, 19 nt, Artificial Sequence
  Description of Artificial Sequence: Synthetic oligonucleotide
  Sense strand starting at position 3653 of SEQ ID NO: 1629
ggccuuuguuucuuccaaa

SEQ ID NO: 127599 - RNA, 19 nt, Artificial Sequence
  Description of Artificial Sequence: Synthetic oligonucleotide
  Antisense strand to SEQ ID NO: 127598
uuuggaagaaacaaaggcc

SEQ ID NO: 127600 - RNA, 19 nt, Artificial Sequence
  Description of Artificial Sequence: Synthetic oligonucleotide
  Sense strand starting at position 3652 of SEQ ID NO: 1629
gggccuuuguuucuuccaa

SEQ ID NO: 127601 - RNA, 19 nt, Artificial Sequence
  Description of Artificial Sequence: Synthetic oligonucleotide
  Antisense strand to SEQ ID NO: 127600
uuggaagaaacaaaggccc

SEQ ID NO: 127602 - RNA, 19 nt, Artificial Sequence
  Description of Artificial Sequence: Synthetic oligonucleotide
  Sense strand starting at position 3583 of SEQ ID NO: 1629
auguuaccuguauauguuu

SEQ ID NO: 127603 - RNA, 19 nt, Artificial Sequence
  Description of Artificial Sequence: Synthetic oligonucleotide
  Antisense strand to SEQ ID NO: 127602
aaacauauacagguaacau

SEQ ID NO: 127604 - RNA, 19 nt, Artificial Sequence
  Description of Artificial Sequence: Synthetic oligonucleotide
  Sense strand starting at position 3581 of SEQ ID NO: 1629
ugauguuaccuguauaugu

SEQ ID NO: 127605 - RNA, 19 nt, Artificial Sequence
  Description of Artificial Sequence: Synthetic oligonucleotide
  Antisense strand to SEQ ID NO: 127604
acauauacagguaacauca

SEQ ID NO: 127606 - RNA, 19 nt, Artificial Sequence
  Description of Artificial Sequence: Synthetic oligonucleotide
  Sense strand starting at position 3579 of SEQ ID NO: 1629
ggugauguuaccuguauau

SEQ ID NO: 127607 - RNA, 19 nt, Artificial Sequence
  Description of Artificial Sequence: Synthetic oligonucleotide
  Antisense strand to SEQ ID NO: 127606
auauacagguaacaucacc

SEQ ID NO: 127608 - RNA, 19 nt, Artificial Sequence
  Description of Artificial Sequence: Synthetic oligonucleotide
  Sense strand starting at position 3578 of SEQ ID NO: 1629
aggugauguuaccuguaua

SEQ ID NO: 127609 - RNA, 19 nt, Artificial Sequence
  Description of Artificial Sequence: Synthetic oligonucleotide
  Antisense strand to SEQ ID NO: 127608
uauacagguaacaucaccu

SEQ ID NO: 127610 - RNA, 19 nt, Artificial Sequence
  Description of Artificial Sequence: Synthetic oligonucleotide
  Sense strand starting at position 3479 of SEQ ID NO: 1629
ccaggaaguuaucccggaa

SEQ ID NO: 127611 - RNA, 19 nt, Artificial Sequence
  Description of Artificial Sequence: Synthetic oligonucleotide
  Antisense strand to SEQ ID NO: 127610
uuccgggauaacuuccugg

SEQ ID NO: 127612 - RNA, 19 nt, Artificial Sequence
  Description of Artificial Sequence: Synthetic oligonucleotide
  Sense strand starting at position 3244 of SEQ ID NO: 1629
ggaaguugacacugcaaau

SEQ ID NO: 127613 - RNA, 19 nt, Artificial Sequence
  Description of Artificial Sequence: Synthetic oligonucleotide
  Antisense strand to SEQ ID NO: 127612
auuugcagugucaacuucc

SEQ ID NO: 127614 - RNA, 19 nt, Artificial Sequence
  Description of Artificial Sequence: Synthetic oligonucleotide
  Sense strand starting at position 2985 of SEQ ID NO: 1629
gguguaagugcccaguuaa

SEQ ID NO: 127615 - RNA, 19 nt, Artificial Sequence
  Description of Artificial Sequence: Synthetic oligonucleotide
  Antisense strand to SEQ ID NO: 127614
uuaacugggcacuuacacc

SEQ ID NO: 127616 - RNA, 19 nt, Artificial Sequence
  Description of Artificial Sequence: Synthetic oligonucleotide
  Sense strand starting at position 2951 of SEQ ID NO: 1629
auacaagucgggugucaug

SEQ ID NO: 127617 - RNA, 19 nt, Artificial Sequence
  Description of Artificial Sequence: Synthetic oligonucleotide
  Antisense strand to SEQ ID NO: 127616
caugacacccgacuuguau

SEQ ID NO: 127618 - RNA, 19 nt, Artificial Sequence
  Description of Artificial Sequence: Synthetic oligonucleotide
  Sense strand starting at position 2905 of SEQ ID NO: 1629
gcuguaagugcacauaaca

SEQ ID NO: 127619 - RNA, 19 nt, Artificial Sequence
  Description of Artificial Sequence: Synthetic oligonucleotide
  Antisense strand to SEQ ID NO: 127618
uguuaugugcacuuacagc

SEQ ID NO: 127620 - RNA, 19 nt, Artificial Sequence
  Description of Artificial Sequence: Synthetic oligonucleotide
  Sense strand starting at position 2886 of SEQ ID NO: 1629
ccuggucucugaguucuca

SEQ ID NO: 127621 - RNA, 19 nt, Artificial Sequence
  Description of Artificial Sequence: Synthetic oligonucleotide
  Antisense strand to SEQ ID NO: 127620
ugagaacucagagaccagg

SEQ ID NO: 127622 - RNA, 19 nt, Artificial Sequence
  Description of Artificial Sequence: Synthetic oligonucleotide
  Sense strand starting at position 2808 of SEQ ID NO: 1629
agcagucgcacugauagaa

SEQ ID NO: 127623 - RNA, 19 nt, Artificial Sequence
  Description of Artificial Sequence: Synthetic oligonucleotide
  Antisense strand to SEQ ID NO: 127622
uucuaucagugcgacugcu

SEQ ID NO: 127624 - RNA, 19 nt, Artificial Sequence
  Description of Artificial Sequence: Synthetic oligonucleotide
  Sense strand starting at position 2669 of SEQ ID NO: 1629
ccugguugucagcaccauu

SEQ ID NO: 127625 - RNA, 19 nt, Artificial Sequence
  Description of Artificial Sequence: Synthetic oligonucleotide
  Antisense strand to SEQ ID NO: 127624
aauggugcugacaaccagg

SEQ ID NO: 127626 - RNA, 19 nt, Artificial Sequence
  Description of Artificial Sequence: Synthetic oligonucleotide
  Sense strand starting at position 2642 of SEQ ID NO: 1629
caauuaucugacggagauc

SEQ ID NO: 127627 - RNA, 19 nt, Artificial Sequence
  Description of Artificial Sequence: Synthetic oligonucleotide
  Antisense strand to SEQ ID NO: 127626
gaucuccgucagauaauug

SEQ ID NO: 127628 - RNA, 19 nt, Artificial Sequence
  Description of Artificial Sequence: Synthetic oligonucleotide
  Sense strand starting at position 2638 of SEQ ID NO: 1629
ggcacaauuaucugacgga

SEQ ID NO: 127629 - RNA, 19 nt, Artificial Sequence
  Description of Artificial Sequence: Synthetic oligonucleotide
  Antisense strand to SEQ ID NO: 127628
uccgucagauaauugugcc

SEQ ID NO: 127630 - RNA, 19 nt, Artificial Sequence
  Description of Artificial Sequence: Synthetic oligonucleotide
  Sense strand starting at position 2607 of SEQ ID NO: 1629
uugugacauugccaaauuu

SEQ ID NO: 127631 - RNA, 19 nt, Artificial Sequence
  Description of Artificial Sequence: Synthetic oligonucleotide
  Antisense strand to SEQ ID NO: 127630
aaauuuggcaaugucacaa

SEQ ID NO: 127632 - RNA, 19 nt, Artificial Sequence
  Description of Artificial Sequence: Synthetic oligonucleotide
  Sense strand starting at position 2246 of SEQ ID NO: 1629
cagugacacuuguugaaac

SEQ ID NO: 127633 - RNA, 19 nt, Artificial Sequence
  Description of Artificial Sequence: Synthetic oligonucleotide
  Antisense strand to SEQ ID NO: 127632
guuucaacaagugucacug

SEQ ID NO: 127634 - RNA, 19 nt, Artificial Sequence
  Description of Artificial Sequence: Synthetic oligonucleotide
  Sense strand starting at position 2216 of SEQ ID NO: 1629
ucugaaagauguuaaagau

SEQ ID NO: 127635 - RNA, 19 nt, Artificial Sequence
  Description of Artificial Sequence: Synthetic oligonucleotide
  Antisense strand to SEQ ID NO: 127634
aucuuuaacaucuuucaga

SEQ ID NO: 127636 - RNA, 19 nt, Artificial Sequence
  Description of Artificial Sequence: Synthetic oligonucleotide
  Sense strand starting at position 2140 of SEQ ID NO: 1629
uuacauaccugauaggaga

SEQ ID NO: 127637 - RNA, 19 nt, Artificial Sequence
  Description of Artificial Sequence: Synthetic oligonucleotide
  Antisense strand to SEQ ID NO: 127636
ucuccuaucagguauguaa

SEQ ID NO: 127638 - RNA, 19 nt, Artificial Sequence
  Description of Artificial Sequence: Synthetic oligonucleotide
  Sense strand starting at position 2021 of SEQ ID NO: 1629
ggugacacaugcccuagaa

SEQ ID NO: 127639 - RNA, 19 nt, Artificial Sequence
  Description of Artificial Sequence: Synthetic oligonucleotide
  Antisense strand to SEQ ID NO: 127638
uucuagggcaugugucacc

SEQ ID NO: 127640 - RNA, 19 nt, Artificial Sequence
  Description of Artificial Sequence: Synthetic oligonucleotide
  Sense strand starting at position 1648 of SEQ ID NO: 1629
cgugaagguugacuaaaug

SEQ ID NO: 127641 - RNA, 19 nt, Artificial Sequence
  Description of Artificial Sequence: Synthetic oligonucleotide
  Antisense strand to SEQ ID NO: 127640
cauuuagucaaccuucacg

SEQ ID NO: 127642 - RNA, 19 nt, Artificial Sequence
  Description of Artificial Sequence: Synthetic oligonucleotide
  Sense strand starting at position 1645 of SEQ ID NO: 1629
ccacgugaagguugacuaa

SEQ ID NO: 127643 - RNA, 19 nt, Artificial Sequence
  Description of Artificial Sequence: Synthetic oligonucleotide
  Antisense strand to SEQ ID NO: 127642
uuagucaaccuucacgugg

SEQ ID NO: 127644 - RNA, 19 nt, Artificial Sequence
  Description of Artificial Sequence: Synthetic oligonucleotide
  Sense strand starting at position 1636 of SEQ ID NO: 1629
acaugagugccacgugaag

SEQ ID NO: 127645 - RNA, 19 nt, Artificial Sequence
  Description of Artificial Sequence: Synthetic oligonucleotide
  Antisense strand to SEQ ID NO: 127644
cuucacguggcacucaugu

SEQ ID NO: 127646 - RNA, 19 nt, Artificial Sequence
  Description of Artificial Sequence: Synthetic oligonucleotide
  Sense strand starting at position 1533 of SEQ ID NO: 1629
aguccuaggucccuggauu

SEQ ID NO: 127647 - RNA, 19 nt, Artificial Sequence
  Description of Artificial Sequence: Synthetic oligonucleotide
  Antisense strand to SEQ ID NO: 127646
aauccagggaccuaggacu

SEQ ID NO: 127648 - RNA, 19 nt, Artificial Sequence
  Description of Artificial Sequence: Synthetic oligonucleotide
  Sense strand starting at position 1292 of SEQ ID NO: 1629
gcuccuagcgcugucauca

SEQ ID NO: 127649 - RNA, 19 nt, Artificial Sequence
  Description of Artificial Sequence: Synthetic oligonucleotide
  Antisense strand to SEQ ID NO: 127648
ugaugacagcgcuaggagc

SEQ ID NO: 127650 - RNA, 19 nt, Artificial Sequence
  Description of Artificial Sequence: Synthetic oligonucleotide
  Sense strand starting at position 697 of SEQ ID NO: 1629
ugucacauacuuuauggau

SEQ ID NO: 127651 - RNA, 19 nt, Artificial Sequence
  Description of Artificial Sequence: Synthetic oligonucleotide
  Antisense strand to SEQ ID NO: 127650
auccauaaaguaugugaca

SEQ ID NO: 127652 - RNA, 19 nt, Artificial Sequence
  Description of Artificial Sequence: Synthetic oligonucleotide
  Sense strand starting at position 610 of SEQ ID NO: 1629
ccauaagcaugcucugaag

SEQ ID NO: 127653 - RNA, 19 nt, Artificial Sequence
  Description of Artificial Sequence: Synthetic oligonucleotide
  Antisense strand to SEQ ID NO: 127652
cuucagagcaugcuuaugg

SEQ ID NO: 127654 - RNA, 19 nt, Artificial Sequence
  Description of Artificial Sequence: Synthetic oligonucleotide
  Sense strand starting at position 437 of SEQ ID NO: 1629
gggucaggucugugucaag

SEQ ID NO: 127655 - RNA, 19 nt, Artificial Sequence
  Description of Artificial Sequence: Synthetic oligonucleotide
  Antisense strand to SEQ ID NO: 127654
cuugacacagaccugaccc

SEQ ID NO: 127656 - RNA, 19 nt, Artificial Sequence
  Description of Artificial Sequence: Synthetic oligonucleotide
  Sense strand starting at position 436 of SEQ ID NO: 1629
agggucaggucugugucaa

SEQ ID NO: 127657 - RNA, 19 nt, Artificial Sequence
  Description of Artificial Sequence: Synthetic oligonucleotide
  Antisense strand to SEQ ID NO: 127656
uugacacagaccugacccu

SEQ ID NO: 127658 - RNA, 19 nt, Artificial Sequence
  Description of Artificial Sequence: Synthetic oligonucleotide
  Sense strand starting at position 414 of SEQ ID NO: 1629
aaaugaugccgggacgagu

SEQ ID NO: 127659 - RNA, 19 nt, Artificial Sequence
  Description of Artificial Sequence: Synthetic oligonucleotide
  Antisense strand to SEQ ID NO: 127658
acucgucccggcaucauuu

SEQ ID NO: 127660 - RNA, 19 nt, Artificial Sequence
  Description of Artificial Sequence: Synthetic oligonucleotide
  Sense strand starting at position 328 of SEQ ID NO: 1629
uguguucuggcgagguuua

SEQ ID NO: 127661 - RNA, 19 nt, Artificial Sequence
  Description of Artificial Sequence: Synthetic oligonucleotide
  Antisense strand to SEQ ID NO: 127660
uaaaccucgccagaacaca

SEQ ID NO: 127662 - RNA, 19 nt, Artificial Sequence
  Description of Artificial Sequence: Synthetic oligonucleotide
  Sense strand starting at position 325 of SEQ ID NO: 1629
ggcuguguucuggcgaggu

SEQ ID NO: 127663 - RNA, 19 nt, Artificial Sequence
  Description of Artificial Sequence: Synthetic oligonucleotide
  Antisense strand to SEQ ID NO: 127662
accucgccagaacacagcc

SEQ ID NO: 127664 - RNA, 19 nt, Artificial Sequence
  Description of Artificial Sequence: Synthetic oligonucleotide
  Sense strand starting at position 232 of SEQ ID NO: 1629
gucacuuugccugaaugca

SEQ ID NO: 127665 - RNA, 19 nt, Artificial Sequence
  Description of Artificial Sequence: Synthetic oligonucleotide
  Antisense strand to SEQ ID NO: 127664
ugcauucaggcaaagugac

SEQ ID NO: 127666 - RNA, 19 nt, Artificial Sequence
  Description of Artificial Sequence: Synthetic oligonucleotide
  Sense strand starting at position 228 of SEQ ID NO: 1629
acaagucacuuugccugaa

SEQ ID NO: 127667 - RNA, 19 nt, Artificial Sequence
  Description of Artificial Sequence: Synthetic oligonucleotide
  Antisense strand to SEQ ID NO: 127666
uucaggcaaagugacuugu

SEQ ID NO: 127668 - RNA, 19 nt, Artificial Sequence
  Description of Artificial Sequence: Synthetic oligonucleotide
  Sense strand starting at position 214 of SEQ ID NO: 1629
ucgucuucucaauaacaag

SEQ ID NO: 127669 - RNA, 19 nt, Artificial Sequence
  Description of Artificial Sequence: Synthetic oligonucleotide
  Antisense strand to SEQ ID NO: 127668
cuuguuauugagaagacga

SEQ ID NO: 127670 - RNA, 19 nt, Artificial Sequence
  Description of Artificial Sequence: Synthetic oligonucleotide
  Sense strand starting at position 44 of SEQ ID NO: 1629
gcccucgugcauuacagau

SEQ ID NO: 127671 - RNA, 19 nt, Artificial Sequence
  Description of Artificial Sequence: Synthetic oligonucleotide
  Antisense strand to SEQ ID NO: 127670
aucuguaaugcacgagggc

SEQ ID NO: 127672 - RNA, 19 nt, Artificial Sequence
  Description of Artificial Sequence: Synthetic oligonucleotide
  Sense strand starting at position 43 of SEQ ID NO: 1629
cgcccucgugcauuacaga

SEQ ID NO: 127673 - RNA, 19 nt, Artificial Sequence
  Description of Artificial Sequence: Synthetic oligonucleotide
  Antisense strand to SEQ ID NO: 127672
ucuguaaugcacgagggcg

SEQ ID NO: 127674 - RNA, 19 nt, Artificial Sequence
  Description of Artificial Sequence: Synthetic oligonucleotide
  Sense strand starting at position 3932 of SEQ ID NO: 1630
cugcuuccaccuuagguaa

SEQ ID NO: 127675 - RNA, 19 nt, Artificial Sequence
  Description of Artificial Sequence: Synthetic oligonucleotide
  Antisense strand to SEQ ID NO: 127674
uuaccuaagguggaagcag

SEQ ID NO: 127676 - RNA, 19 nt, Artificial Sequence
  Description of Artificial Sequence: Synthetic oligonucleotide
  Sense strand starting at position 3604 of SEQ ID NO: 1630
auaugucaugguuaggguu

SEQ ID NO: 127677 - RNA, 19 nt, Artificial Sequence
  Description of Artificial Sequence: Synthetic oligonucleotide
  Antisense strand to SEQ ID NO: 127676
aacccuaaccaugacauau

SEQ ID NO: 127678 - RNA, 19 nt, Artificial Sequence
  Description of Artificial Sequence: Synthetic oligonucleotide
  Sense strand starting at position 3547 of SEQ ID NO: 1630
ugugucaugcauuaaagau

SEQ ID NO: 127679 - RNA, 19 nt, Artificial Sequence
  Description of Artificial Sequence: Synthetic oligonucleotide
  Antisense strand to SEQ ID NO: 127678
aucuuuaaugcaugacaca

SEQ ID NO: 127680 - RNA, 19 nt, Artificial Sequence
  Description of Artificial Sequence: Synthetic oligonucleotide
  Sense strand starting at position 3408 of SEQ ID NO: 1630
guucuaagacucugauaaa

SEQ ID NO: 127681 - RNA, 19 nt, Artificial Sequence
  Description of Artificial Sequence: Synthetic oligonucleotide
  Antisense strand to SEQ ID NO: 127680
uuuaucagagucuuagaac

SEQ ID NO: 127682 - RNA, 19 nt, Artificial Sequence
  Description of Artificial Sequence: Synthetic oligonucleotide
  Sense strand starting at position 3307 of SEQ ID NO: 1630
guguauguuaauuagagga

SEQ ID NO: 127683 - RNA, 19 nt, Artificial Sequence
  Description of Artificial Sequence: Synthetic oligonucleotide
  Antisense strand to SEQ ID NO: 127682
uccucuaauuaacauacac

SEQ ID NO: 127684 - RNA, 19 nt, Artificial Sequence
  Description of Artificial Sequence: Synthetic oligonucleotide
  Sense strand starting at position 3306 of SEQ ID NO: 1630
gguguauguuaauuagagg

SEQ ID NO: 127685 - RNA, 19 nt, Artificial Sequence
  Description of Artificial Sequence: Synthetic oligonucleotide
  Antisense strand to SEQ ID NO: 127684
ccucuaauuaacauacacc

SEQ ID NO: 127686 - RNA, 19 nt, Artificial Sequence
  Description of Artificial Sequence: Synthetic oligonucleotide
  Sense strand starting at position 3300 of SEQ ID NO: 1630
aaaggagguguauguuaau

SEQ ID NO: 127687 - RNA, 19 nt, Artificial Sequence
  Description of Artificial Sequence: Synthetic oligonucleotide
  Antisense strand to SEQ ID NO: 127686
auuaacauacaccuccuuu

SEQ ID NO: 127688 - RNA, 19 nt, Artificial Sequence
  Description of Artificial Sequence: Synthetic oligonucleotide
  Sense strand starting at position 3296 of SEQ ID NO: 1630
cuagaaaggagguguaugu

SEQ ID NO: 127689 - RNA, 19 nt, Artificial Sequence
  Description of Artificial Sequence: Synthetic oligonucleotide
  Antisense strand to SEQ ID NO: 127688
acauacaccuccuuucuag

SEQ ID NO: 127690 - RNA, 19 nt, Artificial Sequence
  Description of Artificial Sequence: Synthetic oligonucleotide
  Sense strand starting at position 2637 of SEQ ID NO: 1630
gucuuuaaagauugacaug

SEQ ID NO: 127691 - RNA, 19 nt, Artificial Sequence
  Description of Artificial Sequence: Synthetic oligonucleotide
  Antisense strand to SEQ ID NO: 127690
caugucaaucuuuaaagac

SEQ ID NO: 127692 - RNA, 19 nt, Artificial Sequence
  Description of Artificial Sequence: Synthetic oligonucleotide
  Sense strand starting at position 2600 of SEQ ID NO: 1630
guuuaaauguacccaaauu

SEQ ID NO: 127693 - RNA, 19 nt, Artificial Sequence
  Description of Artificial Sequence: Synthetic oligonucleotide
  Antisense strand to SEQ ID NO: 127692
aauuuggguacauuuaaac

SEQ ID NO: 127694 - RNA, 19 nt, Artificial Sequence
  Description of Artificial Sequence: Synthetic oligonucleotide
  Sense strand starting at position 2591 of SEQ ID NO: 1630
aggugcauuguuuaaaugu

SEQ ID NO: 127695 - RNA, 19 nt, Artificial Sequence
  Description of Artificial Sequence: Synthetic oligonucleotide
  Antisense strand to SEQ ID NO: 127694
acauuuaaacaaugcaccu

SEQ ID NO: 127696 - RNA, 19 nt, Artificial Sequence
  Description of Artificial Sequence: Synthetic oligonucleotide
  Sense strand starting at position 2589 of SEQ ID NO: 1630
gaaggugcauuguuuaaau

SEQ ID NO: 127697 - RNA, 19 nt, Artificial Sequence
  Description of Artificial Sequence: Synthetic oligonucleotide
  Antisense strand to SEQ ID NO: 127696
auuuaaacaaugcaccuuc

SEQ ID NO: 127698 - RNA, 19 nt, Artificial Sequence
  Description of Artificial Sequence: Synthetic oligonucleotide
  Sense strand starting at position 2570 of SEQ ID NO: 1630
cuuauagcacuguaaugaa

SEQ ID NO: 127699 - RNA, 19 nt, Artificial Sequence
  Description of Artificial Sequence: Synthetic oligonucleotide
  Antisense strand to SEQ ID NO: 127698
uucauuacagugcuauaag

SEQ ID NO: 127700 - RNA, 19 nt, Artificial Sequence
  Description of Artificial Sequence: Synthetic oligonucleotide
  Sense strand starting at position 2568 of SEQ ID NO: 1630
accuuauagcacuguaaug

SEQ ID NO: 127701 - RNA, 19 nt, Artificial Sequence
  Description of Artificial Sequence: Synthetic oligonucleotide
  Antisense strand to SEQ ID NO: 127700
cauuacagugcuauaaggu

SEQ ID NO: 127702 - RNA, 19 nt, Artificial Sequence
  Description of Artificial Sequence: Synthetic oligonucleotide
  Sense strand starting at position 2525 of SEQ ID NO: 1630
augaaaucagguugaauuc

SEQ ID NO: 127703 - RNA, 19 nt, Artificial Sequence
  Description of Artificial Sequence: Synthetic oligonucleotide
  Antisense strand to SEQ ID NO: 127702
gaauucaaccugauuucau

SEQ ID NO: 127704 - RNA, 19 nt, Artificial Sequence
  Description of Artificial Sequence: Synthetic oligonucleotide
  Sense strand starting at position 2504 of SEQ ID NO: 1630
uguugagauuuagggaaga

SEQ ID NO: 127705 - RNA, 19 nt, Artificial Sequence
  Description of Artificial Sequence: Synthetic oligonucleotide
  Antisense strand to SEQ ID NO: 127704
ucuucccuaaaucucaaca

SEQ ID NO: 127706 - RNA, 19 nt, Artificial Sequence
  Description of Artificial Sequence: Synthetic oligonucleotide
  Sense strand starting at position 2432 of SEQ ID NO: 1630
cagaacaccuguguugaua

SEQ ID NO: 127707 - RNA, 19 nt, Artificial Sequence
  Description of Artificial Sequence: Synthetic oligonucleotide
  Antisense strand to SEQ ID NO: 127706
uaucaacacagguguucug

SEQ ID NO: 127708 - RNA, 19 nt, Artificial Sequence
  Description of Artificial Sequence: Synthetic oligonucleotide
  Sense strand starting at position 2431 of SEQ ID NO: 1630
ucagaacaccuguguugau

SEQ ID NO: 127709 - RNA, 19 nt, Artificial Sequence
  Description of Artificial Sequence: Synthetic oligonucleotide
  Antisense strand to SEQ ID NO: 127708
aucaacacagguguucuga

SEQ ID NO: 127710 - RNA, 19 nt, Artificial Sequence
  Description of Artificial Sequence: Synthetic oligonucleotide
  Sense strand starting at position 2291 of SEQ ID NO: 1630
gugaauaaccuagagcauu

SEQ ID NO: 127711 - RNA, 19 nt, Artificial Sequence
  Description of Artificial Sequence: Synthetic oligonucleotide
  Antisense strand to SEQ ID NO: 127710
aaugcucuagguuauucac

SEQ ID NO: 127712 - RNA, 19 nt, Artificial Sequence
  Description of Artificial Sequence: Synthetic oligonucleotide
  Sense strand starting at position 2228 of SEQ ID NO: 1630
acuuguccuuaaguaguaa

SEQ ID NO: 127713 - RNA, 19 nt, Artificial Sequence
  Description of Artificial Sequence: Synthetic oligonucleotide
  Antisense strand to SEQ ID NO: 127712
uuacuacuuaaggacaagu

SEQ ID NO: 127714 - RNA, 19 nt, Artificial Sequence
  Description of Artificial Sequence: Synthetic oligonucleotide
  Sense strand starting at position 2225 of SEQ ID NO: 1630
gcuacuuguccuuaaguag

SEQ ID NO: 127715 - RNA, 19 nt, Artificial Sequence
  Description of Artificial Sequence: Synthetic oligonucleotide
  Antisense strand to SEQ ID NO: 127714
cuacuuaaggacaaguagc

SEQ ID NO: 127716 - RNA, 19 nt, Artificial Sequence
  Description of Artificial Sequence: Synthetic oligonucleotide
  Sense strand starting at position 2138 of SEQ ID NO: 1630
ccuaaauuccaugagugcu

SEQ ID NO: 127717 - RNA, 19 nt, Artificial Sequence
  Description of Artificial Sequence: Synthetic oligonucleotide
  Antisense strand to SEQ ID NO: 127716
agcacucauggaauuuagg

SEQ ID NO: 127718 - RNA, 19 nt, Artificial Sequence
  Description of Artificial Sequence: Synthetic oligonucleotide
  Sense strand starting at position 2077 of SEQ ID NO: 1630
uuauuagaaccaggaguuu

SEQ ID NO: 127719 - RNA, 19 nt, Artificial Sequence
  Description of Artificial Sequence: Synthetic oligonucleotide
  Antisense strand to SEQ ID NO: 127718
aaacuccugguucuaauaa

SEQ ID NO: 127720 - RNA, 19 nt, Artificial Sequence
  Description of Artificial Sequence: Synthetic oligonucleotide
  Sense strand starting at position 2065 of SEQ ID NO: 1630
guaaaugcuuaguuauuag

SEQ ID NO: 127721 - RNA, 19 nt, Artificial Sequence
  Description of Artificial Sequence: Synthetic oligonucleotide
  Antisense strand to SEQ ID NO: 127720
cuaauaacuaagcauuuac

SEQ ID NO: 127722 - RNA, 19 nt, Artificial Sequence
  Description of Artificial Sequence: Synthetic oligonucleotide
  Sense strand starting at position 2026 of SEQ ID NO: 1630
ggagaacgcucucuucuca

SEQ ID NO: 127723 - RNA, 19 nt, Artificial Sequence
  Description of Artificial Sequence: Synthetic oligonucleotide
  Antisense strand to SEQ ID NO: 127722
ugagaagagagcguucucc

SEQ ID NO: 127724 - RNA, 19 nt, Artificial Sequence
  Description of Artificial Sequence: Synthetic oligonucleotide
  Sense strand starting at position 1462 of SEQ ID NO: 1630
gcuaaagaucgcuagggcu

SEQ ID NO: 127725 - RNA, 19 nt, Artificial Sequence
  Description of Artificial Sequence: Synthetic oligonucleotide
  Antisense strand to SEQ ID NO: 127724
agcccuagcgaucuuuagc

SEQ ID NO: 127726 - RNA, 19 nt, Artificial Sequence
  Description of Artificial Sequence: Synthetic oligonucleotide
  Sense strand starting at position 1452 of SEQ ID NO: 1630
aaagucucucgcuaaagau

SEQ ID NO: 127727 - RNA, 19 nt, Artificial Sequence
  Description of Artificial Sequence: Synthetic oligonucleotide
  Antisense strand to SEQ ID NO: 127726
aucuuuagcgagagacuuu

SEQ ID NO: 127728 - RNA, 19 nt, Artificial Sequence
  Description of Artificial Sequence: Synthetic oligonucleotide
  Sense strand starting at position 1451 of SEQ ID NO: 1630
caaagucucucgcuaaaga

SEQ ID NO: 127729 - RNA, 19 nt, Artificial Sequence
  Description of Artificial Sequence: Synthetic oligonucleotide
  Antisense strand to SEQ ID NO: 127728
ucuuuagcgagagacuuug

SEQ ID NO: 127730 - RNA, 19 nt, Artificial Sequence
  Description of Artificial Sequence: Synthetic oligonucleotide
  Sense strand starting at position 1434 of SEQ ID NO: 1630
aaaguuaagugagucaaca

SEQ ID NO: 127731 - RNA, 19 nt, Artificial Sequence
  Description of Artificial Sequence: Synthetic oligonucleotide
  Antisense strand to SEQ ID NO: 127730
uguugacucacuuaacuuu

SEQ ID NO: 127732 - RNA, 19 nt, Artificial Sequence
  Description of Artificial Sequence: Synthetic oligonucleotide
  Sense strand starting at position 1389 of SEQ ID NO: 1630
gaaagcgucccauaaguaa

SEQ ID NO: 127733 - RNA, 19 nt, Artificial Sequence
  Description of Artificial Sequence: Synthetic oligonucleotide
  Antisense strand to SEQ ID NO: 127732
uuacuuaugggacgcuuuc

SEQ ID NO: 127734 - RNA, 19 nt, Artificial Sequence
  Description of Artificial Sequence: Synthetic oligonucleotide
  Sense strand starting at position 1049 of SEQ ID NO: 1630
gaguauuucuuguucuggu

SEQ ID NO: 127735 - RNA, 19 nt, Artificial Sequence
  Description of Artificial Sequence: Synthetic oligonucleotide
  Antisense strand to SEQ ID NO: 127734
accagaacaagaaauacuc

SEQ ID NO: 127736 - RNA, 19 nt, Artificial Sequence
  Description of Artificial Sequence: Synthetic oligonucleotide
  Sense strand starting at position 1005 of SEQ ID NO: 1630
ucugccuuagcugaauaaa

SEQ ID NO: 127737 - RNA, 19 nt, Artificial Sequence
  Description of Artificial Sequence: Synthetic oligonucleotide
  Antisense strand to SEQ ID NO: 127736
uuuauucagcuaaggcaga

SEQ ID NO: 127738 - RNA, 19 nt, Artificial Sequence
  Description of Artificial Sequence: Synthetic oligonucleotide
  Sense strand starting at position 981 of SEQ ID NO: 1630
acaguacgccucuaauacu

SEQ ID NO: 127739 - RNA, 19 nt, Artificial Sequence
  Description of Artificial Sequence: Synthetic oligonucleotide
  Antisense strand to SEQ ID NO: 127738
aguauuagaggcguacugu

SEQ ID NO: 127740 - RNA, 19 nt, Artificial Sequence
  Description of Artificial Sequence: Synthetic oligonucleotide
  Sense strand starting at position 946 of SEQ ID NO: 1630
uggcaaauauaacuuuaga

SEQ ID NO: 127741 - RNA, 19 nt, Artificial Sequence
  Description of Artificial Sequence: Synthetic oligonucleotide
  Antisense strand to SEQ ID NO: 127740
ucuaaaguuauauuugcca

SEQ ID NO: 127742 - RNA, 19 nt, Artificial Sequence
  Description of Artificial Sequence: Synthetic oligonucleotide
  Sense strand starting at position 805 of SEQ ID NO: 1630
gaaccuguagaauguaacu

SEQ ID NO: 127743 - RNA, 19 nt, Artificial Sequence
  Description of Artificial Sequence: Synthetic oligonucleotide
  Antisense strand to SEQ ID NO: 127742
aguuacauucuacagguuc

SEQ ID NO: 127744 - RNA, 19 nt, Artificial Sequence
  Description of Artificial Sequence: Synthetic oligonucleotide
  Sense strand starting at position 798 of SEQ ID NO: 1630
gguguaggaaccuguagaa

SEQ ID NO: 127745 - RNA, 19 nt, Artificial Sequence
  Description of Artificial Sequence: Synthetic oligonucleotide
  Antisense strand to SEQ ID NO: 127744
uucuacagguuccuacacc

SEQ ID NO: 127746 - RNA, 19 nt, Artificial Sequence
  Description of Artificial Sequence: Synthetic oligonucleotide
  Sense strand starting at position 779 of SEQ ID NO: 1630
ccucuaacuugauuggcaa

SEQ ID NO: 127747 - RNA, 19 nt, Artificial Sequence
  Description of Artificial Sequence: Synthetic oligonucleotide
  Antisense strand to SEQ ID NO: 127746
uugccaaucaaguuagagg

SEQ ID NO: 127748 - RNA, 19 nt, Artificial Sequence
  Description of Artificial Sequence: Synthetic oligonucleotide
  Sense strand starting at position 755 of SEQ ID NO: 1630
guaaauaccuguuucuuau

SEQ ID NO: 127749 - RNA, 19 nt, Artificial Sequence
  Description of Artificial Sequence: Synthetic oligonucleotide
  Antisense strand to SEQ ID NO: 127748
auaagaaacagguauuuac

SEQ ID NO: 127750 - RNA, 19 nt, Artificial Sequence
  Description of Artificial Sequence: Synthetic oligonucleotide
  Sense strand starting at position 728 of SEQ ID NO: 1630
uuaacucuuccggagcuaa

SEQ ID NO: 127751 - RNA, 19 nt, Artificial Sequence
  Description of Artificial Sequence: Synthetic oligonucleotide
  Antisense strand to SEQ ID NO: 127750
uuagcuccggaagaguuaa

SEQ ID NO: 127752 - RNA, 19 nt, Artificial Sequence
  Description of Artificial Sequence: Synthetic oligonucleotide
  Sense strand starting at position 81 of SEQ ID NO: 1630
auauguagaugauucgauu

SEQ ID NO: 127753 - RNA, 19 nt, Artificial Sequence
  Description of Artificial Sequence: Synthetic oligonucleotide
  Antisense strand to SEQ ID NO: 127752
aaucgaaucaucuacauau

SEQ ID NO: 127754 - RNA, 19 nt, Artificial Sequence
  Description of Artificial Sequence: Synthetic oligonucleotide
  Sense strand starting at position 3954 of SEQ ID NO: 1631
uguaguaugaggcagaaau

SEQ ID NO: 127755 - RNA, 19 nt, Artificial Sequence
  Description of Artificial Sequence: Synthetic oligonucleotide
  Antisense strand to SEQ ID NO: 127754
auuucugccucauacuaca

SEQ ID NO: 127756 - RNA, 19 nt, Artificial Sequence
  Description of Artificial Sequence: Synthetic oligonucleotide
  Sense strand starting at position 3914 of SEQ ID NO: 1631
gggcuuuaauccuuuaauu

SEQ ID NO: 127757 - RNA, 19 nt, Artificial Sequence
  Description of Artificial Sequence: Synthetic oligonucleotide
  Antisense strand to SEQ ID NO: 127756
aauuaaaggauuaaagccc

SEQ ID NO: 127758 - RNA, 19 nt, Artificial Sequence
  Description of Artificial Sequence: Synthetic oligonucleotide
  Sense strand starting at position 3787 of SEQ ID NO: 1631
guuaucaaucaguaauguu

SEQ ID NO: 127759 - RNA, 19 nt, Artificial Sequence
  Description of Artificial Sequence: Synthetic oligonucleotide
  Antisense strand to SEQ ID NO: 127758
aacauuacugauugauaac

SEQ ID NO: 127760 - RNA, 19 nt, Artificial Sequence
  Description of Artificial Sequence: Synthetic oligonucleotide
  Sense strand starting at position 3786 of SEQ ID NO: 1631
aguuaucaaucaguaaugu

SEQ ID NO: 127761 - RNA, 19 nt, Artificial Sequence
  Description of Artificial Sequence: Synthetic oligonucleotide
  Antisense strand to SEQ ID NO: 127760
acauuacugauugauaacu

SEQ ID NO: 127762 - RNA, 19 nt, Artificial Sequence
  Description of Artificial Sequence: Synthetic oligonucleotide
  Sense strand starting at position 3367 of SEQ ID NO: 1631
acaacaaguguuugcuaua

SEQ ID NO: 127763 - RNA, 19 nt, Artificial Sequence
  Description of Artificial Sequence: Synthetic oligonucleotide
  Antisense strand to SEQ ID NO: 127762
uauagcaaacacuuguugu

SEQ ID NO: 127764 - RNA, 19 nt, Artificial Sequence
  Description of Artificial Sequence: Synthetic oligonucleotide
  Sense strand starting at position 3366 of SEQ ID NO: 1631
gacaacaaguguuugcuau

SEQ ID NO: 127765 - RNA, 19 nt, Artificial Sequence
  Description of Artificial Sequence: Synthetic oligonucleotide
  Antisense strand to SEQ ID NO: 127764
auagcaaacacuuguuguc

SEQ ID NO: 127766 - RNA, 19 nt, Artificial Sequence
  Description of Artificial Sequence: Synthetic oligonucleotide
  Sense strand starting at position 2948 of SEQ ID NO: 1631
cauauugcauaggucagau

SEQ ID NO: 127767 - RNA, 19 nt, Artificial Sequence
  Description of Artificial Sequence: Synthetic oligonucleotide
  Antisense strand to SEQ ID NO: 127766
aucugaccuaugcaauaug

SEQ ID NO: 127768 - RNA, 19 nt, Artificial Sequence
  Description of Artificial Sequence: Synthetic oligonucleotide
  Sense strand starting at position 2945 of SEQ ID NO: 1631
aagcauauugcauagguca

SEQ ID NO: 127769 - RNA, 19 nt, Artificial Sequence
  Description of Artificial Sequence: Synthetic oligonucleotide
  Antisense strand to SEQ ID NO: 127768
ugaccuaugcaauaugcuu

SEQ ID NO: 127770 - RNA, 19 nt, Artificial Sequence
  Description of Artificial Sequence: Synthetic oligonucleotide
  Sense strand starting at position 2919 of SEQ ID NO: 1631
ugauuaucagguuaaaugu

SEQ ID NO: 127771 - RNA, 19 nt, Artificial Sequence
  Description of Artificial Sequence: Synthetic oligonucleotide
  Antisense strand to SEQ ID NO: 127770
acauuuaaccugauaauca

SEQ ID NO: 127772 - RNA, 19 nt, Artificial Sequence
  Description of Artificial Sequence: Synthetic oligonucleotide
  Sense strand starting at position 2913 of SEQ ID NO: 1631
uccucaugauuaucagguu

SEQ ID NO: 127773 - RNA, 19 nt, Artificial Sequence
  Description of Artificial Sequence: Synthetic oligonucleotide
  Antisense strand to SEQ ID NO: 127772
aaccugauaaucaugagga

SEQ ID NO: 127774 - RNA, 19 nt, Artificial Sequence
  Description of Artificial Sequence: Synthetic oligonucleotide
  Sense strand starting at position 2869 of SEQ ID NO: 1631
aguugucuugcagaauacu

SEQ ID NO: 127775 - RNA, 19 nt, Artificial Sequence
  Description of Artificial Sequence: Synthetic oligonucleotide
  Antisense strand to SEQ ID NO: 127774
aguauucugcaagacaacu

SEQ ID NO: 127776 - RNA, 19 nt, Artificial Sequence
  Description of Artificial Sequence: Synthetic oligonucleotide
  Sense strand starting at position 2842 of SEQ ID NO: 1631
ugacauugaugcucuugaa

SEQ ID NO: 127777 - RNA, 19 nt, Artificial Sequence
  Description of Artificial Sequence: Synthetic oligonucleotide
  Antisense strand to SEQ ID NO: 127776
uucaagagcaucaauguca

SEQ ID NO: 127778 - RNA, 19 nt, Artificial Sequence
  Description of Artificial Sequence: Synthetic oligonucleotide
  Sense strand starting at position 2457 of SEQ ID NO: 1631
gguguccuuuaaucuagaa

SEQ ID NO: 127779 - RNA, 19 nt, Artificial Sequence
  Description of Artificial Sequence: Synthetic oligonucleotide
  Antisense strand to SEQ ID NO: 127778
uucuagauuaaaggacacc

SEQ ID NO: 127780 - RNA, 19 nt, Artificial Sequence
  Description of Artificial Sequence: Synthetic oligonucleotide
  Sense strand starting at position 2454 of SEQ ID NO: 1631
uuugguguccuuuaaucua

SEQ ID NO: 127781 - RNA, 19 nt, Artificial Sequence
  Description of Artificial Sequence: Synthetic oligonucleotide
  Antisense strand to SEQ ID NO: 127780
uagauuaaaggacaccaaa

SEQ ID NO: 127782 - RNA, 19 nt, Artificial Sequence
  Description of Artificial Sequence: Synthetic oligonucleotide
  Sense strand starting at position 2312 of SEQ ID NO: 1631
cuguaucuaguauacagua

SEQ ID NO: 127783 - RNA, 19 nt, Artificial Sequence
  Description of Artificial Sequence: Synthetic oligonucleotide
  Antisense strand to SEQ ID NO: 127782
uacuguauacuagauacag

SEQ ID NO: 127784 - RNA, 19 nt, Artificial Sequence
  Description of Artificial Sequence: Synthetic oligonucleotide
  Sense strand starting at position 2230 of SEQ ID NO: 1631
cugacagccugcuuagaau

SEQ ID NO: 127785 - RNA, 19 nt, Artificial Sequence
  Description of Artificial Sequence: Synthetic oligonucleotide
  Antisense strand to SEQ ID NO: 127784
auucuaagcaggcugucag

SEQ ID NO: 127786 - RNA, 19 nt, Artificial Sequence
  Description of Artificial Sequence: Synthetic oligonucleotide
  Sense strand starting at position 2208 of SEQ ID NO: 1631
ggcucagaaccuuguuaag

SEQ ID NO: 127787 - RNA, 19 nt, Artificial Sequence
  Description of Artificial Sequence: Synthetic oligonucleotide
  Antisense strand to SEQ ID NO: 127786
cuuaacaagguucugagcc

SEQ ID NO: 127788 - RNA, 19 nt, Artificial Sequence
  Description of Artificial Sequence: Synthetic oligonucleotide
  Sense strand starting at position 2124 of SEQ ID NO: 1631
cugaaauauccaggucacg

SEQ ID NO: 127789 - RNA, 19 nt, Artificial Sequence
  Description of Artificial Sequence: Synthetic oligonucleotide
  Antisense strand to SEQ ID NO: 127788
cgugaccuggauauuucag

SEQ ID NO: 127790 - RNA, 19 nt, Artificial Sequence
  Description of Artificial Sequence: Synthetic oligonucleotide
  Sense strand starting at position 2113 of SEQ ID NO: 1631
ggauuugaguccugaaaua

SEQ ID NO: 127791 - RNA, 19 nt, Artificial Sequence
  Description of Artificial Sequence: Synthetic oligonucleotide
  Antisense strand to SEQ ID NO: 127790
uauuucaggacucaaaucc

SEQ ID NO: 127792 - RNA, 19 nt, Artificial Sequence
  Description of Artificial Sequence: Synthetic oligonucleotide
  Sense strand starting at position 2094 of SEQ ID NO: 1631
agagaauuccaaugcgggu

SEQ ID NO: 127793 - RNA, 19 nt, Artificial Sequence
  Description of Artificial Sequence: Synthetic oligonucleotide
  Antisense strand to SEQ ID NO: 127792
acccgcauuggaauucucu

SEQ ID NO: 127794 - RNA, 19 nt, Artificial Sequence
  Description of Artificial Sequence: Synthetic oligonucleotide
  Sense strand starting at position 2083 of SEQ ID NO: 1631
ggcagucacccagagaauu

SEQ ID NO: 127795 - RNA, 19 nt, Artificial Sequence
  Description of Artificial Sequence: Synthetic oligonucleotide
  Antisense strand to SEQ ID NO: 127794
aauucucugggugacugcc

SEQ ID NO: 127796 - RNA, 19 nt, Artificial Sequence
  Description of Artificial Sequence: Synthetic oligonucleotide
  Sense strand starting at position 1374 of SEQ ID NO: 1631
aauauuugccugugguuua

SEQ ID NO: 127797 - RNA, 19 nt, Artificial Sequence
  Description of Artificial Sequence: Synthetic oligonucleotide
  Antisense strand to SEQ ID NO: 127796
uaaaccacaggcaaauauu

SEQ ID NO: 127798 - RNA, 19 nt, Artificial Sequence
  Description of Artificial Sequence: Synthetic oligonucleotide
  Sense strand starting at position 1371 of SEQ ID NO: 1631
gggaauauuugccuguggu

SEQ ID NO: 127799 - RNA, 19 nt, Artificial Sequence
  Description of Artificial Sequence: Synthetic oligonucleotide
  Antisense strand to SEQ ID NO: 127798
accacaggcaaauauuccc

SEQ ID NO: 127800 - RNA, 19 nt, Artificial Sequence
  Description of Artificial Sequence: Synthetic oligonucleotide
  Sense strand starting at position 1353 of SEQ ID NO: 1631
cgaauucucucccuaaagg

SEQ ID NO: 127801 - RNA, 19 nt, Artificial Sequence
  Description of Artificial Sequence: Synthetic oligonucleotide
  Antisense strand to SEQ ID NO: 127800
ccuuuagggagagaauucg

SEQ ID NO: 127802 - RNA, 19 nt, Artificial Sequence
  Description of Artificial Sequence: Synthetic oligonucleotide
  Sense strand starting at position 1351 of SEQ ID NO: 1631
ggcgaauucucucccuaaa

SEQ ID NO: 127803 - RNA, 19 nt, Artificial Sequence
  Description of Artificial Sequence: Synthetic oligonucleotide
  Antisense strand to SEQ ID NO: 127802
uuuagggagagaauucgcc

SEQ ID NO: 127804 - RNA, 19 nt, Artificial Sequence
  Description of Artificial Sequence: Synthetic oligonucleotide
  Sense strand starting at position 1342 of SEQ ID NO: 1631
auagaugucggcgaauucu

SEQ ID NO: 127805 - RNA, 19 nt, Artificial Sequence
  Description of Artificial Sequence: Synthetic oligonucleotide
  Antisense strand to SEQ ID NO: 127804
agaauucgccgacaucuau

SEQ ID NO: 127806 - RNA, 19 nt, Artificial Sequence
  Description of Artificial Sequence: Synthetic oligonucleotide
  Sense strand starting at position 1158 of SEQ ID NO: 1631
guauacuuagcccaaagcu

SEQ ID NO: 127807 - RNA, 19 nt, Artificial Sequence
  Description of Artificial Sequence: Synthetic oligonucleotide
  Antisense strand to SEQ ID NO: 127806
agcuuugggcuaaguauac

SEQ ID NO: 127808 - RNA, 19 nt, Artificial Sequence
  Description of Artificial Sequence: Synthetic oligonucleotide
  Sense strand starting at position 1122 of SEQ ID NO: 1631
cggaguuguccugauccau

SEQ ID NO: 127809 - RNA, 19 nt, Artificial Sequence
  Description of Artificial Sequence: Synthetic oligonucleotide
  Antisense strand to SEQ ID NO: 127808
auggaucaggacaacuccg

SEQ ID NO: 127810 - RNA, 19 nt, Artificial Sequence
  Description of Artificial Sequence: Synthetic oligonucleotide
  Sense strand starting at position 1100 of SEQ ID NO: 1631
ccagcuggucagugacaaa

SEQ ID NO: 127811 - RNA, 19 nt, Artificial Sequence
  Description of Artificial Sequence: Synthetic oligonucleotide
  Antisense strand to SEQ ID NO: 127810
uuugucacugaccagcugg

SEQ ID NO: 127812 - RNA, 19 nt, Artificial Sequence
  Description of Artificial Sequence: Synthetic oligonucleotide
  Sense strand starting at position 945 of SEQ ID NO: 1631
augccuuauugagcccaga

SEQ ID NO: 127813 - RNA, 19 nt, Artificial Sequence
  Description of Artificial Sequence: Synthetic oligonucleotide
  Antisense strand to SEQ ID NO: 127812
ucugggcucaauaaggcau

SEQ ID NO: 127814 - RNA, 19 nt, Artificial Sequence
  Description of Artificial Sequence: Synthetic oligonucleotide
  Sense strand starting at position 917 of SEQ ID NO: 1631
uuuguugaauggcuaauaa

SEQ ID NO: 127815 - RNA, 19 nt, Artificial Sequence
  Description of Artificial Sequence: Synthetic oligonucleotide
  Antisense strand to SEQ ID NO: 127814
uuauuagccauucaacaaa

SEQ ID NO: 127816 - RNA, 19 nt, Artificial Sequence
  Description of Artificial Sequence: Synthetic oligonucleotide
  Sense strand starting at position 830 of SEQ ID NO: 1631
cugugaauccuugagggug

SEQ ID NO: 127817 - RNA, 19 nt, Artificial Sequence
  Description of Artificial Sequence: Synthetic oligonucleotide
  Antisense strand to SEQ ID NO: 127816
cacccucaaggauucacag

SEQ ID NO: 127818 - RNA, 19 nt, Artificial Sequence
  Description of Artificial Sequence: Synthetic oligonucleotide
  Sense strand starting at position 772 of SEQ ID NO: 1631
aguguagggcaugauacau

SEQ ID NO: 127819 - RNA, 19 nt, Artificial Sequence
  Description of Artificial Sequence: Synthetic oligonucleotide
  Antisense strand to SEQ ID NO: 127818
auguaucaugcccuacacu

SEQ ID NO: 127820 - RNA, 19 nt, Artificial Sequence
  Description of Artificial Sequence: Synthetic oligonucleotide
  Sense strand starting at position 771 of SEQ ID NO: 1631
caguguagggcaugauaca

SEQ ID NO: 127821 - RNA, 19 nt, Artificial Sequence
  Description of Artificial Sequence: Synthetic oligonucleotide
  Antisense strand to SEQ ID NO: 127820
uguaucaugcccuacacug

SEQ ID NO: 127822 - RNA, 19 nt, Artificial Sequence
  Description of Artificial Sequence: Synthetic oligonucleotide
  Sense strand starting at position 769 of SEQ ID NO: 1631
cucaguguagggcaugaua

SEQ ID NO: 127823 - RNA, 19 nt, Artificial Sequence
  Description of Artificial Sequence: Synthetic oligonucleotide
  Antisense strand to SEQ ID NO: 127822
uaucaugcccuacacugag

SEQ ID NO: 127824 - RNA, 19 nt, Artificial Sequence
  Description of Artificial Sequence: Synthetic oligonucleotide
  Sense strand starting at position 539 of SEQ ID NO: 1631
accugugagcugggaaaca

SEQ ID NO: 127825 - RNA, 19 nt, Artificial Sequence
  Description of Artificial Sequence: Synthetic oligonucleotide
  Antisense strand to SEQ ID NO: 127824
uguuucccagcucacaggu

SEQ ID NO: 127826 - RNA, 19 nt, Artificial Sequence
  Description of Artificial Sequence: Synthetic oligonucleotide
  Sense strand starting at position 537 of SEQ ID NO: 1631
gcaccugugagcugggaaa

SEQ ID NO: 127827 - RNA, 19 nt, Artificial Sequence
  Description of Artificial Sequence: Synthetic oligonucleotide
  Antisense strand to SEQ ID NO: 127826
uuucccagcucacaggugc

SEQ ID NO: 127828 - RNA, 19 nt, Artificial Sequence
  Description of Artificial Sequence: Synthetic oligonucleotide
  Sense strand starting at position 440 of SEQ ID NO: 1631
ugaguaaagccgugaagga

SEQ ID NO: 127829 - RNA, 19 nt, Artificial Sequence
  Description of Artificial Sequence: Synthetic oligonucleotide
  Antisense strand to SEQ ID NO: 127828
uccuucacggcuuuacuca

SEQ ID NO: 127830 - RNA, 19 nt, Artificial Sequence
  Description of Artificial Sequence: Synthetic oligonucleotide
  Sense strand starting at position 428 of SEQ ID NO: 1631
ggaggugacacuugaguaa

SEQ ID NO: 127831 - RNA, 19 nt, Artificial Sequence
  Description of Artificial Sequence: Synthetic oligonucleotide
  Antisense strand to SEQ ID NO: 127830
uuacucaagugucaccucc

SEQ ID NO: 127832 - RNA, 19 nt, Artificial Sequence
  Description of Artificial Sequence: Synthetic oligonucleotide
  Sense strand starting at position 223 of SEQ ID NO: 1631
acagcugugcaccaucaua

SEQ ID NO: 127833 - RNA, 19 nt, Artificial Sequence
  Description of Artificial Sequence: Synthetic oligonucleotide
  Antisense strand to SEQ ID NO: 127832
uaugauggugcacagcugu

SEQ ID NO: 127834 - RNA, 19 nt, Artificial Sequence
  Description of Artificial Sequence: Synthetic oligonucleotide
  Sense strand starting at position 3943 of SEQ ID NO: 1632
uuucuccucguuugaagaa

SEQ ID NO: 127835 - RNA, 19 nt, Artificial Sequence
  Description of Artificial Sequence: Synthetic oligonucleotide
  Antisense strand to SEQ ID NO: 127834
uucuucaaacgaggagaaa

SEQ ID NO: 127836 - RNA, 19 nt, Artificial Sequence
  Description of Artificial Sequence: Synthetic oligonucleotide
  Sense strand starting at position 3829 of SEQ ID NO: 1632
uucugucuuugagagcauu

SEQ ID NO: 127837 - RNA, 19 nt, Artificial Sequence
  Description of Artificial Sequence: Synthetic oligonucleotide
  Antisense strand to SEQ ID NO: 127836
aaugcucucaaagacagaa

SEQ ID NO: 127838 - RNA, 19 nt, Artificial Sequence
  Description of Artificial Sequence: Synthetic oligonucleotide
  Sense strand starting at position 3827 of SEQ ID NO: 1632
aauucugucuuugagagca

SEQ ID NO: 127839 - RNA, 19 nt, Artificial Sequence
  Description of Artificial Sequence: Synthetic oligonucleotide
  Antisense strand to SEQ ID NO: 127838
ugcucucaaagacagaauu

SEQ ID NO: 127840 - RNA, 19 nt, Artificial Sequence
  Description of Artificial Sequence: Synthetic oligonucleotide
  Sense strand starting at position 3826 of SEQ ID NO: 1632
gaauucugucuuugagagc

SEQ ID NO: 127841 - RNA, 19 nt, Artificial Sequence
  Description of Artificial Sequence: Synthetic oligonucleotide
  Antisense strand to SEQ ID NO: 127840
gcucucaaagacagaauuc

SEQ ID NO: 127842 - RNA, 19 nt, Artificial Sequence
  Description of Artificial Sequence: Synthetic oligonucleotide
  Sense strand starting at position 3825 of SEQ ID NO: 1632
agaauucugucuuugagag

SEQ ID NO: 127843 - RNA, 19 nt, Artificial Sequence
  Description of Artificial Sequence: Synthetic oligonucleotide
  Antisense strand to SEQ ID NO: 127842
cucucaaagacagaauucu

SEQ ID NO: 127844 - RNA, 19 nt, Artificial Sequence
  Description of Artificial Sequence: Synthetic oligonucleotide
  Sense strand starting at position 3779 of SEQ ID NO: 1632
ugcuuaagauucugaucuc

SEQ ID NO: 127845 - RNA, 19 nt, Artificial Sequence
  Description of Artificial Sequence: Synthetic oligonucleotide
  Antisense strand to SEQ ID NO: 127844
gagaucagaaucuuaagca

SEQ ID NO: 127846 - RNA, 19 nt, Artificial Sequence
  Description of Artificial Sequence: Synthetic oligonucleotide
  Sense strand starting at position 3759 of SEQ ID NO: 1632
gcccgcugcacauguuaau

SEQ ID NO: 127847 - RNA, 19 nt, Artificial Sequence
  Description of Artificial Sequence: Synthetic oligonucleotide
  Antisense strand to SEQ ID NO: 127846
auuaacaugugcagcgggc

SEQ ID NO: 127848 - RNA, 19 nt, Artificial Sequence
  Description of Artificial Sequence: Synthetic oligonucleotide
  Sense strand starting at position 3736 of SEQ ID NO: 1632
auuaaaggcggugauuaaa

SEQ ID NO: 127849 - RNA, 19 nt, Artificial Sequence
  Description of Artificial Sequence: Synthetic oligonucleotide
  Antisense strand to SEQ ID NO: 127848
uuuaaucaccgccuuuaau

SEQ ID NO: 127850 - RNA, 19 nt, Artificial Sequence
  Description of Artificial Sequence: Synthetic oligonucleotide
  Sense strand starting at position 3735 of SEQ ID NO: 1632
gauuaaaggcggugauuaa

SEQ ID NO: 127851 - RNA, 19 nt, Artificial Sequence
  Description of Artificial Sequence: Synthetic oligonucleotide
  Antisense strand to SEQ ID NO: 127850
uuaaucaccgccuuuaauc

SEQ ID NO: 127852 - RNA, 19 nt, Artificial Sequence
  Description of Artificial Sequence: Synthetic oligonucleotide
  Sense strand starting at position 3733 of SEQ ID NO: 1632
gcgauuaaaggcggugauu

SEQ ID NO: 127853 - RNA, 19 nt, Artificial Sequence
  Description of Artificial Sequence: Synthetic oligonucleotide
  Antisense strand to SEQ ID NO: 127852
aaucaccgccuuuaaucgc

SEQ ID NO: 127854 - RNA, 19 nt, Artificial Sequence
  Description of Artificial Sequence: Synthetic oligonucleotide
  Sense strand starting at position 3648 of SEQ ID NO: 1632
agguucagguucuaaggaa

SEQ ID NO: 127855 - RNA, 19 nt, Artificial Sequence
  Description of Artificial Sequence: Synthetic oligonucleotide
  Antisense strand to SEQ ID NO: 127854
uuccuuagaaccugaaccu

SEQ ID NO: 127856 - RNA, 19 nt, Artificial Sequence
  Description of Artificial Sequence: Synthetic oligonucleotide
  Sense strand starting at position 3358 of SEQ ID NO: 1632
gcacgugugccagaggcaa

SEQ ID NO: 127857 - RNA, 19 nt, Artificial Sequence
  Description of Artificial Sequence: Synthetic oligonucleotide
  Antisense strand to SEQ ID NO: 127856
uugccucuggcacacgugc

SEQ ID NO: 127858 - RNA, 19 nt, Artificial Sequence
  Description of Artificial Sequence: Synthetic oligonucleotide
  Sense strand starting at position 3141 of SEQ ID NO: 1632
accugcccucgugaaugaa

SEQ ID NO: 127859 - RNA, 19 nt, Artificial Sequence
  Description of Artificial Sequence: Synthetic oligonucleotide
  Antisense strand to SEQ ID NO: 127858
uucauucacgagggcaggu

SEQ ID NO: 127860 - RNA, 19 nt, Artificial Sequence
  Description of Artificial Sequence: Synthetic oligonucleotide
  Sense strand starting at position 3138 of SEQ ID NO: 1632
gggaccugcccucgugaau

SEQ ID NO: 127861 - RNA, 19 nt, Artificial Sequence
  Description of Artificial Sequence: Synthetic oligonucleotide
  Antisense strand to SEQ ID NO: 127860
auucacgagggcagguccc

SEQ ID NO: 127862 - RNA, 19 nt, Artificial Sequence
  Description of Artificial Sequence: Synthetic oligonucleotide
  Sense strand starting at position 2759 of SEQ ID NO: 1632
gguguucugaaagguacca

SEQ ID NO: 127863 - RNA, 19 nt, Artificial Sequence
  Description of Artificial Sequence: Synthetic oligonucleotide
  Antisense strand to SEQ ID NO: 127862
ugguaccuuucagaacacc

SEQ ID NO: 127864 - RNA, 19 nt, Artificial Sequence
  Description of Artificial Sequence: Synthetic oligonucleotide
  Sense strand starting at position 2527 of SEQ ID NO: 1632
gcaguagcuccuggugaug

SEQ ID NO: 127865 - RNA, 19 nt, Artificial Sequence
  Description of Artificial Sequence: Synthetic oligonucleotide
  Antisense strand to SEQ ID NO: 127864
caucaccaggagcuacugc

SEQ ID NO: 127866 - RNA, 19 nt, Artificial Sequence
  Description of Artificial Sequence: Synthetic oligonucleotide
  Sense strand starting at position 2526 of SEQ ID NO: 1632
agcaguagcuccuggugau

SEQ ID NO: 127867 - RNA, 19 nt, Artificial Sequence
  Description of Artificial Sequence: Synthetic oligonucleotide
  Antisense strand to SEQ ID NO: 127866
aucaccaggagcuacugcu

SEQ ID NO: 127868 - RNA, 19 nt, Artificial Sequence
  Description of Artificial Sequence: Synthetic oligonucleotide
  Sense strand starting at position 2459 of SEQ ID NO: 1632
gggucauugaggugacauu

SEQ ID NO: 127869 - RNA, 19 nt, Artificial Sequence
  Description of Artificial Sequence: Synthetic oligonucleotide
  Antisense strand to SEQ ID NO: 127868
aaugucaccucaaugaccc

SEQ ID NO: 127870 - RNA, 19 nt, Artificial Sequence
  Description of Artificial Sequence: Synthetic oligonucleotide
  Sense strand starting at position 2457 of SEQ ID NO: 1632
aagggucauugaggugaca

SEQ ID NO: 127871 - RNA, 19 nt, Artificial Sequence
  Description of Artificial Sequence: Synthetic oligonucleotide
  Antisense strand to SEQ ID NO: 127870
ugucaccucaaugacccuu

SEQ ID NO: 127872 - RNA, 19 nt, Artificial Sequence
  Description of Artificial Sequence: Synthetic oligonucleotide
  Sense strand starting at position 2360 of SEQ ID NO: 1632
cagggacccucuggucauu

SEQ ID NO: 127873 - RNA, 19 nt, Artificial Sequence
  Description of Artificial Sequence: Synthetic oligonucleotide
  Antisense strand to SEQ ID NO: 127872
aaugaccagagggucccug

SEQ ID NO: 127874 - RNA, 19 nt, Artificial Sequence
  Description of Artificial Sequence: Synthetic oligonucleotide
  Sense strand starting at position 2206 of SEQ ID NO: 1632
gcugcuggcucuucccaua

SEQ ID NO: 127875 - RNA, 19 nt, Artificial Sequence
  Description of Artificial Sequence: Synthetic oligonucleotide
  Antisense strand to SEQ ID NO: 127874
uaugggaagagccagcagc

SEQ ID NO: 127876 - RNA, 19 nt, Artificial Sequence
  Description of Artificial Sequence: Synthetic oligonucleotide
  Sense strand starting at position 1598 of SEQ ID NO: 1632
gagggaugugcagguaaug

SEQ ID NO: 127877 - RNA, 19 nt, Artificial Sequence
  Description of Artificial Sequence: Synthetic oligonucleotide
  Antisense strand to SEQ ID NO: 127876
cauuaccugcacaucccuc

SEQ ID NO: 127878 - RNA, 19 nt, Artificial Sequence
  Description of Artificial Sequence: Synthetic oligonucleotide
  Sense strand starting at position 1113 of SEQ ID NO: 1632
ucaggaaagcgugacagau

SEQ ID NO: 127879 - RNA, 19 nt, Artificial Sequence
  Description of Artificial Sequence: Synthetic oligonucleotide
  Antisense strand to SEQ ID NO: 127878
aucugucacgcuuuccuga

SEQ ID NO: 127880 - RNA, 19 nt, Artificial Sequence
  Description of Artificial Sequence: Synthetic oligonucleotide
  Sense strand starting at position 950 of SEQ ID NO: 1632
cagagcuagcgcuguguuu

SEQ ID NO: 127881 - RNA, 19 nt, Artificial Sequence
  Description of Artificial Sequence: Synthetic oligonucleotide
  Antisense strand to SEQ ID NO: 127880
aaacacagcgcuagcucug

SEQ ID NO: 127882 - RNA, 19 nt, Artificial Sequence
  Description of Artificial Sequence: Synthetic oligonucleotide
  Sense strand starting at position 790 of SEQ ID NO: 1632
cuccuacugucccuggaaa

SEQ ID NO: 127883 - RNA, 19 nt, Artificial Sequence
  Description of Artificial Sequence: Synthetic oligonucleotide
  Antisense strand to SEQ ID NO: 127882
uuuccagggacaguaggag

SEQ ID NO: 127884 - RNA, 19 nt, Artificial Sequence
  Description of Artificial Sequence: Synthetic oligonucleotide
  Sense strand starting at position 661 of SEQ ID NO: 1632
cacgguuuaucagaggcaa

SEQ ID NO: 127885 - RNA, 19 nt, Artificial Sequence
  Description of Artificial Sequence: Synthetic oligonucleotide
  Antisense strand to SEQ ID NO: 127884
uugccucugauaaaccgug

SEQ ID NO: 127886 - RNA, 19 nt, Artificial Sequence
  Description of Artificial Sequence: Synthetic oligonucleotide
  Sense strand starting at position 656 of SEQ ID NO: 1632
ggucacacgguuuaucaga

SEQ ID NO: 127887 - RNA, 19 nt, Artificial Sequence
  Description of Artificial Sequence: Synthetic oligonucleotide
  Antisense strand to SEQ ID NO: 127886
ucugauaaaccgugugacc

SEQ ID NO: 127888 - RNA, 19 nt, Artificial Sequence
  Description of Artificial Sequence: Synthetic oligonucleotide
  Sense strand starting at position 637 of SEQ ID NO: 1632
ggcucagucccuuguguga

SEQ ID NO: 127889 - RNA, 19 nt, Artificial Sequence
  Description of Artificial Sequence: Synthetic oligonucleotide
  Antisense strand to SEQ ID NO: 127888
ucacacaagggacugagcc

SEQ ID NO: 127890 - RNA, 19 nt, Artificial Sequence
  Description of Artificial Sequence: Synthetic oligonucleotide
  Sense strand starting at position 440 of SEQ ID NO: 1632
gguuacaucugccacacua

SEQ ID NO: 127891 - RNA, 19 nt, Artificial Sequence
  Description of Artificial Sequence: Synthetic oligonucleotide
  Antisense strand to SEQ ID NO: 127890
uaguguggcagauguaacc

SEQ ID NO: 127892 - RNA, 19 nt, Artificial Sequence
  Description of Artificial Sequence: Synthetic oligonucleotide
  Sense strand starting at position 383 of SEQ ID NO: 1632
ccuggagugaccugaauau

SEQ ID NO: 127893 - RNA, 19 nt, Artificial Sequence
  Description of Artificial Sequence: Synthetic oligonucleotide
  Antisense strand to SEQ ID NO: 127892
auauucaggucacuccagg

SEQ ID NO: 127894 - RNA, 19 nt, Artificial Sequence
  Description of Artificial Sequence: Synthetic oligonucleotide
  Sense strand starting at position 40 of SEQ ID NO: 1632
cguggagucuguaaggacu

SEQ ID NO: 127895 - RNA, 19 nt, Artificial Sequence
  Description of Artificial Sequence: Synthetic oligonucleotide
  Antisense strand to SEQ ID NO: 127894
aguccuuacagacuccacg

SEQ ID NO: 127896 - RNA, 19 nt, Artificial Sequence
  Description of Artificial Sequence: Synthetic oligonucleotide
  Sense strand starting at position 3374 of SEQ ID NO: 1633
gggcguccucaggaagaca

SEQ ID NO: 127897 - RNA, 19 nt, Artificial Sequence
  Description of Artificial Sequence: Synthetic oligonucleotide
  Antisense strand to SEQ ID NO: 127896
ugucuuccugaggacgccc

SEQ ID NO: 127898 - RNA, 19 nt, Artificial Sequence
  Description of Artificial Sequence: Synthetic oligonucleotide
  Sense strand starting at position 3308 of SEQ ID NO: 1633
gggcucugccguggaauua

SEQ ID NO: 127899 - RNA, 19 nt, Artificial Sequence
  Description of Artificial Sequence: Synthetic oligonucleotide
  Antisense strand to SEQ ID NO: 127898
uaauuccacggcagagccc

SEQ ID NO: 127900 - RNA, 19 nt, Artificial Sequence
  Description of Artificial Sequence: Synthetic oligonucleotide
  Sense strand starting at position 3307 of SEQ ID NO: 1633
ugggcucugccguggaauu

SEQ ID NO: 127901 - RNA, 19 nt, Artificial Sequence
  Description of Artificial Sequence: Synthetic oligonucleotide
  Antisense strand to SEQ ID NO: 127900
aauuccacggcagagccca

SEQ ID NO: 127902 - RNA, 19 nt, Artificial Sequence
  Description of Artificial Sequence: Synthetic oligonucleotide
  Sense strand starting at position 3141 of SEQ ID NO: 1633
guggcagucccugaggaga

SEQ ID NO: 127903 - RNA, 19 nt, Artificial Sequence
  Description of Artificial Sequence: Synthetic oligonucleotide
  Antisense strand to SEQ ID NO: 127902
ucuccucagggacugccac

SEQ ID NO: 127904 - RNA, 19 nt, Artificial Sequence
  Description of Artificial Sequence: Synthetic oligonucleotide
  Sense strand starting at position 3054 of SEQ ID NO: 1633
aggaguuuggccugcagag

SEQ ID NO: 127905 - RNA, 19 nt, Artificial Sequence
  Description of Artificial Sequence: Synthetic oligonucleotide
  Antisense strand to SEQ ID NO: 127904
cucugcaggccaaacuccu

SEQ ID NO: 127906 - RNA, 19 nt, Artificial Sequence
  Description of Artificial Sequence: Synthetic oligonucleotide
  Sense strand starting at position 2049 of SEQ ID NO: 1633
gcccaaucccugugcuaau

SEQ ID NO: 127907 - RNA, 19 nt, Artificial Sequence
  Description of Artificial Sequence: Synthetic oligonucleotide
  Antisense strand to SEQ ID NO: 127906
auuagcacagggauugggc

SEQ ID NO: 127908 - RNA, 19 nt, Artificial Sequence
  Description of Artificial Sequence: Synthetic oligonucleotide
  Sense strand starting at position 1450 of SEQ ID NO: 1633
ccacaugaucccuagagca

SEQ ID NO: 127909 - RNA, 19 nt, Artificial Sequence
  Description of Artificial Sequence: Synthetic oligonucleotide
  Antisense strand to SEQ ID NO: 127908
ugcucuagggaucaugugg

SEQ ID NO: 127910 - RNA, 19 nt, Artificial Sequence
  Description of Artificial Sequence: Synthetic oligonucleotide
  Sense strand starting at position 1206 of SEQ ID NO: 1633
agagucuccuaacggcaaa

SEQ ID NO: 127911 - RNA, 19 nt, Artificial Sequence
  Description of Artificial Sequence: Synthetic oligonucleotide
  Antisense strand to SEQ ID NO: 127910
uuugccguuaggagacucu

SEQ ID NO: 127912 - RNA, 19 nt, Artificial Sequence
  Description of Artificial Sequence: Synthetic oligonucleotide
  Sense strand starting at position 1000 of SEQ ID NO: 1633
agguauggcugcagggauu

SEQ ID NO: 127913 - RNA, 19 nt, Artificial Sequence
  Description of Artificial Sequence: Synthetic oligonucleotide
  Antisense strand to SEQ ID NO: 127912
aaucccugcagccauaccu

SEQ ID NO: 127914 - RNA, 19 nt, Artificial Sequence
  Description of Artificial Sequence: Synthetic oligonucleotide
  Sense strand starting at position 910 of SEQ ID NO: 1633
cuacgugaucacgagcaga

SEQ ID NO: 127915 - RNA, 19 nt, Artificial Sequence
  Description of Artificial Sequence: Synthetic oligonucleotide
  Antisense strand to SEQ ID NO: 127914
ucugcucgugaucacguag

SEQ ID NO: 127916 - RNA, 19 nt, Artificial Sequence
  Description of Artificial Sequence: Synthetic oligonucleotide
  Sense strand starting at position 902 of SEQ ID NO: 1633
ggaagcuacuacgugauca

SEQ ID NO: 127917 - RNA, 19 nt, Artificial Sequence
  Description of Artificial Sequence: Synthetic oligonucleotide
  Antisense strand to SEQ ID NO: 127916
ugaucacguaguagcuucc

SEQ ID NO: 127918 - RNA, 19 nt, Artificial Sequence
  Description of Artificial Sequence: Synthetic oligonucleotide
  Sense strand starting at position 788 of SEQ ID NO: 1633
gguaccaucugcuaaagca

SEQ ID NO: 127919 - RNA, 19 nt, Artificial Sequence
  Description of Artificial Sequence: Synthetic oligonucleotide
  Antisense strand to SEQ ID NO: 127918
ugcuuuagcagaugguacc

SEQ ID NO: 127920 - RNA, 19 nt, Artificial Sequence
  Description of Artificial Sequence: Synthetic oligonucleotide
  Sense strand starting at position 786 of SEQ ID NO: 1633
gagguaccaucugcuaaag

SEQ ID NO: 127921 - RNA, 19 nt, Artificial Sequence
  Description of Artificial Sequence: Synthetic oligonucleotide
  Antisense strand to SEQ ID NO: 127920
cuuuagcagaugguaccuc

SEQ ID NO: 127922 - RNA, 19 nt, Artificial Sequence
  Description of Artificial Sequence: Synthetic oligonucleotide
  Sense strand starting at position 654 of SEQ ID NO: 1633
uguagcuugucccaggaga

SEQ ID NO: 127923 - RNA, 19 nt, Artificial Sequence
  Description of Artificial Sequence: Synthetic oligonucleotide
  Antisense strand to SEQ ID NO: 127922
ucuccugggacaagcuaca

SEQ ID NO: 127924 - RNA, 19 nt, Artificial Sequence
  Description of Artificial Sequence: Synthetic oligonucleotide
  Sense strand starting at position 493 of SEQ ID NO: 1633
cacgaauggugccaugaau

SEQ ID NO: 127925 - RNA, 19 nt, Artificial Sequence
  Description of Artificial Sequence: Synthetic oligonucleotide
  Antisense strand to SEQ ID NO: 127924
auucauggcaccauucgug

SEQ ID NO: 127926 - RNA, 19 nt, Artificial Sequence
  Description of Artificial Sequence: Synthetic oligonucleotide
  Sense strand starting at position 99 of SEQ ID NO: 1633
ccagaugguccugggaacu

SEQ ID NO: 127927 - RNA, 19 nt, Artificial Sequence
  Description of Artificial Sequence: Synthetic oligonucleotide
  Antisense strand to SEQ ID NO: 127926
aguucccaggaccaucugg

SEQ ID NO: 127928 - RNA, 19 nt, Artificial Sequence
  Description of Artificial Sequence: Synthetic oligonucleotide
  Sense strand starting at position 66 of SEQ ID NO: 1634
agugucugucauuaagaag

SEQ ID NO: 127929 - RNA, 19 nt, Artificial Sequence
  Description of Artificial Sequence: Synthetic oligonucleotide
  Antisense strand to SEQ ID NO: 127928
cuucuuaaugacagacacu

SEQ ID NO: 127930 - RNA, 19 nt, Artificial Sequence
  Description of Artificial Sequence: Synthetic oligonucleotide
  Sense strand starting at position 194 of SEQ ID NO: 1634
gcuugcagucacucuuagu

SEQ ID NO: 127931 - RNA, 19 nt, Artificial Sequence
  Description of Artificial Sequence: Synthetic oligonucleotide
  Antisense strand to SEQ ID NO: 127930
acuaagagugacugcaagc

SEQ ID NO: 127932 - RNA, 19 nt, Artificial Sequence
  Description of Artificial Sequence: Synthetic oligonucleotide
  Sense strand starting at position 340 of SEQ ID NO: 1634
agagaauaucacuaugcgu

SEQ ID NO: 127933 - RNA, 19 nt, Artificial Sequence
  Description of Artificial Sequence: Synthetic oligonucleotide
  Antisense strand to SEQ ID NO: 127932
acgcauagugauauucucu

SEQ ID NO: 127934 - RNA, 19 nt, Artificial Sequence
  Description of Artificial Sequence: Synthetic oligonucleotide
  Sense strand starting at position 433 of SEQ ID NO: 1634
aaaggaauguucucaggcu

SEQ ID NO: 127935 - RNA, 19 nt, Artificial Sequence
  Description of Artificial Sequence: Synthetic oligonucleotide
  Antisense strand to SEQ ID NO: 127934
agccugagaacauuccuuu

SEQ ID NO: 127936 - RNA, 19 nt, Artificial Sequence
  Description of Artificial Sequence: Synthetic oligonucleotide
  Sense strand starting at position 439 of SEQ ID NO: 1634
auguucucaggcuaaugaa

SEQ ID NO: 127937 - RNA, 19 nt, Artificial Sequence
  Description of Artificial Sequence: Synthetic oligonucleotide
  Antisense strand to SEQ ID NO: 127936
uucauuagccugagaacau

SEQ ID NO: 127938 - RNA, 19 nt, Artificial Sequence
  Description of Artificial Sequence: Synthetic oligonucleotide
  Sense strand starting at position 466 of SEQ ID NO: 1634
aggaaugauucugccucaa

SEQ ID NO: 127939 - RNA, 19 nt, Artificial Sequence
  Description of Artificial Sequence: Synthetic oligonucleotide
  Antisense strand to SEQ ID NO: 127938
uugaggcagaaucauuccu

SEQ ID NO: 127940 - RNA, 19 nt, Artificial Sequence
  Description of Artificial Sequence: Synthetic oligonucleotide
  Sense strand starting at position 631 of SEQ ID NO: 1634
ugcucaaauggaugagaug

SEQ ID NO: 127941 - RNA, 19 nt, Artificial Sequence
  Description of Artificial Sequence: Synthetic oligonucleotide
  Antisense strand to SEQ ID NO: 127940
caucucauccauuugagca

SEQ ID NO: 127942 - RNA, 19 nt, Artificial Sequence
  Description of Artificial Sequence: Synthetic oligonucleotide
  Sense strand starting at position 694 of SEQ ID NO: 1634
uugucuuggcagugauuuc

SEQ ID NO: 127943 - RNA, 19 nt, Artificial Sequence
  Description of Artificial Sequence: Synthetic oligonucleotide
  Antisense strand to SEQ ID NO: 127942
gaaaucacugccaagacaa

SEQ ID NO: 127944 - RNA, 19 nt, Artificial Sequence
  Description of Artificial Sequence: Synthetic oligonucleotide
  Sense strand starting at position 701 of SEQ ID NO: 1634
ggcagugauuucucugguc

SEQ ID NO: 127945 - RNA, 19 nt, Artificial Sequence
  Description of Artificial Sequence: Synthetic oligonucleotide
  Antisense strand to SEQ ID NO: 127944
gaccagagaaaucacugcc

SEQ ID NO: 127946 - RNA, 19 nt, Artificial Sequence
  Description of Artificial Sequence: Synthetic oligonucleotide
  Sense strand starting at position 703 of SEQ ID NO: 1634
cagugauuucucuggucug

SEQ ID NO: 127947 - RNA, 19 nt, Artificial Sequence
  Description of Artificial Sequence: Synthetic oligonucleotide
  Antisense strand to SEQ ID NO: 127946
cagaccagagaaaucacug

SEQ ID NO: 127948 - RNA, 19 nt, Artificial Sequence
  Description of Artificial Sequence: Synthetic oligonucleotide
  Sense strand starting at position 706 of SEQ ID NO: 1634
ugauuucucuggucugugu

SEQ ID NO: 127949 - RNA, 19 nt, Artificial Sequence
  Description of Artificial Sequence: Synthetic oligonucleotide
  Antisense strand to SEQ ID NO: 127948
acacagaccagagaaauca

SEQ ID NO: 127950 - RNA, 19 nt, Artificial Sequence
  Description of Artificial Sequence: Synthetic oligonucleotide
  Sense strand starting at position 722 of SEQ ID NO: 1634
ugucccuaugaaugaauga

SEQ ID NO: 127951 - RNA, 19 nt, Artificial Sequence
  Description of Artificial Sequence: Synthetic oligonucleotide
  Antisense strand to SEQ ID NO: 127950
ucauucauucauagggaca

SEQ ID NO: 127952 - RNA, 19 nt, Artificial Sequence
  Description of Artificial Sequence: Synthetic oligonucleotide
  Sense strand starting at position 1181 of SEQ ID NO: 1634
uuguaacuuccacagugaa

SEQ ID NO: 127953 - RNA, 19 nt, Artificial Sequence
  Description of Artificial Sequence: Synthetic oligonucleotide
  Antisense strand to SEQ ID NO: 127952
uucacuguggaaguuacaa

SEQ ID NO: 127954 - RNA, 19 nt, Artificial Sequence
  Description of Artificial Sequence: Synthetic oligonucleotide
  Sense strand starting at position 1212 of SEQ ID NO: 1634
aucuaaagaccucacguuu

SEQ ID NO: 127955 - RNA, 19 nt, Artificial Sequence
  Description of Artificial Sequence: Synthetic oligonucleotide
  Antisense strand to SEQ ID NO: 127954
aaacgugaggucuuuagau

SEQ ID NO: 127956 - RNA, 19 nt, Artificial Sequence
  Description of Artificial Sequence: Synthetic oligonucleotide
  Sense strand starting at position 1260 of SEQ ID NO: 1634
uuugcuuuacuggauugaa

SEQ ID NO: 127957 - RNA, 19 nt, Artificial Sequence
  Description of Artificial Sequence: Synthetic oligonucleotide
  Antisense strand to SEQ ID NO: 127956
uucaauccaguaaagcaaa

SEQ ID NO: 127958 - RNA, 19 nt, Artificial Sequence
  Description of Artificial Sequence: Synthetic oligonucleotide
  Sense strand starting at position 1421 of SEQ ID NO: 1634
cucacagaacggugacaau

SEQ ID NO: 127959 - RNA, 19 nt, Artificial Sequence
  Description of Artificial Sequence: Synthetic oligonucleotide
  Antisense strand to SEQ ID NO: 127958
auugucaccguucugugag

SEQ ID NO: 127960 - RNA, 19 nt, Artificial Sequence
  Description of Artificial Sequence: Synthetic oligonucleotide
  Sense strand starting at position 1632 of SEQ ID NO: 1634
cagcgaaguccuuauaaau

SEQ ID NO: 127961 - RNA, 19 nt, Artificial Sequence
  Description of Artificial Sequence: Synthetic oligonucleotide
  Antisense strand to SEQ ID NO: 127960
auuuauaaggacuucgcug

SEQ ID NO: 127962 - RNA, 19 nt, Artificial Sequence
  Description of Artificial Sequence: Synthetic oligonucleotide
  Sense strand starting at position 1835 of SEQ ID NO: 1634
acacacuaggucuguagaa

SEQ ID NO: 127963 - RNA, 19 nt, Artificial Sequence
  Description of Artificial Sequence: Synthetic oligonucleotide
  Antisense strand to SEQ ID NO: 127962
uucuacagaccuagugugu

SEQ ID NO: 127964 - RNA, 19 nt, Artificial Sequence
  Description of Artificial Sequence: Synthetic oligonucleotide
  Sense strand starting at position 1836 of SEQ ID NO: 1634
cacacuaggucuguagaaa

SEQ ID NO: 127965 - RNA, 19 nt, Artificial Sequence
  Description of Artificial Sequence: Synthetic oligonucleotide
  Antisense strand to SEQ ID NO: 127964
uuucuacagaccuagugug

SEQ ID NO: 127966 - RNA, 19 nt, Artificial Sequence
  Description of Artificial Sequence: Synthetic oligonucleotide
  Sense strand starting at position 2341 of SEQ ID NO: 1634
ggagaauccugccuagaca

SEQ ID NO: 127967 - RNA, 19 nt, Artificial Sequence
  Description of Artificial Sequence: Synthetic oligonucleotide
  Antisense strand to SEQ ID NO: 127966
ugucuaggcaggauucucc

SEQ ID NO: 127968 - RNA, 19 nt, Artificial Sequence
  Description of Artificial Sequence: Synthetic oligonucleotide
  Sense strand starting at position 2429 of SEQ ID NO: 1634
uugcuaaguccagacuaaa

SEQ ID NO: 127969 - RNA, 19 nt, Artificial Sequence
  Description of Artificial Sequence: Synthetic oligonucleotide
  Antisense strand to SEQ ID NO: 127968
uuuagucuggacuuagcaa

SEQ ID NO: 127970 - RNA, 19 nt, Artificial Sequence
  Description of Artificial Sequence: Synthetic oligonucleotide
  Sense strand starting at position 2530 of SEQ ID NO: 1634
uagcuugaagaguauaauc

SEQ ID NO: 127971 - RNA, 19 nt, Artificial Sequence
  Description of Artificial Sequence: Synthetic oligonucleotide
  Antisense strand to SEQ ID NO: 127970
gauuauacucuucaagcua

SEQ ID NO: 127972 - RNA, 19 nt, Artificial Sequence
  Description of Artificial Sequence: Synthetic oligonucleotide
  Sense strand starting at position 2936 of SEQ ID NO: 1634
cccauuacuguuggaaaug

SEQ ID NO: 127973 - RNA, 19 nt, Artificial Sequence
  Description of Artificial Sequence: Synthetic oligonucleotide
  Antisense strand to SEQ ID NO: 127972
cauuuccaacaguaauggg

SEQ ID NO: 127974 - RNA, 19 nt, Artificial Sequence
  Description of Artificial Sequence: Synthetic oligonucleotide
  Sense strand starting at position 2957 of SEQ ID NO: 1634
ggcaaagucccacaaauug

SEQ ID NO: 127975 - RNA, 19 nt, Artificial Sequence
  Description of Artificial Sequence: Synthetic oligonucleotide
  Antisense strand to SEQ ID NO: 127974
caauuugugggacuuugcc

SEQ ID NO: 127976 - RNA, 19 nt, Artificial Sequence
  Description of Artificial Sequence: Synthetic oligonucleotide
  Sense strand starting at position 2964 of SEQ ID NO: 1634
ucccacaaauugguagaau

SEQ ID NO: 127977 - RNA, 19 nt, Artificial Sequence
  Description of Artificial Sequence: Synthetic oligonucleotide
  Antisense strand to SEQ ID NO: 127976
auucuaccaauuuguggga

SEQ ID NO: 127978 - RNA, 19 nt, Artificial Sequence
  Description of Artificial Sequence: Synthetic oligonucleotide
  Sense strand starting at position 3122 of SEQ ID NO: 1634
cuaaauacuuguucuagag

SEQ ID NO: 127979 - RNA, 19 nt, Artificial Sequence
  Description of Artificial Sequence: Synthetic oligonucleotide
  Antisense strand to SEQ ID NO: 127978
cucuagaacaaguauuuag

SEQ ID NO: 127980 - RNA, 19 nt, Artificial Sequence
  Description of Artificial Sequence: Synthetic oligonucleotide
  Sense strand starting at position 3126 of SEQ ID NO: 1634
auacuuguucuagagcaaa

SEQ ID NO: 127981 - RNA, 19 nt, Artificial Sequence
  Description of Artificial Sequence: Synthetic oligonucleotide
  Antisense strand to SEQ ID NO: 127980
uuugcucuagaacaaguau

SEQ ID NO: 127982 - RNA, 19 nt, Artificial Sequence
  Description of Artificial Sequence: Synthetic oligonucleotide
  Sense strand starting at position 3238 of SEQ ID NO: 1634
guagcugugaaucaacaga

SEQ ID NO: 127983 - RNA, 19 nt, Artificial Sequence
  Description of Artificial Sequence: Synthetic oligonucleotide
  Antisense strand to SEQ ID NO: 127982
ucuguugauucacagcuac

SEQ ID NO: 127984 - RNA, 19 nt, Artificial Sequence
  Description of Artificial Sequence: Synthetic oligonucleotide
  Sense strand starting at position 3346 of SEQ ID NO: 1634
augagagacaucuggccaa

SEQ ID NO: 127985 - RNA, 19 nt, Artificial Sequence
  Description of Artificial Sequence: Synthetic oligonucleotide
  Antisense strand to SEQ ID NO: 127984
uuggccagaugucucucau

SEQ ID NO: 127986 - RNA, 19 nt, Artificial Sequence
  Description of Artificial Sequence: Synthetic oligonucleotide
  Sense strand starting at position 3429 of SEQ ID NO: 1634
guaagugaauacucugaaa

SEQ ID NO: 127987 - RNA, 19 nt, Artificial Sequence
  Description of Artificial Sequence: Synthetic oligonucleotide
  Antisense strand to SEQ ID NO: 127986
uuucagaguauucacuuac

SEQ ID NO: 127988 - RNA, 19 nt, Artificial Sequence
  Description of Artificial Sequence: Synthetic oligonucleotide
  Sense strand starting at position 3441 of SEQ ID NO: 1634
ucugaaacucuggaguguu

SEQ ID NO: 127989 - RNA, 19 nt, Artificial Sequence
  Description of Artificial Sequence: Synthetic oligonucleotide
  Antisense strand to SEQ ID NO: 127988
aacacuccagaguuucaga

SEQ ID NO: 127990 - RNA, 19 nt, Artificial Sequence
  Description of Artificial Sequence: Synthetic oligonucleotide
  Sense strand starting at position 3444 of SEQ ID NO: 1634
gaaacucuggaguguuuaa

SEQ ID NO: 127991 - RNA, 19 nt, Artificial Sequence
  Description of Artificial Sequence: Synthetic oligonucleotide
  Antisense strand to SEQ ID NO: 127990
uuaaacacuccagaguuuc

SEQ ID NO: 127992 - RNA, 19 nt, Artificial Sequence
  Description of Artificial Sequence: Synthetic oligonucleotide
  Sense strand starting at position 3529 of SEQ ID NO: 1634
ugagguccuuucucuagaa

SEQ ID NO: 127993 - RNA, 19 nt, Artificial Sequence
  Description of Artificial Sequence: Synthetic oligonucleotide
  Antisense strand to SEQ ID NO: 127992
uucuagagaaaggaccuca

SEQ ID NO: 127994 - RNA, 19 nt, Artificial Sequence
  Description of Artificial Sequence: Synthetic oligonucleotide
  Sense strand starting at position 3530 of SEQ ID NO: 1634
gagguccuuucucuagaaa

SEQ ID NO: 127995 - RNA, 19 nt, Artificial Sequence
  Description of Artificial Sequence: Synthetic oligonucleotide
  Antisense strand to SEQ ID NO: 127994
uuucuagagaaaggaccuc

SEQ ID NO: 127996 - RNA, 19 nt, Artificial Sequence
  Description of Artificial Sequence: Synthetic oligonucleotide
  Sense strand starting at position 3531 of SEQ ID NO: 1634
agguccuuucucuagaaac

SEQ ID NO: 127997 - RNA, 19 nt, Artificial Sequence
  Description of Artificial Sequence: Synthetic oligonucleotide
  Antisense strand to SEQ ID NO: 127996
guuucuagagaaaggaccu

SEQ ID NO: 127998 - RNA, 19 nt, Artificial Sequence
  Description of Artificial Sequence: Synthetic oligonucleotide
  Sense strand starting at position 3679 of SEQ ID NO: 1634
cuuauaucugugcacaaga

SEQ ID NO: 127999 - RNA, 19 nt, Artificial Sequence
  Description of Artificial Sequence: Synthetic oligonucleotide
  Antisense strand to SEQ ID NO: 127998
ucuugugcacagauauaag

SEQ ID NO: 128000 - RNA, 19 nt, Artificial Sequence
  Description of Artificial Sequence: Synthetic oligonucleotide
  Sense strand starting at position 3778 of SEQ ID NO: 1634
cagaaagaguucccugaca

SEQ ID NO: 128001 - RNA, 19 nt, Artificial Sequence
  Description of Artificial Sequence: Synthetic oligonucleotide
  Antisense strand to SEQ ID NO: 128000
ugucagggaacucuuucug

SEQ ID NO: 128002 - RNA, 19 nt, Artificial Sequence
  Description of Artificial Sequence: Synthetic oligonucleotide
  Sense strand starting at position 3780 of SEQ ID NO: 1634
gaaagaguucccugacauc

SEQ ID NO: 128003 - RNA, 19 nt, Artificial Sequence
  Description of Artificial Sequence: Synthetic oligonucleotide
  Antisense strand to SEQ ID NO: 128002
gaugucagggaacucuuuc

SEQ ID NO: 128004 - RNA, 19 nt, Artificial Sequence
  Description of Artificial Sequence: Synthetic oligonucleotide
  Sense strand starting at position 3934 of SEQ ID NO: 1634
accaucuagccagauugua

SEQ ID NO: 128005 - RNA, 19 nt, Artificial Sequence
  Description of Artificial Sequence: Synthetic oligonucleotide
  Antisense strand to SEQ ID NO: 128004
uacaaucuggcuagauggu

SEQ ID NO: 128006 - RNA, 19 nt, Artificial Sequence
  Description of Artificial Sequence: Synthetic oligonucleotide
  Sense strand starting at position 3956 of SEQ ID NO: 1634
auguuauuccuguaucaaa

SEQ ID NO: 128007 - RNA, 19 nt, Artificial Sequence
  Description of Artificial Sequence: Synthetic oligonucleotide
  Antisense strand to SEQ ID NO: 128006
uuugauacaggaauaacau

SEQ ID NO: 128008 - RNA, 19 nt, Artificial Sequence
  Description of Artificial Sequence: Synthetic oligonucleotide
  Sense strand starting at position 47 of SEQ ID NO: 1635
gcauguuuaauggauacgu

SEQ ID NO: 128009 - RNA, 19 nt, Artificial Sequence
  Description of Artificial Sequence: Synthetic oligonucleotide
  Antisense strand to SEQ ID NO: 128008
acguauccauuaaacaugc

SEQ ID NO: 128010 - RNA, 19 nt, Artificial Sequence
  Description of Artificial Sequence: Synthetic oligonucleotide
  Sense strand starting at position 100 of SEQ ID NO: 1635
cagcgacuuccauagucuu

SEQ ID NO: 128011 - RNA, 19 nt, Artificial Sequence
  Description of Artificial Sequence: Synthetic oligonucleotide
  Antisense strand to SEQ ID NO: 128010
aagacuauggaagucgcug

SEQ ID NO: 128012 - RNA, 19 nt, Artificial Sequence
  Description of Artificial Sequence: Synthetic oligonucleotide
  Sense strand starting at position 114 of SEQ ID NO: 1635
gucuuaaggauaugaggca

SEQ ID NO: 128013 - RNA, 19 nt, Artificial Sequence
  Description of Artificial Sequence: Synthetic oligonucleotide
  Antisense strand to SEQ ID NO: 128012
ugccucauauccuuaagac

SEQ ID NO: 128014 - RNA, 19 nt, Artificial Sequence
  Description of Artificial Sequence: Synthetic oligonucleotide
  Sense strand starting at position 127 of SEQ ID NO: 1635
gaggcaucccuuugacauu

SEQ ID NO: 128015 - RNA, 19 nt, Artificial Sequence
  Description of Artificial Sequence: Synthetic oligonucleotide
  Antisense strand to SEQ ID NO: 128014
aaugucaaagggaugccuc

SEQ ID NO: 128016 - RNA, 19 nt, Artificial Sequence
  Description of Artificial Sequence: Synthetic oligonucleotide
  Sense strand starting at position 147 of SEQ ID NO: 1635
gcaaauggcucucuacaca

SEQ ID NO: 128017 - RNA, 19 nt, Artificial Sequence
  Description of Artificial Sequence: Synthetic oligonucleotide
  Antisense strand to SEQ ID NO: 128016
uguguagagagccauuugc

SEQ ID NO: 128018 - RNA, 19 nt, Artificial Sequence
  Description of Artificial Sequence: Synthetic oligonucleotide
  Sense strand starting at position 292 of SEQ ID NO: 1635
guguuuccuccugggaaga

SEQ ID NO: 128019 - RNA, 19 nt, Artificial Sequence
  Description of Artificial Sequence: Synthetic oligonucleotide
  Antisense strand to SEQ ID NO: 128018
ucuucccaggaggaaacac

SEQ ID NO: 128020 - RNA, 19 nt, Artificial Sequence
  Description of Artificial Sequence: Synthetic oligonucleotide
  Sense strand starting at position 293 of SEQ ID NO: 1635
uguuuccuccugggaagaa

SEQ ID NO: 128021 - RNA, 19 nt, Artificial Sequence
  Description of Artificial Sequence: Synthetic oligonucleotide
  Antisense strand to SEQ ID NO: 128020
uucuucccaggaggaaaca

SEQ ID NO: 128022 - RNA, 19 nt, Artificial Sequence
  Description of Artificial Sequence: Synthetic oligonucleotide
  Sense strand starting at position 398 of SEQ ID NO: 1635
ccaggaguucuuggucuua

SEQ ID NO: 128023 - RNA, 19 nt, Artificial Sequence
  Description of Artificial Sequence: Synthetic oligonucleotide
  Antisense strand to SEQ ID NO: 128022
uaagaccaagaacuccugg

SEQ ID NO: 128024 - RNA, 19 nt, Artificial Sequence
  Description of Artificial Sequence: Synthetic oligonucleotide
  Sense strand starting at position 400 of SEQ ID NO: 1635
aggaguucuuggucuuauc

SEQ ID NO: 128025 - RNA, 19 nt, Artificial Sequence
  Description of Artificial Sequence: Synthetic oligonucleotide
  Antisense strand to SEQ ID NO: 128024
gauaagaccaagaacuccu

SEQ ID NO: 128026 - RNA, 19 nt, Artificial Sequence
  Description of Artificial Sequence: Synthetic oligonucleotide
  Sense strand starting at position 496 of SEQ ID NO: 1635
gcagcucugcagggagaaa

SEQ ID NO: 128027 - RNA, 19 nt, Artificial Sequence
  Description of Artificial Sequence: Synthetic oligonucleotide
  Antisense strand to SEQ ID NO: 128026
uuucucccugcagagcugc

SEQ ID NO: 128028 - RNA, 19 nt, Artificial Sequence
  Description of Artificial Sequence: Synthetic oligonucleotide
  Sense strand starting at position 539 of SEQ ID NO: 1635
ugcugcacucuugagauaa

SEQ ID NO: 128029 - RNA, 19 nt, Artificial Sequence
  Description of Artificial Sequence: Synthetic oligonucleotide
  Antisense strand to SEQ ID NO: 128028
uuaucucaagagugcagca

SEQ ID NO: 128030 - RNA, 19 nt, Artificial Sequence
  Description of Artificial Sequence: Synthetic oligonucleotide
  Sense strand starting at position 549 of SEQ ID NO: 1635
uugagauaauucucuuagu

SEQ ID NO: 128031 - RNA, 19 nt, Artificial Sequence
  Description of Artificial Sequence: Synthetic oligonucleotide
  Antisense strand to SEQ ID NO: 128030
acuaagagaauuaucucaa

SEQ ID NO: 128032 - RNA, 19 nt, Artificial Sequence
  Description of Artificial Sequence: Synthetic oligonucleotide
  Sense strand starting at position 550 of SEQ ID NO: 1635
ugagauaauucucuuaguu

SEQ ID NO: 128033 - RNA, 19 nt, Artificial Sequence
  Description of Artificial Sequence: Synthetic oligonucleotide
  Antisense strand to SEQ ID NO: 128032
aacuaagagaauuaucuca

SEQ ID NO: 128034 - RNA, 19 nt, Artificial Sequence
  Description of Artificial Sequence: Synthetic oligonucleotide
  Sense strand starting at position 583 of SEQ ID NO: 1635
gguuuaagaagaugcugau

SEQ ID NO: 128035 - RNA, 19 nt, Artificial Sequence
  Description of Artificial Sequence: Synthetic oligonucleotide
  Antisense strand to SEQ ID NO: 128034
aucagcaucuucuuaaacc

SEQ ID NO: 128036 - RNA, 19 nt, Artificial Sequence
  Description of Artificial Sequence: Synthetic oligonucleotide
  Sense strand starting at position 609 of SEQ ID NO: 1635
auuugaaacuguggaucca

SEQ ID NO: 128037 - RNA, 19 nt, Artificial Sequence
  Description of Artificial Sequence: Synthetic oligonucleotide
  Antisense strand to SEQ ID NO: 128036
uggauccacaguuucaaau

SEQ ID NO: 128038 - RNA, 19 nt, Artificial Sequence
  Description of Artificial Sequence: Synthetic oligonucleotide
  Sense strand starting at position 718 of SEQ ID NO: 1635
ucggcacuccuugggagua

SEQ ID NO: 128039 - RNA, 19 nt, Artificial Sequence
  Description of Artificial Sequence: Synthetic oligonucleotide
  Antisense strand to SEQ ID NO: 128038
uacucccaaggagugccga

SEQ ID NO: 128040 - RNA, 19 nt, Artificial Sequence
  Description of Artificial Sequence: Synthetic oligonucleotide
  Sense strand starting at position 956 of SEQ ID NO: 1635
cucauucguuaauuugcua

SEQ ID NO: 128041 - RNA, 19 nt, Artificial Sequence
  Description of Artificial Sequence: Synthetic oligonucleotide
  Antisense strand to SEQ ID NO: 128040
uagcaaauuaacgaaugag

SEQ ID NO: 128042 - RNA, 19 nt, Artificial Sequence
  Description of Artificial Sequence: Synthetic oligonucleotide
  Sense strand starting at position 960 of SEQ ID NO: 1635
uucguuaauuugcuaguuu

SEQ ID NO: 128043 - RNA, 19 nt, Artificial Sequence
  Description of Artificial Sequence: Synthetic oligonucleotide
  Antisense strand to SEQ ID NO: 128042
aaacuagcaaauuaacgaa

SEQ ID NO: 128044 - RNA, 19 nt, Artificial Sequence
  Description of Artificial Sequence: Synthetic oligonucleotide
  Sense strand starting at position 1214 of SEQ ID NO: 1635
cggucauuaaggcaagaaa

SEQ ID NO: 128045 - RNA, 19 nt, Artificial Sequence
  Description of Artificial Sequence: Synthetic oligonucleotide
  Antisense strand to SEQ ID NO: 128044
uuucuugccuuaaugaccg

SEQ ID NO: 128046 - RNA, 19 nt, Artificial Sequence
  Description of Artificial Sequence: Synthetic oligonucleotide
  Sense strand starting at position 2200 of SEQ ID NO: 1635
ggcgcaucuuuacuggaaa

SEQ ID NO: 128047 - RNA, 19 nt, Artificial Sequence
  Description of Artificial Sequence: Synthetic oligonucleotide
  Antisense strand to SEQ ID NO: 128046
uuuccaguaaagaugcgcc

SEQ ID NO: 128048 - RNA, 19 nt, Artificial Sequence
  Description of Artificial Sequence: Synthetic oligonucleotide
  Sense strand starting at position 2468 of SEQ ID NO: 1635
agccgagagacauguguuu

SEQ ID NO: 128049 - RNA, 19 nt, Artificial Sequence
  Description of Artificial Sequence: Synthetic oligonucleotide
  Antisense strand to SEQ ID NO: 128048
aaacacaugucucucggcu

SEQ ID NO: 128050 - RNA, 19 nt, Artificial Sequence
  Description of Artificial Sequence: Synthetic oligonucleotide
  Sense strand starting at position 2780 of SEQ ID NO: 1635
ccagccaagcgugaugauu

SEQ ID NO: 128051 - RNA, 19 nt, Artificial Sequence
  Description of Artificial Sequence: Synthetic oligonucleotide
  Antisense strand to SEQ ID NO: 128050
aaucaucacgcuuggcugg

SEQ ID NO: 128052 - RNA, 19 nt, Artificial Sequence
  Description of Artificial Sequence: Synthetic oligonucleotide
  Sense strand starting at position 2788 of SEQ ID NO: 1635
gcgugaugauuauuaggaa

SEQ ID NO: 128053 - RNA, 19 nt, Artificial Sequence
  Description of Artificial Sequence: Synthetic oligonucleotide
  Antisense strand to SEQ ID NO: 128052
uuccuaauaaucaucacgc

SEQ ID NO: 128054 - RNA, 19 nt, Artificial Sequence
  Description of Artificial Sequence: Synthetic oligonucleotide
  Sense strand starting at position 2814 of SEQ ID NO: 1635
gcuuguucgcgauuaaauc

SEQ ID NO: 128055 - RNA, 19 nt, Artificial Sequence
  Description of Artificial Sequence: Synthetic oligonucleotide
  Antisense strand to SEQ ID NO: 128054
gauuuaaucgcgaacaagc

SEQ ID NO: 128056 - RNA, 19 nt, Artificial Sequence
  Description of Artificial Sequence: Synthetic oligonucleotide
  Sense strand starting at position 2815 of SEQ ID NO: 1635
cuuguucgcgauuaaaucu

SEQ ID NO: 128057 - RNA, 19 nt, Artificial Sequence
  Description of Artificial Sequence: Synthetic oligonucleotide
  Antisense strand to SEQ ID NO: 128056
agauuuaaucgcgaacaag

SEQ ID NO: 128058 - RNA, 19 nt, Artificial Sequence
  Description of Artificial Sequence: Synthetic oligonucleotide
  Sense strand starting at position 2863 of SEQ ID NO: 1635
agucaaccucucgaaacau

SEQ ID NO: 128059 - RNA, 19 nt, Artificial Sequence
  Description of Artificial Sequence: Synthetic oligonucleotide
  Antisense strand to SEQ ID NO: 128058
auguuucgagagguugacu

SEQ ID NO: 128060 - RNA, 19 nt, Artificial Sequence
  Description of Artificial Sequence: Synthetic oligonucleotide
  Sense strand starting at position 2920 of SEQ ID NO: 1635
gggugucucgugucugguu

SEQ ID NO: 128061 - RNA, 19 nt, Artificial Sequence
  Description of Artificial Sequence: Synthetic oligonucleotide
  Antisense strand to SEQ ID NO: 128060
aaccagacacgagacaccc

SEQ ID NO: 128062 - RNA, 19 nt, Artificial Sequence
  Description of Artificial Sequence: Synthetic oligonucleotide
  Sense strand starting at position 2990 of SEQ ID NO: 1635
ggguguugccaaggguaaa

SEQ ID NO: 128063 - RNA, 19 nt, Artificial Sequence
  Description of Artificial Sequence: Synthetic oligonucleotide
  Antisense strand to SEQ ID NO: 128062
uuuacccuuggcaacaccc

SEQ ID NO: 128064 - RNA, 19 nt, Artificial Sequence
  Description of Artificial Sequence: Synthetic oligonucleotide
  Sense strand starting at position 2991 of SEQ ID NO: 1635
gguguugccaaggguaaac

SEQ ID NO: 128065 - RNA, 19 nt, Artificial Sequence
  Description of Artificial Sequence: Synthetic oligonucleotide
  Antisense strand to SEQ ID NO: 128064
guuuacccuuggcaacacc

SEQ ID NO: 128066 - RNA, 19 nt, Artificial Sequence
  Description of Artificial Sequence: Synthetic oligonucleotide
  Sense strand starting at position 3030 of SEQ ID NO: 1635
gcagaacugcccuacuuga

SEQ ID NO: 128067 - RNA, 19 nt, Artificial Sequence
  Description of Artificial Sequence: Synthetic oligonucleotide
  Antisense strand to SEQ ID NO: 128066
ucaaguagggcaguucugc

SEQ ID NO: 128068 - RNA, 19 nt, Artificial Sequence
  Description of Artificial Sequence: Synthetic oligonucleotide
  Sense strand starting at position 3061 of SEQ ID NO: 1635
aagacauucuggcugggau

SEQ ID NO: 128069 - RNA, 19 nt, Artificial Sequence
  Description of Artificial Sequence: Synthetic oligonucleotide
  Antisense strand to SEQ ID NO: 128068
aucccagccagaaugucuu

SEQ ID NO: 128070 - RNA, 19 nt, Artificial Sequence
  Description of Artificial Sequence: Synthetic oligonucleotide
  Sense strand starting at position 3062 of SEQ ID NO: 1635
agacauucuggcugggauu

SEQ ID NO: 128071 - RNA, 19 nt, Artificial Sequence
  Description of Artificial Sequence: Synthetic oligonucleotide
  Antisense strand to SEQ ID NO: 128070
aaucccagccagaaugucu

SEQ ID NO: 128072 - RNA, 19 nt, Artificial Sequence
  Description of Artificial Sequence: Synthetic oligonucleotide
  Sense strand starting at position 3249 of SEQ ID NO: 1635
uucuuaggagcugaacuau

SEQ ID NO: 128073 - RNA, 19 nt, Artificial Sequence
  Description of Artificial Sequence: Synthetic oligonucleotide
  Antisense strand to SEQ ID NO: 128072
auaguucagcuccuaagaa

SEQ ID NO: 128074 - RNA, 19 nt, Artificial Sequence
  Description of Artificial Sequence: Synthetic oligonucleotide
  Sense strand starting at position 3261 of SEQ ID NO: 1635
gaacuauauugugcaauag

SEQ ID NO: 128075 - RNA, 19 nt, Artificial Sequence
  Description of Artificial Sequence: Synthetic oligonucleotide
  Antisense strand to SEQ ID NO: 128074
cuauugcacaauauaguuc

SEQ ID NO: 128076 - RNA, 19 nt, Artificial Sequence
  Description of Artificial Sequence: Synthetic oligonucleotide
  Sense strand starting at position 3292 of SEQ ID NO: 1635
gugggcuaucucuaagucu

SEQ ID NO: 128077 - RNA, 19 nt, Artificial Sequence
  Description of Artificial Sequence: Synthetic oligonucleotide
  Antisense strand to SEQ ID NO: 128076
agacuuagagauagcccac

SEQ ID NO: 128078 - RNA, 19 nt, Artificial Sequence
  Description of Artificial Sequence: Synthetic oligonucleotide
  Sense strand starting at position 3295 of SEQ ID NO: 1635
ggcuaucucuaagucucau

SEQ ID NO: 128079 - RNA, 19 nt, Artificial Sequence
  Description of Artificial Sequence: Synthetic oligonucleotide
  Antisense strand to SEQ ID NO: 128078
augagacuuagagauagcc

SEQ ID NO: 128080 - RNA, 19 nt, Artificial Sequence
  Description of Artificial Sequence: Synthetic oligonucleotide
  Sense strand starting at position 3314 of SEQ ID NO: 1635
guuauccugcaagauaaau

SEQ ID NO: 128081 - RNA, 19 nt, Artificial Sequence
  Description of Artificial Sequence: Synthetic oligonucleotide
  Antisense strand to SEQ ID NO: 128080
auuuaucuugcaggauaac

SEQ ID NO: 128082 - RNA, 19 nt, Artificial Sequence
  Description of Artificial Sequence: Synthetic oligonucleotide
  Sense strand starting at position 3342 of SEQ ID NO: 1635
ccuccuuuccagugaggaa

SEQ ID NO: 128083 - RNA, 19 nt, Artificial Sequence
  Description of Artificial Sequence: Synthetic oligonucleotide
  Antisense strand to SEQ ID NO: 128082
uuccucacuggaaaggagg

SEQ ID NO: 128084 - RNA, 19 nt, Artificial Sequence
  Description of Artificial Sequence: Synthetic oligonucleotide
  Sense strand starting at position 3679 of SEQ ID NO: 1635
cggaggugaggcugugaaa

SEQ ID NO: 128085 - RNA, 19 nt, Artificial Sequence
  Description of Artificial Sequence: Synthetic oligonucleotide
  Antisense strand to SEQ ID NO: 128084
uuucacagccucaccuccg

SEQ ID NO: 128086 - RNA, 19 nt, Artificial Sequence
  Description of Artificial Sequence: Synthetic oligonucleotide
  Sense strand starting at position 3712 of SEQ ID NO: 1635
uguauagcaucucugauaa

SEQ ID NO: 128087 - RNA, 19 nt, Artificial Sequence
  Description of Artificial Sequence: Synthetic oligonucleotide
  Antisense strand to SEQ ID NO: 128086
uuaucagagaugcuauaca

SEQ ID NO: 128088 - RNA, 19 nt, Artificial Sequence
  Description of Artificial Sequence: Synthetic oligonucleotide
  Sense strand starting at position 56 of SEQ ID NO: 1636
aaguaauuaucuguguaag

SEQ ID NO: 128089 - RNA, 19 nt, Artificial Sequence
  Description of Artificial Sequence: Synthetic oligonucleotide
  Antisense strand to SEQ ID NO: 128088
cuuacacagauaauuacuu

SEQ ID NO: 128090 - RNA, 19 nt, Artificial Sequence
  Description of Artificial Sequence: Synthetic oligonucleotide
  Sense strand starting at position 57 of SEQ ID NO: 1636
aguaauuaucuguguaagg

SEQ ID NO: 128091 - RNA, 19 nt, Artificial Sequence
  Description of Artificial Sequence: Synthetic oligonucleotide
  Antisense strand to SEQ ID NO: 128090
ccuuacacagauaauuacu

SEQ ID NO: 128092 - RNA, 19 nt, Artificial Sequence
  Description of Artificial Sequence: Synthetic oligonucleotide
  Sense strand starting at position 58 of SEQ ID NO: 1636
guaauuaucuguguaaggc

SEQ ID NO: 128093 - RNA, 19 nt, Artificial Sequence
  Description of Artificial Sequence: Synthetic oligonucleotide
  Antisense strand to SEQ ID NO: 128092
gccuuacacagauaauuac

SEQ ID NO: 128094 - RNA, 19 nt, Artificial Sequence
  Description of Artificial Sequence: Synthetic oligonucleotide
  Sense strand starting at position 173 of SEQ ID NO: 1636
gcagccugccaggauuaau

SEQ ID NO: 128095 - RNA, 19 nt, Artificial Sequence
  Description of Artificial Sequence: Synthetic oligonucleotide
  Antisense strand to SEQ ID NO: 128094
auuaauccuggcaggcugc

SEQ ID NO: 128096 - RNA, 19 nt, Artificial Sequence
  Description of Artificial Sequence: Synthetic oligonucleotide
  Sense strand starting at position 276 of SEQ ID NO: 1636
cucugugcccuugugcaaa

SEQ ID NO: 128097 - RNA, 19 nt, Artificial Sequence
  Description of Artificial Sequence: Synthetic oligonucleotide
  Antisense strand to SEQ ID NO: 128096
uuugcacaagggcacagag

SEQ ID NO: 128098 - RNA, 19 nt, Artificial Sequence
  Description of Artificial Sequence: Synthetic oligonucleotide
  Sense strand starting at position 297 of SEQ ID NO: 1636
cacagaaacucgcuuguuu

SEQ ID NO: 128099 - RNA, 19 nt, Artificial Sequence
  Description of Artificial Sequence: Synthetic oligonucleotide
  Antisense strand to SEQ ID NO: 128098
aaacaagcgaguuucugug

SEQ ID NO: 128100 - RNA, 19 nt, Artificial Sequence
  Description of Artificial Sequence: Synthetic oligonucleotide
  Sense strand starting at position 301 of SEQ ID NO: 1636
gaaacucgcuuguuuccau

SEQ ID NO: 128101 - RNA, 19 nt, Artificial Sequence
  Description of Artificial Sequence: Synthetic oligonucleotide
  Antisense strand to SEQ ID NO: 128100
auggaaacaagcgaguuuc

SEQ ID NO: 128102 - RNA, 19 nt, Artificial Sequence
  Description of Artificial Sequence: Synthetic oligonucleotide
  Sense strand starting at position 558 of SEQ ID NO: 1636
ggagauuuguagggcaagu

SEQ ID NO: 128103 - RNA, 19 nt, Artificial Sequence
  Description of Artificial Sequence: Synthetic oligonucleotide
  Antisense strand to SEQ ID NO: 128102
acuugcccuacaaaucucc

SEQ ID NO: 128104 - RNA, 19 nt, Artificial Sequence
  Description of Artificial Sequence: Synthetic oligonucleotide
  Sense strand starting at position 676 of SEQ ID NO: 1636
ccacucaagugaucagauu

SEQ ID NO: 128105 - RNA, 19 nt, Artificial Sequence
  Description of Artificial Sequence: Synthetic oligonucleotide
  Antisense strand to SEQ ID NO: 128104
aaucugaucacuugagugg

SEQ ID NO: 128106 - RNA, 19 nt, Artificial Sequence
  Description of Artificial Sequence: Synthetic oligonucleotide
  Sense strand starting at position 682 of SEQ ID NO: 1636
aagugaucagauugagggu

SEQ ID NO: 128107 - RNA, 19 nt, Artificial Sequence
  Description of Artificial Sequence: Synthetic oligonucleotide
  Antisense strand to SEQ ID NO: 128106
acccucaaucugaucacuu

SEQ ID NO: 128108 - RNA, 19 nt, Artificial Sequence
  Description of Artificial Sequence: Synthetic oligonucleotide
  Sense strand starting at position 685 of SEQ ID NO: 1636
ugaucagauugaggguaaa

SEQ ID NO: 128109 - RNA, 19 nt, Artificial Sequence
  Description of Artificial Sequence: Synthetic oligonucleotide
  Antisense strand to SEQ ID NO: 128108
uuuacccucaaucugauca

SEQ ID NO: 128110 - RNA, 19 nt, Artificial Sequence
  Description of Artificial Sequence: Synthetic oligonucleotide
  Sense strand starting at position 744 of SEQ ID NO: 1636
gcugcaaccuccucugaca

SEQ ID NO: 128111 - RNA, 19 nt, Artificial Sequence
  Description of Artificial Sequence: Synthetic oligonucleotide
  Antisense strand to SEQ ID NO: 128110
ugucagaggagguugcagc

SEQ ID NO: 128112 - RNA, 19 nt, Artificial Sequence
  Description of Artificial Sequence: Synthetic oligonucleotide
  Sense strand starting at position 1280 of SEQ ID NO: 1636
ucugacucauaagaaugau

SEQ ID NO: 128113 - RNA, 19 nt, Artificial Sequence
  Description of Artificial Sequence: Synthetic oligonucleotide
  Antisense strand to SEQ ID NO: 128112
aucauucuuaugagucaga

SEQ ID NO: 128114 - RNA, 19 nt, Artificial Sequence
  Description of Artificial Sequence: Synthetic oligonucleotide
  Sense strand starting at position 1384 of SEQ ID NO: 1636
uccugcuggcaagauuaaa

SEQ ID NO: 128115 - RNA, 19 nt, Artificial Sequence
  Description of Artificial Sequence: Synthetic oligonucleotide
  Antisense strand to SEQ ID NO: 128114
uuuaaucuugccagcagga

SEQ ID NO: 128116 - RNA, 19 nt, Artificial Sequence
  Description of Artificial Sequence: Synthetic oligonucleotide
  Sense strand starting at position 1576 of SEQ ID NO: 1636
gggcuauaauuagcauucu

SEQ ID NO: 128117 - RNA, 19 nt, Artificial Sequence
  Description of Artificial Sequence: Synthetic oligonucleotide
  Antisense strand to SEQ ID NO: 128116
agaaugcuaauuauagccc

SEQ ID NO: 128118 - RNA, 19 nt, Artificial Sequence
  Description of Artificial Sequence: Synthetic oligonucleotide
  Sense strand starting at position 1729 of SEQ ID NO: 1636
ccaccucaucuaugugaug

SEQ ID NO: 128119 - RNA, 19 nt, Artificial Sequence
  Description of Artificial Sequence: Synthetic oligonucleotide
  Antisense strand to SEQ ID NO: 128118
caucacauagaugaggugg

SEQ ID NO: 128120 - RNA, 19 nt, Artificial Sequence
  Description of Artificial Sequence: Synthetic oligonucleotide
  Sense strand starting at position 1765 of SEQ ID NO: 1636
cggcuucugaggugugauc

SEQ ID NO: 128121 - RNA, 19 nt, Artificial Sequence
  Description of Artificial Sequence: Synthetic oligonucleotide
  Antisense strand to SEQ ID NO: 128120
gaucacaccucagaagccg

SEQ ID NO: 128122 - RNA, 19 nt, Artificial Sequence
  Description of Artificial Sequence: Synthetic oligonucleotide
  Sense strand starting at position 1789 of SEQ ID NO: 1636
gcuggaaagcucuaacucu

SEQ ID NO: 128123 - RNA, 19 nt, Artificial Sequence
  Description of Artificial Sequence: Synthetic oligonucleotide
  Antisense strand to SEQ ID NO: 128122
agaguuagagcuuuccagc

SEQ ID NO: 128124 - RNA, 19 nt, Artificial Sequence
  Description of Artificial Sequence: Synthetic oligonucleotide
  Sense strand starting at position 1986 of SEQ ID NO: 1636
gcaucuuucccaggcagag

SEQ ID NO: 128125 - RNA, 19 nt, Artificial Sequence
  Description of Artificial Sequence: Synthetic oligonucleotide
  Antisense strand to SEQ ID NO: 128124
cucugccugggaaagaugc

SEQ ID NO: 128126 - RNA, 19 nt, Artificial Sequence
  Description of Artificial Sequence: Synthetic oligonucleotide
  Sense strand starting at position 2314 of SEQ ID NO: 1636
gggucuuagaaucaugugu

SEQ ID NO: 128127 - RNA, 19 nt, Artificial Sequence
  Description of Artificial Sequence: Synthetic oligonucleotide
  Antisense strand to SEQ ID NO: 128126
acacaugauucuaagaccc

SEQ ID NO: 128128 - RNA, 19 nt, Artificial Sequence
  Description of Artificial Sequence: Synthetic oligonucleotide
  Sense strand starting at position 2599 of SEQ ID NO: 1636
gagggaagucugugcuccu

SEQ ID NO: 128129 - RNA, 19 nt, Artificial Sequence
  Description of Artificial Sequence: Synthetic oligonucleotide
  Antisense strand to SEQ ID NO: 128128
aggagcacagacuucccuc

SEQ ID NO: 128130 - RNA, 19 nt, Artificial Sequence
  Description of Artificial Sequence: Synthetic oligonucleotide
  Sense strand starting at position 2602 of SEQ ID NO: 1636
ggaagucugugcuccuguu

SEQ ID NO: 128131 - RNA, 19 nt, Artificial Sequence
  Description of Artificial Sequence: Synthetic oligonucleotide
  Antisense strand to SEQ ID NO: 128130
aacaggagcacagacuucc

SEQ ID NO: 128132 - RNA, 19 nt, Artificial Sequence
  Description of Artificial Sequence: Synthetic oligonucleotide
  Sense strand starting at position 2669 of SEQ ID NO: 1636
ugauauagguacucagauc

SEQ ID NO: 128133 - RNA, 19 nt, Artificial Sequence
  Description of Artificial Sequence: Synthetic oligonucleotide
  Antisense strand to SEQ ID NO: 128132
gaucugaguaccuauauca

SEQ ID NO: 128134 - RNA, 19 nt, Artificial Sequence
  Description of Artificial Sequence: Synthetic oligonucleotide
  Sense strand starting at position 2767 of SEQ ID NO: 1636
gcaauuaucaggugagugg

SEQ ID NO: 128135 - RNA, 19 nt, Artificial Sequence
  Description of Artificial Sequence: Synthetic oligonucleotide
  Antisense strand to SEQ ID NO: 128134
ccacucaccugauaauugc

SEQ ID NO: 128136 - RNA, 19 nt, Artificial Sequence
  Description of Artificial Sequence: Synthetic oligonucleotide
  Sense strand starting at position 2827 of SEQ ID NO: 1636
ucuugauaacccugagcaa

SEQ ID NO: 128137 - RNA, 19 nt, Artificial Sequence
  Description of Artificial Sequence: Synthetic oligonucleotide
  Antisense strand to SEQ ID NO: 128136
uugcucaggguuaucaaga

SEQ ID NO: 128138 - RNA, 19 nt, Artificial Sequence
  Description of Artificial Sequence: Synthetic oligonucleotide
  Sense strand starting at position 2931 of SEQ ID NO: 1636
agcucuguuucugcuuaga

SEQ ID NO: 128139 - RNA, 19 nt, Artificial Sequence
  Description of Artificial Sequence: Synthetic oligonucleotide
  Antisense strand to SEQ ID NO: 128138
ucuaagcagaaacagagcu

SEQ ID NO: 128140 - RNA, 19 nt, Artificial Sequence
  Description of Artificial Sequence: Synthetic oligonucleotide
  Sense strand starting at position 2933 of SEQ ID NO: 1636
cucuguuucugcuuagaca

SEQ ID NO: 128141 - RNA, 19 nt, Artificial Sequence
  Description of Artificial Sequence: Synthetic oligonucleotide
  Antisense strand to SEQ ID NO: 128140
ugucuaagcagaaacagag

SEQ ID NO: 128142 - RNA, 19 nt, Artificial Sequence
  Description of Artificial Sequence: Synthetic oligonucleotide
  Sense strand starting at position 3010 of SEQ ID NO: 1636
cacggauucucugugacaa

SEQ ID NO: 128143 - RNA, 19 nt, Artificial Sequence
  Description of Artificial Sequence: Synthetic oligonucleotide
  Antisense strand to SEQ ID NO: 128142
uugucacagagaauccgug

SEQ ID NO: 128144 - RNA, 19 nt, Artificial Sequence
  Description of Artificial Sequence: Synthetic oligonucleotide
  Sense strand starting at position 3011 of SEQ ID NO: 1636
acggauucucugugacaau

SEQ ID NO: 128145 - RNA, 19 nt, Artificial Sequence
  Description of Artificial Sequence: Synthetic oligonucleotide
  Antisense strand to SEQ ID NO: 128144
auugucacagagaauccgu

SEQ ID NO: 128146 - RNA, 19 nt, Artificial Sequence
  Description of Artificial Sequence: Synthetic oligonucleotide
  Sense strand starting at position 3184 of SEQ ID NO: 1636
ggagucacuucugaauaga

SEQ ID NO: 128147 - RNA, 19 nt, Artificial Sequence
  Description of Artificial Sequence: Synthetic oligonucleotide
  Antisense strand to SEQ ID NO: 128146
ucuauucagaagugacucc

SEQ ID NO: 128148 - RNA, 19 nt, Artificial Sequence
  Description of Artificial Sequence: Synthetic oligonucleotide
  Sense strand starting at position 3332 of SEQ ID NO: 1636
gggucucucuuagugugau

SEQ ID NO: 128149 - RNA, 19 nt, Artificial Sequence
  Description of Artificial Sequence: Synthetic oligonucleotide
  Antisense strand to SEQ ID NO: 128148
aucacacuaagagagaccc

SEQ ID NO: 128150 - RNA, 19 nt, Artificial Sequence
  Description of Artificial Sequence: Synthetic oligonucleotide
  Sense strand starting at position 3338 of SEQ ID NO: 1636
cucuuagugugaucugagu

SEQ ID NO: 128151 - RNA, 19 nt, Artificial Sequence
  Description of Artificial Sequence: Synthetic oligonucleotide
  Antisense strand to SEQ ID NO: 128150
acucagaucacacuaagag

SEQ ID NO: 128152 - RNA, 19 nt, Artificial Sequence
  Description of Artificial Sequence: Synthetic oligonucleotide
  Sense strand starting at position 3340 of SEQ ID NO: 1636
cuuagugugaucugaguac

SEQ ID NO: 128153 - RNA, 19 nt, Artificial Sequence
  Description of Artificial Sequence: Synthetic oligonucleotide
  Antisense strand to SEQ ID NO: 128152
guacucagaucacacuaag

SEQ ID NO: 128154 - RNA, 19 nt, Artificial Sequence
  Description of Artificial Sequence: Synthetic oligonucleotide
  Sense strand starting at position 3344 of SEQ ID NO: 1636
gugugaucugaguacauau

SEQ ID NO: 128155 - RNA, 19 nt, Artificial Sequence
  Description of Artificial Sequence: Synthetic oligonucleotide
  Antisense strand to SEQ ID NO: 128154
auauguacucagaucacac

SEQ ID NO: 128156 - RNA, 19 nt, Artificial Sequence
  Description of Artificial Sequence: Synthetic oligonucleotide
  Sense strand starting at position 3346 of SEQ ID NO: 1636
gugaucugaguacauauau

SEQ ID NO: 128157 - RNA, 19 nt, Artificial Sequence
  Description of Artificial Sequence: Synthetic oligonucleotide
  Antisense strand to SEQ ID NO: 128156
auauauguacucagaucac

SEQ ID NO: 128158 - RNA, 19 nt, Artificial Sequence
  Description of Artificial Sequence: Synthetic oligonucleotide
  Sense strand starting at position 3378 of SEQ ID NO: 1636
ugaagcccuuaucuguaaa

SEQ ID NO: 128159 - RNA, 19 nt, Artificial Sequence
  Description of Artificial Sequence: Synthetic oligonucleotide
  Antisense strand to SEQ ID NO: 128158
uuuacagauaagggcuuca

SEQ ID NO: 128160 - RNA, 19 nt, Artificial Sequence
  Description of Artificial Sequence: Synthetic oligonucleotide
  Sense strand starting at position 3381 of SEQ ID NO: 1636
agcccuuaucuguaaagga

SEQ ID NO: 128161 - RNA, 19 nt, Artificial Sequence
  Description of Artificial Sequence: Synthetic oligonucleotide
  Antisense strand to SEQ ID NO: 128160
uccuuuacagauaagggcu

SEQ ID NO: 128162 - RNA, 19 nt, Artificial Sequence
  Description of Artificial Sequence: Synthetic oligonucleotide
  Sense strand starting at position 3389 of SEQ ID NO: 1636
ucuguaaaggaaugugcaa

SEQ ID NO: 128163 - RNA, 19 nt, Artificial Sequence
  Description of Artificial Sequence: Synthetic oligonucleotide
  Antisense strand to SEQ ID NO: 128162
uugcacauuccuuuacaga

SEQ ID NO: 128164 - RNA, 19 nt, Artificial Sequence
  Description of Artificial Sequence: Synthetic oligonucleotide
  Sense strand starting at position 3694 of SEQ ID NO: 1636
cugcauuggcuauaggaaa

SEQ ID NO: 128165 - RNA, 19 nt, Artificial Sequence
  Description of Artificial Sequence: Synthetic oligonucleotide
  Antisense strand to SEQ ID NO: 128164
uuuccuauagccaaugcag

SEQ ID NO: 128166 - RNA, 19 nt, Artificial Sequence
  Description of Artificial Sequence: Synthetic oligonucleotide
  Sense strand starting at position 3835 of SEQ ID NO: 1636
gggagagucugcuuucagu

SEQ ID NO: 128167 - RNA, 19 nt, Artificial Sequence
  Description of Artificial Sequence: Synthetic oligonucleotide
  Antisense strand to SEQ ID NO: 128166
acugaaagcagacucuccc

SEQ ID NO: 128168 - RNA, 19 nt, Artificial Sequence
  Description of Artificial Sequence: Synthetic oligonucleotide
  Sense strand starting at position 43 of SEQ ID NO: 1641
ugcugagacacaugaugga

SEQ ID NO: 128169 - RNA, 19 nt, Artificial Sequence
  Description of Artificial Sequence: Synthetic oligonucleotide
  Antisense strand to SEQ ID NO: 128168
uccaucaugugucucagca

SEQ ID NO: 128170 - RNA, 19 nt, Artificial Sequence
  Description of Artificial Sequence: Synthetic oligonucleotide
  Sense strand starting at position 131 of SEQ ID NO: 1641
gcagucugucccugaguga

SEQ ID NO: 128171 - RNA, 19 nt, Artificial Sequence
  Description of Artificial Sequence: Synthetic oligonucleotide
  Antisense strand to SEQ ID NO: 128170
ucacucagggacagacugc

SEQ ID NO: 128172 - RNA, 19 nt, Artificial Sequence
  Description of Artificial Sequence: Synthetic oligonucleotide
  Sense strand starting at position 164 of SEQ ID NO: 1641
aucuguaaaugagaauaag

SEQ ID NO: 128173 - RNA, 19 nt, Artificial Sequence
  Description of Artificial Sequence: Synthetic oligonucleotide
  Antisense strand to SEQ ID NO: 128172
cuuauucucauuuacagau

SEQ ID NO: 128174 - RNA, 19 nt, Artificial Sequence
  Description of Artificial Sequence: Synthetic oligonucleotide
  Sense strand starting at position 244 of SEQ ID NO: 1641
cuaaguugcgcaguuguca

SEQ ID NO: 128175 - RNA, 19 nt, Artificial Sequence
  Description of Artificial Sequence: Synthetic oligonucleotide
  Antisense strand to SEQ ID NO: 128174
ugacaacugcgcaacuuag

SEQ ID NO: 128176 - RNA, 19 nt, Artificial Sequence
  Description of Artificial Sequence: Synthetic oligonucleotide
  Sense strand starting at position 249 of SEQ ID NO: 1641
uugcgcaguugucacuauu

SEQ ID NO: 128177 - RNA, 19 nt, Artificial Sequence
  Description of Artificial Sequence: Synthetic oligonucleotide
  Antisense strand to SEQ ID NO: 128176
aauagugacaacugcgcaa

SEQ ID NO: 128178 - RNA, 19 nt, Artificial Sequence
  Description of Artificial Sequence: Synthetic oligonucleotide
  Sense strand starting at position 257 of SEQ ID NO: 1641
uugucacuauugucaugua

SEQ ID NO: 128179 - RNA, 19 nt, Artificial Sequence
  Description of Artificial Sequence: Synthetic oligonucleotide
  Antisense strand to SEQ ID NO: 128178
uacaugacaauagugacaa

SEQ ID NO: 128180 - RNA, 19 nt, Artificial Sequence
  Description of Artificial Sequence: Synthetic oligonucleotide
  Sense strand starting at position 258 of SEQ ID NO: 1641
ugucacuauugucauguaa

SEQ ID NO: 128181 - RNA, 19 nt, Artificial Sequence
  Description of Artificial Sequence: Synthetic oligonucleotide
  Antisense strand to SEQ ID NO: 128180
uuacaugacaauagugaca

SEQ ID NO: 128182 - RNA, 19 nt, Artificial Sequence
  Description of Artificial Sequence: Synthetic oligonucleotide
  Sense strand starting at position 260 of SEQ ID NO: 1641
ucacuauugucauguaaau

SEQ ID NO: 128183 - RNA, 19 nt, Artificial Sequence
  Description of Artificial Sequence: Synthetic oligonucleotide
  Antisense strand to SEQ ID NO: 128182
auuuacaugacaauaguga

SEQ ID NO: 128184 - RNA, 19 nt, Artificial Sequence
  Description of Artificial Sequence: Synthetic oligonucleotide
  Sense strand starting at position 420 of SEQ ID NO: 1641
ugccgcaaucagugcauau

SEQ ID NO: 128185 - RNA, 19 nt, Artificial Sequence
  Description of Artificial Sequence: Synthetic oligonucleotide
  Antisense strand to SEQ ID NO: 128184
auaugcacugauugcggca

SEQ ID NO: 128186 - RNA, 19 nt, Artificial Sequence
  Description of Artificial Sequence: Synthetic oligonucleotide
  Sense strand starting at position 665 of SEQ ID NO: 1641
ccugaagaguggcugaguu

SEQ ID NO: 128187 - RNA, 19 nt, Artificial Sequence
  Description of Artificial Sequence: Synthetic oligonucleotide
  Antisense strand to SEQ ID NO: 128186
aacucagccacucuucagg

SEQ ID NO: 128188 - RNA, 19 nt, Artificial Sequence
  Description of Artificial Sequence: Synthetic oligonucleotide
  Sense strand starting at position 667 of SEQ ID NO: 1641
ugaagaguggcugaguuca

SEQ ID NO: 128189 - RNA, 19 nt, Artificial Sequence
  Description of Artificial Sequence: Synthetic oligonucleotide
  Antisense strand to SEQ ID NO: 128188
ugaacucagccacucuuca

SEQ ID NO: 128190 - RNA, 19 nt, Artificial Sequence
  Description of Artificial Sequence: Synthetic oligonucleotide
  Sense strand starting at position 754 of SEQ ID NO: 1641
uuuccucauccgugacaua

SEQ ID NO: 128191 - RNA, 19 nt, Artificial Sequence
  Description of Artificial Sequence: Synthetic oligonucleotide
  Antisense strand to SEQ ID NO: 128190
uaugucacggaugaggaaa

SEQ ID NO: 128192 - RNA, 19 nt, Artificial Sequence
  Description of Artificial Sequence: Synthetic oligonucleotide
  Sense strand starting at position 755 of SEQ ID NO: 1641
uuccucauccgugacauaa

SEQ ID NO: 128193 - RNA, 19 nt, Artificial Sequence
  Description of Artificial Sequence: Synthetic oligonucleotide
  Antisense strand to SEQ ID NO: 128192
uuaugucacggaugaggaa

SEQ ID NO: 128194 - RNA, 19 nt, Artificial Sequence
  Description of Artificial Sequence: Synthetic oligonucleotide
  Sense strand starting at position 985 of SEQ ID NO: 1641
gauagcuggugcugggaua

SEQ ID NO: 128195 - RNA, 19 nt, Artificial Sequence
  Description of Artificial Sequence: Synthetic oligonucleotide
  Antisense strand to SEQ ID NO: 128194
uaucccagcaccagcuauc

SEQ ID NO: 128196 - RNA, 19 nt, Artificial Sequence
  Description of Artificial Sequence: Synthetic oligonucleotide
  Sense strand starting at position 1231 of SEQ ID NO: 1641
gggugaucuccucaguccu

SEQ ID NO: 128197 - RNA, 19 nt, Artificial Sequence
  Description of Artificial Sequence: Synthetic oligonucleotide
  Antisense strand to SEQ ID NO: 128196
aggacugaggagaucaccc

SEQ ID NO: 128198 - RNA, 19 nt, Artificial Sequence
  Description of Artificial Sequence: Synthetic oligonucleotide
  Sense strand starting at position 1289 of SEQ ID NO: 1641
ccaacuuaucugcacggga

SEQ ID NO: 128199 - RNA, 19 nt, Artificial Sequence
  Description of Artificial Sequence: Synthetic oligonucleotide
  Antisense strand to SEQ ID NO: 128198
ucccgugcagauaaguugg

SEQ ID NO: 128200 - RNA, 19 nt, Artificial Sequence
  Description of Artificial Sequence: Synthetic oligonucleotide
  Sense strand starting at position 1291 of SEQ ID NO: 1641
aacuuaucugcacgggaau

SEQ ID NO: 128201 - RNA, 19 nt, Artificial Sequence
  Description of Artificial Sequence: Synthetic oligonucleotide
  Antisense strand to SEQ ID NO: 128200
auucccgugcagauaaguu

SEQ ID NO: 128202 - RNA, 19 nt, Artificial Sequence
  Description of Artificial Sequence: Synthetic oligonucleotide
  Sense strand starting at position 1303 of SEQ ID NO: 1641
cgggaauccguuugcagag

SEQ ID NO: 128203 - RNA, 19 nt, Artificial Sequence
  Description of Artificial Sequence: Synthetic oligonucleotide
  Antisense strand to SEQ ID NO: 128202
cucugcaaacggauucccg

SEQ ID NO: 128204 - RNA, 19 nt, Artificial Sequence
  Description of Artificial Sequence: Synthetic oligonucleotide
  Sense strand starting at position 1330 of SEQ ID NO: 1641
uccugcaguccucagggaa

SEQ ID NO: 128205 - RNA, 19 nt, Artificial Sequence
  Description of Artificial Sequence: Synthetic oligonucleotide
  Antisense strand to SEQ ID NO: 128204
uucccugaggacugcagga

SEQ ID NO: 128206 - RNA, 19 nt, Artificial Sequence
  Description of Artificial Sequence: Synthetic oligonucleotide
  Sense strand starting at position 1333 of SEQ ID NO: 1641
ugcaguccucagggaaauu

SEQ ID NO: 128207 - RNA, 19 nt, Artificial Sequence
  Description of Artificial Sequence: Synthetic oligonucleotide
  Antisense strand to SEQ ID NO: 128206
aauuucccugaggacugca

SEQ ID NO: 128208 - RNA, 19 nt, Artificial Sequence
  Description of Artificial Sequence: Synthetic oligonucleotide
  Sense strand starting at position 1334 of SEQ ID NO: 1641
gcaguccucagggaaauua

SEQ ID NO: 128209 - RNA, 19 nt, Artificial Sequence
  Description of Artificial Sequence: Synthetic oligonucleotide
  Antisense strand to SEQ ID NO: 128208
uaauuucccugaggacugc

SEQ ID NO: 128210 - RNA, 19 nt, Artificial Sequence
  Description of Artificial Sequence: Synthetic oligonucleotide
  Sense strand starting at position 1511 of SEQ ID NO: 1641
aucccagaucccugagaac

SEQ ID NO: 128211 - RNA, 19 nt, Artificial Sequence
  Description of Artificial Sequence: Synthetic oligonucleotide
  Antisense strand to SEQ ID NO: 128210
guucucagggaucugggau

SEQ ID NO: 128212 - RNA, 19 nt, Artificial Sequence
  Description of Artificial Sequence: Synthetic oligonucleotide
  Sense strand starting at position 1538 of SEQ ID NO: 1641
cugcaucgcucccuuuaga

SEQ ID NO: 128213 - RNA, 19 nt, Artificial Sequence
  Description of Artificial Sequence: Synthetic oligonucleotide
  Antisense strand to SEQ ID NO: 128212
ucuaaagggagcgaugcag

SEQ ID NO: 128214 - RNA, 19 nt, Artificial Sequence
  Description of Artificial Sequence: Synthetic oligonucleotide
  Sense strand starting at position 2240 of SEQ ID NO: 1641
ggugccuguccgcaggaau

SEQ ID NO: 128215 - RNA, 19 nt, Artificial Sequence
  Description of Artificial Sequence: Synthetic oligonucleotide
  Antisense strand to SEQ ID NO: 128214
auuccugcggacaggcacc

SEQ ID NO: 128216 - RNA, 19 nt, Artificial Sequence
  Description of Artificial Sequence: Synthetic oligonucleotide
  Sense strand starting at position 2314 of SEQ ID NO: 1641
gucaguuuccauggcaaca

SEQ ID NO: 128217 - RNA, 19 nt, Artificial Sequence
  Description of Artificial Sequence: Synthetic oligonucleotide
  Antisense strand to SEQ ID NO: 128216
uguugccauggaaacugac

SEQ ID NO: 128218 - RNA, 19 nt, Artificial Sequence
  Description of Artificial Sequence: Synthetic oligonucleotide
  Sense strand starting at position 2357 of SEQ ID NO: 1641
gggcugucaccgggagaga

SEQ ID NO: 128219 - RNA, 19 nt, Artificial Sequence
  Description of Artificial Sequence: Synthetic oligonucleotide
  Antisense strand to SEQ ID NO: 128218
ucucucccggugacagccc

SEQ ID NO: 128220 - RNA, 19 nt, Artificial Sequence
  Description of Artificial Sequence: Synthetic oligonucleotide
  Sense strand starting at position 2638 of SEQ ID NO: 1641
gguccuguaguuuauguaa

SEQ ID NO: 128221 - RNA, 19 nt, Artificial Sequence
  Description of Artificial Sequence: Synthetic oligonucleotide
  Antisense strand to SEQ ID NO: 128220
uuacauaaacuacaggacc

SEQ ID NO: 128222 - RNA, 19 nt, Artificial Sequence
  Description of Artificial Sequence: Synthetic oligonucleotide
  Sense strand starting at position 2640 of SEQ ID NO: 1641
uccuguaguuuauguaaau

SEQ ID NO: 128223 - RNA, 19 nt, Artificial Sequence
  Description of Artificial Sequence: Synthetic oligonucleotide
  Antisense strand to SEQ ID NO: 128222
auuuacauaaacuacagga

SEQ ID NO: 128224 - RNA, 19 nt, Artificial Sequence
  Description of Artificial Sequence: Synthetic oligonucleotide
  Sense strand starting at position 2641 of SEQ ID NO: 1641
ccuguaguuuauguaaaug

SEQ ID NO: 128225 - RNA, 19 nt, Artificial Sequence
  Description of Artificial Sequence: Synthetic oligonucleotide
  Antisense strand to SEQ ID NO: 128224
cauuuacauaaacuacagg

SEQ ID NO: 128226 - RNA, 19 nt, Artificial Sequence
  Description of Artificial Sequence: Synthetic oligonucleotide
  Sense strand starting at position 2787 of SEQ ID NO: 1641
gaggcauugcgccgacaag

SEQ ID NO: 128227 - RNA, 19 nt, Artificial Sequence
  Description of Artificial Sequence: Synthetic oligonucleotide
  Antisense strand to SEQ ID NO: 128226
cuugucggcgcaaugccuc

SEQ ID NO: 128228 - RNA, 19 nt, Artificial Sequence
  Description of Artificial Sequence: Synthetic oligonucleotide
  Sense strand starting at position 2788 of SEQ ID NO: 1641
aggcauugcgccgacaaga

SEQ ID NO: 128229 - RNA, 19 nt, Artificial Sequence
  Description of Artificial Sequence: Synthetic oligonucleotide
  Antisense strand to SEQ ID NO: 128228
ucuugucggcgcaaugccu

SEQ ID NO: 128230 - RNA, 19 nt, Artificial Sequence
  Description of Artificial Sequence: Synthetic oligonucleotide
  Sense strand starting at position 2797 of SEQ ID NO: 1641
gccgacaagaccuagguau

SEQ ID NO: 128231 - RNA, 19 nt, Artificial Sequence
  Description of Artificial Sequence: Synthetic oligonucleotide
  Antisense strand to SEQ ID NO: 128230
auaccuaggucuugucggc

SEQ ID NO: 128232 - RNA, 19 nt, Artificial Sequence
  Description of Artificial Sequence: Synthetic oligonucleotide
  Sense strand starting at position 3603 of SEQ ID NO: 1641
gccagcuuugugggaguuu

SEQ ID NO: 128233 - RNA, 19 nt, Artificial Sequence
  Description of Artificial Sequence: Synthetic oligonucleotide
  Antisense strand to SEQ ID NO: 128232
aaacucccacaaagcuggc

SEQ ID NO: 128234 - RNA, 19 nt, Artificial Sequence
  Description of Artificial Sequence: Synthetic oligonucleotide
  Sense strand starting at position 3612 of SEQ ID NO: 1641
gugggaguuucccaugcgu

SEQ ID NO: 128235 - RNA, 19 nt, Artificial Sequence
  Description of Artificial Sequence: Synthetic oligonucleotide
  Antisense strand to SEQ ID NO: 128234
acgcaugggaaacucccac

SEQ ID NO: 128236 - RNA, 19 nt, Artificial Sequence
  Description of Artificial Sequence: Synthetic oligonucleotide
  Sense strand starting at position 3636 of SEQ ID NO: 1641
cugggacuucuccagcuga

SEQ ID NO: 128237 - RNA, 19 nt, Artificial Sequence
  Description of Artificial Sequence: Synthetic oligonucleotide
  Antisense strand to SEQ ID NO: 128236
ucagcuggagaagucccag

SEQ ID NO: 128238 - RNA, 19 nt, Artificial Sequence
  Description of Artificial Sequence: Synthetic oligonucleotide
  Sense strand starting at position 3669 of SEQ ID NO: 1641
gcuguccgcccagaaaguu

SEQ ID NO: 128239 - RNA, 19 nt, Artificial Sequence
  Description of Artificial Sequence: Synthetic oligonucleotide
  Antisense strand to SEQ ID NO: 128238
aacuuucugggcggacagc

SEQ ID NO: 128240 - RNA, 19 nt, Artificial Sequence
  Description of Artificial Sequence: Synthetic oligonucleotide
  Sense strand starting at position 3724 of SEQ ID NO: 1641
guuggauucucacacccuu

SEQ ID NO: 128241 - RNA, 19 nt, Artificial Sequence
  Description of Artificial Sequence: Synthetic oligonucleotide
  Antisense strand to SEQ ID NO: 128240
aagggugugagaauccaac

SEQ ID NO: 128242 - RNA, 19 nt, Artificial Sequence
  Description of Artificial Sequence: Synthetic oligonucleotide
  Sense strand starting at position 3838 of SEQ ID NO: 1641
caugacugcucaggucaca

SEQ ID NO: 128243 - RNA, 19 nt, Artificial Sequence
  Description of Artificial Sequence: Synthetic oligonucleotide
  Antisense strand to SEQ ID NO: 128242
ugugaccugagcagucaug

SEQ ID NO: 128244 - RNA, 19 nt, Artificial Sequence
  Description of Artificial Sequence: Synthetic oligonucleotide
  Sense strand starting at position 3893 of SEQ ID NO: 1641
ccacuuggguucuggaauu

SEQ ID NO: 128245 - RNA, 19 nt, Artificial Sequence
  Description of Artificial Sequence: Synthetic oligonucleotide
  Antisense strand to SEQ ID NO: 128244
aauuccagaacccaagugg

SEQ ID NO: 128246 - RNA, 19 nt, Artificial Sequence
  Description of Artificial Sequence: Synthetic oligonucleotide
  Sense strand starting at position 3903 of SEQ ID NO: 1641
ucuggaauuccuuguccuu

SEQ ID NO: 128247 - RNA, 19 nt, Artificial Sequence
  Description of Artificial Sequence: Synthetic oligonucleotide
  Antisense strand to SEQ ID NO: 128246
aaggacaaggaauuccaga

SEQ ID NO: 128248 - RNA, 19 nt, Artificial Sequence
  Description of Artificial Sequence: Synthetic oligonucleotide
  Sense strand starting at position 220 of SEQ ID NO: 1644
gcuccaggcuugugaguca

SEQ ID NO: 128249 - RNA, 19 nt, Artificial Sequence
  Description of Artificial Sequence: Synthetic oligonucleotide
  Antisense strand to SEQ ID NO: 128248
ugacucacaagccuggagc

SEQ ID NO: 128250 - RNA, 19 nt, Artificial Sequence
  Description of Artificial Sequence: Synthetic oligonucleotide
  Sense strand starting at position 275 of SEQ ID NO: 1644
ugcggaggcugaugaauaa

SEQ ID NO: 128251 - RNA, 19 nt, Artificial Sequence
  Description of Artificial Sequence: Synthetic oligonucleotide
  Antisense strand to SEQ ID NO: 128250
uuauucaucagccuccgca

SEQ ID NO: 128252 - RNA, 19 nt, Artificial Sequence
  Description of Artificial Sequence: Synthetic oligonucleotide
  Sense strand starting at position 444 of SEQ ID NO: 1644
ggacuucccuguccaggaa

SEQ ID NO: 128253 - RNA, 19 nt, Artificial Sequence
  Description of Artificial Sequence: Synthetic oligonucleotide
  Antisense strand to SEQ ID NO: 128252
uuccuggacagggaagucc

SEQ ID NO: 128254 - RNA, 19 nt, Artificial Sequence
  Description of Artificial Sequence: Synthetic oligonucleotide
  Sense strand starting at position 545 of SEQ ID NO: 1644
ggauguccuugccaggaau

SEQ ID NO: 128255 - RNA, 19 nt, Artificial Sequence
  Description of Artificial Sequence: Synthetic oligonucleotide
  Antisense strand to SEQ ID NO: 128254
auuccuggcaaggacaucc

SEQ ID NO: 128256 - RNA, 19 nt, Artificial Sequence
  Description of Artificial Sequence: Synthetic oligonucleotide
  Sense strand starting at position 777 of SEQ ID NO: 1644
ggagucagagccugaccua

SEQ ID NO: 128257 - RNA, 19 nt, Artificial Sequence
  Description of Artificial Sequence: Synthetic oligonucleotide
  Antisense strand to SEQ ID NO: 128256
uaggucaggcucugacucc

SEQ ID NO: 128258 - RNA, 19 nt, Artificial Sequence
  Description of Artificial Sequence: Synthetic oligonucleotide
  Sense strand starting at position 778 of SEQ ID NO: 1644
gagucagagccugaccuaa

SEQ ID NO: 128259 - RNA, 19 nt, Artificial Sequence
  Description of Artificial Sequence: Synthetic oligonucleotide
  Antisense strand to SEQ ID NO: 128258
uuaggucaggcucugacuc

SEQ ID NO: 128260 - RNA, 19 nt, Artificial Sequence
  Description of Artificial Sequence: Synthetic oligonucleotide
  Sense strand starting at position 959 of SEQ ID NO: 1644
ggcugcagucugugaacau

SEQ ID NO: 128261 - RNA, 19 nt, Artificial Sequence
  Description of Artificial Sequence: Synthetic oligonucleotide
  Antisense strand to SEQ ID NO: 128260
auguucacagacugcagcc

SEQ ID NO: 128262 - RNA, 19 nt, Artificial Sequence
  Description of Artificial Sequence: Synthetic oligonucleotide
  Sense strand starting at position 960 of SEQ ID NO: 1644
gcugcagucugugaacauc

SEQ ID NO: 128263 - RNA, 19 nt, Artificial Sequence
  Description of Artificial Sequence: Synthetic oligonucleotide
  Antisense strand to SEQ ID NO: 128262
gauguucacagacugcagc

SEQ ID NO: 128264 - RNA, 19 nt, Artificial Sequence
  Description of Artificial Sequence: Synthetic oligonucleotide
  Sense strand starting at position 1292 of SEQ ID NO: 1644
cccucaacuugaggaguua

SEQ ID NO: 128265 - RNA, 19 nt, Artificial Sequence
  Description of Artificial Sequence: Synthetic oligonucleotide
  Antisense strand to SEQ ID NO: 128264
uaacuccucaaguugaggg

SEQ ID NO: 128266 - RNA, 19 nt, Artificial Sequence
  Description of Artificial Sequence: Synthetic oligonucleotide
  Sense strand starting at position 1303 of SEQ ID NO: 1644
aggaguuacuaaggaaucu

SEQ ID NO: 128267 - RNA, 19 nt, Artificial Sequence
  Description of Artificial Sequence: Synthetic oligonucleotide
  Antisense strand to SEQ ID NO: 128266
agauuccuuaguaacuccu

SEQ ID NO: 128268 - RNA, 19 nt, Artificial Sequence
  Description of Artificial Sequence: Synthetic oligonucleotide
  Sense strand starting at position 1781 of SEQ ID NO: 1644
gguucuguccaucgguuua

SEQ ID NO: 128269 - RNA, 19 nt, Artificial Sequence
  Description of Artificial Sequence: Synthetic oligonucleotide
  Antisense strand to SEQ ID NO: 128268
uaaaccgauggacagaacc

SEQ ID NO: 128270 - RNA, 19 nt, Artificial Sequence
  Description of Artificial Sequence: Synthetic oligonucleotide
  Sense strand starting at position 2222 of SEQ ID NO: 1644
gggccagcccuuugcagau

SEQ ID NO: 128271 - RNA, 19 nt, Artificial Sequence
  Description of Artificial Sequence: Synthetic oligonucleotide
  Antisense strand to SEQ ID NO: 128270
aucugcaaagggcuggccc

SEQ ID NO: 128272 - RNA, 19 nt, Artificial Sequence
  Description of Artificial Sequence: Synthetic oligonucleotide
  Sense strand starting at position 2256 of SEQ ID NO: 1644
agucccuggucauuaacuu

SEQ ID NO: 128273 - RNA, 19 nt, Artificial Sequence
  Description of Artificial Sequence: Synthetic oligonucleotide
  Antisense strand to SEQ ID NO: 128272
aaguuaaugaccagggacu

SEQ ID NO: 128274 - RNA, 19 nt, Artificial Sequence
  Description of Artificial Sequence: Synthetic oligonucleotide
  Sense strand starting at position 2264 of SEQ ID NO: 1644
gucauuaacuugggcuuga

SEQ ID NO: 128275 - RNA, 19 nt, Artificial Sequence
  Description of Artificial Sequence: Synthetic oligonucleotide
  Antisense strand to SEQ ID NO: 128274
ucaagcccaaguuaaugac

SEQ ID NO: 128276 - RNA, 19 nt, Artificial Sequence
  Description of Artificial Sequence: Synthetic oligonucleotide
  Sense strand starting at position 2265 of SEQ ID NO: 1644
ucauuaacuugggcuugaa

SEQ ID NO: 128277 - RNA, 19 nt, Artificial Sequence
  Description of Artificial Sequence: Synthetic oligonucleotide
  Antisense strand to SEQ ID NO: 128276
uucaagcccaaguuaauga

SEQ ID NO: 128278 - RNA, 19 nt, Artificial Sequence
  Description of Artificial Sequence: Synthetic oligonucleotide
  Sense strand starting at position 2426 of SEQ ID NO: 1644
ucgcuuccgcucuauugua

SEQ ID NO: 128279 - RNA, 19 nt, Artificial Sequence
  Description of Artificial Sequence: Synthetic oligonucleotide
  Antisense strand to SEQ ID NO: 128278
uacaauagagcggaagcga

SEQ ID NO: 128280 - RNA, 19 nt, Artificial Sequence
  Description of Artificial Sequence: Synthetic oligonucleotide
  Sense strand starting at position 2552 of SEQ ID NO: 1644
gggugcuguucugccauuu

SEQ ID NO: 128281 - RNA, 19 nt, Artificial Sequence
  Description of Artificial Sequence: Synthetic oligonucleotide
  Antisense strand to SEQ ID NO: 128280
aaauggcagaacagcaccc

SEQ ID NO: 128282 - RNA, 19 nt, Artificial Sequence
  Description of Artificial Sequence: Synthetic oligonucleotide
  Sense strand starting at position 2939 of SEQ ID NO: 1644
accagucacuuccagagau

SEQ ID NO: 128283 - RNA, 19 nt, Artificial Sequence
  Description of Artificial Sequence: Synthetic oligonucleotide
  Antisense strand to SEQ ID NO: 128282
aucucuggaagugacuggu

SEQ ID NO: 128284 - RNA, 19 nt, Artificial Sequence
  Description of Artificial Sequence: Synthetic oligonucleotide
  Sense strand starting at position 3010 of SEQ ID NO: 1644
caaagcauugcccaggaga

SEQ ID NO: 128285 - RNA, 19 nt, Artificial Sequence
  Description of Artificial Sequence: Synthetic oligonucleotide
  Antisense strand to SEQ ID NO: 128284
ucuccugggcaaugcuuug

SEQ ID NO: 128286 - RNA, 19 nt, Artificial Sequence
  Description of Artificial Sequence: Synthetic oligonucleotide
  Sense strand starting at position 3012 of SEQ ID NO: 1644
aagcauugcccaggagaau

SEQ ID NO: 128287 - RNA, 19 nt, Artificial Sequence
  Description of Artificial Sequence: Synthetic oligonucleotide
  Antisense strand to SEQ ID NO: 128286
auucuccugggcaaugcuu

SEQ ID NO: 128288 - RNA, 19 nt, Artificial Sequence
  Description of Artificial Sequence: Synthetic oligonucleotide
  Sense strand starting at position 3013 of SEQ ID NO: 1644
agcauugcccaggagaaua

SEQ ID NO: 128289 - RNA, 19 nt, Artificial Sequence
  Description of Artificial Sequence: Synthetic oligonucleotide
  Antisense strand to SEQ ID NO: 128288
uauucuccugggcaaugcu

SEQ ID NO: 128290 - RNA, 19 nt, Artificial Sequence
  Description of Artificial Sequence: Synthetic oligonucleotide
  Sense strand starting at position 3033 of SEQ ID NO: 1644
gugauugccucucccauua

SEQ ID NO: 128291 - RNA, 19 nt, Artificial Sequence
  Description of Artificial Sequence: Synthetic oligonucleotide
  Antisense strand to SEQ ID NO: 128290
uaaugggagaggcaaucac

SEQ ID NO: 128292 - RNA, 19 nt, Artificial Sequence
  Description of Artificial Sequence: Synthetic oligonucleotide
  Sense strand starting at position 3174 of SEQ ID NO: 1644
ggccauuguuaagcugcaa

SEQ ID NO: 128293 - RNA, 19 nt, Artificial Sequence
  Description of Artificial Sequence: Synthetic oligonucleotide
  Antisense strand to SEQ ID NO: 128292
uugcagcuuaacaauggcc

SEQ ID NO: 128294 - RNA, 19 nt, Artificial Sequence
  Description of Artificial Sequence: Synthetic oligonucleotide
  Sense strand starting at position 3256 of SEQ ID NO: 1644
uucugucucuucuugcaua

SEQ ID NO: 128295 - RNA, 19 nt, Artificial Sequence
  Description of Artificial Sequence: Synthetic oligonucleotide
  Antisense strand to SEQ ID NO: 128294
uaugcaagaagagacagaa

SEQ ID NO: 128296 - RNA, 19 nt, Artificial Sequence
  Description of Artificial Sequence: Synthetic oligonucleotide
  Sense strand starting at position 3257 of SEQ ID NO: 1644
ucugucucuucuugcauau

SEQ ID NO: 128297 - RNA, 19 nt, Artificial Sequence
  Description of Artificial Sequence: Synthetic oligonucleotide
  Antisense strand to SEQ ID NO: 128296
auaugcaagaagagacaga

SEQ ID NO: 128298 - RNA, 19 nt, Artificial Sequence
  Description of Artificial Sequence: Synthetic oligonucleotide
  Sense strand starting at position 3259 of SEQ ID NO: 1644
ugucucuucuugcauaugu

SEQ ID NO: 128299 - RNA, 19 nt, Artificial Sequence
  Description of Artificial Sequence: Synthetic oligonucleotide
  Antisense strand to SEQ ID NO: 128298
acauaugcaagaagagaca

SEQ ID NO: 128300 - RNA, 19 nt, Artificial Sequence
  Description of Artificial Sequence: Synthetic oligonucleotide
  Sense strand starting at position 3266 of SEQ ID NO: 1644
ucuugcauaugucuaguga

SEQ ID NO: 128301 - RNA, 19 nt, Artificial Sequence
  Description of Artificial Sequence: Synthetic oligonucleotide
  Antisense strand to SEQ ID NO: 128300
ucacuagacauaugcaaga

SEQ ID NO: 128302 - RNA, 19 nt, Artificial Sequence
  Description of Artificial Sequence: Synthetic oligonucleotide
  Sense strand starting at position 3267 of SEQ ID NO: 1644
cuugcauaugucuagugau

SEQ ID NO: 128303 - RNA, 19 nt, Artificial Sequence
  Description of Artificial Sequence: Synthetic oligonucleotide
  Antisense strand to SEQ ID NO: 128302
aucacuagacauaugcaag

SEQ ID NO: 128304 - RNA, 19 nt, Artificial Sequence
  Description of Artificial Sequence: Synthetic oligonucleotide
  Sense strand starting at position 3325 of SEQ ID NO: 1644
gcuggaaacucuuuccugu

SEQ ID NO: 128305 - RNA, 19 nt, Artificial Sequence
  Description of Artificial Sequence: Synthetic oligonucleotide
  Antisense strand to SEQ ID NO: 128304
acaggaaagaguuuccagc

SEQ ID NO: 128306 - RNA, 19 nt, Artificial Sequence
  Description of Artificial Sequence: Synthetic oligonucleotide
  Sense strand starting at position 3328 of SEQ ID NO: 1644
ggaaacucuuuccuguagu

SEQ ID NO: 128307 - RNA, 19 nt, Artificial Sequence
  Description of Artificial Sequence: Synthetic oligonucleotide
  Antisense strand to SEQ ID NO: 128306
acuacaggaaagaguuucc

SEQ ID NO: 128308 - RNA, 19 nt, Artificial Sequence
  Description of Artificial Sequence: Synthetic oligonucleotide
  Sense strand starting at position 3329 of SEQ ID NO: 1644
gaaacucuuuccuguagug

SEQ ID NO: 128309 - RNA, 19 nt, Artificial Sequence
  Description of Artificial Sequence: Synthetic oligonucleotide
  Antisense strand to SEQ ID NO: 128308
cacuacaggaaagaguuuc

SEQ ID NO: 128310 - RNA, 19 nt, Artificial Sequence
  Description of Artificial Sequence: Synthetic oligonucleotide
  Sense strand starting at position 3403 of SEQ ID NO: 1644
ucccuuuccuccugagagu

SEQ ID NO: 128311 - RNA, 19 nt, Artificial Sequence
  Description of Artificial Sequence: Synthetic oligonucleotide
  Antisense strand to SEQ ID NO: 128310
acucucaggaggaaaggga

SEQ ID NO: 128312 - RNA, 19 nt, Artificial Sequence
  Description of Artificial Sequence: Synthetic oligonucleotide
  Sense strand starting at position 3404 of SEQ ID NO: 1644
cccuuuccuccugagaguu

SEQ ID NO: 128313 - RNA, 19 nt, Artificial Sequence
  Description of Artificial Sequence: Synthetic oligonucleotide
  Antisense strand to SEQ ID NO: 128312
aacucucaggaggaaaggg

SEQ ID NO: 128314 - RNA, 19 nt, Artificial Sequence
  Description of Artificial Sequence: Synthetic oligonucleotide
  Sense strand starting at position 3412 of SEQ ID NO: 1644
uccugagaguucugaggaa

SEQ ID NO: 128315 - RNA, 19 nt, Artificial Sequence
  Description of Artificial Sequence: Synthetic oligonucleotide
  Antisense strand to SEQ ID NO: 128314
uuccucagaacucucagga

SEQ ID NO: 128316 - RNA, 19 nt, Artificial Sequence
  Description of Artificial Sequence: Synthetic oligonucleotide
  Sense strand starting at position 3455 of SEQ ID NO: 1644
ugguuugaguccugaucuu

SEQ ID NO: 128317 - RNA, 19 nt, Artificial Sequence
  Description of Artificial Sequence: Synthetic oligonucleotide
  Antisense strand to SEQ ID NO: 128316
aagaucaggacucaaacca

SEQ ID NO: 128318 - RNA, 19 nt, Artificial Sequence
  Description of Artificial Sequence: Synthetic oligonucleotide
  Sense strand starting at position 3569 of SEQ ID NO: 1644
agaugagguuucugugcca

SEQ ID NO: 128319 - RNA, 19 nt, Artificial Sequence
  Description of Artificial Sequence: Synthetic oligonucleotide
  Antisense strand to SEQ ID NO: 128318
uggcacagaaaccucaucu

SEQ ID NO: 128320 - RNA, 19 nt, Artificial Sequence
  Description of Artificial Sequence: Synthetic oligonucleotide
  Sense strand starting at position 3612 of SEQ ID NO: 1644
caguacgugcuggaucaau

SEQ ID NO: 128321 - RNA, 19 nt, Artificial Sequence
  Description of Artificial Sequence: Synthetic oligonucleotide
  Antisense strand to SEQ ID NO: 128320
auugauccagcacguacug

SEQ ID NO: 128322 - RNA, 19 nt, Artificial Sequence
  Description of Artificial Sequence: Synthetic oligonucleotide
  Sense strand starting at position 3752 of SEQ ID NO: 1644
ugacuagaccucgaacagu

SEQ ID NO: 128323 - RNA, 19 nt, Artificial Sequence
  Description of Artificial Sequence: Synthetic oligonucleotide
  Antisense strand to SEQ ID NO: 128322
acuguucgaggucuaguca

SEQ ID NO: 128324 - RNA, 19 nt, Artificial Sequence
  Description of Artificial Sequence: Synthetic oligonucleotide
  Sense strand starting at position 3855 of SEQ ID NO: 1644
ucauuagucugccuugauc

SEQ ID NO: 128325 - RNA, 19 nt, Artificial Sequence
  Description of Artificial Sequence: Synthetic oligonucleotide
  Antisense strand to SEQ ID NO: 128324
gaucaaggcagacuaauga

SEQ ID NO: 128326 - RNA, 19 nt, Artificial Sequence
  Description of Artificial Sequence: Synthetic oligonucleotide
  Sense strand starting at position 91 of SEQ ID NO: 1643
gugcuaggucggaggaguu

SEQ ID NO: 128327 - RNA, 19 nt, Artificial Sequence
  Description of Artificial Sequence: Synthetic oligonucleotide
  Antisense strand to SEQ ID NO: 128326
aacuccuccgaccuagcac

SEQ ID NO: 128328 - RNA, 19 nt, Artificial Sequence
  Description of Artificial Sequence: Synthetic oligonucleotide
  Sense strand starting at position 101 of SEQ ID NO: 1643
ggaggaguucugggagggu

SEQ ID NO: 128329 - RNA, 19 nt, Artificial Sequence
  Description of Artificial Sequence: Synthetic oligonucleotide
  Antisense strand to SEQ ID NO: 128328
acccucccagaacuccucc

SEQ ID NO: 128330 - RNA, 19 nt, Artificial Sequence
  Description of Artificial Sequence: Synthetic oligonucleotide
  Sense strand starting at position 208 of SEQ ID NO: 1643
ugauucgcuccuuacggaa

SEQ ID NO: 128331 - RNA, 19 nt, Artificial Sequence
  Description of Artificial Sequence: Synthetic oligonucleotide
  Antisense strand to SEQ ID NO: 128330
uuccguaaggagcgaauca

SEQ ID NO: 128332 - RNA, 19 nt, Artificial Sequence
  Description of Artificial Sequence: Synthetic oligonucleotide
  Sense strand starting at position 221 of SEQ ID NO: 1643
acggaagagucaguauuca

SEQ ID NO: 128333 - RNA, 19 nt, Artificial Sequence
  Description of Artificial Sequence: Synthetic oligonucleotide
  Antisense strand to SEQ ID NO: 128332
ugaauacugacucuuccgu

SEQ ID NO: 128334 - RNA, 19 nt, Artificial Sequence
  Description of Artificial Sequence: Synthetic oligonucleotide
  Sense strand starting at position 282 of SEQ ID NO: 1643
ccuugaaagccucgagauc

SEQ ID NO: 128335 - RNA, 19 nt, Artificial Sequence
  Description of Artificial Sequence: Synthetic oligonucleotide
  Antisense strand to SEQ ID NO: 128334
gaucucgaggcuuucaagg

SEQ ID NO: 128336 - RNA, 19 nt, Artificial Sequence
  Description of Artificial Sequence: Synthetic oligonucleotide
  Sense strand starting at position 283 of SEQ ID NO: 1643
cuugaaagccucgagauca

SEQ ID NO: 128337 - RNA, 19 nt, Artificial Sequence
  Description of Artificial Sequence: Synthetic oligonucleotide
  Antisense strand to SEQ ID NO: 128336
ugaucucgaggcuuucaag

SEQ ID NO: 128338 - RNA, 19 nt, Artificial Sequence
  Description of Artificial Sequence: Synthetic oligonucleotide
  Sense strand starting at position 490 of SEQ ID NO: 1643
ccgacuucgucgagcagau

SEQ ID NO: 128339 - RNA, 19 nt, Artificial Sequence
  Description of Artificial Sequence: Synthetic oligonucleotide
  Antisense strand to SEQ ID NO: 128338
aucugcucgacgaagucgg

SEQ ID NO: 128340 - RNA, 19 nt, Artificial Sequence
  Description of Artificial Sequence: Synthetic oligonucleotide
  Sense strand starting at position 502 of SEQ ID NO: 1643
agcagaucugguugacgau

SEQ ID NO: 128341 - RNA, 19 nt, Artificial Sequence
  Description of Artificial Sequence: Synthetic oligonucleotide
  Antisense strand to SEQ ID NO: 128340
aucgucaaccagaucugcu

SEQ ID NO: 128342 - RNA, 19 nt, Artificial Sequence
  Description of Artificial Sequence: Synthetic oligonucleotide
  Sense strand starting at position 505 of SEQ ID NO: 1643
agaucugguugacgaugaa

SEQ ID NO: 128343 - RNA, 19 nt, Artificial Sequence
  Description of Artificial Sequence: Synthetic oligonucleotide
  Antisense strand to SEQ ID NO: 128342
uucaucgucaaccagaucu

SEQ ID NO: 128344 - RNA, 19 nt, Artificial Sequence
  Description of Artificial Sequence: Synthetic oligonucleotide
  Sense strand starting at position 508 of SEQ ID NO: 1643
ucugguugacgaugaaguu

SEQ ID NO: 128345 - RNA, 19 nt, Artificial Sequence
  Description of Artificial Sequence: Synthetic oligonucleotide
  Antisense strand to SEQ ID NO: 128344
aacuucaucgucaaccaga

SEQ ID NO: 128346 - RNA, 19 nt, Artificial Sequence
  Description of Artificial Sequence: Synthetic oligonucleotide
  Sense strand starting at position 1121 of SEQ ID NO: 1643
gacacaaagcgccaagaau

SEQ ID NO: 128347 - RNA, 19 nt, Artificial Sequence
  Description of Artificial Sequence: Synthetic oligonucleotide
  Antisense strand to SEQ ID NO: 128346
auucuuggcgcuuuguguc

SEQ ID NO: 128348 - RNA, 19 nt, Artificial Sequence
  Description of Artificial Sequence: Synthetic oligonucleotide
  Sense strand starting at position 2749 of SEQ ID NO: 1643
ccacuacacggcugucaaa

SEQ ID NO: 128349 - RNA, 19 nt, Artificial Sequence
  Description of Artificial Sequence: Synthetic oligonucleotide
  Antisense strand to SEQ ID NO: 128348
uuugacagccguguagugg

SEQ ID NO: 128350 - RNA, 19 nt, Artificial Sequence
  Description of Artificial Sequence: Synthetic oligonucleotide
  Sense strand starting at position 2830 of SEQ ID NO: 1643
gggauaaagugacauaaag

SEQ ID NO: 128351 - RNA, 19 nt, Artificial Sequence
  Description of Artificial Sequence: Synthetic oligonucleotide
  Antisense strand to SEQ ID NO: 128350
cuuuaugucacuuuauccc

SEQ ID NO: 128352 - RNA, 19 nt, Artificial Sequence
  Description of Artificial Sequence: Synthetic oligonucleotide
  Sense strand starting at position 2913 of SEQ ID NO: 1643
uugggacacuccucagaac

SEQ ID NO: 128353 - RNA, 19 nt, Artificial Sequence
  Description of Artificial Sequence: Synthetic oligonucleotide
  Antisense strand to SEQ ID NO: 128352
guucugaggagugucccaa

SEQ ID NO: 128354 - RNA, 19 nt, Artificial Sequence
  Description of Artificial Sequence: Synthetic oligonucleotide
  Sense strand starting at position 2946 of SEQ ID NO: 1643
uggccaugcugucugucau

SEQ ID NO: 128355 - RNA, 19 nt, Artificial Sequence
  Description of Artificial Sequence: Synthetic oligonucleotide
  Antisense strand to SEQ ID NO: 128354
augacagacagcauggcca

SEQ ID NO: 128356 - RNA, 19 nt, Artificial Sequence
  Description of Artificial Sequence: Synthetic oligonucleotide
  Sense strand starting at position 3028 of SEQ ID NO: 1643
gggccaggguccgugagau

SEQ ID NO: 128357 - RNA, 19 nt, Artificial Sequence
  Description of Artificial Sequence: Synthetic oligonucleotide
  Antisense strand to SEQ ID NO: 128356
aucucacggacccuggccc

SEQ ID NO: 128358 - RNA, 19 nt, Artificial Sequence
  Description of Artificial Sequence: Synthetic oligonucleotide
  Sense strand starting at position 3069 of SEQ ID NO: 1643
uuuauuagaggcugggaga

SEQ ID NO: 128359 - RNA, 19 nt, Artificial Sequence
  Description of Artificial Sequence: Synthetic oligonucleotide
  Antisense strand to SEQ ID NO: 128358
ucucccagccucuaauaaa

SEQ ID NO: 128360 - RNA, 19 nt, Artificial Sequence
  Description of Artificial Sequence: Synthetic oligonucleotide
  Sense strand starting at position 3082 of SEQ ID NO: 1643
gggagacuuccagggcugu

SEQ ID NO: 128361 - RNA, 19 nt, Artificial Sequence
  Description of Artificial Sequence: Synthetic oligonucleotide
  Antisense strand to SEQ ID NO: 128360
acagcccuggaagucuccc

SEQ ID NO: 128362 - RNA, 19 nt, Artificial Sequence
  Description of Artificial Sequence: Synthetic oligonucleotide
  Sense strand starting at position 3490 of SEQ ID NO: 1643
uucccaucuugcuuauagu

SEQ ID NO: 128363 - RNA, 19 nt, Artificial Sequence
  Description of Artificial Sequence: Synthetic oligonucleotide
  Antisense strand to SEQ ID NO: 128362
acuauaagcaagaugggaa

SEQ ID NO: 128364 - RNA, 19 nt, Artificial Sequence
  Description of Artificial Sequence: Synthetic oligonucleotide
  Sense strand starting at position 3493 of SEQ ID NO: 1643
ccaucuugcuuauagugaa

SEQ ID NO: 128365 - RNA, 19 nt, Artificial Sequence
  Description of Artificial Sequence: Synthetic oligonucleotide
  Antisense strand to SEQ ID NO: 128364
uucacuauaagcaagaugg

SEQ ID NO: 128366 - RNA, 19 nt, Artificial Sequence
  Description of Artificial Sequence: Synthetic oligonucleotide
  Sense strand starting at position 3496 of SEQ ID NO: 1643
ucuugcuuauagugaaauc

SEQ ID NO: 128367 - RNA, 19 nt, Artificial Sequence
  Description of Artificial Sequence: Synthetic oligonucleotide
  Antisense strand to SEQ ID NO: 128366
gauuucacuauaagcaaga

SEQ ID NO: 128368 - RNA, 19 nt, Artificial Sequence
  Description of Artificial Sequence: Synthetic oligonucleotide
  Sense strand starting at position 3608 of SEQ ID NO: 1643
ggccuucuccucuguauuu

SEQ ID NO: 128369 - RNA, 19 nt, Artificial Sequence
  Description of Artificial Sequence: Synthetic oligonucleotide
  Antisense strand to SEQ ID NO: 128368
aaauacagaggagaaggcc

SEQ ID NO: 128370 - RNA, 19 nt, Artificial Sequence
  Description of Artificial Sequence: Synthetic oligonucleotide
  Sense strand starting at position 3643 of SEQ ID NO: 1643
cgcacccuaucuugaaaca

SEQ ID NO: 128371 - RNA, 19 nt, Artificial Sequence
  Description of Artificial Sequence: Synthetic oligonucleotide
  Antisense strand to SEQ ID NO: 128370
uguuucaagauagggugcg

SEQ ID NO: 128372 - RNA, 19 nt, Artificial Sequence
  Description of Artificial Sequence: Synthetic oligonucleotide
  Sense strand starting at position 3683 of SEQ ID NO: 1643
aaauguuaccucuaagacg

SEQ ID NO: 128373 - RNA, 19 nt, Artificial Sequence
  Description of Artificial Sequence: Synthetic oligonucleotide
  Antisense strand to SEQ ID NO: 128372
cgucuuagagguaacauuu

SEQ ID NO: 128374 - RNA, 19 nt, Artificial Sequence
  Description of Artificial Sequence: Synthetic oligonucleotide
  Sense strand starting at position 3765 of SEQ ID NO: 1643
auuauuuccuucuuagugu

SEQ ID NO: 128375 - RNA, 19 nt, Artificial Sequence
  Description of Artificial Sequence: Synthetic oligonucleotide
  Antisense strand to SEQ ID NO: 128374
acacuaagaaggaaauaau

SEQ ID NO: 128376 - RNA, 19 nt, Artificial Sequence
  Description of Artificial Sequence: Synthetic oligonucleotide
  Sense strand starting at position 3766 of SEQ ID NO: 1643
uuauuuccuucuuaguguu

SEQ ID NO: 128377 - RNA, 19 nt, Artificial Sequence
  Description of Artificial Sequence: Synthetic oligonucleotide
  Antisense strand to SEQ ID NO: 128376
aacacuaagaaggaaauaa

SEQ ID NO: 128378 - RNA, 19 nt, Artificial Sequence
  Description of Artificial Sequence: Synthetic oligonucleotide
  Sense strand starting at position 3768 of SEQ ID NO: 1643
auuuccuucuuaguguuua

SEQ ID NO: 128379 - RNA, 19 nt, Artificial Sequence
  Description of Artificial Sequence: Synthetic oligonucleotide
  Antisense strand to SEQ ID NO: 128378
uaaacacuaagaaggaaau

SEQ ID NO: 128380 - RNA, 19 nt, Artificial Sequence
  Description of Artificial Sequence: Synthetic oligonucleotide
  Sense strand starting at position 3769 of SEQ ID NO: 1643
uuuccuucuuaguguuuau

SEQ ID NO: 128381 - RNA, 19 nt, Artificial Sequence
  Description of Artificial Sequence: Synthetic oligonucleotide
  Antisense strand to SEQ ID NO: 128380
auaaacacuaagaaggaaa

SEQ ID NO: 128382 - RNA, 19 nt, Artificial Sequence
  Description of Artificial Sequence: Synthetic oligonucleotide
  Sense strand starting at position 3772 of SEQ ID NO: 1643
ccuucuuaguguuuauuac

SEQ ID NO: 128383 - RNA, 19 nt, Artificial Sequence
  Description of Artificial Sequence: Synthetic oligonucleotide
  Antisense strand to SEQ ID NO: 128382
guaauaaacacuaagaagg

SEQ ID NO: 128384 - RNA, 19 nt, Artificial Sequence
  Description of Artificial Sequence: Synthetic oligonucleotide
  Sense strand starting at position 3773 of SEQ ID NO: 1643
cuucuuaguguuuauuacu

SEQ ID NO: 128385 - RNA, 19 nt, Artificial Sequence
  Description of Artificial Sequence: Synthetic oligonucleotide
  Antisense strand to SEQ ID NO: 128384
aguaauaaacacuaagaag

SEQ ID NO: 128386 - RNA, 19 nt, Artificial Sequence
  Description of Artificial Sequence: Synthetic oligonucleotide
  Sense strand starting at position 3782 of SEQ ID NO: 1643
guuuauuacuaccuguaau

SEQ ID NO: 128387 - RNA, 19 nt, Artificial Sequence
  Description of Artificial Sequence: Synthetic oligonucleotide
  Antisense strand to SEQ ID NO: 128386
auuacagguaguaauaaac

SEQ ID NO: 128388 - RNA, 19 nt, Artificial Sequence
  Description of Artificial Sequence: Synthetic oligonucleotide
  Sense strand starting at position 160 of SEQ ID NO: 1639
gccagcagauuguaucuga

SEQ ID NO: 128389 - RNA, 19 nt, Artificial Sequence
  Description of Artificial Sequence: Synthetic oligonucleotide
  Antisense strand to SEQ ID NO: 128388
ucagauacaaucugcuggc

SEQ ID NO: 128390 - RNA, 19 nt, Artificial Sequence
  Description of Artificial Sequence: Synthetic oligonucleotide
  Sense strand starting at position 163 of SEQ ID NO: 1639
agcagauuguaucugacau

SEQ ID NO: 128391 - RNA, 19 nt, Artificial Sequence
  Description of Artificial Sequence: Synthetic oligonucleotide
  Antisense strand to SEQ ID NO: 128390
augucagauacaaucugcu

SEQ ID NO: 128392 - RNA, 19 nt, Artificial Sequence
  Description of Artificial Sequence: Synthetic oligonucleotide
  Sense strand starting at position 371 of SEQ ID NO: 1639
ugcugagacacaugaugga

SEQ ID NO: 128393 - RNA, 19 nt, Artificial Sequence
  Description of Artificial Sequence: Synthetic oligonucleotide
  Antisense strand to SEQ ID NO: 128392
uccaucaugugucucagca

SEQ ID NO: 128394 - RNA, 19 nt, Artificial Sequence
  Description of Artificial Sequence: Synthetic oligonucleotide
  Sense strand starting at position 459 of SEQ ID NO: 1639
gcagucugucccugaguga

SEQ ID NO: 128395 - RNA, 19 nt, Artificial Sequence
  Description of Artificial Sequence: Synthetic oligonucleotide
  Antisense strand to SEQ ID NO: 128394
ucacucagggacagacugc

SEQ ID NO: 128396 - RNA, 19 nt, Artificial Sequence
  Description of Artificial Sequence: Synthetic oligonucleotide
  Sense strand starting at position 492 of SEQ ID NO: 1639
aucuguaaaugagaauaag

SEQ ID NO: 128397 - RNA, 19 nt, Artificial Sequence
  Description of Artificial Sequence: Synthetic oligonucleotide
  Antisense strand to SEQ ID NO: 128396
cuuauucucauuuacagau

SEQ ID NO: 128398 - RNA, 19 nt, Artificial Sequence
  Description of Artificial Sequence: Synthetic oligonucleotide
  Sense strand starting at position 572 of SEQ ID NO: 1639
cuaaguugcgcaguuguca

SEQ ID NO: 128399 - RNA, 19 nt, Artificial Sequence
  Description of Artificial Sequence: Synthetic oligonucleotide
  Antisense strand to SEQ ID NO: 128398
ugacaacugcgcaacuuag

SEQ ID NO: 128400 - RNA, 19 nt, Artificial Sequence
  Description of Artificial Sequence: Synthetic oligonucleotide
  Sense strand starting at position 577 of SEQ ID NO: 1639
uugcgcaguugucacuauu

SEQ ID NO: 128401 - RNA, 19 nt, Artificial Sequence
  Description of Artificial Sequence: Synthetic oligonucleotide
  Antisense strand to SEQ ID NO: 128400
aauagugacaacugcgcaa

SEQ ID NO: 128402 - RNA, 19 nt, Artificial Sequence
  Description of Artificial Sequence: Synthetic oligonucleotide
  Sense strand starting at position 585 of SEQ ID NO: 1639
uugucacuauugucaugua

SEQ ID NO: 128403 - RNA, 19 nt, Artificial Sequence
  Description of Artificial Sequence: Synthetic oligonucleotide
  Antisense strand to SEQ ID NO: 128402
uacaugacaauagugacaa

SEQ ID NO: 128404 - RNA, 19 nt, Artificial Sequence
  Description of Artificial Sequence: Synthetic oligonucleotide
  Sense strand starting at position 586 of SEQ ID NO: 1639
ugucacuauugucauguaa

SEQ ID NO: 128405 - RNA, 19 nt, Artificial Sequence
  Description of Artificial Sequence: Synthetic oligonucleotide
  Antisense strand to SEQ ID NO: 128404
uuacaugacaauagugaca

SEQ ID NO: 128406 - RNA, 19 nt, Artificial Sequence
  Description of Artificial Sequence: Synthetic oligonucleotide
  Sense strand starting at position 588 of SEQ ID NO: 1639
ucacuauugucauguaaau

SEQ ID NO: 128407 - RNA, 19 nt, Artificial Sequence
  Description of Artificial Sequence: Synthetic oligonucleotide
  Antisense strand to SEQ ID NO: 128406
auuuacaugacaauaguga

SEQ ID NO: 128408 - RNA, 19 nt, Artificial Sequence
  Description of Artificial Sequence: Synthetic oligonucleotide
  Sense strand starting at position 748 of SEQ ID NO: 1639
ugccgcaaucagugcauau

SEQ ID NO: 128409 - RNA, 19 nt, Artificial Sequence
  Description of Artificial Sequence: Synthetic oligonucleotide
  Antisense strand to SEQ ID NO: 128408
auaugcacugauugcggca

SEQ ID NO: 128410 - RNA, 19 nt, Artificial Sequence
  Description of Artificial Sequence: Synthetic oligonucleotide
  Sense strand starting at position 993 of SEQ ID NO: 1639
ccugaagaguggcugaguu

SEQ ID NO: 128411 - RNA, 19 nt, Artificial Sequence
  Description of Artificial Sequence: Synthetic oligonucleotide
  Antisense strand to SEQ ID NO: 128410
aacucagccacucuucagg

SEQ ID NO: 128412 - RNA, 19 nt, Artificial Sequence
  Description of Artificial Sequence: Synthetic oligonucleotide
  Sense strand starting at position 995 of SEQ ID NO: 1639
ugaagaguggcugaguuca

SEQ ID NO: 128413 - RNA, 19 nt, Artificial Sequence
  Description of Artificial Sequence: Synthetic oligonucleotide
  Antisense strand to SEQ ID NO: 128412
ugaacucagccacucuuca

SEQ ID NO: 128414 - RNA, 19 nt, Artificial Sequence
  Description of Artificial Sequence: Synthetic oligonucleotide
  Sense strand starting at position 1082 of SEQ ID NO: 1639
uuuccucauccgugacaua

SEQ ID NO: 128415 - RNA, 19 nt, Artificial Sequence
  Description of Artificial Sequence: Synthetic oligonucleotide
  Antisense strand to SEQ ID NO: 128414
uaugucacggaugaggaaa

SEQ ID NO: 128416 - RNA, 19 nt, Artificial Sequence
  Description of Artificial Sequence: Synthetic oligonucleotide
  Sense strand starting at position 1083 of SEQ ID NO: 1639
uuccucauccgugacauaa

SEQ ID NO: 128417 - RNA, 19 nt, Artificial Sequence
  Description of Artificial Sequence: Synthetic oligonucleotide
  Antisense strand to SEQ ID NO: 128416
uuaugucacggaugaggaa

SEQ ID NO: 128418 - RNA, 19 nt, Artificial Sequence
  Description of Artificial Sequence: Synthetic oligonucleotide
  Sense strand starting at position 1313 of SEQ ID NO: 1639
gauagcuggugcugggaua

SEQ ID NO: 128419 - RNA, 19 nt, Artificial Sequence
  Description of Artificial Sequence: Synthetic oligonucleotide
  Antisense strand to SEQ ID NO: 128418
uaucccagcaccagcuauc

SEQ ID NO: 128420 - RNA, 19 nt, Artificial Sequence
  Description of Artificial Sequence: Synthetic oligonucleotide
  Sense strand starting at position 1559 of SEQ ID NO: 1639
gggugaucuccucaguccu

SEQ ID NO: 128421 - RNA, 19 nt, Artificial Sequence
  Description of Artificial Sequence: Synthetic oligonucleotide
  Antisense strand to SEQ ID NO: 128420
aggacugaggagaucaccc

SEQ ID NO: 128422 - RNA, 19 nt, Artificial Sequence
  Description of Artificial Sequence: Synthetic oligonucleotide
  Sense strand starting at position 1617 of SEQ ID NO: 1639
ccaacuuaucugcacggga

SEQ ID NO: 128423 - RNA, 19 nt, Artificial Sequence
  Description of Artificial Sequence: Synthetic oligonucleotide
  Antisense strand to SEQ ID NO: 128422
ucccgugcagauaaguugg

SEQ ID NO: 128424 - RNA, 19 nt, Artificial Sequence
  Description of Artificial Sequence: Synthetic oligonucleotide
  Sense strand starting at position 1619 of SEQ ID NO: 1639
aacuuaucugcacgggaau

SEQ ID NO: 128425 - RNA, 19 nt, Artificial Sequence
  Description of Artificial Sequence: Synthetic oligonucleotide
  Antisense strand to SEQ ID NO: 128424
auucccgugcagauaaguu

SEQ ID NO: 128426 - RNA, 19 nt, Artificial Sequence
  Description of Artificial Sequence: Synthetic oligonucleotide
  Sense strand starting at position 1631 of SEQ ID NO: 1639
cgggaauccguuugcagag

SEQ ID NO: 128427 - RNA, 19 nt, Artificial Sequence
  Description of Artificial Sequence: Synthetic oligonucleotide
  Antisense strand to SEQ ID NO: 128426
cucugcaaacggauucccg

SEQ ID NO: 128428 - RNA, 19 nt, Artificial Sequence
  Description of Artificial Sequence: Synthetic oligonucleotide
  Sense strand starting at position 1658 of SEQ ID NO: 1639
uccugcaguccucagggaa

SEQ ID NO: 128429 - RNA, 19 nt, Artificial Sequence
  Description of Artificial Sequence: Synthetic oligonucleotide
  Antisense strand to SEQ ID NO: 128428
uucccugaggacugcagga

SEQ ID NO: 128430 - RNA, 19 nt, Artificial Sequence
  Description of Artificial Sequence: Synthetic oligonucleotide
  Sense strand starting at position 1661 of SEQ ID NO: 1639
ugcaguccucagggaaauu

SEQ ID NO: 128431 - RNA, 19 nt, Artificial Sequence
  Description of Artificial Sequence: Synthetic oligonucleotide
  Antisense strand to SEQ ID NO: 128430
aauuucccugaggacugca

SEQ ID NO: 128432 - RNA, 19 nt, Artificial Sequence
  Description of Artificial Sequence: Synthetic oligonucleotide
  Sense strand starting at position 1662 of SEQ ID NO: 1639
gcaguccucagggaaauua

SEQ ID NO: 128433 - RNA, 19 nt, Artificial Sequence
  Description of Artificial Sequence: Synthetic oligonucleotide
  Antisense strand to SEQ ID NO: 128432
uaauuucccugaggacugc

SEQ ID NO: 128434 - RNA, 19 nt, Artificial Sequence
  Description of Artificial Sequence: Synthetic oligonucleotide
  Sense strand starting at position 1839 of SEQ ID NO: 1639
aucccagaucccugagaac

SEQ ID NO: 128435 - RNA, 19 nt, Artificial Sequence
  Description of Artificial Sequence: Synthetic oligonucleotide
  Antisense strand to SEQ ID NO: 128434
guucucagggaucugggau

SEQ ID NO: 128436 - RNA, 19 nt, Artificial Sequence
  Description of Artificial Sequence: Synthetic oligonucleotide
  Sense strand starting at position 1866 of SEQ ID NO: 1639
cugcaucgcucccuuuaga

SEQ ID NO: 128437 - RNA, 19 nt, Artificial Sequence
  Description of Artificial Sequence: Synthetic oligonucleotide
  Antisense strand to SEQ ID NO: 128436
ucuaaagggagcgaugcag

SEQ ID NO: 128438 - RNA, 19 nt, Artificial Sequence
  Description of Artificial Sequence: Synthetic oligonucleotide
  Sense strand starting at position 2568 of SEQ ID NO: 1639
ggugccuguccgcaggaau

SEQ ID NO: 128439 - RNA, 19 nt, Artificial Sequence
  Description of Artificial Sequence: Synthetic oligonucleotide
  Antisense strand to SEQ ID NO: 128438
auuccugcggacaggcacc

SEQ ID NO: 128440 - RNA, 19 nt, Artificial Sequence
  Description of Artificial Sequence: Synthetic oligonucleotide
  Sense strand starting at position 2642 of SEQ ID NO: 1639
gucaguuuccauggcaaca

SEQ ID NO: 128441 - RNA, 19 nt, Artificial Sequence
  Description of Artificial Sequence: Synthetic oligonucleotide
  Antisense strand to SEQ ID NO: 128440
uguugccauggaaacugac

SEQ ID NO: 128442 - RNA, 19 nt, Artificial Sequence
  Description of Artificial Sequence: Synthetic oligonucleotide
  Sense strand starting at position 2685 of SEQ ID NO: 1639
gggcugucaccgggagaga

SEQ ID NO: 128443 - RNA, 19 nt, Artificial Sequence
  Description of Artificial Sequence: Synthetic oligonucleotide
  Antisense strand to SEQ ID NO: 128442
ucucucccggugacagccc

SEQ ID NO: 128444 - RNA, 19 nt, Artificial Sequence
  Description of Artificial Sequence: Synthetic oligonucleotide
  Sense strand starting at position 2966 of SEQ ID NO: 1639
gguccuguaguuuauguaa

SEQ ID NO: 128445 - RNA, 19 nt, Artificial Sequence
  Description of Artificial Sequence: Synthetic oligonucleotide
  Antisense strand to SEQ ID NO: 128444
uuacauaaacuacaggacc

SEQ ID NO: 128446 - RNA, 19 nt, Artificial Sequence
  Description of Artificial Sequence: Synthetic oligonucleotide
  Sense strand starting at position 2968 of SEQ ID NO: 1639
uccuguaguuuauguaaau

SEQ ID NO: 128447 - RNA, 19 nt, Artificial Sequence
  Description of Artificial Sequence: Synthetic oligonucleotide
  Antisense strand to SEQ ID NO: 128446
auuuacauaaacuacagga

SEQ ID NO: 128448 - RNA, 19 nt, Artificial Sequence
  Description of Artificial Sequence: Synthetic oligonucleotide
  Sense strand starting at position 2969 of SEQ ID NO: 1639
ccuguaguuuauguaaaug

SEQ ID NO: 128449 - RNA, 19 nt, Artificial Sequence
  Description of Artificial Sequence: Synthetic oligonucleotide
  Antisense strand to SEQ ID NO: 128448
cauuuacauaaacuacagg

SEQ ID NO: 128450 - RNA, 19 nt, Artificial Sequence
  Description of Artificial Sequence: Synthetic oligonucleotide
  Sense strand starting at position 3115 of SEQ ID NO: 1639
gaggcauugcgccgacaag

SEQ ID NO: 128451 - RNA, 19 nt, Artificial Sequence
  Description of Artificial Sequence: Synthetic oligonucleotide
  Antisense strand to SEQ ID NO: 128450
cuugucggcgcaaugccuc

SEQ ID NO: 128452 - RNA, 19 nt, Artificial Sequence
  Description of Artificial Sequence: Synthetic oligonucleotide
  Sense strand starting at position 3116 of SEQ ID NO: 1639
aggcauugcgccgacaaga

SEQ ID NO: 128453 - RNA, 19 nt, Artificial Sequence
  Description of Artificial Sequence: Synthetic oligonucleotide
  Antisense strand to SEQ ID NO: 128452
ucuugucggcgcaaugccu

SEQ ID NO: 128454 - RNA, 19 nt, Artificial Sequence
  Description of Artificial Sequence: Synthetic oligonucleotide
  Sense strand starting at position 3125 of SEQ ID NO: 1639
gccgacaagaccuagguau

SEQ ID NO: 128455 - RNA, 19 nt, Artificial Sequence
  Description of Artificial Sequence: Synthetic oligonucleotide
  Antisense strand to SEQ ID NO: 128454
auaccuaggucuugucggc

SEQ ID NO: 128456 - RNA, 19 nt, Artificial Sequence
  Description of Artificial Sequence: Synthetic oligonucleotide
  Sense strand starting at position 3931 of SEQ ID NO: 1639
gccagcuuugugggaguuu

SEQ ID NO: 128457 - RNA, 19 nt, Artificial Sequence
  Description of Artificial Sequence: Synthetic oligonucleotide
  Antisense strand to SEQ ID NO: 128456
aaacucccacaaagcuggc

SEQ ID NO: 128458 - RNA, 19 nt, Artificial Sequence
  Description of Artificial Sequence: Synthetic oligonucleotide
  Sense strand starting at position 3940 of SEQ ID NO: 1639
gugggaguuucccaugcgu

SEQ ID NO: 128459 - RNA, 19 nt, Artificial Sequence
  Description of Artificial Sequence: Synthetic oligonucleotide
  Antisense strand to SEQ ID NO: 128458
acgcaugggaaacucccac

SEQ ID NO: 128460 - RNA, 19 nt, Artificial Sequence
  Description of Artificial Sequence: Synthetic oligonucleotide
  Sense strand starting at position 3964 of SEQ ID NO: 1639
cugggacuucuccagcuga

SEQ ID NO: 128461 - RNA, 19 nt, Artificial Sequence
  Description of Artificial Sequence: Synthetic oligonucleotide
  Antisense strand to SEQ ID NO: 128460
ucagcuggagaagucccag

SEQ ID NO: 128462 - RNA, 19 nt, Artificial Sequence
  Description of Artificial Sequence: Synthetic oligonucleotide
  Sense strand starting at position 327 of SEQ ID NO: 1640
ucaggugucuccucaugag

SEQ ID NO: 128463 - RNA, 19 nt, Artificial Sequence
  Description of Artificial Sequence: Synthetic oligonucleotide
  Antisense strand to SEQ ID NO: 128462
cucaugaggagacaccuga

SEQ ID NO: 128464 - RNA, 19 nt, Artificial Sequence
  Description of Artificial Sequence: Synthetic oligonucleotide
  Sense strand starting at position 330 of SEQ ID NO: 1640
ggugucuccucaugagaau

SEQ ID NO: 128465 - RNA, 19 nt, Artificial Sequence
  Description of Artificial Sequence: Synthetic oligonucleotide
  Antisense strand to SEQ ID NO: 128464
auucucaugaggagacacc

SEQ ID NO: 128466 - RNA, 19 nt, Artificial Sequence
  Description of Artificial Sequence: Synthetic oligonucleotide
  Sense strand starting at position 331 of SEQ ID NO: 1640
gugucuccucaugagaaug

SEQ ID NO: 128467 - RNA, 19 nt, Artificial Sequence
  Description of Artificial Sequence: Synthetic oligonucleotide
  Antisense strand to SEQ ID NO: 128466
cauucucaugaggagacac

SEQ ID NO: 128468 - RNA, 19 nt, Artificial Sequence
  Description of Artificial Sequence: Synthetic oligonucleotide
  Sense strand starting at position 333 of SEQ ID NO: 1640
gucuccucaugagaaugau

SEQ ID NO: 128469 - RNA, 19 nt, Artificial Sequence
  Description of Artificial Sequence: Synthetic oligonucleotide
  Antisense strand to SEQ ID NO: 128468
aucauucucaugaggagac

SEQ ID NO: 128470 - RNA, 19 nt, Artificial Sequence
  Description of Artificial Sequence: Synthetic oligonucleotide
  Sense strand starting at position 576 of SEQ ID NO: 1640
gugcuaggucggaggaguu

SEQ ID NO: 128471 - RNA, 19 nt, Artificial Sequence
  Description of Artificial Sequence: Synthetic oligonucleotide
  Antisense strand to SEQ ID NO: 128470
aacuccuccgaccuagcac

SEQ ID NO: 128472 - RNA, 19 nt, Artificial Sequence
  Description of Artificial Sequence: Synthetic oligonucleotide
  Sense strand starting at position 586 of SEQ ID NO: 1640
ggaggaguucugggagggu

SEQ ID NO: 128473 - RNA, 19 nt, Artificial Sequence
  Description of Artificial Sequence: Synthetic oligonucleotide
  Antisense strand to SEQ ID NO: 128472
acccucccagaacuccucc

SEQ ID NO: 128474 - RNA, 19 nt, Artificial Sequence
  Description of Artificial Sequence: Synthetic oligonucleotide
  Sense strand starting at position 693 of SEQ ID NO: 1640
ugauucgcuccuuacggaa

SEQ ID NO: 128475 - RNA, 19 nt, Artificial Sequence
  Description of Artificial Sequence: Synthetic oligonucleotide
  Antisense strand to SEQ ID NO: 128474
uuccguaaggagcgaauca

SEQ ID NO: 128476 - RNA, 19 nt, Artificial Sequence
  Description of Artificial Sequence: Synthetic oligonucleotide
  Sense strand starting at position 706 of SEQ ID NO: 1640
acggaagagucaguauuca

SEQ ID NO: 128477 - RNA, 19 nt, Artificial Sequence
  Description of Artificial Sequence: Synthetic oligonucleotide
  Antisense strand to SEQ ID NO: 128476
ugaauacugacucuuccgu

SEQ ID NO: 128478 - RNA, 19 nt, Artificial Sequence
  Description of Artificial Sequence: Synthetic oligonucleotide
  Sense strand starting at position 767 of SEQ ID NO: 1640
ccuugaaagccucgagauc

SEQ ID NO: 128479 - RNA, 19 nt, Artificial Sequence
  Description of Artificial Sequence: Synthetic oligonucleotide
  Antisense strand to SEQ ID NO: 128478
gaucucgaggcuuucaagg

SEQ ID NO: 128480 - RNA, 19 nt, Artificial Sequence
  Description of Artificial Sequence: Synthetic oligonucleotide
  Sense strand starting at position 768 of SEQ ID NO: 1640
cuugaaagccucgagauca

SEQ ID NO: 128481 - RNA, 19 nt, Artificial Sequence
  Description of Artificial Sequence: Synthetic oligonucleotide
  Antisense strand to SEQ ID NO: 128480
ugaucucgaggcuuucaag

SEQ ID NO: 128482 - RNA, 19 nt, Artificial Sequence
  Description of Artificial Sequence: Synthetic oligonucleotide
  Sense strand starting at position 975 of SEQ ID NO: 1640
ccgacuucgucgagcagau

SEQ ID NO: 128483 - RNA, 19 nt, Artificial Sequence
  Description of Artificial Sequence: Synthetic oligonucleotide
  Antisense strand to SEQ ID NO: 128482
aucugcucgacgaagucgg

SEQ ID NO: 128484 - RNA, 19 nt, Artificial Sequence
  Description of Artificial Sequence: Synthetic oligonucleotide
  Sense strand starting at position 987 of SEQ ID NO: 1640
agcagaucugguugacgau

SEQ ID NO: 128485 - RNA, 19 nt, Artificial Sequence
  Description of Artificial Sequence: Synthetic oligonucleotide
  Antisense strand to SEQ ID NO: 128484
aucgucaaccagaucugcu

SEQ ID NO: 128486 - RNA, 19 nt, Artificial Sequence
  Description of Artificial Sequence: Synthetic oligonucleotide
  Sense strand starting at position 990 of SEQ ID NO: 1640
agaucugguugacgaugaa

SEQ ID NO: 128487 - RNA, 19 nt, Artificial Sequence
  Description of Artificial Sequence: Synthetic oligonucleotide
  Antisense strand to SEQ ID NO: 128486
uucaucgucaaccagaucu

SEQ ID NO: 128488 - RNA, 19 nt, Artificial Sequence
  Description of Artificial Sequence: Synthetic oligonucleotide
  Sense strand starting at position 993 of SEQ ID NO: 1640
ucugguugacgaugaaguu

SEQ ID NO: 128489 - RNA, 19 nt, Artificial Sequence
  Description of Artificial Sequence: Synthetic oligonucleotide
  Antisense strand to SEQ ID NO: 128488
aacuucaucgucaaccaga

SEQ ID NO: 128490 - RNA, 19 nt, Artificial Sequence
  Description of Artificial Sequence: Synthetic oligonucleotide
  Sense strand starting at position 1606 of SEQ ID NO: 1640
gacacaaagcgccaagaau

SEQ ID NO: 128491 - RNA, 19 nt, Artificial Sequence
  Description of Artificial Sequence: Synthetic oligonucleotide
  Antisense strand to SEQ ID NO: 128490
auucuuggcgcuuuguguc

SEQ ID NO: 128492 - RNA, 19 nt, Artificial Sequence
  Description of Artificial Sequence: Synthetic oligonucleotide
  Sense strand starting at position 3234 of SEQ ID NO: 1640
ccacuacacggcugucaaa

SEQ ID NO: 128493 - RNA, 19 nt, Artificial Sequence
  Description of Artificial Sequence: Synthetic oligonucleotide
  Antisense strand to SEQ ID NO: 128492
uuugacagccguguagugg

SEQ ID NO: 128494 - RNA, 19 nt, Artificial Sequence
  Description of Artificial Sequence: Synthetic oligonucleotide
  Sense strand starting at position 3315 of SEQ ID NO: 1640
gggauaaagugacauaaag

SEQ ID NO: 128495 - RNA, 19 nt, Artificial Sequence
  Description of Artificial Sequence: Synthetic oligonucleotide
  Antisense strand to SEQ ID NO: 128494
cuuuaugucacuuuauccc

SEQ ID NO: 128496 - RNA, 19 nt, Artificial Sequence
  Description of Artificial Sequence: Synthetic oligonucleotide
  Sense strand starting at position 3398 of SEQ ID NO: 1640
uugggacacuccucagaac

SEQ ID NO: 128497 - RNA, 19 nt, Artificial Sequence
  Description of Artificial Sequence: Synthetic oligonucleotide
  Antisense strand to SEQ ID NO: 128496
guucugaggagugucccaa

SEQ ID NO: 128498 - RNA, 19 nt, Artificial Sequence
  Description of Artificial Sequence: Synthetic oligonucleotide
  Sense strand starting at position 3431 of SEQ ID NO: 1640
uggccaugcugucugucau

SEQ ID NO: 128499 - RNA, 19 nt, Artificial Sequence
  Description of Artificial Sequence: Synthetic oligonucleotide
  Antisense strand to SEQ ID NO: 128498
augacagacagcauggcca

SEQ ID NO: 128500 - RNA, 19 nt, Artificial Sequence
  Description of Artificial Sequence: Synthetic oligonucleotide
  Sense strand starting at position 3513 of SEQ ID NO: 1640
gggccaggguccgugagau

SEQ ID NO: 128501 - RNA, 19 nt, Artificial Sequence
  Description of Artificial Sequence: Synthetic oligonucleotide
  Antisense strand to SEQ ID NO: 128500
aucucacggacccuggccc

SEQ ID NO: 128502 - RNA, 19 nt, Artificial Sequence
  Description of Artificial Sequence: Synthetic oligonucleotide
  Sense strand starting at position 3554 of SEQ ID NO: 1640
uuuauuagaggcugggaga

SEQ ID NO: 128503 - RNA, 19 nt, Artificial Sequence
  Description of Artificial Sequence: Synthetic oligonucleotide
  Antisense strand to SEQ ID NO: 128502
ucucccagccucuaauaaa

SEQ ID NO: 128504 - RNA, 19 nt, Artificial Sequence
  Description of Artificial Sequence: Synthetic oligonucleotide
  Sense strand starting at position 3567 of SEQ ID NO: 1640
gggagacuuccagggcugu

SEQ ID NO: 128505 - RNA, 19 nt, Artificial Sequence
  Description of Artificial Sequence: Synthetic oligonucleotide
  Antisense strand to SEQ ID NO: 128504
acagcccuggaagucuccc

SEQ ID NO: 128506 - RNA, 19 nt, Artificial Sequence
  Description of Artificial Sequence: Synthetic oligonucleotide
  Sense strand starting at position 3975 of SEQ ID NO: 1640
uucccaucuugcuuauagu

SEQ ID NO: 128507 - RNA, 19 nt, Artificial Sequence
  Description of Artificial Sequence: Synthetic oligonucleotide
  Antisense strand to SEQ ID NO: 128506
acuauaagcaagaugggaa

SEQ ID NO: 128508 - RNA, 19 nt, Artificial Sequence
  Description of Artificial Sequence: Synthetic oligonucleotide
  Sense strand starting at position 3978 of SEQ ID NO: 1640
ccaucuugcuuauagugaa

SEQ ID NO: 128509 - RNA, 19 nt, Artificial Sequence
  Description of Artificial Sequence: Synthetic oligonucleotide
  Antisense strand to SEQ ID NO: 128508
uucacuauaagcaagaugg

SEQ ID NO: 128510 - RNA, 19 nt, Artificial Sequence
  Description of Artificial Sequence: Synthetic oligonucleotide
  Sense strand starting at position 3981 of SEQ ID NO: 1640
ucuugcuuauagugaaauc

SEQ ID NO: 128511 - RNA, 19 nt, Artificial Sequence
  Description of Artificial Sequence: Synthetic oligonucleotide
  Antisense strand to SEQ ID NO: 128510
gauuucacuauaagcaaga

SEQ ID NO: 128512 - RNA, 19 nt, Artificial Sequence
  Description of Artificial Sequence: Synthetic oligonucleotide
  Sense strand starting at position 206 of SEQ ID NO: 1642
gcuccaggcuugugaguca

SEQ ID NO: 128513 - RNA, 19 nt, Artificial Sequence
  Description of Artificial Sequence: Synthetic oligonucleotide
  Antisense strand to SEQ ID NO: 128512
ugacucacaagccuggagc

SEQ ID NO: 128514 - RNA, 19 nt, Artificial Sequence
  Description of Artificial Sequence: Synthetic oligonucleotide
  Sense strand starting at position 261 of SEQ ID NO: 1642
ugcggaggcugaugaauaa

SEQ ID NO: 128515 - RNA, 19 nt, Artificial Sequence
  Description of Artificial Sequence: Synthetic oligonucleotide
  Antisense strand to SEQ ID NO: 128514
uuauucaucagccuccgca

SEQ ID NO: 128516 - RNA, 19 nt, Artificial Sequence
  Description of Artificial Sequence: Synthetic oligonucleotide
  Sense strand starting at position 430 of SEQ ID NO: 1642
ggacuucccuguccaggaa

SEQ ID NO: 128517 - RNA, 19 nt, Artificial Sequence
  Description of Artificial Sequence: Synthetic oligonucleotide
  Antisense strand to SEQ ID NO: 128516
uuccuggacagggaagucc

SEQ ID NO: 128518 - RNA, 19 nt, Artificial Sequence
  Description of Artificial Sequence: Synthetic oligonucleotide
  Sense strand starting at position 531 of SEQ ID NO: 1642
ggauguccuugccaggaau

SEQ ID NO: 128519 - RNA, 19 nt, Artificial Sequence
  Description of Artificial Sequence: Synthetic oligonucleotide
  Antisense strand to SEQ ID NO: 128518
auuccuggcaaggacaucc

SEQ ID NO: 128520 - RNA, 19 nt, Artificial Sequence
  Description of Artificial Sequence: Synthetic oligonucleotide
  Sense strand starting at position 763 of SEQ ID NO: 1642
ggagucagagccugaccua

SEQ ID NO: 128521 - RNA, 19 nt, Artificial Sequence
  Description of Artificial Sequence: Synthetic oligonucleotide
  Antisense strand to SEQ ID NO: 128520
uaggucaggcucugacucc

SEQ ID NO: 128522 - RNA, 19 nt, Artificial Sequence
  Description of Artificial Sequence: Synthetic oligonucleotide
  Sense strand starting at position 764 of SEQ ID NO: 1642
gagucagagccugaccuaa

SEQ ID NO: 128523 - RNA, 19 nt, Artificial Sequence
  Description of Artificial Sequence: Synthetic oligonucleotide
  Antisense strand to SEQ ID NO: 128522
uuaggucaggcucugacuc

SEQ ID NO: 128524 - RNA, 19 nt, Artificial Sequence
  Description of Artificial Sequence: Synthetic oligonucleotide
  Sense strand starting at position 945 of SEQ ID NO: 1642
ggcugcagucugugaacau

SEQ ID NO: 128525 - RNA, 19 nt, Artificial Sequence
  Description of Artificial Sequence: Synthetic oligonucleotide
  Antisense strand to SEQ ID NO: 128524
auguucacagacugcagcc

SEQ ID NO: 128526 - RNA, 19 nt, Artificial Sequence
  Description of Artificial Sequence: Synthetic oligonucleotide
  Sense strand starting at position 946 of SEQ ID NO: 1642
gcugcagucugugaacauc

SEQ ID NO: 128527 - RNA, 19 nt, Artificial Sequence
  Description of Artificial Sequence: Synthetic oligonucleotide
  Antisense strand to SEQ ID NO: 128526
gauguucacagacugcagc

SEQ ID NO: 128528 - RNA, 19 nt, Artificial Sequence
  Description of Artificial Sequence: Synthetic oligonucleotide
  Sense strand starting at position 1278 of SEQ ID NO: 1642
cccucaacuugaggaguua

SEQ ID NO: 128529 - RNA, 19 nt, Artificial Sequence
  Description of Artificial Sequence: Synthetic oligonucleotide
  Antisense strand to SEQ ID NO: 128528
uaacuccucaaguugaggg

SEQ ID NO: 128530 - RNA, 19 nt, Artificial Sequence
  Description of Artificial Sequence: Synthetic oligonucleotide
  Sense strand starting at position 1289 of SEQ ID NO: 1642
aggaguuacuaaggaaucu

SEQ ID NO: 128531 - RNA, 19 nt, Artificial Sequence
  Description of Artificial Sequence: Synthetic oligonucleotide
  Antisense strand to SEQ ID NO: 128530
agauuccuuaguaacuccu

SEQ ID NO: 128532 - RNA, 19 nt, Artificial Sequence
  Description of Artificial Sequence: Synthetic oligonucleotide
  Sense strand starting at position 1767 of SEQ ID NO: 1642
gguucuguccaucgguuua

SEQ ID NO: 128533 - RNA, 19 nt, Artificial Sequence
  Description of Artificial Sequence: Synthetic oligonucleotide
  Antisense strand to SEQ ID NO: 128532
uaaaccgauggacagaacc

SEQ ID NO: 128534 - RNA, 19 nt, Artificial Sequence
  Description of Artificial Sequence: Synthetic oligonucleotide
  Sense strand starting at position 2208 of SEQ ID NO: 1642
gggccagcccuuugcagau

SEQ ID NO: 128535 - RNA, 19 nt, Artificial Sequence
  Description of Artificial Sequence: Synthetic oligonucleotide
  Antisense strand to SEQ ID NO: 128534
aucugcaaagggcuggccc

SEQ ID NO: 128536 - RNA, 19 nt, Artificial Sequence
  Description of Artificial Sequence: Synthetic oligonucleotide
  Sense strand starting at position 2242 of SEQ ID NO: 1642
agucccuggucauuaacuu

SEQ ID NO: 128537 - RNA, 19 nt, Artificial Sequence
  Description of Artificial Sequence: Synthetic oligonucleotide
  Antisense strand to SEQ ID NO: 128536
aaguuaaugaccagggacu

SEQ ID NO: 128538 - RNA, 19 nt, Artificial Sequence
  Description of Artificial Sequence: Synthetic oligonucleotide
  Sense strand starting at position 2250 of SEQ ID NO: 1642
gucauuaacuugggcuuga

SEQ ID NO: 128539 - RNA, 19 nt, Artificial Sequence
  Description of Artificial Sequence: Synthetic oligonucleotide
  Antisense strand to SEQ ID NO: 128538
ucaagcccaaguuaaugac

SEQ ID NO: 128540 - RNA, 19 nt, Artificial Sequence
  Description of Artificial Sequence: Synthetic oligonucleotide
  Sense strand starting at position 2251 of SEQ ID NO: 1642
ucauuaacuugggcuugaa

SEQ ID NO: 128541 - RNA, 19 nt, Artificial Sequence
  Description of Artificial Sequence: Synthetic oligonucleotide
  Antisense strand to SEQ ID NO: 128540
uucaagcccaaguuaauga

SEQ ID NO: 128542 - RNA, 19 nt, Artificial Sequence
  Description of Artificial Sequence: Synthetic oligonucleotide
  Sense strand starting at position 2412 of SEQ ID NO: 1642
ucgcuuccgcucuauugua

SEQ ID NO: 128543 - RNA, 19 nt, Artificial Sequence
  Description of Artificial Sequence: Synthetic oligonucleotide
  Antisense strand to SEQ ID NO: 128542
uacaauagagcggaagcga

SEQ ID NO: 128544 - RNA, 19 nt, Artificial Sequence
  Description of Artificial Sequence: Synthetic oligonucleotide
  Sense strand starting at position 2538 of SEQ ID NO: 1642
gggugcuguucugccauuu

SEQ ID NO: 128545 - RNA, 19 nt, Artificial Sequence
  Description of Artificial Sequence: Synthetic oligonucleotide
  Antisense strand to SEQ ID NO: 128544
aaauggcagaacagcaccc

SEQ ID NO: 128546 - RNA, 19 nt, Artificial Sequence
  Description of Artificial Sequence: Synthetic oligonucleotide
  Sense strand starting at position 2925 of SEQ ID NO: 1642
accagucacuuccagagau

SEQ ID NO: 128547 - RNA, 19 nt, Artificial Sequence
  Description of Artificial Sequence: Synthetic oligonucleotide
  Antisense strand to SEQ ID NO: 128546
aucucuggaagugacuggu

SEQ ID NO: 128548 - RNA, 19 nt, Artificial Sequence
  Description of Artificial Sequence: Synthetic oligonucleotide
  Sense strand starting at position 2996 of SEQ ID NO: 1642
caaagcauugcccaggaga

SEQ ID NO: 128549 - RNA, 19 nt, Artificial Sequence
  Description of Artificial Sequence: Synthetic oligonucleotide
  Antisense strand to SEQ ID NO: 128548
ucuccugggcaaugcuuug

SEQ ID NO: 128550 - RNA, 19 nt, Artificial Sequence
  Description of Artificial Sequence: Synthetic oligonucleotide
  Sense strand starting at position 2998 of SEQ ID NO: 1642
aagcauugcccaggagaau

SEQ ID NO: 128551 - RNA, 19 nt, Artificial Sequence
  Description of Artificial Sequence: Synthetic oligonucleotide
  Antisense strand to SEQ ID NO: 128550
auucuccugggcaaugcuu

SEQ ID NO: 128552 - RNA, 19 nt, Artificial Sequence
  Description of Artificial Sequence: Synthetic oligonucleotide
  Sense strand starting at position 2999 of SEQ ID NO: 1642
agcauugcccaggagaaua

SEQ ID NO: 128553 - RNA, 19 nt, Artificial Sequence
  Description of Artificial Sequence: Synthetic oligonucleotide
  Antisense strand to SEQ ID NO: 128552
uauucuccugggcaaugcu

SEQ ID NO: 128554 - RNA, 19 nt, Artificial Sequence
  Description of Artificial Sequence: Synthetic oligonucleotide
  Sense strand starting at position 3019 of SEQ ID NO: 1642
gugauugccucucccauua

SEQ ID NO: 128555 - RNA, 19 nt, Artificial Sequence
  Description of Artificial Sequence: Synthetic oligonucleotide
  Antisense strand to SEQ ID NO: 128554
uaaugggagaggcaaucac

SEQ ID NO: 128556 - RNA, 19 nt, Artificial Sequence
  Description of Artificial Sequence: Synthetic oligonucleotide
  Sense strand starting at position 3160 of SEQ ID NO: 1642
ggccauuguuaagcugcaa

SEQ ID NO: 128557 - RNA, 19 nt, Artificial Sequence
  Description of Artificial Sequence: Synthetic oligonucleotide
  Antisense strand to SEQ ID NO: 128556
uugcagcuuaacaauggcc

SEQ ID NO: 128558 - RNA, 19 nt, Artificial Sequence
  Description of Artificial Sequence: Synthetic oligonucleotide
  Sense strand starting at position 3242 of SEQ ID NO: 1642
uucugucucuucuugcaua

SEQ ID NO: 128559 - RNA, 19 nt, Artificial Sequence
  Description of Artificial Sequence: Synthetic oligonucleotide
  Antisense strand to SEQ ID NO: 128558
uaugcaagaagagacagaa

SEQ ID NO: 128560 - RNA, 19 nt, Artificial Sequence
  Description of Artificial Sequence: Synthetic oligonucleotide
  Sense strand starting at position 3243 of SEQ ID NO: 1642
ucugucucuucuugcauau

SEQ ID NO: 128561 - RNA, 19 nt, Artificial Sequence
  Description of Artificial Sequence: Synthetic oligonucleotide
  Antisense strand to SEQ ID NO: 128560
auaugcaagaagagacaga

SEQ ID NO: 128562 - RNA, 19 nt, Artificial Sequence
  Description of Artificial Sequence: Synthetic oligonucleotide
  Sense strand starting at position 3245 of SEQ ID NO: 1642
ugucucuucuugcauaugu

SEQ ID NO: 128563 - RNA, 19 nt, Artificial Sequence
  Description of Artificial Sequence: Synthetic oligonucleotide
  Antisense strand to SEQ ID NO: 128562
acauaugcaagaagagaca

SEQ ID NO: 128564 - RNA, 19 nt, Artificial Sequence
  Description of Artificial Sequence: Synthetic oligonucleotide
  Sense strand starting at position 3252 of SEQ ID NO: 1642
ucuugcauaugucuaguga

SEQ ID NO: 128565 - RNA, 19 nt, Artificial Sequence
  Description of Artificial Sequence: Synthetic oligonucleotide
  Antisense strand to SEQ ID NO: 128564
ucacuagacauaugcaaga

SEQ ID NO: 128566 - RNA, 19 nt, Artificial Sequence
  Description of Artificial Sequence: Synthetic oligonucleotide
  Sense strand starting at position 3253 of SEQ ID NO: 1642
cuugcauaugucuagugau

SEQ ID NO: 128567 - RNA, 19 nt, Artificial Sequence
  Description of Artificial Sequence: Synthetic oligonucleotide
  Antisense strand to SEQ ID NO: 128566
aucacuagacauaugcaag

SEQ ID NO: 128568 - RNA, 19 nt, Artificial Sequence
  Description of Artificial Sequence: Synthetic oligonucleotide
  Sense strand starting at position 3311 of SEQ ID NO: 1642
gcuggaaacucuuuccugu

SEQ ID NO: 128569 - RNA, 19 nt, Artificial Sequence
  Description of Artificial Sequence: Synthetic oligonucleotide
  Antisense strand to SEQ ID NO: 128568
acaggaaagaguuuccagc

SEQ ID NO: 128570 - RNA, 19 nt, Artificial Sequence
  Description of Artificial Sequence: Synthetic oligonucleotide
  Sense strand starting at position 3314 of SEQ ID NO: 1642
ggaaacucuuuccuguagu

SEQ ID NO: 128571 - RNA, 19 nt, Artificial Sequence
  Description of Artificial Sequence: Synthetic oligonucleotide
  Antisense strand to SEQ ID NO: 128570
acuacaggaaagaguuucc

SEQ ID NO: 128572 - RNA, 19 nt, Artificial Sequence
  Description of Artificial Sequence: Synthetic oligonucleotide
  Sense strand starting at position 3315 of SEQ ID NO: 1642
gaaacucuuuccuguagug

SEQ ID NO: 128573 - RNA, 19 nt, Artificial Sequence
  Description of Artificial Sequence: Synthetic oligonucleotide
  Antisense strand to SEQ ID NO: 128572
cacuacaggaaagaguuuc

SEQ ID NO: 128574 - RNA, 19 nt, Artificial Sequence
  Description of Artificial Sequence: Synthetic oligonucleotide
  Sense strand starting at position 3389 of SEQ ID NO: 1642
ucccuuuccuccugagagu

SEQ ID NO: 128575 - RNA, 19 nt, Artificial Sequence
  Description of Artificial Sequence: Synthetic oligonucleotide
  Antisense strand to SEQ ID NO: 128574
acucucaggaggaaaggga

SEQ ID NO: 128576 - RNA, 19 nt, Artificial Sequence
  Description of Artificial Sequence: Synthetic oligonucleotide
  Sense strand starting at position 3390 of SEQ ID NO: 1642
cccuuuccuccugagaguu

SEQ ID NO: 128577 - RNA, 19 nt, Artificial Sequence
  Description of Artificial Sequence: Synthetic oligonucleotide
  Antisense strand to SEQ ID NO: 128576
aacucucaggaggaaaggg

SEQ ID NO: 128578 - RNA, 19 nt, Artificial Sequence
  Description of Artificial Sequence: Synthetic oligonucleotide
  Sense strand starting at position 3398 of SEQ ID NO: 1642
uccugagaguucugaggaa

SEQ ID NO: 128579 - RNA, 19 nt, Artificial Sequence
  Description of Artificial Sequence: Synthetic oligonucleotide
  Antisense strand to SEQ ID NO: 128578
uuccucagaacucucagga

SEQ ID NO: 128580 - RNA, 19 nt, Artificial Sequence
  Description of Artificial Sequence: Synthetic oligonucleotide
  Sense strand starting at position 3441 of SEQ ID NO: 1642
ugguuugaguccugaucuu

SEQ ID NO: 128581 - RNA, 19 nt, Artificial Sequence
  Description of Artificial Sequence: Synthetic oligonucleotide
  Antisense strand to SEQ ID NO: 128580
aagaucaggacucaaacca

SEQ ID NO: 128582 - RNA, 19 nt, Artificial Sequence
  Description of Artificial Sequence: Synthetic oligonucleotide
  Sense strand starting at position 3555 of SEQ ID NO: 1642
agaugagguuucugugcca

SEQ ID NO: 128583 - RNA, 19 nt, Artificial Sequence
  Description of Artificial Sequence: Synthetic oligonucleotide
  Antisense strand to SEQ ID NO: 128582
uggcacagaaaccucaucu

SEQ ID NO: 128584 - RNA, 19 nt, Artificial Sequence
  Description of Artificial Sequence: Synthetic oligonucleotide
  Sense strand starting at position 3598 of SEQ ID NO: 1642
caguacgugcuggaucaau

SEQ ID NO: 128585 - RNA, 19 nt, Artificial Sequence
  Description of Artificial Sequence: Synthetic oligonucleotide
  Antisense strand to SEQ ID NO: 128584
auugauccagcacguacug

SEQ ID NO: 128586 - RNA, 19 nt, Artificial Sequence
  Description of Artificial Sequence: Synthetic oligonucleotide
  Sense strand starting at position 3738 of SEQ ID NO: 1642
ugacuagaccucgaacagu

SEQ ID NO: 128587 - RNA, 19 nt, Artificial Sequence
  Description of Artificial Sequence: Synthetic oligonucleotide
  Antisense strand to SEQ ID NO: 128586
acuguucgaggucuaguca

SEQ ID NO: 128588 - RNA, 19 nt, Artificial Sequence
  Description of Artificial Sequence: Synthetic oligonucleotide
  Sense strand starting at position 3841 of SEQ ID NO: 1642
ucauuagucugccuugauc

SEQ ID NO: 128589 - RNA, 19 nt, Artificial Sequence
  Description of Artificial Sequence: Synthetic oligonucleotide
  Antisense strand to SEQ ID NO: 128588
gaucaaggcagacuaauga

SEQ ID NO: 128590 - RNA, 19 nt, Artificial Sequence
  Description of Artificial Sequence: Synthetic oligonucleotide
  Sense strand starting at position 660 of SEQ ID NO: 1637
gguucuguccaucgguuua

SEQ ID NO: 128591 - RNA, 19 nt, Artificial Sequence
  Description of Artificial Sequence: Synthetic oligonucleotide
  Antisense strand to SEQ ID NO: 128590
uaaaccgauggacagaacc

SEQ ID NO: 128592 - RNA, 19 nt, Artificial Sequence
  Description of Artificial Sequence: Synthetic oligonucleotide
  Sense strand starting at position 1101 of SEQ ID NO: 1637
gggccagcccuuugcagau

SEQ ID NO: 128593 - RNA, 19 nt, Artificial Sequence
  Description of Artificial Sequence: Synthetic oligonucleotide
  Antisense strand to SEQ ID NO: 128592
aucugcaaagggcuggccc

SEQ ID NO: 128594 - RNA, 19 nt, Artificial Sequence
  Description of Artificial Sequence: Synthetic oligonucleotide
  Sense strand starting at position 1135 of SEQ ID NO: 1637
agucccuggucauuaacuu

SEQ ID NO: 128595 - RNA, 19 nt, Artificial Sequence
  Description of Artificial Sequence: Synthetic oligonucleotide
  Antisense strand to SEQ ID NO: 128594
aaguuaaugaccagggacu

SEQ ID NO: 128596 - RNA, 19 nt, Artificial Sequence
  Description of Artificial Sequence: Synthetic oligonucleotide
  Sense strand starting at position 1144 of SEQ ID NO: 1637
ucauuaacuugggcuugaa

SEQ ID NO: 128597 - RNA, 19 nt, Artificial Sequence
  Description of Artificial Sequence: Synthetic oligonucleotide
  Antisense strand to SEQ ID NO: 128596
uucaagcccaaguuaauga

SEQ ID NO: 128598 - RNA, 19 nt, Artificial Sequence
  Description of Artificial Sequence: Synthetic oligonucleotide
  Sense strand starting at position 1431 of SEQ ID NO: 1637
gggugcuguucugccauuu

SEQ ID NO: 128599 - RNA, 19 nt, Artificial Sequence
  Description of Artificial Sequence: Synthetic oligonucleotide
  Antisense strand to SEQ ID NO: 128598
aaauggcagaacagcaccc

SEQ ID NO: 128600 - RNA, 19 nt, Artificial Sequence
  Description of Artificial Sequence: Synthetic oligonucleotide
  Sense strand starting at position 1889 of SEQ ID NO: 1637
caaagcauugcccaggaga

SEQ ID NO: 128601 - RNA, 19 nt, Artificial Sequence
  Description of Artificial Sequence: Synthetic oligonucleotide
  Antisense strand to SEQ ID NO: 128600
ucuccugggcaaugcuuug

SEQ ID NO: 128602 - RNA, 19 nt, Artificial Sequence
  Description of Artificial Sequence: Synthetic oligonucleotide
  Sense strand starting at position 1891 of SEQ ID NO: 1637
aagcauugcccaggagaau

SEQ ID NO: 128603 - RNA, 19 nt, Artificial Sequence
  Description of Artificial Sequence: Synthetic oligonucleotide
  Antisense strand to SEQ ID NO: 128602
auucuccugggcaaugcuu

SEQ ID NO: 128604 - RNA, 19 nt, Artificial Sequence
  Description of Artificial Sequence: Synthetic oligonucleotide
  Sense strand starting at position 1892 of SEQ ID NO: 1637
agcauugcccaggagaaua

SEQ ID NO: 128605 - RNA, 19 nt, Artificial Sequence
  Description of Artificial Sequence: Synthetic oligonucleotide
  Antisense strand to SEQ ID NO: 128604
uauucuccugggcaaugcu

SEQ ID NO: 128606 - RNA, 19 nt, Artificial Sequence
  Description of Artificial Sequence: Synthetic oligonucleotide
  Sense strand starting at position 1912 of SEQ ID NO: 1637
gugauugccucucccauua

SEQ ID NO: 128607 - RNA, 19 nt, Artificial Sequence
  Description of Artificial Sequence: Synthetic oligonucleotide
  Antisense strand to SEQ ID NO: 128606
uaaugggagaggcaaucac

SEQ ID NO: 128608 - RNA, 19 nt, Artificial Sequence
  Description of Artificial Sequence: Synthetic oligonucleotide
  Sense strand starting at position 2053 of SEQ ID NO: 1637
ggccauuguuaagcugcaa

SEQ ID NO: 128609 - RNA, 19 nt, Artificial Sequence
  Description of Artificial Sequence: Synthetic oligonucleotide
  Antisense strand to SEQ ID NO: 128608
uugcagcuuaacaauggcc

SEQ ID NO: 128610 - RNA, 19 nt, Artificial Sequence
  Description of Artificial Sequence: Synthetic oligonucleotide
  Sense strand starting at position 2135 of SEQ ID NO: 1637
uucugucucuucuugcaua

SEQ ID NO: 128611 - RNA, 19 nt, Artificial Sequence
  Description of Artificial Sequence: Synthetic oligonucleotide
  Antisense strand to SEQ ID NO: 128610
uaugcaagaagagacagaa

SEQ ID NO: 128612 - RNA, 19 nt, Artificial Sequence
  Description of Artificial Sequence: Synthetic oligonucleotide
  Sense strand starting at position 2145 of SEQ ID NO: 1637
ucuugcauaugucuaguga

SEQ ID NO: 128613 - RNA, 19 nt, Artificial Sequence
  Description of Artificial Sequence: Synthetic oligonucleotide
  Antisense strand to SEQ ID NO: 128612
ucacuagacauaugcaaga

SEQ ID NO: 128614 - RNA, 19 nt, Artificial Sequence
  Description of Artificial Sequence: Synthetic oligonucleotide
  Sense strand starting at position 2146 of SEQ ID NO: 1637
cuugcauaugucuagugau

SEQ ID NO: 128615 - RNA, 19 nt, Artificial Sequence
  Description of Artificial Sequence: Synthetic oligonucleotide
  Antisense strand to SEQ ID NO: 128614
aucacuagacauaugcaag

SEQ ID NO: 128616 - RNA, 19 nt, Artificial Sequence
  Description of Artificial Sequence: Synthetic oligonucleotide
  Sense strand starting at position 2204 of SEQ ID NO: 1637
gcuggaaacucuuuccugu

SEQ ID NO: 128617 - RNA, 19 nt, Artificial Sequence
  Description of Artificial Sequence: Synthetic oligonucleotide
  Antisense strand to SEQ ID NO: 128616
acaggaaagaguuuccagc

SEQ ID NO: 128618 - RNA, 19 nt, Artificial Sequence
  Description of Artificial Sequence: Synthetic oligonucleotide
  Sense strand starting at position 2207 of SEQ ID NO: 1637
ggaaacucuuuccuguagu

SEQ ID NO: 128619 - RNA, 19 nt, Artificial Sequence
  Description of Artificial Sequence: Synthetic oligonucleotide
  Antisense strand to SEQ ID NO: 128618
acuacaggaaagaguuucc

SEQ ID NO: 128620 - RNA, 19 nt, Artificial Sequence
  Description of Artificial Sequence: Synthetic oligonucleotide
  Sense strand starting at position 2283 of SEQ ID NO: 1637
cccuuuccuccugagaguu

SEQ ID NO: 128621 - RNA, 19 nt, Artificial Sequence
  Description of Artificial Sequence: Synthetic oligonucleotide
  Antisense strand to SEQ ID NO: 128620
aacucucaggaggaaaggg

SEQ ID NO: 128622 - RNA, 19 nt, Artificial Sequence
  Description of Artificial Sequence: Synthetic oligonucleotide
  Sense strand starting at position 2491 of SEQ ID NO: 1637
caguacgugcuggaucaau

SEQ ID NO: 128623 - RNA, 19 nt, Artificial Sequence
  Description of Artificial Sequence: Synthetic oligonucleotide
  Antisense strand to SEQ ID NO: 128622
auugauccagcacguacug

SEQ ID NO: 128624 - RNA, 19 nt, Artificial Sequence
  Description of Artificial Sequence: Synthetic oligonucleotide
  Sense strand starting at position 2631 of SEQ ID NO: 1637
ugacuagaccucgaacagu

SEQ ID NO: 128625 - RNA, 19 nt, Artificial Sequence
  Description of Artificial Sequence: Synthetic oligonucleotide
  Antisense strand to SEQ ID NO: 128624
acuguucgaggucuaguca

SEQ ID NO: 128626 - RNA, 19 nt, Artificial Sequence
  Description of Artificial Sequence: Synthetic oligonucleotide
  Sense strand starting at position 2734 of SEQ ID NO: 1637
ucauuagucugccuugauc

SEQ ID NO: 128627 - RNA, 19 nt, Artificial Sequence
  Description of Artificial Sequence: Synthetic oligonucleotide
  Antisense strand to SEQ ID NO: 128626
gaucaaggcagacuaauga

SEQ ID NO: 128628 - RNA, 19 nt, Artificial Sequence
  Description of Artificial Sequence: Synthetic oligonucleotide
  Sense strand starting at position 2929 of SEQ ID NO: 1637
cuaugcuaagcauguuaua

SEQ ID NO: 128629 - RNA, 19 nt, Artificial Sequence
  Description of Artificial Sequence: Synthetic oligonucleotide
  Antisense strand to SEQ ID NO: 128628
uauaacaugcuuagcauag

SEQ ID NO: 128630 - RNA, 19 nt, Artificial Sequence
  Description of Artificial Sequence: Synthetic oligonucleotide
  Sense strand starting at position 3002 of SEQ ID NO: 1637
gguucagagaaguguagug

SEQ ID NO: 128631 - RNA, 19 nt, Artificial Sequence
  Description of Artificial Sequence: Synthetic oligonucleotide
  Antisense strand to SEQ ID NO: 128630
cacuacacuucucugaacc

SEQ ID NO: 128632 - RNA, 19 nt, Artificial Sequence
  Description of Artificial Sequence: Synthetic oligonucleotide
  Sense strand starting at position 3072 of SEQ ID NO: 1637
agagguguggacugcucua

SEQ ID NO: 128633 - RNA, 19 nt, Artificial Sequence
  Description of Artificial Sequence: Synthetic oligonucleotide
  Antisense strand to SEQ ID NO: 128632
uagagcaguccacaccucu

SEQ ID NO: 128634 - RNA, 19 nt, Artificial Sequence
  Description of Artificial Sequence: Synthetic oligonucleotide
  Sense strand starting at position 3077 of SEQ ID NO: 1637
uguggacugcucuacauau

SEQ ID NO: 128635 - RNA, 19 nt, Artificial Sequence
  Description of Artificial Sequence: Synthetic oligonucleotide
  Antisense strand to SEQ ID NO: 128634
auauguagagcaguccaca

SEQ ID NO: 128636 - RNA, 19 nt, Artificial Sequence
  Description of Artificial Sequence: Synthetic oligonucleotide
  Sense strand starting at position 3482 of SEQ ID NO: 1637
gccugaaauugguccuuug

SEQ ID NO: 128637 - RNA, 19 nt, Artificial Sequence
  Description of Artificial Sequence: Synthetic oligonucleotide
  Antisense strand to SEQ ID NO: 128636
caaaggaccaauuucaggc

SEQ ID NO: 128638 - RNA, 19 nt, Artificial Sequence
  Description of Artificial Sequence: Synthetic oligonucleotide
  Sense strand starting at position 3485 of SEQ ID NO: 1637
ugaaauugguccuuugcca

SEQ ID NO: 128639 - RNA, 19 nt, Artificial Sequence
  Description of Artificial Sequence: Synthetic oligonucleotide
  Antisense strand to SEQ ID NO: 128638
uggcaaaggaccaauuuca

SEQ ID NO: 128640 - RNA, 19 nt, Artificial Sequence
  Description of Artificial Sequence: Synthetic oligonucleotide
  Sense strand starting at position 3592 of SEQ ID NO: 1637
cccuuuguucucuggagau

SEQ ID NO: 128641 - RNA, 19 nt, Artificial Sequence
  Description of Artificial Sequence: Synthetic oligonucleotide
  Antisense strand to SEQ ID NO: 128640
aucuccagagaacaaaggg

SEQ ID NO: 128642 - RNA, 19 nt, Artificial Sequence
  Description of Artificial Sequence: Synthetic oligonucleotide
  Sense strand starting at position 3594 of SEQ ID NO: 1637
cuuuguucucuggagaucu

SEQ ID NO: 128643 - RNA, 19 nt, Artificial Sequence
  Description of Artificial Sequence: Synthetic oligonucleotide
  Antisense strand to SEQ ID NO: 128642
agaucuccagagaacaaag

SEQ ID NO: 128644 - RNA, 19 nt, Artificial Sequence
  Description of Artificial Sequence: Synthetic oligonucleotide
  Sense strand starting at position 3604 of SEQ ID NO: 1637
uggagaucuccugggccua

SEQ ID NO: 128645 - RNA, 19 nt, Artificial Sequence
  Description of Artificial Sequence: Synthetic oligonucleotide
  Antisense strand to SEQ ID NO: 128644
uaggcccaggagaucucca

SEQ ID NO: 128646 - RNA, 19 nt, Artificial Sequence
  Description of Artificial Sequence: Synthetic oligonucleotide
  Sense strand starting at position 3606 of SEQ ID NO: 1637
gagaucuccugggccuaga

SEQ ID NO: 128647 - RNA, 19 nt, Artificial Sequence
  Description of Artificial Sequence: Synthetic oligonucleotide
  Antisense strand to SEQ ID NO: 128646
ucuaggcccaggagaucuc

SEQ ID NO: 128648 - RNA, 19 nt, Artificial Sequence
  Description of Artificial Sequence: Synthetic oligonucleotide
  Sense strand starting at position 3656 of SEQ ID NO: 1637
uggucugguaaaugaauaa

SEQ ID NO: 128649 - RNA, 19 nt, Artificial Sequence
  Description of Artificial Sequence: Synthetic oligonucleotide
  Antisense strand to SEQ ID NO: 128648
uuauucauuuaccagacca

SEQ ID NO: 128650 - RNA, 19 nt, Artificial Sequence
  Description of Artificial Sequence: Synthetic oligonucleotide
  Sense strand starting at position 3723 of SEQ ID NO: 1637
uagggcucuugaucagaca

SEQ ID NO: 128651 - RNA, 19 nt, Artificial Sequence
  Description of Artificial Sequence: Synthetic oligonucleotide
  Antisense strand to SEQ ID NO: 128650
ugucugaucaagagcccua

SEQ ID NO: 128652 - RNA, 19 nt, Artificial Sequence
  Description of Artificial Sequence: Synthetic oligonucleotide
  Sense strand starting at position 3776 of SEQ ID NO: 1637
gugugaugugggcaaguuc

SEQ ID NO: 128653 - RNA, 19 nt, Artificial Sequence
  Description of Artificial Sequence: Synthetic oligonucleotide
  Antisense strand to SEQ ID NO: 128652
gaacuugcccacaucacac

SEQ ID NO: 128654 - RNA, 19 nt, Artificial Sequence
  Description of Artificial Sequence: Synthetic oligonucleotide
  Sense strand starting at position 3821 of SEQ ID NO: 1637
uuacaagucauguggucau

SEQ ID NO: 128655 - RNA, 19 nt, Artificial Sequence
  Description of Artificial Sequence: Synthetic oligonucleotide
  Antisense strand to SEQ ID NO: 128654
augaccacaugacuuguaa

SEQ ID NO: 128656 - RNA, 19 nt, Artificial Sequence
  Description of Artificial Sequence: Synthetic oligonucleotide
  Sense strand starting at position 3824 of SEQ ID NO: 1637
caagucauguggucauaag

SEQ ID NO: 128657 - RNA, 19 nt, Artificial Sequence
  Description of Artificial Sequence: Synthetic oligonucleotide
  Antisense strand to SEQ ID NO: 128656
cuuaugaccacaugacuug

SEQ ID NO: 128658 - RNA, 19 nt, Artificial Sequence
  Description of Artificial Sequence: Synthetic oligonucleotide
  Sense strand starting at position 3825 of SEQ ID NO: 1637
aagucauguggucauaaga

SEQ ID NO: 128659 - RNA, 19 nt, Artificial Sequence
  Description of Artificial Sequence: Synthetic oligonucleotide
  Antisense strand to SEQ ID NO: 128658
ucuuaugaccacaugacuu

SEQ ID NO: 128660 - RNA, 19 nt, Artificial Sequence
  Description of Artificial Sequence: Synthetic oligonucleotide
  Sense strand starting at position 3907 of SEQ ID NO: 1637
ccgccuggcauguaaacau

SEQ ID NO: 128661 - RNA, 19 nt, Artificial Sequence
  Description of Artificial Sequence: Synthetic oligonucleotide
  Antisense strand to SEQ ID NO: 128660
auguuuacaugccaggcgg

SEQ ID NO: 128662 - RNA, 19 nt, Artificial Sequence
  Description of Artificial Sequence: Synthetic oligonucleotide
  Sense strand starting at position 3916 of SEQ ID NO: 1637
auguaaacauguucgguca

SEQ ID NO: 128663 - RNA, 19 nt, Artificial Sequence
  Description of Artificial Sequence: Synthetic oligonucleotide
  Antisense strand to SEQ ID NO: 128662
ugaccgaacauguuuacau

SEQ ID NO: 128664 - RNA, 19 nt, Artificial Sequence
  Description of Artificial Sequence: Synthetic oligonucleotide
  Sense strand starting at position 3919 of SEQ ID NO: 1637
uaaacauguucggucagca

SEQ ID NO: 128665 - RNA, 19 nt, Artificial Sequence
  Description of Artificial Sequence: Synthetic oligonucleotide
  Antisense strand to SEQ ID NO: 128664
ugcugaccgaacauguuua

SEQ ID NO: 128666 - RNA, 19 nt, Artificial Sequence
  Description of Artificial Sequence: Synthetic oligonucleotide
  Sense strand starting at position 3923 of SEQ ID NO: 1637
cauguucggucagcaauaa

SEQ ID NO: 128667 - RNA, 19 nt, Artificial Sequence
  Description of Artificial Sequence: Synthetic oligonucleotide
  Antisense strand to SEQ ID NO: 128666
uuauugcugaccgaacaug

SEQ ID NO: 128668 - RNA, 19 nt, Artificial Sequence
  Description of Artificial Sequence: Synthetic oligonucleotide
  Sense strand starting at position 3924 of SEQ ID NO: 1637
auguucggucagcaauaau

SEQ ID NO: 128669 - RNA, 19 nt, Artificial Sequence
  Description of Artificial Sequence: Synthetic oligonucleotide
  Antisense strand to SEQ ID NO: 128668
auuauugcugaccgaacau

SEQ ID NO: 128670 - RNA, 19 nt, Artificial Sequence
  Description of Artificial Sequence: Synthetic oligonucleotide
  Sense strand starting at position 167 of SEQ ID NO: 1638
ggccgugucauggcggaua

SEQ ID NO: 128671 - RNA, 19 nt, Artificial Sequence
  Description of Artificial Sequence: Synthetic oligonucleotide
  Antisense strand to SEQ ID NO: 128670
uauccgccaugacacggcc

SEQ ID NO: 128672 - RNA, 19 nt, Artificial Sequence
  Description of Artificial Sequence: Synthetic oligonucleotide
  Sense strand starting at position 170 of SEQ ID NO: 1638
cgugucauggcggauauua

SEQ ID NO: 128673 - RNA, 19 nt, Artificial Sequence
  Description of Artificial Sequence: Synthetic oligonucleotide
  Antisense strand to SEQ ID NO: 128672
uaauauccgccaugacacg

SEQ ID NO: 128674 - RNA, 19 nt, Artificial Sequence
  Description of Artificial Sequence: Synthetic oligonucleotide
  Sense strand starting at position 765 of SEQ ID NO: 1638
agagcaacccuuuggcaua

SEQ ID NO: 128675 - RNA, 19 nt, Artificial Sequence
  Description of Artificial Sequence: Synthetic oligonucleotide
  Antisense strand to SEQ ID NO: 128674
uaugccaaaggguugcucu

SEQ ID NO: 128676 - RNA, 19 nt, Artificial Sequence
  Description of Artificial Sequence: Synthetic oligonucleotide
  Sense strand starting at position 1075 of SEQ ID NO: 1638
ccagcaacccuucggcaua

SEQ ID NO: 128677 - RNA, 19 nt, Artificial Sequence
  Description of Artificial Sequence: Synthetic oligonucleotide
  Antisense strand to SEQ ID NO: 128676
uaugccgaaggguugcugg

SEQ ID NO: 128678 - RNA, 19 nt, Artificial Sequence
  Description of Artificial Sequence: Synthetic oligonucleotide
  Sense strand starting at position 1100 of SEQ ID NO: 1638
cuaggucuuucuucuguca

SEQ ID NO: 128679 - RNA, 19 nt, Artificial Sequence
  Description of Artificial Sequence: Synthetic oligonucleotide
  Antisense strand to SEQ ID NO: 128678
ugacagaagaaagaccuag

SEQ ID NO: 128680 - RNA, 19 nt, Artificial Sequence
  Description of Artificial Sequence: Synthetic oligonucleotide
  Sense strand starting at position 1103 of SEQ ID NO: 1638
ggucuuucuucugucagga

SEQ ID NO: 128681 - RNA, 19 nt, Artificial Sequence
  Description of Artificial Sequence: Synthetic oligonucleotide
  Antisense strand to SEQ ID NO: 128680
uccugacagaagaaagacc

SEQ ID NO: 128682 - RNA, 19 nt, Artificial Sequence
  Description of Artificial Sequence: Synthetic oligonucleotide
  Sense strand starting at position 1116 of SEQ ID NO: 1638
ucaggaguuagauggcuga

SEQ ID NO: 128683 - RNA, 19 nt, Artificial Sequence
  Description of Artificial Sequence: Synthetic oligonucleotide
  Antisense strand to SEQ ID NO: 128682
ucagccaucuaacuccuga

SEQ ID NO: 128684 - RNA, 19 nt, Artificial Sequence
  Description of Artificial Sequence: Synthetic oligonucleotide
  Sense strand starting at position 1119 of SEQ ID NO: 1638
ggaguuagauggcugagca

SEQ ID NO: 128685 - RNA, 19 nt, Artificial Sequence
  Description of Artificial Sequence: Synthetic oligonucleotide
  Antisense strand to SEQ ID NO: 128684
ugcucagccaucuaacucc

SEQ ID NO: 128686 - RNA, 19 nt, Artificial Sequence
  Description of Artificial Sequence: Synthetic oligonucleotide
  Sense strand starting at position 1197 of SEQ ID NO: 1638
gggcuuaacucacugauua

SEQ ID NO: 128687 - RNA, 19 nt, Artificial Sequence
  Description of Artificial Sequence: Synthetic oligonucleotide
  Antisense strand to SEQ ID NO: 128686
uaaucagugaguuaagccc

SEQ ID NO: 128688 - RNA, 19 nt, Artificial Sequence
  Description of Artificial Sequence: Synthetic oligonucleotide
  Sense strand starting at position 1198 of SEQ ID NO: 1638
ggcuuaacucacugauuaa

SEQ ID NO: 128689 - RNA, 19 nt, Artificial Sequence
  Description of Artificial Sequence: Synthetic oligonucleotide
  Antisense strand to SEQ ID NO: 128688
uuaaucagugaguuaagcc

SEQ ID NO: 128690 - RNA, 19 nt, Artificial Sequence
  Description of Artificial Sequence: Synthetic oligonucleotide
  Sense strand starting at position 1216 of SEQ ID NO: 1638
auggaagaaugagaccaaa

SEQ ID NO: 128691 - RNA, 19 nt, Artificial Sequence
  Description of Artificial Sequence: Synthetic oligonucleotide
  Antisense strand to SEQ ID NO: 128690
uuuggucucauucuuccau

SEQ ID NO: 128692 - RNA, 19 nt, Artificial Sequence
  Description of Artificial Sequence: Synthetic oligonucleotide
  Sense strand starting at position 1256 of SEQ ID NO: 1638
ucuuaaaccguccggacua

SEQ ID NO: 128693 - RNA, 19 nt, Artificial Sequence
  Description of Artificial Sequence: Synthetic oligonucleotide
  Antisense strand to SEQ ID NO: 128692
uaguccggacgguuuaaga

SEQ ID NO: 128694 - RNA, 19 nt, Artificial Sequence
  Description of Artificial Sequence: Synthetic oligonucleotide
  Sense strand starting at position 1269 of SEQ ID NO: 1638
ggacuaauucagugagugu

SEQ ID NO: 128695 - RNA, 19 nt, Artificial Sequence
  Description of Artificial Sequence: Synthetic oligonucleotide
  Antisense strand to SEQ ID NO: 128694
acacucacugaauuagucc

SEQ ID NO: 128696 - RNA, 19 nt, Artificial Sequence
  Description of Artificial Sequence: Synthetic oligonucleotide
  Sense strand starting at position 1509 of SEQ ID NO: 1638
aggccucucuaaucagaca

SEQ ID NO: 128697 - RNA, 19 nt, Artificial Sequence
  Description of Artificial Sequence: Synthetic oligonucleotide
  Antisense strand to SEQ ID NO: 128696
ugucugauuagagaggccu

SEQ ID NO: 128698 - RNA, 19 nt, Artificial Sequence
  Description of Artificial Sequence: Synthetic oligonucleotide
  Sense strand starting at position 1555 of SEQ ID NO: 1638
uugccaucucaacauggaa

SEQ ID NO: 128699 - RNA, 19 nt, Artificial Sequence
  Description of Artificial Sequence: Synthetic oligonucleotide
  Antisense strand to SEQ ID NO: 128698
uuccauguugagauggcaa

SEQ ID NO: 128700 - RNA, 19 nt, Artificial Sequence
  Description of Artificial Sequence: Synthetic oligonucleotide
  Sense strand starting at position 1614 of SEQ ID NO: 1638
uggaccugucugcacagaa

SEQ ID NO: 128701 - RNA, 19 nt, Artificial Sequence
  Description of Artificial Sequence: Synthetic oligonucleotide
  Antisense strand to SEQ ID NO: 128700
uucugugcagacaggucca

SEQ ID NO: 128702 - RNA, 19 nt, Artificial Sequence
  Description of Artificial Sequence: Synthetic oligonucleotide
  Sense strand starting at position 1752 of SEQ ID NO: 1638
guugguuccuucuuggauu

SEQ ID NO: 128703 - RNA, 19 nt, Artificial Sequence
  Description of Artificial Sequence: Synthetic oligonucleotide
  Antisense strand to SEQ ID NO: 128702
aauccaagaaggaaccaac

SEQ ID NO: 128704 - RNA, 19 nt, Artificial Sequence
  Description of Artificial Sequence: Synthetic oligonucleotide
  Sense strand starting at position 1842 of SEQ ID NO: 1638
ccuccuuuccaggaaagca

SEQ ID NO: 128705 - RNA, 19 nt, Artificial Sequence
  Description of Artificial Sequence: Synthetic oligonucleotide
  Antisense strand to SEQ ID NO: 128704
ugcuuuccuggaaaggagg

SEQ ID NO: 128706 - RNA, 19 nt, Artificial Sequence
  Description of Artificial Sequence: Synthetic oligonucleotide
  Sense strand starting at position 2115 of SEQ ID NO: 1638
gaacucugcugauucgcaa

SEQ ID NO: 128707 - RNA, 19 nt, Artificial Sequence
  Description of Artificial Sequence: Synthetic oligonucleotide
  Antisense strand to SEQ ID NO: 128706
uugcgaaucagcagaguuc

SEQ ID NO: 128708 - RNA, 19 nt, Artificial Sequence
  Description of Artificial Sequence: Synthetic oligonucleotide
  Sense strand starting at position 2205 of SEQ ID NO: 1638
cuggcaaagccuugggaau

SEQ ID NO: 128709 - RNA, 19 nt, Artificial Sequence
  Description of Artificial Sequence: Synthetic oligonucleotide
  Antisense strand to SEQ ID NO: 128708
auucccaaggcuuugccag

SEQ ID NO: 128710 - RNA, 19 nt, Artificial Sequence
  Description of Artificial Sequence: Synthetic oligonucleotide
  Sense strand starting at position 2206 of SEQ ID NO: 1638
uggcaaagccuugggaaua

SEQ ID NO: 128711 - RNA, 19 nt, Artificial Sequence
  Description of Artificial Sequence: Synthetic oligonucleotide
  Antisense strand to SEQ ID NO: 128710
uauucccaaggcuuugcca

SEQ ID NO: 128712 - RNA, 19 nt, Artificial Sequence
  Description of Artificial Sequence: Synthetic oligonucleotide
  Sense strand starting at position 2218 of SEQ ID NO: 1638
gggaauacuuaacuuagca

SEQ ID NO: 128713 - RNA, 19 nt, Artificial Sequence
  Description of Artificial Sequence: Synthetic oligonucleotide
  Antisense strand to SEQ ID NO: 128712
ugcuaaguuaaguauuccc

SEQ ID NO: 128714 - RNA, 19 nt, Artificial Sequence
  Description of Artificial Sequence: Synthetic oligonucleotide
  Sense strand starting at position 2231 of SEQ ID NO: 1638
uuagcaaggucuuucugaa

SEQ ID NO: 128715 - RNA, 19 nt, Artificial Sequence
  Description of Artificial Sequence: Synthetic oligonucleotide
  Antisense strand to SEQ ID NO: 128714
uucagaaagaccuugcuaa

SEQ ID NO: 128716 - RNA, 19 nt, Artificial Sequence
  Description of Artificial Sequence: Synthetic oligonucleotide
  Sense strand starting at position 2473 of SEQ ID NO: 1638
aguagauggugucucacua

SEQ ID NO: 128717 - RNA, 19 nt, Artificial Sequence
  Description of Artificial Sequence: Synthetic oligonucleotide
  Antisense strand to SEQ ID NO: 128716
uagugagacaccaucuacu

SEQ ID NO: 128718 - RNA, 19 nt, Artificial Sequence
  Description of Artificial Sequence: Synthetic oligonucleotide
  Sense strand starting at position 2597 of SEQ ID NO: 1638
ugaacucuuccaggagcaa

SEQ ID NO: 128719 - RNA, 19 nt, Artificial Sequence
  Description of Artificial Sequence: Synthetic oligonucleotide
  Antisense strand to SEQ ID NO: 128718
uugcuccuggaagaguuca

SEQ ID NO: 128720 - RNA, 19 nt, Artificial Sequence
  Description of Artificial Sequence: Synthetic oligonucleotide
  Sense strand starting at position 3140 of SEQ ID NO: 1638
caagcauuugcuggagucu

SEQ ID NO: 128721 - RNA, 19 nt, Artificial Sequence
  Description of Artificial Sequence: Synthetic oligonucleotide
  Antisense strand to SEQ ID NO: 128720
agacuccagcaaaugcuug

SEQ ID NO: 128722 - RNA, 19 nt, Artificial Sequence
  Description of Artificial Sequence: Synthetic oligonucleotide
  Sense strand starting at position 3232 of SEQ ID NO: 1638
uuaagugauuaccuggaau

SEQ ID NO: 128723 - RNA, 19 nt, Artificial Sequence
  Description of Artificial Sequence: Synthetic oligonucleotide
  Antisense strand to SEQ ID NO: 128722
auuccagguaaucacuuaa

SEQ ID NO: 128724 - RNA, 19 nt, Artificial Sequence
  Description of Artificial Sequence: Synthetic oligonucleotide
  Sense strand starting at position 3407 of SEQ ID NO: 1638
cucacagugucagugauua

SEQ ID NO: 128725 - RNA, 19 nt, Artificial Sequence
  Description of Artificial Sequence: Synthetic oligonucleotide
  Antisense strand to SEQ ID NO: 128724
uaaucacugacacugugag

SEQ ID NO: 128726 - RNA, 19 nt, Artificial Sequence
  Description of Artificial Sequence: Synthetic oligonucleotide
  Sense strand starting at position 3411 of SEQ ID NO: 1638
cagugucagugauuacuau

SEQ ID NO: 128727 - RNA, 19 nt, Artificial Sequence
  Description of Artificial Sequence: Synthetic oligonucleotide
  Antisense strand to SEQ ID NO: 128726
auaguaaucacugacacug

SEQ ID NO: 128728 - RNA, 19 nt, Artificial Sequence
  Description of Artificial Sequence: Synthetic oligonucleotide
  Sense strand starting at position 3417 of SEQ ID NO: 1638
cagugauuacuauguggug

SEQ ID NO: 128729 - RNA, 19 nt, Artificial Sequence
  Description of Artificial Sequence: Synthetic oligonucleotide
  Antisense strand to SEQ ID NO: 128728
caccacauaguaaucacug

SEQ ID NO: 128730 - RNA, 19 nt, Artificial Sequence
  Description of Artificial Sequence: Synthetic oligonucleotide
  Sense strand starting at position 3419 of SEQ ID NO: 1638
gugauuacuaugugguggu

SEQ ID NO: 128731 - RNA, 19 nt, Artificial Sequence
  Description of Artificial Sequence: Synthetic oligonucleotide
  Antisense strand to SEQ ID NO: 128730
accaccacauaguaaucac

SEQ ID NO: 128732 - RNA, 19 nt, Artificial Sequence
  Description of Artificial Sequence: Synthetic oligonucleotide
  Sense strand starting at position 3461 of SEQ ID NO: 1638
uguguaagcugcuuauaaa

SEQ ID NO: 128733 - RNA, 19 nt, Artificial Sequence
  Description of Artificial Sequence: Synthetic oligonucleotide
  Antisense strand to SEQ ID NO: 128732
uuuauaagcagcuuacaca

SEQ ID NO: 128734 - RNA, 19 nt, Artificial Sequence
  Description of Artificial Sequence: Synthetic oligonucleotide
  Sense strand starting at position 3616 of SEQ ID NO: 1638
gaggcaagaugaguaagua

SEQ ID NO: 128735 - RNA, 19 nt, Artificial Sequence
  Description of Artificial Sequence: Synthetic oligonucleotide
  Antisense strand to SEQ ID NO: 128734
uacuuacucaucuugccuc

SEQ ID NO: 128736 - RNA, 19 nt, Artificial Sequence
  Description of Artificial Sequence: Synthetic oligonucleotide
  Sense strand starting at position 3625 of SEQ ID NO: 1638
ugaguaaguagcuguggau

SEQ ID NO: 128737 - RNA, 19 nt, Artificial Sequence
  Description of Artificial Sequence: Synthetic oligonucleotide
  Antisense strand to SEQ ID NO: 128736
auccacagcuacuuacuca

SEQ ID NO: 128738 - RNA, 19 nt, Artificial Sequence
  Description of Artificial Sequence: Synthetic oligonucleotide
  Sense strand starting at position 3740 of SEQ ID NO: 1638
cuaggaguuacugaccguu

SEQ ID NO: 128739 - RNA, 19 nt, Artificial Sequence
  Description of Artificial Sequence: Synthetic oligonucleotide
  Antisense strand to SEQ ID NO: 128738
aacggucaguaacuccuag

SEQ ID NO: 128740 - RNA, 19 nt, Artificial Sequence
  Description of Artificial Sequence: Synthetic oligonucleotide
  Sense strand starting at position 3743 of SEQ ID NO: 1638
ggaguuacugaccguuucu

SEQ ID NO: 128741 - RNA, 19 nt, Artificial Sequence
  Description of Artificial Sequence: Synthetic oligonucleotide
  Antisense strand to SEQ ID NO: 128740
agaaacggucaguaacucc

SEQ ID NO: 128742 - RNA, 19 nt, Artificial Sequence
  Description of Artificial Sequence: Synthetic oligonucleotide
  Sense strand starting at position 3898 of SEQ ID NO: 1638
accacugacaagugguaga

SEQ ID NO: 128743 - RNA, 19 nt, Artificial Sequence
  Description of Artificial Sequence: Synthetic oligonucleotide
  Antisense strand to SEQ ID NO: 128742
ucuaccacuugucaguggu

SEQ ID NO: 128744 - RNA, 19 nt, Artificial Sequence
  Description of Artificial Sequence: Synthetic oligonucleotide
  Sense strand starting at position 3951 of SEQ ID NO: 1638
ccugcugucuuauccauga

SEQ ID NO: 128745 - RNA, 19 nt, Artificial Sequence
  Description of Artificial Sequence: Synthetic oligonucleotide
  Antisense strand to SEQ ID NO: 128744
ucauggauaagacagcagg

SEQ ID NO: 128746 - RNA, 19 nt, Artificial Sequence
  Description of Artificial Sequence: Synthetic oligonucleotide
  Sense strand starting at position 3955 of SEQ ID NO: 1638
cugucuuauccaugaucuu

SEQ ID NO: 128747 - RNA, 19 nt, Artificial Sequence
  Description of Artificial Sequence: Synthetic oligonucleotide
  Antisense strand to SEQ ID NO: 128746
aagaucauggauaagacag

SEQ ID NO: 128748 - RNA, 19 nt, Artificial Sequence
  Description of Artificial Sequence: Synthetic oligonucleotide
  Sense strand starting at position 3956 of SEQ ID NO: 1638
ugucuuauccaugaucuug

SEQ ID NO: 128749 - RNA, 19 nt, Artificial Sequence
  Description of Artificial Sequence: Synthetic oligonucleotide
  Antisense strand to SEQ ID NO: 128748
caagaucauggauaagaca

SEQ ID NO: 128750 - RNA, 19 nt, Artificial Sequence
  Description of Artificial Sequence: Synthetic oligonucleotide
  Sense strand starting at position 3833 of SEQ ID NO: 1645
acuacaagugcaugugaca

SEQ ID NO: 128751 - RNA, 19 nt, Artificial Sequence
  Description of Artificial Sequence: Synthetic oligonucleotide
  Antisense strand to SEQ ID NO: 128750
ugucacaugcacuuguagu

SEQ ID NO: 128752 - RNA, 19 nt, Artificial Sequence
  Description of Artificial Sequence: Synthetic oligonucleotide
  Sense strand starting at position 3636 of SEQ ID NO: 1645
uuaguuucccaaggagaga

SEQ ID NO: 128753 - RNA, 19 nt, Artificial Sequence
  Description of Artificial Sequence: Synthetic oligonucleotide
  Antisense strand to SEQ ID NO: 128752
ucucuccuugggaaacuaa

SEQ ID NO: 128754 - RNA, 19 nt, Artificial Sequence
  Description of Artificial Sequence: Synthetic oligonucleotide
  Sense strand starting at position 3584 of SEQ ID NO: 1645
uugcuuaucucagagggac

SEQ ID NO: 128755 - RNA, 19 nt, Artificial Sequence
  Description of Artificial Sequence: Synthetic oligonucleotide
  Antisense strand to SEQ ID NO: 128754
gucccucugagauaagcaa

SEQ ID NO: 128756 - RNA, 19 nt, Artificial Sequence
  Description of Artificial Sequence: Synthetic oligonucleotide
  Sense strand starting at position 3458 of SEQ ID NO: 1645
auagauuagucccuccuuu

SEQ ID NO: 128757 - RNA, 19 nt, Artificial Sequence
  Description of Artificial Sequence: Synthetic oligonucleotide
  Antisense strand to SEQ ID NO: 128756
aaaggagggacuaaucuau

SEQ ID NO: 128758 - RNA, 19 nt, Artificial Sequence
  Description of Artificial Sequence: Synthetic oligonucleotide
  Sense strand starting at position 3385 of SEQ ID NO: 1645
ugcacuuagaggugucagu

SEQ ID NO: 128759 - RNA, 19 nt, Artificial Sequence
  Description of Artificial Sequence: Synthetic oligonucleotide
  Antisense strand to SEQ ID NO: 128758
acugacaccucuaagugca

SEQ ID NO: 128760 - RNA, 19 nt, Artificial Sequence
  Description of Artificial Sequence: Synthetic oligonucleotide
  Sense strand starting at position 1494 of SEQ ID NO: 1645
ggaugcugaccucaacuuu

SEQ ID NO: 128761 - RNA, 19 nt, Artificial Sequence
  Description of Artificial Sequence: Synthetic oligonucleotide
  Antisense strand to SEQ ID NO: 128760
aaaguugaggucagcaucc

SEQ ID NO: 128762 - RNA, 19 nt, Artificial Sequence
  Description of Artificial Sequence: Synthetic oligonucleotide
  Sense strand starting at position 1278 of SEQ ID NO: 1645
agugaaguugcuuaucacu

SEQ ID NO: 128763 - RNA, 19 nt, Artificial Sequence
  Description of Artificial Sequence: Synthetic oligonucleotide
  Antisense strand to SEQ ID NO: 128762
agugauaagcaacuucacu

SEQ ID NO: 128764 - RNA, 19 nt, Artificial Sequence
  Description of Artificial Sequence: Synthetic oligonucleotide
  Sense strand starting at position 1277 of SEQ ID NO: 1645
aagugaaguugcuuaucac

SEQ ID NO: 128765 - RNA, 19 nt, Artificial Sequence
  Description of Artificial Sequence: Synthetic oligonucleotide
  Antisense strand to SEQ ID NO: 128764
gugauaagcaacuucacuu

SEQ ID NO: 128766 - RNA, 19 nt, Artificial Sequence
  Description of Artificial Sequence: Synthetic oligonucleotide
  Sense strand starting at position 1206 of SEQ ID NO: 1645
auccuugagcaagauuauu

SEQ ID NO: 128767 - RNA, 19 nt, Artificial Sequence
  Description of Artificial Sequence: Synthetic oligonucleotide
  Antisense strand to SEQ ID NO: 128766
aauaaucuugcucaaggau

SEQ ID NO: 128768 - RNA, 19 nt, Artificial Sequence
  Description of Artificial Sequence: Synthetic oligonucleotide
  Sense strand starting at position 1203 of SEQ ID NO: 1645
accauccuugagcaagauu

SEQ ID NO: 128769 - RNA, 19 nt, Artificial Sequence
  Description of Artificial Sequence: Synthetic oligonucleotide
  Antisense strand to SEQ ID NO: 128768
aaucuugcucaaggauggu

SEQ ID NO: 128770 - RNA, 19 nt, Artificial Sequence
  Description of Artificial Sequence: Synthetic oligonucleotide
  Sense strand starting at position 1199 of SEQ ID NO: 1645
agcuaccauccuugagcaa

SEQ ID NO: 128771 - RNA, 19 nt, Artificial Sequence
  Description of Artificial Sequence: Synthetic oligonucleotide
  Antisense strand to SEQ ID NO: 128770
uugcucaaggaugguagcu

SEQ ID NO: 128772 - RNA, 19 nt, Artificial Sequence
  Description of Artificial Sequence: Synthetic oligonucleotide
  Sense strand starting at position 800 of SEQ ID NO: 1645
gagacuaucuggugagcca

SEQ ID NO: 128773 - RNA, 19 nt, Artificial Sequence
  Description of Artificial Sequence: Synthetic oligonucleotide
  Antisense strand to SEQ ID NO: 128772
uggcucaccagauagucuc

SEQ ID NO: 128774 - RNA, 19 nt, Artificial Sequence
  Description of Artificial Sequence: Synthetic oligonucleotide
  Sense strand starting at position 665 of SEQ ID NO: 1645
uaugaugguugaucuaauu

SEQ ID NO: 128775 - RNA, 19 nt, Artificial Sequence
  Description of Artificial Sequence: Synthetic oligonucleotide
  Antisense strand to SEQ ID NO: 128774
aauuagaucaaccaucaua

SEQ ID NO: 128776 - RNA, 19 nt, Artificial Sequence
  Description of Artificial Sequence: Synthetic oligonucleotide
  Sense strand starting at position 662 of SEQ ID NO: 1645
aaauaugaugguugaucua

SEQ ID NO: 128777 - RNA, 19 nt, Artificial Sequence
  Description of Artificial Sequence: Synthetic oligonucleotide
  Antisense strand to SEQ ID NO: 128776
uagaucaaccaucauauuu

SEQ ID NO: 128778 - RNA, 19 nt, Artificial Sequence
  Description of Artificial Sequence: Synthetic oligonucleotide
  Sense strand starting at position 661 of SEQ ID NO: 1645
uaaauaugaugguugaucu

SEQ ID NO: 128779 - RNA, 19 nt, Artificial Sequence
  Description of Artificial Sequence: Synthetic oligonucleotide
  Antisense strand to SEQ ID NO: 128778
agaucaaccaucauauuua

SEQ ID NO: 128780 - RNA, 19 nt, Artificial Sequence
  Description of Artificial Sequence: Synthetic oligonucleotide
  Sense strand starting at position 498 of SEQ ID NO: 1645
ggaucucugcaauguuacu

SEQ ID NO: 128781 - RNA, 19 nt, Artificial Sequence
  Description of Artificial Sequence: Synthetic oligonucleotide
  Antisense strand to SEQ ID NO: 128780
aguaacauugcagagaucc

SEQ ID NO: 128782 - RNA, 19 nt, Artificial Sequence
  Description of Artificial Sequence: Synthetic oligonucleotide
  Sense strand starting at position 495 of SEQ ID NO: 1645
guuggaucucugcaauguu

SEQ ID NO: 128783 - RNA, 19 nt, Artificial Sequence
  Description of Artificial Sequence: Synthetic oligonucleotide
  Antisense strand to SEQ ID NO: 128782
aacauugcagagauccaac

SEQ ID NO: 128784 - RNA, 19 nt, Artificial Sequence
  Description of Artificial Sequence: Synthetic oligonucleotide
  Sense strand starting at position 492 of SEQ ID NO: 1645
cuuguuggaucucugcaau

SEQ ID NO: 128785 - RNA, 19 nt, Artificial Sequence
  Description of Artificial Sequence: Synthetic oligonucleotide
  Antisense strand to SEQ ID NO: 128784
auugcagagauccaacaag

SEQ ID NO: 128786 - RNA, 19 nt, Artificial Sequence
  Description of Artificial Sequence: Synthetic oligonucleotide
  Sense strand starting at position 460 of SEQ ID NO: 1645
auuagcaaagcucaguaaa

SEQ ID NO: 128787 - RNA, 19 nt, Artificial Sequence
  Description of Artificial Sequence: Synthetic oligonucleotide
  Antisense strand to SEQ ID NO: 128786
uuuacugagcuuugcuaau

SEQ ID NO: 128788 - RNA, 19 nt, Artificial Sequence
  Description of Artificial Sequence: Synthetic oligonucleotide
  Sense strand starting at position 424 of SEQ ID NO: 1645
gcccuccuugaguaagcaa

SEQ ID NO: 128789 - RNA, 19 nt, Artificial Sequence
  Description of Artificial Sequence: Synthetic oligonucleotide
  Antisense strand to SEQ ID NO: 128788
uugcuuacucaaggagggc

SEQ ID NO: 128790 - RNA, 19 nt, Artificial Sequence
  Description of Artificial Sequence: Synthetic oligonucleotide
  Sense strand starting at position 420 of SEQ ID NO: 1645
uccugcccuccuugaguaa

SEQ ID NO: 128791 - RNA, 19 nt, Artificial Sequence
  Description of Artificial Sequence: Synthetic oligonucleotide
  Antisense strand to SEQ ID NO: 128790
uuacucaaggagggcagga

SEQ ID NO: 128792 - RNA, 19 nt, Artificial Sequence
  Description of Artificial Sequence: Synthetic oligonucleotide
  Sense strand starting at position 372 of SEQ ID NO: 1645
cucuuccauuaggaaagau

SEQ ID NO: 128793 - RNA, 19 nt, Artificial Sequence
  Description of Artificial Sequence: Synthetic oligonucleotide
  Antisense strand to SEQ ID NO: 128792
aucuuuccuaauggaagag

SEQ ID NO: 128794 - RNA, 19 nt, Artificial Sequence
  Description of Artificial Sequence: Synthetic oligonucleotide
  Sense strand starting at position 371 of SEQ ID NO: 1645
ucucuuccauuaggaaaga

SEQ ID NO: 128795 - RNA, 19 nt, Artificial Sequence
  Description of Artificial Sequence: Synthetic oligonucleotide
  Antisense strand to SEQ ID NO: 128794
ucuuuccuaauggaagaga

SEQ ID NO: 128796 - RNA, 19 nt, Artificial Sequence
  Description of Artificial Sequence: Synthetic oligonucleotide
  Sense strand starting at position 347 of SEQ ID NO: 1645
uuagaaaggucaccugugu

SEQ ID NO: 128797 - RNA, 19 nt, Artificial Sequence
  Description of Artificial Sequence: Synthetic oligonucleotide
  Antisense strand to SEQ ID NO: 128796
acacaggugaccuuucuaa

SEQ ID NO: 128798 - RNA, 19 nt, Artificial Sequence
  Description of Artificial Sequence: Synthetic oligonucleotide
  Sense strand starting at position 175 of SEQ ID NO: 1645
gugacagccugacuuacaa

SEQ ID NO: 128799 - RNA, 19 nt, Artificial Sequence
  Description of Artificial Sequence: Synthetic oligonucleotide
  Antisense strand to SEQ ID NO: 128798
uuguaagucaggcugucac

SEQ ID NO: 128800 - RNA, 19 nt, Artificial Sequence
  Description of Artificial Sequence: Synthetic oligonucleotide
  Sense strand starting at position 72 of SEQ ID NO: 1645
aguuucuagugugacauuu

SEQ ID NO: 128801 - RNA, 19 nt, Artificial Sequence
  Description of Artificial Sequence: Synthetic oligonucleotide
  Antisense strand to SEQ ID NO: 128800
aaaugucacacuagaaacu

SEQ ID NO: 128802 - RNA, 19 nt, Artificial Sequence
  Description of Artificial Sequence: Synthetic oligonucleotide
  Sense strand starting at position 71 of SEQ ID NO: 1645
caguuucuagugugacauu

SEQ ID NO: 128803 - RNA, 19 nt, Artificial Sequence
  Description of Artificial Sequence: Synthetic oligonucleotide
  Antisense strand to SEQ ID NO: 128802
aaugucacacuagaaacug

SEQ ID NO: 128804 - RNA, 19 nt, Artificial Sequence
  Description of Artificial Sequence: Synthetic oligonucleotide
  Sense strand starting at position 69 of SEQ ID NO: 1645
ugcaguuucuagugugaca

SEQ ID NO: 128805 - RNA, 19 nt, Artificial Sequence
  Description of Artificial Sequence: Synthetic oligonucleotide
  Antisense strand to SEQ ID NO: 128804
ugucacacuagaaacugca

SEQ ID NO: 128806 - RNA, 19 nt, Artificial Sequence
  Description of Artificial Sequence: Synthetic oligonucleotide
  Sense strand starting at position 57 of SEQ ID NO: 1645
cagggauggguuugcaguu

SEQ ID NO: 128807 - RNA, 19 nt, Artificial Sequence
  Description of Artificial Sequence: Synthetic oligonucleotide
  Antisense strand to SEQ ID NO: 128806
aacugcaaacccaucccug

SEQ ID NO: 128808 - RNA, 19 nt, Artificial Sequence
  Description of Artificial Sequence: Synthetic oligonucleotide
  Sense strand starting at position 37 of SEQ ID NO: 1645
ggcuuugguugugauacac

SEQ ID NO: 128809 - RNA, 19 nt, Artificial Sequence
  Description of Artificial Sequence: Synthetic oligonucleotide
  Antisense strand to SEQ ID NO: 128808
guguaucacaaccaaagcc

SEQ ID NO: 128810 - RNA, 19 nt, Artificial Sequence
  Description of Artificial Sequence: Synthetic oligonucleotide
  Sense strand starting at position 36 of SEQ ID NO: 1645
uggcuuugguugugauaca

SEQ ID NO: 128811 - RNA, 19 nt, Artificial Sequence
  Description of Artificial Sequence: Synthetic oligonucleotide
  Antisense strand to SEQ ID NO: 128810
uguaucacaaccaaagcca

SEQ ID NO: 128812 - RNA, 19 nt, Artificial Sequence
  Description of Artificial Sequence: Synthetic oligonucleotide
  Sense strand starting at position 34 of SEQ ID NO: 1645
cauggcuuugguugugaua

SEQ ID NO: 128813 - RNA, 19 nt, Artificial Sequence
  Description of Artificial Sequence: Synthetic oligonucleotide
  Antisense strand to SEQ ID NO: 128812
uaucacaaccaaagccaug

SEQ ID NO: 128814 - RNA, 19 nt, Artificial Sequence
  Description of Artificial Sequence: Synthetic oligonucleotide
  Sense strand starting at position 3617 of SEQ ID NO: 1646
ggacaugcucgcugagguu

SEQ ID NO: 128815 - RNA, 19 nt, Artificial Sequence
  Description of Artificial Sequence: Synthetic oligonucleotide
  Antisense strand to SEQ ID NO: 128814
aaccucagcgagcaugucc

SEQ ID NO: 128816 - RNA, 19 nt, Artificial Sequence
  Description of Artificial Sequence: Synthetic oligonucleotide
  Sense strand starting at position 2767 of SEQ ID NO: 1646
agaugcucagccugaggaa

SEQ ID NO: 128817 - RNA, 19 nt, Artificial Sequence
  Description of Artificial Sequence: Synthetic oligonucleotide
  Antisense strand to SEQ ID NO: 128816
uuccucaggcugagcaucu

SEQ ID NO: 128818 - RNA, 19 nt, Artificial Sequence
  Description of Artificial Sequence: Synthetic oligonucleotide
  Sense strand starting at position 1519 of SEQ ID NO: 1646
cagacuuucggccggauga

SEQ ID NO: 128819 - RNA, 19 nt, Artificial Sequence
  Description of Artificial Sequence: Synthetic oligonucleotide
  Antisense strand to SEQ ID NO: 128818
ucauccggccgaaagucug

SEQ ID NO: 128820 - RNA, 19 nt, Artificial Sequence
  Description of Artificial Sequence: Synthetic oligonucleotide
  Sense strand starting at position 1237 of SEQ ID NO: 1646
gagggauugcuguggacca

SEQ ID NO: 128821 - RNA, 19 nt, Artificial Sequence
  Description of Artificial Sequence: Synthetic oligonucleotide
  Antisense strand to SEQ ID NO: 128820
ugguccacagcaaucccuc

SEQ ID NO: 128822 - RNA, 19 nt, Artificial Sequence
  Description of Artificial Sequence: Synthetic oligonucleotide
  Sense strand starting at position 1143 of SEQ ID NO: 1646
gcuccuuugacggagaggu

SEQ ID NO: 128823 - RNA, 19 nt, Artificial Sequence
  Description of Artificial Sequence: Synthetic oligonucleotide
  Antisense strand to SEQ ID NO: 128822
accucuccgucaaaggagc

SEQ ID NO: 128824 - RNA, 19 nt, Artificial Sequence
  Description of Artificial Sequence: Synthetic oligonucleotide
  Sense strand starting at position 1074 of SEQ ID NO: 1646
ggaucuacccugugaagac

SEQ ID NO: 128825 - RNA, 19 nt, Artificial Sequence
  Description of Artificial Sequence: Synthetic oligonucleotide
  Antisense strand to SEQ ID NO: 128824
gucuucacaggguagaucc

SEQ ID NO: 128826 - RNA, 19 nt, Artificial Sequence
  Description of Artificial Sequence: Synthetic oligonucleotide
  Sense strand starting at position 1072 of SEQ ID NO: 1646
ugggaucuacccugugaag

SEQ ID NO: 128827 - RNA, 19 nt, Artificial Sequence
  Description of Artificial Sequence: Synthetic oligonucleotide
  Antisense strand to SEQ ID NO: 128826
cuucacaggguagauccca

SEQ ID NO: 128828 - RNA, 19 nt, Artificial Sequence
  Description of Artificial Sequence: Synthetic oligonucleotide
  Sense strand starting at position 779 of SEQ ID NO: 1646
caguacuugucugcaggga

SEQ ID NO: 128829 - RNA, 19 nt, Artificial Sequence
  Description of Artificial Sequence: Synthetic oligonucleotide
  Antisense strand to SEQ ID NO: 128828
ucccugcagacaaguacug

SEQ ID NO: 128830 - RNA, 19 nt, Artificial Sequence
  Description of Artificial Sequence: Synthetic oligonucleotide
  Sense strand starting at position 759 of SEQ ID NO: 1646
ggcagcgugguuuccgaaa

SEQ ID NO: 128831 - RNA, 19 nt, Artificial Sequence
  Description of Artificial Sequence: Synthetic oligonucleotide
  Antisense strand to SEQ ID NO: 128830
uuucggaaaccacgcugcc

SEQ ID NO: 128832 - RNA, 19 nt, Artificial Sequence
  Description of Artificial Sequence: Synthetic oligonucleotide
  Sense strand starting at position 680 of SEQ ID NO: 1646
gggaguggugucugagaug

SEQ ID NO: 128833 - RNA, 19 nt, Artificial Sequence
  Description of Artificial Sequence: Synthetic oligonucleotide
  Antisense strand to SEQ ID NO: 128832
caucucagacaccacuccc

SEQ ID NO: 128834 - RNA, 19 nt, Artificial Sequence
  Description of Artificial Sequence: Synthetic oligonucleotide
  Sense strand starting at position 679 of SEQ ID NO: 1646
agggaguggugucugagau

SEQ ID NO: 128835 - RNA, 19 nt, Artificial Sequence
  Description of Artificial Sequence: Synthetic oligonucleotide
  Antisense strand to SEQ ID NO: 128834
aucucagacaccacucccu

SEQ ID NO: 128836 - RNA, 19 nt, Artificial Sequence
  Description of Artificial Sequence: Synthetic oligonucleotide
  Sense strand starting at position 349 of SEQ ID NO: 1646
cggguuggcacccaugaaa

SEQ ID NO: 128837 - RNA, 19 nt, Artificial Sequence
  Description of Artificial Sequence: Synthetic oligonucleotide
  Antisense strand to SEQ ID NO: 128836
uuucaugggugccaacccg

SEQ ID NO: 128838 - RNA, 19 nt, Artificial Sequence
  Description of Artificial Sequence: Synthetic oligonucleotide
  Sense strand starting at position 132 of SEQ ID NO: 1646
uggagaccucugugaucca

SEQ ID NO: 128839 - RNA, 19 nt, Artificial Sequence
  Description of Artificial Sequence: Synthetic oligonucleotide
  Antisense strand to SEQ ID NO: 128838
uggaucacagaggucucca

SEQ ID NO: 128840 - RNA, 19 nt, Artificial Sequence
  Description of Artificial Sequence: Synthetic oligonucleotide
  Sense strand starting at position 81 of SEQ ID NO: 1646
cuuugaucaccagguugga

SEQ ID NO: 128841 - RNA, 19 nt, Artificial Sequence
  Description of Artificial Sequence: Synthetic oligonucleotide
  Antisense strand to SEQ ID NO: 128840
uccaaccuggugaucaaag

SEQ ID NO: 128842 - RNA, 19 nt, Artificial Sequence
  Description of Artificial Sequence: Synthetic oligonucleotide
  Sense strand starting at position 78 of SEQ ID NO: 1646
aggcuuugaucaccagguu

SEQ ID NO: 128843 - RNA, 19 nt, Artificial Sequence
  Description of Artificial Sequence: Synthetic oligonucleotide
  Antisense strand to SEQ ID NO: 128842
aaccuggugaucaaagccu

SEQ ID NO: 128844 - RNA, 19 nt, Artificial Sequence
  Description of Artificial Sequence: Synthetic oligonucleotide
  Sense strand starting at position 40 of SEQ ID NO: 1646
uguagucaauccuggcaca

SEQ ID NO: 128845 - RNA, 19 nt, Artificial Sequence
  Description of Artificial Sequence: Synthetic oligonucleotide
  Antisense strand to SEQ ID NO: 128844
ugugccaggauugacuaca

SEQ ID NO: 128846 - RNA, 19 nt, Artificial Sequence
  Description of Artificial Sequence: Synthetic oligonucleotide
  Sense strand starting at position 3971 of SEQ ID NO: 1647
gcaaauagccugcacgauu

SEQ ID NO: 128847 - RNA, 19 nt, Artificial Sequence
  Description of Artificial Sequence: Synthetic oligonucleotide
  Antisense strand to SEQ ID NO: 128846
aaucgugcaggcuauuugc

SEQ ID NO: 128848 - RNA, 19 nt, Artificial Sequence
  Description of Artificial Sequence: Synthetic oligonucleotide
  Sense strand starting at position 3959 of SEQ ID NO: 1647
auguacuggugagcaaaua

SEQ ID NO: 128849 - RNA, 19 nt, Artificial Sequence
  Description of Artificial Sequence: Synthetic oligonucleotide
  Antisense strand to SEQ ID NO: 128848
uauuugcucaccaguacau

SEQ ID NO: 128850 - RNA, 19 nt, Artificial Sequence
  Description of Artificial Sequence: Synthetic oligonucleotide
  Sense strand starting at position 3957 of SEQ ID NO: 1647
aaauguacuggugagcaaa

SEQ ID NO: 128851 - RNA, 19 nt, Artificial Sequence
  Description of Artificial Sequence: Synthetic oligonucleotide
  Antisense strand to SEQ ID NO: 128850
uuugcucaccaguacauuu

SEQ ID NO: 128852 - RNA, 19 nt, Artificial Sequence
  Description of Artificial Sequence: Synthetic oligonucleotide
  Sense strand starting at position 3887 of SEQ ID NO: 1647
uguuuaaagagcgaugaaa

SEQ ID NO: 128853 - RNA, 19 nt, Artificial Sequence
  Description of Artificial Sequence: Synthetic oligonucleotide
  Antisense strand to SEQ ID NO: 128852
uuucaucgcucuuuaaaca

SEQ ID NO: 128854 - RNA, 19 nt, Artificial Sequence
  Description of Artificial Sequence: Synthetic oligonucleotide
  Sense strand starting at position 3886 of SEQ ID NO: 1647
cuguuuaaagagcgaugaa

SEQ ID NO: 128855 - RNA, 19 nt, Artificial Sequence
  Description of Artificial Sequence: Synthetic oligonucleotide
  Antisense strand to SEQ ID NO: 128854
uucaucgcucuuuaaacag

SEQ ID NO: 128856 - RNA, 19 nt, Artificial Sequence
  Description of Artificial Sequence: Synthetic oligonucleotide
  Sense strand starting at position 3734 of SEQ ID NO: 1647
ucaaguuacuggcuaaaug

SEQ ID NO: 128857 - RNA, 19 nt, Artificial Sequence
  Description of Artificial Sequence: Synthetic oligonucleotide
  Antisense strand to SEQ ID NO: 128856
cauuuagccaguaacuuga

SEQ ID NO: 128858 - RNA, 19 nt, Artificial Sequence
  Description of Artificial Sequence: Synthetic oligonucleotide
  Sense strand starting at position 3646 of SEQ ID NO: 1647
uuguaagguauauagagua

SEQ ID NO: 128859 - RNA, 19 nt, Artificial Sequence
  Description of Artificial Sequence: Synthetic oligonucleotide
  Antisense strand to SEQ ID NO: 128858
uacucuauauaccuuacaa

SEQ ID NO: 128860 - RNA, 19 nt, Artificial Sequence
  Description of Artificial Sequence: Synthetic oligonucleotide
  Sense strand starting at position 3460 of SEQ ID NO: 1647
gugucugucaaaugaagga

SEQ ID NO: 128861 - RNA, 19 nt, Artificial Sequence
  Description of Artificial Sequence: Synthetic oligonucleotide
  Antisense strand to SEQ ID NO: 128860
uccuucauuugacagacac

SEQ ID NO: 128862 - RNA, 19 nt, Artificial Sequence
  Description of Artificial Sequence: Synthetic oligonucleotide
  Sense strand starting at position 3410 of SEQ ID NO: 1647
guuggcuagauuugugguu

SEQ ID NO: 128863 - RNA, 19 nt, Artificial Sequence
  Description of Artificial Sequence: Synthetic oligonucleotide
  Antisense strand to SEQ ID NO: 128862
aaccacaaaucuagccaac

SEQ ID NO: 128864 - RNA, 19 nt, Artificial Sequence
  Description of Artificial Sequence: Synthetic oligonucleotide
  Sense strand starting at position 3242 of SEQ ID NO: 1647
agauauguguugucuucca

SEQ ID NO: 128865 - RNA, 19 nt, Artificial Sequence
  Description of Artificial Sequence: Synthetic oligonucleotide
  Antisense strand to SEQ ID NO: 128864
uggaagacaacacauaucu

SEQ ID NO: 128866 - RNA, 19 nt, Artificial Sequence
  Description of Artificial Sequence: Synthetic oligonucleotide
  Sense strand starting at position 3233 of SEQ ID NO: 1647
guccuuugaagauaugugu

SEQ ID NO: 128867 - RNA, 19 nt, Artificial Sequence
  Description of Artificial Sequence: Synthetic oligonucleotide
  Antisense strand to SEQ ID NO: 128866
acacauaucuucaaaggac

SEQ ID NO: 128868 - RNA, 19 nt, Artificial Sequence
  Description of Artificial Sequence: Synthetic oligonucleotide
  Sense strand starting at position 3231 of SEQ ID NO: 1647
gaguccuuugaagauaugu

SEQ ID NO: 128869 - RNA, 19 nt, Artificial Sequence
  Description of Artificial Sequence: Synthetic oligonucleotide
  Antisense strand to SEQ ID NO: 128868
acauaucuucaaaggacuc

SEQ ID NO: 128870 - RNA, 19 nt, Artificial Sequence
  Description of Artificial Sequence: Synthetic oligonucleotide
  Sense strand starting at position 3227 of SEQ ID NO: 1647
cugagaguccuuugaagau

SEQ ID NO: 128871 - RNA, 19 nt, Artificial Sequence
  Description of Artificial Sequence: Synthetic oligonucleotide
  Antisense strand to SEQ ID NO: 128870
aucuucaaaggacucucag

SEQ ID NO: 128872 - RNA, 19 nt, Artificial Sequence
  Description of Artificial Sequence: Synthetic oligonucleotide
  Sense strand starting at position 3225 of SEQ ID NO: 1647
cucugagaguccuuugaag

SEQ ID NO: 128873 - RNA, 19 nt, Artificial Sequence
  Description of Artificial Sequence: Synthetic oligonucleotide
  Antisense strand to SEQ ID NO: 128872
cuucaaaggacucucagag

SEQ ID NO: 128874 - RNA, 19 nt, Artificial Sequence
  Description of Artificial Sequence: Synthetic oligonucleotide
  Sense strand starting at position 3216 of SEQ ID NO: 1647
ugagaugaccucugagagu

SEQ ID NO: 128875 - RNA, 19 nt, Artificial Sequence
  Description of Artificial Sequence: Synthetic oligonucleotide
  Antisense strand to SEQ ID NO: 128874
acucucagaggucaucuca

SEQ ID NO: 128876 - RNA, 19 nt, Artificial Sequence
  Description of Artificial Sequence: Synthetic oligonucleotide
  Sense strand starting at position 3159 of SEQ ID NO: 1647
uuaaguggugagggaugaa

SEQ ID NO: 128877 - RNA, 19 nt, Artificial Sequence
  Description of Artificial Sequence: Synthetic oligonucleotide
  Antisense strand to SEQ ID NO: 128876
uucaucccucaccacuuaa

SEQ ID NO: 128878 - RNA, 19 nt, Artificial Sequence
  Description of Artificial Sequence: Synthetic oligonucleotide
  Sense strand starting at position 3156 of SEQ ID NO: 1647
guauuaaguggugagggau

SEQ ID NO: 128879 - RNA, 19 nt, Artificial Sequence
  Description of Artificial Sequence: Synthetic oligonucleotide
  Antisense strand to SEQ ID NO: 128878
aucccucaccacuuaauac

SEQ ID NO: 128880 - RNA, 19 nt, Artificial Sequence
  Description of Artificial Sequence: Synthetic oligonucleotide
  Sense strand starting at position 3144 of SEQ ID NO: 1647
gcgucccuccacguauuaa

SEQ ID NO: 128881 - RNA, 19 nt, Artificial Sequence
  Description of Artificial Sequence: Synthetic oligonucleotide
  Antisense strand to SEQ ID NO: 128880
uuaauacguggagggacgc

SEQ ID NO: 128882 - RNA, 19 nt, Artificial Sequence
  Description of Artificial Sequence: Synthetic oligonucleotide
  Sense strand starting at position 3114 of SEQ ID NO: 1647
uuggucaagucacugaauu

SEQ ID NO: 128883 - RNA, 19 nt, Artificial Sequence
  Description of Artificial Sequence: Synthetic oligonucleotide
  Antisense strand to SEQ ID NO: 128882
aauucagugacuugaccaa

SEQ ID NO: 128884 - RNA, 19 nt, Artificial Sequence
  Description of Artificial Sequence: Synthetic oligonucleotide
  Sense strand starting at position 3008 of SEQ ID NO: 1647
ggacacaucuuaguaacuu

SEQ ID NO: 128885 - RNA, 19 nt, Artificial Sequence
  Description of Artificial Sequence: Synthetic oligonucleotide
  Antisense strand to SEQ ID NO: 128884
aaguuacuaagaugugucc

SEQ ID NO: 128886 - RNA, 19 nt, Artificial Sequence
  Description of Artificial Sequence: Synthetic oligonucleotide
  Sense strand starting at position 2957 of SEQ ID NO: 1647
agagaagccucugcugauc

SEQ ID NO: 128887 - RNA, 19 nt, Artificial Sequence
  Description of Artificial Sequence: Synthetic oligonucleotide
  Antisense strand to SEQ ID NO: 128886
gaucagcagaggcuucucu

SEQ ID NO: 128888 - RNA, 19 nt, Artificial Sequence
  Description of Artificial Sequence: Synthetic oligonucleotide
  Sense strand starting at position 2956 of SEQ ID NO: 1647
uagagaagccucugcugau

SEQ ID NO: 128889 - RNA, 19 nt, Artificial Sequence
  Description of Artificial Sequence: Synthetic oligonucleotide
  Antisense strand to SEQ ID NO: 128888
aucagcagaggcuucucua

SEQ ID NO: 128890 - RNA, 19 nt, Artificial Sequence
  Description of Artificial Sequence: Synthetic oligonucleotide
  Sense strand starting at position 2940 of SEQ ID NO: 1647
cagagaaugcccugacuag

SEQ ID NO: 128891 - RNA, 19 nt, Artificial Sequence
  Description of Artificial Sequence: Synthetic oligonucleotide
  Antisense strand to SEQ ID NO: 128890
cuagucagggcauucucug

SEQ ID NO: 128892 - RNA, 19 nt, Artificial Sequence
  Description of Artificial Sequence: Synthetic oligonucleotide
  Sense strand starting at position 2826 of SEQ ID NO: 1647
ccaggugaggcuuaaacuu

SEQ ID NO: 128893 - RNA, 19 nt, Artificial Sequence
  Description of Artificial Sequence: Synthetic oligonucleotide
  Antisense strand to SEQ ID NO: 128892
aaguuuaagccucaccugg

SEQ ID NO: 128894 - RNA, 19 nt, Artificial Sequence
  Description of Artificial Sequence: Synthetic oligonucleotide
  Sense strand starting at position 2697 of SEQ ID NO: 1647
cagaauagcugagggauuu

SEQ ID NO: 128895 - RNA, 19 nt, Artificial Sequence
  Description of Artificial Sequence: Synthetic oligonucleotide
  Antisense strand to SEQ ID NO: 128894
aaaucccucagcuauucug

SEQ ID NO: 128896 - RNA, 19 nt, Artificial Sequence
  Description of Artificial Sequence: Synthetic oligonucleotide
  Sense strand starting at position 2632 of SEQ ID NO: 1647
ggagaauaauccuaaggau

SEQ ID NO: 128897 - RNA, 19 nt, Artificial Sequence
  Description of Artificial Sequence: Synthetic oligonucleotide
  Antisense strand to SEQ ID NO: 128896
auccuuaggauuauucucc

SEQ ID NO: 128898 - RNA, 19 nt, Artificial Sequence
  Description of Artificial Sequence: Synthetic oligonucleotide
  Sense strand starting at position 2607 of SEQ ID NO: 1647
ugccucaggccuuauugua

SEQ ID NO: 128899 - RNA, 19 nt, Artificial Sequence
  Description of Artificial Sequence: Synthetic oligonucleotide
  Antisense strand to SEQ ID NO: 128898
uacaauaaggccugaggca

SEQ ID NO: 128900 - RNA, 19 nt, Artificial Sequence
  Description of Artificial Sequence: Synthetic oligonucleotide
  Sense strand starting at position 2587 of SEQ ID NO: 1647
acguuucuuccagcguaca

SEQ ID NO: 128901 - RNA, 19 nt, Artificial Sequence
  Description of Artificial Sequence: Synthetic oligonucleotide
  Antisense strand to SEQ ID NO: 128900
uguacgcuggaagaaacgu

SEQ ID NO: 128902 - RNA, 19 nt, Artificial Sequence
  Description of Artificial Sequence: Synthetic oligonucleotide
  Sense strand starting at position 2360 of SEQ ID NO: 1647
auucgugaagacuggagau

SEQ ID NO: 128903 - RNA, 19 nt, Artificial Sequence
  Description of Artificial Sequence: Synthetic oligonucleotide
  Antisense strand to SEQ ID NO: 128902
aucuccagucuucacgaau

SEQ ID NO: 128904 - RNA, 19 nt, Artificial Sequence
  Description of Artificial Sequence: Synthetic oligonucleotide
  Sense strand starting at position 2354 of SEQ ID NO: 1647
gugcggauucgugaagacu

SEQ ID NO: 128905 - RNA, 19 nt, Artificial Sequence
  Description of Artificial Sequence: Synthetic oligonucleotide
  Antisense strand to SEQ ID NO: 128904
agucuucacgaauccgcac

SEQ ID NO: 128906 - RNA, 19 nt, Artificial Sequence
  Description of Artificial Sequence: Synthetic oligonucleotide
  Sense strand starting at position 813 of SEQ ID NO: 1647
ugaacuugccuuuggaaca

SEQ ID NO: 128907 - RNA, 19 nt, Artificial Sequence
  Description of Artificial Sequence: Synthetic oligonucleotide
  Antisense strand to SEQ ID NO: 128906
uguuccaaaggcaaguuca

SEQ ID NO: 128908 - RNA, 19 nt, Artificial Sequence
  Description of Artificial Sequence: Synthetic oligonucleotide
  Sense strand starting at position 773 of SEQ ID NO: 1647
ccuuucucugcagaugaga

SEQ ID NO: 128909 - RNA, 19 nt, Artificial Sequence
  Description of Artificial Sequence: Synthetic oligonucleotide
  Antisense strand to SEQ ID NO: 128908
ucucaucugcagagaaagg

SEQ ID NO: 128910 - RNA, 19 nt, Artificial Sequence
  Description of Artificial Sequence: Synthetic oligonucleotide
  Sense strand starting at position 745 of SEQ ID NO: 1647
ucacucuggucuucucauu

SEQ ID NO: 128911 - RNA, 19 nt, Artificial Sequence
  Description of Artificial Sequence: Synthetic oligonucleotide
  Antisense strand to SEQ ID NO: 128910
aaugagaagaccagaguga

SEQ ID NO: 128912 - RNA, 19 nt, Artificial Sequence
  Description of Artificial Sequence: Synthetic oligonucleotide
  Sense strand starting at position 680 of SEQ ID NO: 1647
cguuguuagaaagguauuu

SEQ ID NO: 128913 - RNA, 19 nt, Artificial Sequence
  Description of Artificial Sequence: Synthetic oligonucleotide
  Antisense strand to SEQ ID NO: 128912
aaauaccuuucuaacaacg

SEQ ID NO: 128914 - RNA, 19 nt, Artificial Sequence
  Description of Artificial Sequence: Synthetic oligonucleotide
  Sense strand starting at position 361 of SEQ ID NO: 1647
agagcauacugguuaggga

SEQ ID NO: 128915 - RNA, 19 nt, Artificial Sequence
  Description of Artificial Sequence: Synthetic oligonucleotide
  Antisense strand to SEQ ID NO: 128914
ucccuaaccaguaugcucu

SEQ ID NO: 128916 - RNA, 19 nt, Artificial Sequence
  Description of Artificial Sequence: Synthetic oligonucleotide
  Sense strand starting at position 225 of SEQ ID NO: 1647
agccaaagcuauccaaaga

SEQ ID NO: 128917 - RNA, 19 nt, Artificial Sequence
  Description of Artificial Sequence: Synthetic oligonucleotide
  Antisense strand to SEQ ID NO: 128916
ucuuuggauagcuuuggcu

SEQ ID NO: 128918 - RNA, 19 nt, Artificial Sequence
  Description of Artificial Sequence: Synthetic oligonucleotide
  Sense strand starting at position 147 of SEQ ID NO: 1647
gggagaugggucuggauuc

SEQ ID NO: 128919 - RNA, 19 nt, Artificial Sequence
  Description of Artificial Sequence: Synthetic oligonucleotide
  Antisense strand to SEQ ID NO: 128918
gaauccagacccaucuccc

SEQ ID NO: 128920 - RNA, 19 nt, Artificial Sequence
  Description of Artificial Sequence: Synthetic oligonucleotide
  Sense strand starting at position 114 of SEQ ID NO: 1647
acacguuauugaucccaag

SEQ ID NO: 128921 - RNA, 19 nt, Artificial Sequence
  Description of Artificial Sequence: Synthetic oligonucleotide
  Antisense strand to SEQ ID NO: 128920
cuugggaucaauaacgugu

SEQ ID NO: 128922 - RNA, 19 nt, Artificial Sequence
  Description of Artificial Sequence: Synthetic oligonucleotide
  Sense strand starting at position 108 of SEQ ID NO: 1647
auuaguacacguuauugau

SEQ ID NO: 128923 - RNA, 19 nt, Artificial Sequence
  Description of Artificial Sequence: Synthetic oligonucleotide
  Antisense strand to SEQ ID NO: 128922
aucaauaacguguacuaau

SEQ ID NO: 128924 - RNA, 19 nt, Artificial Sequence
  Description of Artificial Sequence: Synthetic oligonucleotide
  Sense strand starting at position 10 of SEQ ID NO: 1647
gacagucuuccaggcuaua

SEQ ID NO: 128925 - RNA, 19 nt, Artificial Sequence
  Description of Artificial Sequence: Synthetic oligonucleotide
  Antisense strand to SEQ ID NO: 128924
uauagccuggaagacuguc

SEQ ID NO: 128926 - RNA, 19 nt, Artificial Sequence
  Description of Artificial Sequence: Synthetic oligonucleotide
  Sense strand starting at position 3974 of SEQ ID NO: 1648
guaaauggaucugaggcau

SEQ ID NO: 128927 - RNA, 19 nt, Artificial Sequence
  Description of Artificial Sequence: Synthetic oligonucleotide
  Antisense strand to SEQ ID NO: 128926
augccucagauccauuuac

SEQ ID NO: 128928 - RNA, 19 nt, Artificial Sequence
  Description of Artificial Sequence: Synthetic oligonucleotide
  Sense strand starting at position 3973 of SEQ ID NO: 1648
gguaaauggaucugaggca

SEQ ID NO: 128929 - RNA, 19 nt, Artificial Sequence
  Description of Artificial Sequence: Synthetic oligonucleotide
  Antisense strand to SEQ ID NO: 128928
ugccucagauccauuuacc

SEQ ID NO: 128930 - RNA, 19 nt, Artificial Sequence
  Description of Artificial Sequence: Synthetic oligonucleotide
  Sense strand starting at position 3900 of SEQ ID NO: 1648
ggucuuuauccuuauaggu

SEQ ID NO: 128931 - RNA, 19 nt, Artificial Sequence
  Description of Artificial Sequence: Synthetic oligonucleotide
  Antisense strand to SEQ ID NO: 128930
accuauaaggauaaagacc

SEQ ID NO: 128932 - RNA, 19 nt, Artificial Sequence
  Description of Artificial Sequence: Synthetic oligonucleotide
  Sense strand starting at position 3897 of SEQ ID NO: 1648
ucuggucuuuauccuuaua

SEQ ID NO: 128933 - RNA, 19 nt, Artificial Sequence
  Description of Artificial Sequence: Synthetic oligonucleotide
  Antisense strand to SEQ ID NO: 128932
uauaaggauaaagaccaga

SEQ ID NO: 128934 - RNA, 19 nt, Artificial Sequence
  Description of Artificial Sequence: Synthetic oligonucleotide
  Sense strand starting at position 3894 of SEQ ID NO: 1648
gagucuggucuuuauccuu

SEQ ID NO: 128935 - RNA, 19 nt, Artificial Sequence
  Description of Artificial Sequence: Synthetic oligonucleotide
  Antisense strand to SEQ ID NO: 128934
aaggauaaagaccagacuc

SEQ ID NO: 128936 - RNA, 19 nt, Artificial Sequence
  Description of Artificial Sequence: Synthetic oligonucleotide
  Sense strand starting at position 3893 of SEQ ID NO: 1648
agagucuggucuuuauccu

SEQ ID NO: 128937 - RNA, 19 nt, Artificial Sequence
  Description of Artificial Sequence: Synthetic oligonucleotide
  Antisense strand to SEQ ID NO: 128936
aggauaaagaccagacucu

SEQ ID NO: 128938 - RNA, 19 nt, Artificial Sequence
  Description of Artificial Sequence: Synthetic oligonucleotide
  Sense strand starting at position 3890 of SEQ ID NO: 1648
ucaagagucuggucuuuau

SEQ ID NO: 128939 - RNA, 19 nt, Artificial Sequence
  Description of Artificial Sequence: Synthetic oligonucleotide
  Antisense strand to SEQ ID NO: 128938
auaaagaccagacucuuga

SEQ ID NO: 128940 - RNA, 19 nt, Artificial Sequence
  Description of Artificial Sequence: Synthetic oligonucleotide
  Sense strand starting at position 3816 of SEQ ID NO: 1648
gagaaauacuaguagccaa

SEQ ID NO: 128941 - RNA, 19 nt, Artificial Sequence
  Description of Artificial Sequence: Synthetic oligonucleotide
  Antisense strand to SEQ ID NO: 128940
uuggcuacuaguauuucuc

SEQ ID NO: 128942 - RNA, 19 nt, Artificial Sequence
  Description of Artificial Sequence: Synthetic oligonucleotide
  Sense strand starting at position 3803 of SEQ ID NO: 1648
agccucagauguggagaaa

SEQ ID NO: 128943 - RNA, 19 nt, Artificial Sequence
  Description of Artificial Sequence: Synthetic oligonucleotide
  Antisense strand to SEQ ID NO: 128942
uuucuccacaucugaggcu

SEQ ID NO: 128944 - RNA, 19 nt, Artificial Sequence
  Description of Artificial Sequence: Synthetic oligonucleotide
  Sense strand starting at position 3796 of SEQ ID NO: 1648
ccacgauagccucagaugu

SEQ ID NO: 128945 - RNA, 19 nt, Artificial Sequence
  Description of Artificial Sequence: Synthetic oligonucleotide
  Antisense strand to SEQ ID NO: 128944
acaucugaggcuaucgugg

SEQ ID NO: 128946 - RNA, 19 nt, Artificial Sequence
  Description of Artificial Sequence: Synthetic oligonucleotide
  Sense strand starting at position 3750 of SEQ ID NO: 1648
gggcaaacuucuccaaccu

SEQ ID NO: 128947 - RNA, 19 nt, Artificial Sequence
  Description of Artificial Sequence: Synthetic oligonucleotide
  Antisense strand to SEQ ID NO: 128946
agguuggagaaguuugccc

SEQ ID NO: 128948 - RNA, 19 nt, Artificial Sequence
  Description of Artificial Sequence: Synthetic oligonucleotide
  Sense strand starting at position 3628 of SEQ ID NO: 1648
cucucuugucaggaugauu

SEQ ID NO: 128949 - RNA, 19 nt, Artificial Sequence
  Description of Artificial Sequence: Synthetic oligonucleotide
  Antisense strand to SEQ ID NO: 128948
aaucauccugacaagagag

SEQ ID NO: 128950 - RNA, 19 nt, Artificial Sequence
  Description of Artificial Sequence: Synthetic oligonucleotide
  Sense strand starting at position 3535 of SEQ ID NO: 1648
guacccaauuugugccaau

SEQ ID NO: 128951 - RNA, 19 nt, Artificial Sequence
  Description of Artificial Sequence: Synthetic oligonucleotide
  Antisense strand to SEQ ID NO: 128950
auuggcacaaauuggguac

SEQ ID NO: 128952 - RNA, 19 nt, Artificial Sequence
  Description of Artificial Sequence: Synthetic oligonucleotide
  Sense strand starting at position 3429 of SEQ ID NO: 1648
guaauugcaggcugugaaa

SEQ ID NO: 128953 - RNA, 19 nt, Artificial Sequence
  Description of Artificial Sequence: Synthetic oligonucleotide
  Antisense strand to SEQ ID NO: 128952
uuucacagccugcaauuac

SEQ ID NO: 128954 - RNA, 19 nt, Artificial Sequence
  Description of Artificial Sequence: Synthetic oligonucleotide
  Sense strand starting at position 3416 of SEQ ID NO: 1648
gcagauaaacaagguaauu

SEQ ID NO: 128955 - RNA, 19 nt, Artificial Sequence
  Description of Artificial Sequence: Synthetic oligonucleotide
  Antisense strand to SEQ ID NO: 128954
aauuaccuuguuuaucugc

SEQ ID NO: 128956 - RNA, 19 nt, Artificial Sequence
  Description of Artificial Sequence: Synthetic oligonucleotide
  Sense strand starting at position 3381 of SEQ ID NO: 1648
uuacauucugcuugaugga

SEQ ID NO: 128957 - RNA, 19 nt, Artificial Sequence
  Description of Artificial Sequence: Synthetic oligonucleotide
  Antisense strand to SEQ ID NO: 128956
uccaucaagcagaauguaa

SEQ ID NO: 128958 - RNA, 19 nt, Artificial Sequence
  Description of Artificial Sequence: Synthetic oligonucleotide
  Sense strand starting at position 3378 of SEQ ID NO: 1648
aguuuacauucugcuugau

SEQ ID NO: 128959 - RNA, 19 nt, Artificial Sequence
  Description of Artificial Sequence: Synthetic oligonucleotide
  Antisense strand to SEQ ID NO: 128958
aucaagcagaauguaaacu

SEQ ID NO: 128960 - RNA, 19 nt, Artificial Sequence
  Description of Artificial Sequence: Synthetic oligonucleotide
  Sense strand starting at position 3368 of SEQ ID NO: 1648
gcccucauuuaguuuacau

SEQ ID NO: 128961 - RNA, 19 nt, Artificial Sequence
  Description of Artificial Sequence: Synthetic oligonucleotide
  Antisense strand to SEQ ID NO: 128960
auguaaacuaaaugagggc

SEQ ID NO: 128962 - RNA, 19 nt, Artificial Sequence
  Description of Artificial Sequence: Synthetic oligonucleotide
  Sense strand starting at position 3332 of SEQ ID NO: 1648
uggacacuaucucgaauaa

SEQ ID NO: 128963 - RNA, 19 nt, Artificial Sequence
  Description of Artificial Sequence: Synthetic oligonucleotide
  Antisense strand to SEQ ID NO: 128962
uuauucgagauagugucca

SEQ ID NO: 128964 - RNA, 19 nt, Artificial Sequence
  Description of Artificial Sequence: Synthetic oligonucleotide
  Sense strand starting at position 3330 of SEQ ID NO: 1648
gcuggacacuaucucgaau

SEQ ID NO: 128965 - RNA, 19 nt, Artificial Sequence
  Description of Artificial Sequence: Synthetic oligonucleotide
  Antisense strand to SEQ ID NO: 128964
auucgagauaguguccagc

SEQ ID NO: 128966 - RNA, 19 nt, Artificial Sequence
  Description of Artificial Sequence: Synthetic oligonucleotide
  Sense strand starting at position 3322 of SEQ ID NO: 1648
ugcuaagugcuggacacua

SEQ ID NO: 128967 - RNA, 19 nt, Artificial Sequence
  Description of Artificial Sequence: Synthetic oligonucleotide
  Antisense strand to SEQ ID NO: 128966
uaguguccagcacuuagca

SEQ ID NO: 128968 - RNA, 19 nt, Artificial Sequence
  Description of Artificial Sequence: Synthetic oligonucleotide
  Sense strand starting at position 3311 of SEQ ID NO: 1648
uugagagcaucugcuaagu

SEQ ID NO: 128969 - RNA, 19 nt, Artificial Sequence
  Description of Artificial Sequence: Synthetic oligonucleotide
  Antisense strand to SEQ ID NO: 128968
acuuagcagaugcucucaa

SEQ ID NO: 128970 - RNA, 19 nt, Artificial Sequence
  Description of Artificial Sequence: Synthetic oligonucleotide
  Sense strand starting at position 2858 of SEQ ID NO: 1648
gaucuuggcucaucgcaaa

SEQ ID NO: 128971 - RNA, 19 nt, Artificial Sequence
  Description of Artificial Sequence: Synthetic oligonucleotide
  Antisense strand to SEQ ID NO: 128970
uuugcgaugagccaagauc

SEQ ID NO: 128972 - RNA, 19 nt, Artificial Sequence
  Description of Artificial Sequence: Synthetic oligonucleotide
  Sense strand starting at position 2672 of SEQ ID NO: 1648
gggcaaauuucggguuccu

SEQ ID NO: 128973 - RNA, 19 nt, Artificial Sequence
  Description of Artificial Sequence: Synthetic oligonucleotide
  Antisense strand to SEQ ID NO: 128972
aggaacccgaaauuugccc

SEQ ID NO: 128974 - RNA, 19 nt, Artificial Sequence
  Description of Artificial Sequence: Synthetic oligonucleotide
  Sense strand starting at position 2595 of SEQ ID NO: 1648
caagcagagucuggaauuu

SEQ ID NO: 128975 - RNA, 19 nt, Artificial Sequence
  Description of Artificial Sequence: Synthetic oligonucleotide
  Antisense strand to SEQ ID NO: 128974
aaauuccagacucugcuug

SEQ ID NO: 128976 - RNA, 19 nt, Artificial Sequence
  Description of Artificial Sequence: Synthetic oligonucleotide
  Sense strand starting at position 2594 of SEQ ID NO: 1648
ucaagcagagucuggaauu

SEQ ID NO: 128977 - RNA, 19 nt, Artificial Sequence
  Description of Artificial Sequence: Synthetic oligonucleotide
  Antisense strand to SEQ ID NO: 128976
aauuccagacucugcuuga

SEQ ID NO: 128978 - RNA, 19 nt, Artificial Sequence
  Description of Artificial Sequence: Synthetic oligonucleotide
  Sense strand starting at position 2432 of SEQ ID NO: 1648
gggcauguuacccgacacu

SEQ ID NO: 128979 - RNA, 19 nt, Artificial Sequence
  Description of Artificial Sequence: Synthetic oligonucleotide
  Antisense strand to SEQ ID NO: 128978
agugucggguaacaugccc

SEQ ID NO: 128980 - RNA, 19 nt, Artificial Sequence
  Description of Artificial Sequence: Synthetic oligonucleotide
  Sense strand starting at position 2373 of SEQ ID NO: 1648
uagauagaucagcguucca

SEQ ID NO: 128981 - RNA, 19 nt, Artificial Sequence
  Description of Artificial Sequence: Synthetic oligonucleotide
  Antisense strand to SEQ ID NO: 128980
uggaacgcugaucuaucua

SEQ ID NO: 128982 - RNA, 19 nt, Artificial Sequence
  Description of Artificial Sequence: Synthetic oligonucleotide
  Sense strand starting at position 2110 of SEQ ID NO: 1648
ggccuuacaucacccagaa

SEQ ID NO: 128983 - RNA, 19 nt, Artificial Sequence
  Description of Artificial Sequence: Synthetic oligonucleotide
  Antisense strand to SEQ ID NO: 128982
uucugggugauguaaggcc

SEQ ID NO: 128984 - RNA, 19 nt, Artificial Sequence
  Description of Artificial Sequence: Synthetic oligonucleotide
  Sense strand starting at position 2043 of SEQ ID NO: 1648
gcgucuggucaccgagagu

SEQ ID NO: 128985 - RNA, 19 nt, Artificial Sequence
  Description of Artificial Sequence: Synthetic oligonucleotide
  Antisense strand to SEQ ID NO: 128984
acucucggugaccagacgc

SEQ ID NO: 128986 - RNA, 19 nt, Artificial Sequence
  Description of Artificial Sequence: Synthetic oligonucleotide
  Sense strand starting at position 1181 of SEQ ID NO: 1648
cucucaucccugcgggaau

SEQ ID NO: 128987 - RNA, 19 nt, Artificial Sequence
  Description of Artificial Sequence: Synthetic oligonucleotide
  Antisense strand to SEQ ID NO: 128986
auucccgcagggaugagag

SEQ ID NO: 128988 - RNA, 19 nt, Artificial Sequence
  Description of Artificial Sequence: Synthetic oligonucleotide
  Sense strand starting at position 543 of SEQ ID NO: 1648
gucagauucuuuccuuccu

SEQ ID NO: 128989 - RNA, 19 nt, Artificial Sequence
  Description of Artificial Sequence: Synthetic oligonucleotide
  Antisense strand to SEQ ID NO: 128988
aggaaggaaagaaucugac

SEQ ID NO: 128990 - RNA, 19 nt, Artificial Sequence
  Description of Artificial Sequence: Synthetic oligonucleotide
  Sense strand starting at position 541 of SEQ ID NO: 1648
gugucagauucuuuccuuc

SEQ ID NO: 128991 - RNA, 19 nt, Artificial Sequence
  Description of Artificial Sequence: Synthetic oligonucleotide
  Antisense strand to SEQ ID NO: 128990
gaaggaaagaaucugacac

SEQ ID NO: 128992 - RNA, 19 nt, Artificial Sequence
  Description of Artificial Sequence: Synthetic oligonucleotide
  Sense strand starting at position 540 of SEQ ID NO: 1648
ugugucagauucuuuccuu

SEQ ID NO: 128993 - RNA, 19 nt, Artificial Sequence
  Description of Artificial Sequence: Synthetic oligonucleotide
  Antisense strand to SEQ ID NO: 128992
aaggaaagaaucugacaca

SEQ ID NO: 128994 - RNA, 19 nt, Artificial Sequence
  Description of Artificial Sequence: Synthetic oligonucleotide
  Sense strand starting at position 530 of SEQ ID NO: 1648
gcaagagaggugugucaga

SEQ ID NO: 128995 - RNA, 19 nt, Artificial Sequence
  Description of Artificial Sequence: Synthetic oligonucleotide
  Antisense strand to SEQ ID NO: 128994
ucugacacaccucucuugc

SEQ ID NO: 128996 - RNA, 19 nt, Artificial Sequence
  Description of Artificial Sequence: Synthetic oligonucleotide
  Sense strand starting at position 387 of SEQ ID NO: 1648
gcaugucaucuguaucaca

SEQ ID NO: 128997 - RNA, 19 nt, Artificial Sequence
  Description of Artificial Sequence: Synthetic oligonucleotide
  Antisense strand to SEQ ID NO: 128996
ugugauacagaugacaugc

SEQ ID NO: 128998 - RNA, 19 nt, Artificial Sequence
  Description of Artificial Sequence: Synthetic oligonucleotide
  Sense strand starting at position 383 of SEQ ID NO: 1648
ucacgcaugucaucuguau

SEQ ID NO: 128999 - RNA, 19 nt, Artificial Sequence
  Description of Artificial Sequence: Synthetic oligonucleotide
  Antisense strand to SEQ ID NO: 128998
auacagaugacaugcguga

SEQ ID NO: 129000 - RNA, 19 nt, Artificial Sequence
  Description of Artificial Sequence: Synthetic oligonucleotide
  Sense strand starting at position 378 of SEQ ID NO: 1648
gucuaucacgcaugucauc

SEQ ID NO: 129001 - RNA, 19 nt, Artificial Sequence
  Description of Artificial Sequence: Synthetic oligonucleotide
  Antisense strand to SEQ ID NO: 129000
gaugacaugcgugauagac

SEQ ID NO: 129002 - RNA, 19 nt, Artificial Sequence
  Description of Artificial Sequence: Synthetic oligonucleotide
  Sense strand starting at position 365 of SEQ ID NO: 1648
auacauaugcacugucuau

SEQ ID NO: 129003 - RNA, 19 nt, Artificial Sequence
  Description of Artificial Sequence: Synthetic oligonucleotide
  Antisense strand to SEQ ID NO: 129002
auagacagugcauauguau

SEQ ID NO: 129004 - RNA, 19 nt, Artificial Sequence
  Description of Artificial Sequence: Synthetic oligonucleotide
  Sense strand starting at position 210 of SEQ ID NO: 1648
cuacccuaucugugucaua

SEQ ID NO: 129005 - RNA, 19 nt, Artificial Sequence
  Description of Artificial Sequence: Synthetic oligonucleotide
  Antisense strand to SEQ ID NO: 129004
uaugacacagauaggguag

SEQ ID NO: 129006 - RNA, 19 nt, Artificial Sequence
  Description of Artificial Sequence: Synthetic oligonucleotide
  Sense strand starting at position 3727 of SEQ ID NO: 1649
augcgucugugcugggaaa

SEQ ID NO: 129007 - RNA, 19 nt, Artificial Sequence
  Description of Artificial Sequence: Synthetic oligonucleotide
  Antisense strand to SEQ ID NO: 129006
uuucccagcacagacgcau

SEQ ID NO: 129008 - RNA, 19 nt, Artificial Sequence
  Description of Artificial Sequence: Synthetic oligonucleotide
  Sense strand starting at position 3695 of SEQ ID NO: 1649
cacgaaugucaauggacga

SEQ ID NO: 129009 - RNA, 19 nt, Artificial Sequence
  Description of Artificial Sequence: Synthetic oligonucleotide
  Antisense strand to SEQ ID NO: 129008
ucguccauugacauucgug

SEQ ID NO: 129010 - RNA, 19 nt, Artificial Sequence
  Description of Artificial Sequence: Synthetic oligonucleotide
  Sense strand starting at position 3689 of SEQ ID NO: 1649
gaaugucacgaaugucaau

SEQ ID NO: 129011 - RNA, 19 nt, Artificial Sequence
  Description of Artificial Sequence: Synthetic oligonucleotide
  Antisense strand to SEQ ID NO: 129010
auugacauucgugacauuc

SEQ ID NO: 129012 - RNA, 19 nt, Artificial Sequence
  Description of Artificial Sequence: Synthetic oligonucleotide
  Sense strand starting at position 3685 of SEQ ID NO: 1649
gaaggaaugucacgaaugu

SEQ ID NO: 129013 - RNA, 19 nt, Artificial Sequence
  Description of Artificial Sequence: Synthetic oligonucleotide
  Antisense strand to SEQ ID NO: 129012
acauucgugacauuccuuc

SEQ ID NO: 129014 - RNA, 19 nt, Artificial Sequence
  Description of Artificial Sequence: Synthetic oligonucleotide
  Sense strand starting at position 3164 of SEQ ID NO: 1649
cucaacggucucuagagua

SEQ ID NO: 129015 - RNA, 19 nt, Artificial Sequence
  Description of Artificial Sequence: Synthetic oligonucleotide
  Antisense strand to SEQ ID NO: 129014
uacucuagagaccguugag

SEQ ID NO: 129016 - RNA, 19 nt, Artificial Sequence
  Description of Artificial Sequence: Synthetic oligonucleotide
  Sense strand starting at position 3101 of SEQ ID NO: 1649
gaguaaacgaaucgaugaa

SEQ ID NO: 129017 - RNA, 19 nt, Artificial Sequence
  Description of Artificial Sequence: Synthetic oligonucleotide
  Antisense strand to SEQ ID NO: 129016
uucaucgauucguuuacuc

SEQ ID NO: 129018 - RNA, 19 nt, Artificial Sequence
  Description of Artificial Sequence: Synthetic oligonucleotide
  Sense strand starting at position 3092 of SEQ ID NO: 1649
uuguuaaaugaguaaacga

SEQ ID NO: 129019 - RNA, 19 nt, Artificial Sequence
  Description of Artificial Sequence: Synthetic oligonucleotide
  Antisense strand to SEQ ID NO: 129018
ucguuuacucauuuaacaa

SEQ ID NO: 129020 - RNA, 19 nt, Artificial Sequence
  Description of Artificial Sequence: Synthetic oligonucleotide
  Sense strand starting at position 2584 of SEQ ID NO: 1649
agucuugcuucugagguuu

SEQ ID NO: 129021 - RNA, 19 nt, Artificial Sequence
  Description of Artificial Sequence: Synthetic oligonucleotide
  Antisense strand to SEQ ID NO: 129020
aaaccucagaagcaagacu

SEQ ID NO: 129022 - RNA, 19 nt, Artificial Sequence
  Description of Artificial Sequence: Synthetic oligonucleotide
  Sense strand starting at position 2583 of SEQ ID NO: 1649
aagucuugcuucugagguu

SEQ ID NO: 129023 - RNA, 19 nt, Artificial Sequence
  Description of Artificial Sequence: Synthetic oligonucleotide
  Antisense strand to SEQ ID NO: 129022
aaccucagaagcaagacuu

SEQ ID NO: 129024 - RNA, 19 nt, Artificial Sequence
  Description of Artificial Sequence: Synthetic oligonucleotide
  Sense strand starting at position 2577 of SEQ ID NO: 1649
caaggaaagucuugcuucu

SEQ ID NO: 129025 - RNA, 19 nt, Artificial Sequence
  Description of Artificial Sequence: Synthetic oligonucleotide
  Antisense strand to SEQ ID NO: 129024
agaagcaagacuuuccuug

SEQ ID NO: 129026 - RNA, 19 nt, Artificial Sequence
  Description of Artificial Sequence: Synthetic oligonucleotide
  Sense strand starting at position 2330 of SEQ ID NO: 1649
gguuaauggcguuaccugu

SEQ ID NO: 129027 - RNA, 19 nt, Artificial Sequence
  Description of Artificial Sequence: Synthetic oligonucleotide
  Antisense strand to SEQ ID NO: 129026
acagguaacgccauuaacc

SEQ ID NO: 129028 - RNA, 19 nt, Artificial Sequence
  Description of Artificial Sequence: Synthetic oligonucleotide
  Sense strand starting at position 2318 of SEQ ID NO: 1649
gggucuugcacggguuaau

SEQ ID NO: 129029 - RNA, 19 nt, Artificial Sequence
  Description of Artificial Sequence: Synthetic oligonucleotide
  Antisense strand to SEQ ID NO: 129028
auuaacccgugcaagaccc

SEQ ID NO: 129030 - RNA, 19 nt, Artificial Sequence
  Description of Artificial Sequence: Synthetic oligonucleotide
  Sense strand starting at position 2295 of SEQ ID NO: 1649
gcuuaugauagcgucuguu

SEQ ID NO: 129031 - RNA, 19 nt, Artificial Sequence
  Description of Artificial Sequence: Synthetic oligonucleotide
  Antisense strand to SEQ ID NO: 129030
aacagacgcuaucauaagc

SEQ ID NO: 129032 - RNA, 19 nt, Artificial Sequence
  Description of Artificial Sequence: Synthetic oligonucleotide
  Sense strand starting at position 2294 of SEQ ID NO: 1649
ggcuuaugauagcgucugu

SEQ ID NO: 129033 - RNA, 19 nt, Artificial Sequence
  Description of Artificial Sequence: Synthetic oligonucleotide
  Antisense strand to SEQ ID NO: 129032
acagacgcuaucauaagcc

SEQ ID NO: 129034 - RNA, 19 nt, Artificial Sequence
  Description of Artificial Sequence: Synthetic oligonucleotide
  Sense strand starting at position 2270 of SEQ ID NO: 1649
ccuguuugcucgccugaaa

SEQ ID NO: 129035 - RNA, 19 nt, Artificial Sequence
  Description of Artificial Sequence: Synthetic oligonucleotide
  Antisense strand to SEQ ID NO: 129034
uuucaggcgagcaaacagg

SEQ ID NO: 129036 - RNA, 19 nt, Artificial Sequence
  Description of Artificial Sequence: Synthetic oligonucleotide
  Sense strand starting at position 2269 of SEQ ID NO: 1649
cccuguuugcucgccugaa

SEQ ID NO: 129037 - RNA, 19 nt, Artificial Sequence
  Description of Artificial Sequence: Synthetic oligonucleotide
  Antisense strand to SEQ ID NO: 129036
uucaggcgagcaaacaggg

SEQ ID NO: 129038 - RNA, 19 nt, Artificial Sequence
  Description of Artificial Sequence: Synthetic oligonucleotide
  Sense strand starting at position 1662 of SEQ ID NO: 1649
ucaagucaccagcgauuaa

SEQ ID NO: 129039 - RNA, 19 nt, Artificial Sequence
  Description of Artificial Sequence: Synthetic oligonucleotide
  Antisense strand to SEQ ID NO: 129038
uuaaucgcuggugacuuga

SEQ ID NO: 129040 - RNA, 19 nt, Artificial Sequence
  Description of Artificial Sequence: Synthetic oligonucleotide
  Sense strand starting at position 1576 of SEQ ID NO: 1649
gagccuuucugugcugaau

SEQ ID NO: 129041 - RNA, 19 nt, Artificial Sequence
  Description of Artificial Sequence: Synthetic oligonucleotide
  Antisense strand to SEQ ID NO: 129040
auucagcacagaaaggcuc

SEQ ID NO: 129042 - RNA, 19 nt, Artificial Sequence
  Description of Artificial Sequence: Synthetic oligonucleotide
  Sense strand starting at position 1575 of SEQ ID NO: 1649
ugagccuuucugugcugaa

SEQ ID NO: 129043 - RNA, 19 nt, Artificial Sequence
  Description of Artificial Sequence: Synthetic oligonucleotide
  Antisense strand to SEQ ID NO: 129042
uucagcacagaaaggcuca

SEQ ID NO: 129044 - RNA, 19 nt, Artificial Sequence
  Description of Artificial Sequence: Synthetic oligonucleotide
  Sense strand starting at position 1544 of SEQ ID NO: 1649
gucgguuauuauuaugaaa

SEQ ID NO: 129045 - RNA, 19 nt, Artificial Sequence
  Description of Artificial Sequence: Synthetic oligonucleotide
  Antisense strand to SEQ ID NO: 129044
uuucauaauaauaaccgac

SEQ ID NO: 129046 - RNA, 19 nt, Artificial Sequence
  Description of Artificial Sequence: Synthetic oligonucleotide
  Sense strand starting at position 1540 of SEQ ID NO: 1649
cauugucgguuauuauuau

SEQ ID NO: 129047 - RNA, 19 nt, Artificial Sequence
  Description of Artificial Sequence: Synthetic oligonucleotide
  Antisense strand to SEQ ID NO: 129046
auaauaauaaccgacaaug

SEQ ID NO: 129048 - RNA, 19 nt, Artificial Sequence
  Description of Artificial Sequence: Synthetic oligonucleotide
  Sense strand starting at position 1538 of SEQ ID NO: 1649
gccauugucgguuauuauu

SEQ ID NO: 129049 - RNA, 19 nt, Artificial Sequence
  Description of Artificial Sequence: Synthetic oligonucleotide
  Antisense strand to SEQ ID NO: 129048
aauaauaaccgacaauggc

SEQ ID NO: 129050 - RNA, 19 nt, Artificial Sequence
  Description of Artificial Sequence: Synthetic oligonucleotide
  Sense strand starting at position 1536 of SEQ ID NO: 1649
uagccauugucgguuauua

SEQ ID NO: 129051 - RNA, 19 nt, Artificial Sequence
  Description of Artificial Sequence: Synthetic oligonucleotide
  Antisense strand to SEQ ID NO: 129050
uaauaaccgacaauggcua

SEQ ID NO: 129052 - RNA, 19 nt, Artificial Sequence
  Description of Artificial Sequence: Synthetic oligonucleotide
  Sense strand starting at position 1535 of SEQ ID NO: 1649
auagccauugucgguuauu

SEQ ID NO: 129053 - RNA, 19 nt, Artificial Sequence
  Description of Artificial Sequence: Synthetic oligonucleotide
  Antisense strand to SEQ ID NO: 129052
aauaaccgacaauggcuau

SEQ ID NO: 129054 - RNA, 19 nt, Artificial Sequence
  Description of Artificial Sequence: Synthetic oligonucleotide
  Sense strand starting at position 1519 of SEQ ID NO: 1649
gugagcacugggcagaaua

SEQ ID NO: 129055 - RNA, 19 nt, Artificial Sequence
  Description of Artificial Sequence: Synthetic oligonucleotide
  Antisense strand to SEQ ID NO: 129054
uauucugcccagugcucac

SEQ ID NO: 129056 - RNA, 19 nt, Artificial Sequence
  Description of Artificial Sequence: Synthetic oligonucleotide
  Sense strand starting at position 1487 of SEQ ID NO: 1649
agcaaucaugccuaacuga

SEQ ID NO: 129057 - RNA, 19 nt, Artificial Sequence
  Description of Artificial Sequence: Synthetic oligonucleotide
  Antisense strand to SEQ ID NO: 129056
ucaguuaggcaugauugcu

SEQ ID NO: 129058 - RNA, 19 nt, Artificial Sequence
  Description of Artificial Sequence: Synthetic oligonucleotide
  Sense strand starting at position 1399 of SEQ ID NO: 1649
guaugaucuugggcaagug

SEQ ID NO: 129059 - RNA, 19 nt, Artificial Sequence
  Description of Artificial Sequence: Synthetic oligonucleotide
  Antisense strand to SEQ ID NO: 129058
cacuugcccaagaucauac

SEQ ID NO: 129060 - RNA, 19 nt, Artificial Sequence
  Description of Artificial Sequence: Synthetic oligonucleotide
  Sense strand starting at position 1390 of SEQ ID NO: 1649
ccacaaguuguaugaucuu

SEQ ID NO: 129061 - RNA, 19 nt, Artificial Sequence
  Description of Artificial Sequence: Synthetic oligonucleotide
  Antisense strand to SEQ ID NO: 129060
aagaucauacaacuugugg

SEQ ID NO: 129062 - RNA, 19 nt, Artificial Sequence
  Description of Artificial Sequence: Synthetic oligonucleotide
  Sense strand starting at position 1369 of SEQ ID NO: 1649
gguaaauccugguuccaag

SEQ ID NO: 129063 - RNA, 19 nt, Artificial Sequence
  Description of Artificial Sequence: Synthetic oligonucleotide
  Antisense strand to SEQ ID NO: 129062
cuuggaaccaggauuuacc

SEQ ID NO: 129064 - RNA, 19 nt, Artificial Sequence
  Description of Artificial Sequence: Synthetic oligonucleotide
  Sense strand starting at position 1310 of SEQ ID NO: 1649
cccucauucccauggucau

SEQ ID NO: 129065 - RNA, 19 nt, Artificial Sequence
  Description of Artificial Sequence: Synthetic oligonucleotide
  Antisense strand to SEQ ID NO: 129064
augaccaugggaaugaggg

SEQ ID NO: 129066 - RNA, 19 nt, Artificial Sequence
  Description of Artificial Sequence: Synthetic oligonucleotide
  Sense strand starting at position 400 of SEQ ID NO: 1649
uccaaucugccuugaggaa

SEQ ID NO: 129067 - RNA, 19 nt, Artificial Sequence
  Description of Artificial Sequence: Synthetic oligonucleotide
  Antisense strand to SEQ ID NO: 129066
uuccucaaggcagauugga

SEQ ID NO: 129068 - RNA, 19 nt, Artificial Sequence
  Description of Artificial Sequence: Synthetic oligonucleotide
  Sense strand starting at position 241 of SEQ ID NO: 1649
ggaggagaaugccauggaa

SEQ ID NO: 129069 - RNA, 19 nt, Artificial Sequence
  Description of Artificial Sequence: Synthetic oligonucleotide
  Antisense strand to SEQ ID NO: 129068
uuccauggcauucuccucc

SEQ ID NO: 129070 - RNA, 19 nt, Artificial Sequence
  Description of Artificial Sequence: Synthetic oligonucleotide
  Sense strand starting at position 192 of SEQ ID NO: 1649
ggauccuucuggugauaca

SEQ ID NO: 129071 - RNA, 19 nt, Artificial Sequence
  Description of Artificial Sequence: Synthetic oligonucleotide
  Antisense strand to SEQ ID NO: 129070
uguaucaccagaaggaucc

SEQ ID NO: 129072 - RNA, 19 nt, Artificial Sequence
  Description of Artificial Sequence: Synthetic oligonucleotide
  Sense strand starting at position 190 of SEQ ID NO: 1649
cgggauccuucuggugaua

SEQ ID NO: 129073 - RNA, 19 nt, Artificial Sequence
  Description of Artificial Sequence: Synthetic oligonucleotide
  Antisense strand to SEQ ID NO: 129072
uaucaccagaaggaucccg

SEQ ID NO: 129074 - RNA, 19 nt, Artificial Sequence
  Description of Artificial Sequence: Synthetic oligonucleotide
  Sense strand starting at position 189 of SEQ ID NO: 1649
ccgggauccuucuggugau

SEQ ID NO: 129075 - RNA, 19 nt, Artificial Sequence
  Description of Artificial Sequence: Synthetic oligonucleotide
  Antisense strand to SEQ ID NO: 129074
aucaccagaaggaucccgg

SEQ ID NO: 129076 - RNA, 19 nt, Artificial Sequence
  Description of Artificial Sequence: Synthetic oligonucleotide
  Sense strand starting at position 135 of SEQ ID NO: 1650
aagugacugccucaagcua

SEQ ID NO: 129077 - RNA, 19 nt, Artificial Sequence
  Description of Artificial Sequence: Synthetic oligonucleotide
  Antisense strand to SEQ ID NO: 129076
uagcuugaggcagucacuu

SEQ ID NO: 129078 - RNA, 19 nt, Artificial Sequence
  Description of Artificial Sequence: Synthetic oligonucleotide
  Sense strand starting at position 402 of SEQ ID NO: 1650
gggcaagggucauuccaaa

SEQ ID NO: 129079 - RNA, 19 nt, Artificial Sequence
  Description of Artificial Sequence: Synthetic oligonucleotide
  Antisense strand to SEQ ID NO: 129078
uuuggaaugacccuugccc

SEQ ID NO: 129080 - RNA, 19 nt, Artificial Sequence
  Description of Artificial Sequence: Synthetic oligonucleotide
  Sense strand starting at position 479 of SEQ ID NO: 1650
agaccaugauuggcauuau

SEQ ID NO: 129081 - RNA, 19 nt, Artificial Sequence
  Description of Artificial Sequence: Synthetic oligonucleotide
  Antisense strand to SEQ ID NO: 129080
auaaugccaaucauggucu

SEQ ID NO: 129082 - RNA, 19 nt, Artificial Sequence
  Description of Artificial Sequence: Synthetic oligonucleotide
  Sense strand starting at position 503 of SEQ ID NO: 1650
cuaccugugggauggauaa

SEQ ID NO: 129083 - RNA, 19 nt, Artificial Sequence
  Description of Artificial Sequence: Synthetic oligonucleotide
  Antisense strand to SEQ ID NO: 129082
uuauccaucccacagguag

SEQ ID NO: 129084 - RNA, 19 nt, Artificial Sequence
  Description of Artificial Sequence: Synthetic oligonucleotide
  Sense strand starting at position 659 of SEQ ID NO: 1650
uccuguggugcucaaacua

SEQ ID NO: 129085 - RNA, 19 nt, Artificial Sequence
  Description of Artificial Sequence: Synthetic oligonucleotide
  Antisense strand to SEQ ID NO: 129084
uaguuugagcaccacagga

SEQ ID NO: 129086 - RNA, 19 nt, Artificial Sequence
  Description of Artificial Sequence: Synthetic oligonucleotide
  Sense strand starting at position 756 of SEQ ID NO: 1650
ggaaucucucccugagccu

SEQ ID NO: 129087 - RNA, 19 nt, Artificial Sequence
  Description of Artificial Sequence: Synthetic oligonucleotide
  Antisense strand to SEQ ID NO: 129086
aggcucagggagagauucc

SEQ ID NO: 129088 - RNA, 19 nt, Artificial Sequence
  Description of Artificial Sequence: Synthetic oligonucleotide
  Sense strand starting at position 763 of SEQ ID NO: 1650
cucccugagccuuauggaa

SEQ ID NO: 129089 - RNA, 19 nt, Artificial Sequence
  Description of Artificial Sequence: Synthetic oligonucleotide
  Antisense strand to SEQ ID NO: 129088
uuccauaaggcucagggag

SEQ ID NO: 129090 - RNA, 19 nt, Artificial Sequence
  Description of Artificial Sequence: Synthetic oligonucleotide
  Sense strand starting at position 1487 of SEQ ID NO: 1650
accagacacuuaucuguau

SEQ ID NO: 129091 - RNA, 19 nt, Artificial Sequence
  Description of Artificial Sequence: Synthetic oligonucleotide
  Antisense strand to SEQ ID NO: 129090
auacagauaagugucuggu

SEQ ID NO: 129092 - RNA, 19 nt, Artificial Sequence
  Description of Artificial Sequence: Synthetic oligonucleotide
  Sense strand starting at position 1488 of SEQ ID NO: 1650
ccagacacuuaucuguauu

SEQ ID NO: 129093 - RNA, 19 nt, Artificial Sequence
  Description of Artificial Sequence: Synthetic oligonucleotide
  Antisense strand to SEQ ID NO: 129092
aauacagauaagugucugg

SEQ ID NO: 129094 - RNA, 19 nt, Artificial Sequence
  Description of Artificial Sequence: Synthetic oligonucleotide
  Sense strand starting at position 1641 of SEQ ID NO: 1650
ggugucucuccugaggaag

SEQ ID NO: 129095 - RNA, 19 nt, Artificial Sequence
  Description of Artificial Sequence: Synthetic oligonucleotide
  Antisense strand to SEQ ID NO: 129094
cuuccucaggagagacacc

SEQ ID NO: 129096 - RNA, 19 nt, Artificial Sequence
  Description of Artificial Sequence: Synthetic oligonucleotide
  Sense strand starting at position 1787 of SEQ ID NO: 1650
ccuggcuuuccagaucuau

SEQ ID NO: 129097 - RNA, 19 nt, Artificial Sequence
  Description of Artificial Sequence: Synthetic oligonucleotide
  Antisense strand to SEQ ID NO: 129096
auagaucuggaaagccagg

SEQ ID NO: 129098 - RNA, 19 nt, Artificial Sequence
  Description of Artificial Sequence: Synthetic oligonucleotide
  Sense strand starting at position 2051 of SEQ ID NO: 1650
ugcagcucauuaucauaga

SEQ ID NO: 129099 - RNA, 19 nt, Artificial Sequence
  Description of Artificial Sequence: Synthetic oligonucleotide
  Antisense strand to SEQ ID NO: 129098
ucuaugauaaugagcugca

SEQ ID NO: 129100 - RNA, 19 nt, Artificial Sequence
  Description of Artificial Sequence: Synthetic oligonucleotide
  Sense strand starting at position 2196 of SEQ ID NO: 1650
gcaagcugucaacaaagga

SEQ ID NO: 129101 - RNA, 19 nt, Artificial Sequence
  Description of Artificial Sequence: Synthetic oligonucleotide
  Antisense strand to SEQ ID NO: 129100
uccuuuguugacagcuugc

SEQ ID NO: 129102 - RNA, 19 nt, Artificial Sequence
  Description of Artificial Sequence: Synthetic oligonucleotide
  Sense strand starting at position 2553 of SEQ ID NO: 1650
ucugguaggguugagacua

SEQ ID NO: 129103 - RNA, 19 nt, Artificial Sequence
  Description of Artificial Sequence: Synthetic oligonucleotide
  Antisense strand to SEQ ID NO: 129102
uagucucaacccuaccaga

SEQ ID NO: 129104 - RNA, 19 nt, Artificial Sequence
  Description of Artificial Sequence: Synthetic oligonucleotide
  Sense strand starting at position 2568 of SEQ ID NO: 1650
acuagagucuuggaauuug

SEQ ID NO: 129105 - RNA, 19 nt, Artificial Sequence
  Description of Artificial Sequence: Synthetic oligonucleotide
  Antisense strand to SEQ ID NO: 129104
caaauuccaagacucuagu

SEQ ID NO: 129106 - RNA, 19 nt, Artificial Sequence
  Description of Artificial Sequence: Synthetic oligonucleotide
  Sense strand starting at position 2578 of SEQ ID NO: 1650
uggaauuugugggagcaaa

SEQ ID NO: 129107 - RNA, 19 nt, Artificial Sequence
  Description of Artificial Sequence: Synthetic oligonucleotide
  Antisense strand to SEQ ID NO: 129106
uuugcucccacaaauucca

SEQ ID NO: 129108 - RNA, 19 nt, Artificial Sequence
  Description of Artificial Sequence: Synthetic oligonucleotide
  Sense strand starting at position 2642 of SEQ ID NO: 1650
ucaaauaaggcuugaaguu

SEQ ID NO: 129109 - RNA, 19 nt, Artificial Sequence
  Description of Artificial Sequence: Synthetic oligonucleotide
  Antisense strand to SEQ ID NO: 129108
aacuucaagccuuauuuga

SEQ ID NO: 129110 - RNA, 19 nt, Artificial Sequence
  Description of Artificial Sequence: Synthetic oligonucleotide
  Sense strand starting at position 2671 of SEQ ID NO: 1650
uuauuauugcaaugagaag

SEQ ID NO: 129111 - RNA, 19 nt, Artificial Sequence
  Description of Artificial Sequence: Synthetic oligonucleotide
  Antisense strand to SEQ ID NO: 129110
cuucucauugcaauaauaa

SEQ ID NO: 129112 - RNA, 19 nt, Artificial Sequence
  Description of Artificial Sequence: Synthetic oligonucleotide
  Sense strand starting at position 2688 of SEQ ID NO: 1650
agaugaaccuugcucugaa

SEQ ID NO: 129113 - RNA, 19 nt, Artificial Sequence
  Description of Artificial Sequence: Synthetic oligonucleotide
  Antisense strand to SEQ ID NO: 129112
uucagagcaagguucaucu

SEQ ID NO: 129114 - RNA, 19 nt, Artificial Sequence
  Description of Artificial Sequence: Synthetic oligonucleotide
  Sense strand starting at position 2810 of SEQ ID NO: 1650
cagagaaucuuucuggcag

SEQ ID NO: 129115 - RNA, 19 nt, Artificial Sequence
  Description of Artificial Sequence: Synthetic oligonucleotide
  Antisense strand to SEQ ID NO: 129114
cugccagaaagauucucug

SEQ ID NO: 129116 - RNA, 19 nt, Artificial Sequence
  Description of Artificial Sequence: Synthetic oligonucleotide
  Sense strand starting at position 2816 of SEQ ID NO: 1650
aucuuucuggcaggguaau

SEQ ID NO: 129117 - RNA, 19 nt, Artificial Sequence
  Description of Artificial Sequence: Synthetic oligonucleotide
  Antisense strand to SEQ ID NO: 129116
auuacccugccagaaagau

SEQ ID NO: 129118 - RNA, 19 nt, Artificial Sequence
  Description of Artificial Sequence: Synthetic oligonucleotide
  Sense strand starting at position 2887 of SEQ ID NO: 1650
cgggauucuggaugacaau

SEQ ID NO: 129119 - RNA, 19 nt, Artificial Sequence
  Description of Artificial Sequence: Synthetic oligonucleotide
  Antisense strand to SEQ ID NO: 129118
auugucauccagaaucccg

SEQ ID NO: 129120 - RNA, 19 nt, Artificial Sequence
  Description of Artificial Sequence: Synthetic oligonucleotide
  Sense strand starting at position 3060 of SEQ ID NO: 1650
uuuacuccuguccaaguau

SEQ ID NO: 129121 - RNA, 19 nt, Artificial Sequence
  Description of Artificial Sequence: Synthetic oligonucleotide
  Antisense strand to SEQ ID NO: 129120
auacuuggacaggaguaaa

SEQ ID NO: 129122 - RNA, 19 nt, Artificial Sequence
  Description of Artificial Sequence: Synthetic oligonucleotide
  Sense strand starting at position 3067 of SEQ ID NO: 1650
cuguccaaguauucugaua

SEQ ID NO: 129123 - RNA, 19 nt, Artificial Sequence
  Description of Artificial Sequence: Synthetic oligonucleotide
  Antisense strand to SEQ ID NO: 129122
uaucagaauacuuggacag

SEQ ID NO: 129124 - RNA, 19 nt, Artificial Sequence
  Description of Artificial Sequence: Synthetic oligonucleotide
  Sense strand starting at position 3081 of SEQ ID NO: 1650
ugauaagcuuccucuacug

SEQ ID NO: 129125 - RNA, 19 nt, Artificial Sequence
  Description of Artificial Sequence: Synthetic oligonucleotide
  Antisense strand to SEQ ID NO: 129124
caguagaggaagcuuauca

SEQ ID NO: 129126 - RNA, 19 nt, Artificial Sequence
  Description of Artificial Sequence: Synthetic oligonucleotide
  Sense strand starting at position 3113 of SEQ ID NO: 1650
acaguccucagugguauaa

SEQ ID NO: 129127 - RNA, 19 nt, Artificial Sequence
  Description of Artificial Sequence: Synthetic oligonucleotide
  Antisense strand to SEQ ID NO: 129126
uuauaccacugaggacugu

SEQ ID NO: 129128 - RNA, 19 nt, Artificial Sequence
  Description of Artificial Sequence: Synthetic oligonucleotide
  Sense strand starting at position 3117 of SEQ ID NO: 1650
uccucagugguauaaaucu

SEQ ID NO: 129129 - RNA, 19 nt, Artificial Sequence
  Description of Artificial Sequence: Synthetic oligonucleotide
  Antisense strand to SEQ ID NO: 129128
agauuuauaccacugagga

SEQ ID NO: 129130 - RNA, 19 nt, Artificial Sequence
  Description of Artificial Sequence: Synthetic oligonucleotide
  Sense strand starting at position 3284 of SEQ ID NO: 1650
acuaaccagucaucucgaa

SEQ ID NO: 129131 - RNA, 19 nt, Artificial Sequence
  Description of Artificial Sequence: Synthetic oligonucleotide
  Antisense strand to SEQ ID NO: 129130
uucgagaugacugguuagu

SEQ ID NO: 129132 - RNA, 19 nt, Artificial Sequence
  Description of Artificial Sequence: Synthetic oligonucleotide
  Sense strand starting at position 3288 of SEQ ID NO: 1650
accagucaucucgaacaau

SEQ ID NO: 129133 - RNA, 19 nt, Artificial Sequence
  Description of Artificial Sequence: Synthetic oligonucleotide
  Antisense strand to SEQ ID NO: 129132
auuguucgagaugacuggu

SEQ ID NO: 129134 - RNA, 19 nt, Artificial Sequence
  Description of Artificial Sequence: Synthetic oligonucleotide
  Sense strand starting at position 3397 of SEQ ID NO: 1650
gcugaaauuuguguuccug

SEQ ID NO: 129135 - RNA, 19 nt, Artificial Sequence
  Description of Artificial Sequence: Synthetic oligonucleotide
  Antisense strand to SEQ ID NO: 129134
caggaacacaaauuucagc

SEQ ID NO: 129136 - RNA, 19 nt, Artificial Sequence
  Description of Artificial Sequence: Synthetic oligonucleotide
  Sense strand starting at position 3399 of SEQ ID NO: 1650
ugaaauuuguguuccugua

SEQ ID NO: 129137 - RNA, 19 nt, Artificial Sequence
  Description of Artificial Sequence: Synthetic oligonucleotide
  Antisense strand to SEQ ID NO: 129136
uacaggaacacaaauuuca

SEQ ID NO: 129138 - RNA, 19 nt, Artificial Sequence
  Description of Artificial Sequence: Synthetic oligonucleotide
  Sense strand starting at position 3553 of SEQ ID NO: 1650
auauuuacccuguguuauu

SEQ ID NO: 129139 - RNA, 19 nt, Artificial Sequence
  Description of Artificial Sequence: Synthetic oligonucleotide
  Antisense strand to SEQ ID NO: 129138
aauaacacaggguaaauau

SEQ ID NO: 129140 - RNA, 19 nt, Artificial Sequence
  Description of Artificial Sequence: Synthetic oligonucleotide
  Sense strand starting at position 3612 of SEQ ID NO: 1650
gacagacuagucgaucguu

SEQ ID NO: 129141 - RNA, 19 nt, Artificial Sequence
  Description of Artificial Sequence: Synthetic oligonucleotide
  Antisense strand to SEQ ID NO: 129140
aacgaucgacuagucuguc

SEQ ID NO: 129142 - RNA, 19 nt, Artificial Sequence
  Description of Artificial Sequence: Synthetic oligonucleotide
  Sense strand starting at position 3758 of SEQ ID NO: 1650
ccgugguaggauuggagau

SEQ ID NO: 129143 - RNA, 19 nt, Artificial Sequence
  Description of Artificial Sequence: Synthetic oligonucleotide
  Antisense strand to SEQ ID NO: 129142
aucuccaauccuaccacgg

SEQ ID NO: 129144 - RNA, 19 nt, Artificial Sequence
  Description of Artificial Sequence: Synthetic oligonucleotide
  Sense strand starting at position 3759 of SEQ ID NO: 1650
cgugguaggauuggagaua

SEQ ID NO: 129145 - RNA, 19 nt, Artificial Sequence
  Description of Artificial Sequence: Synthetic oligonucleotide
  Antisense strand to SEQ ID NO: 129144
uaucuccaauccuaccacg

SEQ ID NO: 129146 - RNA, 19 nt, Artificial Sequence
  Description of Artificial Sequence: Synthetic oligonucleotide
  Sense strand starting at position 3808 of SEQ ID NO: 1650
agggcccucugguucuaaa

SEQ ID NO: 129147 - RNA, 19 nt, Artificial Sequence
  Description of Artificial Sequence: Synthetic oligonucleotide
  Antisense strand to SEQ ID NO: 129146
uuuagaaccagagggcccu

SEQ ID NO: 129148 - RNA, 19 nt, Artificial Sequence
  Description of Artificial Sequence: Synthetic oligonucleotide
  Sense strand starting at position 3833 of SEQ ID NO: 1650
ggugucugacucuggaaga

SEQ ID NO: 129149 - RNA, 19 nt, Artificial Sequence
  Description of Artificial Sequence: Synthetic oligonucleotide
  Antisense strand to SEQ ID NO: 129148
ucuuccagagucagacacc

SEQ ID NO: 129150 - RNA, 19 nt, Artificial Sequence
  Description of Artificial Sequence: Synthetic oligonucleotide
  Sense strand starting at position 3891 of SEQ ID NO: 1650
ugggaagauuaugauacaa

SEQ ID NO: 129151 - RNA, 19 nt, Artificial Sequence
  Description of Artificial Sequence: Synthetic oligonucleotide
  Antisense strand to SEQ ID NO: 129150
uuguaucauaaucuuccca

SEQ ID NO: 129152 - RNA, 19 nt, Artificial Sequence
  Description of Artificial Sequence: Synthetic oligonucleotide
  Sense strand starting at position 3940 of SEQ ID NO: 1650
acuccugugguccagaaau

SEQ ID NO: 129153 - RNA, 19 nt, Artificial Sequence
  Description of Artificial Sequence: Synthetic oligonucleotide
  Antisense strand to SEQ ID NO: 129152
auuucuggaccacaggagu

SEQ ID NO: 129154 - RNA, 19 nt, Artificial Sequence
  Description of Artificial Sequence: Synthetic oligonucleotide
  Sense strand starting at position 3942 of SEQ ID NO: 1650
uccugugguccagaaauaa

SEQ ID NO: 129155 - RNA, 19 nt, Artificial Sequence
  Description of Artificial Sequence: Synthetic oligonucleotide
  Antisense strand to SEQ ID NO: 129154
uuauuucuggaccacagga

SEQ ID NO: 129156 - RNA, 19 nt, Artificial Sequence
  Description of Artificial Sequence: Synthetic oligonucleotide
  Sense strand starting at position 59 of SEQ ID NO: 1651
ggguuuguuuaggcugaua

SEQ ID NO: 129157 - RNA, 19 nt, Artificial Sequence
  Description of Artificial Sequence: Synthetic oligonucleotide
  Antisense strand to SEQ ID NO: 129156
uaucagccuaaacaaaccc

SEQ ID NO: 129158 - RNA, 19 nt, Artificial Sequence
  Description of Artificial Sequence: Synthetic oligonucleotide
  Sense strand starting at position 61 of SEQ ID NO: 1651
guuuguuuaggcugauaug

SEQ ID NO: 129159 - RNA, 19 nt, Artificial Sequence
  Description of Artificial Sequence: Synthetic oligonucleotide
  Antisense strand to SEQ ID NO: 129158
cauaucagccuaaacaaac

SEQ ID NO: 129160 - RNA, 19 nt, Artificial Sequence
  Description of Artificial Sequence: Synthetic oligonucleotide
  Sense strand starting at position 72 of SEQ ID NO: 1651
cugauaugguucuuaaagg

SEQ ID NO: 129161 - RNA, 19 nt, Artificial Sequence
  Description of Artificial Sequence: Synthetic oligonucleotide
  Antisense strand to SEQ ID NO: 129160
ccuuuaagaaccauaucag

SEQ ID NO: 129162 - RNA, 19 nt, Artificial Sequence
  Description of Artificial Sequence: Synthetic oligonucleotide
  Sense strand starting at position 90 of SEQ ID NO: 1651
gcaaauacagucuaagauu

SEQ ID NO: 129163 - RNA, 19 nt, Artificial Sequence
  Description of Artificial Sequence: Synthetic oligonucleotide
  Antisense strand to SEQ ID NO: 129162
aaucuuagacuguauuugc

SEQ ID NO: 129164 - RNA, 19 nt, Artificial Sequence
  Description of Artificial Sequence: Synthetic oligonucleotide
  Sense strand starting at position 98 of SEQ ID NO: 1651
agucuaagauuggagggaa

SEQ ID NO: 129165 - RNA, 19 nt, Artificial Sequence
  Description of Artificial Sequence: Synthetic oligonucleotide
  Antisense strand to SEQ ID NO: 129164
uucccuccaaucuuagacu

SEQ ID NO: 129166 - RNA, 19 nt, Artificial Sequence
  Description of Artificial Sequence: Synthetic oligonucleotide
  Sense strand starting at position 124 of SEQ ID NO: 1651
uuuggauccuggucuugaa

SEQ ID NO: 129167 - RNA, 19 nt, Artificial Sequence
  Description of Artificial Sequence: Synthetic oligonucleotide
  Antisense strand to SEQ ID NO: 129166
uucaagaccaggauccaaa

SEQ ID NO: 129168 - RNA, 19 nt, Artificial Sequence
  Description of Artificial Sequence: Synthetic oligonucleotide
  Sense strand starting at position 281 of SEQ ID NO: 1651
uguaaaggcuuauuccuua

SEQ ID NO: 129169 - RNA, 19 nt, Artificial Sequence
  Description of Artificial Sequence: Synthetic oligonucleotide
  Antisense strand to SEQ ID NO: 129168
uaaggaauaagccuuuaca

SEQ ID NO: 129170 - RNA, 19 nt, Artificial Sequence
  Description of Artificial Sequence: Synthetic oligonucleotide
  Sense strand starting at position 286 of SEQ ID NO: 1651
aggcuuauuccuuaugcag

SEQ ID NO: 129171 - RNA, 19 nt, Artificial Sequence
  Description of Artificial Sequence: Synthetic oligonucleotide
  Antisense strand to SEQ ID NO: 129170
cugcauaaggaauaagccu

SEQ ID NO: 129172 - RNA, 19 nt, Artificial Sequence
  Description of Artificial Sequence: Synthetic oligonucleotide
  Sense strand starting at position 300 of SEQ ID NO: 1651
ugcagagucucacuagucu

SEQ ID NO: 129173 - RNA, 19 nt, Artificial Sequence
  Description of Artificial Sequence: Synthetic oligonucleotide
  Antisense strand to SEQ ID NO: 129172
agacuagugagacucugca

SEQ ID NO: 129174 - RNA, 19 nt, Artificial Sequence
  Description of Artificial Sequence: Synthetic oligonucleotide
  Sense strand starting at position 304 of SEQ ID NO: 1651
gagucucacuagucuguca

SEQ ID NO: 129175 - RNA, 19 nt, Artificial Sequence
  Description of Artificial Sequence: Synthetic oligonucleotide
  Antisense strand to SEQ ID NO: 129174
ugacagacuagugagacuc

SEQ ID NO: 129176 - RNA, 19 nt, Artificial Sequence
  Description of Artificial Sequence: Synthetic oligonucleotide
  Sense strand starting at position 306 of SEQ ID NO: 1651
gucucacuagucugucaac

SEQ ID NO: 129177 - RNA, 19 nt, Artificial Sequence
  Description of Artificial Sequence: Synthetic oligonucleotide
  Antisense strand to SEQ ID NO: 129176
guugacagacuagugagac

SEQ ID NO: 129178 - RNA, 19 nt, Artificial Sequence
  Description of Artificial Sequence: Synthetic oligonucleotide
  Sense strand starting at position 342 of SEQ ID NO: 1651
gcauauaaugccugggaag

SEQ ID NO: 129179 - RNA, 19 nt, Artificial Sequence
  Description of Artificial Sequence: Synthetic oligonucleotide
  Antisense strand to SEQ ID NO: 129178
cuucccaggcauuauaugc

SEQ ID NO: 129180 - RNA, 19 nt, Artificial Sequence
  Description of Artificial Sequence: Synthetic oligonucleotide
  Sense strand starting at position 428 of SEQ ID NO: 1651
gucucaguuccugaaccuu

SEQ ID NO: 129181 - RNA, 19 nt, Artificial Sequence
  Description of Artificial Sequence: Synthetic oligonucleotide
  Antisense strand to SEQ ID NO: 129180
aagguucaggaacugagac

SEQ ID NO: 129182 - RNA, 19 nt, Artificial Sequence
  Description of Artificial Sequence: Synthetic oligonucleotide
  Sense strand starting at position 553 of SEQ ID NO: 1651
uuagacugcucuccaagaa

SEQ ID NO: 129183 - RNA, 19 nt, Artificial Sequence
  Description of Artificial Sequence: Synthetic oligonucleotide
  Antisense strand to SEQ ID NO: 129182
uucuuggagagcagucuaa

SEQ ID NO: 129184 - RNA, 19 nt, Artificial Sequence
  Description of Artificial Sequence: Synthetic oligonucleotide
  Sense strand starting at position 780 of SEQ ID NO: 1651
cuaugaggucccuauucua

SEQ ID NO: 129185 - RNA, 19 nt, Artificial Sequence
  Description of Artificial Sequence: Synthetic oligonucleotide
  Antisense strand to SEQ ID NO: 129184
uagaauagggaccucauag

SEQ ID NO: 129186 - RNA, 19 nt, Artificial Sequence
  Description of Artificial Sequence: Synthetic oligonucleotide
  Sense strand starting at position 864 of SEQ ID NO: 1651
uauuuaugcuuugggaaag

SEQ ID NO: 129187 - RNA, 19 nt, Artificial Sequence
  Description of Artificial Sequence: Synthetic oligonucleotide
  Antisense strand to SEQ ID NO: 129186
cuuucccaaagcauaaaua

SEQ ID NO: 129188 - RNA, 19 nt, Artificial Sequence
  Description of Artificial Sequence: Synthetic oligonucleotide
  Sense strand starting at position 1032 of SEQ ID NO: 1651
agcuaagcugaaugguaaa

SEQ ID NO: 129189 - RNA, 19 nt, Artificial Sequence
  Description of Artificial Sequence: Synthetic oligonucleotide
  Antisense strand to SEQ ID NO: 129188
uuuaccauucagcuuagcu

SEQ ID NO: 129190 - RNA, 19 nt, Artificial Sequence
  Description of Artificial Sequence: Synthetic oligonucleotide
  Sense strand starting at position 1090 of SEQ ID NO: 1651
cuuuccuguuuccuggaaa

SEQ ID NO: 129191 - RNA, 19 nt, Artificial Sequence
  Description of Artificial Sequence: Synthetic oligonucleotide
  Antisense strand to SEQ ID NO: 129190
uuuccaggaaacaggaaag

SEQ ID NO: 129192 - RNA, 19 nt, Artificial Sequence
  Description of Artificial Sequence: Synthetic oligonucleotide
  Sense strand starting at position 1180 of SEQ ID NO: 1651
gauugagaauuaggaacau

SEQ ID NO: 129193 - RNA, 19 nt, Artificial Sequence
  Description of Artificial Sequence: Synthetic oligonucleotide
  Antisense strand to SEQ ID NO: 129192
auguuccuaauucucaauc

SEQ ID NO: 129194 - RNA, 19 nt, Artificial Sequence
  Description of Artificial Sequence: Synthetic oligonucleotide
  Sense strand starting at position 1341 of SEQ ID NO: 1651
uuucucuccuuuguagaua

SEQ ID NO: 129195 - RNA, 19 nt, Artificial Sequence
  Description of Artificial Sequence: Synthetic oligonucleotide
  Antisense strand to SEQ ID NO: 129194
uaucuacaaaggagagaaa

SEQ ID NO: 129196 - RNA, 19 nt, Artificial Sequence
  Description of Artificial Sequence: Synthetic oligonucleotide
  Sense strand starting at position 1344 of SEQ ID NO: 1651
cucuccuuuguagauaaga

SEQ ID NO: 129197 - RNA, 19 nt, Artificial Sequence
  Description of Artificial Sequence: Synthetic oligonucleotide
  Antisense strand to SEQ ID NO: 129196
ucuuaucuacaaaggagag

SEQ ID NO: 129198 - RNA, 19 nt, Artificial Sequence
  Description of Artificial Sequence: Synthetic oligonucleotide
  Sense strand starting at position 1392 of SEQ ID NO: 1651
cgcaguaauuuaucaggca

SEQ ID NO: 129199 - RNA, 19 nt, Artificial Sequence
  Description of Artificial Sequence: Synthetic oligonucleotide
  Antisense strand to SEQ ID NO: 129198
ugccugauaaauuacugcg

SEQ ID NO: 129200 - RNA, 19 nt, Artificial Sequence
  Description of Artificial Sequence: Synthetic oligonucleotide
  Sense strand starting at position 1452 of SEQ ID NO: 1651
ugguguaauacucgaggca

SEQ ID NO: 129201 - RNA, 19 nt, Artificial Sequence
  Description of Artificial Sequence: Synthetic oligonucleotide
  Antisense strand to SEQ ID NO: 129200
ugccucgaguauuacacca

SEQ ID NO: 129202 - RNA, 19 nt, Artificial Sequence
  Description of Artificial Sequence: Synthetic oligonucleotide
  Sense strand starting at position 1453 of SEQ ID NO: 1651
gguguaauacucgaggcaa

SEQ ID NO: 129203 - RNA, 19 nt, Artificial Sequence
  Description of Artificial Sequence: Synthetic oligonucleotide
  Antisense strand to SEQ ID NO: 129202
uugccucgaguauuacacc

SEQ ID NO: 129204 - RNA, 19 nt, Artificial Sequence
  Description of Artificial Sequence: Synthetic oligonucleotide
  Sense strand starting at position 1847 of SEQ ID NO: 1651
caucgaucuggagacggua

SEQ ID NO: 129205 - RNA, 19 nt, Artificial Sequence
  Description of Artificial Sequence: Synthetic oligonucleotide
  Antisense strand to SEQ ID NO: 129204
uaccgucuccagaucgaug

SEQ ID NO: 129206 - RNA, 19 nt, Artificial Sequence
  Description of Artificial Sequence: Synthetic oligonucleotide
  Sense strand starting at position 1996 of SEQ ID NO: 1651
gcccuagcucugcucuuau

SEQ ID NO: 129207 - RNA, 19 nt, Artificial Sequence
  Description of Artificial Sequence: Synthetic oligonucleotide
  Antisense strand to SEQ ID NO: 129206
auaagagcagagcuagggc

SEQ ID NO: 129208 - RNA, 19 nt, Artificial Sequence
  Description of Artificial Sequence: Synthetic oligonucleotide
  Sense strand starting at position 2008 of SEQ ID NO: 1651
cucuuauuccggcaaacag

SEQ ID NO: 129209 - RNA, 19 nt, Artificial Sequence
  Description of Artificial Sequence: Synthetic oligonucleotide
  Antisense strand to SEQ ID NO: 129208
cuguuugccggaauaagag

SEQ ID NO: 129210 - RNA, 19 nt, Artificial Sequence
  Description of Artificial Sequence: Synthetic oligonucleotide
  Sense strand starting at position 2290 of SEQ ID NO: 1651
augcacgaagcuuaucaga

SEQ ID NO: 129211 - RNA, 19 nt, Artificial Sequence
  Description of Artificial Sequence: Synthetic oligonucleotide
  Antisense strand to SEQ ID NO: 129210
ucugauaagcuucgugcau

SEQ ID NO: 129212 - RNA, 19 nt, Artificial Sequence
  Description of Artificial Sequence: Synthetic oligonucleotide
  Sense strand starting at position 2416 of SEQ ID NO: 1651
ggaacaaauugcucuguuu

SEQ ID NO: 129213 - RNA, 19 nt, Artificial Sequence
  Description of Artificial Sequence: Synthetic oligonucleotide
  Antisense strand to SEQ ID NO: 129212
aaacagagcaauuuguucc

SEQ ID NO: 129214 - RNA, 19 nt, Artificial Sequence
  Description of Artificial Sequence: Synthetic oligonucleotide
  Sense strand starting at position 2467 of SEQ ID NO: 1651
guuggcuccuguuuagaaa

SEQ ID NO: 129215 - RNA, 19 nt, Artificial Sequence
  Description of Artificial Sequence: Synthetic oligonucleotide
  Antisense strand to SEQ ID NO: 129214
uuucuaaacaggagccaac

SEQ ID NO: 129216 - RNA, 19 nt, Artificial Sequence
  Description of Artificial Sequence: Synthetic oligonucleotide
  Sense strand starting at position 2468 of SEQ ID NO: 1651
uuggcuccuguuuagaaau

SEQ ID NO: 129217 - RNA, 19 nt, Artificial Sequence
  Description of Artificial Sequence: Synthetic oligonucleotide
  Antisense strand to SEQ ID NO: 129216
auuucuaaacaggagccaa

SEQ ID NO: 129218 - RNA, 19 nt, Artificial Sequence
  Description of Artificial Sequence: Synthetic oligonucleotide
  Sense strand starting at position 2528 of SEQ ID NO: 1651
uuugcaacucuagacaagu

SEQ ID NO: 129219 - RNA, 19 nt, Artificial Sequence
  Description of Artificial Sequence: Synthetic oligonucleotide
  Antisense strand to SEQ ID NO: 129218
acuugucuagaguugcaaa

SEQ ID NO: 129220 - RNA, 19 nt, Artificial Sequence
  Description of Artificial Sequence: Synthetic oligonucleotide
  Sense strand starting at position 2619 of SEQ ID NO: 1651
ugauguauuccacaaguga

SEQ ID NO: 129221 - RNA, 19 nt, Artificial Sequence
  Description of Artificial Sequence: Synthetic oligonucleotide
  Antisense strand to SEQ ID NO: 129220
ucacuuguggaauacauca

SEQ ID NO: 129222 - RNA, 19 nt, Artificial Sequence
  Description of Artificial Sequence: Synthetic oligonucleotide
  Sense strand starting at position 3577 of SEQ ID NO: 1651
gcuaguauuacaggaauga

SEQ ID NO: 129223 - RNA, 19 nt, Artificial Sequence
  Description of Artificial Sequence: Synthetic oligonucleotide
  Antisense strand to SEQ ID NO: 129222
ucauuccuguaauacuagc

SEQ ID NO: 129224 - RNA, 19 nt, Artificial Sequence
  Description of Artificial Sequence: Synthetic oligonucleotide
  Sense strand starting at position 3652 of SEQ ID NO: 1651
ugugaaauauuuggaacau

SEQ ID NO: 129225 - RNA, 19 nt, Artificial Sequence
  Description of Artificial Sequence: Synthetic oligonucleotide
  Antisense strand to SEQ ID NO: 129224
auguuccaaauauuucaca

SEQ ID NO: 129226 - RNA, 19 nt, Artificial Sequence
  Description of Artificial Sequence: Synthetic oligonucleotide
  Sense strand starting at position 3653 of SEQ ID NO: 1651
gugaaauauuuggaacauu

SEQ ID NO: 129227 - RNA, 19 nt, Artificial Sequence
  Description of Artificial Sequence: Synthetic oligonucleotide
  Antisense strand to SEQ ID NO: 129226
aauguuccaaauauuucac

SEQ ID NO: 129228 - RNA, 19 nt, Artificial Sequence
  Description of Artificial Sequence: Synthetic oligonucleotide
  Sense strand starting at position 3699 of SEQ ID NO: 1651
ucccaauauccagagacgu

SEQ ID NO: 129229 - RNA, 19 nt, Artificial Sequence
  Description of Artificial Sequence: Synthetic oligonucleotide
  Antisense strand to SEQ ID NO: 129228
acgucucuggauauuggga

SEQ ID NO: 129230 - RNA, 19 nt, Artificial Sequence
  Description of Artificial Sequence: Synthetic oligonucleotide
  Sense strand starting at position 3920 of SEQ ID NO: 1651
gauaauuaagaguacguac

SEQ ID NO: 129231 - RNA, 19 nt, Artificial Sequence
  Description of Artificial Sequence: Synthetic oligonucleotide
  Antisense strand to SEQ ID NO: 129230
guacguacucuuaauuauc

SEQ ID NO: 129232 - RNA, 19 nt, Artificial Sequence
  Description of Artificial Sequence: Synthetic oligonucleotide
  Sense strand starting at position 3922 of SEQ ID NO: 1651
uaauuaagaguacguacaa

SEQ ID NO: 129233 - RNA, 19 nt, Artificial Sequence
  Description of Artificial Sequence: Synthetic oligonucleotide
  Antisense strand to SEQ ID NO: 129232
uuguacguacucuuaauua

SEQ ID NO: 129234 - RNA, 19 nt, Artificial Sequence
  Description of Artificial Sequence: Synthetic oligonucleotide
  Sense strand starting at position 3933 of SEQ ID NO: 1651
acguacaacguguauguaa

SEQ ID NO: 129235 - RNA, 19 nt, Artificial Sequence
  Description of Artificial Sequence: Synthetic oligonucleotide
  Antisense strand to SEQ ID NO: 129234
uuacauacacguuguacgu

SEQ ID NO: 129236 - RNA, 19 nt, Artificial Sequence
  Description of Artificial Sequence: Synthetic oligonucleotide
  Sense strand starting at position 1765 of SEQ ID NO: 1652
gagcuucggugccaacaaa

SEQ ID NO: 129237 - RNA, 19 nt, Artificial Sequence
  Description of Artificial Sequence: Synthetic oligonucleotide
  Antisense strand to SEQ ID NO: 129236
uuuguuggcaccgaagcuc

SEQ ID NO: 129238 - RNA, 19 nt, Artificial Sequence
  Description of Artificial Sequence: Synthetic oligonucleotide
  Sense strand starting at position 1746 of SEQ ID NO: 1652
uccugaccucgcgggauuu

SEQ ID NO: 129239 - RNA, 19 nt, Artificial Sequence
  Description of Artificial Sequence: Synthetic oligonucleotide
  Antisense strand to SEQ ID NO: 129238
aaaucccgcgaggucagga

SEQ ID NO: 129240 - RNA, 19 nt, Artificial Sequence
  Description of Artificial Sequence: Synthetic oligonucleotide
  Sense strand starting at position 1642 of SEQ ID NO: 1652
cgugaauacccugacuccu

SEQ ID NO: 129241 - RNA, 19 nt, Artificial Sequence
  Description of Artificial Sequence: Synthetic oligonucleotide
  Antisense strand to SEQ ID NO: 129240
aggagucaggguauucacg

SEQ ID NO: 129242 - RNA, 19 nt, Artificial Sequence
  Description of Artificial Sequence: Synthetic oligonucleotide
  Sense strand starting at position 1632 of SEQ ID NO: 1652
guuaucagugcgugaauac

SEQ ID NO: 129243 - RNA, 19 nt, Artificial Sequence
  Description of Artificial Sequence: Synthetic oligonucleotide
  Antisense strand to SEQ ID NO: 129242
guauucacgcacugauaac

SEQ ID NO: 129244 - RNA, 19 nt, Artificial Sequence
  Description of Artificial Sequence: Synthetic oligonucleotide
  Sense strand starting at position 1631 of SEQ ID NO: 1652
gguuaucagugcgugaaua

SEQ ID NO: 129245 - RNA, 19 nt, Artificial Sequence
  Description of Artificial Sequence: Synthetic oligonucleotide
  Antisense strand to SEQ ID NO: 129244
uauucacgcacugauaacc

SEQ ID NO: 129246 - RNA, 19 nt, Artificial Sequence
  Description of Artificial Sequence: Synthetic oligonucleotide
  Sense strand starting at position 1630 of SEQ ID NO: 1652
agguuaucagugcgugaau

SEQ ID NO: 129247 - RNA, 19 nt, Artificial Sequence
  Description of Artificial Sequence: Synthetic oligonucleotide
  Antisense strand to SEQ ID NO: 129246
auucacgcacugauaaccu

SEQ ID NO: 129248 - RNA, 19 nt, Artificial Sequence
  Description of Artificial Sequence: Synthetic oligonucleotide
  Sense strand starting at position 1628 of SEQ ID NO: 1652
acagguuaucagugcguga

SEQ ID NO: 129249 - RNA, 19 nt, Artificial Sequence
  Description of Artificial Sequence: Synthetic oligonucleotide
  Antisense strand to SEQ ID NO: 129248
ucacgcacugauaaccugu

SEQ ID NO: 129250 - RNA, 19 nt, Artificial Sequence
  Description of Artificial Sequence: Synthetic oligonucleotide
  Sense strand starting at position 1309 of SEQ ID NO: 1652
gcuuacgucuugcucacau

SEQ ID NO: 129251 - RNA, 19 nt, Artificial Sequence
  Description of Artificial Sequence: Synthetic oligonucleotide
  Antisense strand to SEQ ID NO: 129250
augugagcaagacguaagc

SEQ ID NO: 129252 - RNA, 19 nt, Artificial Sequence
  Description of Artificial Sequence: Synthetic oligonucleotide
  Sense strand starting at position 1308 of SEQ ID NO: 1652
ggcuuacgucuugcucaca

SEQ ID NO: 129253 - RNA, 19 nt, Artificial Sequence
  Description of Artificial Sequence: Synthetic oligonucleotide
  Antisense strand to SEQ ID NO: 129252
ugugagcaagacguaagcc

SEQ ID NO: 129254 - RNA, 19 nt, Artificial Sequence
  Description of Artificial Sequence: Synthetic oligonucleotide
  Sense strand starting at position 1273 of SEQ ID NO: 1652
ucacuugacugacaagaag

SEQ ID NO: 129255 - RNA, 19 nt, Artificial Sequence
  Description of Artificial Sequence: Synthetic oligonucleotide
  Antisense strand to SEQ ID NO: 129254
cuucuugucagucaaguga

SEQ ID NO: 129256 - RNA, 19 nt, Artificial Sequence
  Description of Artificial Sequence: Synthetic oligonucleotide
  Sense strand starting at position 1269 of SEQ ID NO: 1652
gcugucacuugacugacaa

SEQ ID NO: 129257 - RNA, 19 nt, Artificial Sequence
  Description of Artificial Sequence: Synthetic oligonucleotide
  Antisense strand to SEQ ID NO: 129256
uugucagucaagugacagc

SEQ ID NO: 129258 - RNA, 19 nt, Artificial Sequence
  Description of Artificial Sequence: Synthetic oligonucleotide
  Sense strand starting at position 1259 of SEQ ID NO: 1652
agguacuauugcugucacu

SEQ ID NO: 129259 - RNA, 19 nt, Artificial Sequence
  Description of Artificial Sequence: Synthetic oligonucleotide
  Antisense strand to SEQ ID NO: 129258
agugacagcaauaguaccu

SEQ ID NO: 129260 - RNA, 19 nt, Artificial Sequence
  Description of Artificial Sequence: Synthetic oligonucleotide
  Sense strand starting at position 1253 of SEQ ID NO: 1652
ugagaaagguacuauugcu

SEQ ID NO: 129261 - RNA, 19 nt, Artificial Sequence
  Description of Artificial Sequence: Synthetic oligonucleotide
  Antisense strand to SEQ ID NO: 129260
agcaauaguaccuuucuca

SEQ ID NO: 129262 - RNA, 19 nt, Artificial Sequence
  Description of Artificial Sequence: Synthetic oligonucleotide
  Sense strand starting at position 1189 of SEQ ID NO: 1652
ugugucagguccuguccua

SEQ ID NO: 129263 - RNA, 19 nt, Artificial Sequence
  Description of Artificial Sequence: Synthetic oligonucleotide
  Antisense strand to SEQ ID NO: 129262
uaggacaggaccugacaca

SEQ ID NO: 129264 - RNA, 19 nt, Artificial Sequence
  Description of Artificial Sequence: Synthetic oligonucleotide
  Sense strand starting at position 1138 of SEQ ID NO: 1652
gcaaucucccagugaagaa

SEQ ID NO: 129265 - RNA, 19 nt, Artificial Sequence
  Description of Artificial Sequence: Synthetic oligonucleotide
  Antisense strand to SEQ ID NO: 129264
uucuucacugggagauugc

SEQ ID NO: 129266 - RNA, 19 nt, Artificial Sequence
  Description of Artificial Sequence: Synthetic oligonucleotide
  Sense strand starting at position 1135 of SEQ ID NO: 1652
cuggcaaucucccagugaa

SEQ ID NO: 129267 - RNA, 19 nt, Artificial Sequence
  Description of Artificial Sequence: Synthetic oligonucleotide
  Antisense strand to SEQ ID NO: 129266
uucacugggagauugccag

SEQ ID NO: 129268 - RNA, 19 nt, Artificial Sequence
  Description of Artificial Sequence: Synthetic oligonucleotide
  Sense strand starting at position 884 of SEQ ID NO: 1652
cgucucuacuaguacagau

SEQ ID NO: 129269 - RNA, 19 nt, Artificial Sequence
  Description of Artificial Sequence: Synthetic oligonucleotide
  Antisense strand to SEQ ID NO: 129268
aucuguacuaguagagacg

SEQ ID NO: 129270 - RNA, 19 nt, Artificial Sequence
  Description of Artificial Sequence: Synthetic oligonucleotide
  Sense strand starting at position 881 of SEQ ID NO: 1652
ccucgucucuacuaguaca

SEQ ID NO: 129271 - RNA, 19 nt, Artificial Sequence
  Description of Artificial Sequence: Synthetic oligonucleotide
  Antisense strand to SEQ ID NO: 129270
uguacuaguagagacgagg

SEQ ID NO: 129272 - RNA, 19 nt, Artificial Sequence
  Description of Artificial Sequence: Synthetic oligonucleotide
  Sense strand starting at position 743 of SEQ ID NO: 1652
acucucgagucauauaaau

SEQ ID NO: 129273 - RNA, 19 nt, Artificial Sequence
  Description of Artificial Sequence: Synthetic oligonucleotide
  Antisense strand to SEQ ID NO: 129272
auuuauaugacucgagagu

SEQ ID NO: 129274 - RNA, 19 nt, Artificial Sequence
  Description of Artificial Sequence: Synthetic oligonucleotide
  Sense strand starting at position 605 of SEQ ID NO: 1652
agaugagaguccugaugaa

SEQ ID NO: 129275 - RNA, 19 nt, Artificial Sequence
  Description of Artificial Sequence: Synthetic oligonucleotide
  Antisense strand to SEQ ID NO: 129274
uucaucaggacucucaucu

SEQ ID NO: 129276 - RNA, 19 nt, Artificial Sequence
  Description of Artificial Sequence: Synthetic oligonucleotide
  Sense strand starting at position 549 of SEQ ID NO: 1652
auuaauuaugcguaggaaa

SEQ ID NO: 129277 - RNA, 19 nt, Artificial Sequence
  Description of Artificial Sequence: Synthetic oligonucleotide
  Antisense strand to SEQ ID NO: 129276
uuuccuacgcauaauuaau

SEQ ID NO: 129278 - RNA, 19 nt, Artificial Sequence
  Description of Artificial Sequence: Synthetic oligonucleotide
  Sense strand starting at position 548 of SEQ ID NO: 1652
cauuaauuaugcguaggaa

SEQ ID NO: 129279 - RNA, 19 nt, Artificial Sequence
  Description of Artificial Sequence: Synthetic oligonucleotide
  Antisense strand to SEQ ID NO: 129278
uuccuacgcauaauuaaug

SEQ ID NO: 129280 - RNA, 19 nt, Artificial Sequence
  Description of Artificial Sequence: Synthetic oligonucleotide
  Sense strand starting at position 547 of SEQ ID NO: 1652
ucauuaauuaugcguagga

SEQ ID NO: 129281 - RNA, 19 nt, Artificial Sequence
  Description of Artificial Sequence: Synthetic oligonucleotide
  Antisense strand to SEQ ID NO: 129280
uccuacgcauaauuaauga

SEQ ID NO: 129282 - RNA, 19 nt, Artificial Sequence
  Description of Artificial Sequence: Synthetic oligonucleotide
  Sense strand starting at position 525 of SEQ ID NO: 1652
augagucaugagugaagac

SEQ ID NO: 129283 - RNA, 19 nt, Artificial Sequence
  Description of Artificial Sequence: Synthetic oligonucleotide
  Antisense strand to SEQ ID NO: 129282
gucuucacucaugacucau

SEQ ID NO: 129284 - RNA, 19 nt, Artificial Sequence
  Description of Artificial Sequence: Synthetic oligonucleotide
  Sense strand starting at position 521 of SEQ ID NO: 1652
uuugaugagucaugaguga

SEQ ID NO: 129285 - RNA, 19 nt, Artificial Sequence
  Description of Artificial Sequence: Synthetic oligonucleotide
  Antisense strand to SEQ ID NO: 129284
ucacucaugacucaucaaa

SEQ ID NO: 129286 - RNA, 19 nt, Artificial Sequence
  Description of Artificial Sequence: Synthetic oligonucleotide
  Sense strand starting at position 514 of SEQ ID NO: 1652
ucaaauauuugaugaguca

SEQ ID NO: 129287 - RNA, 19 nt, Artificial Sequence
  Description of Artificial Sequence: Synthetic oligonucleotide
  Antisense strand to SEQ ID NO: 129286
ugacucaucaaauauuuga

SEQ ID NO: 129288 - RNA, 19 nt, Artificial Sequence
  Description of Artificial Sequence: Synthetic oligonucleotide
  Sense strand starting at position 512 of SEQ ID NO: 1652
acucaaauauuugaugagu

SEQ ID NO: 129289 - RNA, 19 nt, Artificial Sequence
  Description of Artificial Sequence: Synthetic oligonucleotide
  Antisense strand to SEQ ID NO: 129288
acucaucaaauauuugagu

SEQ ID NO: 129290 - RNA, 19 nt, Artificial Sequence
  Description of Artificial Sequence: Synthetic oligonucleotide
  Sense strand starting at position 481 of SEQ ID NO: 1652
ccuugucugccucauggua

SEQ ID NO: 129291 - RNA, 19 nt, Artificial Sequence
  Description of Artificial Sequence: Synthetic oligonucleotide
  Antisense strand to SEQ ID NO: 129290
uaccaugaggcagacaagg

SEQ ID NO: 129292 - RNA, 19 nt, Artificial Sequence
  Description of Artificial Sequence: Synthetic oligonucleotide
  Sense strand starting at position 438 of SEQ ID NO: 1652
ggcgucucuacgcauugaa

SEQ ID NO: 129293 - RNA, 19 nt, Artificial Sequence
  Description of Artificial Sequence: Synthetic oligonucleotide
  Antisense strand to SEQ ID NO: 129292
uucaaugcguagagacgcc

SEQ ID NO: 129294 - RNA, 19 nt, Artificial Sequence
  Description of Artificial Sequence: Synthetic oligonucleotide
  Sense strand starting at position 416 of SEQ ID NO: 1652
cagccuaugugaugauguu

SEQ ID NO: 129295 - RNA, 19 nt, Artificial Sequence
  Description of Artificial Sequence: Synthetic oligonucleotide
  Antisense strand to SEQ ID NO: 129294
aacaucaucacauaggcug

SEQ ID NO: 129296 - RNA, 19 nt, Artificial Sequence
  Description of Artificial Sequence: Synthetic oligonucleotide
  Sense strand starting at position 377 of SEQ ID NO: 1652
agucacuguugacacauaa

SEQ ID NO: 129297 - RNA, 19 nt, Artificial Sequence
  Description of Artificial Sequence: Synthetic oligonucleotide
  Antisense strand to SEQ ID NO: 129296
uuaugugucaacagugacu

SEQ ID NO: 129298 - RNA, 19 nt, Artificial Sequence
  Description of Artificial Sequence: Synthetic oligonucleotide
  Sense strand starting at position 375 of SEQ ID NO: 1652
ugagucacuguugacacau

SEQ ID NO: 129299 - RNA, 19 nt, Artificial Sequence
  Description of Artificial Sequence: Synthetic oligonucleotide
  Antisense strand to SEQ ID NO: 129298
augugucaacagugacuca

SEQ ID NO: 129300 - RNA, 19 nt, Artificial Sequence
  Description of Artificial Sequence: Synthetic oligonucleotide
  Sense strand starting at position 374 of SEQ ID NO: 1652
augagucacuguugacaca

SEQ ID NO: 129301 - RNA, 19 nt, Artificial Sequence
  Description of Artificial Sequence: Synthetic oligonucleotide
  Antisense strand to SEQ ID NO: 129300
ugugucaacagugacucau

SEQ ID NO: 129302 - RNA, 19 nt, Artificial Sequence
  Description of Artificial Sequence: Synthetic oligonucleotide
  Sense strand starting at position 370 of SEQ ID NO: 1652
aggcaugagucacuguuga

SEQ ID NO: 129303 - RNA, 19 nt, Artificial Sequence
  Description of Artificial Sequence: Synthetic oligonucleotide
  Antisense strand to SEQ ID NO: 129302
ucaacagugacucaugccu

SEQ ID NO: 129304 - RNA, 19 nt, Artificial Sequence
  Description of Artificial Sequence: Synthetic oligonucleotide
  Sense strand starting at position 194 of SEQ ID NO: 1652
ccuaucuagugguaucauu

SEQ ID NO: 129305 - RNA, 19 nt, Artificial Sequence
  Description of Artificial Sequence: Synthetic oligonucleotide
  Antisense strand to SEQ ID NO: 129304
aaugauaccacuagauagg

SEQ ID NO: 129306 - RNA, 19 nt, Artificial Sequence
  Description of Artificial Sequence: Synthetic oligonucleotide
  Sense strand starting at position 1765 of SEQ ID NO: 1652
gagcuucggugccaacaaa

SEQ ID NO: 129307 - RNA, 19 nt, Artificial Sequence
  Description of Artificial Sequence: Synthetic oligonucleotide
  Antisense strand to SEQ ID NO: 129306
uuuguuggcaccgaagcuc

SEQ ID NO: 129308 - RNA, 19 nt, Artificial Sequence
  Description of Artificial Sequence: Synthetic oligonucleotide
  Sense strand starting at position 1746 of SEQ ID NO: 1652
uccugaccucgcgggauuu

SEQ ID NO: 129309 - RNA, 19 nt, Artificial Sequence
  Description of Artificial Sequence: Synthetic oligonucleotide
  Antisense strand to SEQ ID NO: 129308
aaaucccgcgaggucagga

SEQ ID NO: 129310 - RNA, 19 nt, Artificial Sequence
  Description of Artificial Sequence: Synthetic oligonucleotide
  Sense strand starting at position 1642 of SEQ ID NO: 1652
cgugaauacccugacuccu

SEQ ID NO: 129311 - RNA, 19 nt, Artificial Sequence
  Description of Artificial Sequence: Synthetic oligonucleotide
  Antisense strand to SEQ ID NO: 129310
aggagucaggguauucacg

SEQ ID NO: 129312 - RNA, 19 nt, Artificial Sequence
  Description of Artificial Sequence: Synthetic oligonucleotide
  Sense strand starting at position 1632 of SEQ ID NO: 1652
guuaucagugcgugaauac

SEQ ID NO: 129313 - RNA, 19 nt, Artificial Sequence
  Description of Artificial Sequence: Synthetic oligonucleotide
  Antisense strand to SEQ ID NO: 129312
guauucacgcacugauaac

SEQ ID NO: 129314 - RNA, 19 nt, Artificial Sequence
  Description of Artificial Sequence: Synthetic oligonucleotide
  Sense strand starting at position 1631 of SEQ ID NO: 1652
gguuaucagugcgugaaua

SEQ ID NO: 129315 - RNA, 19 nt, Artificial Sequence
  Description of Artificial Sequence: Synthetic oligonucleotide
  Antisense strand to SEQ ID NO: 129314
uauucacgcacugauaacc

SEQ ID NO: 129316 - RNA, 19 nt, Artificial Sequence
  Description of Artificial Sequence: Synthetic oligonucleotide
  Sense strand starting at position 1630 of SEQ ID NO: 1652
agguuaucagugcgugaau

SEQ ID NO: 129317 - RNA, 19 nt, Artificial Sequence
  Description of Artificial Sequence: Synthetic oligonucleotide
  Antisense strand to SEQ ID NO: 129316
auucacgcacugauaaccu

SEQ ID NO: 129318 - RNA, 19 nt, Artificial Sequence
  Description of Artificial Sequence: Synthetic oligonucleotide
  Sense strand starting at position 1628 of SEQ ID NO: 1652
acagguuaucagugcguga

SEQ ID NO: 129319 - RNA, 19 nt, Artificial Sequence
  Description of Artificial Sequence: Synthetic oligonucleotide
  Antisense strand to SEQ ID NO: 129318
ucacgcacugauaaccugu

SEQ ID NO: 129320 - RNA, 19 nt, Artificial Sequence
  Description of Artificial Sequence: Synthetic oligonucleotide
  Sense strand starting at position 1309 of SEQ ID NO: 1652
gcuuacgucuugcucacau

SEQ ID NO: 129321 - RNA, 19 nt, Artificial Sequence
  Description of Artificial Sequence: Synthetic oligonucleotide
  Antisense strand to SEQ ID NO: 129320
augugagcaagacguaagc

SEQ ID NO: 129322 - RNA, 19 nt, Artificial Sequence
  Description of Artificial Sequence: Synthetic oligonucleotide
  Sense strand starting at position 1308 of SEQ ID NO: 1652
ggcuuacgucuugcucaca

SEQ ID NO: 129323 - RNA, 19 nt, Artificial Sequence
  Description of Artificial Sequence: Synthetic oligonucleotide
  Antisense strand to SEQ ID NO: 129322
ugugagcaagacguaagcc

SEQ ID NO: 129324 - RNA, 19 nt, Artificial Sequence
  Description of Artificial Sequence: Synthetic oligonucleotide
  Sense strand starting at position 1273 of SEQ ID NO: 1652
ucacuugacugacaagaag

SEQ ID NO: 129325 - RNA, 19 nt, Artificial Sequence
  Description of Artificial Sequence: Synthetic oligonucleotide
  Antisense strand to SEQ ID NO: 129324
cuucuugucagucaaguga

SEQ ID NO: 129326 - RNA, 19 nt, Artificial Sequence
  Description of Artificial Sequence: Synthetic oligonucleotide
  Sense strand starting at position 1269 of SEQ ID NO: 1652
gcugucacuugacugacaa

SEQ ID NO: 129327 - RNA, 19 nt, Artificial Sequence
  Description of Artificial Sequence: Synthetic oligonucleotide
  Antisense strand to SEQ ID NO: 129326
uugucagucaagugacagc

SEQ ID NO: 129328 - RNA, 19 nt, Artificial Sequence
  Description of Artificial Sequence: Synthetic oligonucleotide
  Sense strand starting at position 1259 of SEQ ID NO: 1652
agguacuauugcugucacu

SEQ ID NO: 129329 - RNA, 19 nt, Artificial Sequence
  Description of Artificial Sequence: Synthetic oligonucleotide
  Antisense strand to SEQ ID NO: 129328
agugacagcaauaguaccu

SEQ ID NO: 129330 - RNA, 19 nt, Artificial Sequence
  Description of Artificial Sequence: Synthetic oligonucleotide
  Sense strand starting at position 1253 of SEQ ID NO: 1652
ugagaaagguacuauugcu

SEQ ID NO: 129331 - RNA, 19 nt, Artificial Sequence
  Description of Artificial Sequence: Synthetic oligonucleotide
  Antisense strand to SEQ ID NO: 129330
agcaauaguaccuuucuca

SEQ ID NO: 129332 - RNA, 19 nt, Artificial Sequence
  Description of Artificial Sequence: Synthetic oligonucleotide
  Sense strand starting at position 1189 of SEQ ID NO: 1652
ugugucagguccuguccua

SEQ ID NO: 129333 - RNA, 19 nt, Artificial Sequence
  Description of Artificial Sequence: Synthetic oligonucleotide
  Antisense strand to SEQ ID NO: 129332
uaggacaggaccugacaca

SEQ ID NO: 129334 - RNA, 19 nt, Artificial Sequence
  Description of Artificial Sequence: Synthetic oligonucleotide
  Sense strand starting at position 1138 of SEQ ID NO: 1652
gcaaucucccagugaagaa

SEQ ID NO: 129335 - RNA, 19 nt, Artificial Sequence
  Description of Artificial Sequence: Synthetic oligonucleotide
  Antisense strand to SEQ ID NO: 129334
uucuucacugggagauugc

SEQ ID NO: 129336 - RNA, 19 nt, Artificial Sequence
  Description of Artificial Sequence: Synthetic oligonucleotide
  Sense strand starting at position 1135 of SEQ ID NO: 1652
cuggcaaucucccagugaa

SEQ ID NO: 129337 - RNA, 19 nt, Artificial Sequence
  Description of Artificial Sequence: Synthetic oligonucleotide
  Antisense strand to SEQ ID NO: 129336
uucacugggagauugccag

SEQ ID NO: 129338 - RNA, 19 nt, Artificial Sequence
  Description of Artificial Sequence: Synthetic oligonucleotide
  Sense strand starting at position 884 of SEQ ID NO: 1652
cgucucuacuaguacagau

SEQ ID NO: 129339 - RNA, 19 nt, Artificial Sequence
  Description of Artificial Sequence: Synthetic oligonucleotide
  Antisense strand to SEQ ID NO: 129338
aucuguacuaguagagacg

SEQ ID NO: 129340 - RNA, 19 nt, Artificial Sequence
  Description of Artificial Sequence: Synthetic oligonucleotide
  Sense strand starting at position 881 of SEQ ID NO: 1652
ccucgucucuacuaguaca

SEQ ID NO: 129341 - RNA, 19 nt, Artificial Sequence
  Description of Artificial Sequence: Synthetic oligonucleotide
  Antisense strand to SEQ ID NO: 129340
uguacuaguagagacgagg

SEQ ID NO: 129342 - RNA, 19 nt, Artificial Sequence
  Description of Artificial Sequence: Synthetic oligonucleotide
  Sense strand starting at position 743 of SEQ ID NO: 1652
acucucgagucauauaaau

SEQ ID NO: 129343 - RNA, 19 nt, Artificial Sequence
  Description of Artificial Sequence: Synthetic oligonucleotide
  Antisense strand to SEQ ID NO: 129342
auuuauaugacucgagagu

SEQ ID NO: 129344 - RNA, 19 nt, Artificial Sequence
  Description of Artificial Sequence: Synthetic oligonucleotide
  Sense strand starting at position 605 of SEQ ID NO: 1652
agaugagaguccugaugaa

SEQ ID NO: 129345 - RNA, 19 nt, Artificial Sequence
  Description of Artificial Sequence: Synthetic oligonucleotide
  Antisense strand to SEQ ID NO: 129344
uucaucaggacucucaucu

SEQ ID NO: 129346 - RNA, 19 nt, Artificial Sequence
  Description of Artificial Sequence: Synthetic oligonucleotide
  Sense strand starting at position 549 of SEQ ID NO: 1652
auuaauuaugcguaggaaa

SEQ ID NO: 129347 - RNA, 19 nt, Artificial Sequence
  Description of Artificial Sequence: Synthetic oligonucleotide
  Antisense strand to SEQ ID NO: 129346
uuuccuacgcauaauuaau

SEQ ID NO: 129348 - RNA, 19 nt, Artificial Sequence
  Description of Artificial Sequence: Synthetic oligonucleotide
  Sense strand starting at position 548 of SEQ ID NO: 1652
cauuaauuaugcguaggaa

SEQ ID NO: 129349 - RNA, 19 nt, Artificial Sequence
  Description of Artificial Sequence: Synthetic oligonucleotide
  Antisense strand to SEQ ID NO: 129348
uuccuacgcauaauuaaug

SEQ ID NO: 129350 - RNA, 19 nt, Artificial Sequence
  Description of Artificial Sequence: Synthetic oligonucleotide
  Sense strand starting at position 547 of SEQ ID NO: 1652
ucauuaauuaugcguagga

SEQ ID NO: 129351 - RNA, 19 nt, Artificial Sequence
  Description of Artificial Sequence: Synthetic oligonucleotide
  Antisense strand to SEQ ID NO: 129350
uccuacgcauaauuaauga

SEQ ID NO: 129352 - RNA, 19 nt, Artificial Sequence
  Description of Artificial Sequence: Synthetic oligonucleotide
  Sense strand starting at position 525 of SEQ ID NO: 1652
augagucaugagugaagac

SEQ ID NO: 129353 - RNA, 19 nt, Artificial Sequence
  Description of Artificial Sequence: Synthetic oligonucleotide
  Antisense strand to SEQ ID NO: 129352
gucuucacucaugacucau

SEQ ID NO: 129354 - RNA, 19 nt, Artificial Sequence
  Description of Artificial Sequence: Synthetic oligonucleotide
  Sense strand starting at position 521 of SEQ ID NO: 1652
uuugaugagucaugaguga

SEQ ID NO: 129355 - RNA, 19 nt, Artificial Sequence
  Description of Artificial Sequence: Synthetic oligonucleotide
  Antisense strand to SEQ ID NO: 129354
ucacucaugacucaucaaa

SEQ ID NO: 129356 - RNA, 19 nt, Artificial Sequence
  Description of Artificial Sequence: Synthetic oligonucleotide
  Sense strand starting at position 514 of SEQ ID NO: 1652
ucaaauauuugaugaguca

SEQ ID NO: 129357 - RNA, 19 nt, Artificial Sequence
  Description of Artificial Sequence: Synthetic oligonucleotide
  Antisense strand to SEQ ID NO: 129356
ugacucaucaaauauuuga

SEQ ID NO: 129358 - RNA, 19 nt, Artificial Sequence
  Description of Artificial Sequence: Synthetic oligonucleotide
  Sense strand starting at position 512 of SEQ ID NO: 1652
acucaaauauuugaugagu

SEQ ID NO: 129359 - RNA, 19 nt, Artificial Sequence
  Description of Artificial Sequence: Synthetic oligonucleotide
  Antisense strand to SEQ ID NO: 129358
acucaucaaauauuugagu

SEQ ID NO: 129360 - RNA, 19 nt, Artificial Sequence
  Description of Artificial Sequence: Synthetic oligonucleotide
  Sense strand starting at position 481 of SEQ ID NO: 1652
ccuugucugccucauggua

SEQ ID NO: 129361 - RNA, 19 nt, Artificial Sequence
  Description of Artificial Sequence: Synthetic oligonucleotide
  Antisense strand to SEQ ID NO: 129360
uaccaugaggcagacaagg

SEQ ID NO: 129362 - RNA, 19 nt, Artificial Sequence
  Description of Artificial Sequence: Synthetic oligonucleotide
  Sense strand starting at position 438 of SEQ ID NO: 1652
ggcgucucuacgcauugaa

SEQ ID NO: 129363 - RNA, 19 nt, Artificial Sequence
  Description of Artificial Sequence: Synthetic oligonucleotide
  Antisense strand to SEQ ID NO: 129362
uucaaugcguagagacgcc

SEQ ID NO: 129364 - RNA, 19 nt, Artificial Sequence
  Description of Artificial Sequence: Synthetic oligonucleotide
  Sense strand starting at position 416 of SEQ ID NO: 1652
cagccuaugugaugauguu

SEQ ID NO: 129365 - RNA, 19 nt, Artificial Sequence
  Description of Artificial Sequence: Synthetic oligonucleotide
  Antisense strand to SEQ ID NO: 129364
aacaucaucacauaggcug

SEQ ID NO: 129366 - RNA, 19 nt, Artificial Sequence
  Description of Artificial Sequence: Synthetic oligonucleotide
  Sense strand starting at position 377 of SEQ ID NO: 1652
agucacuguugacacauaa

SEQ ID NO: 129367 - RNA, 19 nt, Artificial Sequence
  Description of Artificial Sequence: Synthetic oligonucleotide
  Antisense strand to SEQ ID NO: 129366
uuaugugucaacagugacu

SEQ ID NO: 129368 - RNA, 19 nt, Artificial Sequence
  Description of Artificial Sequence: Synthetic oligonucleotide
  Sense strand starting at position 375 of SEQ ID NO: 1652
ugagucacuguugacacau

SEQ ID NO: 129369 - RNA, 19 nt, Artificial Sequence
  Description of Artificial Sequence: Synthetic oligonucleotide
  Antisense strand to SEQ ID NO: 129368
augugucaacagugacuca

SEQ ID NO: 129370 - RNA, 19 nt, Artificial Sequence
  Description of Artificial Sequence: Synthetic oligonucleotide
  Sense strand starting at position 374 of SEQ ID NO: 1652
augagucacuguugacaca

SEQ ID NO: 129371 - RNA, 19 nt, Artificial Sequence
  Description of Artificial Sequence: Synthetic oligonucleotide
  Antisense strand to SEQ ID NO: 129370
ugugucaacagugacucau

SEQ ID NO: 129372 - RNA, 19 nt, Artificial Sequence
  Description of Artificial Sequence: Synthetic oligonucleotide
  Sense strand starting at position 370 of SEQ ID NO: 1652
aggcaugagucacuguuga

SEQ ID NO: 129373 - RNA, 19 nt, Artificial Sequence
  Description of Artificial Sequence: Synthetic oligonucleotide
  Antisense strand to SEQ ID NO: 129372
ucaacagugacucaugccu

SEQ ID NO: 129374 - RNA, 19 nt, Artificial Sequence
  Description of Artificial Sequence: Synthetic oligonucleotide
  Sense strand starting at position 194 of SEQ ID NO: 1652
ccuaucuagugguaucauu

SEQ ID NO: 129375 - RNA, 19 nt, Artificial Sequence
  Description of Artificial Sequence: Synthetic oligonucleotide
  Antisense strand to SEQ ID NO: 129374
aaugauaccacuagauagg

SEQ ID NO: 129376 - RNA, 19 nt, Artificial Sequence
  Description of Artificial Sequence: Synthetic oligonucleotide
  Sense strand starting at position 90 of SEQ ID NO: 1653
gagugaaugacagaugugu

SEQ ID NO: 129377 - RNA, 19 nt, Artificial Sequence
  Description of Artificial Sequence: Synthetic oligonucleotide
  Antisense strand to SEQ ID NO: 129376
acacaucugucauucacuc

SEQ ID NO: 129378 - RNA, 19 nt, Artificial Sequence
  Description of Artificial Sequence: Synthetic oligonucleotide
  Sense strand starting at position 92 of SEQ ID NO: 1653
gugaaugacagauguguac

SEQ ID NO: 129379 - RNA, 19 nt, Artificial Sequence
  Description of Artificial Sequence: Synthetic oligonucleotide
  Antisense strand to SEQ ID NO: 129378
guacacaucugucauucac

SEQ ID NO: 129380 - RNA, 19 nt, Artificial Sequence
  Description of Artificial Sequence: Synthetic oligonucleotide
  Sense strand starting at position 151 of SEQ ID NO: 1653
ccagcagucuaauuccaga

SEQ ID NO: 129381 - RNA, 19 nt, Artificial Sequence
  Description of Artificial Sequence: Synthetic oligonucleotide
  Antisense strand to SEQ ID NO: 129380
ucuggaauuagacugcugg

SEQ ID NO: 129382 - RNA, 19 nt, Artificial Sequence
  Description of Artificial Sequence: Synthetic oligonucleotide
  Sense strand starting at position 238 of SEQ ID NO: 1653
uggugagauacuuagugau

SEQ ID NO: 129383 - RNA, 19 nt, Artificial Sequence
  Description of Artificial Sequence: Synthetic oligonucleotide
  Antisense strand to SEQ ID NO: 129382
aucacuaaguaucucacca

SEQ ID NO: 129384 - RNA, 19 nt, Artificial Sequence
  Description of Artificial Sequence: Synthetic oligonucleotide
  Sense strand starting at position 240 of SEQ ID NO: 1653
gugagauacuuagugauga

SEQ ID NO: 129385 - RNA, 19 nt, Artificial Sequence
  Description of Artificial Sequence: Synthetic oligonucleotide
  Antisense strand to SEQ ID NO: 129384
ucaucacuaaguaucucac

SEQ ID NO: 129386 - RNA, 19 nt, Artificial Sequence
  Description of Artificial Sequence: Synthetic oligonucleotide
  Sense strand starting at position 434 of SEQ ID NO: 1653
agaagaucuugcuuugaca

SEQ ID NO: 129387 - RNA, 19 nt, Artificial Sequence
  Description of Artificial Sequence: Synthetic oligonucleotide
  Antisense strand to SEQ ID NO: 129386
ugucaaagcaagaucuucu

SEQ ID NO: 129388 - RNA, 19 nt, Artificial Sequence
  Description of Artificial Sequence: Synthetic oligonucleotide
  Sense strand starting at position 514 of SEQ ID NO: 1653
caguccuuggcgcaagaua

SEQ ID NO: 129389 - RNA, 19 nt, Artificial Sequence
  Description of Artificial Sequence: Synthetic oligonucleotide
  Antisense strand to SEQ ID NO: 129388
uaucuugcgccaaggacug

SEQ ID NO: 129390 - RNA, 19 nt, Artificial Sequence
  Description of Artificial Sequence: Synthetic oligonucleotide
  Sense strand starting at position 535 of SEQ ID NO: 1653
guugaauuuguuuggguuu

SEQ ID NO: 129391 - RNA, 19 nt, Artificial Sequence
  Description of Artificial Sequence: Synthetic oligonucleotide
  Antisense strand to SEQ ID NO: 129390
aaacccaaacaaauucaac

SEQ ID NO: 129392 - RNA, 19 nt, Artificial Sequence
  Description of Artificial Sequence: Synthetic oligonucleotide
  Sense strand starting at position 638 of SEQ ID NO: 1653
cuuacuuugugaccagcaa

SEQ ID NO: 129393 - RNA, 19 nt, Artificial Sequence
  Description of Artificial Sequence: Synthetic oligonucleotide
  Antisense strand to SEQ ID NO: 129392
uugcuggucacaaaguaag

SEQ ID NO: 129394 - RNA, 19 nt, Artificial Sequence
  Description of Artificial Sequence: Synthetic oligonucleotide
  Sense strand starting at position 742 of SEQ ID NO: 1653
acaguagcaugauuacaau

SEQ ID NO: 129395 - RNA, 19 nt, Artificial Sequence
  Description of Artificial Sequence: Synthetic oligonucleotide
  Antisense strand to SEQ ID NO: 129394
auuguaaucaugcuacugu

SEQ ID NO: 129396 - RNA, 19 nt, Artificial Sequence
  Description of Artificial Sequence: Synthetic oligonucleotide
  Sense strand starting at position 1019 of SEQ ID NO: 1653
gugaaauggagaugcuaau

SEQ ID NO: 129397 - RNA, 19 nt, Artificial Sequence
  Description of Artificial Sequence: Synthetic oligonucleotide
  Antisense strand to SEQ ID NO: 129396
auuagcaucuccauuucac

SEQ ID NO: 129398 - RNA, 19 nt, Artificial Sequence
  Description of Artificial Sequence: Synthetic oligonucleotide
  Sense strand starting at position 1033 of SEQ ID NO: 1653
cuaauaauggcacacagua

SEQ ID NO: 129399 - RNA, 19 nt, Artificial Sequence
  Description of Artificial Sequence: Synthetic oligonucleotide
  Antisense strand to SEQ ID NO: 129398
uacugugugccauuauuag

SEQ ID NO: 129400 - RNA, 19 nt, Artificial Sequence
  Description of Artificial Sequence: Synthetic oligonucleotide
  Sense strand starting at position 1310 of SEQ ID NO: 1653
gaaagugccuucguaggaa

SEQ ID NO: 129401 - RNA, 19 nt, Artificial Sequence
  Description of Artificial Sequence: Synthetic oligonucleotide
  Antisense strand to SEQ ID NO: 129400
uuccuacgaaggcacuuuc

SEQ ID NO: 129402 - RNA, 19 nt, Artificial Sequence
  Description of Artificial Sequence: Synthetic oligonucleotide
  Sense strand starting at position 1359 of SEQ ID NO: 1653
agcugaaggucuuuggaga

SEQ ID NO: 129403 - RNA, 19 nt, Artificial Sequence
  Description of Artificial Sequence: Synthetic oligonucleotide
  Antisense strand to SEQ ID NO: 129402
ucuccaaagaccuucagcu

SEQ ID NO: 129404 - RNA, 19 nt, Artificial Sequence
  Description of Artificial Sequence: Synthetic oligonucleotide
  Sense strand starting at position 1360 of SEQ ID NO: 1653
gcugaaggucuuuggagag

SEQ ID NO: 129405 - RNA, 19 nt, Artificial Sequence
  Description of Artificial Sequence: Synthetic oligonucleotide
  Antisense strand to SEQ ID NO: 129404
cucuccaaagaccuucagc

SEQ ID NO: 129406 - RNA, 19 nt, Artificial Sequence
  Description of Artificial Sequence: Synthetic oligonucleotide
  Sense strand starting at position 2062 of SEQ ID NO: 1653
gaaauuuccugaggugaac

SEQ ID NO: 129407 - RNA, 19 nt, Artificial Sequence
  Description of Artificial Sequence: Synthetic oligonucleotide
  Antisense strand to SEQ ID NO: 129406
guucaccucaggaaauuuc

SEQ ID NO: 129408 - RNA, 19 nt, Artificial Sequence
  Description of Artificial Sequence: Synthetic oligonucleotide
  Sense strand starting at position 2122 of SEQ ID NO: 1653
aaaucucuggagugagauc

SEQ ID NO: 129409 - RNA, 19 nt, Artificial Sequence
  Description of Artificial Sequence: Synthetic oligonucleotide
  Antisense strand to SEQ ID NO: 129408
gaucucacuccagagauuu

SEQ ID NO: 129410 - RNA, 19 nt, Artificial Sequence
  Description of Artificial Sequence: Synthetic oligonucleotide
  Sense strand starting at position 2133 of SEQ ID NO: 1653
gugagaucacguuggagac

SEQ ID NO: 129411 - RNA, 19 nt, Artificial Sequence
  Description of Artificial Sequence: Synthetic oligonucleotide
  Antisense strand to SEQ ID NO: 129410
gucuccaacgugaucucac

SEQ ID NO: 129412 - RNA, 19 nt, Artificial Sequence
  Description of Artificial Sequence: Synthetic oligonucleotide
  Sense strand starting at position 2169 of SEQ ID NO: 1653
uuugccugugcguuauagu

SEQ ID NO: 129413 - RNA, 19 nt, Artificial Sequence
  Description of Artificial Sequence: Synthetic oligonucleotide
  Antisense strand to SEQ ID NO: 129412
acuauaacgcacaggcaaa

SEQ ID NO: 129414 - RNA, 19 nt, Artificial Sequence
  Description of Artificial Sequence: Synthetic oligonucleotide
  Sense strand starting at position 2186 of SEQ ID NO: 1653
guacaugugccacagcaaa

SEQ ID NO: 129415 - RNA, 19 nt, Artificial Sequence
  Description of Artificial Sequence: Synthetic oligonucleotide
  Antisense strand to SEQ ID NO: 129414
uuugcuguggcacauguac

SEQ ID NO: 129416 - RNA, 19 nt, Artificial Sequence
  Description of Artificial Sequence: Synthetic oligonucleotide
  Sense strand starting at position 2338 of SEQ ID NO: 1653
uuuauaacccgagacguca

SEQ ID NO: 129417 - RNA, 19 nt, Artificial Sequence
  Description of Artificial Sequence: Synthetic oligonucleotide
  Antisense strand to SEQ ID NO: 129416
ugacgucucggguuauaaa

SEQ ID NO: 129418 - RNA, 19 nt, Artificial Sequence
  Description of Artificial Sequence: Synthetic oligonucleotide
  Sense strand starting at position 2346 of SEQ ID NO: 1653
ccgagacgucacuaagaug

SEQ ID NO: 129419 - RNA, 19 nt, Artificial Sequence
  Description of Artificial Sequence: Synthetic oligonucleotide
  Antisense strand to SEQ ID NO: 129418
caucuuagugacgucucgg

SEQ ID NO: 129420 - RNA, 19 nt, Artificial Sequence
  Description of Artificial Sequence: Synthetic oligonucleotide
  Sense strand starting at position 2381 of SEQ ID NO: 1653
gcgagaaaccuuugauugc

SEQ ID NO: 129421 - RNA, 19 nt, Artificial Sequence
  Description of Artificial Sequence: Synthetic oligonucleotide
  Antisense strand to SEQ ID NO: 129420
gcaaucaaagguuucucgc

SEQ ID NO: 129422 - RNA, 19 nt, Artificial Sequence
  Description of Artificial Sequence: Synthetic oligonucleotide
  Sense strand starting at position 2460 of SEQ ID NO: 1653
auaguaagggagcguugaa

SEQ ID NO: 129423 - RNA, 19 nt, Artificial Sequence
  Description of Artificial Sequence: Synthetic oligonucleotide
  Antisense strand to SEQ ID NO: 129422
uucaacgcucccuuacuau

SEQ ID NO: 129424 - RNA, 19 nt, Artificial Sequence
  Description of Artificial Sequence: Synthetic oligonucleotide
  Sense strand starting at position 2470 of SEQ ID NO: 1653
agcguugaaucccuagaug

SEQ ID NO: 129425 - RNA, 19 nt, Artificial Sequence
  Description of Artificial Sequence: Synthetic oligonucleotide
  Antisense strand to SEQ ID NO: 129424
caucuagggauucaacgcu

SEQ ID NO: 129426 - RNA, 19 nt, Artificial Sequence
  Description of Artificial Sequence: Synthetic oligonucleotide
  Sense strand starting at position 2484 of SEQ ID NO: 1653
agaugagauugccugguuu

SEQ ID NO: 129427 - RNA, 19 nt, Artificial Sequence
  Description of Artificial Sequence: Synthetic oligonucleotide
  Antisense strand to SEQ ID NO: 129426
aaaccaggcaaucucaucu

SEQ ID NO: 129428 - RNA, 19 nt, Artificial Sequence
  Description of Artificial Sequence: Synthetic oligonucleotide
  Sense strand starting at position 2536 of SEQ ID NO: 1653
gaggcaggauaagaauaau

SEQ ID NO: 129429 - RNA, 19 nt, Artificial Sequence
  Description of Artificial Sequence: Synthetic oligonucleotide
  Antisense strand to SEQ ID NO: 129428
auuauucuuauccugccuc

SEQ ID NO: 129430 - RNA, 19 nt, Artificial Sequence
  Description of Artificial Sequence: Synthetic oligonucleotide
  Sense strand starting at position 2617 of SEQ ID NO: 1653
ugaguacgucgaguuguuu

SEQ ID NO: 129431 - RNA, 19 nt, Artificial Sequence
  Description of Artificial Sequence: Synthetic oligonucleotide
  Antisense strand to SEQ ID NO: 129430
aaacaacucgacguacuca

SEQ ID NO: 129432 - RNA, 19 nt, Artificial Sequence
  Description of Artificial Sequence: Synthetic oligonucleotide
  Sense strand starting at position 2775 of SEQ ID NO: 1653
acaggagaguggucagaug

SEQ ID NO: 129433 - RNA, 19 nt, Artificial Sequence
  Description of Artificial Sequence: Synthetic oligonucleotide
  Antisense strand to SEQ ID NO: 129432
caucugaccacucuccugu

SEQ ID NO: 129434 - RNA, 19 nt, Artificial Sequence
  Description of Artificial Sequence: Synthetic oligonucleotide
  Sense strand starting at position 2946 of SEQ ID NO: 1653
ugaguuuaccacugauaag

SEQ ID NO: 129435 - RNA, 19 nt, Artificial Sequence
  Description of Artificial Sequence: Synthetic oligonucleotide
  Antisense strand to SEQ ID NO: 129434
cuuaucagugguaaacuca

SEQ ID NO: 129436 - RNA, 19 nt, Artificial Sequence
  Description of Artificial Sequence: Synthetic oligonucleotide
  Sense strand starting at position 2965 of SEQ ID NO: 1653
gcccacuucccaggguuau

SEQ ID NO: 129437 - RNA, 19 nt, Artificial Sequence
  Description of Artificial Sequence: Synthetic oligonucleotide
  Antisense strand to SEQ ID NO: 129436
auaacccugggaagugggc

SEQ ID NO: 129438 - RNA, 19 nt, Artificial Sequence
  Description of Artificial Sequence: Synthetic oligonucleotide
  Sense strand starting at position 2966 of SEQ ID NO: 1653
cccacuucccaggguuaua

SEQ ID NO: 129439 - RNA, 19 nt, Artificial Sequence
  Description of Artificial Sequence: Synthetic oligonucleotide
  Antisense strand to SEQ ID NO: 129438
uauaacccugggaaguggg

SEQ ID NO: 129440 - RNA, 19 nt, Artificial Sequence
  Description of Artificial Sequence: Synthetic oligonucleotide
  Sense strand starting at position 2977 of SEQ ID NO: 1653
ggguuauaauaagaaagga

SEQ ID NO: 129441 - RNA, 19 nt, Artificial Sequence
  Description of Artificial Sequence: Synthetic oligonucleotide
  Antisense strand to SEQ ID NO: 129440
uccuuucuuauuauaaccc

SEQ ID NO: 129442 - RNA, 19 nt, Artificial Sequence
  Description of Artificial Sequence: Synthetic oligonucleotide
  Sense strand starting at position 3030 of SEQ ID NO: 1653
cuuuguaaguucucaagua

SEQ ID NO: 129443 - RNA, 19 nt, Artificial Sequence
  Description of Artificial Sequence: Synthetic oligonucleotide
  Antisense strand to SEQ ID NO: 129442
uacuugagaacuuacaaag

SEQ ID NO: 129444 - RNA, 19 nt, Artificial Sequence
  Description of Artificial Sequence: Synthetic oligonucleotide
  Sense strand starting at position 3046 of SEQ ID NO: 1653
guaucauccagauguaagg

SEQ ID NO: 129445 - RNA, 19 nt, Artificial Sequence
  Description of Artificial Sequence: Synthetic oligonucleotide
  Antisense strand to SEQ ID NO: 129444
ccuuacaucuggaugauac

SEQ ID NO: 129446 - RNA, 19 nt, Artificial Sequence
  Description of Artificial Sequence: Synthetic oligonucleotide
  Sense strand starting at position 3200 of SEQ ID NO: 1653
gaacuuacucccggagucu

SEQ ID NO: 129447 - RNA, 19 nt, Artificial Sequence
  Description of Artificial Sequence: Synthetic oligonucleotide
  Antisense strand to SEQ ID NO: 129446
agacuccgggaguaaguuc

SEQ ID NO: 129448 - RNA, 19 nt, Artificial Sequence
  Description of Artificial Sequence: Synthetic oligonucleotide
  Sense strand starting at position 3269 of SEQ ID NO: 1653
agauccagcucccugaaua

SEQ ID NO: 129449 - RNA, 19 nt, Artificial Sequence
  Description of Artificial Sequence: Synthetic oligonucleotide
  Antisense strand to SEQ ID NO: 129448
uauucagggagcuggaucu

SEQ ID NO: 129450 - RNA, 19 nt, Artificial Sequence
  Description of Artificial Sequence: Synthetic oligonucleotide
  Sense strand starting at position 3282 of SEQ ID NO: 1653
ugaauaccuagugagcgau

SEQ ID NO: 129451 - RNA, 19 nt, Artificial Sequence
  Description of Artificial Sequence: Synthetic oligonucleotide
  Antisense strand to SEQ ID NO: 129450
aucgcucacuagguauuca

SEQ ID NO: 129452 - RNA, 19 nt, Artificial Sequence
  Description of Artificial Sequence: Synthetic oligonucleotide
  Sense strand starting at position 3612 of SEQ ID NO: 1653
auacuaggcuuccuaguau

SEQ ID NO: 129453 - RNA, 19 nt, Artificial Sequence
  Description of Artificial Sequence: Synthetic oligonucleotide
  Antisense strand to SEQ ID NO: 129452
auacuaggaagccuaguau

SEQ ID NO: 129454 - RNA, 19 nt, Artificial Sequence
  Description of Artificial Sequence: Synthetic oligonucleotide
  Sense strand starting at position 3623 of SEQ ID NO: 1653
ccuaguaugccucaacuga

SEQ ID NO: 129455 - RNA, 19 nt, Artificial Sequence
  Description of Artificial Sequence: Synthetic oligonucleotide
  Antisense strand to SEQ ID NO: 129454
ucaguugaggcauacuagg

SEQ ID NO: 129456 - RNA, 19 nt, Artificial Sequence
  Description of Artificial Sequence: Synthetic oligonucleotide
  Sense strand starting at position 3821 of SEQ ID NO: 1654
gcagucuagaguuagucuu

SEQ ID NO: 129457 - RNA, 19 nt, Artificial Sequence
  Description of Artificial Sequence: Synthetic oligonucleotide
  Antisense strand to SEQ ID NO: 129456
aagacuaacucuagacugc

SEQ ID NO: 129458 - RNA, 19 nt, Artificial Sequence
  Description of Artificial Sequence: Synthetic oligonucleotide
  Sense strand starting at position 3815 of SEQ ID NO: 1654
gccauugcagucuagaguu

SEQ ID NO: 129459 - RNA, 19 nt, Artificial Sequence
  Description of Artificial Sequence: Synthetic oligonucleotide
  Antisense strand to SEQ ID NO: 129458
aacucuagacugcaauggc

SEQ ID NO: 129460 - RNA, 19 nt, Artificial Sequence
  Description of Artificial Sequence: Synthetic oligonucleotide
  Sense strand starting at position 3753 of SEQ ID NO: 1654
guggcuccaaauugugaua

SEQ ID NO: 129461 - RNA, 19 nt, Artificial Sequence
  Description of Artificial Sequence: Synthetic oligonucleotide
  Antisense strand to SEQ ID NO: 129460
uaucacaauuuggagccac

SEQ ID NO: 129462 - RNA, 19 nt, Artificial Sequence
  Description of Artificial Sequence: Synthetic oligonucleotide
  Sense strand starting at position 3664 of SEQ ID NO: 1654
gacgucuagccagauaaua

SEQ ID NO: 129463 - RNA, 19 nt, Artificial Sequence
  Description of Artificial Sequence: Synthetic oligonucleotide
  Antisense strand to SEQ ID NO: 129462
uauuaucuggcuagacguc

SEQ ID NO: 129464 - RNA, 19 nt, Artificial Sequence
  Description of Artificial Sequence: Synthetic oligonucleotide
  Sense strand starting at position 3661 of SEQ ID NO: 1654
uuagacgucuagccagaua

SEQ ID NO: 129465 - RNA, 19 nt, Artificial Sequence
  Description of Artificial Sequence: Synthetic oligonucleotide
  Antisense strand to SEQ ID NO: 129464
uaucuggcuagacgucuaa

SEQ ID NO: 129466 - RNA, 19 nt, Artificial Sequence
  Description of Artificial Sequence: Synthetic oligonucleotide
  Sense strand starting at position 3648 of SEQ ID NO: 1654
ucaagaaguuugcuuagac

SEQ ID NO: 129467 - RNA, 19 nt, Artificial Sequence
  Description of Artificial Sequence: Synthetic oligonucleotide
  Antisense strand to SEQ ID NO: 129466
gucuaagcaaacuucuuga

SEQ ID NO: 129468 - RNA, 19 nt, Artificial Sequence
  Description of Artificial Sequence: Synthetic oligonucleotide
  Sense strand starting at position 3620 of SEQ ID NO: 1654
gugaaaguguaaucuguuu

SEQ ID NO: 129469 - RNA, 19 nt, Artificial Sequence
  Description of Artificial Sequence: Synthetic oligonucleotide
  Antisense strand to SEQ ID NO: 129468
aaacagauuacacuuucac

SEQ ID NO: 129470 - RNA, 19 nt, Artificial Sequence
  Description of Artificial Sequence: Synthetic oligonucleotide
  Sense strand starting at position 3610 of SEQ ID NO: 1654
aggugucuuagugaaagug

SEQ ID NO: 129471 - RNA, 19 nt, Artificial Sequence
  Description of Artificial Sequence: Synthetic oligonucleotide
  Antisense strand to SEQ ID NO: 129470
cacuuucacuaagacaccu

SEQ ID NO: 129472 - RNA, 19 nt, Artificial Sequence
  Description of Artificial Sequence: Synthetic oligonucleotide
  Sense strand starting at position 3608 of SEQ ID NO: 1654
acaggugucuuagugaaag

SEQ ID NO: 129473 - RNA, 19 nt, Artificial Sequence
  Description of Artificial Sequence: Synthetic oligonucleotide
  Antisense strand to SEQ ID NO: 129472
cuuucacuaagacaccugu

SEQ ID NO: 129474 - RNA, 19 nt, Artificial Sequence
  Description of Artificial Sequence: Synthetic oligonucleotide
  Sense strand starting at position 3586 of SEQ ID NO: 1654
auaagaaguaugugguaaa

SEQ ID NO: 129475 - RNA, 19 nt, Artificial Sequence
  Description of Artificial Sequence: Synthetic oligonucleotide
  Antisense strand to SEQ ID NO: 129474
uuuaccacauacuucuuau

SEQ ID NO: 129476 - RNA, 19 nt, Artificial Sequence
  Description of Artificial Sequence: Synthetic oligonucleotide
  Sense strand starting at position 3584 of SEQ ID NO: 1654
aaauaagaaguauguggua

SEQ ID NO: 129477 - RNA, 19 nt, Artificial Sequence
  Description of Artificial Sequence: Synthetic oligonucleotide
  Antisense strand to SEQ ID NO: 129476
uaccacauacuucuuauuu

SEQ ID NO: 129478 - RNA, 19 nt, Artificial Sequence
  Description of Artificial Sequence: Synthetic oligonucleotide
  Sense strand starting at position 3509 of SEQ ID NO: 1654
ggaugcaguuuguuaaucu

SEQ ID NO: 129479 - RNA, 19 nt, Artificial Sequence
  Description of Artificial Sequence: Synthetic oligonucleotide
  Antisense strand to SEQ ID NO: 129478
agauuaacaaacugcaucc

SEQ ID NO: 129480 - RNA, 19 nt, Artificial Sequence
  Description of Artificial Sequence: Synthetic oligonucleotide
  Sense strand starting at position 3507 of SEQ ID NO: 1654
cgggaugcaguuuguuaau

SEQ ID NO: 129481 - RNA, 19 nt, Artificial Sequence
  Description of Artificial Sequence: Synthetic oligonucleotide
  Antisense strand to SEQ ID NO: 129480
auuaacaaacugcaucccg

SEQ ID NO: 129482 - RNA, 19 nt, Artificial Sequence
  Description of Artificial Sequence: Synthetic oligonucleotide
  Sense strand starting at position 3046 of SEQ ID NO: 1654
ccaaguuuacguuacagaa

SEQ ID NO: 129483 - RNA, 19 nt, Artificial Sequence
  Description of Artificial Sequence: Synthetic oligonucleotide
  Antisense strand to SEQ ID NO: 129482
uucuguaacguaaacuugg

SEQ ID NO: 129484 - RNA, 19 nt, Artificial Sequence
  Description of Artificial Sequence: Synthetic oligonucleotide
  Sense strand starting at position 3021 of SEQ ID NO: 1654
uuuguucguguauacacau

SEQ ID NO: 129485 - RNA, 19 nt, Artificial Sequence
  Description of Artificial Sequence: Synthetic oligonucleotide
  Antisense strand to SEQ ID NO: 129484
auguguauacacgaacaaa

SEQ ID NO: 129486 - RNA, 19 nt, Artificial Sequence
  Description of Artificial Sequence: Synthetic oligonucleotide
  Sense strand starting at position 2976 of SEQ ID NO: 1654
ugaauaauucugggccaaa

SEQ ID NO: 129487 - RNA, 19 nt, Artificial Sequence
  Description of Artificial Sequence: Synthetic oligonucleotide
  Antisense strand to SEQ ID NO: 129486
uuuggcccagaauuauuca

SEQ ID NO: 129488 - RNA, 19 nt, Artificial Sequence
  Description of Artificial Sequence: Synthetic oligonucleotide
  Sense strand starting at position 2904 of SEQ ID NO: 1654
gcaauuucuuuggaguaaa

SEQ ID NO: 129489 - RNA, 19 nt, Artificial Sequence
  Description of Artificial Sequence: Synthetic oligonucleotide
  Antisense strand to SEQ ID NO: 129488
uuuacuccaaagaaauugc

SEQ ID NO: 129490 - RNA, 19 nt, Artificial Sequence
  Description of Artificial Sequence: Synthetic oligonucleotide
  Sense strand starting at position 2775 of SEQ ID NO: 1654
acaguaaguuugcugaaag

SEQ ID NO: 129491 - RNA, 19 nt, Artificial Sequence
  Description of Artificial Sequence: Synthetic oligonucleotide
  Antisense strand to SEQ ID NO: 129490
cuuucagcaaacuuacugu

SEQ ID NO: 129492 - RNA, 19 nt, Artificial Sequence
  Description of Artificial Sequence: Synthetic oligonucleotide
  Sense strand starting at position 2774 of SEQ ID NO: 1654
cacaguaaguuugcugaaa

SEQ ID NO: 129493 - RNA, 19 nt, Artificial Sequence
  Description of Artificial Sequence: Synthetic oligonucleotide
  Antisense strand to SEQ ID NO: 129492
uuucagcaaacuuacugug

SEQ ID NO: 129494 - RNA, 19 nt, Artificial Sequence
  Description of Artificial Sequence: Synthetic oligonucleotide
  Sense strand starting at position 2767 of SEQ ID NO: 1654
guaagugcacaguaaguuu

SEQ ID NO: 129495 - RNA, 19 nt, Artificial Sequence
  Description of Artificial Sequence: Synthetic oligonucleotide
  Antisense strand to SEQ ID NO: 129494
aaacuuacugugcacuuac

SEQ ID NO: 129496 - RNA, 19 nt, Artificial Sequence
  Description of Artificial Sequence: Synthetic oligonucleotide
  Sense strand starting at position 2378 of SEQ ID NO: 1654
guagccuguauugacagau

SEQ ID NO: 129497 - RNA, 19 nt, Artificial Sequence
  Description of Artificial Sequence: Synthetic oligonucleotide
  Antisense strand to SEQ ID NO: 129496
aucugucaauacaggcuac

SEQ ID NO: 129498 - RNA, 19 nt, Artificial Sequence
  Description of Artificial Sequence: Synthetic oligonucleotide
  Sense strand starting at position 2170 of SEQ ID NO: 1654
ggaguaacugcucggucca

SEQ ID NO: 129499 - RNA, 19 nt, Artificial Sequence
  Description of Artificial Sequence: Synthetic oligonucleotide
  Antisense strand to SEQ ID NO: 129498
uggaccgagcaguuacucc

SEQ ID NO: 129500 - RNA, 19 nt, Artificial Sequence
  Description of Artificial Sequence: Synthetic oligonucleotide
  Sense strand starting at position 1580 of SEQ ID NO: 1654
gacugugaguaauucccaa

SEQ ID NO: 129501 - RNA, 19 nt, Artificial Sequence
  Description of Artificial Sequence: Synthetic oligonucleotide
  Antisense strand to SEQ ID NO: 129500
uugggaauuacucacaguc

SEQ ID NO: 129502 - RNA, 19 nt, Artificial Sequence
  Description of Artificial Sequence: Synthetic oligonucleotide
  Sense strand starting at position 1576 of SEQ ID NO: 1654
uccggacugugaguaauuc

SEQ ID NO: 129503 - RNA, 19 nt, Artificial Sequence
  Description of Artificial Sequence: Synthetic oligonucleotide
  Antisense strand to SEQ ID NO: 129502
gaauuacucacaguccgga

SEQ ID NO: 129504 - RNA, 19 nt, Artificial Sequence
  Description of Artificial Sequence: Synthetic oligonucleotide
  Sense strand starting at position 1571 of SEQ ID NO: 1654
ccauuuccggacugugagu

SEQ ID NO: 129505 - RNA, 19 nt, Artificial Sequence
  Description of Artificial Sequence: Synthetic oligonucleotide
  Antisense strand to SEQ ID NO: 129504
acucacaguccggaaaugg

SEQ ID NO: 129506 - RNA, 19 nt, Artificial Sequence
  Description of Artificial Sequence: Synthetic oligonucleotide
  Sense strand starting at position 1331 of SEQ ID NO: 1654
uguuuccuuugguuaugaa

SEQ ID NO: 129507 - RNA, 19 nt, Artificial Sequence
  Description of Artificial Sequence: Synthetic oligonucleotide
  Antisense strand to SEQ ID NO: 129506
uucauaaccaaaggaaaca

SEQ ID NO: 129508 - RNA, 19 nt, Artificial Sequence
  Description of Artificial Sequence: Synthetic oligonucleotide
  Sense strand starting at position 1330 of SEQ ID NO: 1654
guguuuccuuugguuauga

SEQ ID NO: 129509 - RNA, 19 nt, Artificial Sequence
  Description of Artificial Sequence: Synthetic oligonucleotide
  Antisense strand to SEQ ID NO: 129508
ucauaaccaaaggaaacac

SEQ ID NO: 129510 - RNA, 19 nt, Artificial Sequence
  Description of Artificial Sequence: Synthetic oligonucleotide
  Sense strand starting at position 1316 of SEQ ID NO: 1654
guagacaucacgcaguguu

SEQ ID NO: 129511 - RNA, 19 nt, Artificial Sequence
  Description of Artificial Sequence: Synthetic oligonucleotide
  Antisense strand to SEQ ID NO: 129510
aacacugcgugaugucuac

SEQ ID NO: 129512 - RNA, 19 nt, Artificial Sequence
  Description of Artificial Sequence: Synthetic oligonucleotide
  Sense strand starting at position 1186 of SEQ ID NO: 1654
guuaaauguugagucauau

SEQ ID NO: 129513 - RNA, 19 nt, Artificial Sequence
  Description of Artificial Sequence: Synthetic oligonucleotide
  Antisense strand to SEQ ID NO: 129512
auaugacucaacauuuaac

SEQ ID NO: 129514 - RNA, 19 nt, Artificial Sequence
  Description of Artificial Sequence: Synthetic oligonucleotide
  Sense strand starting at position 1184 of SEQ ID NO: 1654
guguuaaauguugagucau

SEQ ID NO: 129515 - RNA, 19 nt, Artificial Sequence
  Description of Artificial Sequence: Synthetic oligonucleotide
  Antisense strand to SEQ ID NO: 129514
augacucaacauuuaacac

SEQ ID NO: 129516 - RNA, 19 nt, Artificial Sequence
  Description of Artificial Sequence: Synthetic oligonucleotide
  Sense strand starting at position 1180 of SEQ ID NO: 1654
ggaaguguuaaauguugag

SEQ ID NO: 129517 - RNA, 19 nt, Artificial Sequence
  Description of Artificial Sequence: Synthetic oligonucleotide
  Antisense strand to SEQ ID NO: 129516
cucaacauuuaacacuucc

SEQ ID NO: 129518 - RNA, 19 nt, Artificial Sequence
  Description of Artificial Sequence: Synthetic oligonucleotide
  Sense strand starting at position 1016 of SEQ ID NO: 1654
ggcuuucuuugaccuuaua

SEQ ID NO: 129519 - RNA, 19 nt, Artificial Sequence
  Description of Artificial Sequence: Synthetic oligonucleotide
  Antisense strand to SEQ ID NO: 129518
uauaaggucaaagaaagcc

SEQ ID NO: 129520 - RNA, 19 nt, Artificial Sequence
  Description of Artificial Sequence: Synthetic oligonucleotide
  Sense strand starting at position 1013 of SEQ ID NO: 1654
gauggcuuucuuugaccuu

SEQ ID NO: 129521 - RNA, 19 nt, Artificial Sequence
  Description of Artificial Sequence: Synthetic oligonucleotide
  Antisense strand to SEQ ID NO: 129520
aaggucaaagaaagccauc

SEQ ID NO: 129522 - RNA, 19 nt, Artificial Sequence
  Description of Artificial Sequence: Synthetic oligonucleotide
  Sense strand starting at position 1006 of SEQ ID NO: 1654
cucguaagauggcuuucuu

SEQ ID NO: 129523 - RNA, 19 nt, Artificial Sequence
  Description of Artificial Sequence: Synthetic oligonucleotide
  Antisense strand to SEQ ID NO: 129522
aagaaagccaucuuacgag

SEQ ID NO: 129524 - RNA, 19 nt, Artificial Sequence
  Description of Artificial Sequence: Synthetic oligonucleotide
  Sense strand starting at position 973 of SEQ ID NO: 1654
aggcuacuuccugaacuaa

SEQ ID NO: 129525 - RNA, 19 nt, Artificial Sequence
  Description of Artificial Sequence: Synthetic oligonucleotide
  Antisense strand to SEQ ID NO: 129524
uuaguucaggaaguagccu

SEQ ID NO: 129526 - RNA, 19 nt, Artificial Sequence
  Description of Artificial Sequence: Synthetic oligonucleotide
  Sense strand starting at position 955 of SEQ ID NO: 1654
aaucguugacuguaaagaa

SEQ ID NO: 129527 - RNA, 19 nt, Artificial Sequence
  Description of Artificial Sequence: Synthetic oligonucleotide
  Antisense strand to SEQ ID NO: 129526
uucuuuacagucaacgauu

SEQ ID NO: 129528 - RNA, 19 nt, Artificial Sequence
  Description of Artificial Sequence: Synthetic oligonucleotide
  Sense strand starting at position 921 of SEQ ID NO: 1654
cguugagaaagugaucauu

SEQ ID NO: 129529 - RNA, 19 nt, Artificial Sequence
  Description of Artificial Sequence: Synthetic oligonucleotide
  Antisense strand to SEQ ID NO: 129528
aaugaucacuuucucaacg

SEQ ID NO: 129530 - RNA, 19 nt, Artificial Sequence
  Description of Artificial Sequence: Synthetic oligonucleotide
  Sense strand starting at position 654 of SEQ ID NO: 1654
auguuugcccauuaugaug

SEQ ID NO: 129531 - RNA, 19 nt, Artificial Sequence
  Description of Artificial Sequence: Synthetic oligonucleotide
  Antisense strand to SEQ ID NO: 129530
caucauaaugggcaaacau

SEQ ID NO: 129532 - RNA, 19 nt, Artificial Sequence
  Description of Artificial Sequence: Synthetic oligonucleotide
  Sense strand starting at position 385 of SEQ ID NO: 1654
ggaaacaaauauugaguaa

SEQ ID NO: 129533 - RNA, 19 nt, Artificial Sequence
  Description of Artificial Sequence: Synthetic oligonucleotide
  Antisense strand to SEQ ID NO: 129532
uuacucaauauuuguuucc

SEQ ID NO: 129534 - RNA, 19 nt, Artificial Sequence
  Description of Artificial Sequence: Synthetic oligonucleotide
  Sense strand starting at position 364 of SEQ ID NO: 1654
cuuugucaccuacaaguga

SEQ ID NO: 129535 - RNA, 19 nt, Artificial Sequence
  Description of Artificial Sequence: Synthetic oligonucleotide
  Antisense strand to SEQ ID NO: 129534
ucacuuguaggugacaaag

SEQ ID NO: 129536 - RNA, 19 nt, Artificial Sequence
  Description of Artificial Sequence: Synthetic oligonucleotide
  Sense strand starting at position 3939 of SEQ ID NO: 1656
guaugucuaaauuggagaa

SEQ ID NO: 129537 - RNA, 19 nt, Artificial Sequence
  Description of Artificial Sequence: Synthetic oligonucleotide
  Antisense strand to SEQ ID NO: 129536
uucuccaauuuagacauac

SEQ ID NO: 129538 - RNA, 19 nt, Artificial Sequence
  Description of Artificial Sequence: Synthetic oligonucleotide
  Sense strand starting at position 3762 of SEQ ID NO: 1656
aauugagguuuccugaauc

SEQ ID NO: 129539 - RNA, 19 nt, Artificial Sequence
  Description of Artificial Sequence: Synthetic oligonucleotide
  Antisense strand to SEQ ID NO: 129538
gauucaggaaaccucaauu

SEQ ID NO: 129540 - RNA, 19 nt, Artificial Sequence
  Description of Artificial Sequence: Synthetic oligonucleotide
  Sense strand starting at position 3754 of SEQ ID NO: 1656
gaguuugaaauugagguuu

SEQ ID NO: 129541 - RNA, 19 nt, Artificial Sequence
  Description of Artificial Sequence: Synthetic oligonucleotide
  Antisense strand to SEQ ID NO: 129540
aaaccucaauuucaaacuc

SEQ ID NO: 129542 - RNA, 19 nt, Artificial Sequence
  Description of Artificial Sequence: Synthetic oligonucleotide
  Sense strand starting at position 3753 of SEQ ID NO: 1656
agaguuugaaauugagguu

SEQ ID NO: 129543 - RNA, 19 nt, Artificial Sequence
  Description of Artificial Sequence: Synthetic oligonucleotide
  Antisense strand to SEQ ID NO: 129542
aaccucaauuucaaacucu

SEQ ID NO: 129544 - RNA, 19 nt, Artificial Sequence
  Description of Artificial Sequence: Synthetic oligonucleotide
  Sense strand starting at position 3747 of SEQ ID NO: 1656
aaaggcagaguuugaaauu

SEQ ID NO: 129545 - RNA, 19 nt, Artificial Sequence
  Description of Artificial Sequence: Synthetic oligonucleotide
  Antisense strand to SEQ ID NO: 129544
aauuucaaacucugccuuu

SEQ ID NO: 129546 - RNA, 19 nt, Artificial Sequence
  Description of Artificial Sequence: Synthetic oligonucleotide
  Sense strand starting at position 3707 of SEQ ID NO: 1656
cuuggugcucuagaagcaa

SEQ ID NO: 129547 - RNA, 19 nt, Artificial Sequence
  Description of Artificial Sequence: Synthetic oligonucleotide
  Antisense strand to SEQ ID NO: 129546
uugcuucuagagcaccaag

SEQ ID NO: 129548 - RNA, 19 nt, Artificial Sequence
  Description of Artificial Sequence: Synthetic oligonucleotide
  Sense strand starting at position 3703 of SEQ ID NO: 1656
caaccuuggugcucuagaa

SEQ ID NO: 129549 - RNA, 19 nt, Artificial Sequence
  Description of Artificial Sequence: Synthetic oligonucleotide
  Antisense strand to SEQ ID NO: 129548
uucuagagcaccaagguug

SEQ ID NO: 129550 - RNA, 19 nt, Artificial Sequence
  Description of Artificial Sequence: Synthetic oligonucleotide
  Sense strand starting at position 3664 of SEQ ID NO: 1656
gaggaaucacuuugagugu

SEQ ID NO: 129551 - RNA, 19 nt, Artificial Sequence
  Description of Artificial Sequence: Synthetic oligonucleotide
  Antisense strand to SEQ ID NO: 129550
acacucaaagugauuccuc

SEQ ID NO: 129552 - RNA, 19 nt, Artificial Sequence
  Description of Artificial Sequence: Synthetic oligonucleotide
  Sense strand starting at position 3598 of SEQ ID NO: 1656
auggaaugcugagcaaaug

SEQ ID NO: 129553 - RNA, 19 nt, Artificial Sequence
  Description of Artificial Sequence: Synthetic oligonucleotide
  Antisense strand to SEQ ID NO: 129552
cauuugcucagcauuccau

SEQ ID NO: 129554 - RNA, 19 nt, Artificial Sequence
  Description of Artificial Sequence: Synthetic oligonucleotide
  Sense strand starting at position 3354 of SEQ ID NO: 1656
ggauucuacuagcuugaau

SEQ ID NO: 129555 - RNA, 19 nt, Artificial Sequence
  Description of Artificial Sequence: Synthetic oligonucleotide
  Antisense strand to SEQ ID NO: 129554
auucaagcuaguagaaucc

SEQ ID NO: 129556 - RNA, 19 nt, Artificial Sequence
  Description of Artificial Sequence: Synthetic oligonucleotide
  Sense strand starting at position 3304 of SEQ ID NO: 1656
gugucuucuccugaacauu

SEQ ID NO: 129557 - RNA, 19 nt, Artificial Sequence
  Description of Artificial Sequence: Synthetic oligonucleotide
  Antisense strand to SEQ ID NO: 129556
aauguucaggagaagacac

SEQ ID NO: 129558 - RNA, 19 nt, Artificial Sequence
  Description of Artificial Sequence: Synthetic oligonucleotide
  Sense strand starting at position 3248 of SEQ ID NO: 1656
ucacaagaguuggugugau

SEQ ID NO: 129559 - RNA, 19 nt, Artificial Sequence
  Description of Artificial Sequence: Synthetic oligonucleotide
  Antisense strand to SEQ ID NO: 129558
aucacaccaacucuuguga

SEQ ID NO: 129560 - RNA, 19 nt, Artificial Sequence
  Description of Artificial Sequence: Synthetic oligonucleotide
  Sense strand starting at position 3145 of SEQ ID NO: 1656
gucuguuuccauuacacca

SEQ ID NO: 129561 - RNA, 19 nt, Artificial Sequence
  Description of Artificial Sequence: Synthetic oligonucleotide
  Antisense strand to SEQ ID NO: 129560
ugguguaauggaaacagac

SEQ ID NO: 129562 - RNA, 19 nt, Artificial Sequence
  Description of Artificial Sequence: Synthetic oligonucleotide
  Sense strand starting at position 3139 of SEQ ID NO: 1656
aggacugucuguuuccauu

SEQ ID NO: 129563 - RNA, 19 nt, Artificial Sequence
  Description of Artificial Sequence: Synthetic oligonucleotide
  Antisense strand to SEQ ID NO: 129562
aauggaaacagacaguccu

SEQ ID NO: 129564 - RNA, 19 nt, Artificial Sequence
  Description of Artificial Sequence: Synthetic oligonucleotide
  Sense strand starting at position 3099 of SEQ ID NO: 1656
guaacuugagcaggcaaau

SEQ ID NO: 129565 - RNA, 19 nt, Artificial Sequence
  Description of Artificial Sequence: Synthetic oligonucleotide
  Antisense strand to SEQ ID NO: 129564
auuugccugcucaaguuac

SEQ ID NO: 129566 - RNA, 19 nt, Artificial Sequence
  Description of Artificial Sequence: Synthetic oligonucleotide
  Sense strand starting at position 3071 of SEQ ID NO: 1656
aaguucuucccaugaugga

SEQ ID NO: 129567 - RNA, 19 nt, Artificial Sequence
  Description of Artificial Sequence: Synthetic oligonucleotide
  Antisense strand to SEQ ID NO: 129566
uccaucaugggaagaacuu

SEQ ID NO: 129568 - RNA, 19 nt, Artificial Sequence
  Description of Artificial Sequence: Synthetic oligonucleotide
  Sense strand starting at position 2899 of SEQ ID NO: 1656
gagguuauaccauaugcau

SEQ ID NO: 129569 - RNA, 19 nt, Artificial Sequence
  Description of Artificial Sequence: Synthetic oligonucleotide
  Antisense strand to SEQ ID NO: 129568
augcauaugguauaaccuc

SEQ ID NO: 129570 - RNA, 19 nt, Artificial Sequence
  Description of Artificial Sequence: Synthetic oligonucleotide
  Sense strand starting at position 2458 of SEQ ID NO: 1656
agccuugaagaaugguaaa

SEQ ID NO: 129571 - RNA, 19 nt, Artificial Sequence
  Description of Artificial Sequence: Synthetic oligonucleotide
  Antisense strand to SEQ ID NO: 129570
uuuaccauucuucaaggcu

SEQ ID NO: 129572 - RNA, 19 nt, Artificial Sequence
  Description of Artificial Sequence: Synthetic oligonucleotide
  Sense strand starting at position 2451 of SEQ ID NO: 1656
ccuggugagccuugaagaa

SEQ ID NO: 129573 - RNA, 19 nt, Artificial Sequence
  Description of Artificial Sequence: Synthetic oligonucleotide
  Antisense strand to SEQ ID NO: 129572
uucuucaaggcucaccagg

SEQ ID NO: 129574 - RNA, 19 nt, Artificial Sequence
  Description of Artificial Sequence: Synthetic oligonucleotide
  Sense strand starting at position 2297 of SEQ ID NO: 1656
gcacgaguaccuuuccguu

SEQ ID NO: 129575 - RNA, 19 nt, Artificial Sequence
  Description of Artificial Sequence: Synthetic oligonucleotide
  Antisense strand to SEQ ID NO: 129574
aacggaaagguacucgugc

SEQ ID NO: 129576 - RNA, 19 nt, Artificial Sequence
  Description of Artificial Sequence: Synthetic oligonucleotide
  Sense strand starting at position 2258 of SEQ ID NO: 1656
guaucuuccucauuacaga

SEQ ID NO: 129577 - RNA, 19 nt, Artificial Sequence
  Description of Artificial Sequence: Synthetic oligonucleotide
  Antisense strand to SEQ ID NO: 129576
ucuguaaugaggaagauac

SEQ ID NO: 129578 - RNA, 19 nt, Artificial Sequence
  Description of Artificial Sequence: Synthetic oligonucleotide
  Sense strand starting at position 1457 of SEQ ID NO: 1656
cucagauucuuuccagaug

SEQ ID NO: 129579 - RNA, 19 nt, Artificial Sequence
  Description of Artificial Sequence: Synthetic oligonucleotide
  Antisense strand to SEQ ID NO: 129578
caucuggaaagaaucugag

SEQ ID NO: 129580 - RNA, 19 nt, Artificial Sequence
  Description of Artificial Sequence: Synthetic oligonucleotide
  Sense strand starting at position 1313 of SEQ ID NO: 1656
augaguugacguggaaaga

SEQ ID NO: 129581 - RNA, 19 nt, Artificial Sequence
  Description of Artificial Sequence: Synthetic oligonucleotide
  Antisense strand to SEQ ID NO: 129580
ucuuuccacgucaacucau

SEQ ID NO: 129582 - RNA, 19 nt, Artificial Sequence
  Description of Artificial Sequence: Synthetic oligonucleotide
  Sense strand starting at position 1128 of SEQ ID NO: 1656
agcugagaccuuuagcuca

SEQ ID NO: 129583 - RNA, 19 nt, Artificial Sequence
  Description of Artificial Sequence: Synthetic oligonucleotide
  Antisense strand to SEQ ID NO: 129582
ugagcuaaaggucucagcu

SEQ ID NO: 129584 - RNA, 19 nt, Artificial Sequence
  Description of Artificial Sequence: Synthetic oligonucleotide
  Sense strand starting at position 818 of SEQ ID NO: 1656
gcgccugcuccucuccaaa

SEQ ID NO: 129585 - RNA, 19 nt, Artificial Sequence
  Description of Artificial Sequence: Synthetic oligonucleotide
  Antisense strand to SEQ ID NO: 129584
uuuggagaggagcaggcgc

SEQ ID NO: 129586 - RNA, 19 nt, Artificial Sequence
  Description of Artificial Sequence: Synthetic oligonucleotide
  Sense strand starting at position 692 of SEQ ID NO: 1656
ccgguaaucgaagggcaga

SEQ ID NO: 129587 - RNA, 19 nt, Artificial Sequence
  Description of Artificial Sequence: Synthetic oligonucleotide
  Antisense strand to SEQ ID NO: 129586
ucugcccuucgauuaccgg

SEQ ID NO: 129588 - RNA, 19 nt, Artificial Sequence
  Description of Artificial Sequence: Synthetic oligonucleotide
  Sense strand starting at position 474 of SEQ ID NO: 1656
ggcucuucugagugaccua

SEQ ID NO: 129589 - RNA, 19 nt, Artificial Sequence
  Description of Artificial Sequence: Synthetic oligonucleotide
  Antisense strand to SEQ ID NO: 129588
uaggucacucagaagagcc

SEQ ID NO: 129590 - RNA, 19 nt, Artificial Sequence
  Description of Artificial Sequence: Synthetic oligonucleotide
  Sense strand starting at position 394 of SEQ ID NO: 1656
ggucuugggcccuaagagu

SEQ ID NO: 129591 - RNA, 19 nt, Artificial Sequence
  Description of Artificial Sequence: Synthetic oligonucleotide
  Antisense strand to SEQ ID NO: 129590
acucuuagggcccaagacc

SEQ ID NO: 129592 - RNA, 19 nt, Artificial Sequence
  Description of Artificial Sequence: Synthetic oligonucleotide
  Sense strand starting at position 370 of SEQ ID NO: 1656
ugcacucuaggcuagagua

SEQ ID NO: 129593 - RNA, 19 nt, Artificial Sequence
  Description of Artificial Sequence: Synthetic oligonucleotide
  Antisense strand to SEQ ID NO: 129592
uacucuagccuagagugca

SEQ ID NO: 129594 - RNA, 19 nt, Artificial Sequence
  Description of Artificial Sequence: Synthetic oligonucleotide
  Sense strand starting at position 309 of SEQ ID NO: 1656
gauaaagugugcucccaca

SEQ ID NO: 129595 - RNA, 19 nt, Artificial Sequence
  Description of Artificial Sequence: Synthetic oligonucleotide
  Antisense strand to SEQ ID NO: 129594
ugugggagcacacuuuauc

SEQ ID NO: 129596 - RNA, 19 nt, Artificial Sequence
  Description of Artificial Sequence: Synthetic oligonucleotide
  Sense strand starting at position 307 of SEQ ID NO: 1656
gggauaaagugugcuccca

SEQ ID NO: 129597 - RNA, 19 nt, Artificial Sequence
  Description of Artificial Sequence: Synthetic oligonucleotide
  Antisense strand to SEQ ID NO: 129596
ugggagcacacuuuauccc

SEQ ID NO: 129598 - RNA, 19 nt, Artificial Sequence
  Description of Artificial Sequence: Synthetic oligonucleotide
  Sense strand starting at position 199 of SEQ ID NO: 1656
ggacucauuaaggguucca

SEQ ID NO: 129599 - RNA, 19 nt, Artificial Sequence
  Description of Artificial Sequence: Synthetic oligonucleotide
  Antisense strand to SEQ ID NO: 129598
uggaacccuuaaugagucc

SEQ ID NO: 129600 - RNA, 19 nt, Artificial Sequence
  Description of Artificial Sequence: Synthetic oligonucleotide
  Sense strand starting at position 122 of SEQ ID NO: 1656
guguuuaaggaagggucaa

SEQ ID NO: 129601 - RNA, 19 nt, Artificial Sequence
  Description of Artificial Sequence: Synthetic oligonucleotide
  Antisense strand to SEQ ID NO: 129600
uugacccuuccuuaaacac

SEQ ID NO: 129602 - RNA, 19 nt, Artificial Sequence
  Description of Artificial Sequence: Synthetic oligonucleotide
  Sense strand starting at position 116 of SEQ ID NO: 1656
ggacguguguuuaaggaag

SEQ ID NO: 129603 - RNA, 19 nt, Artificial Sequence
  Description of Artificial Sequence: Synthetic oligonucleotide
  Antisense strand to SEQ ID NO: 129602
cuuccuuaaacacacgucc

SEQ ID NO: 129604 - RNA, 19 nt, Artificial Sequence
  Description of Artificial Sequence: Synthetic oligonucleotide
  Sense strand starting at position 115 of SEQ ID NO: 1656
gggacguguguuuaaggaa

SEQ ID NO: 129605 - RNA, 19 nt, Artificial Sequence
  Description of Artificial Sequence: Synthetic oligonucleotide
  Antisense strand to SEQ ID NO: 129604
uuccuuaaacacacguccc

SEQ ID NO: 129606 - RNA, 19 nt, Artificial Sequence
  Description of Artificial Sequence: Synthetic oligonucleotide
  Sense strand starting at position 114 of SEQ ID NO: 1656
agggacguguguuuaagga

SEQ ID NO: 129607 - RNA, 19 nt, Artificial Sequence
  Description of Artificial Sequence: Synthetic oligonucleotide
  Antisense strand to SEQ ID NO: 129606
uccuuaaacacacgucccu

SEQ ID NO: 129608 - RNA, 19 nt, Artificial Sequence
  Description of Artificial Sequence: Synthetic oligonucleotide
  Sense strand starting at position 109 of SEQ ID NO: 1656
aggagagggacguguguuu

SEQ ID NO: 129609 - RNA, 19 nt, Artificial Sequence
  Description of Artificial Sequence: Synthetic oligonucleotide
  Antisense strand to SEQ ID NO: 129608
aaacacacgucccucuccu

SEQ ID NO: 129610 - RNA, 19 nt, Artificial Sequence
  Description of Artificial Sequence: Synthetic oligonucleotide
  Sense strand starting at position 71 of SEQ ID NO: 1656
agagguagagugugaucaa

SEQ ID NO: 129611 - RNA, 19 nt, Artificial Sequence
  Description of Artificial Sequence: Synthetic oligonucleotide
  Antisense strand to SEQ ID NO: 129610
uugaucacacucuaccucu

SEQ ID NO: 129612 - RNA, 19 nt, Artificial Sequence
  Description of Artificial Sequence: Synthetic oligonucleotide
  Sense strand starting at position 3 of SEQ ID NO: 1656
ugaguuggccuugaagacu

SEQ ID NO: 129613 - RNA, 19 nt, Artificial Sequence
  Description of Artificial Sequence: Synthetic oligonucleotide
  Antisense strand to SEQ ID NO: 129612
agucuucaaggccaacuca

SEQ ID NO: 129614 - RNA, 19 nt, Artificial Sequence
  Description of Artificial Sequence: Synthetic oligonucleotide
  Sense strand starting at position 2 of SEQ ID NO: 1656
uugaguuggccuugaagac

SEQ ID NO: 129615 - RNA, 19 nt, Artificial Sequence
  Description of Artificial Sequence: Synthetic oligonucleotide
  Antisense strand to SEQ ID NO: 129614
gucuucaaggccaacucaa

SEQ ID NO: 129616 - RNA, 19 nt, Artificial Sequence
  Description of Artificial Sequence: Synthetic oligonucleotide
  Sense strand starting at position 3923 of SEQ ID NO: 1655
aauugagguuuccugaauc

SEQ ID NO: 129617 - RNA, 19 nt, Artificial Sequence
  Description of Artificial Sequence: Synthetic oligonucleotide
  Antisense strand to SEQ ID NO: 129616
gauucaggaaaccucaauu

SEQ ID NO: 129618 - RNA, 19 nt, Artificial Sequence
  Description of Artificial Sequence: Synthetic oligonucleotide
  Sense strand starting at position 3915 of SEQ ID NO: 1655
gaguuugaaauugagguuu

SEQ ID NO: 129619 - RNA, 19 nt, Artificial Sequence
  Description of Artificial Sequence: Synthetic oligonucleotide
  Antisense strand to SEQ ID NO: 129618
aaaccucaauuucaaacuc

SEQ ID NO: 129620 - RNA, 19 nt, Artificial Sequence
  Description of Artificial Sequence: Synthetic oligonucleotide
  Sense strand starting at position 3914 of SEQ ID NO: 1655
agaguuugaaauugagguu

SEQ ID NO: 129621 - RNA, 19 nt, Artificial Sequence
  Description of Artificial Sequence: Synthetic oligonucleotide
  Antisense strand to SEQ ID NO: 129620
aaccucaauuucaaacucu

SEQ ID NO: 129622 - RNA, 19 nt, Artificial Sequence
  Description of Artificial Sequence: Synthetic oligonucleotide
  Sense strand starting at position 3908 of SEQ ID NO: 1655
aaaggcagaguuugaaauu

SEQ ID NO: 129623 - RNA, 19 nt, Artificial Sequence
  Description of Artificial Sequence: Synthetic oligonucleotide
  Antisense strand to SEQ ID NO: 129622
aauuucaaacucugccuuu

SEQ ID NO: 129624 - RNA, 19 nt, Artificial Sequence
  Description of Artificial Sequence: Synthetic oligonucleotide
  Sense strand starting at position 3868 of SEQ ID NO: 1655
cuuggugcucuagaagcaa

SEQ ID NO: 129625 - RNA, 19 nt, Artificial Sequence
  Description of Artificial Sequence: Synthetic oligonucleotide
  Antisense strand to SEQ ID NO: 129624
uugcuucuagagcaccaag

SEQ ID NO: 129626 - RNA, 19 nt, Artificial Sequence
  Description of Artificial Sequence: Synthetic oligonucleotide
  Sense strand starting at position 3864 of SEQ ID NO: 1655
caaccuuggugcucuagaa

SEQ ID NO: 129627 - RNA, 19 nt, Artificial Sequence
  Description of Artificial Sequence: Synthetic oligonucleotide
  Antisense strand to SEQ ID NO: 129626
uucuagagcaccaagguug

SEQ ID NO: 129628 - RNA, 19 nt, Artificial Sequence
  Description of Artificial Sequence: Synthetic oligonucleotide
  Sense strand starting at position 3825 of SEQ ID NO: 1655
gaggaaucacuuugagugu

SEQ ID NO: 129629 - RNA, 19 nt, Artificial Sequence
  Description of Artificial Sequence: Synthetic oligonucleotide
  Antisense strand to SEQ ID NO: 129628
acacucaaagugauuccuc

SEQ ID NO: 129630 - RNA, 19 nt, Artificial Sequence
  Description of Artificial Sequence: Synthetic oligonucleotide
  Sense strand starting at position 3759 of SEQ ID NO: 1655
auggaaugcugagcaaaug

SEQ ID NO: 129631 - RNA, 19 nt, Artificial Sequence
  Description of Artificial Sequence: Synthetic oligonucleotide
  Antisense strand to SEQ ID NO: 129630
cauuugcucagcauuccau

SEQ ID NO: 129632 - RNA, 19 nt, Artificial Sequence
  Description of Artificial Sequence: Synthetic oligonucleotide
  Sense strand starting at position 3515 of SEQ ID NO: 1655
ggauucuacuagcuugaau

SEQ ID NO: 129633 - RNA, 19 nt, Artificial Sequence
  Description of Artificial Sequence: Synthetic oligonucleotide
  Antisense strand to SEQ ID NO: 129632
auucaagcuaguagaaucc

SEQ ID NO: 129634 - RNA, 19 nt, Artificial Sequence
  Description of Artificial Sequence: Synthetic oligonucleotide
  Sense strand starting at position 3465 of SEQ ID NO: 1655
gugucuucuccugaacauu

SEQ ID NO: 129635 - RNA, 19 nt, Artificial Sequence
  Description of Artificial Sequence: Synthetic oligonucleotide
  Antisense strand to SEQ ID NO: 129634
aauguucaggagaagacac

SEQ ID NO: 129636 - RNA, 19 nt, Artificial Sequence
  Description of Artificial Sequence: Synthetic oligonucleotide
  Sense strand starting at position 3409 of SEQ ID NO: 1655
ucacaagaguuggugugau

SEQ ID NO: 129637 - RNA, 19 nt, Artificial Sequence
  Description of Artificial Sequence: Synthetic oligonucleotide
  Antisense strand to SEQ ID NO: 129636
aucacaccaacucuuguga

SEQ ID NO: 129638 - RNA, 19 nt, Artificial Sequence
  Description of Artificial Sequence: Synthetic oligonucleotide
  Sense strand starting at position 3306 of SEQ ID NO: 1655
gucuguuuccauuacacca

SEQ ID NO: 129639 - RNA, 19 nt, Artificial Sequence
  Description of Artificial Sequence: Synthetic oligonucleotide
  Antisense strand to SEQ ID NO: 129638
ugguguaauggaaacagac

SEQ ID NO: 129640 - RNA, 19 nt, Artificial Sequence
  Description of Artificial Sequence: Synthetic oligonucleotide
  Sense strand starting at position 3260 of SEQ ID NO: 1655
guaacuugagcaggcaaau

SEQ ID NO: 129641 - RNA, 19 nt, Artificial Sequence
  Description of Artificial Sequence: Synthetic oligonucleotide
  Antisense strand to SEQ ID NO: 129640
auuugccugcucaaguuac

SEQ ID NO: 129642 - RNA, 19 nt, Artificial Sequence
  Description of Artificial Sequence: Synthetic oligonucleotide
  Sense strand starting at position 3232 of SEQ ID NO: 1655
aaguucuucccaugaugga

SEQ ID NO: 129643 - RNA, 19 nt, Artificial Sequence
  Description of Artificial Sequence: Synthetic oligonucleotide
  Antisense strand to SEQ ID NO: 129642
uccaucaugggaagaacuu

SEQ ID NO: 129644 - RNA, 19 nt, Artificial Sequence
  Description of Artificial Sequence: Synthetic oligonucleotide
  Sense strand starting at position 3060 of SEQ ID NO: 1655
gagguuauaccauaugcau

SEQ ID NO: 129645 - RNA, 19 nt, Artificial Sequence
  Description of Artificial Sequence: Synthetic oligonucleotide
  Antisense strand to SEQ ID NO: 129644
augcauaugguauaaccuc

SEQ ID NO: 129646 - RNA, 19 nt, Artificial Sequence
  Description of Artificial Sequence: Synthetic oligonucleotide
  Sense strand starting at position 2619 of SEQ ID NO: 1655
agccuugaagaaugguaaa

SEQ ID NO: 129647 - RNA, 19 nt, Artificial Sequence
  Description of Artificial Sequence: Synthetic oligonucleotide
  Antisense strand to SEQ ID NO: 129646
uuuaccauucuucaaggcu

SEQ ID NO: 129648 - RNA, 19 nt, Artificial Sequence
  Description of Artificial Sequence: Synthetic oligonucleotide
  Sense strand starting at position 2612 of SEQ ID NO: 1655
ccuggugagccuugaagaa

SEQ ID NO: 129649 - RNA, 19 nt, Artificial Sequence
  Description of Artificial Sequence: Synthetic oligonucleotide
  Antisense strand to SEQ ID NO: 129648
uucuucaaggcucaccagg

SEQ ID NO: 129650 - RNA, 19 nt, Artificial Sequence
  Description of Artificial Sequence: Synthetic oligonucleotide
  Sense strand starting at position 2458 of SEQ ID NO: 1655
gcacgaguaccuuuccguu

SEQ ID NO: 129651 - RNA, 19 nt, Artificial Sequence
  Description of Artificial Sequence: Synthetic oligonucleotide
  Antisense strand to SEQ ID NO: 129650
aacggaaagguacucgugc

SEQ ID NO: 129652 - RNA, 19 nt, Artificial Sequence
  Description of Artificial Sequence: Synthetic oligonucleotide
  Sense strand starting at position 2419 of SEQ ID NO: 1655
guaucuuccucauuacaga

SEQ ID NO: 129653 - RNA, 19 nt, Artificial Sequence
  Description of Artificial Sequence: Synthetic oligonucleotide
  Antisense strand to SEQ ID NO: 129652
ucuguaaugaggaagauac

SEQ ID NO: 129654 - RNA, 19 nt, Artificial Sequence
  Description of Artificial Sequence: Synthetic oligonucleotide
  Sense strand starting at position 1618 of SEQ ID NO: 1655
cucagauucuuuccagaug

SEQ ID NO: 129655 - RNA, 19 nt, Artificial Sequence
  Description of Artificial Sequence: Synthetic oligonucleotide
  Antisense strand to SEQ ID NO: 129654
caucuggaaagaaucugag

SEQ ID NO: 129656 - RNA, 19 nt, Artificial Sequence
  Description of Artificial Sequence: Synthetic oligonucleotide
  Sense strand starting at position 1474 of SEQ ID NO: 1655
augaguugacguggaaaga

SEQ ID NO: 129657 - RNA, 19 nt, Artificial Sequence
  Description of Artificial Sequence: Synthetic oligonucleotide
  Antisense strand to SEQ ID NO: 129656
ucuuuccacgucaacucau

SEQ ID NO: 129658 - RNA, 19 nt, Artificial Sequence
  Description of Artificial Sequence: Synthetic oligonucleotide
  Sense strand starting at position 1289 of SEQ ID NO: 1655
agcugagaccuuuagcuca

SEQ ID NO: 129659 - RNA, 19 nt, Artificial Sequence
  Description of Artificial Sequence: Synthetic oligonucleotide
  Antisense strand to SEQ ID NO: 129658
ugagcuaaaggucucagcu

SEQ ID NO: 129660 - RNA, 19 nt, Artificial Sequence
  Description of Artificial Sequence: Synthetic oligonucleotide
  Sense strand starting at position 979 of SEQ ID NO: 1655
gcgccugcuccucuccaaa

SEQ ID NO: 129661 - RNA, 19 nt, Artificial Sequence
  Description of Artificial Sequence: Synthetic oligonucleotide
  Antisense strand to SEQ ID NO: 129660
uuuggagaggagcaggcgc

SEQ ID NO: 129662 - RNA, 19 nt, Artificial Sequence
  Description of Artificial Sequence: Synthetic oligonucleotide
  Sense strand starting at position 555 of SEQ ID NO: 1655
ggucuugggcccuaagagu

SEQ ID NO: 129663 - RNA, 19 nt, Artificial Sequence
  Description of Artificial Sequence: Synthetic oligonucleotide
  Antisense strand to SEQ ID NO: 129662
acucuuagggcccaagacc

SEQ ID NO: 129664 - RNA, 19 nt, Artificial Sequence
  Description of Artificial Sequence: Synthetic oligonucleotide
  Sense strand starting at position 531 of SEQ ID NO: 1655
ugcacucuaggcuagagua

SEQ ID NO: 129665 - RNA, 19 nt, Artificial Sequence
  Description of Artificial Sequence: Synthetic oligonucleotide
  Antisense strand to SEQ ID NO: 129664
uacucuagccuagagugca

SEQ ID NO: 129666 - RNA, 19 nt, Artificial Sequence
  Description of Artificial Sequence: Synthetic oligonucleotide
  Sense strand starting at position 468 of SEQ ID NO: 1655
gggauaaagugugcuccca

SEQ ID NO: 129667 - RNA, 19 nt, Artificial Sequence
  Description of Artificial Sequence: Synthetic oligonucleotide
  Antisense strand to SEQ ID NO: 129666
ugggagcacacuuuauccc

SEQ ID NO: 129668 - RNA, 19 nt, Artificial Sequence
  Description of Artificial Sequence: Synthetic oligonucleotide
  Sense strand starting at position 360 of SEQ ID NO: 1655
ggacucauuaaggguucca

SEQ ID NO: 129669 - RNA, 19 nt, Artificial Sequence
  Description of Artificial Sequence: Synthetic oligonucleotide
  Antisense strand to SEQ ID NO: 129668
uggaacccuuaaugagucc

SEQ ID NO: 129670 - RNA, 19 nt, Artificial Sequence
  Description of Artificial Sequence: Synthetic oligonucleotide
  Sense strand starting at position 283 of SEQ ID NO: 1655
guguuuaaggaagggucaa

SEQ ID NO: 129671 - RNA, 19 nt, Artificial Sequence
  Description of Artificial Sequence: Synthetic oligonucleotide
  Antisense strand to SEQ ID NO: 129670
uugacccuuccuuaaacac

SEQ ID NO: 129672 - RNA, 19 nt, Artificial Sequence
  Description of Artificial Sequence: Synthetic oligonucleotide
  Sense strand starting at position 276 of SEQ ID NO: 1655
gggacguguguuuaaggaa

SEQ ID NO: 129673 - RNA, 19 nt, Artificial Sequence
  Description of Artificial Sequence: Synthetic oligonucleotide
  Antisense strand to SEQ ID NO: 129672
uuccuuaaacacacguccc

SEQ ID NO: 129674 - RNA, 19 nt, Artificial Sequence
  Description of Artificial Sequence: Synthetic oligonucleotide
  Sense strand starting at position 275 of SEQ ID NO: 1655
agggacguguguuuaagga

SEQ ID NO: 129675 - RNA, 19 nt, Artificial Sequence
  Description of Artificial Sequence: Synthetic oligonucleotide
  Antisense strand to SEQ ID NO: 129674
uccuuaaacacacgucccu

SEQ ID NO: 129676 - RNA, 19 nt, Artificial Sequence
  Description of Artificial Sequence: Synthetic oligonucleotide
  Sense strand starting at position 270 of SEQ ID NO: 1655
aggagagggacguguguuu

SEQ ID NO: 129677 - RNA, 19 nt, Artificial Sequence
  Description of Artificial Sequence: Synthetic oligonucleotide
  Antisense strand to SEQ ID NO: 129676
aaacacacgucccucuccu

SEQ ID NO: 129678 - RNA, 19 nt, Artificial Sequence
  Description of Artificial Sequence: Synthetic oligonucleotide
  Sense strand starting at position 232 of SEQ ID NO: 1655
agagguagagugugaucaa

SEQ ID NO: 129679 - RNA, 19 nt, Artificial Sequence
  Description of Artificial Sequence: Synthetic oligonucleotide
  Antisense strand to SEQ ID NO: 129678
uugaucacacucuaccucu

SEQ ID NO: 129680 - RNA, 19 nt, Artificial Sequence
  Description of Artificial Sequence: Synthetic oligonucleotide
  Sense strand starting at position 164 of SEQ ID NO: 1655
ugaguuggccuugaagacu

SEQ ID NO: 129681 - RNA, 19 nt, Artificial Sequence
  Description of Artificial Sequence: Synthetic oligonucleotide
  Antisense strand to SEQ ID NO: 129680
agucuucaaggccaacuca

SEQ ID NO: 129682 - RNA, 19 nt, Artificial Sequence
  Description of Artificial Sequence: Synthetic oligonucleotide
  Sense strand starting at position 163 of SEQ ID NO: 1655
uugaguuggccuugaagac

SEQ ID NO: 129683 - RNA, 19 nt, Artificial Sequence
  Description of Artificial Sequence: Synthetic oligonucleotide
  Antisense strand to SEQ ID NO: 129682
gucuucaaggccaacucaa

SEQ ID NO: 129684 - RNA, 19 nt, Artificial Sequence
  Description of Artificial Sequence: Synthetic oligonucleotide
  Sense strand starting at position 131 of SEQ ID NO: 1655
aaaugugggucuucugacu

SEQ ID NO: 129685 - RNA, 19 nt, Artificial Sequence
  Description of Artificial Sequence: Synthetic oligonucleotide
  Antisense strand to SEQ ID NO: 129684
agucagaagacccacauuu

SEQ ID NO: 129686 - RNA, 19 nt, Artificial Sequence
  Description of Artificial Sequence: Synthetic oligonucleotide
  Sense strand starting at position 58 of SEQ ID NO: 1655
aaagaucugcaguaugauc

SEQ ID NO: 129687 - RNA, 19 nt, Artificial Sequence
  Description of Artificial Sequence: Synthetic oligonucleotide
  Antisense strand to SEQ ID NO: 129686
gaucauacugcagaucuuu

SEQ ID NO: 129688 - RNA, 19 nt, Artificial Sequence
  Description of Artificial Sequence: Synthetic oligonucleotide
  Sense strand starting at position 55 of SEQ ID NO: 1655
ucuaaagaucugcaguaug

SEQ ID NO: 129689 - RNA, 19 nt, Artificial Sequence
  Description of Artificial Sequence: Synthetic oligonucleotide
  Antisense strand to SEQ ID NO: 129688
cauacugcagaucuuuaga

SEQ ID NO: 129690 - RNA, 19 nt, Artificial Sequence
  Description of Artificial Sequence: Synthetic oligonucleotide
  Sense strand starting at position 54 of SEQ ID NO: 1655
aucuaaagaucugcaguau

SEQ ID NO: 129691 - RNA, 19 nt, Artificial Sequence
  Description of Artificial Sequence: Synthetic oligonucleotide
  Antisense strand to SEQ ID NO: 129690
auacugcagaucuuuagau

SEQ ID NO: 129692 - RNA, 19 nt, Artificial Sequence
  Description of Artificial Sequence: Synthetic oligonucleotide
  Sense strand starting at position 19 of SEQ ID NO: 1655
aaugaacgacuuugugaaa

SEQ ID NO: 129693 - RNA, 19 nt, Artificial Sequence
  Description of Artificial Sequence: Synthetic oligonucleotide
  Antisense strand to SEQ ID NO: 129692
uuucacaaagucguucauu

SEQ ID NO: 129694 - RNA, 19 nt, Artificial Sequence
  Description of Artificial Sequence: Synthetic oligonucleotide
  Sense strand starting at position 4 of SEQ ID NO: 1655
gggaaauguuugcugaaug

SEQ ID NO: 129695 - RNA, 19 nt, Artificial Sequence
  Description of Artificial Sequence: Synthetic oligonucleotide
  Antisense strand to SEQ ID NO: 129694
cauucagcaaacauuuccc

SEQ ID NO: 129696 - RNA, 19 nt, Artificial Sequence
  Description of Artificial Sequence: Synthetic oligonucleotide
  Sense strand starting at position 3798 of SEQ ID NO: 1657
uuaggugucccugggaaga

SEQ ID NO: 129697 - RNA, 19 nt, Artificial Sequence
  Description of Artificial Sequence: Synthetic oligonucleotide
  Antisense strand to SEQ ID NO: 129696
ucuucccagggacaccuaa

SEQ ID NO: 129698 - RNA, 19 nt, Artificial Sequence
  Description of Artificial Sequence: Synthetic oligonucleotide
  Sense strand starting at position 3765 of SEQ ID NO: 1657
cucugagagcccuaauguu

SEQ ID NO: 129699 - RNA, 19 nt, Artificial Sequence
  Description of Artificial Sequence: Synthetic oligonucleotide
  Antisense strand to SEQ ID NO: 129698
aacauuagggcucucagag

SEQ ID NO: 129700 - RNA, 19 nt, Artificial Sequence
  Description of Artificial Sequence: Synthetic oligonucleotide
  Sense strand starting at position 3547 of SEQ ID NO: 1657
guuugaauugauugacauu

SEQ ID NO: 129701 - RNA, 19 nt, Artificial Sequence
  Description of Artificial Sequence: Synthetic oligonucleotide
  Antisense strand to SEQ ID NO: 129700
aaugucaaucaauucaaac

SEQ ID NO: 129702 - RNA, 19 nt, Artificial Sequence
  Description of Artificial Sequence: Synthetic oligonucleotide
  Sense strand starting at position 3423 of SEQ ID NO: 1657
ucuaaucuguggguggaaa

SEQ ID NO: 129703 - RNA, 19 nt, Artificial Sequence
  Description of Artificial Sequence: Synthetic oligonucleotide
  Antisense strand to SEQ ID NO: 129702
uuuccacccacagauuaga

SEQ ID NO: 129704 - RNA, 19 nt, Artificial Sequence
  Description of Artificial Sequence: Synthetic oligonucleotide
  Sense strand starting at position 3422 of SEQ ID NO: 1657
aucuaaucuguggguggaa

SEQ ID NO: 129705 - RNA, 19 nt, Artificial Sequence
  Description of Artificial Sequence: Synthetic oligonucleotide
  Antisense strand to SEQ ID NO: 129704
uuccacccacagauuagau

SEQ ID NO: 129706 - RNA, 19 nt, Artificial Sequence
  Description of Artificial Sequence: Synthetic oligonucleotide
  Sense strand starting at position 3232 of SEQ ID NO: 1657
accugaauaucuguuggaa

SEQ ID NO: 129707 - RNA, 19 nt, Artificial Sequence
  Description of Artificial Sequence: Synthetic oligonucleotide
  Antisense strand to SEQ ID NO: 129706
uuccaacagauauucaggu

SEQ ID NO: 129708 - RNA, 19 nt, Artificial Sequence
  Description of Artificial Sequence: Synthetic oligonucleotide
  Sense strand starting at position 3196 of SEQ ID NO: 1657
gaaagaguccgucaaacuc

SEQ ID NO: 129709 - RNA, 19 nt, Artificial Sequence
  Description of Artificial Sequence: Synthetic oligonucleotide
  Antisense strand to SEQ ID NO: 129708
gaguuugacggacucuuuc

SEQ ID NO: 129710 - RNA, 19 nt, Artificial Sequence
  Description of Artificial Sequence: Synthetic oligonucleotide
  Sense strand starting at position 3194 of SEQ ID NO: 1657
aggaaagaguccgucaaac

SEQ ID NO: 129711 - RNA, 19 nt, Artificial Sequence
  Description of Artificial Sequence: Synthetic oligonucleotide
  Antisense strand to SEQ ID NO: 129710
guuugacggacucuuuccu

SEQ ID NO: 129712 - RNA, 19 nt, Artificial Sequence
  Description of Artificial Sequence: Synthetic oligonucleotide
  Sense strand starting at position 3193 of SEQ ID NO: 1657
aaggaaagaguccgucaaa

SEQ ID NO: 129713 - RNA, 19 nt, Artificial Sequence
  Description of Artificial Sequence: Synthetic oligonucleotide
  Antisense strand to SEQ ID NO: 129712
uuugacggacucuuuccuu

SEQ ID NO: 129714 - RNA, 19 nt, Artificial Sequence
  Description of Artificial Sequence: Synthetic oligonucleotide
  Sense strand starting at position 3179 of SEQ ID NO: 1657
auuaaacuuuggucaagga

SEQ ID NO: 129715 - RNA, 19 nt, Artificial Sequence
  Description of Artificial Sequence: Synthetic oligonucleotide
  Antisense strand to SEQ ID NO: 129714
uccuugaccaaaguuuaau

SEQ ID NO: 129716 - RNA, 19 nt, Artificial Sequence
  Description of Artificial Sequence: Synthetic oligonucleotide
  Sense strand starting at position 3176 of SEQ ID NO: 1657
cugauuaaacuuuggucaa

SEQ ID NO: 129717 - RNA, 19 nt, Artificial Sequence
  Description of Artificial Sequence: Synthetic oligonucleotide
  Antisense strand to SEQ ID NO: 129716
uugaccaaaguuuaaucag

SEQ ID NO: 129718 - RNA, 19 nt, Artificial Sequence
  Description of Artificial Sequence: Synthetic oligonucleotide
  Sense strand starting at position 3165 of SEQ ID NO: 1657
aggacuuaagccugauuaa

SEQ ID NO: 129719 - RNA, 19 nt, Artificial Sequence
  Description of Artificial Sequence: Synthetic oligonucleotide
  Antisense strand to SEQ ID NO: 129718
uuaaucaggcuuaaguccu

SEQ ID NO: 129720 - RNA, 19 nt, Artificial Sequence
  Description of Artificial Sequence: Synthetic oligonucleotide
  Sense strand starting at position 3042 of SEQ ID NO: 1657
gauaucaaggguggugauu

SEQ ID NO: 129721 - RNA, 19 nt, Artificial Sequence
  Description of Artificial Sequence: Synthetic oligonucleotide
  Antisense strand to SEQ ID NO: 129720
aaucaccacccuugauauc

SEQ ID NO: 129722 - RNA, 19 nt, Artificial Sequence
  Description of Artificial Sequence: Synthetic oligonucleotide
  Sense strand starting at position 3041 of SEQ ID NO: 1657
agauaucaaggguggugau

SEQ ID NO: 129723 - RNA, 19 nt, Artificial Sequence
  Description of Artificial Sequence: Synthetic oligonucleotide
  Antisense strand to SEQ ID NO: 129722
aucaccacccuugauaucu

SEQ ID NO: 129724 - RNA, 19 nt, Artificial Sequence
  Description of Artificial Sequence: Synthetic oligonucleotide
  Sense strand starting at position 3027 of SEQ ID NO: 1657
uauccagggugaucagaua

SEQ ID NO: 129725 - RNA, 19 nt, Artificial Sequence
  Description of Artificial Sequence: Synthetic oligonucleotide
  Antisense strand to SEQ ID NO: 129724
uaucugaucacccuggaua

SEQ ID NO: 129726 - RNA, 19 nt, Artificial Sequence
  Description of Artificial Sequence: Synthetic oligonucleotide
  Sense strand starting at position 3022 of SEQ ID NO: 1657
ucagauauccagggugauc

SEQ ID NO: 129727 - RNA, 19 nt, Artificial Sequence
  Description of Artificial Sequence: Synthetic oligonucleotide
  Antisense strand to SEQ ID NO: 129726
gaucacccuggauaucuga

SEQ ID NO: 129728 - RNA, 19 nt, Artificial Sequence
  Description of Artificial Sequence: Synthetic oligonucleotide
  Sense strand starting at position 2933 of SEQ ID NO: 1657
gggauucuugcugaaccca

SEQ ID NO: 129729 - RNA, 19 nt, Artificial Sequence
  Description of Artificial Sequence: Synthetic oligonucleotide
  Antisense strand to SEQ ID NO: 129728
uggguucagcaagaauccc

SEQ ID NO: 129730 - RNA, 19 nt, Artificial Sequence
  Description of Artificial Sequence: Synthetic oligonucleotide
  Sense strand starting at position 2931 of SEQ ID NO: 1657
gagggauucuugcugaacc

SEQ ID NO: 129731 - RNA, 19 nt, Artificial Sequence
  Description of Artificial Sequence: Synthetic oligonucleotide
  Antisense strand to SEQ ID NO: 129730
gguucagcaagaaucccuc

SEQ ID NO: 129732 - RNA, 19 nt, Artificial Sequence
  Description of Artificial Sequence: Synthetic oligonucleotide
  Sense strand starting at position 2823 of SEQ ID NO: 1657
ugaggucuaacacggaaua

SEQ ID NO: 129733 - RNA, 19 nt, Artificial Sequence
  Description of Artificial Sequence: Synthetic oligonucleotide
  Antisense strand to SEQ ID NO: 129732
uauuccguguuagaccuca

SEQ ID NO: 129734 - RNA, 19 nt, Artificial Sequence
  Description of Artificial Sequence: Synthetic oligonucleotide
  Sense strand starting at position 2793 of SEQ ID NO: 1657
guguaaagaugaucacacu

SEQ ID NO: 129735 - RNA, 19 nt, Artificial Sequence
  Description of Artificial Sequence: Synthetic oligonucleotide
  Antisense strand to SEQ ID NO: 129734
agugugaucaucuuuacac

SEQ ID NO: 129736 - RNA, 19 nt, Artificial Sequence
  Description of Artificial Sequence: Synthetic oligonucleotide
  Sense strand starting at position 2784 of SEQ ID NO: 1657
uugcuauagguguaaagau

SEQ ID NO: 129737 - RNA, 19 nt, Artificial Sequence
  Description of Artificial Sequence: Synthetic oligonucleotide
  Antisense strand to SEQ ID NO: 129736
aucuuuacaccuauagcaa

SEQ ID NO: 129738 - RNA, 19 nt, Artificial Sequence
  Description of Artificial Sequence: Synthetic oligonucleotide
  Sense strand starting at position 2767 of SEQ ID NO: 1657
gacuuuauacaggguuauu

SEQ ID NO: 129739 - RNA, 19 nt, Artificial Sequence
  Description of Artificial Sequence: Synthetic oligonucleotide
  Antisense strand to SEQ ID NO: 129738
aauaacccuguauaaaguc

SEQ ID NO: 129740 - RNA, 19 nt, Artificial Sequence
  Description of Artificial Sequence: Synthetic oligonucleotide
  Sense strand starting at position 2563 of SEQ ID NO: 1657
ggaugaaguggguguauag

SEQ ID NO: 129741 - RNA, 19 nt, Artificial Sequence
  Description of Artificial Sequence: Synthetic oligonucleotide
  Antisense strand to SEQ ID NO: 129740
cuauacacccacuucaucc

SEQ ID NO: 129742 - RNA, 19 nt, Artificial Sequence
  Description of Artificial Sequence: Synthetic oligonucleotide
  Sense strand starting at position 2551 of SEQ ID NO: 1657
auguaauuccuuggaugaa

SEQ ID NO: 129743 - RNA, 19 nt, Artificial Sequence
  Description of Artificial Sequence: Synthetic oligonucleotide
  Antisense strand to SEQ ID NO: 129742
uucauccaaggaauuacau

SEQ ID NO: 129744 - RNA, 19 nt, Artificial Sequence
  Description of Artificial Sequence: Synthetic oligonucleotide
  Sense strand starting at position 2550 of SEQ ID NO: 1657
cauguaauuccuuggauga

SEQ ID NO: 129745 - RNA, 19 nt, Artificial Sequence
  Description of Artificial Sequence: Synthetic oligonucleotide
  Antisense strand to SEQ ID NO: 129744
ucauccaaggaauuacaug

SEQ ID NO: 129746 - RNA, 19 nt, Artificial Sequence
  Description of Artificial Sequence: Synthetic oligonucleotide
  Sense strand starting at position 2523 of SEQ ID NO: 1657
uuuguagcuguugcuuaau

SEQ ID NO: 129747 - RNA, 19 nt, Artificial Sequence
  Description of Artificial Sequence: Synthetic oligonucleotide
  Antisense strand to SEQ ID NO: 129746
auuaagcaacagcuacaaa

SEQ ID NO: 129748 - RNA, 19 nt, Artificial Sequence
  Description of Artificial Sequence: Synthetic oligonucleotide
  Sense strand starting at position 2491 of SEQ ID NO: 1657
cgucauauacauggagaag

SEQ ID NO: 129749 - RNA, 19 nt, Artificial Sequence
  Description of Artificial Sequence: Synthetic oligonucleotide
  Antisense strand to SEQ ID NO: 129748
cuucuccauguauaugacg

SEQ ID NO: 129750 - RNA, 19 nt, Artificial Sequence
  Description of Artificial Sequence: Synthetic oligonucleotide
  Sense strand starting at position 2490 of SEQ ID NO: 1657
ucgucauauacauggagaa

SEQ ID NO: 129751 - RNA, 19 nt, Artificial Sequence
  Description of Artificial Sequence: Synthetic oligonucleotide
  Antisense strand to SEQ ID NO: 129750
uucuccauguauaugacga

SEQ ID NO: 129752 - RNA, 19 nt, Artificial Sequence
  Description of Artificial Sequence: Synthetic oligonucleotide
  Sense strand starting at position 2482 of SEQ ID NO: 1657
ccagaacuucgucauauac

SEQ ID NO: 129753 - RNA, 19 nt, Artificial Sequence
  Description of Artificial Sequence: Synthetic oligonucleotide
  Antisense strand to SEQ ID NO: 129752
guauaugacgaaguucugg

SEQ ID NO: 129754 - RNA, 19 nt, Artificial Sequence
  Description of Artificial Sequence: Synthetic oligonucleotide
  Sense strand starting at position 1245 of SEQ ID NO: 1657
cugacucuuggccaguaca

SEQ ID NO: 129755 - RNA, 19 nt, Artificial Sequence
  Description of Artificial Sequence: Synthetic oligonucleotide
  Antisense strand to SEQ ID NO: 129754
uguacuggccaagagucag

SEQ ID NO: 129756 - RNA, 19 nt, Artificial Sequence
  Description of Artificial Sequence: Synthetic oligonucleotide
  Sense strand starting at position 1133 of SEQ ID NO: 1657
gugaaacauagugaggguu

SEQ ID NO: 129757 - RNA, 19 nt, Artificial Sequence
  Description of Artificial Sequence: Synthetic oligonucleotide
  Antisense strand to SEQ ID NO: 129756
aacccucacuauguuucac

SEQ ID NO: 129758 - RNA, 19 nt, Artificial Sequence
  Description of Artificial Sequence: Synthetic oligonucleotide
  Sense strand starting at position 1123 of SEQ ID NO: 1657
gcaggagucagugaaacau

SEQ ID NO: 129759 - RNA, 19 nt, Artificial Sequence
  Description of Artificial Sequence: Synthetic oligonucleotide
  Antisense strand to SEQ ID NO: 129758
auguuucacugacuccugc

SEQ ID NO: 129760 - RNA, 19 nt, Artificial Sequence
  Description of Artificial Sequence: Synthetic oligonucleotide
  Sense strand starting at position 828 of SEQ ID NO: 1657
guggauaaauacuccugga

SEQ ID NO: 129761 - RNA, 19 nt, Artificial Sequence
  Description of Artificial Sequence: Synthetic oligonucleotide
  Antisense strand to SEQ ID NO: 129760
uccaggaguauuuauccac

SEQ ID NO: 129762 - RNA, 19 nt, Artificial Sequence
  Description of Artificial Sequence: Synthetic oligonucleotide
  Sense strand starting at position 783 of SEQ ID NO: 1657
ccagacugguuuguagaga

SEQ ID NO: 129763 - RNA, 19 nt, Artificial Sequence
  Description of Artificial Sequence: Synthetic oligonucleotide
  Antisense strand to SEQ ID NO: 129762
ucucuacaaaccagucugg

SEQ ID NO: 129764 - RNA, 19 nt, Artificial Sequence
  Description of Artificial Sequence: Synthetic oligonucleotide
  Sense strand starting at position 715 of SEQ ID NO: 1657
agaggcuguggguagauaa

SEQ ID NO: 129765 - RNA, 19 nt, Artificial Sequence
  Description of Artificial Sequence: Synthetic oligonucleotide
  Antisense strand to SEQ ID NO: 129764
uuaucuacccacagccucu

SEQ ID NO: 129766 - RNA, 19 nt, Artificial Sequence
  Description of Artificial Sequence: Synthetic oligonucleotide
  Sense strand starting at position 690 of SEQ ID NO: 1657
gggugacauguuuaauuau

SEQ ID NO: 129767 - RNA, 19 nt, Artificial Sequence
  Description of Artificial Sequence: Synthetic oligonucleotide
  Antisense strand to SEQ ID NO: 129766
auaauuaaacaugucaccc

SEQ ID NO: 129768 - RNA, 19 nt, Artificial Sequence
  Description of Artificial Sequence: Synthetic oligonucleotide
  Sense strand starting at position 204 of SEQ ID NO: 1657
gagggacuguuuccauaac

SEQ ID NO: 129769 - RNA, 19 nt, Artificial Sequence
  Description of Artificial Sequence: Synthetic oligonucleotide
  Antisense strand to SEQ ID NO: 129768
guuauggaaacagucccuc

SEQ ID NO: 129770 - RNA, 19 nt, Artificial Sequence
  Description of Artificial Sequence: Synthetic oligonucleotide
  Sense strand starting at position 127 of SEQ ID NO: 1657
aggauaagugggugaacga

SEQ ID NO: 129771 - RNA, 19 nt, Artificial Sequence
  Description of Artificial Sequence: Synthetic oligonucleotide
  Antisense strand to SEQ ID NO: 129770
ucguucacccacuuauccu

SEQ ID NO: 129772 - RNA, 19 nt, Artificial Sequence
  Description of Artificial Sequence: Synthetic oligonucleotide
  Sense strand starting at position 67 of SEQ ID NO: 1657
gcaguaagucaacaaacau

SEQ ID NO: 129773 - RNA, 19 nt, Artificial Sequence
  Description of Artificial Sequence: Synthetic oligonucleotide
  Antisense strand to SEQ ID NO: 129772
auguuuguugacuuacugc

SEQ ID NO: 129774 - RNA, 19 nt, Artificial Sequence
  Description of Artificial Sequence: Synthetic oligonucleotide
  Sense strand starting at position 24 of SEQ ID NO: 1657
acccaaugacucgagucuu

SEQ ID NO: 129775 - RNA, 19 nt, Artificial Sequence
  Description of Artificial Sequence: Synthetic oligonucleotide
  Antisense strand to SEQ ID NO: 129774
aagacucgagucauugggu

SEQ ID NO: 129776 - RNA, 19 nt, Artificial Sequence
  Description of Artificial Sequence: Synthetic oligonucleotide
  Sense strand starting at position 18 of SEQ ID NO: 1659
cgaaguugagaacgauugu

SEQ ID NO: 129777 - RNA, 19 nt, Artificial Sequence
  Description of Artificial Sequence: Synthetic oligonucleotide
  Antisense strand to SEQ ID NO: 129776
acaaucguucucaacuucg

SEQ ID NO: 129778 - RNA, 19 nt, Artificial Sequence
  Description of Artificial Sequence: Synthetic oligonucleotide
  Sense strand starting at position 25 of SEQ ID NO: 1659
gagaacgauugugcuaaca

SEQ ID NO: 129779 - RNA, 19 nt, Artificial Sequence
  Description of Artificial Sequence: Synthetic oligonucleotide
  Antisense strand to SEQ ID NO: 129778
uguuagcacaaucguucuc

SEQ ID NO: 129780 - RNA, 19 nt, Artificial Sequence
  Description of Artificial Sequence: Synthetic oligonucleotide
  Sense strand starting at position 141 of SEQ ID NO: 1659
uuuccucuaguuggguaaa

SEQ ID NO: 129781 - RNA, 19 nt, Artificial Sequence
  Description of Artificial Sequence: Synthetic oligonucleotide
  Antisense strand to SEQ ID NO: 129780
uuuacccaacuagaggaaa

SEQ ID NO: 129782 - RNA, 19 nt, Artificial Sequence
  Description of Artificial Sequence: Synthetic oligonucleotide
  Sense strand starting at position 151 of SEQ ID NO: 1659
uuggguaaaugccuacaga

SEQ ID NO: 129783 - RNA, 19 nt, Artificial Sequence
  Description of Artificial Sequence: Synthetic oligonucleotide
  Antisense strand to SEQ ID NO: 129782
ucuguaggcauuuacccaa

SEQ ID NO: 129784 - RNA, 19 nt, Artificial Sequence
  Description of Artificial Sequence: Synthetic oligonucleotide
  Sense strand starting at position 154 of SEQ ID NO: 1659
gguaaaugccuacagaagu

SEQ ID NO: 129785 - RNA, 19 nt, Artificial Sequence
  Description of Artificial Sequence: Synthetic oligonucleotide
  Antisense strand to SEQ ID NO: 129784
acuucuguaggcauuuacc

SEQ ID NO: 129786 - RNA, 19 nt, Artificial Sequence
  Description of Artificial Sequence: Synthetic oligonucleotide
  Sense strand starting at position 567 of SEQ ID NO: 1659
gcggcugcugugagauagu

SEQ ID NO: 129787 - RNA, 19 nt, Artificial Sequence
  Description of Artificial Sequence: Synthetic oligonucleotide
  Antisense strand to SEQ ID NO: 129786
acuaucucacagcagccgc

SEQ ID NO: 129788 - RNA, 19 nt, Artificial Sequence
  Description of Artificial Sequence: Synthetic oligonucleotide
  Sense strand starting at position 692 of SEQ ID NO: 1659
cuacuagcaguuugagaga

SEQ ID NO: 129789 - RNA, 19 nt, Artificial Sequence
  Description of Artificial Sequence: Synthetic oligonucleotide
  Antisense strand to SEQ ID NO: 129788
ucucucaaacugcuaguag

SEQ ID NO: 129790 - RNA, 19 nt, Artificial Sequence
  Description of Artificial Sequence: Synthetic oligonucleotide
  Sense strand starting at position 941 of SEQ ID NO: 1659
ggaggagacuucguaaacu

SEQ ID NO: 129791 - RNA, 19 nt, Artificial Sequence
  Description of Artificial Sequence: Synthetic oligonucleotide
  Antisense strand to SEQ ID NO: 129790
aguuuacgaagucuccucc

SEQ ID NO: 129792 - RNA, 19 nt, Artificial Sequence
  Description of Artificial Sequence: Synthetic oligonucleotide
  Sense strand starting at position 1019 of SEQ ID NO: 1659
aagggaucggcucagcaau

SEQ ID NO: 129793 - RNA, 19 nt, Artificial Sequence
  Description of Artificial Sequence: Synthetic oligonucleotide
  Antisense strand to SEQ ID NO: 129792
auugcugagccgaucccuu

SEQ ID NO: 129794 - RNA, 19 nt, Artificial Sequence
  Description of Artificial Sequence: Synthetic oligonucleotide
  Sense strand starting at position 1707 of SEQ ID NO: 1659
gguagucugacccgaggaa

SEQ ID NO: 129795 - RNA, 19 nt, Artificial Sequence
  Description of Artificial Sequence: Synthetic oligonucleotide
  Antisense strand to SEQ ID NO: 129794
uuccucgggucagacuacc

SEQ ID NO: 129796 - RNA, 19 nt, Artificial Sequence
  Description of Artificial Sequence: Synthetic oligonucleotide
  Sense strand starting at position 1812 of SEQ ID NO: 1659
agaagagguaaccguugaa

SEQ ID NO: 129797 - RNA, 19 nt, Artificial Sequence
  Description of Artificial Sequence: Synthetic oligonucleotide
  Antisense strand to SEQ ID NO: 129796
uucaacgguuaccucuucu

SEQ ID NO: 129798 - RNA, 19 nt, Artificial Sequence
  Description of Artificial Sequence: Synthetic oligonucleotide
  Sense strand starting at position 1816 of SEQ ID NO: 1659
gagguaaccguugaaagcu

SEQ ID NO: 129799 - RNA, 19 nt, Artificial Sequence
  Description of Artificial Sequence: Synthetic oligonucleotide
  Antisense strand to SEQ ID NO: 129798
agcuuucaacgguuaccuc

SEQ ID NO: 129800 - RNA, 19 nt, Artificial Sequence
  Description of Artificial Sequence: Synthetic oligonucleotide
  Sense strand starting at position 2089 of SEQ ID NO: 1659
acgucaugggcucauccaa

SEQ ID NO: 129801 - RNA, 19 nt, Artificial Sequence
  Description of Artificial Sequence: Synthetic oligonucleotide
  Antisense strand to SEQ ID NO: 129800
uuggaugagcccaugacgu

SEQ ID NO: 129802 - RNA, 19 nt, Artificial Sequence
  Description of Artificial Sequence: Synthetic oligonucleotide
  Sense strand starting at position 2273 of SEQ ID NO: 1659
ugccaagaguuuccaagga

SEQ ID NO: 129803 - RNA, 19 nt, Artificial Sequence
  Description of Artificial Sequence: Synthetic oligonucleotide
  Antisense strand to SEQ ID NO: 129802
uccuuggaaacucuuggca

SEQ ID NO: 129804 - RNA, 19 nt, Artificial Sequence
  Description of Artificial Sequence: Synthetic oligonucleotide
  Sense strand starting at position 2277 of SEQ ID NO: 1659
aagaguuuccaaggaagug

SEQ ID NO: 129805 - RNA, 19 nt, Artificial Sequence
  Description of Artificial Sequence: Synthetic oligonucleotide
  Antisense strand to SEQ ID NO: 129804
cacuuccuuggaaacucuu

SEQ ID NO: 129806 - RNA, 19 nt, Artificial Sequence
  Description of Artificial Sequence: Synthetic oligonucleotide
  Sense strand starting at position 2278 of SEQ ID NO: 1659
agaguuuccaaggaagugu

SEQ ID NO: 129807 - RNA, 19 nt, Artificial Sequence
  Description of Artificial Sequence: Synthetic oligonucleotide
  Antisense strand to SEQ ID NO: 129806
acacuuccuuggaaacucu

SEQ ID NO: 129808 - RNA, 19 nt, Artificial Sequence
  Description of Artificial Sequence: Synthetic oligonucleotide
  Sense strand starting at position 2437 of SEQ ID NO: 1659
gagacacucggccaaguaa

SEQ ID NO: 129809 - RNA, 19 nt, Artificial Sequence
  Description of Artificial Sequence: Synthetic oligonucleotide
  Antisense strand to SEQ ID NO: 129808
uuacuuggccgagugucuc

SEQ ID NO: 129810 - RNA, 19 nt, Artificial Sequence
  Description of Artificial Sequence: Synthetic oligonucleotide
  Sense strand starting at position 2468 of SEQ ID NO: 1659
ggccuuguuuaagugaaga

SEQ ID NO: 129811 - RNA, 19 nt, Artificial Sequence
  Description of Artificial Sequence: Synthetic oligonucleotide
  Antisense strand to SEQ ID NO: 129810
ucuucacuuaaacaaggcc

SEQ ID NO: 129812 - RNA, 19 nt, Artificial Sequence
  Description of Artificial Sequence: Synthetic oligonucleotide
  Sense strand starting at position 2473 of SEQ ID NO: 1659
uguuuaagugaagaacuuu

SEQ ID NO: 129813 - RNA, 19 nt, Artificial Sequence
  Description of Artificial Sequence: Synthetic oligonucleotide
  Antisense strand to SEQ ID NO: 129812
aaaguucuucacuuaaaca

SEQ ID NO: 129814 - RNA, 19 nt, Artificial Sequence
  Description of Artificial Sequence: Synthetic oligonucleotide
  Sense strand starting at position 2531 of SEQ ID NO: 1659
aaagaaguggcacacgauu

SEQ ID NO: 129815 - RNA, 19 nt, Artificial Sequence
  Description of Artificial Sequence: Synthetic oligonucleotide
  Antisense strand to SEQ ID NO: 129814
aaucgugugccacuucuuu

SEQ ID NO: 129816 - RNA, 19 nt, Artificial Sequence
  Description of Artificial Sequence: Synthetic oligonucleotide
  Sense strand starting at position 2537 of SEQ ID NO: 1659
guggcacacgauuguuaaa

SEQ ID NO: 129817 - RNA, 19 nt, Artificial Sequence
  Description of Artificial Sequence: Synthetic oligonucleotide
  Antisense strand to SEQ ID NO: 129816
uuuaacaaucgugugccac

SEQ ID NO: 129818 - RNA, 19 nt, Artificial Sequence
  Description of Artificial Sequence: Synthetic oligonucleotide
  Sense strand starting at position 2549 of SEQ ID NO: 1659
uguuaaagcgauuauugug

SEQ ID NO: 129819 - RNA, 19 nt, Artificial Sequence
  Description of Artificial Sequence: Synthetic oligonucleotide
  Antisense strand to SEQ ID NO: 129818
cacaauaaucgcuuuaaca

SEQ ID NO: 129820 - RNA, 19 nt, Artificial Sequence
  Description of Artificial Sequence: Synthetic oligonucleotide
  Sense strand starting at position 2558 of SEQ ID NO: 1659
gauuauugugauggaaacu

SEQ ID NO: 129821 - RNA, 19 nt, Artificial Sequence
  Description of Artificial Sequence: Synthetic oligonucleotide
  Antisense strand to SEQ ID NO: 129820
aguuuccaucacaauaauc

SEQ ID NO: 129822 - RNA, 19 nt, Artificial Sequence
  Description of Artificial Sequence: Synthetic oligonucleotide
  Sense strand starting at position 2592 of SEQ ID NO: 1659
ugaguagauucagcagaga

SEQ ID NO: 129823 - RNA, 19 nt, Artificial Sequence
  Description of Artificial Sequence: Synthetic oligonucleotide
  Antisense strand to SEQ ID NO: 129822
ucucugcugaaucuacuca

SEQ ID NO: 129824 - RNA, 19 nt, Artificial Sequence
  Description of Artificial Sequence: Synthetic oligonucleotide
  Sense strand starting at position 2671 of SEQ ID NO: 1659
cugagauggguuggcucaa

SEQ ID NO: 129825 - RNA, 19 nt, Artificial Sequence
  Description of Artificial Sequence: Synthetic oligonucleotide
  Antisense strand to SEQ ID NO: 129824
uugagccaacccaucucag

SEQ ID NO: 129826 - RNA, 19 nt, Artificial Sequence
  Description of Artificial Sequence: Synthetic oligonucleotide
  Sense strand starting at position 2672 of SEQ ID NO: 1659
ugagauggguuggcucaaa

SEQ ID NO: 129827 - RNA, 19 nt, Artificial Sequence
  Description of Artificial Sequence: Synthetic oligonucleotide
  Antisense strand to SEQ ID NO: 129826
uuugagccaacccaucuca

SEQ ID NO: 129828 - RNA, 19 nt, Artificial Sequence
  Description of Artificial Sequence: Synthetic oligonucleotide
  Sense strand starting at position 2690 of SEQ ID NO: 1659
agaaauugguuaguccacu

SEQ ID NO: 129829 - RNA, 19 nt, Artificial Sequence
  Description of Artificial Sequence: Synthetic oligonucleotide
  Antisense strand to SEQ ID NO: 129828
aguggacuaaccaauuucu

SEQ ID NO: 129830 - RNA, 19 nt, Artificial Sequence
  Description of Artificial Sequence: Synthetic oligonucleotide
  Sense strand starting at position 2759 of SEQ ID NO: 1659
ucagguagcuaagaaauuu

SEQ ID NO: 129831 - RNA, 19 nt, Artificial Sequence
  Description of Artificial Sequence: Synthetic oligonucleotide
  Antisense strand to SEQ ID NO: 129830
aaauuucuuagcuaccuga

SEQ ID NO: 129832 - RNA, 19 nt, Artificial Sequence
  Description of Artificial Sequence: Synthetic oligonucleotide
  Sense strand starting at position 2779 of SEQ ID NO: 1659
guccuuuauugccuucuga

SEQ ID NO: 129833 - RNA, 19 nt, Artificial Sequence
  Description of Artificial Sequence: Synthetic oligonucleotide
  Antisense strand to SEQ ID NO: 129832
ucagaaggcaauaaaggac

SEQ ID NO: 129834 - RNA, 19 nt, Artificial Sequence
  Description of Artificial Sequence: Synthetic oligonucleotide
  Sense strand starting at position 2880 of SEQ ID NO: 1659
augugaaaucaagguacuu

SEQ ID NO: 129835 - RNA, 19 nt, Artificial Sequence
  Description of Artificial Sequence: Synthetic oligonucleotide
  Antisense strand to SEQ ID NO: 129834
aaguaccuugauuucacau

SEQ ID NO: 129836 - RNA, 19 nt, Artificial Sequence
  Description of Artificial Sequence: Synthetic oligonucleotide
  Sense strand starting at position 2927 of SEQ ID NO: 1659
guuuauuugugcucuuuau

SEQ ID NO: 129837 - RNA, 19 nt, Artificial Sequence
  Description of Artificial Sequence: Synthetic oligonucleotide
  Antisense strand to SEQ ID NO: 129836
auaaagagcacaaauaaac

SEQ ID NO: 129838 - RNA, 19 nt, Artificial Sequence
  Description of Artificial Sequence: Synthetic oligonucleotide
  Sense strand starting at position 3113 of SEQ ID NO: 1659
aguguaggaugcuuaggaa

SEQ ID NO: 129839 - RNA, 19 nt, Artificial Sequence
  Description of Artificial Sequence: Synthetic oligonucleotide
  Antisense strand to SEQ ID NO: 129838
uuccuaagcauccuacacu

SEQ ID NO: 129840 - RNA, 19 nt, Artificial Sequence
  Description of Artificial Sequence: Synthetic oligonucleotide
  Sense strand starting at position 3220 of SEQ ID NO: 1659
uuaggauuaugggaucaau

SEQ ID NO: 129841 - RNA, 19 nt, Artificial Sequence
  Description of Artificial Sequence: Synthetic oligonucleotide
  Antisense strand to SEQ ID NO: 129840
auugaucccauaauccuaa

SEQ ID NO: 129842 - RNA, 19 nt, Artificial Sequence
  Description of Artificial Sequence: Synthetic oligonucleotide
  Sense strand starting at position 3273 of SEQ ID NO: 1659
uauacugucguguaauuag

SEQ ID NO: 129843 - RNA, 19 nt, Artificial Sequence
  Description of Artificial Sequence: Synthetic oligonucleotide
  Antisense strand to SEQ ID NO: 129842
cuaauuacacgacaguaua

SEQ ID NO: 129844 - RNA, 19 nt, Artificial Sequence
  Description of Artificial Sequence: Synthetic oligonucleotide
  Sense strand starting at position 3330 of SEQ ID NO: 1659
uuacguuauuaaccuuuga

SEQ ID NO: 129845 - RNA, 19 nt, Artificial Sequence
  Description of Artificial Sequence: Synthetic oligonucleotide
  Antisense strand to SEQ ID NO: 129844
ucaaagguuaauaacguaa

SEQ ID NO: 129846 - RNA, 19 nt, Artificial Sequence
  Description of Artificial Sequence: Synthetic oligonucleotide
  Sense strand starting at position 3394 of SEQ ID NO: 1659
gccaaugagaucuagcgca

SEQ ID NO: 129847 - RNA, 19 nt, Artificial Sequence
  Description of Artificial Sequence: Synthetic oligonucleotide
  Antisense strand to SEQ ID NO: 129846
ugcgcuagaucucauuggc

SEQ ID NO: 129848 - RNA, 19 nt, Artificial Sequence
  Description of Artificial Sequence: Synthetic oligonucleotide
  Sense strand starting at position 3399 of SEQ ID NO: 1659
ugagaucuagcgcagacua

SEQ ID NO: 129849 - RNA, 19 nt, Artificial Sequence
  Description of Artificial Sequence: Synthetic oligonucleotide
  Antisense strand to SEQ ID NO: 129848
uagucugcgcuagaucuca

SEQ ID NO: 129850 - RNA, 19 nt, Artificial Sequence
  Description of Artificial Sequence: Synthetic oligonucleotide
  Sense strand starting at position 3419 of SEQ ID NO: 1659
gccauauaccguugaccag

SEQ ID NO: 129851 - RNA, 19 nt, Artificial Sequence
  Description of Artificial Sequence: Synthetic oligonucleotide
  Antisense strand to SEQ ID NO: 129850
cuggucaacgguauauggc

SEQ ID NO: 129852 - RNA, 19 nt, Artificial Sequence
  Description of Artificial Sequence: Synthetic oligonucleotide
  Sense strand starting at position 3443 of SEQ ID NO: 1659
guuagcaugcuuuauugaa

SEQ ID NO: 129853 - RNA, 19 nt, Artificial Sequence
  Description of Artificial Sequence: Synthetic oligonucleotide
  Antisense strand to SEQ ID NO: 129852
uucaauaaagcaugcuaac

SEQ ID NO: 129854 - RNA, 19 nt, Artificial Sequence
  Description of Artificial Sequence: Synthetic oligonucleotide
  Sense strand starting at position 3937 of SEQ ID NO: 1659
gugguauuccuagauacuu

SEQ ID NO: 129855 - RNA, 19 nt, Artificial Sequence
  Description of Artificial Sequence: Synthetic oligonucleotide
  Antisense strand to SEQ ID NO: 129854
aaguaucuaggaauaccac

SEQ ID NO: 129856 - RNA, 19 nt, Artificial Sequence
  Description of Artificial Sequence: Synthetic oligonucleotide
  Sense strand starting at position 159 of SEQ ID NO: 1658
ucaucuuaggaguguagaa

SEQ ID NO: 129857 - RNA, 19 nt, Artificial Sequence
  Description of Artificial Sequence: Synthetic oligonucleotide
  Antisense strand to SEQ ID NO: 129856
uucuacacuccuaagauga

SEQ ID NO: 129858 - RNA, 19 nt, Artificial Sequence
  Description of Artificial Sequence: Synthetic oligonucleotide
  Sense strand starting at position 526 of SEQ ID NO: 1658
ccgagucagcacuaacuua

SEQ ID NO: 129859 - RNA, 19 nt, Artificial Sequence
  Description of Artificial Sequence: Synthetic oligonucleotide
  Antisense strand to SEQ ID NO: 129858
uaaguuagugcugacucgg

SEQ ID NO: 129860 - RNA, 19 nt, Artificial Sequence
  Description of Artificial Sequence: Synthetic oligonucleotide
  Sense strand starting at position 681 of SEQ ID NO: 1658
cccucuagcccaggauuau

SEQ ID NO: 129861 - RNA, 19 nt, Artificial Sequence
  Description of Artificial Sequence: Synthetic oligonucleotide
  Antisense strand to SEQ ID NO: 129860
auaauccugggcuagaggg

SEQ ID NO: 129862 - RNA, 19 nt, Artificial Sequence
  Description of Artificial Sequence: Synthetic oligonucleotide
  Sense strand starting at position 682 of SEQ ID NO: 1658
ccucuagcccaggauuauu

SEQ ID NO: 129863 - RNA, 19 nt, Artificial Sequence
  Description of Artificial Sequence: Synthetic oligonucleotide
  Antisense strand to SEQ ID NO: 129862
aauaauccugggcuagagg

SEQ ID NO: 129864 - RNA, 19 nt, Artificial Sequence
  Description of Artificial Sequence: Synthetic oligonucleotide
  Sense strand starting at position 732 of SEQ ID NO: 1658
uggcaauuagugugacaag

SEQ ID NO: 129865 - RNA, 19 nt, Artificial Sequence
  Description of Artificial Sequence: Synthetic oligonucleotide
  Antisense strand to SEQ ID NO: 129864
cuugucacacuaauugcca

SEQ ID NO: 129866 - RNA, 19 nt, Artificial Sequence
  Description of Artificial Sequence: Synthetic oligonucleotide
  Sense strand starting at position 744 of SEQ ID NO: 1658
ugacaagagucuucuuugu

SEQ ID NO: 129867 - RNA, 19 nt, Artificial Sequence
  Description of Artificial Sequence: Synthetic oligonucleotide
  Antisense strand to SEQ ID NO: 129866
acaaagaagacucuuguca

SEQ ID NO: 129868 - RNA, 19 nt, Artificial Sequence
  Description of Artificial Sequence: Synthetic oligonucleotide
  Sense strand starting at position 746 of SEQ ID NO: 1658
acaagagucuucuuuguac

SEQ ID NO: 129869 - RNA, 19 nt, Artificial Sequence
  Description of Artificial Sequence: Synthetic oligonucleotide
  Antisense strand to SEQ ID NO: 129868
guacaaagaagacucuugu

SEQ ID NO: 129870 - RNA, 19 nt, Artificial Sequence
  Description of Artificial Sequence: Synthetic oligonucleotide
  Sense strand starting at position 748 of SEQ ID NO: 1658
aagagucuucuuuguacug

SEQ ID NO: 129871 - RNA, 19 nt, Artificial Sequence
  Description of Artificial Sequence: Synthetic oligonucleotide
  Antisense strand to SEQ ID NO: 129870
caguacaaagaagacucuu

SEQ ID NO: 129872 - RNA, 19 nt, Artificial Sequence
  Description of Artificial Sequence: Synthetic oligonucleotide
  Sense strand starting at position 897 of SEQ ID NO: 1658
ggcauagucacuuggagac

SEQ ID NO: 129873 - RNA, 19 nt, Artificial Sequence
  Description of Artificial Sequence: Synthetic oligonucleotide
  Antisense strand to SEQ ID NO: 129872
gucuccaagugacuaugcc

SEQ ID NO: 129874 - RNA, 19 nt, Artificial Sequence
  Description of Artificial Sequence: Synthetic oligonucleotide
  Sense strand starting at position 934 of SEQ ID NO: 1658
aggauacugcucuaaucuu

SEQ ID NO: 129875 - RNA, 19 nt, Artificial Sequence
  Description of Artificial Sequence: Synthetic oligonucleotide
  Antisense strand to SEQ ID NO: 129874
aagauuagagcaguauccu

SEQ ID NO: 129876 - RNA, 19 nt, Artificial Sequence
  Description of Artificial Sequence: Synthetic oligonucleotide
  Sense strand starting at position 961 of SEQ ID NO: 1658
aucuuauugugggucucua

SEQ ID NO: 129877 - RNA, 19 nt, Artificial Sequence
  Description of Artificial Sequence: Synthetic oligonucleotide
  Antisense strand to SEQ ID NO: 129876
uagagacccacaauaagau

SEQ ID NO: 129878 - RNA, 19 nt, Artificial Sequence
  Description of Artificial Sequence: Synthetic oligonucleotide
  Sense strand starting at position 1088 of SEQ ID NO: 1658
cugguuaauuaaguuacau

SEQ ID NO: 129879 - RNA, 19 nt, Artificial Sequence
  Description of Artificial Sequence: Synthetic oligonucleotide
  Antisense strand to SEQ ID NO: 129878
auguaacuuaauuaaccag

SEQ ID NO: 129880 - RNA, 19 nt, Artificial Sequence
  Description of Artificial Sequence: Synthetic oligonucleotide
  Sense strand starting at position 1175 of SEQ ID NO: 1658
gguuuauuauuaccacuag

SEQ ID NO: 129881 - RNA, 19 nt, Artificial Sequence
  Description of Artificial Sequence: Synthetic oligonucleotide
  Antisense strand to SEQ ID NO: 129880
cuagugguaauaauaaacc

SEQ ID NO: 129882 - RNA, 19 nt, Artificial Sequence
  Description of Artificial Sequence: Synthetic oligonucleotide
  Sense strand starting at position 1233 of SEQ ID NO: 1658
ccugaacugugcccuauuu

SEQ ID NO: 129883 - RNA, 19 nt, Artificial Sequence
  Description of Artificial Sequence: Synthetic oligonucleotide
  Antisense strand to SEQ ID NO: 129882
aaauagggcacaguucagg

SEQ ID NO: 129884 - RNA, 19 nt, Artificial Sequence
  Description of Artificial Sequence: Synthetic oligonucleotide
  Sense strand starting at position 1423 of SEQ ID NO: 1658
uuuguaaacuguccaugaa

SEQ ID NO: 129885 - RNA, 19 nt, Artificial Sequence
  Description of Artificial Sequence: Synthetic oligonucleotide
  Antisense strand to SEQ ID NO: 129884
uucauggacaguuuacaaa

SEQ ID NO: 129886 - RNA, 19 nt, Artificial Sequence
  Description of Artificial Sequence: Synthetic oligonucleotide
  Sense strand starting at position 1424 of SEQ ID NO: 1658
uuguaaacuguccaugaag

SEQ ID NO: 129887 - RNA, 19 nt, Artificial Sequence
  Description of Artificial Sequence: Synthetic oligonucleotide
  Antisense strand to SEQ ID NO: 129886
cuucauggacaguuuacaa

SEQ ID NO: 129888 - RNA, 19 nt, Artificial Sequence
  Description of Artificial Sequence: Synthetic oligonucleotide
  Sense strand starting at position 1628 of SEQ ID NO: 1658
uuugauaaacacugguuaa

SEQ ID NO: 129889 - RNA, 19 nt, Artificial Sequence
  Description of Artificial Sequence: Synthetic oligonucleotide
  Antisense strand to SEQ ID NO: 129888
uuaaccaguguuuaucaaa

SEQ ID NO: 129890 - RNA, 19 nt, Artificial Sequence
  Description of Artificial Sequence: Synthetic oligonucleotide
  Sense strand starting at position 1683 of SEQ ID NO: 1658
aguuucuagcuauauggau

SEQ ID NO: 129891 - RNA, 19 nt, Artificial Sequence
  Description of Artificial Sequence: Synthetic oligonucleotide
  Antisense strand to SEQ ID NO: 129890
auccauauagcuagaaacu

SEQ ID NO: 129892 - RNA, 19 nt, Artificial Sequence
  Description of Artificial Sequence: Synthetic oligonucleotide
  Sense strand starting at position 1767 of SEQ ID NO: 1658
gaggucucccuggauucuu

SEQ ID NO: 129893 - RNA, 19 nt, Artificial Sequence
  Description of Artificial Sequence: Synthetic oligonucleotide
  Antisense strand to SEQ ID NO: 129892
aagaauccagggagaccuc

SEQ ID NO: 129894 - RNA, 19 nt, Artificial Sequence
  Description of Artificial Sequence: Synthetic oligonucleotide
  Sense strand starting at position 1911 of SEQ ID NO: 1658
acuacagaguccucaauga

SEQ ID NO: 129895 - RNA, 19 nt, Artificial Sequence
  Description of Artificial Sequence: Synthetic oligonucleotide
  Antisense strand to SEQ ID NO: 129894
ucauugaggacucuguagu

SEQ ID NO: 129896 - RNA, 19 nt, Artificial Sequence
  Description of Artificial Sequence: Synthetic oligonucleotide
  Sense strand starting at position 1988 of SEQ ID NO: 1658
gguguccgccaugcuauaa

SEQ ID NO: 129897 - RNA, 19 nt, Artificial Sequence
  Description of Artificial Sequence: Synthetic oligonucleotide
  Antisense strand to SEQ ID NO: 129896
uuauagcauggcggacacc

SEQ ID NO: 129898 - RNA, 19 nt, Artificial Sequence
  Description of Artificial Sequence: Synthetic oligonucleotide
  Sense strand starting at position 1992 of SEQ ID NO: 1658
uccgccaugcuauaagaaa

SEQ ID NO: 129899 - RNA, 19 nt, Artificial Sequence
  Description of Artificial Sequence: Synthetic oligonucleotide
  Antisense strand to SEQ ID NO: 129898
uuucuuauagcauggcgga

SEQ ID NO: 129900 - RNA, 19 nt, Artificial Sequence
  Description of Artificial Sequence: Synthetic oligonucleotide
  Sense strand starting at position 2041 of SEQ ID NO: 1658
aggagauauugcuuuauac

SEQ ID NO: 129901 - RNA, 19 nt, Artificial Sequence
  Description of Artificial Sequence: Synthetic oligonucleotide
  Antisense strand to SEQ ID NO: 129900
guauaaagcaauaucuccu

SEQ ID NO: 129902 - RNA, 19 nt, Artificial Sequence
  Description of Artificial Sequence: Synthetic oligonucleotide
  Sense strand starting at position 2077 of SEQ ID NO: 1658
cuuugacuccauugguaac

SEQ ID NO: 129903 - RNA, 19 nt, Artificial Sequence
  Description of Artificial Sequence: Synthetic oligonucleotide
  Antisense strand to SEQ ID NO: 129902
guuaccaauggagucaaag

SEQ ID NO: 129904 - RNA, 19 nt, Artificial Sequence
  Description of Artificial Sequence: Synthetic oligonucleotide
  Sense strand starting at position 2952 of SEQ ID NO: 1658
auggauuguucugcauuaa

SEQ ID NO: 129905 - RNA, 19 nt, Artificial Sequence
  Description of Artificial Sequence: Synthetic oligonucleotide
  Antisense strand to SEQ ID NO: 129904
uuaaugcagaacaauccau

SEQ ID NO: 129906 - RNA, 19 nt, Artificial Sequence
  Description of Artificial Sequence: Synthetic oligonucleotide
  Sense strand starting at position 2953 of SEQ ID NO: 1658
uggauuguucugcauuaau

SEQ ID NO: 129907 - RNA, 19 nt, Artificial Sequence
  Description of Artificial Sequence: Synthetic oligonucleotide
  Antisense strand to SEQ ID NO: 129906
auuaaugcagaacaaucca

SEQ ID NO: 129908 - RNA, 19 nt, Artificial Sequence
  Description of Artificial Sequence: Synthetic oligonucleotide
  Sense strand starting at position 3055 of SEQ ID NO: 1658
augagaaccuuacuuguca

SEQ ID NO: 129909 - RNA, 19 nt, Artificial Sequence
  Description of Artificial Sequence: Synthetic oligonucleotide
  Antisense strand to SEQ ID NO: 129908
ugacaaguaagguucucau

SEQ ID NO: 129910 - RNA, 19 nt, Artificial Sequence
  Description of Artificial Sequence: Synthetic oligonucleotide
  Sense strand starting at position 3056 of SEQ ID NO: 1658
ugagaaccuuacuugucau

SEQ ID NO: 129911 - RNA, 19 nt, Artificial Sequence
  Description of Artificial Sequence: Synthetic oligonucleotide
  Antisense strand to SEQ ID NO: 129910
augacaaguaagguucuca

SEQ ID NO: 129912 - RNA, 19 nt, Artificial Sequence
  Description of Artificial Sequence: Synthetic oligonucleotide
  Sense strand starting at position 3103 of SEQ ID NO: 1658
guacgucuagucuaggaaa

SEQ ID NO: 129913 - RNA, 19 nt, Artificial Sequence
  Description of Artificial Sequence: Synthetic oligonucleotide
  Antisense strand to SEQ ID NO: 129912
uuuccuagacuagacguac

SEQ ID NO: 129914 - RNA, 19 nt, Artificial Sequence
  Description of Artificial Sequence: Synthetic oligonucleotide
  Sense strand starting at position 3105 of SEQ ID NO: 1658
acgucuagucuaggaaauc

SEQ ID NO: 129915 - RNA, 19 nt, Artificial Sequence
  Description of Artificial Sequence: Synthetic oligonucleotide
  Antisense strand to SEQ ID NO: 129914
gauuuccuagacuagacgu

SEQ ID NO: 129916 - RNA, 19 nt, Artificial Sequence
  Description of Artificial Sequence: Synthetic oligonucleotide
  Sense strand starting at position 3117 of SEQ ID NO: 1658
ggaaauccuggaggccauu

SEQ ID NO: 129917 - RNA, 19 nt, Artificial Sequence
  Description of Artificial Sequence: Synthetic oligonucleotide
  Antisense strand to SEQ ID NO: 129916
aauggccuccaggauuucc

SEQ ID NO: 129918 - RNA, 19 nt, Artificial Sequence
  Description of Artificial Sequence: Synthetic oligonucleotide
  Sense strand starting at position 3130 of SEQ ID NO: 1658
gccauuccacugugauuuc

SEQ ID NO: 129919 - RNA, 19 nt, Artificial Sequence
  Description of Artificial Sequence: Synthetic oligonucleotide
  Antisense strand to SEQ ID NO: 129918
gaaaucacaguggaauggc

SEQ ID NO: 129920 - RNA, 19 nt, Artificial Sequence
  Description of Artificial Sequence: Synthetic oligonucleotide
  Sense strand starting at position 3674 of SEQ ID NO: 1658
acuguaaggcucuaagugu

SEQ ID NO: 129921 - RNA, 19 nt, Artificial Sequence
  Description of Artificial Sequence: Synthetic oligonucleotide
  Antisense strand to SEQ ID NO: 129920
acacuuagagccuuacagu

SEQ ID NO: 129922 - RNA, 19 nt, Artificial Sequence
  Description of Artificial Sequence: Synthetic oligonucleotide
  Sense strand starting at position 3689 of SEQ ID NO: 1658
guguccuuagugucuuagu

SEQ ID NO: 129923 - RNA, 19 nt, Artificial Sequence
  Description of Artificial Sequence: Synthetic oligonucleotide
  Antisense strand to SEQ ID NO: 129922
acuaagacacuaaggacac

SEQ ID NO: 129924 - RNA, 19 nt, Artificial Sequence
  Description of Artificial Sequence: Synthetic oligonucleotide
  Sense strand starting at position 3715 of SEQ ID NO: 1658
cugcuacauccauaagcga

SEQ ID NO: 129925 - RNA, 19 nt, Artificial Sequence
  Description of Artificial Sequence: Synthetic oligonucleotide
  Antisense strand to SEQ ID NO: 129924
ucgcuuauggauguagcag

SEQ ID NO: 129926 - RNA, 19 nt, Artificial Sequence
  Description of Artificial Sequence: Synthetic oligonucleotide
  Sense strand starting at position 3779 of SEQ ID NO: 1658
uuuaguuagggcuauacau

SEQ ID NO: 129927 - RNA, 19 nt, Artificial Sequence
  Description of Artificial Sequence: Synthetic oligonucleotide
  Antisense strand to SEQ ID NO: 129926
auguauagcccuaacuaaa

SEQ ID NO: 129928 - RNA, 19 nt, Artificial Sequence
  Description of Artificial Sequence: Synthetic oligonucleotide
  Sense strand starting at position 3789 of SEQ ID NO: 1658
gcuauacauccugacagua

SEQ ID NO: 129929 - RNA, 19 nt, Artificial Sequence
  Description of Artificial Sequence: Synthetic oligonucleotide
  Antisense strand to SEQ ID NO: 129928
uacugucaggauguauagc

SEQ ID NO: 129930 - RNA, 19 nt, Artificial Sequence
  Description of Artificial Sequence: Synthetic oligonucleotide
  Sense strand starting at position 3915 of SEQ ID NO: 1658
uggguaaagugcuuaacug

SEQ ID NO: 129931 - RNA, 19 nt, Artificial Sequence
  Description of Artificial Sequence: Synthetic oligonucleotide
  Antisense strand to SEQ ID NO: 129930
caguuaagcacuuuaccca

SEQ ID NO: 129932 - RNA, 19 nt, Artificial Sequence
  Description of Artificial Sequence: Synthetic oligonucleotide
  Sense strand starting at position 3919 of SEQ ID NO: 1658
uaaagugcuuaacuggauu

SEQ ID NO: 129933 - RNA, 19 nt, Artificial Sequence
  Description of Artificial Sequence: Synthetic oligonucleotide
  Antisense strand to SEQ ID NO: 129932
aauccaguuaagcacuuua

SEQ ID NO: 129934 - RNA, 19 nt, Artificial Sequence
  Description of Artificial Sequence: Synthetic oligonucleotide
  Sense strand starting at position 3922 of SEQ ID NO: 1658
agugcuuaacuggauucua

SEQ ID NO: 129935 - RNA, 19 nt, Artificial Sequence
  Description of Artificial Sequence: Synthetic oligonucleotide
  Antisense strand to SEQ ID NO: 129934
uagaauccaguuaagcacu

SEQ ID NO: 129936 - RNA, 19 nt, Artificial Sequence
  Description of Artificial Sequence: Synthetic oligonucleotide
  Sense strand starting at position 3076 of SEQ ID NO: 1660
uccuaucacuguugaagga

SEQ ID NO: 129937 - RNA, 19 nt, Artificial Sequence
  Description of Artificial Sequence: Synthetic oligonucleotide
  Antisense strand to SEQ ID NO: 129936
uccuucaacagugauagga

SEQ ID NO: 129938 - RNA, 19 nt, Artificial Sequence
  Description of Artificial Sequence: Synthetic oligonucleotide
  Sense strand starting at position 2558 of SEQ ID NO: 1660
cgacaucggucugccgaau

SEQ ID NO: 129939 - RNA, 19 nt, Artificial Sequence
  Description of Artificial Sequence: Synthetic oligonucleotide
  Antisense strand to SEQ ID NO: 129938
auucggcagaccgaugucg

SEQ ID NO: 129940 - RNA, 19 nt, Artificial Sequence
  Description of Artificial Sequence: Synthetic oligonucleotide
  Sense strand starting at position 2069 of SEQ ID NO: 1660
uucuucucgcuggaagacu

SEQ ID NO: 129941 - RNA, 19 nt, Artificial Sequence
  Description of Artificial Sequence: Synthetic oligonucleotide
  Antisense strand to SEQ ID NO: 129940
agucuuccagcgagaagaa

SEQ ID NO: 129942 - RNA, 19 nt, Artificial Sequence
  Description of Artificial Sequence: Synthetic oligonucleotide
  Sense strand starting at position 2067 of SEQ ID NO: 1660
cuuucuucucgcuggaaga

SEQ ID NO: 129943 - RNA, 19 nt, Artificial Sequence
  Description of Artificial Sequence: Synthetic oligonucleotide
  Antisense strand to SEQ ID NO: 129942
ucuuccagcgagaagaaag

SEQ ID NO: 129944 - RNA, 19 nt, Artificial Sequence
  Description of Artificial Sequence: Synthetic oligonucleotide
  Sense strand starting at position 1708 of SEQ ID NO: 1660
ggagaagcauucccagauc

SEQ ID NO: 129945 - RNA, 19 nt, Artificial Sequence
  Description of Artificial Sequence: Synthetic oligonucleotide
  Antisense strand to SEQ ID NO: 129944
gaucugggaaugcuucucc

SEQ ID NO: 129946 - RNA, 19 nt, Artificial Sequence
  Description of Artificial Sequence: Synthetic oligonucleotide
  Sense strand starting at position 1696 of SEQ ID NO: 1660
ccacauaucuuuggagaag

SEQ ID NO: 129947 - RNA, 19 nt, Artificial Sequence
  Description of Artificial Sequence: Synthetic oligonucleotide
  Antisense strand to SEQ ID NO: 129946
cuucuccaaagauaugugg

SEQ ID NO: 129948 - RNA, 19 nt, Artificial Sequence
  Description of Artificial Sequence: Synthetic oligonucleotide
  Sense strand starting at position 1695 of SEQ ID NO: 1660
uccacauaucuuuggagaa

SEQ ID NO: 129949 - RNA, 19 nt, Artificial Sequence
  Description of Artificial Sequence: Synthetic oligonucleotide
  Antisense strand to SEQ ID NO: 129948
uucuccaaagauaugugga

SEQ ID NO: 129950 - RNA, 19 nt, Artificial Sequence
  Description of Artificial Sequence: Synthetic oligonucleotide
  Sense strand starting at position 1663 of SEQ ID NO: 1660
gccucaguaucaccagaga

SEQ ID NO: 129951 - RNA, 19 nt, Artificial Sequence
  Description of Artificial Sequence: Synthetic oligonucleotide
  Antisense strand to SEQ ID NO: 129950
ucucuggugauacugaggc

SEQ ID NO: 129952 - RNA, 19 nt, Artificial Sequence
  Description of Artificial Sequence: Synthetic oligonucleotide
  Sense strand starting at position 1544 of SEQ ID NO: 1660
cagaaacggacguaguuaa

SEQ ID NO: 129953 - RNA, 19 nt, Artificial Sequence
  Description of Artificial Sequence: Synthetic oligonucleotide
  Antisense strand to SEQ ID NO: 129952
uuaacuacguccguuucug

SEQ ID NO: 129954 - RNA, 19 nt, Artificial Sequence
  Description of Artificial Sequence: Synthetic oligonucleotide
  Sense strand starting at position 1483 of SEQ ID NO: 1660
cguuguuugcaggacagua

SEQ ID NO: 129955 - RNA, 19 nt, Artificial Sequence
  Description of Artificial Sequence: Synthetic oligonucleotide
  Antisense strand to SEQ ID NO: 129954
uacuguccugcaaacaacg

SEQ ID NO: 129956 - RNA, 19 nt, Artificial Sequence
  Description of Artificial Sequence: Synthetic oligonucleotide
  Sense strand starting at position 1480 of SEQ ID NO: 1660
uuacguuguuugcaggaca

SEQ ID NO: 129957 - RNA, 19 nt, Artificial Sequence
  Description of Artificial Sequence: Synthetic oligonucleotide
  Antisense strand to SEQ ID NO: 129956
uguccugcaaacaacguaa

SEQ ID NO: 129958 - RNA, 19 nt, Artificial Sequence
  Description of Artificial Sequence: Synthetic oligonucleotide
  Sense strand starting at position 1472 of SEQ ID NO: 1660
agaugagguuacguuguuu

SEQ ID NO: 129959 - RNA, 19 nt, Artificial Sequence
  Description of Artificial Sequence: Synthetic oligonucleotide
  Antisense strand to SEQ ID NO: 129958
aaacaacguaaccucaucu

SEQ ID NO: 129960 - RNA, 19 nt, Artificial Sequence
  Description of Artificial Sequence: Synthetic oligonucleotide
  Sense strand starting at position 1381 of SEQ ID NO: 1660
guguuauucucaguccaua

SEQ ID NO: 129961 - RNA, 19 nt, Artificial Sequence
  Description of Artificial Sequence: Synthetic oligonucleotide
  Antisense strand to SEQ ID NO: 129960
uauggacugagaauaacac

SEQ ID NO: 129962 - RNA, 19 nt, Artificial Sequence
  Description of Artificial Sequence: Synthetic oligonucleotide
  Sense strand starting at position 1379 of SEQ ID NO: 1660
caguguuauucucagucca

SEQ ID NO: 129963 - RNA, 19 nt, Artificial Sequence
  Description of Artificial Sequence: Synthetic oligonucleotide
  Antisense strand to SEQ ID NO: 129962
uggacugagaauaacacug

SEQ ID NO: 129964 - RNA, 19 nt, Artificial Sequence
  Description of Artificial Sequence: Synthetic oligonucleotide
  Sense strand starting at position 1370 of SEQ ID NO: 1660
gugaacaggcaguguuauu

SEQ ID NO: 129965 - RNA, 19 nt, Artificial Sequence
  Description of Artificial Sequence: Synthetic oligonucleotide
  Antisense strand to SEQ ID NO: 129964
aauaacacugccuguucac

SEQ ID NO: 129966 - RNA, 19 nt, Artificial Sequence
  Description of Artificial Sequence: Synthetic oligonucleotide
  Sense strand starting at position 1295 of SEQ ID NO: 1660
cggucugucacagaccuua

SEQ ID NO: 129967 - RNA, 19 nt, Artificial Sequence
  Description of Artificial Sequence: Synthetic oligonucleotide
  Antisense strand to SEQ ID NO: 129966
uaaggucugugacagaccg

SEQ ID NO: 129968 - RNA, 19 nt, Artificial Sequence
  Description of Artificial Sequence: Synthetic oligonucleotide
  Sense strand starting at position 1271 of SEQ ID NO: 1660
cuuaaagauugggagauga

SEQ ID NO: 129969 - RNA, 19 nt, Artificial Sequence
  Description of Artificial Sequence: Synthetic oligonucleotide
  Antisense strand to SEQ ID NO: 129968
ucaucucccaaucuuuaag

SEQ ID NO: 129970 - RNA, 19 nt, Artificial Sequence
  Description of Artificial Sequence: Synthetic oligonucleotide
  Sense strand starting at position 1270 of SEQ ID NO: 1660
ccuuaaagauugggagaug

SEQ ID NO: 129971 - RNA, 19 nt, Artificial Sequence
  Description of Artificial Sequence: Synthetic oligonucleotide
  Antisense strand to SEQ ID NO: 129970
caucucccaaucuuuaagg

SEQ ID NO: 129972 - RNA, 19 nt, Artificial Sequence
  Description of Artificial Sequence: Synthetic oligonucleotide
  Sense strand starting at position 1248 of SEQ ID NO: 1660
gauuaugcgugauucugau

SEQ ID NO: 129973 - RNA, 19 nt, Artificial Sequence
  Description of Artificial Sequence: Synthetic oligonucleotide
  Antisense strand to SEQ ID NO: 129972
aucagaaucacgcauaauc

SEQ ID NO: 129974 - RNA, 19 nt, Artificial Sequence
  Description of Artificial Sequence: Synthetic oligonucleotide
  Sense strand starting at position 1246 of SEQ ID NO: 1660
gggauuaugcgugauucug

SEQ ID NO: 129975 - RNA, 19 nt, Artificial Sequence
  Description of Artificial Sequence: Synthetic oligonucleotide
  Antisense strand to SEQ ID NO: 129974
cagaaucacgcauaauccc

SEQ ID NO: 129976 - RNA, 19 nt, Artificial Sequence
  Description of Artificial Sequence: Synthetic oligonucleotide
  Sense strand starting at position 1245 of SEQ ID NO: 1660
ugggauuaugcgugauucu

SEQ ID NO: 129977 - RNA, 19 nt, Artificial Sequence
  Description of Artificial Sequence: Synthetic oligonucleotide
  Antisense strand to SEQ ID NO: 129976
agaaucacgcauaauccca

SEQ ID NO: 129978 - RNA, 19 nt, Artificial Sequence
  Description of Artificial Sequence: Synthetic oligonucleotide
  Sense strand starting at position 1244 of SEQ ID NO: 1660
augggauuaugcgugauuc

SEQ ID NO: 129979 - RNA, 19 nt, Artificial Sequence
  Description of Artificial Sequence: Synthetic oligonucleotide
  Antisense strand to SEQ ID NO: 129978
gaaucacgcauaaucccau

SEQ ID NO: 129980 - RNA, 19 nt, Artificial Sequence
  Description of Artificial Sequence: Synthetic oligonucleotide
  Sense strand starting at position 1234 of SEQ ID NO: 1660
auuuaucucuaugggauua

SEQ ID NO: 129981 - RNA, 19 nt, Artificial Sequence
  Description of Artificial Sequence: Synthetic oligonucleotide
  Antisense strand to SEQ ID NO: 129980
uaaucccauagagauaaau

SEQ ID NO: 129982 - RNA, 19 nt, Artificial Sequence
  Description of Artificial Sequence: Synthetic oligonucleotide
  Sense strand starting at position 1087 of SEQ ID NO: 1660
gugcgagauucugucucca

SEQ ID NO: 129983 - RNA, 19 nt, Artificial Sequence
  Description of Artificial Sequence: Synthetic oligonucleotide
  Antisense strand to SEQ ID NO: 129982
uggagacagaaucucgcac

SEQ ID NO: 129984 - RNA, 19 nt, Artificial Sequence
  Description of Artificial Sequence: Synthetic oligonucleotide
  Sense strand starting at position 784 of SEQ ID NO: 1660
guacgaugcguauucaugu

SEQ ID NO: 129985 - RNA, 19 nt, Artificial Sequence
  Description of Artificial Sequence: Synthetic oligonucleotide
  Antisense strand to SEQ ID NO: 129984
acaugaauacgcaucguac

SEQ ID NO: 129986 - RNA, 19 nt, Artificial Sequence
  Description of Artificial Sequence: Synthetic oligonucleotide
  Sense strand starting at position 778 of SEQ ID NO: 1660
uauuuaguacgaugcguau

SEQ ID NO: 129987 - RNA, 19 nt, Artificial Sequence
  Description of Artificial Sequence: Synthetic oligonucleotide
  Antisense strand to SEQ ID NO: 129986
auacgcaucguacuaaaua

SEQ ID NO: 129988 - RNA, 19 nt, Artificial Sequence
  Description of Artificial Sequence: Synthetic oligonucleotide
  Sense strand starting at position 773 of SEQ ID NO: 1660
aaaguuauuuaguacgaug

SEQ ID NO: 129989 - RNA, 19 nt, Artificial Sequence
  Description of Artificial Sequence: Synthetic oligonucleotide
  Antisense strand to SEQ ID NO: 129988
caucguacuaaauaacuuu

SEQ ID NO: 129990 - RNA, 19 nt, Artificial Sequence
  Description of Artificial Sequence: Synthetic oligonucleotide
  Sense strand starting at position 674 of SEQ ID NO: 1660
gucauuaguucucuuuaua

SEQ ID NO: 129991 - RNA, 19 nt, Artificial Sequence
  Description of Artificial Sequence: Synthetic oligonucleotide
  Antisense strand to SEQ ID NO: 129990
uauaaagagaacuaaugac

SEQ ID NO: 129992 - RNA, 19 nt, Artificial Sequence
  Description of Artificial Sequence: Synthetic oligonucleotide
  Sense strand starting at position 673 of SEQ ID NO: 1660
agucauuaguucucuuuau

SEQ ID NO: 129993 - RNA, 19 nt, Artificial Sequence
  Description of Artificial Sequence: Synthetic oligonucleotide
  Antisense strand to SEQ ID NO: 129992
auaaagagaacuaaugacu

SEQ ID NO: 129994 - RNA, 19 nt, Artificial Sequence
  Description of Artificial Sequence: Synthetic oligonucleotide
  Sense strand starting at position 670 of SEQ ID NO: 1660
ugaagucauuaguucucuu

SEQ ID NO: 129995 - RNA, 19 nt, Artificial Sequence
  Description of Artificial Sequence: Synthetic oligonucleotide
  Antisense strand to SEQ ID NO: 129994
aagagaacuaaugacuuca

SEQ ID NO: 129996 - RNA, 19 nt, Artificial Sequence
  Description of Artificial Sequence: Synthetic oligonucleotide
  Sense strand starting at position 632 of SEQ ID NO: 1660
uggauauuguguccaaaga

SEQ ID NO: 129997 - RNA, 19 nt, Artificial Sequence
  Description of Artificial Sequence: Synthetic oligonucleotide
  Antisense strand to SEQ ID NO: 129996
ucuuuggacacaauaucca

SEQ ID NO: 129998 - RNA, 19 nt, Artificial Sequence
  Description of Artificial Sequence: Synthetic oligonucleotide
  Sense strand starting at position 630 of SEQ ID NO: 1660
uuuggauauuguguccaaa

SEQ ID NO: 129999 - RNA, 19 nt, Artificial Sequence
  Description of Artificial Sequence: Synthetic oligonucleotide
  Antisense strand to SEQ ID NO: 129998
uuuggacacaauauccaaa

SEQ ID NO: 130000 - RNA, 19 nt, Artificial Sequence
  Description of Artificial Sequence: Synthetic oligonucleotide
  Sense strand starting at position 549 of SEQ ID NO: 1660
guauucuuucuggagggca

SEQ ID NO: 130001 - RNA, 19 nt, Artificial Sequence
  Description of Artificial Sequence: Synthetic oligonucleotide
  Antisense strand to SEQ ID NO: 130000
ugcccuccagaaagaauac

SEQ ID NO: 130002 - RNA, 19 nt, Artificial Sequence
  Description of Artificial Sequence: Synthetic oligonucleotide
  Sense strand starting at position 243 of SEQ ID NO: 1660
uucaaaggugggugaaaua

SEQ ID NO: 130003 - RNA, 19 nt, Artificial Sequence
  Description of Artificial Sequence: Synthetic oligonucleotide
  Antisense strand to SEQ ID NO: 130002
uauuucacccaccuuugaa

SEQ ID NO: 130004 - RNA, 19 nt, Artificial Sequence
  Description of Artificial Sequence: Synthetic oligonucleotide
  Sense strand starting at position 242 of SEQ ID NO: 1660
auucaaaggugggugaaau

SEQ ID NO: 130005 - RNA, 19 nt, Artificial Sequence
  Description of Artificial Sequence: Synthetic oligonucleotide
  Antisense strand to SEQ ID NO: 130004
auuucacccaccuuugaau

SEQ ID NO: 130006 - RNA, 19 nt, Artificial Sequence
  Description of Artificial Sequence: Synthetic oligonucleotide
  Sense strand starting at position 171 of SEQ ID NO: 1660
ccgaaauaacauuguucug

SEQ ID NO: 130007 - RNA, 19 nt, Artificial Sequence
  Description of Artificial Sequence: Synthetic oligonucleotide
  Antisense strand to SEQ ID NO: 130006
cagaacaauguuauuucgg

SEQ ID NO: 130008 - RNA, 19 nt, Artificial Sequence
  Description of Artificial Sequence: Synthetic oligonucleotide
  Sense strand starting at position 142 of SEQ ID NO: 1660
guugaugucuaagucucau

SEQ ID NO: 130009 - RNA, 19 nt, Artificial Sequence
  Description of Artificial Sequence: Synthetic oligonucleotide
  Antisense strand to SEQ ID NO: 130008
augagacuuagacaucaac

SEQ ID NO: 130010 - RNA, 19 nt, Artificial Sequence
  Description of Artificial Sequence: Synthetic oligonucleotide
  Sense strand starting at position 139 of SEQ ID NO: 1660
aauguugaugucuaagucu

SEQ ID NO: 130011 - RNA, 19 nt, Artificial Sequence
  Description of Artificial Sequence: Synthetic oligonucleotide
  Antisense strand to SEQ ID NO: 130010
agacuuagacaucaacauu

SEQ ID NO: 130012 - RNA, 19 nt, Artificial Sequence
  Description of Artificial Sequence: Synthetic oligonucleotide
  Sense strand starting at position 120 of SEQ ID NO: 1660
ggaacacuuugagaaacaa

SEQ ID NO: 130013 - RNA, 19 nt, Artificial Sequence
  Description of Artificial Sequence: Synthetic oligonucleotide
  Antisense strand to SEQ ID NO: 130012
uuguuucucaaaguguucc

SEQ ID NO: 130014 - RNA, 19 nt, Artificial Sequence
  Description of Artificial Sequence: Synthetic oligonucleotide
  Sense strand starting at position 3825 of SEQ ID NO: 1661
cagcgaagaaucuggauga

SEQ ID NO: 130015 - RNA, 19 nt, Artificial Sequence
  Description of Artificial Sequence: Synthetic oligonucleotide
  Antisense strand to SEQ ID NO: 130014
ucauccagauucuucgcug

SEQ ID NO: 130016 - RNA, 19 nt, Artificial Sequence
  Description of Artificial Sequence: Synthetic oligonucleotide
  Sense strand starting at position 3816 of SEQ ID NO: 1661
gcugaaucucagcgaagaa

SEQ ID NO: 130017 - RNA, 19 nt, Artificial Sequence
  Description of Artificial Sequence: Synthetic oligonucleotide
  Antisense strand to SEQ ID NO: 130016
uucuucgcugagauucagc

SEQ ID NO: 130018 - RNA, 19 nt, Artificial Sequence
  Description of Artificial Sequence: Synthetic oligonucleotide
  Sense strand starting at position 3815 of SEQ ID NO: 1661
ugcugaaucucagcgaaga

SEQ ID NO: 130019 - RNA, 19 nt, Artificial Sequence
  Description of Artificial Sequence: Synthetic oligonucleotide
  Antisense strand to SEQ ID NO: 130018
ucuucgcugagauucagca

SEQ ID NO: 130020 - RNA, 19 nt, Artificial Sequence
  Description of Artificial Sequence: Synthetic oligonucleotide
  Sense strand starting at position 3533 of SEQ ID NO: 1661
ggagcugagguccaaguuu

SEQ ID NO: 130021 - RNA, 19 nt, Artificial Sequence
  Description of Artificial Sequence: Synthetic oligonucleotide
  Antisense strand to SEQ ID NO: 130020
aaacuuggaccucagcucc

SEQ ID NO: 130022 - RNA, 19 nt, Artificial Sequence
  Description of Artificial Sequence: Synthetic oligonucleotide
  Sense strand starting at position 3369 of SEQ ID NO: 1661
ugcaaugugagagagugua

SEQ ID NO: 130023 - RNA, 19 nt, Artificial Sequence
  Description of Artificial Sequence: Synthetic oligonucleotide
  Antisense strand to SEQ ID NO: 130022
uacacucucucacauugca

SEQ ID NO: 130024 - RNA, 19 nt, Artificial Sequence
  Description of Artificial Sequence: Synthetic oligonucleotide
  Sense strand starting at position 3306 of SEQ ID NO: 1661
gacagagaucgucaagcaa

SEQ ID NO: 130025 - RNA, 19 nt, Artificial Sequence
  Description of Artificial Sequence: Synthetic oligonucleotide
  Antisense strand to SEQ ID NO: 130024
uugcuugacgaucucuguc

SEQ ID NO: 130026 - RNA, 19 nt, Artificial Sequence
  Description of Artificial Sequence: Synthetic oligonucleotide
  Sense strand starting at position 3194 of SEQ ID NO: 1661
guggauggaagcuauggua

SEQ ID NO: 130027 - RNA, 19 nt, Artificial Sequence
  Description of Artificial Sequence: Synthetic oligonucleotide
  Antisense strand to SEQ ID NO: 130026
uaccauagcuuccauccac

SEQ ID NO: 130028 - RNA, 19 nt, Artificial Sequence
  Description of Artificial Sequence: Synthetic oligonucleotide
  Sense strand starting at position 3000 of SEQ ID NO: 1661
gguagcuuccugcaaauau

SEQ ID NO: 130029 - RNA, 19 nt, Artificial Sequence
  Description of Artificial Sequence: Synthetic oligonucleotide
  Antisense strand to SEQ ID NO: 130028
auauuugcaggaagcuacc

SEQ ID NO: 130030 - RNA, 19 nt, Artificial Sequence
  Description of Artificial Sequence: Synthetic oligonucleotide
  Sense strand starting at position 2969 of SEQ ID NO: 1661
acacguguccaagaaauaa

SEQ ID NO: 130031 - RNA, 19 nt, Artificial Sequence
  Description of Artificial Sequence: Synthetic oligonucleotide
  Antisense strand to SEQ ID NO: 130030
uuauuucuuggacacgugu

SEQ ID NO: 130032 - RNA, 19 nt, Artificial Sequence
  Description of Artificial Sequence: Synthetic oligonucleotide
  Sense strand starting at position 2966 of SEQ ID NO: 1661
uugacacguguccaagaaa

SEQ ID NO: 130033 - RNA, 19 nt, Artificial Sequence
  Description of Artificial Sequence: Synthetic oligonucleotide
  Antisense strand to SEQ ID NO: 130032
uuucuuggacacgugucaa

SEQ ID NO: 130034 - RNA, 19 nt, Artificial Sequence
  Description of Artificial Sequence: Synthetic oligonucleotide
  Sense strand starting at position 2897 of SEQ ID NO: 1661
agaugauaguuccuaucuu

SEQ ID NO: 130035 - RNA, 19 nt, Artificial Sequence
  Description of Artificial Sequence: Synthetic oligonucleotide
  Antisense strand to SEQ ID NO: 130034
aagauaggaacuaucaucu

SEQ ID NO: 130036 - RNA, 19 nt, Artificial Sequence
  Description of Artificial Sequence: Synthetic oligonucleotide
  Sense strand starting at position 2894 of SEQ ID NO: 1661
agaagaugauaguuccuau

SEQ ID NO: 130037 - RNA, 19 nt, Artificial Sequence
  Description of Artificial Sequence: Synthetic oligonucleotide
  Antisense strand to SEQ ID NO: 130036
auaggaacuaucaucuucu

SEQ ID NO: 130038 - RNA, 19 nt, Artificial Sequence
  Description of Artificial Sequence: Synthetic oligonucleotide
  Sense strand starting at position 2827 of SEQ ID NO: 1661
gaaacauagcugugaagcu

SEQ ID NO: 130039 - RNA, 19 nt, Artificial Sequence
  Description of Artificial Sequence: Synthetic oligonucleotide
  Antisense strand to SEQ ID NO: 130038
agcuucacagcuauguuuc

SEQ ID NO: 130040 - RNA, 19 nt, Artificial Sequence
  Description of Artificial Sequence: Synthetic oligonucleotide
  Sense strand starting at position 2824 of SEQ ID NO: 1661
acagaaacauagcugugaa

SEQ ID NO: 130041 - RNA, 19 nt, Artificial Sequence
  Description of Artificial Sequence: Synthetic oligonucleotide
  Antisense strand to SEQ ID NO: 130040
uucacagcuauguuucugu

SEQ ID NO: 130042 - RNA, 19 nt, Artificial Sequence
  Description of Artificial Sequence: Synthetic oligonucleotide
  Sense strand starting at position 2810 of SEQ ID NO: 1661
gucuuugccauaggacaga

SEQ ID NO: 130043 - RNA, 19 nt, Artificial Sequence
  Description of Artificial Sequence: Synthetic oligonucleotide
  Antisense strand to SEQ ID NO: 130042
ucuguccuauggcaaagac

SEQ ID NO: 130044 - RNA, 19 nt, Artificial Sequence
  Description of Artificial Sequence: Synthetic oligonucleotide
  Sense strand starting at position 2808 of SEQ ID NO: 1661
cagucuuugccauaggaca

SEQ ID NO: 130045 - RNA, 19 nt, Artificial Sequence
  Description of Artificial Sequence: Synthetic oligonucleotide
  Antisense strand to SEQ ID NO: 130044
uguccuauggcaaagacug

SEQ ID NO: 130046 - RNA, 19 nt, Artificial Sequence
  Description of Artificial Sequence: Synthetic oligonucleotide
  Sense strand starting at position 2360 of SEQ ID NO: 1661
cucuuuagggaucagucuu

SEQ ID NO: 130047 - RNA, 19 nt, Artificial Sequence
  Description of Artificial Sequence: Synthetic oligonucleotide
  Antisense strand to SEQ ID NO: 130046
aagacugaucccuaaagag

SEQ ID NO: 130048 - RNA, 19 nt, Artificial Sequence
  Description of Artificial Sequence: Synthetic oligonucleotide
  Sense strand starting at position 2357 of SEQ ID NO: 1661
cugcucuuuagggaucagu

SEQ ID NO: 130049 - RNA, 19 nt, Artificial Sequence
  Description of Artificial Sequence: Synthetic oligonucleotide
  Antisense strand to SEQ ID NO: 130048
acugaucccuaaagagcag

SEQ ID NO: 130050 - RNA, 19 nt, Artificial Sequence
  Description of Artificial Sequence: Synthetic oligonucleotide
  Sense strand starting at position 2353 of SEQ ID NO: 1661
aaagcugcucuuuagggau

SEQ ID NO: 130051 - RNA, 19 nt, Artificial Sequence
  Description of Artificial Sequence: Synthetic oligonucleotide
  Antisense strand to SEQ ID NO: 130050
aucccuaaagagcagcuuu

SEQ ID NO: 130052 - RNA, 19 nt, Artificial Sequence
  Description of Artificial Sequence: Synthetic oligonucleotide
  Sense strand starting at position 2266 of SEQ ID NO: 1661
cucauaucucaucgaggga

SEQ ID NO: 130053 - RNA, 19 nt, Artificial Sequence
  Description of Artificial Sequence: Synthetic oligonucleotide
  Antisense strand to SEQ ID NO: 130052
ucccucgaugagauaugag

SEQ ID NO: 130054 - RNA, 19 nt, Artificial Sequence
  Description of Artificial Sequence: Synthetic oligonucleotide
  Sense strand starting at position 1856 of SEQ ID NO: 1661
cggaaagcguugucuauuu

SEQ ID NO: 130055 - RNA, 19 nt, Artificial Sequence
  Description of Artificial Sequence: Synthetic oligonucleotide
  Antisense strand to SEQ ID NO: 130054
aaauagacaacgcuuuccg

SEQ ID NO: 130056 - RNA, 19 nt, Artificial Sequence
  Description of Artificial Sequence: Synthetic oligonucleotide
  Sense strand starting at position 1765 of SEQ ID NO: 1661
acugccauucucuaguaua

SEQ ID NO: 130057 - RNA, 19 nt, Artificial Sequence
  Description of Artificial Sequence: Synthetic oligonucleotide
  Antisense strand to SEQ ID NO: 130056
uauacuagagaauggcagu

SEQ ID NO: 130058 - RNA, 19 nt, Artificial Sequence
  Description of Artificial Sequence: Synthetic oligonucleotide
  Sense strand starting at position 1431 of SEQ ID NO: 1661
uuuauugggcacuauauau

SEQ ID NO: 130059 - RNA, 19 nt, Artificial Sequence
  Description of Artificial Sequence: Synthetic oligonucleotide
  Antisense strand to SEQ ID NO: 130058
auauauagugcccaauaaa

SEQ ID NO: 130060 - RNA, 19 nt, Artificial Sequence
  Description of Artificial Sequence: Synthetic oligonucleotide
  Sense strand starting at position 1428 of SEQ ID NO: 1661
acguuuauugggcacuaua

SEQ ID NO: 130061 - RNA, 19 nt, Artificial Sequence
  Description of Artificial Sequence: Synthetic oligonucleotide
  Antisense strand to SEQ ID NO: 130060
uauagugcccaauaaacgu

SEQ ID NO: 130062 - RNA, 19 nt, Artificial Sequence
  Description of Artificial Sequence: Synthetic oligonucleotide
  Sense strand starting at position 1392 of SEQ ID NO: 1661
gagugcuaguuaccagaaa

SEQ ID NO: 130063 - RNA, 19 nt, Artificial Sequence
  Description of Artificial Sequence: Synthetic oligonucleotide
  Antisense strand to SEQ ID NO: 130062
uuucugguaacuagcacuc

SEQ ID NO: 130064 - RNA, 19 nt, Artificial Sequence
  Description of Artificial Sequence: Synthetic oligonucleotide
  Sense strand starting at position 1359 of SEQ ID NO: 1661
auguuaggaguuuaaauuc

SEQ ID NO: 130065 - RNA, 19 nt, Artificial Sequence
  Description of Artificial Sequence: Synthetic oligonucleotide
  Antisense strand to SEQ ID NO: 130064
gaauuuaaacuccuaacau

SEQ ID NO: 130066 - RNA, 19 nt, Artificial Sequence
  Description of Artificial Sequence: Synthetic oligonucleotide
  Sense strand starting at position 1349 of SEQ ID NO: 1661
uucccuaguuauguuagga

SEQ ID NO: 130067 - RNA, 19 nt, Artificial Sequence
  Description of Artificial Sequence: Synthetic oligonucleotide
  Antisense strand to SEQ ID NO: 130066
uccuaacauaacuagggaa

SEQ ID NO: 130068 - RNA, 19 nt, Artificial Sequence
  Description of Artificial Sequence: Synthetic oligonucleotide
  Sense strand starting at position 1256 of SEQ ID NO: 1661
ccuucucuagauuguagaa

SEQ ID NO: 130069 - RNA, 19 nt, Artificial Sequence
  Description of Artificial Sequence: Synthetic oligonucleotide
  Antisense strand to SEQ ID NO: 130068
uucuacaaucuagagaagg

SEQ ID NO: 130070 - RNA, 19 nt, Artificial Sequence
  Description of Artificial Sequence: Synthetic oligonucleotide
  Sense strand starting at position 1108 of SEQ ID NO: 1661
augauuuagcauugugucu

SEQ ID NO: 130071 - RNA, 19 nt, Artificial Sequence
  Description of Artificial Sequence: Synthetic oligonucleotide
  Antisense strand to SEQ ID NO: 130070
agacacaaugcuaaaucau

SEQ ID NO: 130072 - RNA, 19 nt, Artificial Sequence
  Description of Artificial Sequence: Synthetic oligonucleotide
  Sense strand starting at position 1095 of SEQ ID NO: 1661
cccuaugaucagcaugauu

SEQ ID NO: 130073 - RNA, 19 nt, Artificial Sequence
  Description of Artificial Sequence: Synthetic oligonucleotide
  Antisense strand to SEQ ID NO: 130072
aaucaugcugaucauaggg

SEQ ID NO: 130074 - RNA, 19 nt, Artificial Sequence
  Description of Artificial Sequence: Synthetic oligonucleotide
  Sense strand starting at position 1094 of SEQ ID NO: 1661
ucccuaugaucagcaugau

SEQ ID NO: 130075 - RNA, 19 nt, Artificial Sequence
  Description of Artificial Sequence: Synthetic oligonucleotide
  Antisense strand to SEQ ID NO: 130074
aucaugcugaucauaggga

SEQ ID NO: 130076 - RNA, 19 nt, Artificial Sequence
  Description of Artificial Sequence: Synthetic oligonucleotide
  Sense strand starting at position 1084 of SEQ ID NO: 1661
aguagaggauucccuauga

SEQ ID NO: 130077 - RNA, 19 nt, Artificial Sequence
  Description of Artificial Sequence: Synthetic oligonucleotide
  Antisense strand to SEQ ID NO: 130076
ucauagggaauccucuacu

SEQ ID NO: 130078 - RNA, 19 nt, Artificial Sequence
  Description of Artificial Sequence: Synthetic oligonucleotide
  Sense strand starting at position 1071 of SEQ ID NO: 1661
gaugcauggcucuaguaga

SEQ ID NO: 130079 - RNA, 19 nt, Artificial Sequence
  Description of Artificial Sequence: Synthetic oligonucleotide
  Antisense strand to SEQ ID NO: 130078
ucuacuagagccaugcauc

SEQ ID NO: 130080 - RNA, 19 nt, Artificial Sequence
  Description of Artificial Sequence: Synthetic oligonucleotide
  Sense strand starting at position 1059 of SEQ ID NO: 1661
guuuguaagaaggaugcau

SEQ ID NO: 130081 - RNA, 19 nt, Artificial Sequence
  Description of Artificial Sequence: Synthetic oligonucleotide
  Antisense strand to SEQ ID NO: 130080
augcauccuucuuacaaac

SEQ ID NO: 130082 - RNA, 19 nt, Artificial Sequence
  Description of Artificial Sequence: Synthetic oligonucleotide
  Sense strand starting at position 1051 of SEQ ID NO: 1661
uacauaggguuuguaagaa

SEQ ID NO: 130083 - RNA, 19 nt, Artificial Sequence
  Description of Artificial Sequence: Synthetic oligonucleotide
  Antisense strand to SEQ ID NO: 130082
uucuuacaaacccuaugua

SEQ ID NO: 130084 - RNA, 19 nt, Artificial Sequence
  Description of Artificial Sequence: Synthetic oligonucleotide
  Sense strand starting at position 1050 of SEQ ID NO: 1661
cuacauaggguuuguaaga

SEQ ID NO: 130085 - RNA, 19 nt, Artificial Sequence
  Description of Artificial Sequence: Synthetic oligonucleotide
  Antisense strand to SEQ ID NO: 130084
ucuuacaaacccuauguag

SEQ ID NO: 130086 - RNA, 19 nt, Artificial Sequence
  Description of Artificial Sequence: Synthetic oligonucleotide
  Sense strand starting at position 1002 of SEQ ID NO: 1661
agaguucccuuacuaaaga

SEQ ID NO: 130087 - RNA, 19 nt, Artificial Sequence
  Description of Artificial Sequence: Synthetic oligonucleotide
  Antisense strand to SEQ ID NO: 130086
ucuuuaguaagggaacucu

SEQ ID NO: 130088 - RNA, 19 nt, Artificial Sequence
  Description of Artificial Sequence: Synthetic oligonucleotide
  Sense strand starting at position 997 of SEQ ID NO: 1661
auaagagaguucccuuacu

SEQ ID NO: 130089 - RNA, 19 nt, Artificial Sequence
  Description of Artificial Sequence: Synthetic oligonucleotide
  Antisense strand to SEQ ID NO: 130088
aguaagggaacucucuuau

SEQ ID NO: 130090 - RNA, 19 nt, Artificial Sequence
  Description of Artificial Sequence: Synthetic oligonucleotide
  Sense strand starting at position 935 of SEQ ID NO: 1661
gaauauuuguaggauauug

SEQ ID NO: 130091 - RNA, 19 nt, Artificial Sequence
  Description of Artificial Sequence: Synthetic oligonucleotide
  Antisense strand to SEQ ID NO: 130090
caauauccuacaaauauuc

SEQ ID NO: 130092 - RNA, 19 nt, Artificial Sequence
  Description of Artificial Sequence: Synthetic oligonucleotide
  Sense strand starting at position 228 of SEQ ID NO: 1661
guucuugcucugucgcuua

SEQ ID NO: 130093 - RNA, 19 nt, Artificial Sequence
  Description of Artificial Sequence: Synthetic oligonucleotide
  Antisense strand to SEQ ID NO: 130092
uaagcgacagagcaagaac

SEQ ID NO: 130094 - RNA, 19 nt, Artificial Sequence
  Description of Artificial Sequence: Synthetic oligonucleotide
  Sense strand starting at position 159 of SEQ ID NO: 1662
cagaaugcuagaggcgaaa

SEQ ID NO: 130095 - RNA, 19 nt, Artificial Sequence
  Description of Artificial Sequence: Synthetic oligonucleotide
  Antisense strand to SEQ ID NO: 130094
uuucgccucuagcauucug

SEQ ID NO: 130096 - RNA, 19 nt, Artificial Sequence
  Description of Artificial Sequence: Synthetic oligonucleotide
  Sense strand starting at position 188 of SEQ ID NO: 1662
gggcgagagccacauguua

SEQ ID NO: 130097 - RNA, 19 nt, Artificial Sequence
  Description of Artificial Sequence: Synthetic oligonucleotide
  Antisense strand to SEQ ID NO: 130096
uaacauguggcucucgccc

SEQ ID NO: 130098 - RNA, 19 nt, Artificial Sequence
  Description of Artificial Sequence: Synthetic oligonucleotide
  Sense strand starting at position 190 of SEQ ID NO: 1662
gcgagagccacauguuaca

SEQ ID NO: 130099 - RNA, 19 nt, Artificial Sequence
  Description of Artificial Sequence: Synthetic oligonucleotide
  Antisense strand to SEQ ID NO: 130098
uguaacauguggcucucgc

SEQ ID NO: 130100 - RNA, 19 nt, Artificial Sequence
  Description of Artificial Sequence: Synthetic oligonucleotide
  Sense strand starting at position 261 of SEQ ID NO: 1662
ggcggaguucccugcuauu

SEQ ID NO: 130101 - RNA, 19 nt, Artificial Sequence
  Description of Artificial Sequence: Synthetic oligonucleotide
  Antisense strand to SEQ ID NO: 130100
aauagcagggaacuccgcc

SEQ ID NO: 130102 - RNA, 19 nt, Artificial Sequence
  Description of Artificial Sequence: Synthetic oligonucleotide
  Sense strand starting at position 264 of SEQ ID NO: 1662
ggaguucccugcuauugua

SEQ ID NO: 130103 - RNA, 19 nt, Artificial Sequence
  Description of Artificial Sequence: Synthetic oligonucleotide
  Antisense strand to SEQ ID NO: 130102
uacaauagcagggaacucc

SEQ ID NO: 130104 - RNA, 19 nt, Artificial Sequence
  Description of Artificial Sequence: Synthetic oligonucleotide
  Sense strand starting at position 267 of SEQ ID NO: 1662
guucccugcuauuguagau

SEQ ID NO: 130105 - RNA, 19 nt, Artificial Sequence
  Description of Artificial Sequence: Synthetic oligonucleotide
  Antisense strand to SEQ ID NO: 130104
aucuacaauagcagggaac

SEQ ID NO: 130106 - RNA, 19 nt, Artificial Sequence
  Description of Artificial Sequence: Synthetic oligonucleotide
  Sense strand starting at position 276 of SEQ ID NO: 1662
uauuguagauguucggauu

SEQ ID NO: 130107 - RNA, 19 nt, Artificial Sequence
  Description of Artificial Sequence: Synthetic oligonucleotide
  Antisense strand to SEQ ID NO: 130106
aauccgaacaucuacaaua

SEQ ID NO: 130108 - RNA, 19 nt, Artificial Sequence
  Description of Artificial Sequence: Synthetic oligonucleotide
  Sense strand starting at position 351 of SEQ ID NO: 1662
gguucagacuugugcuuag

SEQ ID NO: 130109 - RNA, 19 nt, Artificial Sequence
  Description of Artificial Sequence: Synthetic oligonucleotide
  Antisense strand to SEQ ID NO: 130108
cuaagcacaagucugaacc

SEQ ID NO: 130110 - RNA, 19 nt, Artificial Sequence
  Description of Artificial Sequence: Synthetic oligonucleotide
  Sense strand starting at position 354 of SEQ ID NO: 1662
ucagacuugugcuuaggga

SEQ ID NO: 130111 - RNA, 19 nt, Artificial Sequence
  Description of Artificial Sequence: Synthetic oligonucleotide
  Antisense strand to SEQ ID NO: 130110
ucccuaagcacaagucuga

SEQ ID NO: 130112 - RNA, 19 nt, Artificial Sequence
  Description of Artificial Sequence: Synthetic oligonucleotide
  Sense strand starting at position 355 of SEQ ID NO: 1662
cagacuugugcuuagggaa

SEQ ID NO: 130113 - RNA, 19 nt, Artificial Sequence
  Description of Artificial Sequence: Synthetic oligonucleotide
  Antisense strand to SEQ ID NO: 130112
uucccuaagcacaagucug

SEQ ID NO: 130114 - RNA, 19 nt, Artificial Sequence
  Description of Artificial Sequence: Synthetic oligonucleotide
  Sense strand starting at position 403 of SEQ ID NO: 1662
gcuugagauuacccuguaa

SEQ ID NO: 130115 - RNA, 19 nt, Artificial Sequence
  Description of Artificial Sequence: Synthetic oligonucleotide
  Antisense strand to SEQ ID NO: 130114
uuacaggguaaucucaagc

SEQ ID NO: 130116 - RNA, 19 nt, Artificial Sequence
  Description of Artificial Sequence: Synthetic oligonucleotide
  Sense strand starting at position 405 of SEQ ID NO: 1662
uugagauuacccuguaagu

SEQ ID NO: 130117 - RNA, 19 nt, Artificial Sequence
  Description of Artificial Sequence: Synthetic oligonucleotide
  Antisense strand to SEQ ID NO: 130116
acuuacaggguaaucucaa

SEQ ID NO: 130118 - RNA, 19 nt, Artificial Sequence
  Description of Artificial Sequence: Synthetic oligonucleotide
  Sense strand starting at position 407 of SEQ ID NO: 1662
gagauuacccuguaaguca

SEQ ID NO: 130119 - RNA, 19 nt, Artificial Sequence
  Description of Artificial Sequence: Synthetic oligonucleotide
  Antisense strand to SEQ ID NO: 130118
ugacuuacaggguaaucuc

SEQ ID NO: 130120 - RNA, 19 nt, Artificial Sequence
  Description of Artificial Sequence: Synthetic oligonucleotide
  Sense strand starting at position 491 of SEQ ID NO: 1662
gugggauucugauccuucu

SEQ ID NO: 130121 - RNA, 19 nt, Artificial Sequence
  Description of Artificial Sequence: Synthetic oligonucleotide
  Antisense strand to SEQ ID NO: 130120
agaaggaucagaaucccac

SEQ ID NO: 130122 - RNA, 19 nt, Artificial Sequence
  Description of Artificial Sequence: Synthetic oligonucleotide
  Sense strand starting at position 494 of SEQ ID NO: 1662
ggauucugauccuucuaag

SEQ ID NO: 130123 - RNA, 19 nt, Artificial Sequence
  Description of Artificial Sequence: Synthetic oligonucleotide
  Antisense strand to SEQ ID NO: 130122
cuuagaaggaucagaaucc

SEQ ID NO: 130124 - RNA, 19 nt, Artificial Sequence
  Description of Artificial Sequence: Synthetic oligonucleotide
  Sense strand starting at position 614 of SEQ ID NO: 1662
ggcccaaucuacuuccuga

SEQ ID NO: 130125 - RNA, 19 nt, Artificial Sequence
  Description of Artificial Sequence: Synthetic oligonucleotide
  Antisense strand to SEQ ID NO: 130124
ucaggaaguagauugggcc

SEQ ID NO: 130126 - RNA, 19 nt, Artificial Sequence
  Description of Artificial Sequence: Synthetic oligonucleotide
  Sense strand starting at position 646 of SEQ ID NO: 1662
uugcuauucuuuguuucua

SEQ ID NO: 130127 - RNA, 19 nt, Artificial Sequence
  Description of Artificial Sequence: Synthetic oligonucleotide
  Antisense strand to SEQ ID NO: 130126
uagaaacaaagaauagcaa

SEQ ID NO: 130128 - RNA, 19 nt, Artificial Sequence
  Description of Artificial Sequence: Synthetic oligonucleotide
  Sense strand starting at position 647 of SEQ ID NO: 1662
ugcuauucuuuguuucuau

SEQ ID NO: 130129 - RNA, 19 nt, Artificial Sequence
  Description of Artificial Sequence: Synthetic oligonucleotide
  Antisense strand to SEQ ID NO: 130128
auagaaacaaagaauagca

SEQ ID NO: 130130 - RNA, 19 nt, Artificial Sequence
  Description of Artificial Sequence: Synthetic oligonucleotide
  Sense strand starting at position 660 of SEQ ID NO: 1662
uucuaugucuuucugguga

SEQ ID NO: 130131 - RNA, 19 nt, Artificial Sequence
  Description of Artificial Sequence: Synthetic oligonucleotide
  Antisense strand to SEQ ID NO: 130130
ucaccagaaagacauagaa

SEQ ID NO: 130132 - RNA, 19 nt, Artificial Sequence
  Description of Artificial Sequence: Synthetic oligonucleotide
  Sense strand starting at position 662 of SEQ ID NO: 1662
cuaugucuuucuggugaau

SEQ ID NO: 130133 - RNA, 19 nt, Artificial Sequence
  Description of Artificial Sequence: Synthetic oligonucleotide
  Antisense strand to SEQ ID NO: 130132
auucaccagaaagacauag

SEQ ID NO: 130134 - RNA, 19 nt, Artificial Sequence
  Description of Artificial Sequence: Synthetic oligonucleotide
  Sense strand starting at position 664 of SEQ ID NO: 1662
augucuuucuggugaauau

SEQ ID NO: 130135 - RNA, 19 nt, Artificial Sequence
  Description of Artificial Sequence: Synthetic oligonucleotide
  Antisense strand to SEQ ID NO: 130134
auauucaccagaaagacau

SEQ ID NO: 130136 - RNA, 19 nt, Artificial Sequence
  Description of Artificial Sequence: Synthetic oligonucleotide
  Sense strand starting at position 665 of SEQ ID NO: 1662
ugucuuucuggugaauaug

SEQ ID NO: 130137 - RNA, 19 nt, Artificial Sequence
  Description of Artificial Sequence: Synthetic oligonucleotide
  Antisense strand to SEQ ID NO: 130136
cauauucaccagaaagaca

SEQ ID NO: 130138 - RNA, 19 nt, Artificial Sequence
  Description of Artificial Sequence: Synthetic oligonucleotide
  Sense strand starting at position 1069 of SEQ ID NO: 1662
gagaccuuccucugugcua

SEQ ID NO: 130139 - RNA, 19 nt, Artificial Sequence
  Description of Artificial Sequence: Synthetic oligonucleotide
  Antisense strand to SEQ ID NO: 130138
uagcacagaggaaggucuc

SEQ ID NO: 130140 - RNA, 19 nt, Artificial Sequence
  Description of Artificial Sequence: Synthetic oligonucleotide
  Sense strand starting at position 1090 of SEQ ID NO: 1662
cacugugcugaguacuuaa

SEQ ID NO: 130141 - RNA, 19 nt, Artificial Sequence
  Description of Artificial Sequence: Synthetic oligonucleotide
  Antisense strand to SEQ ID NO: 130140
uuaaguacucagcacagug

SEQ ID NO: 130142 - RNA, 19 nt, Artificial Sequence
  Description of Artificial Sequence: Synthetic oligonucleotide
  Sense strand starting at position 1093 of SEQ ID NO: 1662
ugugcugaguacuuaauag

SEQ ID NO: 130143 - RNA, 19 nt, Artificial Sequence
  Description of Artificial Sequence: Synthetic oligonucleotide
  Antisense strand to SEQ ID NO: 130142
cuauuaaguacucagcaca

SEQ ID NO: 130144 - RNA, 19 nt, Artificial Sequence
  Description of Artificial Sequence: Synthetic oligonucleotide
  Sense strand starting at position 1200 of SEQ ID NO: 1662
augucuaaucagugguaga

SEQ ID NO: 130145 - RNA, 19 nt, Artificial Sequence
  Description of Artificial Sequence: Synthetic oligonucleotide
  Antisense strand to SEQ ID NO: 130144
ucuaccacugauuagacau

SEQ ID NO: 130146 - RNA, 19 nt, Artificial Sequence
  Description of Artificial Sequence: Synthetic oligonucleotide
  Sense strand starting at position 1201 of SEQ ID NO: 1662
ugucuaaucagugguagag

SEQ ID NO: 130147 - RNA, 19 nt, Artificial Sequence
  Description of Artificial Sequence: Synthetic oligonucleotide
  Antisense strand to SEQ ID NO: 130146
cucuaccacugauuagaca

SEQ ID NO: 130148 - RNA, 19 nt, Artificial Sequence
  Description of Artificial Sequence: Synthetic oligonucleotide
  Sense strand starting at position 1236 of SEQ ID NO: 1662
cagucugucugcuucugaa

SEQ ID NO: 130149 - RNA, 19 nt, Artificial Sequence
  Description of Artificial Sequence: Synthetic oligonucleotide
  Antisense strand to SEQ ID NO: 130148
uucagaagcagacagacug

SEQ ID NO: 130150 - RNA, 19 nt, Artificial Sequence
  Description of Artificial Sequence: Synthetic oligonucleotide
  Sense strand starting at position 1261 of SEQ ID NO: 1662
acugcaagccguuauaauu

SEQ ID NO: 130151 - RNA, 19 nt, Artificial Sequence
  Description of Artificial Sequence: Synthetic oligonucleotide
  Antisense strand to SEQ ID NO: 130150
aauuauaacggcuugcagu

SEQ ID NO: 130152 - RNA, 19 nt, Artificial Sequence
  Description of Artificial Sequence: Synthetic oligonucleotide
  Sense strand starting at position 1269 of SEQ ID NO: 1662
ccguuauaauuccauccgu

SEQ ID NO: 130153 - RNA, 19 nt, Artificial Sequence
  Description of Artificial Sequence: Synthetic oligonucleotide
  Antisense strand to SEQ ID NO: 130152
acggauggaauuauaacgg

SEQ ID NO: 130154 - RNA, 19 nt, Artificial Sequence
  Description of Artificial Sequence: Synthetic oligonucleotide
  Sense strand starting at position 1294 of SEQ ID NO: 1662
gugaaacaugguuggcuga

SEQ ID NO: 130155 - RNA, 19 nt, Artificial Sequence
  Description of Artificial Sequence: Synthetic oligonucleotide
  Antisense strand to SEQ ID NO: 130154
ucagccaaccauguuucac

SEQ ID NO: 130156 - RNA, 19 nt, Artificial Sequence
  Description of Artificial Sequence: Synthetic oligonucleotide
  Sense strand starting at position 1318 of SEQ ID NO: 1662
aagguaguggccuguggaa

SEQ ID NO: 130157 - RNA, 19 nt, Artificial Sequence
  Description of Artificial Sequence: Synthetic oligonucleotide
  Antisense strand to SEQ ID NO: 130156
uuccacaggccacuaccuu

SEQ ID NO: 130158 - RNA, 19 nt, Artificial Sequence
  Description of Artificial Sequence: Synthetic oligonucleotide
  Sense strand starting at position 3446 of SEQ ID NO: 1662
gcccuauuccuguauucug

SEQ ID NO: 130159 - RNA, 19 nt, Artificial Sequence
  Description of Artificial Sequence: Synthetic oligonucleotide
  Antisense strand to SEQ ID NO: 130158
cagaauacaggaauagggc

SEQ ID NO: 130160 - RNA, 19 nt, Artificial Sequence
  Description of Artificial Sequence: Synthetic oligonucleotide
  Sense strand starting at position 3457 of SEQ ID NO: 1662
guauucugacuccauaucu

SEQ ID NO: 130161 - RNA, 19 nt, Artificial Sequence
  Description of Artificial Sequence: Synthetic oligonucleotide
  Antisense strand to SEQ ID NO: 130160
agauauggagucagaauac

SEQ ID NO: 130162 - RNA, 19 nt, Artificial Sequence
  Description of Artificial Sequence: Synthetic oligonucleotide
  Sense strand starting at position 3620 of SEQ ID NO: 1662
guaccagaaucuuggauag

SEQ ID NO: 130163 - RNA, 19 nt, Artificial Sequence
  Description of Artificial Sequence: Synthetic oligonucleotide
  Antisense strand to SEQ ID NO: 130162
cuauccaagauucugguac

SEQ ID NO: 130164 - RNA, 19 nt, Artificial Sequence
  Description of Artificial Sequence: Synthetic oligonucleotide
  Sense strand starting at position 3644 of SEQ ID NO: 1662
gugucauccuuucugacuu

SEQ ID NO: 130165 - RNA, 19 nt, Artificial Sequence
  Description of Artificial Sequence: Synthetic oligonucleotide
  Antisense strand to SEQ ID NO: 130164
aagucagaaaggaugacac

SEQ ID NO: 130166 - RNA, 19 nt, Artificial Sequence
  Description of Artificial Sequence: Synthetic oligonucleotide
  Sense strand starting at position 3645 of SEQ ID NO: 1662
ugucauccuuucugacuuu

SEQ ID NO: 130167 - RNA, 19 nt, Artificial Sequence
  Description of Artificial Sequence: Synthetic oligonucleotide
  Antisense strand to SEQ ID NO: 130166
aaagucagaaaggaugaca

SEQ ID NO: 130168 - RNA, 19 nt, Artificial Sequence
  Description of Artificial Sequence: Synthetic oligonucleotide
  Sense strand starting at position 3700 of SEQ ID NO: 1662
accauuuggucacaaggau

SEQ ID NO: 130169 - RNA, 19 nt, Artificial Sequence
  Description of Artificial Sequence: Synthetic oligonucleotide
  Antisense strand to SEQ ID NO: 130168
auccuugugaccaaauggu

SEQ ID NO: 130170 - RNA, 19 nt, Artificial Sequence
  Description of Artificial Sequence: Synthetic oligonucleotide
  Sense strand starting at position 3740 of SEQ ID NO: 1662
aaggaaucuccuugucuag

SEQ ID NO: 130171 - RNA, 19 nt, Artificial Sequence
  Description of Artificial Sequence: Synthetic oligonucleotide
  Antisense strand to SEQ ID NO: 130170
cuagacaaggagauuccuu

SEQ ID NO: 130172 - RNA, 19 nt, Artificial Sequence
  Description of Artificial Sequence: Synthetic oligonucleotide
  Sense strand starting at position 43 of SEQ ID NO: 1664
cucccacugcuggaauaua

SEQ ID NO: 130173 - RNA, 19 nt, Artificial Sequence
  Description of Artificial Sequence: Synthetic oligonucleotide
  Antisense strand to SEQ ID NO: 130172
uauauuccagcagugggag

SEQ ID NO: 130174 - RNA, 19 nt, Artificial Sequence
  Description of Artificial Sequence: Synthetic oligonucleotide
  Sense strand starting at position 132 of SEQ ID NO: 1664
acagcuguugcucaauaac

SEQ ID NO: 130175 - RNA, 19 nt, Artificial Sequence
  Description of Artificial Sequence: Synthetic oligonucleotide
  Antisense strand to SEQ ID NO: 130174
guuauugagcaacagcugu

SEQ ID NO: 130176 - RNA, 19 nt, Artificial Sequence
  Description of Artificial Sequence: Synthetic oligonucleotide
  Sense strand starting at position 135 of SEQ ID NO: 1664
gcuguugcucaauaacuau

SEQ ID NO: 130177 - RNA, 19 nt, Artificial Sequence
  Description of Artificial Sequence: Synthetic oligonucleotide
  Antisense strand to SEQ ID NO: 130176
auaguuauugagcaacagc

SEQ ID NO: 130178 - RNA, 19 nt, Artificial Sequence
  Description of Artificial Sequence: Synthetic oligonucleotide
  Sense strand starting at position 169 of SEQ ID NO: 1664
aaauguuaaggcugagauu

SEQ ID NO: 130179 - RNA, 19 nt, Artificial Sequence
  Description of Artificial Sequence: Synthetic oligonucleotide
  Antisense strand to SEQ ID NO: 130178
aaucucagccuuaacauuu

SEQ ID NO: 130180 - RNA, 19 nt, Artificial Sequence
  Description of Artificial Sequence: Synthetic oligonucleotide
  Sense strand starting at position 382 of SEQ ID NO: 1664
ugaggugaguacgugucaa

SEQ ID NO: 130181 - RNA, 19 nt, Artificial Sequence
  Description of Artificial Sequence: Synthetic oligonucleotide
  Antisense strand to SEQ ID NO: 130180
uugacacguacucaccuca

SEQ ID NO: 130182 - RNA, 19 nt, Artificial Sequence
  Description of Artificial Sequence: Synthetic oligonucleotide
  Sense strand starting at position 736 of SEQ ID NO: 1664
ccagaaagccucuauagca

SEQ ID NO: 130183 - RNA, 19 nt, Artificial Sequence
  Description of Artificial Sequence: Synthetic oligonucleotide
  Antisense strand to SEQ ID NO: 130182
ugcuauagaggcuuucugg

SEQ ID NO: 130184 - RNA, 19 nt, Artificial Sequence
  Description of Artificial Sequence: Synthetic oligonucleotide
  Sense strand starting at position 767 of SEQ ID NO: 1664
gagaucacgucuuucuaca

SEQ ID NO: 130185 - RNA, 19 nt, Artificial Sequence
  Description of Artificial Sequence: Synthetic oligonucleotide
  Antisense strand to SEQ ID NO: 130184
uguagaaagacgugaucuc

SEQ ID NO: 130186 - RNA, 19 nt, Artificial Sequence
  Description of Artificial Sequence: Synthetic oligonucleotide
  Sense strand starting at position 976 of SEQ ID NO: 1664
ugaauugacugccuacuau

SEQ ID NO: 130187 - RNA, 19 nt, Artificial Sequence
  Description of Artificial Sequence: Synthetic oligonucleotide
  Antisense strand to SEQ ID NO: 130186
auaguaggcagucaauuca

SEQ ID NO: 130188 - RNA, 19 nt, Artificial Sequence
  Description of Artificial Sequence: Synthetic oligonucleotide
  Sense strand starting at position 1067 of SEQ ID NO: 1664
agaaaucauuagucccagu

SEQ ID NO: 130189 - RNA, 19 nt, Artificial Sequence
  Description of Artificial Sequence: Synthetic oligonucleotide
  Antisense strand to SEQ ID NO: 130188
acugggacuaaugauuucu

SEQ ID NO: 130190 - RNA, 19 nt, Artificial Sequence
  Description of Artificial Sequence: Synthetic oligonucleotide
  Sense strand starting at position 1077 of SEQ ID NO: 1664
agucccagucuauagauaa

SEQ ID NO: 130191 - RNA, 19 nt, Artificial Sequence
  Description of Artificial Sequence: Synthetic oligonucleotide
  Antisense strand to SEQ ID NO: 130190
uuaucuauagacugggacu

SEQ ID NO: 130192 - RNA, 19 nt, Artificial Sequence
  Description of Artificial Sequence: Synthetic oligonucleotide
  Sense strand starting at position 1190 of SEQ ID NO: 1664
agcagaauagagugacugu

SEQ ID NO: 130193 - RNA, 19 nt, Artificial Sequence
  Description of Artificial Sequence: Synthetic oligonucleotide
  Antisense strand to SEQ ID NO: 130192
acagucacucuauucugcu

SEQ ID NO: 130194 - RNA, 19 nt, Artificial Sequence
  Description of Artificial Sequence: Synthetic oligonucleotide
  Sense strand starting at position 1373 of SEQ ID NO: 1664
gagauagucuccucagcag

SEQ ID NO: 130195 - RNA, 19 nt, Artificial Sequence
  Description of Artificial Sequence: Synthetic oligonucleotide
  Antisense strand to SEQ ID NO: 130194
cugcugaggagacuaucuc

SEQ ID NO: 130196 - RNA, 19 nt, Artificial Sequence
  Description of Artificial Sequence: Synthetic oligonucleotide
  Sense strand starting at position 1376 of SEQ ID NO: 1664
auagucuccucagcagagu

SEQ ID NO: 130197 - RNA, 19 nt, Artificial Sequence
  Description of Artificial Sequence: Synthetic oligonucleotide
  Antisense strand to SEQ ID NO: 130196
acucugcugaggagacuau

SEQ ID NO: 130198 - RNA, 19 nt, Artificial Sequence
  Description of Artificial Sequence: Synthetic oligonucleotide
  Sense strand starting at position 1507 of SEQ ID NO: 1664
cacugauggcucgccgagu

SEQ ID NO: 130199 - RNA, 19 nt, Artificial Sequence
  Description of Artificial Sequence: Synthetic oligonucleotide
  Antisense strand to SEQ ID NO: 130198
acucggcgagccaucagug

SEQ ID NO: 130200 - RNA, 19 nt, Artificial Sequence
  Description of Artificial Sequence: Synthetic oligonucleotide
  Sense strand starting at position 1531 of SEQ ID NO: 1664
ggaucaacuugauauugac

SEQ ID NO: 130201 - RNA, 19 nt, Artificial Sequence
  Description of Artificial Sequence: Synthetic oligonucleotide
  Antisense strand to SEQ ID NO: 130200
gucaauaucaaguugaucc

SEQ ID NO: 130202 - RNA, 19 nt, Artificial Sequence
  Description of Artificial Sequence: Synthetic oligonucleotide
  Sense strand starting at position 1537 of SEQ ID NO: 1664
acuugauauugacaaugac

SEQ ID NO: 130203 - RNA, 19 nt, Artificial Sequence
  Description of Artificial Sequence: Synthetic oligonucleotide
  Antisense strand to SEQ ID NO: 130202
gucauugucaauaucaagu

SEQ ID NO: 130204 - RNA, 19 nt, Artificial Sequence
  Description of Artificial Sequence: Synthetic oligonucleotide
  Sense strand starting at position 1540 of SEQ ID NO: 1664
ugauauugacaaugacagu

SEQ ID NO: 130205 - RNA, 19 nt, Artificial Sequence
  Description of Artificial Sequence: Synthetic oligonucleotide
  Antisense strand to SEQ ID NO: 130204
acugucauugucaauauca

SEQ ID NO: 130206 - RNA, 19 nt, Artificial Sequence
  Description of Artificial Sequence: Synthetic oligonucleotide
  Sense strand starting at position 1632 of SEQ ID NO: 1664
ccuagagggucuuucugaa

SEQ ID NO: 130207 - RNA, 19 nt, Artificial Sequence
  Description of Artificial Sequence: Synthetic oligonucleotide
  Antisense strand to SEQ ID NO: 130206
uucagaaagacccucuagg

SEQ ID NO: 130208 - RNA, 19 nt, Artificial Sequence
  Description of Artificial Sequence: Synthetic oligonucleotide
  Sense strand starting at position 1638 of SEQ ID NO: 1664
gggucuuucugaaaggagg

SEQ ID NO: 130209 - RNA, 19 nt, Artificial Sequence
  Description of Artificial Sequence: Synthetic oligonucleotide
  Antisense strand to SEQ ID NO: 130208
ccuccuuucagaaagaccc

SEQ ID NO: 130210 - RNA, 19 nt, Artificial Sequence
  Description of Artificial Sequence: Synthetic oligonucleotide
  Sense strand starting at position 1817 of SEQ ID NO: 1664
ccuguauucuucuauuuga

SEQ ID NO: 130211 - RNA, 19 nt, Artificial Sequence
  Description of Artificial Sequence: Synthetic oligonucleotide
  Antisense strand to SEQ ID NO: 130210
ucaaauagaagaauacagg

SEQ ID NO: 130212 - RNA, 19 nt, Artificial Sequence
  Description of Artificial Sequence: Synthetic oligonucleotide
  Sense strand starting at position 1856 of SEQ ID NO: 1664
ccuccauuguugguuucua

SEQ ID NO: 130213 - RNA, 19 nt, Artificial Sequence
  Description of Artificial Sequence: Synthetic oligonucleotide
  Antisense strand to SEQ ID NO: 130212
uagaaaccaacaauggagg

SEQ ID NO: 130214 - RNA, 19 nt, Artificial Sequence
  Description of Artificial Sequence: Synthetic oligonucleotide
  Sense strand starting at position 1860 of SEQ ID NO: 1664
cauuguugguuucuagaga

SEQ ID NO: 130215 - RNA, 19 nt, Artificial Sequence
  Description of Artificial Sequence: Synthetic oligonucleotide
  Antisense strand to SEQ ID NO: 130214
ucucuagaaaccaacaaug

SEQ ID NO: 130216 - RNA, 19 nt, Artificial Sequence
  Description of Artificial Sequence: Synthetic oligonucleotide
  Sense strand starting at position 1988 of SEQ ID NO: 1664
ccgucagaagcuuagaagu

SEQ ID NO: 130217 - RNA, 19 nt, Artificial Sequence
  Description of Artificial Sequence: Synthetic oligonucleotide
  Antisense strand to SEQ ID NO: 130216
acuucuaagcuucugacgg

SEQ ID NO: 130218 - RNA, 19 nt, Artificial Sequence
  Description of Artificial Sequence: Synthetic oligonucleotide
  Sense strand starting at position 2126 of SEQ ID NO: 1664
ggucccagugccugauuua

SEQ ID NO: 130219 - RNA, 19 nt, Artificial Sequence
  Description of Artificial Sequence: Synthetic oligonucleotide
  Antisense strand to SEQ ID NO: 130218
uaaaucaggcacugggacc

SEQ ID NO: 130220 - RNA, 19 nt, Artificial Sequence
  Description of Artificial Sequence: Synthetic oligonucleotide
  Sense strand starting at position 2399 of SEQ ID NO: 1664
guaagaugcuccucccaaa

SEQ ID NO: 130221 - RNA, 19 nt, Artificial Sequence
  Description of Artificial Sequence: Synthetic oligonucleotide
  Antisense strand to SEQ ID NO: 130220
uuugggaggagcaucuuac

SEQ ID NO: 130222 - RNA, 19 nt, Artificial Sequence
  Description of Artificial Sequence: Synthetic oligonucleotide
  Sense strand starting at position 2473 of SEQ ID NO: 1664
gcacccauacugugugaca

SEQ ID NO: 130223 - RNA, 19 nt, Artificial Sequence
  Description of Artificial Sequence: Synthetic oligonucleotide
  Antisense strand to SEQ ID NO: 130222
ugucacacaguaugggugc

SEQ ID NO: 130224 - RNA, 19 nt, Artificial Sequence
  Description of Artificial Sequence: Synthetic oligonucleotide
  Sense strand starting at position 2542 of SEQ ID NO: 1664
guuggaucaccuggaaauu

SEQ ID NO: 130225 - RNA, 19 nt, Artificial Sequence
  Description of Artificial Sequence: Synthetic oligonucleotide
  Antisense strand to SEQ ID NO: 130224
aauuuccaggugauccaac

SEQ ID NO: 130226 - RNA, 19 nt, Artificial Sequence
  Description of Artificial Sequence: Synthetic oligonucleotide
  Sense strand starting at position 2552 of SEQ ID NO: 1664
cuggaaauucccugagacu

SEQ ID NO: 130227 - RNA, 19 nt, Artificial Sequence
  Description of Artificial Sequence: Synthetic oligonucleotide
  Antisense strand to SEQ ID NO: 130226
agucucagggaauuuccag

SEQ ID NO: 130228 - RNA, 19 nt, Artificial Sequence
  Description of Artificial Sequence: Synthetic oligonucleotide
  Sense strand starting at position 2555 of SEQ ID NO: 1664
gaaauucccugagacugga

SEQ ID NO: 130229 - RNA, 19 nt, Artificial Sequence
  Description of Artificial Sequence: Synthetic oligonucleotide
  Antisense strand to SEQ ID NO: 130228
uccagucucagggaauuuc

SEQ ID NO: 130230 - RNA, 19 nt, Artificial Sequence
  Description of Artificial Sequence: Synthetic oligonucleotide
  Sense strand starting at position 2559 of SEQ ID NO: 1664
uucccugagacuggaguaa

SEQ ID NO: 130231 - RNA, 19 nt, Artificial Sequence
  Description of Artificial Sequence: Synthetic oligonucleotide
  Antisense strand to SEQ ID NO: 130230
uuacuccagucucagggaa

SEQ ID NO: 130232 - RNA, 19 nt, Artificial Sequence
  Description of Artificial Sequence: Synthetic oligonucleotide
  Sense strand starting at position 2570 of SEQ ID NO: 1664
uggaguaacucucugaauc

SEQ ID NO: 130233 - RNA, 19 nt, Artificial Sequence
  Description of Artificial Sequence: Synthetic oligonucleotide
  Antisense strand to SEQ ID NO: 130232
gauucagagaguuacucca

SEQ ID NO: 130234 - RNA, 19 nt, Artificial Sequence
  Description of Artificial Sequence: Synthetic oligonucleotide
  Sense strand starting at position 2571 of SEQ ID NO: 1664
ggaguaacucucugaauca

SEQ ID NO: 130235 - RNA, 19 nt, Artificial Sequence
  Description of Artificial Sequence: Synthetic oligonucleotide
  Antisense strand to SEQ ID NO: 130234
ugauucagagaguuacucc

SEQ ID NO: 130236 - RNA, 19 nt, Artificial Sequence
  Description of Artificial Sequence: Synthetic oligonucleotide
  Sense strand starting at position 2609 of SEQ ID NO: 1664
gccaaauaaucggcucaaa

SEQ ID NO: 130237 - RNA, 19 nt, Artificial Sequence
  Description of Artificial Sequence: Synthetic oligonucleotide
  Antisense strand to SEQ ID NO: 130236
uuugagccgauuauuuggc

SEQ ID NO: 130238 - RNA, 19 nt, Artificial Sequence
  Description of Artificial Sequence: Synthetic oligonucleotide
  Sense strand starting at position 3082 of SEQ ID NO: 1664
aggcgaaugcucagaccgu

SEQ ID NO: 130239 - RNA, 19 nt, Artificial Sequence
  Description of Artificial Sequence: Synthetic oligonucleotide
  Antisense strand to SEQ ID NO: 130238
acggucugagcauucgccu

SEQ ID NO: 130240 - RNA, 19 nt, Artificial Sequence
  Description of Artificial Sequence: Synthetic oligonucleotide
  Sense strand starting at position 3709 of SEQ ID NO: 1664
cugggauuaugggcaguga

SEQ ID NO: 130241 - RNA, 19 nt, Artificial Sequence
  Description of Artificial Sequence: Synthetic oligonucleotide
  Antisense strand to SEQ ID NO: 130240
ucacugcccauaaucccag

SEQ ID NO: 130242 - RNA, 19 nt, Artificial Sequence
  Description of Artificial Sequence: Synthetic oligonucleotide
  Sense strand starting at position 3760 of SEQ ID NO: 1664
cccugucgcagauaaagaa

SEQ ID NO: 130243 - RNA, 19 nt, Artificial Sequence
  Description of Artificial Sequence: Synthetic oligonucleotide
  Antisense strand to SEQ ID NO: 130242
uucuuuaucugcgacaggg

SEQ ID NO: 130244 - RNA, 19 nt, Artificial Sequence
  Description of Artificial Sequence: Synthetic oligonucleotide
  Sense strand starting at position 3874 of SEQ ID NO: 1664
acauaagaauugccagguu

SEQ ID NO: 130245 - RNA, 19 nt, Artificial Sequence
  Description of Artificial Sequence: Synthetic oligonucleotide
  Antisense strand to SEQ ID NO: 130244
aaccuggcaauucuuaugu

SEQ ID NO: 130246 - RNA, 19 nt, Artificial Sequence
  Description of Artificial Sequence: Synthetic oligonucleotide
  Sense strand starting at position 3911 of SEQ ID NO: 1664
gaaagcaguuagcuuaaca

SEQ ID NO: 130247 - RNA, 19 nt, Artificial Sequence
  Description of Artificial Sequence: Synthetic oligonucleotide
  Antisense strand to SEQ ID NO: 130246
uguuaagcuaacugcuuuc

SEQ ID NO: 130248 - RNA, 19 nt, Artificial Sequence
  Description of Artificial Sequence: Synthetic oligonucleotide
  Sense strand starting at position 3945 of SEQ ID NO: 1664
uuuagcuugcgucagaauc

SEQ ID NO: 130249 - RNA, 19 nt, Artificial Sequence
  Description of Artificial Sequence: Synthetic oligonucleotide
  Antisense strand to SEQ ID NO: 130248
gauucugacgcaagcuaaa

SEQ ID NO: 130250 - RNA, 19 nt, Artificial Sequence
  Description of Artificial Sequence: Synthetic oligonucleotide
  Sense strand starting at position 3953 of SEQ ID NO: 1664
gcgucagaaucaccuggau

SEQ ID NO: 130251 - RNA, 19 nt, Artificial Sequence
  Description of Artificial Sequence: Synthetic oligonucleotide
  Antisense strand to SEQ ID NO: 130250
auccaggugauucugacgc

SEQ ID NO: 130252 - RNA, 19 nt, Artificial Sequence
  Description of Artificial Sequence: Synthetic oligonucleotide
  Sense strand starting at position 26 of SEQ ID NO: 1663
ugaauugacugccuacuau

SEQ ID NO: 130253 - RNA, 19 nt, Artificial Sequence
  Description of Artificial Sequence: Synthetic oligonucleotide
  Antisense strand to SEQ ID NO: 130252
auaguaggcagucaauuca

SEQ ID NO: 130254 - RNA, 19 nt, Artificial Sequence
  Description of Artificial Sequence: Synthetic oligonucleotide
  Sense strand starting at position 117 of SEQ ID NO: 1663
agaaaucauuagucccagu

SEQ ID NO: 130255 - RNA, 19 nt, Artificial Sequence
  Description of Artificial Sequence: Synthetic oligonucleotide
  Antisense strand to SEQ ID NO: 130254
acugggacuaaugauuucu

SEQ ID NO: 130256 - RNA, 19 nt, Artificial Sequence
  Description of Artificial Sequence: Synthetic oligonucleotide
  Sense strand starting at position 127 of SEQ ID NO: 1663
agucccagucuauagauaa

SEQ ID NO: 130257 - RNA, 19 nt, Artificial Sequence
  Description of Artificial Sequence: Synthetic oligonucleotide
  Antisense strand to SEQ ID NO: 130256
uuaucuauagacugggacu

SEQ ID NO: 130258 - RNA, 19 nt, Artificial Sequence
  Description of Artificial Sequence: Synthetic oligonucleotide
  Sense strand starting at position 240 of SEQ ID NO: 1663
agcagaauagagugacugu

SEQ ID NO: 130259 - RNA, 19 nt, Artificial Sequence
  Description of Artificial Sequence: Synthetic oligonucleotide
  Antisense strand to SEQ ID NO: 130258
acagucacucuauucugcu

SEQ ID NO: 130260 - RNA, 19 nt, Artificial Sequence
  Description of Artificial Sequence: Synthetic oligonucleotide
  Sense strand starting at position 423 of SEQ ID NO: 1663
gagauagucuccucagcag

SEQ ID NO: 130261 - RNA, 19 nt, Artificial Sequence
  Description of Artificial Sequence: Synthetic oligonucleotide
  Antisense strand to SEQ ID NO: 130260
cugcugaggagacuaucuc

SEQ ID NO: 130262 - RNA, 19 nt, Artificial Sequence
  Description of Artificial Sequence: Synthetic oligonucleotide
  Sense strand starting at position 426 of SEQ ID NO: 1663
auagucuccucagcagagu

SEQ ID NO: 130263 - RNA, 19 nt, Artificial Sequence
  Description of Artificial Sequence: Synthetic oligonucleotide
  Antisense strand to SEQ ID NO: 130262
acucugcugaggagacuau

SEQ ID NO: 130264 - RNA, 19 nt, Artificial Sequence
  Description of Artificial Sequence: Synthetic oligonucleotide
  Sense strand starting at position 557 of SEQ ID NO: 1663
cacugauggcucgccgagu

SEQ ID NO: 130265 - RNA, 19 nt, Artificial Sequence
  Description of Artificial Sequence: Synthetic oligonucleotide
  Antisense strand to SEQ ID NO: 130264
acucggcgagccaucagug

SEQ ID NO: 130266 - RNA, 19 nt, Artificial Sequence
  Description of Artificial Sequence: Synthetic oligonucleotide
  Sense strand starting at position 590 of SEQ ID NO: 1663
ugauauugacaaugacagu

SEQ ID NO: 130267 - RNA, 19 nt, Artificial Sequence
  Description of Artificial Sequence: Synthetic oligonucleotide
  Antisense strand to SEQ ID NO: 130266
acugucauugucaauauca

SEQ ID NO: 130268 - RNA, 19 nt, Artificial Sequence
  Description of Artificial Sequence: Synthetic oligonucleotide
  Sense strand starting at position 682 of SEQ ID NO: 1663
ccuagagggucuuucugaa

SEQ ID NO: 130269 - RNA, 19 nt, Artificial Sequence
  Description of Artificial Sequence: Synthetic oligonucleotide
  Antisense strand to SEQ ID NO: 130268
uucagaaagacccucuagg

SEQ ID NO: 130270 - RNA, 19 nt, Artificial Sequence
  Description of Artificial Sequence: Synthetic oligonucleotide
  Sense strand starting at position 688 of SEQ ID NO: 1663
gggucuuucugaaaggagg

SEQ ID NO: 130271 - RNA, 19 nt, Artificial Sequence
  Description of Artificial Sequence: Synthetic oligonucleotide
  Antisense strand to SEQ ID NO: 130270
ccuccuuucagaaagaccc

SEQ ID NO: 130272 - RNA, 19 nt, Artificial Sequence
  Description of Artificial Sequence: Synthetic oligonucleotide
  Sense strand starting at position 910 of SEQ ID NO: 1663
cauuguugguuucuagaga

SEQ ID NO: 130273 - RNA, 19 nt, Artificial Sequence
  Description of Artificial Sequence: Synthetic oligonucleotide
  Antisense strand to SEQ ID NO: 130272
ucucuagaaaccaacaaug

SEQ ID NO: 130274 - RNA, 19 nt, Artificial Sequence
  Description of Artificial Sequence: Synthetic oligonucleotide
  Sense strand starting at position 1038 of SEQ ID NO: 1663
ccgucagaagcuuagaagu

SEQ ID NO: 130275 - RNA, 19 nt, Artificial Sequence
  Description of Artificial Sequence: Synthetic oligonucleotide
  Antisense strand to SEQ ID NO: 130274
acuucuaagcuucugacgg

SEQ ID NO: 130276 - RNA, 19 nt, Artificial Sequence
  Description of Artificial Sequence: Synthetic oligonucleotide
  Sense strand starting at position 1176 of SEQ ID NO: 1663
ggucccagugccugauuua

SEQ ID NO: 130277 - RNA, 19 nt, Artificial Sequence
  Description of Artificial Sequence: Synthetic oligonucleotide
  Antisense strand to SEQ ID NO: 130276
uaaaucaggcacugggacc

SEQ ID NO: 130278 - RNA, 19 nt, Artificial Sequence
  Description of Artificial Sequence: Synthetic oligonucleotide
  Sense strand starting at position 1449 of SEQ ID NO: 1663
guaagaugcuccucccaaa

SEQ ID NO: 130279 - RNA, 19 nt, Artificial Sequence
  Description of Artificial Sequence: Synthetic oligonucleotide
  Antisense strand to SEQ ID NO: 130278
uuugggaggagcaucuuac

SEQ ID NO: 130280 - RNA, 19 nt, Artificial Sequence
  Description of Artificial Sequence: Synthetic oligonucleotide
  Sense strand starting at position 1523 of SEQ ID NO: 1663
gcacccauacugugugaca

SEQ ID NO: 130281 - RNA, 19 nt, Artificial Sequence
  Description of Artificial Sequence: Synthetic oligonucleotide
  Antisense strand to SEQ ID NO: 130280
ugucacacaguaugggugc

SEQ ID NO: 130282 - RNA, 19 nt, Artificial Sequence
  Description of Artificial Sequence: Synthetic oligonucleotide
  Sense strand starting at position 1592 of SEQ ID NO: 1663
guuggaucaccuggaaauu

SEQ ID NO: 130283 - RNA, 19 nt, Artificial Sequence
  Description of Artificial Sequence: Synthetic oligonucleotide
  Antisense strand to SEQ ID NO: 130282
aauuuccaggugauccaac

SEQ ID NO: 130284 - RNA, 19 nt, Artificial Sequence
  Description of Artificial Sequence: Synthetic oligonucleotide
  Sense strand starting at position 1602 of SEQ ID NO: 1663
cuggaaauucccugagacu

SEQ ID NO: 130285 - RNA, 19 nt, Artificial Sequence
  Description of Artificial Sequence: Synthetic oligonucleotide
  Antisense strand to SEQ ID NO: 130284
agucucagggaauuuccag

SEQ ID NO: 130286 - RNA, 19 nt, Artificial Sequence
  Description of Artificial Sequence: Synthetic oligonucleotide
  Sense strand starting at position 1605 of SEQ ID NO: 1663
gaaauucccugagacugga

SEQ ID NO: 130287 - RNA, 19 nt, Artificial Sequence
  Description of Artificial Sequence: Synthetic oligonucleotide
  Antisense strand to SEQ ID NO: 130286
uccagucucagggaauuuc

SEQ ID NO: 130288 - RNA, 19 nt, Artificial Sequence
  Description of Artificial Sequence: Synthetic oligonucleotide
  Sense strand starting at position 1609 of SEQ ID NO: 1663
uucccugagacuggaguaa

SEQ ID NO: 130289 - RNA, 19 nt, Artificial Sequence
  Description of Artificial Sequence: Synthetic oligonucleotide
  Antisense strand to SEQ ID NO: 130288
uuacuccagucucagggaa

SEQ ID NO: 130290 - RNA, 19 nt, Artificial Sequence
  Description of Artificial Sequence: Synthetic oligonucleotide
  Sense strand starting at position 1620 of SEQ ID NO: 1663
uggaguaacucucugaauc

SEQ ID NO: 130291 - RNA, 19 nt, Artificial Sequence
  Description of Artificial Sequence: Synthetic oligonucleotide
  Antisense strand to SEQ ID NO: 130290
gauucagagaguuacucca

SEQ ID NO: 130292 - RNA, 19 nt, Artificial Sequence
  Description of Artificial Sequence: Synthetic oligonucleotide
  Sense strand starting at position 1621 of SEQ ID NO: 1663
ggaguaacucucugaauca

SEQ ID NO: 130293 - RNA, 19 nt, Artificial Sequence
  Description of Artificial Sequence: Synthetic oligonucleotide
  Antisense strand to SEQ ID NO: 130292
ugauucagagaguuacucc

SEQ ID NO: 130294 - RNA, 19 nt, Artificial Sequence
  Description of Artificial Sequence: Synthetic oligonucleotide
  Sense strand starting at position 1659 of SEQ ID NO: 1663
gccaaauaaucggcucaaa

SEQ ID NO: 130295 - RNA, 19 nt, Artificial Sequence
  Description of Artificial Sequence: Synthetic oligonucleotide
  Antisense strand to SEQ ID NO: 130294
uuugagccgauuauuuggc

SEQ ID NO: 130296 - RNA, 19 nt, Artificial Sequence
  Description of Artificial Sequence: Synthetic oligonucleotide
  Sense strand starting at position 2132 of SEQ ID NO: 1663
aggcgaaugcucagaccgu

SEQ ID NO: 130297 - RNA, 19 nt, Artificial Sequence
  Description of Artificial Sequence: Synthetic oligonucleotide
  Antisense strand to SEQ ID NO: 130296
acggucugagcauucgccu

SEQ ID NO: 130298 - RNA, 19 nt, Artificial Sequence
  Description of Artificial Sequence: Synthetic oligonucleotide
  Sense strand starting at position 2759 of SEQ ID NO: 1663
cugggauuaugggcaguga

SEQ ID NO: 130299 - RNA, 19 nt, Artificial Sequence
  Description of Artificial Sequence: Synthetic oligonucleotide
  Antisense strand to SEQ ID NO: 130298
ucacugcccauaaucccag

SEQ ID NO: 130300 - RNA, 19 nt, Artificial Sequence
  Description of Artificial Sequence: Synthetic oligonucleotide
  Sense strand starting at position 2810 of SEQ ID NO: 1663
cccugucgcagauaaagaa

SEQ ID NO: 130301 - RNA, 19 nt, Artificial Sequence
  Description of Artificial Sequence: Synthetic oligonucleotide
  Antisense strand to SEQ ID NO: 130300
uucuuuaucugcgacaggg

SEQ ID NO: 130302 - RNA, 19 nt, Artificial Sequence
  Description of Artificial Sequence: Synthetic oligonucleotide
  Sense strand starting at position 2924 of SEQ ID NO: 1663
acauaagaauugccagguu

SEQ ID NO: 130303 - RNA, 19 nt, Artificial Sequence
  Description of Artificial Sequence: Synthetic oligonucleotide
  Antisense strand to SEQ ID NO: 130302
aaccuggcaauucuuaugu

SEQ ID NO: 130304 - RNA, 19 nt, Artificial Sequence
  Description of Artificial Sequence: Synthetic oligonucleotide
  Sense strand starting at position 2961 of SEQ ID NO: 1663
gaaagcaguuagcuuaaca

SEQ ID NO: 130305 - RNA, 19 nt, Artificial Sequence
  Description of Artificial Sequence: Synthetic oligonucleotide
  Antisense strand to SEQ ID NO: 130304
uguuaagcuaacugcuuuc

SEQ ID NO: 130306 - RNA, 19 nt, Artificial Sequence
  Description of Artificial Sequence: Synthetic oligonucleotide
  Sense strand starting at position 3003 of SEQ ID NO: 1663
gcgucagaaucaccuggau

SEQ ID NO: 130307 - RNA, 19 nt, Artificial Sequence
  Description of Artificial Sequence: Synthetic oligonucleotide
  Antisense strand to SEQ ID NO: 130306
auccaggugauucugacgc

SEQ ID NO: 130308 - RNA, 19 nt, Artificial Sequence
  Description of Artificial Sequence: Synthetic oligonucleotide
  Sense strand starting at position 3106 of SEQ ID NO: 1663
agaaguuucuaggugaugu

SEQ ID NO: 130309 - RNA, 19 nt, Artificial Sequence
  Description of Artificial Sequence: Synthetic oligonucleotide
  Antisense strand to SEQ ID NO: 130308
acaucaccuagaaacuucu

SEQ ID NO: 130310 - RNA, 19 nt, Artificial Sequence
  Description of Artificial Sequence: Synthetic oligonucleotide
  Sense strand starting at position 3107 of SEQ ID NO: 1663
gaaguuucuaggugauguu

SEQ ID NO: 130311 - RNA, 19 nt, Artificial Sequence
  Description of Artificial Sequence: Synthetic oligonucleotide
  Antisense strand to SEQ ID NO: 130310
aacaucaccuagaaacuuc

SEQ ID NO: 130312 - RNA, 19 nt, Artificial Sequence
  Description of Artificial Sequence: Synthetic oligonucleotide
  Sense strand starting at position 3120 of SEQ ID NO: 1663
gauguugaugcuuguuuga

SEQ ID NO: 130313 - RNA, 19 nt, Artificial Sequence
  Description of Artificial Sequence: Synthetic oligonucleotide
  Antisense strand to SEQ ID NO: 130312
ucaaacaagcaucaacauc

SEQ ID NO: 130314 - RNA, 19 nt, Artificial Sequence
  Description of Artificial Sequence: Synthetic oligonucleotide
  Sense strand starting at position 3122 of SEQ ID NO: 1663
uguugaugcuuguuugaag

SEQ ID NO: 130315 - RNA, 19 nt, Artificial Sequence
  Description of Artificial Sequence: Synthetic oligonucleotide
  Antisense strand to SEQ ID NO: 130314
cuucaaacaagcaucaaca

SEQ ID NO: 130316 - RNA, 19 nt, Artificial Sequence
  Description of Artificial Sequence: Synthetic oligonucleotide
  Sense strand starting at position 3129 of SEQ ID NO: 1663
gcuuguuugaaguggauag

SEQ ID NO: 130317 - RNA, 19 nt, Artificial Sequence
  Description of Artificial Sequence: Synthetic oligonucleotide
  Antisense strand to SEQ ID NO: 130316
cuauccacuucaaacaagc

SEQ ID NO: 130318 - RNA, 19 nt, Artificial Sequence
  Description of Artificial Sequence: Synthetic oligonucleotide
  Sense strand starting at position 3133 of SEQ ID NO: 1663
guuugaaguggauagccau

SEQ ID NO: 130319 - RNA, 19 nt, Artificial Sequence
  Description of Artificial Sequence: Synthetic oligonucleotide
  Antisense strand to SEQ ID NO: 130318
auggcuauccacuucaaac

SEQ ID NO: 130320 - RNA, 19 nt, Artificial Sequence
  Description of Artificial Sequence: Synthetic oligonucleotide
  Sense strand starting at position 3170 of SEQ ID NO: 1663
ggagcaauauaauccaauu

SEQ ID NO: 130321 - RNA, 19 nt, Artificial Sequence
  Description of Artificial Sequence: Synthetic oligonucleotide
  Antisense strand to SEQ ID NO: 130320
aauuggauuauauugcucc

SEQ ID NO: 130322 - RNA, 19 nt, Artificial Sequence
  Description of Artificial Sequence: Synthetic oligonucleotide
  Sense strand starting at position 3272 of SEQ ID NO: 1663
uugagcuuucuguauucca

SEQ ID NO: 130323 - RNA, 19 nt, Artificial Sequence
  Description of Artificial Sequence: Synthetic oligonucleotide
  Antisense strand to SEQ ID NO: 130322
uggaauacagaaagcucaa

SEQ ID NO: 130324 - RNA, 19 nt, Artificial Sequence
  Description of Artificial Sequence: Synthetic oligonucleotide
  Sense strand starting at position 3336 of SEQ ID NO: 1663
aacaguacuugucuuagga

SEQ ID NO: 130325 - RNA, 19 nt, Artificial Sequence
  Description of Artificial Sequence: Synthetic oligonucleotide
  Antisense strand to SEQ ID NO: 130324
uccuaagacaaguacuguu

SEQ ID NO: 130326 - RNA, 19 nt, Artificial Sequence
  Description of Artificial Sequence: Synthetic oligonucleotide
  Sense strand starting at position 3653 of SEQ ID NO: 1663
agaaguugcaguugagauu

SEQ ID NO: 130327 - RNA, 19 nt, Artificial Sequence
  Description of Artificial Sequence: Synthetic oligonucleotide
  Antisense strand to SEQ ID NO: 130326
aaucucaacugcaacuucu

SEQ ID NO: 130328 - RNA, 19 nt, Artificial Sequence
  Description of Artificial Sequence: Synthetic oligonucleotide
  Sense strand starting at position 3747 of SEQ ID NO: 1663
aaagaugucccucaggguu

SEQ ID NO: 130329 - RNA, 19 nt, Artificial Sequence
  Description of Artificial Sequence: Synthetic oligonucleotide
  Antisense strand to SEQ ID NO: 130328
aacccugagggacaucuuu

SEQ ID NO: 130330 - RNA, 19 nt, Artificial Sequence
  Description of Artificial Sequence: Synthetic oligonucleotide
  Sense strand starting at position 3972 of SEQ ID NO: 1663
cuagauuuccuguggguuc

SEQ ID NO: 130331 - RNA, 19 nt, Artificial Sequence
  Description of Artificial Sequence: Synthetic oligonucleotide
  Antisense strand to SEQ ID NO: 130330
gaacccacaggaaaucuag

SEQ ID NO: 130332 - RNA, 19 nt, Artificial Sequence
  Description of Artificial Sequence: Synthetic oligonucleotide
  Sense strand starting at position 3971 of SEQ ID NO: 1665
guagaauauguuggauuau

SEQ ID NO: 130333 - RNA, 19 nt, Artificial Sequence
  Description of Artificial Sequence: Synthetic oligonucleotide
  Antisense strand to SEQ ID NO: 130332
auaauccaacauauucuac

SEQ ID NO: 130334 - RNA, 19 nt, Artificial Sequence
  Description of Artificial Sequence: Synthetic oligonucleotide
  Sense strand starting at position 3842 of SEQ ID NO: 1665
gacaucaagucacuggaua

SEQ ID NO: 130335 - RNA, 19 nt, Artificial Sequence
  Description of Artificial Sequence: Synthetic oligonucleotide
  Antisense strand to SEQ ID NO: 130334
uauccagugacuugauguc

SEQ ID NO: 130336 - RNA, 19 nt, Artificial Sequence
  Description of Artificial Sequence: Synthetic oligonucleotide
  Sense strand starting at position 3763 of SEQ ID NO: 1665
guuauugugagauaaaugc

SEQ ID NO: 130337 - RNA, 19 nt, Artificial Sequence
  Description of Artificial Sequence: Synthetic oligonucleotide
  Antisense strand to SEQ ID NO: 130336
gcauuuaucucacaauaac

SEQ ID NO: 130338 - RNA, 19 nt, Artificial Sequence
  Description of Artificial Sequence: Synthetic oligonucleotide
  Sense strand starting at position 3686 of SEQ ID NO: 1665
guaauaccuguuuaaguuc

SEQ ID NO: 130339 - RNA, 19 nt, Artificial Sequence
  Description of Artificial Sequence: Synthetic oligonucleotide
  Antisense strand to SEQ ID NO: 130338
gaacuuaaacagguauuac

SEQ ID NO: 130340 - RNA, 19 nt, Artificial Sequence
  Description of Artificial Sequence: Synthetic oligonucleotide
  Sense strand starting at position 3457 of SEQ ID NO: 1665
gugucagcccauuaauaac

SEQ ID NO: 130341 - RNA, 19 nt, Artificial Sequence
  Description of Artificial Sequence: Synthetic oligonucleotide
  Antisense strand to SEQ ID NO: 130340
guuauuaaugggcugacac

SEQ ID NO: 130342 - RNA, 19 nt, Artificial Sequence
  Description of Artificial Sequence: Synthetic oligonucleotide
  Sense strand starting at position 3444 of SEQ ID NO: 1665
agaguucugaaagguguca

SEQ ID NO: 130343 - RNA, 19 nt, Artificial Sequence
  Description of Artificial Sequence: Synthetic oligonucleotide
  Antisense strand to SEQ ID NO: 130342
ugacaccuuucagaacucu

SEQ ID NO: 130344 - RNA, 19 nt, Artificial Sequence
  Description of Artificial Sequence: Synthetic oligonucleotide
  Sense strand starting at position 3428 of SEQ ID NO: 1665
ugcacuagauuugaggaga

SEQ ID NO: 130345 - RNA, 19 nt, Artificial Sequence
  Description of Artificial Sequence: Synthetic oligonucleotide
  Antisense strand to SEQ ID NO: 130344
ucuccucaaaucuagugca

SEQ ID NO: 130346 - RNA, 19 nt, Artificial Sequence
  Description of Artificial Sequence: Synthetic oligonucleotide
  Sense strand starting at position 3398 of SEQ ID NO: 1665
aagucagguguguacagau

SEQ ID NO: 130347 - RNA, 19 nt, Artificial Sequence
  Description of Artificial Sequence: Synthetic oligonucleotide
  Antisense strand to SEQ ID NO: 130346
aucuguacacaccugacuu

SEQ ID NO: 130348 - RNA, 19 nt, Artificial Sequence
  Description of Artificial Sequence: Synthetic oligonucleotide
  Sense strand starting at position 3307 of SEQ ID NO: 1665
auugcugagaggugguaaa

SEQ ID NO: 130349 - RNA, 19 nt, Artificial Sequence
  Description of Artificial Sequence: Synthetic oligonucleotide
  Antisense strand to SEQ ID NO: 130348
uuuaccaccucucagcaau

SEQ ID NO: 130350 - RNA, 19 nt, Artificial Sequence
  Description of Artificial Sequence: Synthetic oligonucleotide
  Sense strand starting at position 3291 of SEQ ID NO: 1665
guuaaacacguagggaauu

SEQ ID NO: 130351 - RNA, 19 nt, Artificial Sequence
  Description of Artificial Sequence: Synthetic oligonucleotide
  Antisense strand to SEQ ID NO: 130350
aauucccuacguguuuaac

SEQ ID NO: 130352 - RNA, 19 nt, Artificial Sequence
  Description of Artificial Sequence: Synthetic oligonucleotide
  Sense strand starting at position 3279 of SEQ ID NO: 1665
cauuauggaugaguuaaac

SEQ ID NO: 130353 - RNA, 19 nt, Artificial Sequence
  Description of Artificial Sequence: Synthetic oligonucleotide
  Antisense strand to SEQ ID NO: 130352
guuuaacucauccauaaug

SEQ ID NO: 130354 - RNA, 19 nt, Artificial Sequence
  Description of Artificial Sequence: Synthetic oligonucleotide
  Sense strand starting at position 3277 of SEQ ID NO: 1665
ugcauuauggaugaguuaa

SEQ ID NO: 130355 - RNA, 19 nt, Artificial Sequence
  Description of Artificial Sequence: Synthetic oligonucleotide
  Antisense strand to SEQ ID NO: 130354
uuaacucauccauaaugca

SEQ ID NO: 130356 - RNA, 19 nt, Artificial Sequence
  Description of Artificial Sequence: Synthetic oligonucleotide
  Sense strand starting at position 3276 of SEQ ID NO: 1665
augcauuauggaugaguua

SEQ ID NO: 130357 - RNA, 19 nt, Artificial Sequence
  Description of Artificial Sequence: Synthetic oligonucleotide
  Antisense strand to SEQ ID NO: 130356
uaacucauccauaaugcau

SEQ ID NO: 130358 - RNA, 19 nt, Artificial Sequence
  Description of Artificial Sequence: Synthetic oligonucleotide
  Sense strand starting at position 3274 of SEQ ID NO: 1665
cuaugcauuauggaugagu

SEQ ID NO: 130359 - RNA, 19 nt, Artificial Sequence
  Description of Artificial Sequence: Synthetic oligonucleotide
  Antisense strand to SEQ ID NO: 130358
acucauccauaaugcauag

SEQ ID NO: 130360 - RNA, 19 nt, Artificial Sequence
  Description of Artificial Sequence: Synthetic oligonucleotide
  Sense strand starting at position 3270 of SEQ ID NO: 1665
auuccuaugcauuauggau

SEQ ID NO: 130361 - RNA, 19 nt, Artificial Sequence
  Description of Artificial Sequence: Synthetic oligonucleotide
  Antisense strand to SEQ ID NO: 130360
auccauaaugcauaggaau

SEQ ID NO: 130362 - RNA, 19 nt, Artificial Sequence
  Description of Artificial Sequence: Synthetic oligonucleotide
  Sense strand starting at position 2916 of SEQ ID NO: 1665
uggaauuacuugguauucu

SEQ ID NO: 130363 - RNA, 19 nt, Artificial Sequence
  Description of Artificial Sequence: Synthetic oligonucleotide
  Antisense strand to SEQ ID NO: 130362
agaauaccaaguaauucca

SEQ ID NO: 130364 - RNA, 19 nt, Artificial Sequence
  Description of Artificial Sequence: Synthetic oligonucleotide
  Sense strand starting at position 2915 of SEQ ID NO: 1665
guggaauuacuugguauuc

SEQ ID NO: 130365 - RNA, 19 nt, Artificial Sequence
  Description of Artificial Sequence: Synthetic oligonucleotide
  Antisense strand to SEQ ID NO: 130364
gaauaccaaguaauuccac

SEQ ID NO: 130366 - RNA, 19 nt, Artificial Sequence
  Description of Artificial Sequence: Synthetic oligonucleotide
  Sense strand starting at position 2902 of SEQ ID NO: 1665
ggccauguaaauuguggaa

SEQ ID NO: 130367 - RNA, 19 nt, Artificial Sequence
  Description of Artificial Sequence: Synthetic oligonucleotide
  Antisense strand to SEQ ID NO: 130366
uuccacaauuuacauggcc

SEQ ID NO: 130368 - RNA, 19 nt, Artificial Sequence
  Description of Artificial Sequence: Synthetic oligonucleotide
  Sense strand starting at position 2895 of SEQ ID NO: 1665
aagggugggccauguaaau

SEQ ID NO: 130369 - RNA, 19 nt, Artificial Sequence
  Description of Artificial Sequence: Synthetic oligonucleotide
  Antisense strand to SEQ ID NO: 130368
auuuacauggcccacccuu

SEQ ID NO: 130370 - RNA, 19 nt, Artificial Sequence
  Description of Artificial Sequence: Synthetic oligonucleotide
  Sense strand starting at position 2865 of SEQ ID NO: 1665
acaguuuguuacuuagaau

SEQ ID NO: 130371 - RNA, 19 nt, Artificial Sequence
  Description of Artificial Sequence: Synthetic oligonucleotide
  Antisense strand to SEQ ID NO: 130370
auucuaaguaacaaacugu

SEQ ID NO: 130372 - RNA, 19 nt, Artificial Sequence
  Description of Artificial Sequence: Synthetic oligonucleotide
  Sense strand starting at position 2864 of SEQ ID NO: 1665
gacaguuuguuacuuagaa

SEQ ID NO: 130373 - RNA, 19 nt, Artificial Sequence
  Description of Artificial Sequence: Synthetic oligonucleotide
  Antisense strand to SEQ ID NO: 130372
uucuaaguaacaaacuguc

SEQ ID NO: 130374 - RNA, 19 nt, Artificial Sequence
  Description of Artificial Sequence: Synthetic oligonucleotide
  Sense strand starting at position 2861 of SEQ ID NO: 1665
gaagacaguuuguuacuua

SEQ ID NO: 130375 - RNA, 19 nt, Artificial Sequence
  Description of Artificial Sequence: Synthetic oligonucleotide
  Antisense strand to SEQ ID NO: 130374
uaaguaacaaacugucuuc

SEQ ID NO: 130376 - RNA, 19 nt, Artificial Sequence
  Description of Artificial Sequence: Synthetic oligonucleotide
  Sense strand starting at position 2860 of SEQ ID NO: 1665
agaagacaguuuguuacuu

SEQ ID NO: 130377 - RNA, 19 nt, Artificial Sequence
  Description of Artificial Sequence: Synthetic oligonucleotide
  Antisense strand to SEQ ID NO: 130376
aaguaacaaacugucuucu

SEQ ID NO: 130378 - RNA, 19 nt, Artificial Sequence
  Description of Artificial Sequence: Synthetic oligonucleotide
  Sense strand starting at position 2801 of SEQ ID NO: 1665
aguugaaugcuacauauua

SEQ ID NO: 130379 - RNA, 19 nt, Artificial Sequence
  Description of Artificial Sequence: Synthetic oligonucleotide
  Antisense strand to SEQ ID NO: 130378
uaauauguagcauucaacu

SEQ ID NO: 130380 - RNA, 19 nt, Artificial Sequence
  Description of Artificial Sequence: Synthetic oligonucleotide
  Sense strand starting at position 2796 of SEQ ID NO: 1665
agauuaguugaaugcuaca

SEQ ID NO: 130381 - RNA, 19 nt, Artificial Sequence
  Description of Artificial Sequence: Synthetic oligonucleotide
  Antisense strand to SEQ ID NO: 130380
uguagcauucaacuaaucu

SEQ ID NO: 130382 - RNA, 19 nt, Artificial Sequence
  Description of Artificial Sequence: Synthetic oligonucleotide
  Sense strand starting at position 2793 of SEQ ID NO: 1665
aauagauuaguugaaugcu

SEQ ID NO: 130383 - RNA, 19 nt, Artificial Sequence
  Description of Artificial Sequence: Synthetic oligonucleotide
  Antisense strand to SEQ ID NO: 130382
agcauucaacuaaucuauu

SEQ ID NO: 130384 - RNA, 19 nt, Artificial Sequence
  Description of Artificial Sequence: Synthetic oligonucleotide
  Sense strand starting at position 2721 of SEQ ID NO: 1665
agguguauaaaguaucuua

SEQ ID NO: 130385 - RNA, 19 nt, Artificial Sequence
  Description of Artificial Sequence: Synthetic oligonucleotide
  Antisense strand to SEQ ID NO: 130384
uaagauacuuuauacaccu

SEQ ID NO: 130386 - RNA, 19 nt, Artificial Sequence
  Description of Artificial Sequence: Synthetic oligonucleotide
  Sense strand starting at position 2656 of SEQ ID NO: 1665
acacacuuccgucaagaga

SEQ ID NO: 130387 - RNA, 19 nt, Artificial Sequence
  Description of Artificial Sequence: Synthetic oligonucleotide
  Antisense strand to SEQ ID NO: 130386
ucucuugacggaagugugu

SEQ ID NO: 130388 - RNA, 19 nt, Artificial Sequence
  Description of Artificial Sequence: Synthetic oligonucleotide
  Sense strand starting at position 2625 of SEQ ID NO: 1665
agucuacugauagggaauu

SEQ ID NO: 130389 - RNA, 19 nt, Artificial Sequence
  Description of Artificial Sequence: Synthetic oligonucleotide
  Antisense strand to SEQ ID NO: 130388
aauucccuaucaguagacu

SEQ ID NO: 130390 - RNA, 19 nt, Artificial Sequence
  Description of Artificial Sequence: Synthetic oligonucleotide
  Sense strand starting at position 2182 of SEQ ID NO: 1665
cuuugaaguccaugaacaa

SEQ ID NO: 130391 - RNA, 19 nt, Artificial Sequence
  Description of Artificial Sequence: Synthetic oligonucleotide
  Antisense strand to SEQ ID NO: 130390
uuguucauggacuucaaag

SEQ ID NO: 130392 - RNA, 19 nt, Artificial Sequence
  Description of Artificial Sequence: Synthetic oligonucleotide
  Sense strand starting at position 2134 of SEQ ID NO: 1665
ugauuagggccuuaugcaa

SEQ ID NO: 130393 - RNA, 19 nt, Artificial Sequence
  Description of Artificial Sequence: Synthetic oligonucleotide
  Antisense strand to SEQ ID NO: 130392
uugcauaaggcccuaauca

SEQ ID NO: 130394 - RNA, 19 nt, Artificial Sequence
  Description of Artificial Sequence: Synthetic oligonucleotide
  Sense strand starting at position 2121 of SEQ ID NO: 1665
aucaguaugcgcgugauua

SEQ ID NO: 130395 - RNA, 19 nt, Artificial Sequence
  Description of Artificial Sequence: Synthetic oligonucleotide
  Antisense strand to SEQ ID NO: 130394
uaaucacgcgcauacugau

SEQ ID NO: 130396 - RNA, 19 nt, Artificial Sequence
  Description of Artificial Sequence: Synthetic oligonucleotide
  Sense strand starting at position 2025 of SEQ ID NO: 1665
ugacauugucaaggcaacu

SEQ ID NO: 130397 - RNA, 19 nt, Artificial Sequence
  Description of Artificial Sequence: Synthetic oligonucleotide
  Antisense strand to SEQ ID NO: 130396
aguugccuugacaauguca

SEQ ID NO: 130398 - RNA, 19 nt, Artificial Sequence
  Description of Artificial Sequence: Synthetic oligonucleotide
  Sense strand starting at position 1486 of SEQ ID NO: 1665
cgagcugaacucuaaauua

SEQ ID NO: 130399 - RNA, 19 nt, Artificial Sequence
  Description of Artificial Sequence: Synthetic oligonucleotide
  Antisense strand to SEQ ID NO: 130398
uaauuuagaguucagcucg

SEQ ID NO: 130400 - RNA, 19 nt, Artificial Sequence
  Description of Artificial Sequence: Synthetic oligonucleotide
  Sense strand starting at position 1338 of SEQ ID NO: 1665
agacguucucauuagguau

SEQ ID NO: 130401 - RNA, 19 nt, Artificial Sequence
  Description of Artificial Sequence: Synthetic oligonucleotide
  Antisense strand to SEQ ID NO: 130400
auaccuaaugagaacgucu

SEQ ID NO: 130402 - RNA, 19 nt, Artificial Sequence
  Description of Artificial Sequence: Synthetic oligonucleotide
  Sense strand starting at position 1122 of SEQ ID NO: 1665
uguaguuaucuagaguaua

SEQ ID NO: 130403 - RNA, 19 nt, Artificial Sequence
  Description of Artificial Sequence: Synthetic oligonucleotide
  Antisense strand to SEQ ID NO: 130402
uauacucuagauaacuaca

SEQ ID NO: 130404 - RNA, 19 nt, Artificial Sequence
  Description of Artificial Sequence: Synthetic oligonucleotide
  Sense strand starting at position 877 of SEQ ID NO: 1665
uuuaacuuuccaggugacu

SEQ ID NO: 130405 - RNA, 19 nt, Artificial Sequence
  Description of Artificial Sequence: Synthetic oligonucleotide
  Antisense strand to SEQ ID NO: 130404
agucaccuggaaaguuaaa

SEQ ID NO: 130406 - RNA, 19 nt, Artificial Sequence
  Description of Artificial Sequence: Synthetic oligonucleotide
  Sense strand starting at position 701 of SEQ ID NO: 1665
augccuuaugcauaagaau

SEQ ID NO: 130407 - RNA, 19 nt, Artificial Sequence
  Description of Artificial Sequence: Synthetic oligonucleotide
  Antisense strand to SEQ ID NO: 130406
auucuuaugcauaaggcau

SEQ ID NO: 130408 - RNA, 19 nt, Artificial Sequence
  Description of Artificial Sequence: Synthetic oligonucleotide
  Sense strand starting at position 220 of SEQ ID NO: 1665
gugggcaccgcagaaauaa

SEQ ID NO: 130409 - RNA, 19 nt, Artificial Sequence
  Description of Artificial Sequence: Synthetic oligonucleotide
  Antisense strand to SEQ ID NO: 130408
uuauuucugcggugcccac

SEQ ID NO: 130410 - RNA, 19 nt, Artificial Sequence
  Description of Artificial Sequence: Synthetic oligonucleotide
  Sense strand starting at position 17 of SEQ ID NO: 1665
agguguacaacuuagugaa

SEQ ID NO: 130411 - RNA, 19 nt, Artificial Sequence
  Description of Artificial Sequence: Synthetic oligonucleotide
  Antisense strand to SEQ ID NO: 130410
uucacuaaguuguacaccu

SEQ ID NO: 130412 - RNA, 19 nt, Artificial Sequence
  Description of Artificial Sequence: Synthetic oligonucleotide
  Sense strand starting at position 3927 of SEQ ID NO: 1666
aggauaguucugugagaac

SEQ ID NO: 130413 - RNA, 19 nt, Artificial Sequence
  Description of Artificial Sequence: Synthetic oligonucleotide
  Antisense strand to SEQ ID NO: 130412
guucucacagaacuauccu

SEQ ID NO: 130414 - RNA, 19 nt, Artificial Sequence
  Description of Artificial Sequence: Synthetic oligonucleotide
  Sense strand starting at position 3926 of SEQ ID NO: 1666
aaggauaguucugugagaa

SEQ ID NO: 130415 - RNA, 19 nt, Artificial Sequence
  Description of Artificial Sequence: Synthetic oligonucleotide
  Antisense strand to SEQ ID NO: 130414
uucucacagaacuauccuu

SEQ ID NO: 130416 - RNA, 19 nt, Artificial Sequence
  Description of Artificial Sequence: Synthetic oligonucleotide
  Sense strand starting at position 3837 of SEQ ID NO: 1666
agucauugaagcuagugua

SEQ ID NO: 130417 - RNA, 19 nt, Artificial Sequence
  Description of Artificial Sequence: Synthetic oligonucleotide
  Antisense strand to SEQ ID NO: 130416
uacacuagcuucaaugacu

SEQ ID NO: 130418 - RNA, 19 nt, Artificial Sequence
  Description of Artificial Sequence: Synthetic oligonucleotide
  Sense strand starting at position 3832 of SEQ ID NO: 1666
cggaaagucauugaagcua

SEQ ID NO: 130419 - RNA, 19 nt, Artificial Sequence
  Description of Artificial Sequence: Synthetic oligonucleotide
  Antisense strand to SEQ ID NO: 130418
uagcuucaaugacuuuccg

SEQ ID NO: 130420 - RNA, 19 nt, Artificial Sequence
  Description of Artificial Sequence: Synthetic oligonucleotide
  Sense strand starting at position 3820 of SEQ ID NO: 1666
uaauaugaccuucggaaag

SEQ ID NO: 130421 - RNA, 19 nt, Artificial Sequence
  Description of Artificial Sequence: Synthetic oligonucleotide
  Antisense strand to SEQ ID NO: 130420
cuuuccgaaggucauauua

SEQ ID NO: 130422 - RNA, 19 nt, Artificial Sequence
  Description of Artificial Sequence: Synthetic oligonucleotide
  Sense strand starting at position 3636 of SEQ ID NO: 1666
ccagcauuacuguaaggga

SEQ ID NO: 130423 - RNA, 19 nt, Artificial Sequence
  Description of Artificial Sequence: Synthetic oligonucleotide
  Antisense strand to SEQ ID NO: 130422
ucccuuacaguaaugcugg

SEQ ID NO: 130424 - RNA, 19 nt, Artificial Sequence
  Description of Artificial Sequence: Synthetic oligonucleotide
  Sense strand starting at position 3609 of SEQ ID NO: 1666
cuggaaauauggccuaagu

SEQ ID NO: 130425 - RNA, 19 nt, Artificial Sequence
  Description of Artificial Sequence: Synthetic oligonucleotide
  Antisense strand to SEQ ID NO: 130424
acuuaggccauauuuccag

SEQ ID NO: 130426 - RNA, 19 nt, Artificial Sequence
  Description of Artificial Sequence: Synthetic oligonucleotide
  Sense strand starting at position 3596 of SEQ ID NO: 1666
uuaacuaguuaaucuggaa

SEQ ID NO: 130427 - RNA, 19 nt, Artificial Sequence
  Description of Artificial Sequence: Synthetic oligonucleotide
  Antisense strand to SEQ ID NO: 130426
uuccagauuaacuaguuaa

SEQ ID NO: 130428 - RNA, 19 nt, Artificial Sequence
  Description of Artificial Sequence: Synthetic oligonucleotide
  Sense strand starting at position 3485 of SEQ ID NO: 1666
guaauuaagccuuagggug

SEQ ID NO: 130429 - RNA, 19 nt, Artificial Sequence
  Description of Artificial Sequence: Synthetic oligonucleotide
  Antisense strand to SEQ ID NO: 130428
cacccuaaggcuuaauuac

SEQ ID NO: 130430 - RNA, 19 nt, Artificial Sequence
  Description of Artificial Sequence: Synthetic oligonucleotide
  Sense strand starting at position 3472 of SEQ ID NO: 1666
ugauuuguucgugguaauu

SEQ ID NO: 130431 - RNA, 19 nt, Artificial Sequence
  Description of Artificial Sequence: Synthetic oligonucleotide
  Antisense strand to SEQ ID NO: 130430
aauuaccacgaacaaauca

SEQ ID NO: 130432 - RNA, 19 nt, Artificial Sequence
  Description of Artificial Sequence: Synthetic oligonucleotide
  Sense strand starting at position 3470 of SEQ ID NO: 1666
auugauuuguucgugguaa

SEQ ID NO: 130433 - RNA, 19 nt, Artificial Sequence
  Description of Artificial Sequence: Synthetic oligonucleotide
  Antisense strand to SEQ ID NO: 130432
uuaccacgaacaaaucaau

SEQ ID NO: 130434 - RNA, 19 nt, Artificial Sequence
  Description of Artificial Sequence: Synthetic oligonucleotide
  Sense strand starting at position 3469 of SEQ ID NO: 1666
gauugauuuguucguggua

SEQ ID NO: 130435 - RNA, 19 nt, Artificial Sequence
  Description of Artificial Sequence: Synthetic oligonucleotide
  Antisense strand to SEQ ID NO: 130434
uaccacgaacaaaucaauc

SEQ ID NO: 130436 - RNA, 19 nt, Artificial Sequence
  Description of Artificial Sequence: Synthetic oligonucleotide
  Sense strand starting at position 3465 of SEQ ID NO: 1666
gugggauugauuuguucgu

SEQ ID NO: 130437 - RNA, 19 nt, Artificial Sequence
  Description of Artificial Sequence: Synthetic oligonucleotide
  Antisense strand to SEQ ID NO: 130436
acgaacaaaucaaucccac

SEQ ID NO: 130438 - RNA, 19 nt, Artificial Sequence
  Description of Artificial Sequence: Synthetic oligonucleotide
  Sense strand starting at position 3432 of SEQ ID NO: 1666
aagcuauugucagugacag

SEQ ID NO: 130439 - RNA, 19 nt, Artificial Sequence
  Description of Artificial Sequence: Synthetic oligonucleotide
  Antisense strand to SEQ ID NO: 130438
cugucacugacaauagcuu

SEQ ID NO: 130440 - RNA, 19 nt, Artificial Sequence
  Description of Artificial Sequence: Synthetic oligonucleotide
  Sense strand starting at position 3380 of SEQ ID NO: 1666
ucaucaguccuagaaugcu

SEQ ID NO: 130441 - RNA, 19 nt, Artificial Sequence
  Description of Artificial Sequence: Synthetic oligonucleotide
  Antisense strand to SEQ ID NO: 130440
agcauucuaggacugauga

SEQ ID NO: 130442 - RNA, 19 nt, Artificial Sequence
  Description of Artificial Sequence: Synthetic oligonucleotide
  Sense strand starting at position 3303 of SEQ ID NO: 1666
uagaacugcugguucuaca

SEQ ID NO: 130443 - RNA, 19 nt, Artificial Sequence
  Description of Artificial Sequence: Synthetic oligonucleotide
  Antisense strand to SEQ ID NO: 130442
uguagaaccagcaguucua

SEQ ID NO: 130444 - RNA, 19 nt, Artificial Sequence
  Description of Artificial Sequence: Synthetic oligonucleotide
  Sense strand starting at position 3290 of SEQ ID NO: 1666
aguuuaaauuggguagaac

SEQ ID NO: 130445 - RNA, 19 nt, Artificial Sequence
  Description of Artificial Sequence: Synthetic oligonucleotide
  Antisense strand to SEQ ID NO: 130444
guucuacccaauuuaaacu

SEQ ID NO: 130446 - RNA, 19 nt, Artificial Sequence
  Description of Artificial Sequence: Synthetic oligonucleotide
  Sense strand starting at position 3260 of SEQ ID NO: 1666
uaguuaaucugucuugaga

SEQ ID NO: 130447 - RNA, 19 nt, Artificial Sequence
  Description of Artificial Sequence: Synthetic oligonucleotide
  Antisense strand to SEQ ID NO: 130446
ucucaagacagauuaacua

SEQ ID NO: 130448 - RNA, 19 nt, Artificial Sequence
  Description of Artificial Sequence: Synthetic oligonucleotide
  Sense strand starting at position 3219 of SEQ ID NO: 1666
gguguauuucaugguaagc

SEQ ID NO: 130449 - RNA, 19 nt, Artificial Sequence
  Description of Artificial Sequence: Synthetic oligonucleotide
  Antisense strand to SEQ ID NO: 130448
gcuuaccaugaaauacacc

SEQ ID NO: 130450 - RNA, 19 nt, Artificial Sequence
  Description of Artificial Sequence: Synthetic oligonucleotide
  Sense strand starting at position 3139 of SEQ ID NO: 1666
gacaaagucccaggucuaa

SEQ ID NO: 130451 - RNA, 19 nt, Artificial Sequence
  Description of Artificial Sequence: Synthetic oligonucleotide
  Antisense strand to SEQ ID NO: 130450
uuagaccugggacuuuguc

SEQ ID NO: 130452 - RNA, 19 nt, Artificial Sequence
  Description of Artificial Sequence: Synthetic oligonucleotide
  Sense strand starting at position 3126 of SEQ ID NO: 1666
gcgaaauucccuggacaaa

SEQ ID NO: 130453 - RNA, 19 nt, Artificial Sequence
  Description of Artificial Sequence: Synthetic oligonucleotide
  Antisense strand to SEQ ID NO: 130452
uuuguccagggaauuucgc

SEQ ID NO: 130454 - RNA, 19 nt, Artificial Sequence
  Description of Artificial Sequence: Synthetic oligonucleotide
  Sense strand starting at position 3125 of SEQ ID NO: 1666
ggcgaaauucccuggacaa

SEQ ID NO: 130455 - RNA, 19 nt, Artificial Sequence
  Description of Artificial Sequence: Synthetic oligonucleotide
  Antisense strand to SEQ ID NO: 130454
uuguccagggaauuucgcc

SEQ ID NO: 130456 - RNA, 19 nt, Artificial Sequence
  Description of Artificial Sequence: Synthetic oligonucleotide
  Sense strand starting at position 3124 of SEQ ID NO: 1666
uggcgaaauucccuggaca

SEQ ID NO: 130457 - RNA, 19 nt, Artificial Sequence
  Description of Artificial Sequence: Synthetic oligonucleotide
  Antisense strand to SEQ ID NO: 130456
uguccagggaauuucgcca

SEQ ID NO: 130458 - RNA, 19 nt, Artificial Sequence
  Description of Artificial Sequence: Synthetic oligonucleotide
  Sense strand starting at position 3076 of SEQ ID NO: 1666
cuuucuugguaacuagaca

SEQ ID NO: 130459 - RNA, 19 nt, Artificial Sequence
  Description of Artificial Sequence: Synthetic oligonucleotide
  Antisense strand to SEQ ID NO: 130458
ugucuaguuaccaagaaag

SEQ ID NO: 130460 - RNA, 19 nt, Artificial Sequence
  Description of Artificial Sequence: Synthetic oligonucleotide
  Sense strand starting at position 3056 of SEQ ID NO: 1666
agguuucgcguugcacaua

SEQ ID NO: 130461 - RNA, 19 nt, Artificial Sequence
  Description of Artificial Sequence: Synthetic oligonucleotide
  Antisense strand to SEQ ID NO: 130460
uaugugcaacgcgaaaccu

SEQ ID NO: 130462 - RNA, 19 nt, Artificial Sequence
  Description of Artificial Sequence: Synthetic oligonucleotide
  Sense strand starting at position 3054 of SEQ ID NO: 1666
aaagguuucgcguugcaca

SEQ ID NO: 130463 - RNA, 19 nt, Artificial Sequence
  Description of Artificial Sequence: Synthetic oligonucleotide
  Antisense strand to SEQ ID NO: 130462
ugugcaacgcgaaaccuuu

SEQ ID NO: 130464 - RNA, 19 nt, Artificial Sequence
  Description of Artificial Sequence: Synthetic oligonucleotide
  Sense strand starting at position 3025 of SEQ ID NO: 1666
uguuucucagaguaaauau

SEQ ID NO: 130465 - RNA, 19 nt, Artificial Sequence
  Description of Artificial Sequence: Synthetic oligonucleotide
  Antisense strand to SEQ ID NO: 130464
auauuuacucugagaaaca

SEQ ID NO: 130466 - RNA, 19 nt, Artificial Sequence
  Description of Artificial Sequence: Synthetic oligonucleotide
  Sense strand starting at position 2964 of SEQ ID NO: 1666
guaagcugaugacuaauaa

SEQ ID NO: 130467 - RNA, 19 nt, Artificial Sequence
  Description of Artificial Sequence: Synthetic oligonucleotide
  Antisense strand to SEQ ID NO: 130466
uuauuagucaucagcuuac

SEQ ID NO: 130468 - RNA, 19 nt, Artificial Sequence
  Description of Artificial Sequence: Synthetic oligonucleotide
  Sense strand starting at position 2962 of SEQ ID NO: 1666
caguaagcugaugacuaau

SEQ ID NO: 130469 - RNA, 19 nt, Artificial Sequence
  Description of Artificial Sequence: Synthetic oligonucleotide
  Antisense strand to SEQ ID NO: 130468
auuagucaucagcuuacug

SEQ ID NO: 130470 - RNA, 19 nt, Artificial Sequence
  Description of Artificial Sequence: Synthetic oligonucleotide
  Sense strand starting at position 2817 of SEQ ID NO: 1666
cuuauuaagucgcuaauuu

SEQ ID NO: 130471 - RNA, 19 nt, Artificial Sequence
  Description of Artificial Sequence: Synthetic oligonucleotide
  Antisense strand to SEQ ID NO: 130470
aaauuagcgacuuaauaag

SEQ ID NO: 130472 - RNA, 19 nt, Artificial Sequence
  Description of Artificial Sequence: Synthetic oligonucleotide
  Sense strand starting at position 2641 of SEQ ID NO: 1666
ggccucccgcuuuaaauuu

SEQ ID NO: 130473 - RNA, 19 nt, Artificial Sequence
  Description of Artificial Sequence: Synthetic oligonucleotide
  Antisense strand to SEQ ID NO: 130472
aaauuuaaagcgggaggcc

SEQ ID NO: 130474 - RNA, 19 nt, Artificial Sequence
  Description of Artificial Sequence: Synthetic oligonucleotide
  Sense strand starting at position 2639 of SEQ ID NO: 1666
cgggccucccgcuuuaaau

SEQ ID NO: 130475 - RNA, 19 nt, Artificial Sequence
  Description of Artificial Sequence: Synthetic oligonucleotide
  Antisense strand to SEQ ID NO: 130474
auuuaaagcgggaggcccg

SEQ ID NO: 130476 - RNA, 19 nt, Artificial Sequence
  Description of Artificial Sequence: Synthetic oligonucleotide
  Sense strand starting at position 2638 of SEQ ID NO: 1666
gcgggccucccgcuuuaaa

SEQ ID NO: 130477 - RNA, 19 nt, Artificial Sequence
  Description of Artificial Sequence: Synthetic oligonucleotide
  Antisense strand to SEQ ID NO: 130476
uuuaaagcgggaggcccgc

SEQ ID NO: 130478 - RNA, 19 nt, Artificial Sequence
  Description of Artificial Sequence: Synthetic oligonucleotide
  Sense strand starting at position 2546 of SEQ ID NO: 1666
gcuccucgcuagguaauuu

SEQ ID NO: 130479 - RNA, 19 nt, Artificial Sequence
  Description of Artificial Sequence: Synthetic oligonucleotide
  Antisense strand to SEQ ID NO: 130478
aaauuaccuagcgaggagc

SEQ ID NO: 130480 - RNA, 19 nt, Artificial Sequence
  Description of Artificial Sequence: Synthetic oligonucleotide
  Sense strand starting at position 2517 of SEQ ID NO: 1666
guugaaacauuggcaacaa

SEQ ID NO: 130481 - RNA, 19 nt, Artificial Sequence
  Description of Artificial Sequence: Synthetic oligonucleotide
  Antisense strand to SEQ ID NO: 130480
uuguugccaauguuucaac

SEQ ID NO: 130482 - RNA, 19 nt, Artificial Sequence
  Description of Artificial Sequence: Synthetic oligonucleotide
  Sense strand starting at position 2505 of SEQ ID NO: 1666
gguuuccgcgcaguugaaa

SEQ ID NO: 130483 - RNA, 19 nt, Artificial Sequence
  Description of Artificial Sequence: Synthetic oligonucleotide
  Antisense strand to SEQ ID NO: 130482
uuucaacugcgcggaaacc

SEQ ID NO: 130484 - RNA, 19 nt, Artificial Sequence
  Description of Artificial Sequence: Synthetic oligonucleotide
  Sense strand starting at position 1449 of SEQ ID NO: 1666
agcagcuaugaauauguaa

SEQ ID NO: 130485 - RNA, 19 nt, Artificial Sequence
  Description of Artificial Sequence: Synthetic oligonucleotide
  Antisense strand to SEQ ID NO: 130484
uuacauauucauagcugcu

SEQ ID NO: 130486 - RNA, 19 nt, Artificial Sequence
  Description of Artificial Sequence: Synthetic oligonucleotide
  Sense strand starting at position 96 of SEQ ID NO: 1666
aguugauacuuagcuagga

SEQ ID NO: 130487 - RNA, 19 nt, Artificial Sequence
  Description of Artificial Sequence: Synthetic oligonucleotide
  Antisense strand to SEQ ID NO: 130486
uccuagcuaaguaucaacu

SEQ ID NO: 130488 - RNA, 19 nt, Artificial Sequence
  Description of Artificial Sequence: Synthetic oligonucleotide
  Sense strand starting at position 94 of SEQ ID NO: 1666
agaguugauacuuagcuag

SEQ ID NO: 130489 - RNA, 19 nt, Artificial Sequence
  Description of Artificial Sequence: Synthetic oligonucleotide
  Antisense strand to SEQ ID NO: 130488
cuagcuaaguaucaacucu

SEQ ID NO: 130490 - RNA, 19 nt, Artificial Sequence
  Description of Artificial Sequence: Synthetic oligonucleotide
  Sense strand starting at position 93 of SEQ ID NO: 1666
cagaguugauacuuagcua

SEQ ID NO: 130491 - RNA, 19 nt, Artificial Sequence
  Description of Artificial Sequence: Synthetic oligonucleotide
  Antisense strand to SEQ ID NO: 130490
uagcuaaguaucaacucug

SEQ ID NO: 130492 - RNA, 19 nt, Artificial Sequence
  Description of Artificial Sequence: Synthetic oligonucleotide
  Sense strand starting at position 96 of SEQ ID NO: 1667
ggcgcauccuuauaggaga

SEQ ID NO: 130493 - RNA, 19 nt, Artificial Sequence
  Description of Artificial Sequence: Synthetic oligonucleotide
  Antisense strand to SEQ ID NO: 130492
ucuccuauaaggaugcgcc

SEQ ID NO: 130494 - RNA, 19 nt, Artificial Sequence
  Description of Artificial Sequence: Synthetic oligonucleotide
  Sense strand starting at position 99 of SEQ ID NO: 1667
gcauccuuauaggagagaa

SEQ ID NO: 130495 - RNA, 19 nt, Artificial Sequence
  Description of Artificial Sequence: Synthetic oligonucleotide
  Antisense strand to SEQ ID NO: 130494
uucucuccuauaaggaugc

SEQ ID NO: 130496 - RNA, 19 nt, Artificial Sequence
  Description of Artificial Sequence: Synthetic oligonucleotide
  Sense strand starting at position 194 of SEQ ID NO: 1667
ggagaacucuccucgcuuc

SEQ ID NO: 130497 - RNA, 19 nt, Artificial Sequence
  Description of Artificial Sequence: Synthetic oligonucleotide
  Antisense strand to SEQ ID NO: 130496
gaagcgaggagaguucucc

SEQ ID NO: 130498 - RNA, 19 nt, Artificial Sequence
  Description of Artificial Sequence: Synthetic oligonucleotide
  Sense strand starting at position 480 of SEQ ID NO: 1667
guucgaaaguuucugggcu

SEQ ID NO: 130499 - RNA, 19 nt, Artificial Sequence
  Description of Artificial Sequence: Synthetic oligonucleotide
  Antisense strand to SEQ ID NO: 130498
agcccagaaacuuucgaac

SEQ ID NO: 130500 - RNA, 19 nt, Artificial Sequence
  Description of Artificial Sequence: Synthetic oligonucleotide
  Sense strand starting at position 481 of SEQ ID NO: 1667
uucgaaaguuucugggcuu

SEQ ID NO: 130501 - RNA, 19 nt, Artificial Sequence
  Description of Artificial Sequence: Synthetic oligonucleotide
  Antisense strand to SEQ ID NO: 130500
aagcccagaaacuuucgaa

SEQ ID NO: 130502 - RNA, 19 nt, Artificial Sequence
  Description of Artificial Sequence: Synthetic oligonucleotide
  Sense strand starting at position 482 of SEQ ID NO: 1667
ucgaaaguuucugggcuuu

SEQ ID NO: 130503 - RNA, 19 nt, Artificial Sequence
  Description of Artificial Sequence: Synthetic oligonucleotide
  Antisense strand to SEQ ID NO: 130502
aaagcccagaaacuuucga

SEQ ID NO: 130504 - RNA, 19 nt, Artificial Sequence
  Description of Artificial Sequence: Synthetic oligonucleotide
  Sense strand starting at position 726 of SEQ ID NO: 1667
gcgcguauacaucguccau

SEQ ID NO: 130505 - RNA, 19 nt, Artificial Sequence
  Description of Artificial Sequence: Synthetic oligonucleotide
  Antisense strand to SEQ ID NO: 130504
auggacgauguauacgcgc

SEQ ID NO: 130506 - RNA, 19 nt, Artificial Sequence
  Description of Artificial Sequence: Synthetic oligonucleotide
  Sense strand starting at position 963 of SEQ ID NO: 1667
ccgcgaucuuguccagguu

SEQ ID NO: 130507 - RNA, 19 nt, Artificial Sequence
  Description of Artificial Sequence: Synthetic oligonucleotide
  Antisense strand to SEQ ID NO: 130506
aaccuggacaagaucgcgg

SEQ ID NO: 130508 - RNA, 19 nt, Artificial Sequence
  Description of Artificial Sequence: Synthetic oligonucleotide
  Sense strand starting at position 1041 of SEQ ID NO: 1667
gcuugcacauguucuugaa

SEQ ID NO: 130509 - RNA, 19 nt, Artificial Sequence
  Description of Artificial Sequence: Synthetic oligonucleotide
  Antisense strand to SEQ ID NO: 130508
uucaagaacaugugcaagc

SEQ ID NO: 130510 - RNA, 19 nt, Artificial Sequence
  Description of Artificial Sequence: Synthetic oligonucleotide
  Sense strand starting at position 1086 of SEQ ID NO: 1667
agaugguggucugcgagaa

SEQ ID NO: 130511 - RNA, 19 nt, Artificial Sequence
  Description of Artificial Sequence: Synthetic oligonucleotide
  Antisense strand to SEQ ID NO: 130510
uucucgcagaccaccaucu

SEQ ID NO: 130512 - RNA, 19 nt, Artificial Sequence
  Description of Artificial Sequence: Synthetic oligonucleotide
  Sense strand starting at position 1087 of SEQ ID NO: 1667
gaugguggucugcgagaac

SEQ ID NO: 130513 - RNA, 19 nt, Artificial Sequence
  Description of Artificial Sequence: Synthetic oligonucleotide
  Antisense strand to SEQ ID NO: 130512
guucucgcagaccaccauc

SEQ ID NO: 130514 - RNA, 19 nt, Artificial Sequence
  Description of Artificial Sequence: Synthetic oligonucleotide
  Sense strand starting at position 1098 of SEQ ID NO: 1667
gcgagaacacguuaccgua

SEQ ID NO: 130515 - RNA, 19 nt, Artificial Sequence
  Description of Artificial Sequence: Synthetic oligonucleotide
  Antisense strand to SEQ ID NO: 130514
uacgguaacguguucucgc

SEQ ID NO: 130516 - RNA, 19 nt, Artificial Sequence
  Description of Artificial Sequence: Synthetic oligonucleotide
  Sense strand starting at position 1149 of SEQ ID NO: 1667
gcguaaagcccagcuugau

SEQ ID NO: 130517 - RNA, 19 nt, Artificial Sequence
  Description of Artificial Sequence: Synthetic oligonucleotide
  Antisense strand to SEQ ID NO: 130516
aucaagcugggcuuuacgc

SEQ ID NO: 130518 - RNA, 19 nt, Artificial Sequence
  Description of Artificial Sequence: Synthetic oligonucleotide
  Sense strand starting at position 1176 of SEQ ID NO: 1667
gcuugaacugcuuggcgaa

SEQ ID NO: 130519 - RNA, 19 nt, Artificial Sequence
  Description of Artificial Sequence: Synthetic oligonucleotide
  Antisense strand to SEQ ID NO: 130518
uucgccaagcaguucaagc

SEQ ID NO: 130520 - RNA, 19 nt, Artificial Sequence
  Description of Artificial Sequence: Synthetic oligonucleotide
  Sense strand starting at position 1679 of SEQ ID NO: 1667
ccugccuugccguguucua

SEQ ID NO: 130521 - RNA, 19 nt, Artificial Sequence
  Description of Artificial Sequence: Synthetic oligonucleotide
  Antisense strand to SEQ ID NO: 130520
uagaacacggcaaggcagg

SEQ ID NO: 130522 - RNA, 19 nt, Artificial Sequence
  Description of Artificial Sequence: Synthetic oligonucleotide
  Sense strand starting at position 2421 of SEQ ID NO: 1667
gcugaauucccgcccgcau

SEQ ID NO: 130523 - RNA, 19 nt, Artificial Sequence
  Description of Artificial Sequence: Synthetic oligonucleotide
  Antisense strand to SEQ ID NO: 130522
augcgggcgggaauucagc

SEQ ID NO: 130524 - RNA, 19 nt, Artificial Sequence
  Description of Artificial Sequence: Synthetic oligonucleotide
  Sense strand starting at position 3206 of SEQ ID NO: 1667
gcuagaguuugcccggacu

SEQ ID NO: 130525 - RNA, 19 nt, Artificial Sequence
  Description of Artificial Sequence: Synthetic oligonucleotide
  Antisense strand to SEQ ID NO: 130524
aguccgggcaaacucuagc

SEQ ID NO: 130526 - RNA, 19 nt, Artificial Sequence
  Description of Artificial Sequence: Synthetic oligonucleotide
  Sense strand starting at position 3330 of SEQ ID NO: 1667
gaaggaucuugaguggagu

SEQ ID NO: 130527 - RNA, 19 nt, Artificial Sequence
  Description of Artificial Sequence: Synthetic oligonucleotide
  Antisense strand to SEQ ID NO: 130526
acuccacucaagauccuuc

SEQ ID NO: 130528 - RNA, 19 nt, Artificial Sequence
  Description of Artificial Sequence: Synthetic oligonucleotide
  Sense strand starting at position 3404 of SEQ ID NO: 1667
aggguacugagcuguguuu

SEQ ID NO: 130529 - RNA, 19 nt, Artificial Sequence
  Description of Artificial Sequence: Synthetic oligonucleotide
  Antisense strand to SEQ ID NO: 130528
aaacacagcucaguacccu

SEQ ID NO: 130530 - RNA, 19 nt, Artificial Sequence
  Description of Artificial Sequence: Synthetic oligonucleotide
  Sense strand starting at position 3585 of SEQ ID NO: 1667
gcaaaucaggucuguggaa

SEQ ID NO: 130531 - RNA, 19 nt, Artificial Sequence
  Description of Artificial Sequence: Synthetic oligonucleotide
  Antisense strand to SEQ ID NO: 130530
uuccacagaccugauuugc

SEQ ID NO: 130532 - RNA, 19 nt, Artificial Sequence
  Description of Artificial Sequence: Synthetic oligonucleotide
  Sense strand starting at position 3586 of SEQ ID NO: 1667
caaaucaggucuguggaau

SEQ ID NO: 130533 - RNA, 19 nt, Artificial Sequence
  Description of Artificial Sequence: Synthetic oligonucleotide
  Antisense strand to SEQ ID NO: 130532
auuccacagaccugauuug

SEQ ID NO: 130534 - RNA, 19 nt, Artificial Sequence
  Description of Artificial Sequence: Synthetic oligonucleotide
  Sense strand starting at position 3587 of SEQ ID NO: 1667
aaaucaggucuguggaaua

SEQ ID NO: 130535 - RNA, 19 nt, Artificial Sequence
  Description of Artificial Sequence: Synthetic oligonucleotide
  Antisense strand to SEQ ID NO: 130534
uauuccacagaccugauuu

SEQ ID NO: 130536 - RNA, 19 nt, Artificial Sequence
  Description of Artificial Sequence: Synthetic oligonucleotide
  Sense strand starting at position 3707 of SEQ ID NO: 1667
gggcacagacuuugaucau

SEQ ID NO: 130537 - RNA, 19 nt, Artificial Sequence
  Description of Artificial Sequence: Synthetic oligonucleotide
  Antisense strand to SEQ ID NO: 130536
augaucaaagucugugccc

SEQ ID NO: 130538 - RNA, 19 nt, Artificial Sequence
  Description of Artificial Sequence: Synthetic oligonucleotide
  Sense strand starting at position 3708 of SEQ ID NO: 1667
ggcacagacuuugaucaug

SEQ ID NO: 130539 - RNA, 19 nt, Artificial Sequence
  Description of Artificial Sequence: Synthetic oligonucleotide
  Antisense strand to SEQ ID NO: 130538
caugaucaaagucugugcc

SEQ ID NO: 130540 - RNA, 19 nt, Artificial Sequence
  Description of Artificial Sequence: Synthetic oligonucleotide
  Sense strand starting at position 3860 of SEQ ID NO: 1667
ucugaaccgagcuagagau

SEQ ID NO: 130541 - RNA, 19 nt, Artificial Sequence
  Description of Artificial Sequence: Synthetic oligonucleotide
  Antisense strand to SEQ ID NO: 130540
aucucuagcucgguucaga

SEQ ID NO: 130542 - RNA, 19 nt, Artificial Sequence
  Description of Artificial Sequence: Synthetic oligonucleotide
  Sense strand starting at position 3870 of SEQ ID NO: 1667
gcuagagauacugggcuuu

SEQ ID NO: 130543 - RNA, 19 nt, Artificial Sequence
  Description of Artificial Sequence: Synthetic oligonucleotide
  Antisense strand to SEQ ID NO: 130542
aaagcccaguaucucuagc

SEQ ID NO: 130544 - RNA, 19 nt, Artificial Sequence
  Description of Artificial Sequence: Synthetic oligonucleotide
  Sense strand starting at position 3971 of SEQ ID NO: 1667
cugggaauuccgcagugaa

SEQ ID NO: 130545 - RNA, 19 nt, Artificial Sequence
  Description of Artificial Sequence: Synthetic oligonucleotide
  Antisense strand to SEQ ID NO: 130544
uucacugcggaauucccag

SEQ ID NO: 130546 - RNA, 19 nt, Artificial Sequence
  Description of Artificial Sequence: Synthetic oligonucleotide
  Sense strand starting at position 3974 of SEQ ID NO: 1667
ggaauuccgcagugaaguc

SEQ ID NO: 130547 - RNA, 19 nt, Artificial Sequence
  Description of Artificial Sequence: Synthetic oligonucleotide
  Antisense strand to SEQ ID NO: 130546
gacuucacugcggaauucc

SEQ ID NO: 130548 - RNA, 19 nt, Artificial Sequence
  Description of Artificial Sequence: Synthetic oligonucleotide
  Sense strand starting at position 3983 of SEQ ID NO: 1667
cagugaaguccaugcucgu

SEQ ID NO: 130549 - RNA, 19 nt, Artificial Sequence
  Description of Artificial Sequence: Synthetic oligonucleotide
  Antisense strand to SEQ ID NO: 130548
acgagcauggacuucacug

SEQ ID NO: 130550 - RNA, 19 nt, Artificial Sequence
  Description of Artificial Sequence: Synthetic oligonucleotide
  Sense strand starting at position 18 of SEQ ID NO: 1668
agaagucucuggucugcaa

SEQ ID NO: 130551 - RNA, 19 nt, Artificial Sequence
  Description of Artificial Sequence: Synthetic oligonucleotide
  Antisense strand to SEQ ID NO: 130550
uugcagaccagagacuucu

SEQ ID NO: 130552 - RNA, 19 nt, Artificial Sequence
  Description of Artificial Sequence: Synthetic oligonucleotide
  Sense strand starting at position 67 of SEQ ID NO: 1668
gacuuaagucugugcagga

SEQ ID NO: 130553 - RNA, 19 nt, Artificial Sequence
  Description of Artificial Sequence: Synthetic oligonucleotide
  Antisense strand to SEQ ID NO: 130552
uccugcacagacuuaaguc

SEQ ID NO: 130554 - RNA, 19 nt, Artificial Sequence
  Description of Artificial Sequence: Synthetic oligonucleotide
  Sense strand starting at position 289 of SEQ ID NO: 1668
caguguucugaugacaagu

SEQ ID NO: 130555 - RNA, 19 nt, Artificial Sequence
  Description of Artificial Sequence: Synthetic oligonucleotide
  Antisense strand to SEQ ID NO: 130554
acuugucaucagaacacug

SEQ ID NO: 130556 - RNA, 19 nt, Artificial Sequence
  Description of Artificial Sequence: Synthetic oligonucleotide
  Sense strand starting at position 325 of SEQ ID NO: 1668
acaccaugauucgcuuuaa

SEQ ID NO: 130557 - RNA, 19 nt, Artificial Sequence
  Description of Artificial Sequence: Synthetic oligonucleotide
  Antisense strand to SEQ ID NO: 130556
uuaaagcgaaucauggugu

SEQ ID NO: 130558 - RNA, 19 nt, Artificial Sequence
  Description of Artificial Sequence: Synthetic oligonucleotide
  Sense strand starting at position 515 of SEQ ID NO: 1668
ggaccaucgccucaacuuu

SEQ ID NO: 130559 - RNA, 19 nt, Artificial Sequence
  Description of Artificial Sequence: Synthetic oligonucleotide
  Antisense strand to SEQ ID NO: 130558
aaaguugaggcgauggucc

SEQ ID NO: 130560 - RNA, 19 nt, Artificial Sequence
  Description of Artificial Sequence: Synthetic oligonucleotide
  Sense strand starting at position 705 of SEQ ID NO: 1668
gcacucaagugauugcuga

SEQ ID NO: 130561 - RNA, 19 nt, Artificial Sequence
  Description of Artificial Sequence: Synthetic oligonucleotide
  Antisense strand to SEQ ID NO: 130560
ucagcaaucacuugagugc

SEQ ID NO: 130562 - RNA, 19 nt, Artificial Sequence
  Description of Artificial Sequence: Synthetic oligonucleotide
  Sense strand starting at position 706 of SEQ ID NO: 1668
cacucaagugauugcugaa

SEQ ID NO: 130563 - RNA, 19 nt, Artificial Sequence
  Description of Artificial Sequence: Synthetic oligonucleotide
  Antisense strand to SEQ ID NO: 130562
uucagcaaucacuugagug

SEQ ID NO: 130564 - RNA, 19 nt, Artificial Sequence
  Description of Artificial Sequence: Synthetic oligonucleotide
  Sense strand starting at position 823 of SEQ ID NO: 1668
agggcuggauguuuacaua

SEQ ID NO: 130565 - RNA, 19 nt, Artificial Sequence
  Description of Artificial Sequence: Synthetic oligonucleotide
  Antisense strand to SEQ ID NO: 130564
uauguaaacauccagcccu

SEQ ID NO: 130566 - RNA, 19 nt, Artificial Sequence
  Description of Artificial Sequence: Synthetic oligonucleotide
  Sense strand starting at position 1100 of SEQ ID NO: 1668
ccaagaagucggugggauc

SEQ ID NO: 130567 - RNA, 19 nt, Artificial Sequence
  Description of Artificial Sequence: Synthetic oligonucleotide
  Antisense strand to SEQ ID NO: 130566
gaucccaccgacuucuugg

SEQ ID NO: 130568 - RNA, 19 nt, Artificial Sequence
  Description of Artificial Sequence: Synthetic oligonucleotide
  Sense strand starting at position 1306 of SEQ ID NO: 1668
agaagaggucgaggcagau

SEQ ID NO: 130569 - RNA, 19 nt, Artificial Sequence
  Description of Artificial Sequence: Synthetic oligonucleotide
  Antisense strand to SEQ ID NO: 130568
aucugccucgaccucuucu

SEQ ID NO: 130570 - RNA, 19 nt, Artificial Sequence
  Description of Artificial Sequence: Synthetic oligonucleotide
  Sense strand starting at position 2092 of SEQ ID NO: 1668
cugccuaagacguaggaua

SEQ ID NO: 130571 - RNA, 19 nt, Artificial Sequence
  Description of Artificial Sequence: Synthetic oligonucleotide
  Antisense strand to SEQ ID NO: 130570
uauccuacgucuuaggcag

SEQ ID NO: 130572 - RNA, 19 nt, Artificial Sequence
  Description of Artificial Sequence: Synthetic oligonucleotide
  Sense strand starting at position 2094 of SEQ ID NO: 1668
gccuaagacguaggauaau

SEQ ID NO: 130573 - RNA, 19 nt, Artificial Sequence
  Description of Artificial Sequence: Synthetic oligonucleotide
  Antisense strand to SEQ ID NO: 130572
auuauccuacgucuuaggc

SEQ ID NO: 130574 - RNA, 19 nt, Artificial Sequence
  Description of Artificial Sequence: Synthetic oligonucleotide
  Sense strand starting at position 2351 of SEQ ID NO: 1668
ucuuuauugugacuugaau

SEQ ID NO: 130575 - RNA, 19 nt, Artificial Sequence
  Description of Artificial Sequence: Synthetic oligonucleotide
  Antisense strand to SEQ ID NO: 130574
auucaagucacaauaaaga

SEQ ID NO: 130576 - RNA, 19 nt, Artificial Sequence
  Description of Artificial Sequence: Synthetic oligonucleotide
  Sense strand starting at position 2365 of SEQ ID NO: 1668
ugaauuguauuacccugaa

SEQ ID NO: 130577 - RNA, 19 nt, Artificial Sequence
  Description of Artificial Sequence: Synthetic oligonucleotide
  Antisense strand to SEQ ID NO: 130576
uucaggguaauacaauuca

SEQ ID NO: 130578 - RNA, 19 nt, Artificial Sequence
  Description of Artificial Sequence: Synthetic oligonucleotide
  Sense strand starting at position 2442 of SEQ ID NO: 1668
cggguacuacgcuagauuu

SEQ ID NO: 130579 - RNA, 19 nt, Artificial Sequence
  Description of Artificial Sequence: Synthetic oligonucleotide
  Antisense strand to SEQ ID NO: 130578
aaaucuagcguaguacccg

SEQ ID NO: 130580 - RNA, 19 nt, Artificial Sequence
  Description of Artificial Sequence: Synthetic oligonucleotide
  Sense strand starting at position 2545 of SEQ ID NO: 1668
cccguauguaacuagagau

SEQ ID NO: 130581 - RNA, 19 nt, Artificial Sequence
  Description of Artificial Sequence: Synthetic oligonucleotide
  Antisense strand to SEQ ID NO: 130580
aucucuaguuacauacggg

SEQ ID NO: 130582 - RNA, 19 nt, Artificial Sequence
  Description of Artificial Sequence: Synthetic oligonucleotide
  Sense strand starting at position 2577 of SEQ ID NO: 1668
cauauagggugguugugaa

SEQ ID NO: 130583 - RNA, 19 nt, Artificial Sequence
  Description of Artificial Sequence: Synthetic oligonucleotide
  Antisense strand to SEQ ID NO: 130582
uucacaaccacccuauaug

SEQ ID NO: 130584 - RNA, 19 nt, Artificial Sequence
  Description of Artificial Sequence: Synthetic oligonucleotide
  Sense strand starting at position 2584 of SEQ ID NO: 1668
ggugguugugaagacuuaa

SEQ ID NO: 130585 - RNA, 19 nt, Artificial Sequence
  Description of Artificial Sequence: Synthetic oligonucleotide
  Antisense strand to SEQ ID NO: 130584
uuaagucuucacaaccacc

SEQ ID NO: 130586 - RNA, 19 nt, Artificial Sequence
  Description of Artificial Sequence: Synthetic oligonucleotide
  Sense strand starting at position 2653 of SEQ ID NO: 1668
cucugugaggguuagcaau

SEQ ID NO: 130587 - RNA, 19 nt, Artificial Sequence
  Description of Artificial Sequence: Synthetic oligonucleotide
  Antisense strand to SEQ ID NO: 130586
auugcuaacccucacagag

SEQ ID NO: 130588 - RNA, 19 nt, Artificial Sequence
  Description of Artificial Sequence: Synthetic oligonucleotide
  Sense strand starting at position 2655 of SEQ ID NO: 1668
cugugaggguuagcaauua

SEQ ID NO: 130589 - RNA, 19 nt, Artificial Sequence
  Description of Artificial Sequence: Synthetic oligonucleotide
  Antisense strand to SEQ ID NO: 130588
uaauugcuaacccucacag

SEQ ID NO: 130590 - RNA, 19 nt, Artificial Sequence
  Description of Artificial Sequence: Synthetic oligonucleotide
  Sense strand starting at position 3205 of SEQ ID NO: 1668
gcuuuaguauccucugaaa

SEQ ID NO: 130591 - RNA, 19 nt, Artificial Sequence
  Description of Artificial Sequence: Synthetic oligonucleotide
  Antisense strand to SEQ ID NO: 130590
uuucagaggauacuaaagc

SEQ ID NO: 130592 - RNA, 19 nt, Artificial Sequence
  Description of Artificial Sequence: Synthetic oligonucleotide
  Sense strand starting at position 3207 of SEQ ID NO: 1668
uuuaguauccucugaaaug

SEQ ID NO: 130593 - RNA, 19 nt, Artificial Sequence
  Description of Artificial Sequence: Synthetic oligonucleotide
  Antisense strand to SEQ ID NO: 130592
cauuucagaggauacuaaa

SEQ ID NO: 130594 - RNA, 19 nt, Artificial Sequence
  Description of Artificial Sequence: Synthetic oligonucleotide
  Sense strand starting at position 3225 of SEQ ID NO: 1668
gucaccuccucucugagua

SEQ ID NO: 130595 - RNA, 19 nt, Artificial Sequence
  Description of Artificial Sequence: Synthetic oligonucleotide
  Antisense strand to SEQ ID NO: 130594
uacucagagaggaggugac

SEQ ID NO: 130596 - RNA, 19 nt, Artificial Sequence
  Description of Artificial Sequence: Synthetic oligonucleotide
  Sense strand starting at position 3229 of SEQ ID NO: 1668
ccuccucucugaguacuuu

SEQ ID NO: 130597 - RNA, 19 nt, Artificial Sequence
  Description of Artificial Sequence: Synthetic oligonucleotide
  Antisense strand to SEQ ID NO: 130596
aaaguacucagagaggagg

SEQ ID NO: 130598 - RNA, 19 nt, Artificial Sequence
  Description of Artificial Sequence: Synthetic oligonucleotide
  Sense strand starting at position 3566 of SEQ ID NO: 1668
caggcaugagccuauguca

SEQ ID NO: 130599 - RNA, 19 nt, Artificial Sequence
  Description of Artificial Sequence: Synthetic oligonucleotide
  Antisense strand to SEQ ID NO: 130598
ugacauaggcucaugccug

SEQ ID NO: 130600 - RNA, 19 nt, Artificial Sequence
  Description of Artificial Sequence: Synthetic oligonucleotide
  Sense strand starting at position 3587 of SEQ ID NO: 1668
cugauuugguguuacagau

SEQ ID NO: 130601 - RNA, 19 nt, Artificial Sequence
  Description of Artificial Sequence: Synthetic oligonucleotide
  Antisense strand to SEQ ID NO: 130600
aucuguaacaccaaaucag

SEQ ID NO: 130602 - RNA, 19 nt, Artificial Sequence
  Description of Artificial Sequence: Synthetic oligonucleotide
  Sense strand starting at position 3591 of SEQ ID NO: 1668
uuugguguuacagauggua

SEQ ID NO: 130603 - RNA, 19 nt, Artificial Sequence
  Description of Artificial Sequence: Synthetic oligonucleotide
  Antisense strand to SEQ ID NO: 130602
uaccaucuguaacaccaaa

SEQ ID NO: 130604 - RNA, 19 nt, Artificial Sequence
  Description of Artificial Sequence: Synthetic oligonucleotide
  Sense strand starting at position 3593 of SEQ ID NO: 1668
ugguguuacagaugguaaa

SEQ ID NO: 130605 - RNA, 19 nt, Artificial Sequence
  Description of Artificial Sequence: Synthetic oligonucleotide
  Antisense strand to SEQ ID NO: 130604
uuuaccaucuguaacacca

SEQ ID NO: 130606 - RNA, 19 nt, Artificial Sequence
  Description of Artificial Sequence: Synthetic oligonucleotide
  Sense strand starting at position 3594 of SEQ ID NO: 1668
gguguuacagaugguaaag

SEQ ID NO: 130607 - RNA, 19 nt, Artificial Sequence
  Description of Artificial Sequence: Synthetic oligonucleotide
  Antisense strand to SEQ ID NO: 130606
cuuuaccaucuguaacacc

SEQ ID NO: 130608 - RNA, 19 nt, Artificial Sequence
  Description of Artificial Sequence: Synthetic oligonucleotide
  Sense strand starting at position 3615 of SEQ ID NO: 1668
uagcaaacuguguagguua

SEQ ID NO: 130609 - RNA, 19 nt, Artificial Sequence
  Description of Artificial Sequence: Synthetic oligonucleotide
  Antisense strand to SEQ ID NO: 130608
uaaccuacacaguuugcua

SEQ ID NO: 130610 - RNA, 19 nt, Artificial Sequence
  Description of Artificial Sequence: Synthetic oligonucleotide
  Sense strand starting at position 3666 of SEQ ID NO: 1668
cgggauuugcuguguacug

SEQ ID NO: 130611 - RNA, 19 nt, Artificial Sequence
  Description of Artificial Sequence: Synthetic oligonucleotide
  Antisense strand to SEQ ID NO: 130610
caguacacagcaaaucccg

SEQ ID NO: 130612 - RNA, 19 nt, Artificial Sequence
  Description of Artificial Sequence: Synthetic oligonucleotide
  Sense strand starting at position 3667 of SEQ ID NO: 1668
gggauuugcuguguacuga

SEQ ID NO: 130613 - RNA, 19 nt, Artificial Sequence
  Description of Artificial Sequence: Synthetic oligonucleotide
  Antisense strand to SEQ ID NO: 130612
ucaguacacagcaaauccc

SEQ ID NO: 130614 - RNA, 19 nt, Artificial Sequence
  Description of Artificial Sequence: Synthetic oligonucleotide
  Sense strand starting at position 3682 of SEQ ID NO: 1668
cugaauuaagcucaaguua

SEQ ID NO: 130615 - RNA, 19 nt, Artificial Sequence
  Description of Artificial Sequence: Synthetic oligonucleotide
  Antisense strand to SEQ ID NO: 130614
uaacuugagcuuaauucag

SEQ ID NO: 130616 - RNA, 19 nt, Artificial Sequence
  Description of Artificial Sequence: Synthetic oligonucleotide
  Sense strand starting at position 3741 of SEQ ID NO: 1668
ugcuaucuucuggaagcaa

SEQ ID NO: 130617 - RNA, 19 nt, Artificial Sequence
  Description of Artificial Sequence: Synthetic oligonucleotide
  Antisense strand to SEQ ID NO: 130616
uugcuuccagaagauagca

SEQ ID NO: 130618 - RNA, 19 nt, Artificial Sequence
  Description of Artificial Sequence: Synthetic oligonucleotide
  Sense strand starting at position 3767 of SEQ ID NO: 1668
ugacucucccaagaaguuu

SEQ ID NO: 130619 - RNA, 19 nt, Artificial Sequence
  Description of Artificial Sequence: Synthetic oligonucleotide
  Antisense strand to SEQ ID NO: 130618
aaacuucuugggagaguca

SEQ ID NO: 130620 - RNA, 19 nt, Artificial Sequence
  Description of Artificial Sequence: Synthetic oligonucleotide
  Sense strand starting at position 3855 of SEQ ID NO: 1668
gguaguucagaaggcagau

SEQ ID NO: 130621 - RNA, 19 nt, Artificial Sequence
  Description of Artificial Sequence: Synthetic oligonucleotide
  Antisense strand to SEQ ID NO: 130620
aucugccuucugaacuacc

SEQ ID NO: 130622 - RNA, 19 nt, Artificial Sequence
  Description of Artificial Sequence: Synthetic oligonucleotide
  Sense strand starting at position 3864 of SEQ ID NO: 1668
gaaggcagaugcuugagau

SEQ ID NO: 130623 - RNA, 19 nt, Artificial Sequence
  Description of Artificial Sequence: Synthetic oligonucleotide
  Antisense strand to SEQ ID NO: 130622
aucucaagcaucugccuuc

SEQ ID NO: 130624 - RNA, 19 nt, Artificial Sequence
  Description of Artificial Sequence: Synthetic oligonucleotide
  Sense strand starting at position 3865 of SEQ ID NO: 1668
aaggcagaugcuugagaua

SEQ ID NO: 130625 - RNA, 19 nt, Artificial Sequence
  Description of Artificial Sequence: Synthetic oligonucleotide
  Antisense strand to SEQ ID NO: 130624
uaucucaagcaucugccuu

SEQ ID NO: 130626 - RNA, 19 nt, Artificial Sequence
  Description of Artificial Sequence: Synthetic oligonucleotide
  Sense strand starting at position 3870 of SEQ ID NO: 1668
agaugcuugagauagcuuu

SEQ ID NO: 130627 - RNA, 19 nt, Artificial Sequence
  Description of Artificial Sequence: Synthetic oligonucleotide
  Antisense strand to SEQ ID NO: 130626
aaagcuaucucaagcaucu

SEQ ID NO: 130628 - RNA, 19 nt, Artificial Sequence
  Description of Artificial Sequence: Synthetic oligonucleotide
  Sense strand starting at position 3976 of SEQ ID NO: 1668
ucaggauuccagggucuuu

SEQ ID NO: 130629 - RNA, 19 nt, Artificial Sequence
  Description of Artificial Sequence: Synthetic oligonucleotide
  Antisense strand to SEQ ID NO: 130628
aaagacccuggaauccuga

SEQ ID NO: 130630 - RNA, 19 nt, Artificial Sequence
  Description of Artificial Sequence: Synthetic oligonucleotide
  Sense strand starting at position 3923 of SEQ ID NO: 1670
ucucauuuguguuaaggaa

SEQ ID NO: 130631 - RNA, 19 nt, Artificial Sequence
  Description of Artificial Sequence: Synthetic oligonucleotide
  Antisense strand to SEQ ID NO: 130630
uuccuuaacacaaaugaga

SEQ ID NO: 130632 - RNA, 19 nt, Artificial Sequence
  Description of Artificial Sequence: Synthetic oligonucleotide
  Sense strand starting at position 3919 of SEQ ID NO: 1670
augcucucauuuguguuaa

SEQ ID NO: 130633 - RNA, 19 nt, Artificial Sequence
  Description of Artificial Sequence: Synthetic oligonucleotide
  Antisense strand to SEQ ID NO: 130632
uuaacacaaaugagagcau

SEQ ID NO: 130634 - RNA, 19 nt, Artificial Sequence
  Description of Artificial Sequence: Synthetic oligonucleotide
  Sense strand starting at position 3914 of SEQ ID NO: 1670
cugacaugcucucauuugu

SEQ ID NO: 130635 - RNA, 19 nt, Artificial Sequence
  Description of Artificial Sequence: Synthetic oligonucleotide
  Antisense strand to SEQ ID NO: 130634
acaaaugagagcaugucag

SEQ ID NO: 130636 - RNA, 19 nt, Artificial Sequence
  Description of Artificial Sequence: Synthetic oligonucleotide
  Sense strand starting at position 3881 of SEQ ID NO: 1670
uuuaucuccugggaaacca

SEQ ID NO: 130637 - RNA, 19 nt, Artificial Sequence
  Description of Artificial Sequence: Synthetic oligonucleotide
  Antisense strand to SEQ ID NO: 130636
ugguuucccaggagauaaa

SEQ ID NO: 130638 - RNA, 19 nt, Artificial Sequence
  Description of Artificial Sequence: Synthetic oligonucleotide
  Sense strand starting at position 3865 of SEQ ID NO: 1670
gaucaaggguuuggaauuu

SEQ ID NO: 130639 - RNA, 19 nt, Artificial Sequence
  Description of Artificial Sequence: Synthetic oligonucleotide
  Antisense strand to SEQ ID NO: 130638
aaauuccaaacccuugauc

SEQ ID NO: 130640 - RNA, 19 nt, Artificial Sequence
  Description of Artificial Sequence: Synthetic oligonucleotide
  Sense strand starting at position 3812 of SEQ ID NO: 1670
guaguagaaguuuaaacca

SEQ ID NO: 130641 - RNA, 19 nt, Artificial Sequence
  Description of Artificial Sequence: Synthetic oligonucleotide
  Antisense strand to SEQ ID NO: 130640
ugguuuaaacuucuacuac

SEQ ID NO: 130642 - RNA, 19 nt, Artificial Sequence
  Description of Artificial Sequence: Synthetic oligonucleotide
  Sense strand starting at position 3801 of SEQ ID NO: 1670
cauugugauagguaguaga

SEQ ID NO: 130643 - RNA, 19 nt, Artificial Sequence
  Description of Artificial Sequence: Synthetic oligonucleotide
  Antisense strand to SEQ ID NO: 130642
ucuacuaccuaucacaaug

SEQ ID NO: 130644 - RNA, 19 nt, Artificial Sequence
  Description of Artificial Sequence: Synthetic oligonucleotide
  Sense strand starting at position 3799 of SEQ ID NO: 1670
aucauugugauagguagua

SEQ ID NO: 130645 - RNA, 19 nt, Artificial Sequence
  Description of Artificial Sequence: Synthetic oligonucleotide
  Antisense strand to SEQ ID NO: 130644
uacuaccuaucacaaugau

SEQ ID NO: 130646 - RNA, 19 nt, Artificial Sequence
  Description of Artificial Sequence: Synthetic oligonucleotide
  Sense strand starting at position 3797 of SEQ ID NO: 1670
acaucauugugauagguag

SEQ ID NO: 130647 - RNA, 19 nt, Artificial Sequence
  Description of Artificial Sequence: Synthetic oligonucleotide
  Antisense strand to SEQ ID NO: 130646
cuaccuaucacaaugaugu

SEQ ID NO: 130648 - RNA, 19 nt, Artificial Sequence
  Description of Artificial Sequence: Synthetic oligonucleotide
  Sense strand starting at position 3792 of SEQ ID NO: 1670
uuggaacaucauugugaua

SEQ ID NO: 130649 - RNA, 19 nt, Artificial Sequence
  Description of Artificial Sequence: Synthetic oligonucleotide
  Antisense strand to SEQ ID NO: 130648
uaucacaaugauguuccaa

SEQ ID NO: 130650 - RNA, 19 nt, Artificial Sequence
  Description of Artificial Sequence: Synthetic oligonucleotide
  Sense strand starting at position 3791 of SEQ ID NO: 1670
guuggaacaucauugugau

SEQ ID NO: 130651 - RNA, 19 nt, Artificial Sequence
  Description of Artificial Sequence: Synthetic oligonucleotide
  Antisense strand to SEQ ID NO: 130650
aucacaaugauguuccaac

SEQ ID NO: 130652 - RNA, 19 nt, Artificial Sequence
  Description of Artificial Sequence: Synthetic oligonucleotide
  Sense strand starting at position 3604 of SEQ ID NO: 1670
uuacuauagguugagucaa

SEQ ID NO: 130653 - RNA, 19 nt, Artificial Sequence
  Description of Artificial Sequence: Synthetic oligonucleotide
  Antisense strand to SEQ ID NO: 130652
uugacucaaccuauaguaa

SEQ ID NO: 130654 - RNA, 19 nt, Artificial Sequence
  Description of Artificial Sequence: Synthetic oligonucleotide
  Sense strand starting at position 3603 of SEQ ID NO: 1670
cuuacuauagguugaguca

SEQ ID NO: 130655 - RNA, 19 nt, Artificial Sequence
  Description of Artificial Sequence: Synthetic oligonucleotide
  Antisense strand to SEQ ID NO: 130654
ugacucaaccuauaguaag

SEQ ID NO: 130656 - RNA, 19 nt, Artificial Sequence
  Description of Artificial Sequence: Synthetic oligonucleotide
  Sense strand starting at position 3518 of SEQ ID NO: 1670
gguuaauccuaccugaauu

SEQ ID NO: 130657 - RNA, 19 nt, Artificial Sequence
  Description of Artificial Sequence: Synthetic oligonucleotide
  Antisense strand to SEQ ID NO: 130656
aauucagguaggauuaacc

SEQ ID NO: 130658 - RNA, 19 nt, Artificial Sequence
  Description of Artificial Sequence: Synthetic oligonucleotide
  Sense strand starting at position 3504 of SEQ ID NO: 1670
aguagaaaguaucagguua

SEQ ID NO: 130659 - RNA, 19 nt, Artificial Sequence
  Description of Artificial Sequence: Synthetic oligonucleotide
  Antisense strand to SEQ ID NO: 130658
uaaccugauacuuucuacu

SEQ ID NO: 130660 - RNA, 19 nt, Artificial Sequence
  Description of Artificial Sequence: Synthetic oligonucleotide
  Sense strand starting at position 3440 of SEQ ID NO: 1670
guuuaugaauaagucacaa

SEQ ID NO: 130661 - RNA, 19 nt, Artificial Sequence
  Description of Artificial Sequence: Synthetic oligonucleotide
  Antisense strand to SEQ ID NO: 130660
uugugacuuauucauaaac

SEQ ID NO: 130662 - RNA, 19 nt, Artificial Sequence
  Description of Artificial Sequence: Synthetic oligonucleotide
  Sense strand starting at position 3437 of SEQ ID NO: 1670
gcaguuuaugaauaaguca

SEQ ID NO: 130663 - RNA, 19 nt, Artificial Sequence
  Description of Artificial Sequence: Synthetic oligonucleotide
  Antisense strand to SEQ ID NO: 130662
ugacuuauucauaaacugc

SEQ ID NO: 130664 - RNA, 19 nt, Artificial Sequence
  Description of Artificial Sequence: Synthetic oligonucleotide
  Sense strand starting at position 3431 of SEQ ID NO: 1670
ccuuuagcaguuuaugaau

SEQ ID NO: 130665 - RNA, 19 nt, Artificial Sequence
  Description of Artificial Sequence: Synthetic oligonucleotide
  Antisense strand to SEQ ID NO: 130664
auucauaaacugcuaaagg

SEQ ID NO: 130666 - RNA, 19 nt, Artificial Sequence
  Description of Artificial Sequence: Synthetic oligonucleotide
  Sense strand starting at position 3223 of SEQ ID NO: 1670
aagcuuucccuguggaaga

SEQ ID NO: 130667 - RNA, 19 nt, Artificial Sequence
  Description of Artificial Sequence: Synthetic oligonucleotide
  Antisense strand to SEQ ID NO: 130666
ucuuccacagggaaagcuu

SEQ ID NO: 130668 - RNA, 19 nt, Artificial Sequence
  Description of Artificial Sequence: Synthetic oligonucleotide
  Sense strand starting at position 2883 of SEQ ID NO: 1670
cuaacauuccaauguggga

SEQ ID NO: 130669 - RNA, 19 nt, Artificial Sequence
  Description of Artificial Sequence: Synthetic oligonucleotide
  Antisense strand to SEQ ID NO: 130668
ucccacauuggaauguuag

SEQ ID NO: 130670 - RNA, 19 nt, Artificial Sequence
  Description of Artificial Sequence: Synthetic oligonucleotide
  Sense strand starting at position 2808 of SEQ ID NO: 1670
gcguacucuguguuaugca

SEQ ID NO: 130671 - RNA, 19 nt, Artificial Sequence
  Description of Artificial Sequence: Synthetic oligonucleotide
  Antisense strand to SEQ ID NO: 130670
ugcauaacacagaguacgc

SEQ ID NO: 130672 - RNA, 19 nt, Artificial Sequence
  Description of Artificial Sequence: Synthetic oligonucleotide
  Sense strand starting at position 2804 of SEQ ID NO: 1670
gaaggcguacucuguguua

SEQ ID NO: 130673 - RNA, 19 nt, Artificial Sequence
  Description of Artificial Sequence: Synthetic oligonucleotide
  Antisense strand to SEQ ID NO: 130672
uaacacagaguacgccuuc

SEQ ID NO: 130674 - RNA, 19 nt, Artificial Sequence
  Description of Artificial Sequence: Synthetic oligonucleotide
  Sense strand starting at position 2780 of SEQ ID NO: 1670
acuuauucgucacucaugu

SEQ ID NO: 130675 - RNA, 19 nt, Artificial Sequence
  Description of Artificial Sequence: Synthetic oligonucleotide
  Antisense strand to SEQ ID NO: 130674
acaugagugacgaauaagu

SEQ ID NO: 130676 - RNA, 19 nt, Artificial Sequence
  Description of Artificial Sequence: Synthetic oligonucleotide
  Sense strand starting at position 2778 of SEQ ID NO: 1670
ccacuuauucgucacucau

SEQ ID NO: 130677 - RNA, 19 nt, Artificial Sequence
  Description of Artificial Sequence: Synthetic oligonucleotide
  Antisense strand to SEQ ID NO: 130676
augagugacgaauaagugg

SEQ ID NO: 130678 - RNA, 19 nt, Artificial Sequence
  Description of Artificial Sequence: Synthetic oligonucleotide
  Sense strand starting at position 2777 of SEQ ID NO: 1670
cccacuuauucgucacuca

SEQ ID NO: 130679 - RNA, 19 nt, Artificial Sequence
  Description of Artificial Sequence: Synthetic oligonucleotide
  Antisense strand to SEQ ID NO: 130678
ugagugacgaauaaguggg

SEQ ID NO: 130680 - RNA, 19 nt, Artificial Sequence
  Description of Artificial Sequence: Synthetic oligonucleotide
  Sense strand starting at position 2625 of SEQ ID NO: 1670
gcaccugggcgcuauaacu

SEQ ID NO: 130681 - RNA, 19 nt, Artificial Sequence
  Description of Artificial Sequence: Synthetic oligonucleotide
  Antisense strand to SEQ ID NO: 130680
aguuauagcgcccaggugc

SEQ ID NO: 130682 - RNA, 19 nt, Artificial Sequence
  Description of Artificial Sequence: Synthetic oligonucleotide
  Sense strand starting at position 2586 of SEQ ID NO: 1670
ccugcacagucacuuauua

SEQ ID NO: 130683 - RNA, 19 nt, Artificial Sequence
  Description of Artificial Sequence: Synthetic oligonucleotide
  Antisense strand to SEQ ID NO: 130682
uaauaagugacugugcagg

SEQ ID NO: 130684 - RNA, 19 nt, Artificial Sequence
  Description of Artificial Sequence: Synthetic oligonucleotide
  Sense strand starting at position 2391 of SEQ ID NO: 1670
ccuugaaaugcuggcaagu

SEQ ID NO: 130685 - RNA, 19 nt, Artificial Sequence
  Description of Artificial Sequence: Synthetic oligonucleotide
  Antisense strand to SEQ ID NO: 130684
acuugccagcauuucaagg

SEQ ID NO: 130686 - RNA, 19 nt, Artificial Sequence
  Description of Artificial Sequence: Synthetic oligonucleotide
  Sense strand starting at position 2382 of SEQ ID NO: 1670
gcccucugcccuugaaaug

SEQ ID NO: 130687 - RNA, 19 nt, Artificial Sequence
  Description of Artificial Sequence: Synthetic oligonucleotide
  Antisense strand to SEQ ID NO: 130686
cauuucaagggcagagggc

SEQ ID NO: 130688 - RNA, 19 nt, Artificial Sequence
  Description of Artificial Sequence: Synthetic oligonucleotide
  Sense strand starting at position 2354 of SEQ ID NO: 1670
ccagauguuagucgaguca

SEQ ID NO: 130689 - RNA, 19 nt, Artificial Sequence
  Description of Artificial Sequence: Synthetic oligonucleotide
  Antisense strand to SEQ ID NO: 130688
ugacucgacuaacaucugg

SEQ ID NO: 130690 - RNA, 19 nt, Artificial Sequence
  Description of Artificial Sequence: Synthetic oligonucleotide
  Sense strand starting at position 2345 of SEQ ID NO: 1670
gcaauacacccagauguua

SEQ ID NO: 130691 - RNA, 19 nt, Artificial Sequence
  Description of Artificial Sequence: Synthetic oligonucleotide
  Antisense strand to SEQ ID NO: 130690
uaacaucuggguguauugc

SEQ ID NO: 130692 - RNA, 19 nt, Artificial Sequence
  Description of Artificial Sequence: Synthetic oligonucleotide
  Sense strand starting at position 2274 of SEQ ID NO: 1670
ggccauuugacccguggga

SEQ ID NO: 130693 - RNA, 19 nt, Artificial Sequence
  Description of Artificial Sequence: Synthetic oligonucleotide
  Antisense strand to SEQ ID NO: 130692
ucccacgggucaaauggcc

SEQ ID NO: 130694 - RNA, 19 nt, Artificial Sequence
  Description of Artificial Sequence: Synthetic oligonucleotide
  Sense strand starting at position 2263 of SEQ ID NO: 1670
agucguuucucggccauuu

SEQ ID NO: 130695 - RNA, 19 nt, Artificial Sequence
  Description of Artificial Sequence: Synthetic oligonucleotide
  Antisense strand to SEQ ID NO: 130694
aaauggccgagaaacgacu

SEQ ID NO: 130696 - RNA, 19 nt, Artificial Sequence
  Description of Artificial Sequence: Synthetic oligonucleotide
  Sense strand starting at position 2197 of SEQ ID NO: 1670
aagaacuggccauguuuga

SEQ ID NO: 130697 - RNA, 19 nt, Artificial Sequence
  Description of Artificial Sequence: Synthetic oligonucleotide
  Antisense strand to SEQ ID NO: 130696
ucaaacauggccaguucuu

SEQ ID NO: 130698 - RNA, 19 nt, Artificial Sequence
  Description of Artificial Sequence: Synthetic oligonucleotide
  Sense strand starting at position 2195 of SEQ ID NO: 1670
ugaagaacuggccauguuu

SEQ ID NO: 130699 - RNA, 19 nt, Artificial Sequence
  Description of Artificial Sequence: Synthetic oligonucleotide
  Antisense strand to SEQ ID NO: 130698
aaacauggccaguucuuca

SEQ ID NO: 130700 - RNA, 19 nt, Artificial Sequence
  Description of Artificial Sequence: Synthetic oligonucleotide
  Sense strand starting at position 900 of SEQ ID NO: 1670
ccaugaucugacugcacuu

SEQ ID NO: 130701 - RNA, 19 nt, Artificial Sequence
  Description of Artificial Sequence: Synthetic oligonucleotide
  Antisense strand to SEQ ID NO: 130700
aagugcagucagaucaugg

SEQ ID NO: 130702 - RNA, 19 nt, Artificial Sequence
  Description of Artificial Sequence: Synthetic oligonucleotide
  Sense strand starting at position 309 of SEQ ID NO: 1670
gucccuuagcuccacaaga

SEQ ID NO: 130703 - RNA, 19 nt, Artificial Sequence
  Description of Artificial Sequence: Synthetic oligonucleotide
  Antisense strand to SEQ ID NO: 130702
ucuuguggagcuaagggac

SEQ ID NO: 130704 - RNA, 19 nt, Artificial Sequence
  Description of Artificial Sequence: Synthetic oligonucleotide
  Sense strand starting at position 259 of SEQ ID NO: 1670
ccagaauguuguucucaaa

SEQ ID NO: 130705 - RNA, 19 nt, Artificial Sequence
  Description of Artificial Sequence: Synthetic oligonucleotide
  Antisense strand to SEQ ID NO: 130704
uuugagaacaacauucugg

SEQ ID NO: 130706 - RNA, 19 nt, Artificial Sequence
  Description of Artificial Sequence: Synthetic oligonucleotide
  Sense strand starting at position 258 of SEQ ID NO: 1670
gccagaauguuguucucaa

SEQ ID NO: 130707 - RNA, 19 nt, Artificial Sequence
  Description of Artificial Sequence: Synthetic oligonucleotide
  Antisense strand to SEQ ID NO: 130706
uugagaacaacauucuggc

SEQ ID NO: 130708 - RNA, 19 nt, Artificial Sequence
  Description of Artificial Sequence: Synthetic oligonucleotide
  Sense strand starting at position 69 of SEQ ID NO: 1670
agauaagaguuucuccuaa

SEQ ID NO: 130709 - RNA, 19 nt, Artificial Sequence
  Description of Artificial Sequence: Synthetic oligonucleotide
  Antisense strand to SEQ ID NO: 130708
uuaggagaaacucuuaucu

SEQ ID NO: 130710 - RNA, 19 nt, Artificial Sequence
  Description of Artificial Sequence: Synthetic oligonucleotide
  Sense strand starting at position 3905 of SEQ ID NO: 1669
cucucaaagcacugaguau

SEQ ID NO: 130711 - RNA, 19 nt, Artificial Sequence
  Description of Artificial Sequence: Synthetic oligonucleotide
  Antisense strand to SEQ ID NO: 130710
auacucagugcuuugagag

SEQ ID NO: 130712 - RNA, 19 nt, Artificial Sequence
  Description of Artificial Sequence: Synthetic oligonucleotide
  Sense strand starting at position 3863 of SEQ ID NO: 1669
ugcaguaccuucucauacu

SEQ ID NO: 130713 - RNA, 19 nt, Artificial Sequence
  Description of Artificial Sequence: Synthetic oligonucleotide
  Antisense strand to SEQ ID NO: 130712
aguaugagaagguacugca

SEQ ID NO: 130714 - RNA, 19 nt, Artificial Sequence
  Description of Artificial Sequence: Synthetic oligonucleotide
  Sense strand starting at position 3770 of SEQ ID NO: 1669
ucucauuuguguuaaggaa

SEQ ID NO: 130715 - RNA, 19 nt, Artificial Sequence
  Description of Artificial Sequence: Synthetic oligonucleotide
  Antisense strand to SEQ ID NO: 130714
uuccuuaacacaaaugaga

SEQ ID NO: 130716 - RNA, 19 nt, Artificial Sequence
  Description of Artificial Sequence: Synthetic oligonucleotide
  Sense strand starting at position 3766 of SEQ ID NO: 1669
augcucucauuuguguuaa

SEQ ID NO: 130717 - RNA, 19 nt, Artificial Sequence
  Description of Artificial Sequence: Synthetic oligonucleotide
  Antisense strand to SEQ ID NO: 130716
uuaacacaaaugagagcau

SEQ ID NO: 130718 - RNA, 19 nt, Artificial Sequence
  Description of Artificial Sequence: Synthetic oligonucleotide
  Sense strand starting at position 3761 of SEQ ID NO: 1669
cugacaugcucucauuugu

SEQ ID NO: 130719 - RNA, 19 nt, Artificial Sequence
  Description of Artificial Sequence: Synthetic oligonucleotide
  Antisense strand to SEQ ID NO: 130718
acaaaugagagcaugucag

SEQ ID NO: 130720 - RNA, 19 nt, Artificial Sequence
  Description of Artificial Sequence: Synthetic oligonucleotide
  Sense strand starting at position 3728 of SEQ ID NO: 1669
uuuaucuccugggaaacca

SEQ ID NO: 130721 - RNA, 19 nt, Artificial Sequence
  Description of Artificial Sequence: Synthetic oligonucleotide
  Antisense strand to SEQ ID NO: 130720
ugguuucccaggagauaaa

SEQ ID NO: 130722 - RNA, 19 nt, Artificial Sequence
  Description of Artificial Sequence: Synthetic oligonucleotide
  Sense strand starting at position 3712 of SEQ ID NO: 1669
gaucaaggguuuggaauuu

SEQ ID NO: 130723 - RNA, 19 nt, Artificial Sequence
  Description of Artificial Sequence: Synthetic oligonucleotide
  Antisense strand to SEQ ID NO: 130722
aaauuccaaacccuugauc

SEQ ID NO: 130724 - RNA, 19 nt, Artificial Sequence
  Description of Artificial Sequence: Synthetic oligonucleotide
  Sense strand starting at position 3659 of SEQ ID NO: 1669
guaguagaaguuuaaacca

SEQ ID NO: 130725 - RNA, 19 nt, Artificial Sequence
  Description of Artificial Sequence: Synthetic oligonucleotide
  Antisense strand to SEQ ID NO: 130724
ugguuuaaacuucuacuac

SEQ ID NO: 130726 - RNA, 19 nt, Artificial Sequence
  Description of Artificial Sequence: Synthetic oligonucleotide
  Sense strand starting at position 3648 of SEQ ID NO: 1669
cauugugauagguaguaga

SEQ ID NO: 130727 - RNA, 19 nt, Artificial Sequence
  Description of Artificial Sequence: Synthetic oligonucleotide
  Antisense strand to SEQ ID NO: 130726
ucuacuaccuaucacaaug

SEQ ID NO: 130728 - RNA, 19 nt, Artificial Sequence
  Description of Artificial Sequence: Synthetic oligonucleotide
  Sense strand starting at position 3646 of SEQ ID NO: 1669
aucauugugauagguagua

SEQ ID NO: 130729 - RNA, 19 nt, Artificial Sequence
  Description of Artificial Sequence: Synthetic oligonucleotide
  Antisense strand to SEQ ID NO: 130728
uacuaccuaucacaaugau

SEQ ID NO: 130730 - RNA, 19 nt, Artificial Sequence
  Description of Artificial Sequence: Synthetic oligonucleotide
  Sense strand starting at position 3639 of SEQ ID NO: 1669
uuggaacaucauugugaua

SEQ ID NO: 130731 - RNA, 19 nt, Artificial Sequence
  Description of Artificial Sequence: Synthetic oligonucleotide
  Antisense strand to SEQ ID NO: 130730
uaucacaaugauguuccaa

SEQ ID NO: 130732 - RNA, 19 nt, Artificial Sequence
  Description of Artificial Sequence: Synthetic oligonucleotide
  Sense strand starting at position 3638 of SEQ ID NO: 1669
guuggaacaucauugugau

SEQ ID NO: 130733 - RNA, 19 nt, Artificial Sequence
  Description of Artificial Sequence: Synthetic oligonucleotide
  Antisense strand to SEQ ID NO: 130732
aucacaaugauguuccaac

SEQ ID NO: 130734 - RNA, 19 nt, Artificial Sequence
  Description of Artificial Sequence: Synthetic oligonucleotide
  Sense strand starting at position 3451 of SEQ ID NO: 1669
uuacuauagguugagucaa

SEQ ID NO: 130735 - RNA, 19 nt, Artificial Sequence
  Description of Artificial Sequence: Synthetic oligonucleotide
  Antisense strand to SEQ ID NO: 130734
uugacucaaccuauaguaa

SEQ ID NO: 130736 - RNA, 19 nt, Artificial Sequence
  Description of Artificial Sequence: Synthetic oligonucleotide
  Sense strand starting at position 3450 of SEQ ID NO: 1669
cuuacuauagguugaguca

SEQ ID NO: 130737 - RNA, 19 nt, Artificial Sequence
  Description of Artificial Sequence: Synthetic oligonucleotide
  Antisense strand to SEQ ID NO: 130736
ugacucaaccuauaguaag

SEQ ID NO: 130738 - RNA, 19 nt, Artificial Sequence
  Description of Artificial Sequence: Synthetic oligonucleotide
  Sense strand starting at position 3365 of SEQ ID NO: 1669
gguuaauccuaccugaauu

SEQ ID NO: 130739 - RNA, 19 nt, Artificial Sequence
  Description of Artificial Sequence: Synthetic oligonucleotide
  Antisense strand to SEQ ID NO: 130738
aauucagguaggauuaacc

SEQ ID NO: 130740 - RNA, 19 nt, Artificial Sequence
  Description of Artificial Sequence: Synthetic oligonucleotide
  Sense strand starting at position 3351 of SEQ ID NO: 1669
aguagaaaguaucagguua

SEQ ID NO: 130741 - RNA, 19 nt, Artificial Sequence
  Description of Artificial Sequence: Synthetic oligonucleotide
  Antisense strand to SEQ ID NO: 130740
uaaccugauacuuucuacu

SEQ ID NO: 130742 - RNA, 19 nt, Artificial Sequence
  Description of Artificial Sequence: Synthetic oligonucleotide
  Sense strand starting at position 3287 of SEQ ID NO: 1669
guuuaugaauaagucacaa

SEQ ID NO: 130743 - RNA, 19 nt, Artificial Sequence
  Description of Artificial Sequence: Synthetic oligonucleotide
  Antisense strand to SEQ ID NO: 130742
uugugacuuauucauaaac

SEQ ID NO: 130744 - RNA, 19 nt, Artificial Sequence
  Description of Artificial Sequence: Synthetic oligonucleotide
  Sense strand starting at position 3284 of SEQ ID NO: 1669
gcaguuuaugaauaaguca

SEQ ID NO: 130745 - RNA, 19 nt, Artificial Sequence
  Description of Artificial Sequence: Synthetic oligonucleotide
  Antisense strand to SEQ ID NO: 130744
ugacuuauucauaaacugc

SEQ ID NO: 130746 - RNA, 19 nt, Artificial Sequence
  Description of Artificial Sequence: Synthetic oligonucleotide
  Sense strand starting at position 3278 of SEQ ID NO: 1669
ccuuuagcaguuuaugaau

SEQ ID NO: 130747 - RNA, 19 nt, Artificial Sequence
  Description of Artificial Sequence: Synthetic oligonucleotide
  Antisense strand to SEQ ID NO: 130746
auucauaaacugcuaaagg

SEQ ID NO: 130748 - RNA, 19 nt, Artificial Sequence
  Description of Artificial Sequence: Synthetic oligonucleotide
  Sense strand starting at position 3070 of SEQ ID NO: 1669
aagcuuucccuguggaaga

SEQ ID NO: 130749 - RNA, 19 nt, Artificial Sequence
  Description of Artificial Sequence: Synthetic oligonucleotide
  Antisense strand to SEQ ID NO: 130748
ucuuccacagggaaagcuu

SEQ ID NO: 130750 - RNA, 19 nt, Artificial Sequence
  Description of Artificial Sequence: Synthetic oligonucleotide
  Sense strand starting at position 2730 of SEQ ID NO: 1669
cuaacauuccaauguggga

SEQ ID NO: 130751 - RNA, 19 nt, Artificial Sequence
  Description of Artificial Sequence: Synthetic oligonucleotide
  Antisense strand to SEQ ID NO: 130750
ucccacauuggaauguuag

SEQ ID NO: 130752 - RNA, 19 nt, Artificial Sequence
  Description of Artificial Sequence: Synthetic oligonucleotide
  Sense strand starting at position 2655 of SEQ ID NO: 1669
gcguacucuguguuaugca

SEQ ID NO: 130753 - RNA, 19 nt, Artificial Sequence
  Description of Artificial Sequence: Synthetic oligonucleotide
  Antisense strand to SEQ ID NO: 130752
ugcauaacacagaguacgc

SEQ ID NO: 130754 - RNA, 19 nt, Artificial Sequence
  Description of Artificial Sequence: Synthetic oligonucleotide
  Sense strand starting at position 2651 of SEQ ID NO: 1669
gaaggcguacucuguguua

SEQ ID NO: 130755 - RNA, 19 nt, Artificial Sequence
  Description of Artificial Sequence: Synthetic oligonucleotide
  Antisense strand to SEQ ID NO: 130754
uaacacagaguacgccuuc

SEQ ID NO: 130756 - RNA, 19 nt, Artificial Sequence
  Description of Artificial Sequence: Synthetic oligonucleotide
  Sense strand starting at position 2627 of SEQ ID NO: 1669
acuuauucgucacucaugu

SEQ ID NO: 130757 - RNA, 19 nt, Artificial Sequence
  Description of Artificial Sequence: Synthetic oligonucleotide
  Antisense strand to SEQ ID NO: 130756
acaugagugacgaauaagu

SEQ ID NO: 130758 - RNA, 19 nt, Artificial Sequence
  Description of Artificial Sequence: Synthetic oligonucleotide
  Sense strand starting at position 2625 of SEQ ID NO: 1669
ccacuuauucgucacucau

SEQ ID NO: 130759 - RNA, 19 nt, Artificial Sequence
  Description of Artificial Sequence: Synthetic oligonucleotide
  Antisense strand to SEQ ID NO: 130758
augagugacgaauaagugg

SEQ ID NO: 130760 - RNA, 19 nt, Artificial Sequence
  Description of Artificial Sequence: Synthetic oligonucleotide
  Sense strand starting at position 2624 of SEQ ID NO: 1669
cccacuuauucgucacuca

SEQ ID NO: 130761 - RNA, 19 nt, Artificial Sequence
  Description of Artificial Sequence: Synthetic oligonucleotide
  Antisense strand to SEQ ID NO: 130760
ugagugacgaauaaguggg

SEQ ID NO: 130762 - RNA, 19 nt, Artificial Sequence
  Description of Artificial Sequence: Synthetic oligonucleotide
  Sense strand starting at position 2472 of SEQ ID NO: 1669
gcaccugggcgcuauaacu

SEQ ID NO: 130763 - RNA, 19 nt, Artificial Sequence
  Description of Artificial Sequence: Synthetic oligonucleotide
  Antisense strand to SEQ ID NO: 130762
aguuauagcgcccaggugc

SEQ ID NO: 130764 - RNA, 19 nt, Artificial Sequence
  Description of Artificial Sequence: Synthetic oligonucleotide
  Sense strand starting at position 2433 of SEQ ID NO: 1669
ccugcacagucacuuauua

SEQ ID NO: 130765 - RNA, 19 nt, Artificial Sequence
  Description of Artificial Sequence: Synthetic oligonucleotide
  Antisense strand to SEQ ID NO: 130764
uaauaagugacugugcagg

SEQ ID NO: 130766 - RNA, 19 nt, Artificial Sequence
  Description of Artificial Sequence: Synthetic oligonucleotide
  Sense strand starting at position 2238 of SEQ ID NO: 1669
ccuugaaaugcuggcaagu

SEQ ID NO: 130767 - RNA, 19 nt, Artificial Sequence
  Description of Artificial Sequence: Synthetic oligonucleotide
  Antisense strand to SEQ ID NO: 130766
acuugccagcauuucaagg

SEQ ID NO: 130768 - RNA, 19 nt, Artificial Sequence
  Description of Artificial Sequence: Synthetic oligonucleotide
  Sense strand starting at position 2229 of SEQ ID NO: 1669
gcccucugcccuugaaaug

SEQ ID NO: 130769 - RNA, 19 nt, Artificial Sequence
  Description of Artificial Sequence: Synthetic oligonucleotide
  Antisense strand to SEQ ID NO: 130768
cauuucaagggcagagggc

SEQ ID NO: 130770 - RNA, 19 nt, Artificial Sequence
  Description of Artificial Sequence: Synthetic oligonucleotide
  Sense strand starting at position 2201 of SEQ ID NO: 1669
ccagauguuagucgaguca

SEQ ID NO: 130771 - RNA, 19 nt, Artificial Sequence
  Description of Artificial Sequence: Synthetic oligonucleotide
  Antisense strand to SEQ ID NO: 130770
ugacucgacuaacaucugg

SEQ ID NO: 130772 - RNA, 19 nt, Artificial Sequence
  Description of Artificial Sequence: Synthetic oligonucleotide
  Sense strand starting at position 2192 of SEQ ID NO: 1669
gcaauacacccagauguua

SEQ ID NO: 130773 - RNA, 19 nt, Artificial Sequence
  Description of Artificial Sequence: Synthetic oligonucleotide
  Antisense strand to SEQ ID NO: 130772
uaacaucuggguguauugc

SEQ ID NO: 130774 - RNA, 19 nt, Artificial Sequence
  Description of Artificial Sequence: Synthetic oligonucleotide
  Sense strand starting at position 2121 of SEQ ID NO: 1669
ggccauuugacccguggga

SEQ ID NO: 130775 - RNA, 19 nt, Artificial Sequence
  Description of Artificial Sequence: Synthetic oligonucleotide
  Antisense strand to SEQ ID NO: 130774
ucccacgggucaaauggcc

SEQ ID NO: 130776 - RNA, 19 nt, Artificial Sequence
  Description of Artificial Sequence: Synthetic oligonucleotide
  Sense strand starting at position 2110 of SEQ ID NO: 1669
agucguuucucggccauuu

SEQ ID NO: 130777 - RNA, 19 nt, Artificial Sequence
  Description of Artificial Sequence: Synthetic oligonucleotide
  Antisense strand to SEQ ID NO: 130776
aaauggccgagaaacgacu

SEQ ID NO: 130778 - RNA, 19 nt, Artificial Sequence
  Description of Artificial Sequence: Synthetic oligonucleotide
  Sense strand starting at position 2044 of SEQ ID NO: 1669
aagaacuggccauguuuga

SEQ ID NO: 130779 - RNA, 19 nt, Artificial Sequence
  Description of Artificial Sequence: Synthetic oligonucleotide
  Antisense strand to SEQ ID NO: 130778
ucaaacauggccaguucuu

SEQ ID NO: 130780 - RNA, 19 nt, Artificial Sequence
  Description of Artificial Sequence: Synthetic oligonucleotide
  Sense strand starting at position 2042 of SEQ ID NO: 1669
ugaagaacuggccauguuu

SEQ ID NO: 130781 - RNA, 19 nt, Artificial Sequence
  Description of Artificial Sequence: Synthetic oligonucleotide
  Antisense strand to SEQ ID NO: 130780
aaacauggccaguucuuca

SEQ ID NO: 130782 - RNA, 19 nt, Artificial Sequence
  Description of Artificial Sequence: Synthetic oligonucleotide
  Sense strand starting at position 747 of SEQ ID NO: 1669
ccaugaucugacugcacuu

SEQ ID NO: 130783 - RNA, 19 nt, Artificial Sequence
  Description of Artificial Sequence: Synthetic oligonucleotide
  Antisense strand to SEQ ID NO: 130782
aagugcagucagaucaugg

SEQ ID NO: 130784 - RNA, 19 nt, Artificial Sequence
  Description of Artificial Sequence: Synthetic oligonucleotide
  Sense strand starting at position 156 of SEQ ID NO: 1669
gucccuuagcuccacaaga

SEQ ID NO: 130785 - RNA, 19 nt, Artificial Sequence
  Description of Artificial Sequence: Synthetic oligonucleotide
  Antisense strand to SEQ ID NO: 130784
ucuuguggagcuaagggac

SEQ ID NO: 130786 - RNA, 19 nt, Artificial Sequence
  Description of Artificial Sequence: Synthetic oligonucleotide
  Sense strand starting at position 106 of SEQ ID NO: 1669
ccagaauguuguucucaaa

SEQ ID NO: 130787 - RNA, 19 nt, Artificial Sequence
  Description of Artificial Sequence: Synthetic oligonucleotide
  Antisense strand to SEQ ID NO: 130786
uuugagaacaacauucugg

SEQ ID NO: 130788 - RNA, 19 nt, Artificial Sequence
  Description of Artificial Sequence: Synthetic oligonucleotide
  Sense strand starting at position 105 of SEQ ID NO: 1669
gccagaauguuguucucaa

SEQ ID NO: 130789 - RNA, 19 nt, Artificial Sequence
  Description of Artificial Sequence: Synthetic oligonucleotide
  Antisense strand to SEQ ID NO: 130788
uugagaacaacauucuggc

SEQ ID NO: 130790 - RNA, 19 nt, Artificial Sequence
  Description of Artificial Sequence: Synthetic oligonucleotide
  Sense strand starting at position 3918 of SEQ ID NO: 1671
guuugaagcucccuccaaa

SEQ ID NO: 130791 - RNA, 19 nt, Artificial Sequence
  Description of Artificial Sequence: Synthetic oligonucleotide
  Antisense strand to SEQ ID NO: 130790
uuuggagggagcuucaaac

SEQ ID NO: 130792 - RNA, 19 nt, Artificial Sequence
  Description of Artificial Sequence: Synthetic oligonucleotide
  Sense strand starting at position 3877 of SEQ ID NO: 1671
ggcaaauccucccagaauc

SEQ ID NO: 130793 - RNA, 19 nt, Artificial Sequence
  Description of Artificial Sequence: Synthetic oligonucleotide
  Antisense strand to SEQ ID NO: 130792
gauucugggaggauuugcc

SEQ ID NO: 130794 - RNA, 19 nt, Artificial Sequence
  Description of Artificial Sequence: Synthetic oligonucleotide
  Sense strand starting at position 3617 of SEQ ID NO: 1671
ugaagaauguacugcaaag

SEQ ID NO: 130795 - RNA, 19 nt, Artificial Sequence
  Description of Artificial Sequence: Synthetic oligonucleotide
  Antisense strand to SEQ ID NO: 130794
cuuugcaguacauucuuca

SEQ ID NO: 130796 - RNA, 19 nt, Artificial Sequence
  Description of Artificial Sequence: Synthetic oligonucleotide
  Sense strand starting at position 3262 of SEQ ID NO: 1671
ggugacucugaccaaguua

SEQ ID NO: 130797 - RNA, 19 nt, Artificial Sequence
  Description of Artificial Sequence: Synthetic oligonucleotide
  Antisense strand to SEQ ID NO: 130796
uaacuuggucagagucacc

SEQ ID NO: 130798 - RNA, 19 nt, Artificial Sequence
  Description of Artificial Sequence: Synthetic oligonucleotide
  Sense strand starting at position 3261 of SEQ ID NO: 1671
gggugacucugaccaaguu

SEQ ID NO: 130799 - RNA, 19 nt, Artificial Sequence
  Description of Artificial Sequence: Synthetic oligonucleotide
  Antisense strand to SEQ ID NO: 130798
aacuuggucagagucaccc

SEQ ID NO: 130800 - RNA, 19 nt, Artificial Sequence
  Description of Artificial Sequence: Synthetic oligonucleotide
  Sense strand starting at position 3154 of SEQ ID NO: 1671
uggccuauguccuaccaca

SEQ ID NO: 130801 - RNA, 19 nt, Artificial Sequence
  Description of Artificial Sequence: Synthetic oligonucleotide
  Antisense strand to SEQ ID NO: 130800
ugugguaggacauaggcca

SEQ ID NO: 130802 - RNA, 19 nt, Artificial Sequence
  Description of Artificial Sequence: Synthetic oligonucleotide
  Sense strand starting at position 3145 of SEQ ID NO: 1671
cagaaaucauggccuaugu

SEQ ID NO: 130803 - RNA, 19 nt, Artificial Sequence
  Description of Artificial Sequence: Synthetic oligonucleotide
  Antisense strand to SEQ ID NO: 130802
acauaggccaugauuucug

SEQ ID NO: 130804 - RNA, 19 nt, Artificial Sequence
  Description of Artificial Sequence: Synthetic oligonucleotide
  Sense strand starting at position 3143 of SEQ ID NO: 1671
agcagaaaucauggccuau

SEQ ID NO: 130805 - RNA, 19 nt, Artificial Sequence
  Description of Artificial Sequence: Synthetic oligonucleotide
  Antisense strand to SEQ ID NO: 130804
auaggccaugauuucugcu

SEQ ID NO: 130806 - RNA, 19 nt, Artificial Sequence
  Description of Artificial Sequence: Synthetic oligonucleotide
  Sense strand starting at position 3122 of SEQ ID NO: 1671
gggugugcccucugucaag

SEQ ID NO: 130807 - RNA, 19 nt, Artificial Sequence
  Description of Artificial Sequence: Synthetic oligonucleotide
  Antisense strand to SEQ ID NO: 130806
cuugacagagggcacaccc

SEQ ID NO: 130808 - RNA, 19 nt, Artificial Sequence
  Description of Artificial Sequence: Synthetic oligonucleotide
  Sense strand starting at position 3027 of SEQ ID NO: 1671
guccuugacucucaagaga

SEQ ID NO: 130809 - RNA, 19 nt, Artificial Sequence
  Description of Artificial Sequence: Synthetic oligonucleotide
  Antisense strand to SEQ ID NO: 130808
ucucuugagagucaaggac

SEQ ID NO: 130810 - RNA, 19 nt, Artificial Sequence
  Description of Artificial Sequence: Synthetic oligonucleotide
  Sense strand starting at position 2959 of SEQ ID NO: 1671
aaggaaguuucugaugcuu

SEQ ID NO: 130811 - RNA, 19 nt, Artificial Sequence
  Description of Artificial Sequence: Synthetic oligonucleotide
  Antisense strand to SEQ ID NO: 130810
aagcaucagaaacuuccuu

SEQ ID NO: 130812 - RNA, 19 nt, Artificial Sequence
  Description of Artificial Sequence: Synthetic oligonucleotide
  Sense strand starting at position 2958 of SEQ ID NO: 1671
uaaggaaguuucugaugcu

SEQ ID NO: 130813 - RNA, 19 nt, Artificial Sequence
  Description of Artificial Sequence: Synthetic oligonucleotide
  Antisense strand to SEQ ID NO: 130812
agcaucagaaacuuccuua

SEQ ID NO: 130814 - RNA, 19 nt, Artificial Sequence
  Description of Artificial Sequence: Synthetic oligonucleotide
  Sense strand starting at position 2917 of SEQ ID NO: 1671
augccaaguccauaggauu

SEQ ID NO: 130815 - RNA, 19 nt, Artificial Sequence
  Description of Artificial Sequence: Synthetic oligonucleotide
  Antisense strand to SEQ ID NO: 130814
aauccuauggacuuggcau

SEQ ID NO: 130816 - RNA, 19 nt, Artificial Sequence
  Description of Artificial Sequence: Synthetic oligonucleotide
  Sense strand starting at position 2876 of SEQ ID NO: 1671
ggagauaagcuccaucucu

SEQ ID NO: 130817 - RNA, 19 nt, Artificial Sequence
  Description of Artificial Sequence: Synthetic oligonucleotide
  Antisense strand to SEQ ID NO: 130816
agagauggagcuuaucucc

SEQ ID NO: 130818 - RNA, 19 nt, Artificial Sequence
  Description of Artificial Sequence: Synthetic oligonucleotide
  Sense strand starting at position 2837 of SEQ ID NO: 1671
ucccgagguucccuaaaca

SEQ ID NO: 130819 - RNA, 19 nt, Artificial Sequence
  Description of Artificial Sequence: Synthetic oligonucleotide
  Antisense strand to SEQ ID NO: 130818
uguuuagggaaccucggga

SEQ ID NO: 130820 - RNA, 19 nt, Artificial Sequence
  Description of Artificial Sequence: Synthetic oligonucleotide
  Sense strand starting at position 2678 of SEQ ID NO: 1671
gacuuugguuuggagagaa

SEQ ID NO: 130821 - RNA, 19 nt, Artificial Sequence
  Description of Artificial Sequence: Synthetic oligonucleotide
  Antisense strand to SEQ ID NO: 130820
uucucuccaaaccaaaguc

SEQ ID NO: 130822 - RNA, 19 nt, Artificial Sequence
  Description of Artificial Sequence: Synthetic oligonucleotide
  Sense strand starting at position 2677 of SEQ ID NO: 1671
agacuuugguuuggagaga

SEQ ID NO: 130823 - RNA, 19 nt, Artificial Sequence
  Description of Artificial Sequence: Synthetic oligonucleotide
  Antisense strand to SEQ ID NO: 130822
ucucuccaaaccaaagucu

SEQ ID NO: 130824 - RNA, 19 nt, Artificial Sequence
  Description of Artificial Sequence: Synthetic oligonucleotide
  Sense strand starting at position 2676 of SEQ ID NO: 1671
gagacuuugguuuggagag

SEQ ID NO: 130825 - RNA, 19 nt, Artificial Sequence
  Description of Artificial Sequence: Synthetic oligonucleotide
  Antisense strand to SEQ ID NO: 130824
cucuccaaaccaaagucuc

SEQ ID NO: 130826 - RNA, 19 nt, Artificial Sequence
  Description of Artificial Sequence: Synthetic oligonucleotide
  Sense strand starting at position 2471 of SEQ ID NO: 1671
ggagauggcacuuaagucu

SEQ ID NO: 130827 - RNA, 19 nt, Artificial Sequence
  Description of Artificial Sequence: Synthetic oligonucleotide
  Antisense strand to SEQ ID NO: 130826
agacuuaagugccaucucc

SEQ ID NO: 130828 - RNA, 19 nt, Artificial Sequence
  Description of Artificial Sequence: Synthetic oligonucleotide
  Sense strand starting at position 2363 of SEQ ID NO: 1671
ugucucuucuggucaggau

SEQ ID NO: 130829 - RNA, 19 nt, Artificial Sequence
  Description of Artificial Sequence: Synthetic oligonucleotide
  Antisense strand to SEQ ID NO: 130828
auccugaccagaagagaca

SEQ ID NO: 130830 - RNA, 19 nt, Artificial Sequence
  Description of Artificial Sequence: Synthetic oligonucleotide
  Sense strand starting at position 2316 of SEQ ID NO: 1671
gcaaauggcuugguguacu

SEQ ID NO: 130831 - RNA, 19 nt, Artificial Sequence
  Description of Artificial Sequence: Synthetic oligonucleotide
  Antisense strand to SEQ ID NO: 130830
aguacaccaagccauuugc

SEQ ID NO: 130832 - RNA, 19 nt, Artificial Sequence
  Description of Artificial Sequence: Synthetic oligonucleotide
  Sense strand starting at position 2314 of SEQ ID NO: 1671
uggcaaauggcuuggugua

SEQ ID NO: 130833 - RNA, 19 nt, Artificial Sequence
  Description of Artificial Sequence: Synthetic oligonucleotide
  Antisense strand to SEQ ID NO: 130832
uacaccaagccauuugcca

SEQ ID NO: 130834 - RNA, 19 nt, Artificial Sequence
  Description of Artificial Sequence: Synthetic oligonucleotide
  Sense strand starting at position 2241 of SEQ ID NO: 1671
cgaugaauccaaugauucu

SEQ ID NO: 130835 - RNA, 19 nt, Artificial Sequence
  Description of Artificial Sequence: Synthetic oligonucleotide
  Antisense strand to SEQ ID NO: 130834
agaaucauuggauucaucg

SEQ ID NO: 130836 - RNA, 19 nt, Artificial Sequence
  Description of Artificial Sequence: Synthetic oligonucleotide
  Sense strand starting at position 2187 of SEQ ID NO: 1671
gagggaaguuccugcaugu

SEQ ID NO: 130837 - RNA, 19 nt, Artificial Sequence
  Description of Artificial Sequence: Synthetic oligonucleotide
  Antisense strand to SEQ ID NO: 130836
acaugcaggaacuucccuc

SEQ ID NO: 130838 - RNA, 19 nt, Artificial Sequence
  Description of Artificial Sequence: Synthetic oligonucleotide
  Sense strand starting at position 2083 of SEQ ID NO: 1671
agugauacuuccucccugu

SEQ ID NO: 130839 - RNA, 19 nt, Artificial Sequence
  Description of Artificial Sequence: Synthetic oligonucleotide
  Antisense strand to SEQ ID NO: 130838
acagggaggaaguaucacu

SEQ ID NO: 130840 - RNA, 19 nt, Artificial Sequence
  Description of Artificial Sequence: Synthetic oligonucleotide
  Sense strand starting at position 971 of SEQ ID NO: 1671
ccaucuuacccgugaagcu

SEQ ID NO: 130841 - RNA, 19 nt, Artificial Sequence
  Description of Artificial Sequence: Synthetic oligonucleotide
  Antisense strand to SEQ ID NO: 130840
agcuucacggguaagaugg

SEQ ID NO: 130842 - RNA, 19 nt, Artificial Sequence
  Description of Artificial Sequence: Synthetic oligonucleotide
  Sense strand starting at position 968 of SEQ ID NO: 1671
auuccaucuuacccgugaa

SEQ ID NO: 130843 - RNA, 19 nt, Artificial Sequence
  Description of Artificial Sequence: Synthetic oligonucleotide
  Antisense strand to SEQ ID NO: 130842
uucacggguaagauggaau

SEQ ID NO: 130844 - RNA, 19 nt, Artificial Sequence
  Description of Artificial Sequence: Synthetic oligonucleotide
  Sense strand starting at position 952 of SEQ ID NO: 1671
uccagaaagucugccaauu

SEQ ID NO: 130845 - RNA, 19 nt, Artificial Sequence
  Description of Artificial Sequence: Synthetic oligonucleotide
  Antisense strand to SEQ ID NO: 130844
aauuggcagacuuucugga

SEQ ID NO: 130846 - RNA, 19 nt, Artificial Sequence
  Description of Artificial Sequence: Synthetic oligonucleotide
  Sense strand starting at position 859 of SEQ ID NO: 1671
cacagcugcuucucggaaa

SEQ ID NO: 130847 - RNA, 19 nt, Artificial Sequence
  Description of Artificial Sequence: Synthetic oligonucleotide
  Antisense strand to SEQ ID NO: 130846
uuuccgagaagcagcugug

SEQ ID NO: 130848 - RNA, 19 nt, Artificial Sequence
  Description of Artificial Sequence: Synthetic oligonucleotide
  Sense strand starting at position 743 of SEQ ID NO: 1671
gacagagcaugacgaauaa

SEQ ID NO: 130849 - RNA, 19 nt, Artificial Sequence
  Description of Artificial Sequence: Synthetic oligonucleotide
  Antisense strand to SEQ ID NO: 130848
uuauucgucaugcucuguc

SEQ ID NO: 130850 - RNA, 19 nt, Artificial Sequence
  Description of Artificial Sequence: Synthetic oligonucleotide
  Sense strand starting at position 628 of SEQ ID NO: 1671
aggauuucuuaagggcaga

SEQ ID NO: 130851 - RNA, 19 nt, Artificial Sequence
  Description of Artificial Sequence: Synthetic oligonucleotide
  Antisense strand to SEQ ID NO: 130850
ucugcccuuaagaaauccu

SEQ ID NO: 130852 - RNA, 19 nt, Artificial Sequence
  Description of Artificial Sequence: Synthetic oligonucleotide
  Sense strand starting at position 531 of SEQ ID NO: 1671
cuggauagcugcuauauuc

SEQ ID NO: 130853 - RNA, 19 nt, Artificial Sequence
  Description of Artificial Sequence: Synthetic oligonucleotide
  Antisense strand to SEQ ID NO: 130852
gaauauagcagcuauccag

SEQ ID NO: 130854 - RNA, 19 nt, Artificial Sequence
  Description of Artificial Sequence: Synthetic oligonucleotide
  Sense strand starting at position 347 of SEQ ID NO: 1671
ggcagcuucucugaaauca

SEQ ID NO: 130855 - RNA, 19 nt, Artificial Sequence
  Description of Artificial Sequence: Synthetic oligonucleotide
  Antisense strand to SEQ ID NO: 130854
ugauuucagagaagcugcc

SEQ ID NO: 130856 - RNA, 19 nt, Artificial Sequence
  Description of Artificial Sequence: Synthetic oligonucleotide
  Sense strand starting at position 345 of SEQ ID NO: 1671
gcggcagcuucucugaaau

SEQ ID NO: 130857 - RNA, 19 nt, Artificial Sequence
  Description of Artificial Sequence: Synthetic oligonucleotide
  Antisense strand to SEQ ID NO: 130856
auuucagagaagcugccgc

SEQ ID NO: 130858 - RNA, 19 nt, Artificial Sequence
  Description of Artificial Sequence: Synthetic oligonucleotide
  Sense strand starting at position 344 of SEQ ID NO: 1671
ggcggcagcuucucugaaa

SEQ ID NO: 130859 - RNA, 19 nt, Artificial Sequence
  Description of Artificial Sequence: Synthetic oligonucleotide
  Antisense strand to SEQ ID NO: 130858
uuucagagaagcugccgcc

SEQ ID NO: 130860 - RNA, 19 nt, Artificial Sequence
  Description of Artificial Sequence: Synthetic oligonucleotide
  Sense strand starting at position 275 of SEQ ID NO: 1671
ccaagcaggccugaauaga

SEQ ID NO: 130861 - RNA, 19 nt, Artificial Sequence
  Description of Artificial Sequence: Synthetic oligonucleotide
  Antisense strand to SEQ ID NO: 130860
ucuauucaggccugcuugg

SEQ ID NO: 130862 - RNA, 19 nt, Artificial Sequence
  Description of Artificial Sequence: Synthetic oligonucleotide
  Sense strand starting at position 217 of SEQ ID NO: 1671
gcuaucaguuuccauccau

SEQ ID NO: 130863 - RNA, 19 nt, Artificial Sequence
  Description of Artificial Sequence: Synthetic oligonucleotide
  Antisense strand to SEQ ID NO: 130862
auggauggaaacugauagc

SEQ ID NO: 130864 - RNA, 19 nt, Artificial Sequence
  Description of Artificial Sequence: Synthetic oligonucleotide
  Sense strand starting at position 132 of SEQ ID NO: 1671
cauagauagcugugaggau

SEQ ID NO: 130865 - RNA, 19 nt, Artificial Sequence
  Description of Artificial Sequence: Synthetic oligonucleotide
  Antisense strand to SEQ ID NO: 130864
auccucacagcuaucuaug

SEQ ID NO: 130866 - RNA, 19 nt, Artificial Sequence
  Description of Artificial Sequence: Synthetic oligonucleotide
  Sense strand starting at position 122 of SEQ ID NO: 1671
guacuuaccucauagauag

SEQ ID NO: 130867 - RNA, 19 nt, Artificial Sequence
  Description of Artificial Sequence: Synthetic oligonucleotide
  Antisense strand to SEQ ID NO: 130866
cuaucuaugagguaaguac

SEQ ID NO: 130868 - RNA, 19 nt, Artificial Sequence
  Description of Artificial Sequence: Synthetic oligonucleotide
  Sense strand starting at position 42 of SEQ ID NO: 1671
acacuaguugugcaaccau

SEQ ID NO: 130869 - RNA, 19 nt, Artificial Sequence
  Description of Artificial Sequence: Synthetic oligonucleotide
  Antisense strand to SEQ ID NO: 130868
augguugcacaacuagugu

SEQ ID NO: 130870 - RNA, 19 nt, Artificial Sequence
  Description of Artificial Sequence: Synthetic oligonucleotide
  Sense strand starting at position 3670 of SEQ ID NO: 1672
uugucuuucugagucccua

SEQ ID NO: 130871 - RNA, 19 nt, Artificial Sequence
  Description of Artificial Sequence: Synthetic oligonucleotide
  Antisense strand to SEQ ID NO: 130870
uagggacucagaaagacaa

SEQ ID NO: 130872 - RNA, 19 nt, Artificial Sequence
  Description of Artificial Sequence: Synthetic oligonucleotide
  Sense strand starting at position 3567 of SEQ ID NO: 1672
gagcauuuguauuaagcac

SEQ ID NO: 130873 - RNA, 19 nt, Artificial Sequence
  Description of Artificial Sequence: Synthetic oligonucleotide
  Antisense strand to SEQ ID NO: 130872
gugcuuaauacaaaugcuc

SEQ ID NO: 130874 - RNA, 19 nt, Artificial Sequence
  Description of Artificial Sequence: Synthetic oligonucleotide
  Sense strand starting at position 3146 of SEQ ID NO: 1672
caauguacccauggagagu

SEQ ID NO: 130875 - RNA, 19 nt, Artificial Sequence
  Description of Artificial Sequence: Synthetic oligonucleotide
  Antisense strand to SEQ ID NO: 130874
acucuccauggguacauug

SEQ ID NO: 130876 - RNA, 19 nt, Artificial Sequence
  Description of Artificial Sequence: Synthetic oligonucleotide
  Sense strand starting at position 3019 of SEQ ID NO: 1672
uuugguuggugauaggaua

SEQ ID NO: 130877 - RNA, 19 nt, Artificial Sequence
  Description of Artificial Sequence: Synthetic oligonucleotide
  Antisense strand to SEQ ID NO: 130876
uauccuaucaccaaccaaa

SEQ ID NO: 130878 - RNA, 19 nt, Artificial Sequence
  Description of Artificial Sequence: Synthetic oligonucleotide
  Sense strand starting at position 2622 of SEQ ID NO: 1672
uuugacaguuuguuuaaag

SEQ ID NO: 130879 - RNA, 19 nt, Artificial Sequence
  Description of Artificial Sequence: Synthetic oligonucleotide
  Antisense strand to SEQ ID NO: 130878
cuuuaaacaaacugucaaa

SEQ ID NO: 130880 - RNA, 19 nt, Artificial Sequence
  Description of Artificial Sequence: Synthetic oligonucleotide
  Sense strand starting at position 151 of SEQ ID NO: 1672
uuaauuccgaaguggaaau

SEQ ID NO: 130881 - RNA, 19 nt, Artificial Sequence
  Description of Artificial Sequence: Synthetic oligonucleotide
  Antisense strand to SEQ ID NO: 130880
auuuccacuucggaauuaa

SEQ ID NO: 130882 - RNA, 19 nt, Artificial Sequence
  Description of Artificial Sequence: Synthetic oligonucleotide
  Sense strand starting at position 64 of SEQ ID NO: 1672
uucgcuuugcaacagauau

SEQ ID NO: 130883 - RNA, 19 nt, Artificial Sequence
  Description of Artificial Sequence: Synthetic oligonucleotide
  Antisense strand to SEQ ID NO: 130882
auaucuguugcaaagcgaa

SEQ ID NO: 130884 - RNA, 19 nt, Artificial Sequence
  Description of Artificial Sequence: Synthetic oligonucleotide
  Sense strand starting at position 3250 of SEQ ID NO: 1673
guaauucaaggaugaaggu

SEQ ID NO: 130885 - RNA, 19 nt, Artificial Sequence
  Description of Artificial Sequence: Synthetic oligonucleotide
  Antisense strand to SEQ ID NO: 130884
accuucauccuugaauuac

SEQ ID NO: 130886 - RNA, 19 nt, Artificial Sequence
  Description of Artificial Sequence: Synthetic oligonucleotide
  Sense strand starting at position 2981 of SEQ ID NO: 1673
ugaguacaaucuuauaagc

SEQ ID NO: 130887 - RNA, 19 nt, Artificial Sequence
  Description of Artificial Sequence: Synthetic oligonucleotide
  Antisense strand to SEQ ID NO: 130886
gcuuauaagauuguacuca

SEQ ID NO: 130888 - RNA, 19 nt, Artificial Sequence
  Description of Artificial Sequence: Synthetic oligonucleotide
  Sense strand starting at position 2975 of SEQ ID NO: 1673
cuagcaugaguacaaucuu

SEQ ID NO: 130889 - RNA, 19 nt, Artificial Sequence
  Description of Artificial Sequence: Synthetic oligonucleotide
  Antisense strand to SEQ ID NO: 130888
aagauuguacucaugcuag

SEQ ID NO: 130890 - RNA, 19 nt, Artificial Sequence
  Description of Artificial Sequence: Synthetic oligonucleotide
  Sense strand starting at position 2972 of SEQ ID NO: 1673
ccucuagcaugaguacaau

SEQ ID NO: 130891 - RNA, 19 nt, Artificial Sequence
  Description of Artificial Sequence: Synthetic oligonucleotide
  Antisense strand to SEQ ID NO: 130890
auuguacucaugcuagagg

SEQ ID NO: 130892 - RNA, 19 nt, Artificial Sequence
  Description of Artificial Sequence: Synthetic oligonucleotide
  Sense strand starting at position 2177 of SEQ ID NO: 1673
gcagucacuuauugaagga

SEQ ID NO: 130893 - RNA, 19 nt, Artificial Sequence
  Description of Artificial Sequence: Synthetic oligonucleotide
  Antisense strand to SEQ ID NO: 130892
uccuucaauaagugacugc

SEQ ID NO: 130894 - RNA, 19 nt, Artificial Sequence
  Description of Artificial Sequence: Synthetic oligonucleotide
  Sense strand starting at position 862 of SEQ ID NO: 1673
agaaauguccuugguaauc

SEQ ID NO: 130895 - RNA, 19 nt, Artificial Sequence
  Description of Artificial Sequence: Synthetic oligonucleotide
  Antisense strand to SEQ ID NO: 130894
gauuaccaaggacauuucu

SEQ ID NO: 130896 - RNA, 19 nt, Artificial Sequence
  Description of Artificial Sequence: Synthetic oligonucleotide
  Sense strand starting at position 861 of SEQ ID NO: 1673
gagaaauguccuugguaau

SEQ ID NO: 130897 - RNA, 19 nt, Artificial Sequence
  Description of Artificial Sequence: Synthetic oligonucleotide
  Antisense strand to SEQ ID NO: 130896
auuaccaaggacauuucuc

SEQ ID NO: 130898 - RNA, 19 nt, Artificial Sequence
  Description of Artificial Sequence: Synthetic oligonucleotide
  Sense strand starting at position 860 of SEQ ID NO: 1673
agagaaauguccuugguaa

SEQ ID NO: 130899 - RNA, 19 nt, Artificial Sequence
  Description of Artificial Sequence: Synthetic oligonucleotide
  Antisense strand to SEQ ID NO: 130898
uuaccaaggacauuucucu

SEQ ID NO: 130900 - RNA, 19 nt, Artificial Sequence
  Description of Artificial Sequence: Synthetic oligonucleotide
  Sense strand starting at position 64 of SEQ ID NO: 1673
uuugcuuugcaacagauau

SEQ ID NO: 130901 - RNA, 19 nt, Artificial Sequence
  Description of Artificial Sequence: Synthetic oligonucleotide
  Antisense strand to SEQ ID NO: 130900
auaucuguugcaaagcaaa

SEQ ID NO: 130902 - RNA, 19 nt, Artificial Sequence
  Description of Artificial Sequence: Synthetic oligonucleotide
  Sense strand starting at position 59 of SEQ ID NO: 1673
acuuguuugcuuugcaaca

SEQ ID NO: 130903 - RNA, 19 nt, Artificial Sequence
  Description of Artificial Sequence: Synthetic oligonucleotide
  Antisense strand to SEQ ID NO: 130902
uguugcaaagcaaacaagu

SEQ ID NO: 130904 - RNA, 19 nt, Artificial Sequence
  Description of Artificial Sequence: Synthetic oligonucleotide
  Sense strand starting at position 57 of SEQ ID NO: 1673
ccacuuguuugcuuugcaa

SEQ ID NO: 130905 - RNA, 19 nt, Artificial Sequence
  Description of Artificial Sequence: Synthetic oligonucleotide
  Antisense strand to SEQ ID NO: 130904
uugcaaagcaaacaagugg

SEQ ID NO: 130906 - RNA, 19 nt, Artificial Sequence
  Description of Artificial Sequence: Synthetic oligonucleotide
  Sense strand starting at position 3451 of SEQ ID NO: 1674
gcuguuuauuagccuucua

SEQ ID NO: 130907 - RNA, 19 nt, Artificial Sequence
  Description of Artificial Sequence: Synthetic oligonucleotide
  Antisense strand to SEQ ID NO: 130906
uagaaggcuaauaaacagc

SEQ ID NO: 130908 - RNA, 19 nt, Artificial Sequence
  Description of Artificial Sequence: Synthetic oligonucleotide
  Sense strand starting at position 3230 of SEQ ID NO: 1674
gccuuuaucauagaggagu

SEQ ID NO: 130909 - RNA, 19 nt, Artificial Sequence
  Description of Artificial Sequence: Synthetic oligonucleotide
  Antisense strand to SEQ ID NO: 130908
acuccucuaugauaaaggc

SEQ ID NO: 130910 - RNA, 19 nt, Artificial Sequence
  Description of Artificial Sequence: Synthetic oligonucleotide
  Sense strand starting at position 2018 of SEQ ID NO: 1674
uguuguauaguugaaauca

SEQ ID NO: 130911 - RNA, 19 nt, Artificial Sequence
  Description of Artificial Sequence: Synthetic oligonucleotide
  Antisense strand to SEQ ID NO: 130910
ugauuucaacuauacaaca

SEQ ID NO: 130912 - RNA, 19 nt, Artificial Sequence
  Description of Artificial Sequence: Synthetic oligonucleotide
  Sense strand starting at position 2016 of SEQ ID NO: 1674
aguguuguauaguugaaau

SEQ ID NO: 130913 - RNA, 19 nt, Artificial Sequence
  Description of Artificial Sequence: Synthetic oligonucleotide
  Antisense strand to SEQ ID NO: 130912
auuucaacuauacaacacu

SEQ ID NO: 130914 - RNA, 19 nt, Artificial Sequence
  Description of Artificial Sequence: Synthetic oligonucleotide
  Sense strand starting at position 1023 of SEQ ID NO: 1674
cccaguuuacauuagaguu

SEQ ID NO: 130915 - RNA, 19 nt, Artificial Sequence
  Description of Artificial Sequence: Synthetic oligonucleotide
  Antisense strand to SEQ ID NO: 130914
aacucuaauguaaacuggg

SEQ ID NO: 130916 - RNA, 19 nt, Artificial Sequence
  Description of Artificial Sequence: Synthetic oligonucleotide
  Sense strand starting at position 718 of SEQ ID NO: 1674
aacaauguguuuggaugua

SEQ ID NO: 130917 - RNA, 19 nt, Artificial Sequence
  Description of Artificial Sequence: Synthetic oligonucleotide
  Antisense strand to SEQ ID NO: 130916
uacauccaaacacauuguu

SEQ ID NO: 130918 - RNA, 19 nt, Artificial Sequence
  Description of Artificial Sequence: Synthetic oligonucleotide
  Sense strand starting at position 1497 of SEQ ID NO: 1676
cuccguggcuuccacaaua

SEQ ID NO: 130919 - RNA, 19 nt, Artificial Sequence
  Description of Artificial Sequence: Synthetic oligonucleotide
  Antisense strand to SEQ ID NO: 130918
uauuguggaagccacggag

SEQ ID NO: 130920 - RNA, 19 nt, Artificial Sequence
  Description of Artificial Sequence: Synthetic oligonucleotide
  Sense strand starting at position 3400 of SEQ ID NO: 1676
ugcugaaccuauguguauu

SEQ ID NO: 130921 - RNA, 19 nt, Artificial Sequence
  Description of Artificial Sequence: Synthetic oligonucleotide
  Antisense strand to SEQ ID NO: 130920
aauacacauagguucagca

SEQ ID NO: 130922 - RNA, 19 nt, Artificial Sequence
  Description of Artificial Sequence: Synthetic oligonucleotide
  Sense strand starting at position 3451 of SEQ ID NO: 1674
gcuguuuauuagccuucua

SEQ ID NO: 130923 - RNA, 19 nt, Artificial Sequence
  Description of Artificial Sequence: Synthetic oligonucleotide
  Antisense strand to SEQ ID NO: 130922
uagaaggcuaauaaacagc

SEQ ID NO: 130924 - RNA, 19 nt, Artificial Sequence
  Description of Artificial Sequence: Synthetic oligonucleotide
  Sense strand starting at position 3230 of SEQ ID NO: 1674
gccuuuaucauagaggagu

SEQ ID NO: 130925 - RNA, 19 nt, Artificial Sequence
  Description of Artificial Sequence: Synthetic oligonucleotide
  Antisense strand to SEQ ID NO: 130924
acuccucuaugauaaaggc

SEQ ID NO: 130926 - RNA, 19 nt, Artificial Sequence
  Description of Artificial Sequence: Synthetic oligonucleotide
  Sense strand starting at position 2018 of SEQ ID NO: 1674
uguuguauaguugaaauca

SEQ ID NO: 130927 - RNA, 19 nt, Artificial Sequence
  Description of Artificial Sequence: Synthetic oligonucleotide
  Antisense strand to SEQ ID NO: 130926
ugauuucaacuauacaaca

SEQ ID NO: 130928 - RNA, 19 nt, Artificial Sequence
  Description of Artificial Sequence: Synthetic oligonucleotide
  Sense strand starting at position 2016 of SEQ ID NO: 1674
aguguuguauaguugaaau

SEQ ID NO: 130929 - RNA, 19 nt, Artificial Sequence
  Description of Artificial Sequence: Synthetic oligonucleotide
  Antisense strand to SEQ ID NO: 130928
auuucaacuauacaacacu

SEQ ID NO: 130930 - RNA, 19 nt, Artificial Sequence
  Description of Artificial Sequence: Synthetic oligonucleotide
  Sense strand starting at position 1023 of SEQ ID NO: 1674
cccaguuuacauuagaguu

SEQ ID NO: 130931 - RNA, 19 nt, Artificial Sequence
  Description of Artificial Sequence: Synthetic oligonucleotide
  Antisense strand to SEQ ID NO: 130930
aacucuaauguaaacuggg

SEQ ID NO: 130932 - RNA, 19 nt, Artificial Sequence
  Description of Artificial Sequence: Synthetic oligonucleotide
  Sense strand starting at position 718 of SEQ ID NO: 1674
aacaauguguuuggaugua

SEQ ID NO: 130933 - RNA, 19 nt, Artificial Sequence
  Description of Artificial Sequence: Synthetic oligonucleotide
  Antisense strand to SEQ ID NO: 130932
uacauccaaacacauuguu

SEQ ID NO: 130934 - RNA, 19 nt, Artificial Sequence
  Description of Artificial Sequence: Synthetic oligonucleotide
  Sense strand starting at position 1497 of SEQ ID NO: 1676
cuccguggcuuccacaaua

SEQ ID NO: 130935 - RNA, 19 nt, Artificial Sequence
  Description of Artificial Sequence: Synthetic oligonucleotide
  Antisense strand to SEQ ID NO: 130934
uauuguggaagccacggag

SEQ ID NO: 130936 - RNA, 19 nt, Artificial Sequence
  Description of Artificial Sequence: Synthetic oligonucleotide
  Sense strand starting at position 3400 of SEQ ID NO: 1676
ugcugaaccuauguguauu

SEQ ID NO: 130937 - RNA, 19 nt, Artificial Sequence
  Description of Artificial Sequence: Synthetic oligonucleotide
  Antisense strand to SEQ ID NO: 130936
aauacacauagguucagca

SEQ ID NO: 130938 - RNA, 19 nt, Artificial Sequence
  Description of Artificial Sequence: Synthetic oligonucleotide
  Sense strand starting at position 3451 of SEQ ID NO: 1674
gcuguuuauuagccuucua

SEQ ID NO: 130939 - RNA, 19 nt, Artificial Sequence
  Description of Artificial Sequence: Synthetic oligonucleotide
  Antisense strand to SEQ ID NO: 130938
uagaaggcuaauaaacagc

SEQ ID NO: 130940 - RNA, 19 nt, Artificial Sequence
  Description of Artificial Sequence: Synthetic oligonucleotide
  Sense strand starting at position 3230 of SEQ ID NO: 1674
gccuuuaucauagaggagu

SEQ ID NO: 130941 - RNA, 19 nt, Artificial Sequence
  Description of Artificial Sequence: Synthetic oligonucleotide
  Antisense strand to SEQ ID NO: 130940
acuccucuaugauaaaggc

SEQ ID NO: 130942 - RNA, 19 nt, Artificial Sequence
  Description of Artificial Sequence: Synthetic oligonucleotide
  Sense strand starting at position 2018 of SEQ ID NO: 1674
uguuguauaguugaaauca

SEQ ID NO: 130943 - RNA, 19 nt, Artificial Sequence
  Description of Artificial Sequence: Synthetic oligonucleotide
  Antisense strand to SEQ ID NO: 130942
ugauuucaacuauacaaca

SEQ ID NO: 130944 - RNA, 19 nt, Artificial Sequence
  Description of Artificial Sequence: Synthetic oligonucleotide
  Sense strand starting at position 2016 of SEQ ID NO: 1674
aguguuguauaguugaaau

SEQ ID NO: 130945 - RNA, 19 nt, Artificial Sequence
  Description of Artificial Sequence: Synthetic oligonucleotide
  Antisense strand to SEQ ID NO: 130944
auuucaacuauacaacacu

SEQ ID NO: 130946 - RNA, 19 nt, Artificial Sequence
  Description of Artificial Sequence: Synthetic oligonucleotide
  Sense strand starting at position 1023 of SEQ ID NO: 1674
cccaguuuacauuagaguu

SEQ ID NO: 130947 - RNA, 19 nt, Artificial Sequence
  Description of Artificial Sequence: Synthetic oligonucleotide
  Antisense strand to SEQ ID NO: 130946
aacucuaauguaaacuggg

SEQ ID NO: 130948 - RNA, 19 nt, Artificial Sequence
  Description of Artificial Sequence: Synthetic oligonucleotide
  Sense strand starting at position 718 of SEQ ID NO: 1674
aacaauguguuuggaugua

SEQ ID NO: 130949 - RNA, 19 nt, Artificial Sequence
  Description of Artificial Sequence: Synthetic oligonucleotide
  Antisense strand to SEQ ID NO: 130948
uacauccaaacacauuguu

SEQ ID NO: 130950 - RNA, 19 nt, Artificial Sequence
  Description of Artificial Sequence: Synthetic oligonucleotide
  Sense strand starting at position 1497 of SEQ ID NO: 1676
cuccguggcuuccacaaua

SEQ ID NO: 130951 - RNA, 19 nt, Artificial Sequence
  Description of Artificial Sequence: Synthetic oligonucleotide
  Antisense strand to SEQ ID NO: 130950
uauuguggaagccacggag

SEQ ID NO: 130952 - RNA, 19 nt, Artificial Sequence
  Description of Artificial Sequence: Synthetic oligonucleotide
  Sense strand starting at position 3400 of SEQ ID NO: 1676
ugcugaaccuauguguauu

SEQ ID NO: 130953 - RNA, 19 nt, Artificial Sequence
  Description of Artificial Sequence: Synthetic oligonucleotide
  Antisense strand to SEQ ID NO: 130952
aauacacauagguucagca

SEQ ID NO: 130954 - RNA, 19 nt, Artificial Sequence
  Description of Artificial Sequence: Synthetic oligonucleotide
  Sense strand starting at position 1750 of SEQ ID NO: 1677
gugccauuaggguguguga

SEQ ID NO: 130955 - RNA, 19 nt, Artificial Sequence
  Description of Artificial Sequence: Synthetic oligonucleotide
  Antisense strand to SEQ ID NO: 130954
ucacacacccuaauggcac

SEQ ID NO: 130956 - RNA, 19 nt, Artificial Sequence
  Description of Artificial Sequence: Synthetic oligonucleotide
  Sense strand starting at position 1752 of SEQ ID NO: 1677
gccauuagggugugugaag

SEQ ID NO: 130957 - RNA, 19 nt, Artificial Sequence
  Description of Artificial Sequence: Synthetic oligonucleotide
  Antisense strand to SEQ ID NO: 130956
cuucacacacccuaauggc

SEQ ID NO: 130958 - RNA, 19 nt, Artificial Sequence
  Description of Artificial Sequence: Synthetic oligonucleotide
  Sense strand starting at position 1753 of SEQ ID NO: 1677
ccauuagggugugugaagu

SEQ ID NO: 130959 - RNA, 19 nt, Artificial Sequence
  Description of Artificial Sequence: Synthetic oligonucleotide
  Antisense strand to SEQ ID NO: 130958
acuucacacacccuaaugg

SEQ ID NO: 130960 - RNA, 19 nt, Artificial Sequence
  Description of Artificial Sequence: Synthetic oligonucleotide
  Sense strand starting at position 1879 of SEQ ID NO: 1677
ggaaucuugucugcaaacu

SEQ ID NO: 130961 - RNA, 19 nt, Artificial Sequence
  Description of Artificial Sequence: Synthetic oligonucleotide
  Antisense strand to SEQ ID NO: 130960
aguuugcagacaagauucc

SEQ ID NO: 130962 - RNA, 19 nt, Artificial Sequence
  Description of Artificial Sequence: Synthetic oligonucleotide
  Sense strand starting at position 1880 of SEQ ID NO: 1677
gaaucuugucugcaaacug

SEQ ID NO: 130963 - RNA, 19 nt, Artificial Sequence
  Description of Artificial Sequence: Synthetic oligonucleotide
  Antisense strand to SEQ ID NO: 130962
caguuugcagacaagauuc

SEQ ID NO: 130964 - RNA, 19 nt, Artificial Sequence
  Description of Artificial Sequence: Synthetic oligonucleotide
  Sense strand starting at position 1889 of SEQ ID NO: 1677
cugcaaacuguuugaugga

SEQ ID NO: 130965 - RNA, 19 nt, Artificial Sequence
  Description of Artificial Sequence: Synthetic oligonucleotide
  Antisense strand to SEQ ID NO: 130964
uccaucaaacaguuugcag

SEQ ID NO: 130966 - RNA, 19 nt, Artificial Sequence
  Description of Artificial Sequence: Synthetic oligonucleotide
  Sense strand starting at position 1892 of SEQ ID NO: 1677
caaacuguuugauggagau

SEQ ID NO: 130967 - RNA, 19 nt, Artificial Sequence
  Description of Artificial Sequence: Synthetic oligonucleotide
  Antisense strand to SEQ ID NO: 130966
aucuccaucaaacaguuug

SEQ ID NO: 130968 - RNA, 19 nt, Artificial Sequence
  Description of Artificial Sequence: Synthetic oligonucleotide
  Sense strand starting at position 1995 of SEQ ID NO: 1677
ggcggcgucugcaaagaua

SEQ ID NO: 130969 - RNA, 19 nt, Artificial Sequence
  Description of Artificial Sequence: Synthetic oligonucleotide
  Antisense strand to SEQ ID NO: 130968
uaucuuugcagacgccgcc

SEQ ID NO: 130970 - RNA, 19 nt, Artificial Sequence
  Description of Artificial Sequence: Synthetic oligonucleotide
  Sense strand starting at position 2054 of SEQ ID NO: 1677
uagaaugucguauaguuga

SEQ ID NO: 130971 - RNA, 19 nt, Artificial Sequence
  Description of Artificial Sequence: Synthetic oligonucleotide
  Antisense strand to SEQ ID NO: 130970
ucaacuauacgacauucua

SEQ ID NO: 130972 - RNA, 19 nt, Artificial Sequence
  Description of Artificial Sequence: Synthetic oligonucleotide
  Sense strand starting at position 2218 of SEQ ID NO: 1677
gcagucacucauugaagga

SEQ ID NO: 130973 - RNA, 19 nt, Artificial Sequence
  Description of Artificial Sequence: Synthetic oligonucleotide
  Antisense strand to SEQ ID NO: 130972
uccuucaaugagugacugc

SEQ ID NO: 130974 - RNA, 19 nt, Artificial Sequence
  Description of Artificial Sequence: Synthetic oligonucleotide
  Sense strand starting at position 2646 of SEQ ID NO: 1677
uuugacuguuucuuuaaag

SEQ ID NO: 130975 - RNA, 19 nt, Artificial Sequence
  Description of Artificial Sequence: Synthetic oligonucleotide
  Antisense strand to SEQ ID NO: 130974
cuuuaaagaaacagucaaa

SEQ ID NO: 130976 - RNA, 19 nt, Artificial Sequence
  Description of Artificial Sequence: Synthetic oligonucleotide
  Sense strand starting at position 2657 of SEQ ID NO: 1677
cuuuaaaggucucaggcaa

SEQ ID NO: 130977 - RNA, 19 nt, Artificial Sequence
  Description of Artificial Sequence: Synthetic oligonucleotide
  Antisense strand to SEQ ID NO: 130976
uugccugagaccuuuaaag

SEQ ID NO: 130978 - RNA, 19 nt, Artificial Sequence
  Description of Artificial Sequence: Synthetic oligonucleotide
  Sense strand starting at position 3694 of SEQ ID NO: 1677
uugucuuucugagucccua

SEQ ID NO: 130979 - RNA, 19 nt, Artificial Sequence
  Description of Artificial Sequence: Synthetic oligonucleotide
  Antisense strand to SEQ ID NO: 130978
uagggacucagaaagacaa

SEQ ID NO: 130980 - RNA, 19 nt, Artificial Sequence
  Description of Artificial Sequence: Synthetic oligonucleotide
  Sense strand starting at position 3808 of SEQ ID NO: 1677
gcaacuucuuccuacugga

SEQ ID NO: 130981 - RNA, 19 nt, Artificial Sequence
  Description of Artificial Sequence: Synthetic oligonucleotide
  Antisense strand to SEQ ID NO: 130980
uccaguaggaagaaguugc

SEQ ID NO: 130982 - RNA, 19 nt, Artificial Sequence
  Description of Artificial Sequence: Synthetic oligonucleotide
  Sense strand starting at position 3610 of SEQ ID NO: 1678
agaguuacaugcucacauc

SEQ ID NO: 130983 - RNA, 19 nt, Artificial Sequence
  Description of Artificial Sequence: Synthetic oligonucleotide
  Antisense strand to SEQ ID NO: 130982
gaugugagcauguaacucu

SEQ ID NO: 130984 - RNA, 19 nt, Artificial Sequence
  Description of Artificial Sequence: Synthetic oligonucleotide
  Sense strand starting at position 3584 of SEQ ID NO: 1678
ugagaagcugcugaaguua

SEQ ID NO: 130985 - RNA, 19 nt, Artificial Sequence
  Description of Artificial Sequence: Synthetic oligonucleotide
  Antisense strand to SEQ ID NO: 130984
uaacuucagcagcuucuca

SEQ ID NO: 130986 - RNA, 19 nt, Artificial Sequence
  Description of Artificial Sequence: Synthetic oligonucleotide
  Sense strand starting at position 3556 of SEQ ID NO: 1678
guaagccuucuggaagauu

SEQ ID NO: 130987 - RNA, 19 nt, Artificial Sequence
  Description of Artificial Sequence: Synthetic oligonucleotide
  Antisense strand to SEQ ID NO: 130986
aaucuuccagaaggcuuac

SEQ ID NO: 130988 - RNA, 19 nt, Artificial Sequence
  Description of Artificial Sequence: Synthetic oligonucleotide
  Sense strand starting at position 3506 of SEQ ID NO: 1678
gggcauaucaggugggaaa

SEQ ID NO: 130989 - RNA, 19 nt, Artificial Sequence
  Description of Artificial Sequence: Synthetic oligonucleotide
  Antisense strand to SEQ ID NO: 130988
uuucccaccugauaugccc

SEQ ID NO: 130990 - RNA, 19 nt, Artificial Sequence
  Description of Artificial Sequence: Synthetic oligonucleotide
  Sense strand starting at position 3329 of SEQ ID NO: 1678
gguugacauagugguagga

SEQ ID NO: 130991 - RNA, 19 nt, Artificial Sequence
  Description of Artificial Sequence: Synthetic oligonucleotide
  Antisense strand to SEQ ID NO: 130990
uccuaccacuaugucaacc

SEQ ID NO: 130992 - RNA, 19 nt, Artificial Sequence
  Description of Artificial Sequence: Synthetic oligonucleotide
  Sense strand starting at position 3288 of SEQ ID NO: 1678
gaguaacaucuuggacuaa

SEQ ID NO: 130993 - RNA, 19 nt, Artificial Sequence
  Description of Artificial Sequence: Synthetic oligonucleotide
  Antisense strand to SEQ ID NO: 130992
uuaguccaagauguuacuc

SEQ ID NO: 130994 - RNA, 19 nt, Artificial Sequence
  Description of Artificial Sequence: Synthetic oligonucleotide
  Sense strand starting at position 3279 of SEQ ID NO: 1678
ugcaguuuagaguaacauc

SEQ ID NO: 130995 - RNA, 19 nt, Artificial Sequence
  Description of Artificial Sequence: Synthetic oligonucleotide
  Antisense strand to SEQ ID NO: 130994
gauguuacucuaaacugca

SEQ ID NO: 130996 - RNA, 19 nt, Artificial Sequence
  Description of Artificial Sequence: Synthetic oligonucleotide
  Sense strand starting at position 3274 of SEQ ID NO: 1678
aauggugcaguuuagagua

SEQ ID NO: 130997 - RNA, 19 nt, Artificial Sequence
  Description of Artificial Sequence: Synthetic oligonucleotide
  Antisense strand to SEQ ID NO: 130996
uacucuaaacugcaccauu

SEQ ID NO: 130998 - RNA, 19 nt, Artificial Sequence
  Description of Artificial Sequence: Synthetic oligonucleotide
  Sense strand starting at position 3239 of SEQ ID NO: 1678
ugaccaaggucugcagaau

SEQ ID NO: 130999 - RNA, 19 nt, Artificial Sequence
  Description of Artificial Sequence: Synthetic oligonucleotide
  Antisense strand to SEQ ID NO: 130998
auucugcagaccuugguca

SEQ ID NO: 131000 - RNA, 19 nt, Artificial Sequence
  Description of Artificial Sequence: Synthetic oligonucleotide
  Sense strand starting at position 3136 of SEQ ID NO: 1678
auaugagagggauguuucu

SEQ ID NO: 131001 - RNA, 19 nt, Artificial Sequence
  Description of Artificial Sequence: Synthetic oligonucleotide
  Antisense strand to SEQ ID NO: 131000
agaaacaucccucucauau

SEQ ID NO: 131002 - RNA, 19 nt, Artificial Sequence
  Description of Artificial Sequence: Synthetic oligonucleotide
  Sense strand starting at position 3049 of SEQ ID NO: 1678
auauaaagauguucucaug

SEQ ID NO: 131003 - RNA, 19 nt, Artificial Sequence
  Description of Artificial Sequence: Synthetic oligonucleotide
  Antisense strand to SEQ ID NO: 131002
caugagaacaucuuuauau

SEQ ID NO: 131004 - RNA, 19 nt, Artificial Sequence
  Description of Artificial Sequence: Synthetic oligonucleotide
  Sense strand starting at position 3032 of SEQ ID NO: 1678
ugccuagcaggauauugau

SEQ ID NO: 131005 - RNA, 19 nt, Artificial Sequence
  Description of Artificial Sequence: Synthetic oligonucleotide
  Antisense strand to SEQ ID NO: 131004
aucaauauccugcuaggca

SEQ ID NO: 131006 - RNA, 19 nt, Artificial Sequence
  Description of Artificial Sequence: Synthetic oligonucleotide
  Sense strand starting at position 2806 of SEQ ID NO: 1678
ugucuacucguguuagguu

SEQ ID NO: 131007 - RNA, 19 nt, Artificial Sequence
  Description of Artificial Sequence: Synthetic oligonucleotide
  Antisense strand to SEQ ID NO: 131006
aaccuaacacgaguagaca

SEQ ID NO: 131008 - RNA, 19 nt, Artificial Sequence
  Description of Artificial Sequence: Synthetic oligonucleotide
  Sense strand starting at position 2805 of SEQ ID NO: 1678
uugucuacucguguuaggu

SEQ ID NO: 131009 - RNA, 19 nt, Artificial Sequence
  Description of Artificial Sequence: Synthetic oligonucleotide
  Antisense strand to SEQ ID NO: 131008
accuaacacgaguagacaa

SEQ ID NO: 131010 - RNA, 19 nt, Artificial Sequence
  Description of Artificial Sequence: Synthetic oligonucleotide
  Sense strand starting at position 2186 of SEQ ID NO: 1678
ccgauuauuaugggcaaac

SEQ ID NO: 131011 - RNA, 19 nt, Artificial Sequence
  Description of Artificial Sequence: Synthetic oligonucleotide
  Antisense strand to SEQ ID NO: 131010
guuugcccauaauaaucgg

SEQ ID NO: 131012 - RNA, 19 nt, Artificial Sequence
  Description of Artificial Sequence: Synthetic oligonucleotide
  Sense strand starting at position 2176 of SEQ ID NO: 1678
ccgaaucaacccgauuauu

SEQ ID NO: 131013 - RNA, 19 nt, Artificial Sequence
  Description of Artificial Sequence: Synthetic oligonucleotide
  Antisense strand to SEQ ID NO: 131012
aauaaucggguugauucgg

SEQ ID NO: 131014 - RNA, 19 nt, Artificial Sequence
  Description of Artificial Sequence: Synthetic oligonucleotide
  Sense strand starting at position 2166 of SEQ ID NO: 1678
gaaaccuuggccgaaucaa

SEQ ID NO: 131015 - RNA, 19 nt, Artificial Sequence
  Description of Artificial Sequence: Synthetic oligonucleotide
  Antisense strand to SEQ ID NO: 131014
uugauucggccaagguuuc

SEQ ID NO: 131016 - RNA, 19 nt, Artificial Sequence
  Description of Artificial Sequence: Synthetic oligonucleotide
  Sense strand starting at position 2163 of SEQ ID NO: 1678
agggaaaccuuggccgaau

SEQ ID NO: 131017 - RNA, 19 nt, Artificial Sequence
  Description of Artificial Sequence: Synthetic oligonucleotide
  Antisense strand to SEQ ID NO: 131016
auucggccaagguuucccu

SEQ ID NO: 131018 - RNA, 19 nt, Artificial Sequence
  Description of Artificial Sequence: Synthetic oligonucleotide
  Sense strand starting at position 1602 of SEQ ID NO: 1678
ggcccaaaggugugaaaua

SEQ ID NO: 131019 - RNA, 19 nt, Artificial Sequence
  Description of Artificial Sequence: Synthetic oligonucleotide
  Antisense strand to SEQ ID NO: 131018
uauuucacaccuuugggcc

SEQ ID NO: 131020 - RNA, 19 nt, Artificial Sequence
  Description of Artificial Sequence: Synthetic oligonucleotide
  Sense strand starting at position 1569 of SEQ ID NO: 1678
ggcuguucacugcaaggga

SEQ ID NO: 131021 - RNA, 19 nt, Artificial Sequence
  Description of Artificial Sequence: Synthetic oligonucleotide
  Antisense strand to SEQ ID NO: 131020
ucccuugcagugaacagcc

SEQ ID NO: 131022 - RNA, 19 nt, Artificial Sequence
  Description of Artificial Sequence: Synthetic oligonucleotide
  Sense strand starting at position 1461 of SEQ ID NO: 1678
gggccauaauacuccuuua

SEQ ID NO: 131023 - RNA, 19 nt, Artificial Sequence
  Description of Artificial Sequence: Synthetic oligonucleotide
  Antisense strand to SEQ ID NO: 131022
uaaaggaguauuauggccc

SEQ ID NO: 131024 - RNA, 19 nt, Artificial Sequence
  Description of Artificial Sequence: Synthetic oligonucleotide
  Sense strand starting at position 1332 of SEQ ID NO: 1678
aagugugcuacugagguaa

SEQ ID NO: 131025 - RNA, 19 nt, Artificial Sequence
  Description of Artificial Sequence: Synthetic oligonucleotide
  Antisense strand to SEQ ID NO: 131024
uuaccucaguagcacacuu

SEQ ID NO: 131026 - RNA, 19 nt, Artificial Sequence
  Description of Artificial Sequence: Synthetic oligonucleotide
  Sense strand starting at position 1257 of SEQ ID NO: 1678
uccagauggaugggucauu

SEQ ID NO: 131027 - RNA, 19 nt, Artificial Sequence
  Description of Artificial Sequence: Synthetic oligonucleotide
  Antisense strand to SEQ ID NO: 131026
aaugacccauccaucugga

SEQ ID NO: 131028 - RNA, 19 nt, Artificial Sequence
  Description of Artificial Sequence: Synthetic oligonucleotide
  Sense strand starting at position 1249 of SEQ ID NO: 1678
cucgcuucuccagauggau

SEQ ID NO: 131029 - RNA, 19 nt, Artificial Sequence
  Description of Artificial Sequence: Synthetic oligonucleotide
  Antisense strand to SEQ ID NO: 131028
auccaucuggagaagcgag

SEQ ID NO: 131030 - RNA, 19 nt, Artificial Sequence
  Description of Artificial Sequence: Synthetic oligonucleotide
  Sense strand starting at position 1018 of SEQ ID NO: 1678
ucccacuguccucaggaua

SEQ ID NO: 131031 - RNA, 19 nt, Artificial Sequence
  Description of Artificial Sequence: Synthetic oligonucleotide
  Antisense strand to SEQ ID NO: 131030
uauccugaggacaguggga

SEQ ID NO: 131032 - RNA, 19 nt, Artificial Sequence
  Description of Artificial Sequence: Synthetic oligonucleotide
  Sense strand starting at position 946 of SEQ ID NO: 1678
agccaacuagaaugaucuu

SEQ ID NO: 131033 - RNA, 19 nt, Artificial Sequence
  Description of Artificial Sequence: Synthetic oligonucleotide
  Antisense strand to SEQ ID NO: 131032
aagaucauucuaguuggcu

SEQ ID NO: 131034 - RNA, 19 nt, Artificial Sequence
  Description of Artificial Sequence: Synthetic oligonucleotide
  Sense strand starting at position 876 of SEQ ID NO: 1678
caucuaguccugggauuac

SEQ ID NO: 131035 - RNA, 19 nt, Artificial Sequence
  Description of Artificial Sequence: Synthetic oligonucleotide
  Antisense strand to SEQ ID NO: 131034
guaaucccaggacuagaug

SEQ ID NO: 131036 - RNA, 19 nt, Artificial Sequence
  Description of Artificial Sequence: Synthetic oligonucleotide
  Sense strand starting at position 875 of SEQ ID NO: 1678
ucaucuaguccugggauua

SEQ ID NO: 131037 - RNA, 19 nt, Artificial Sequence
  Description of Artificial Sequence: Synthetic oligonucleotide
  Antisense strand to SEQ ID NO: 131036
uaaucccaggacuagauga

SEQ ID NO: 131038 - RNA, 19 nt, Artificial Sequence
  Description of Artificial Sequence: Synthetic oligonucleotide
  Sense strand starting at position 785 of SEQ ID NO: 1678
caguucuuuggguaaacaa

SEQ ID NO: 131039 - RNA, 19 nt, Artificial Sequence
  Description of Artificial Sequence: Synthetic oligonucleotide
  Antisense strand to SEQ ID NO: 131038
uuguuuacccaaagaacug

SEQ ID NO: 131040 - RNA, 19 nt, Artificial Sequence
  Description of Artificial Sequence: Synthetic oligonucleotide
  Sense strand starting at position 784 of SEQ ID NO: 1678
ucaguucuuuggguaaaca

SEQ ID NO: 131041 - RNA, 19 nt, Artificial Sequence
  Description of Artificial Sequence: Synthetic oligonucleotide
  Antisense strand to SEQ ID NO: 131040
uguuuacccaaagaacuga

SEQ ID NO: 131042 - RNA, 19 nt, Artificial Sequence
  Description of Artificial Sequence: Synthetic oligonucleotide
  Sense strand starting at position 553 of SEQ ID NO: 1678
ggauucugaacgugagaga

SEQ ID NO: 131043 - RNA, 19 nt, Artificial Sequence
  Description of Artificial Sequence: Synthetic oligonucleotide
  Antisense strand to SEQ ID NO: 131042
ucucucacguucagaaucc

SEQ ID NO: 131044 - RNA, 19 nt, Artificial Sequence
  Description of Artificial Sequence: Synthetic oligonucleotide
  Sense strand starting at position 551 of SEQ ID NO: 1678
gaggauucugaacgugaga

SEQ ID NO: 131045 - RNA, 19 nt, Artificial Sequence
  Description of Artificial Sequence: Synthetic oligonucleotide
  Antisense strand to SEQ ID NO: 131044
ucucacguucagaauccuc

SEQ ID NO: 131046 - RNA, 19 nt, Artificial Sequence
  Description of Artificial Sequence: Synthetic oligonucleotide
  Sense strand starting at position 506 of SEQ ID NO: 1678
agaauugugaugugacuuu

SEQ ID NO: 131047 - RNA, 19 nt, Artificial Sequence
  Description of Artificial Sequence: Synthetic oligonucleotide
  Antisense strand to SEQ ID NO: 131046
aaagucacaucacaauucu

SEQ ID NO: 131048 - RNA, 19 nt, Artificial Sequence
  Description of Artificial Sequence: Synthetic oligonucleotide
  Sense strand starting at position 473 of SEQ ID NO: 1678
aguguauacuaaccauauu

SEQ ID NO: 131049 - RNA, 19 nt, Artificial Sequence
  Description of Artificial Sequence: Synthetic oligonucleotide
  Antisense strand to SEQ ID NO: 131048
aauaugguuaguauacacu

SEQ ID NO: 131050 - RNA, 19 nt, Artificial Sequence
  Description of Artificial Sequence: Synthetic oligonucleotide
  Sense strand starting at position 465 of SEQ ID NO: 1678
uuaccuguaguguauacua

SEQ ID NO: 131051 - RNA, 19 nt, Artificial Sequence
  Description of Artificial Sequence: Synthetic oligonucleotide
  Antisense strand to SEQ ID NO: 131050
uaguauacacuacagguaa

SEQ ID NO: 131052 - RNA, 19 nt, Artificial Sequence
  Description of Artificial Sequence: Synthetic oligonucleotide
  Sense strand starting at position 460 of SEQ ID NO: 1678
ugaacuuaccuguagugua

SEQ ID NO: 131053 - RNA, 19 nt, Artificial Sequence
  Description of Artificial Sequence: Synthetic oligonucleotide
  Antisense strand to SEQ ID NO: 131052
uacacuacagguaaguuca

SEQ ID NO: 131054 - RNA, 19 nt, Artificial Sequence
  Description of Artificial Sequence: Synthetic oligonucleotide
  Sense strand starting at position 435 of SEQ ID NO: 1678
agaucacugucaccagaca

SEQ ID NO: 131055 - RNA, 19 nt, Artificial Sequence
  Description of Artificial Sequence: Synthetic oligonucleotide
  Antisense strand to SEQ ID NO: 131054
ugucuggugacagugaucu

SEQ ID NO: 131056 - RNA, 19 nt, Artificial Sequence
  Description of Artificial Sequence: Synthetic oligonucleotide
  Sense strand starting at position 325 of SEQ ID NO: 1678
ucccuacuggucuauugaa

SEQ ID NO: 131057 - RNA, 19 nt, Artificial Sequence
  Description of Artificial Sequence: Synthetic oligonucleotide
  Antisense strand to SEQ ID NO: 131056
uucaauagaccaguaggga

SEQ ID NO: 131058 - RNA, 19 nt, Artificial Sequence
  Description of Artificial Sequence: Synthetic oligonucleotide
  Sense strand starting at position 218 of SEQ ID NO: 1678
cccgcugccucauuuaaua

SEQ ID NO: 131059 - RNA, 19 nt, Artificial Sequence
  Description of Artificial Sequence: Synthetic oligonucleotide
  Antisense strand to SEQ ID NO: 131058
uauuaaaugaggcagcggg

SEQ ID NO: 131060 - RNA, 19 nt, Artificial Sequence
  Description of Artificial Sequence: Synthetic oligonucleotide
  Sense strand starting at position 42 of SEQ ID NO: 1678
aaucauaugcaagguugau

SEQ ID NO: 131061 - RNA, 19 nt, Artificial Sequence
  Description of Artificial Sequence: Synthetic oligonucleotide
  Antisense strand to SEQ ID NO: 131060
aucaaccuugcauaugauu

SEQ ID NO: 131062 - RNA, 19 nt, Artificial Sequence
  Description of Artificial Sequence: Synthetic oligonucleotide
  Sense strand starting at position 3655 of SEQ ID NO: 1679
gcucaaggagguugaguaa

SEQ ID NO: 131063 - RNA, 19 nt, Artificial Sequence
  Description of Artificial Sequence: Synthetic oligonucleotide
  Antisense strand to SEQ ID NO: 131062
uuacucaaccuccuugagc

SEQ ID NO: 131064 - RNA, 19 nt, Artificial Sequence
  Description of Artificial Sequence: Synthetic oligonucleotide
  Sense strand starting at position 3473 of SEQ ID NO: 1679
uguugaugagguugugaaa

SEQ ID NO: 131065 - RNA, 19 nt, Artificial Sequence
  Description of Artificial Sequence: Synthetic oligonucleotide
  Antisense strand to SEQ ID NO: 131064
uuucacaaccucaucaaca

SEQ ID NO: 131066 - RNA, 19 nt, Artificial Sequence
  Description of Artificial Sequence: Synthetic oligonucleotide
  Sense strand starting at position 3253 of SEQ ID NO: 1679
agcucuguugucugagaaa

SEQ ID NO: 131067 - RNA, 19 nt, Artificial Sequence
  Description of Artificial Sequence: Synthetic oligonucleotide
  Antisense strand to SEQ ID NO: 131066
uuucucagacaacagagcu

SEQ ID NO: 131068 - RNA, 19 nt, Artificial Sequence
  Description of Artificial Sequence: Synthetic oligonucleotide
  Sense strand starting at position 2929 of SEQ ID NO: 1679
ucagaucacugguuuguuu

SEQ ID NO: 131069 - RNA, 19 nt, Artificial Sequence
  Description of Artificial Sequence: Synthetic oligonucleotide
  Antisense strand to SEQ ID NO: 131068
aaacaaaccagugaucuga

SEQ ID NO: 131070 - RNA, 19 nt, Artificial Sequence
  Description of Artificial Sequence: Synthetic oligonucleotide
  Sense strand starting at position 2910 of SEQ ID NO: 1679
uaaaguagcccuuggucau

SEQ ID NO: 131071 - RNA, 19 nt, Artificial Sequence
  Description of Artificial Sequence: Synthetic oligonucleotide
  Antisense strand to SEQ ID NO: 131070
augaccaagggcuacuuua

SEQ ID NO: 131072 - RNA, 19 nt, Artificial Sequence
  Description of Artificial Sequence: Synthetic oligonucleotide
  Sense strand starting at position 2870 of SEQ ID NO: 1679
cccagauguuaccuccuga

SEQ ID NO: 131073 - RNA, 19 nt, Artificial Sequence
  Description of Artificial Sequence: Synthetic oligonucleotide
  Antisense strand to SEQ ID NO: 131072
ucaggagguaacaucuggg

SEQ ID NO: 131074 - RNA, 19 nt, Artificial Sequence
  Description of Artificial Sequence: Synthetic oligonucleotide
  Sense strand starting at position 2829 of SEQ ID NO: 1679
augcgugugggaaguaaug

SEQ ID NO: 131075 - RNA, 19 nt, Artificial Sequence
  Description of Artificial Sequence: Synthetic oligonucleotide
  Antisense strand to SEQ ID NO: 131074
cauuacuucccacacgcau

SEQ ID NO: 131076 - RNA, 19 nt, Artificial Sequence
  Description of Artificial Sequence: Synthetic oligonucleotide
  Sense strand starting at position 2756 of SEQ ID NO: 1679
guuacuucugucugaaaua

SEQ ID NO: 131077 - RNA, 19 nt, Artificial Sequence
  Description of Artificial Sequence: Synthetic oligonucleotide
  Antisense strand to SEQ ID NO: 131076
uauuucagacagaaguaac

SEQ ID NO: 131078 - RNA, 19 nt, Artificial Sequence
  Description of Artificial Sequence: Synthetic oligonucleotide
  Sense strand starting at position 2755 of SEQ ID NO: 1679
uguuacuucugucugaaau

SEQ ID NO: 131079 - RNA, 19 nt, Artificial Sequence
  Description of Artificial Sequence: Synthetic oligonucleotide
  Antisense strand to SEQ ID NO: 131078
auuucagacagaaguaaca

SEQ ID NO: 131080 - RNA, 19 nt, Artificial Sequence
  Description of Artificial Sequence: Synthetic oligonucleotide
  Sense strand starting at position 2734 of SEQ ID NO: 1679
ucuuuagggcuuuguaaua

SEQ ID NO: 131081 - RNA, 19 nt, Artificial Sequence
  Description of Artificial Sequence: Synthetic oligonucleotide
  Antisense strand to SEQ ID NO: 131080
uauuacaaagcccuaaaga

SEQ ID NO: 131082 - RNA, 19 nt, Artificial Sequence
  Description of Artificial Sequence: Synthetic oligonucleotide
  Sense strand starting at position 2631 of SEQ ID NO: 1679
gcauuuaucuggcuaucac

SEQ ID NO: 131083 - RNA, 19 nt, Artificial Sequence
  Description of Artificial Sequence: Synthetic oligonucleotide
  Antisense strand to SEQ ID NO: 131082
gugauagccagauaaaugc

SEQ ID NO: 131084 - RNA, 19 nt, Artificial Sequence
  Description of Artificial Sequence: Synthetic oligonucleotide
  Sense strand starting at position 2627 of SEQ ID NO: 1679
cagugcauuuaucuggcua

SEQ ID NO: 131085 - RNA, 19 nt, Artificial Sequence
  Description of Artificial Sequence: Synthetic oligonucleotide
  Antisense strand to SEQ ID NO: 131084
uagccagauaaaugcacug

SEQ ID NO: 131086 - RNA, 19 nt, Artificial Sequence
  Description of Artificial Sequence: Synthetic oligonucleotide
  Sense strand starting at position 2400 of SEQ ID NO: 1679
caggcuugcuaaguaaaua

SEQ ID NO: 131087 - RNA, 19 nt, Artificial Sequence
  Description of Artificial Sequence: Synthetic oligonucleotide
  Antisense strand to SEQ ID NO: 131086
uauuuacuuagcaagccug

SEQ ID NO: 131088 - RNA, 19 nt, Artificial Sequence
  Description of Artificial Sequence: Synthetic oligonucleotide
  Sense strand starting at position 2369 of SEQ ID NO: 1679
auccucagcguuuagaaca

SEQ ID NO: 131089 - RNA, 19 nt, Artificial Sequence
  Description of Artificial Sequence: Synthetic oligonucleotide
  Antisense strand to SEQ ID NO: 131088
uguucuaaacgcugaggau

SEQ ID NO: 131090 - RNA, 19 nt, Artificial Sequence
  Description of Artificial Sequence: Synthetic oligonucleotide
  Sense strand starting at position 2206 of SEQ ID NO: 1679
ggcaguacaaguugaucuu

SEQ ID NO: 131091 - RNA, 19 nt, Artificial Sequence
  Description of Artificial Sequence: Synthetic oligonucleotide
  Antisense strand to SEQ ID NO: 131090
aagaucaacuuguacugcc

SEQ ID NO: 131092 - RNA, 19 nt, Artificial Sequence
  Description of Artificial Sequence: Synthetic oligonucleotide
  Sense strand starting at position 2140 of SEQ ID NO: 1679
ggaggaaagccuugacauc

SEQ ID NO: 131093 - RNA, 19 nt, Artificial Sequence
  Description of Artificial Sequence: Synthetic oligonucleotide
  Antisense strand to SEQ ID NO: 131092
gaugucaaggcuuuccucc

SEQ ID NO: 131094 - RNA, 19 nt, Artificial Sequence
  Description of Artificial Sequence: Synthetic oligonucleotide
  Sense strand starting at position 1738 of SEQ ID NO: 1679
cgguagguucgggugcaau

SEQ ID NO: 131095 - RNA, 19 nt, Artificial Sequence
  Description of Artificial Sequence: Synthetic oligonucleotide
  Antisense strand to SEQ ID NO: 131094
auugcacccgaaccuaccg

SEQ ID NO: 131096 - RNA, 19 nt, Artificial Sequence
  Description of Artificial Sequence: Synthetic oligonucleotide
  Sense strand starting at position 1455 of SEQ ID NO: 1679
ggagcacguccuuaccuaa

SEQ ID NO: 131097 - RNA, 19 nt, Artificial Sequence
  Description of Artificial Sequence: Synthetic oligonucleotide
  Antisense strand to SEQ ID NO: 131096
uuagguaaggacgugcucc

SEQ ID NO: 131098 - RNA, 19 nt, Artificial Sequence
  Description of Artificial Sequence: Synthetic oligonucleotide
  Sense strand starting at position 1424 of SEQ ID NO: 1679
cgacuucugccucagcuaa

SEQ ID NO: 131099 - RNA, 19 nt, Artificial Sequence
  Description of Artificial Sequence: Synthetic oligonucleotide
  Antisense strand to SEQ ID NO: 131098
uuagcugaggcagaagucg

SEQ ID NO: 131100 - RNA, 19 nt, Artificial Sequence
  Description of Artificial Sequence: Synthetic oligonucleotide
  Sense strand starting at position 1299 of SEQ ID NO: 1679
guaaauuaacacgggaaca

SEQ ID NO: 131101 - RNA, 19 nt, Artificial Sequence
  Description of Artificial Sequence: Synthetic oligonucleotide
  Antisense strand to SEQ ID NO: 131100
uguucccguguuaauuuac

SEQ ID NO: 131102 - RNA, 19 nt, Artificial Sequence
  Description of Artificial Sequence: Synthetic oligonucleotide
  Sense strand starting at position 1286 of SEQ ID NO: 1679
acagacuaacaacguaaau

SEQ ID NO: 131103 - RNA, 19 nt, Artificial Sequence
  Description of Artificial Sequence: Synthetic oligonucleotide
  Antisense strand to SEQ ID NO: 131102
auuuacguuguuagucugu

SEQ ID NO: 131104 - RNA, 19 nt, Artificial Sequence
  Description of Artificial Sequence: Synthetic oligonucleotide
  Sense strand starting at position 1197 of SEQ ID NO: 1679
ucgugagcgccucuaaaua

SEQ ID NO: 131105 - RNA, 19 nt, Artificial Sequence
  Description of Artificial Sequence: Synthetic oligonucleotide
  Antisense strand to SEQ ID NO: 131104
uauuuagaggcgcucacga

SEQ ID NO: 131106 - RNA, 19 nt, Artificial Sequence
  Description of Artificial Sequence: Synthetic oligonucleotide
  Sense strand starting at position 1195 of SEQ ID NO: 1679
agucgugagcgccucuaaa

SEQ ID NO: 131107 - RNA, 19 nt, Artificial Sequence
  Description of Artificial Sequence: Synthetic oligonucleotide
  Antisense strand to SEQ ID NO: 131106
uuuagaggcgcucacgacu

SEQ ID NO: 131108 - RNA, 19 nt, Artificial Sequence
  Description of Artificial Sequence: Synthetic oligonucleotide
  Sense strand starting at position 765 of SEQ ID NO: 1679
aggaaauauuucugaaaga

SEQ ID NO: 131109 - RNA, 19 nt, Artificial Sequence
  Description of Artificial Sequence: Synthetic oligonucleotide
  Antisense strand to SEQ ID NO: 131108
ucuuucagaaauauuuccu

SEQ ID NO: 131110 - RNA, 19 nt, Artificial Sequence
  Description of Artificial Sequence: Synthetic oligonucleotide
  Sense strand starting at position 597 of SEQ ID NO: 1679
uuguaaagaugaguaguuu

SEQ ID NO: 131111 - RNA, 19 nt, Artificial Sequence
  Description of Artificial Sequence: Synthetic oligonucleotide
  Antisense strand to SEQ ID NO: 131110
aaacuacucaucuuuacaa

SEQ ID NO: 131112 - RNA, 19 nt, Artificial Sequence
  Description of Artificial Sequence: Synthetic oligonucleotide
  Sense strand starting at position 557 of SEQ ID NO: 1679
ucugcauucgcacaaacaa

SEQ ID NO: 131113 - RNA, 19 nt, Artificial Sequence
  Description of Artificial Sequence: Synthetic oligonucleotide
  Antisense strand to SEQ ID NO: 131112
uuguuugugcgaaugcaga

SEQ ID NO: 131114 - RNA, 19 nt, Artificial Sequence
  Description of Artificial Sequence: Synthetic oligonucleotide
  Sense strand starting at position 523 of SEQ ID NO: 1679
gcacuuuaggauuacaagu

SEQ ID NO: 131115 - RNA, 19 nt, Artificial Sequence
  Description of Artificial Sequence: Synthetic oligonucleotide
  Antisense strand to SEQ ID NO: 131114
acuuguaauccuaaagugc

SEQ ID NO: 131116 - RNA, 19 nt, Artificial Sequence
  Description of Artificial Sequence: Synthetic oligonucleotide
  Sense strand starting at position 517 of SEQ ID NO: 1679
uuauaugcacuuuaggauu

SEQ ID NO: 131117 - RNA, 19 nt, Artificial Sequence
  Description of Artificial Sequence: Synthetic oligonucleotide
  Antisense strand to SEQ ID NO: 131116
aauccuaaagugcauauaa

SEQ ID NO: 131118 - RNA, 19 nt, Artificial Sequence
  Description of Artificial Sequence: Synthetic oligonucleotide
  Sense strand starting at position 447 of SEQ ID NO: 1679
augauuauccuuggacaau

SEQ ID NO: 131119 - RNA, 19 nt, Artificial Sequence
  Description of Artificial Sequence: Synthetic oligonucleotide
  Antisense strand to SEQ ID NO: 131118
auuguccaaggauaaucau

SEQ ID NO: 131120 - RNA, 19 nt, Artificial Sequence
  Description of Artificial Sequence: Synthetic oligonucleotide
  Sense strand starting at position 406 of SEQ ID NO: 1679
aaaugagacuaaguguuga

SEQ ID NO: 131121 - RNA, 19 nt, Artificial Sequence
  Description of Artificial Sequence: Synthetic oligonucleotide
  Antisense strand to SEQ ID NO: 131120
ucaacacuuagucucauuu

SEQ ID NO: 131122 - RNA, 19 nt, Artificial Sequence
  Description of Artificial Sequence: Synthetic oligonucleotide
  Sense strand starting at position 354 of SEQ ID NO: 1679
gugcuaacauuguuacuaa

SEQ ID NO: 131123 - RNA, 19 nt, Artificial Sequence
  Description of Artificial Sequence: Synthetic oligonucleotide
  Antisense strand to SEQ ID NO: 131122
uuaguaacaauguuagcac

SEQ ID NO: 131124 - RNA, 19 nt, Artificial Sequence
  Description of Artificial Sequence: Synthetic oligonucleotide
  Sense strand starting at position 330 of SEQ ID NO: 1679
gcucuaaagcugugauaua

SEQ ID NO: 131125 - RNA, 19 nt, Artificial Sequence
  Description of Artificial Sequence: Synthetic oligonucleotide
  Antisense strand to SEQ ID NO: 131124
uauaucacagcuuuagagc

SEQ ID NO: 131126 - RNA, 19 nt, Artificial Sequence
  Description of Artificial Sequence: Synthetic oligonucleotide
  Sense strand starting at position 164 of SEQ ID NO: 1679
gagaauuuaugugaaaugu

SEQ ID NO: 131127 - RNA, 19 nt, Artificial Sequence
  Description of Artificial Sequence: Synthetic oligonucleotide
  Antisense strand to SEQ ID NO: 131126
acauuucacauaaauucuc

SEQ ID NO: 131128 - RNA, 19 nt, Artificial Sequence
  Description of Artificial Sequence: Synthetic oligonucleotide
  Sense strand starting at position 124 of SEQ ID NO: 1679
agagcaaggguuugaugua

SEQ ID NO: 131129 - RNA, 19 nt, Artificial Sequence
  Description of Artificial Sequence: Synthetic oligonucleotide
  Antisense strand to SEQ ID NO: 131128
uacaucaaacccuugcucu

SEQ ID NO: 131130 - RNA, 19 nt, Artificial Sequence
  Description of Artificial Sequence: Synthetic oligonucleotide
  Sense strand starting at position 95 of SEQ ID NO: 1679
cugaaagcuuacuugccaa

SEQ ID NO: 131131 - RNA, 19 nt, Artificial Sequence
  Description of Artificial Sequence: Synthetic oligonucleotide
  Antisense strand to SEQ ID NO: 131130
uuggcaaguaagcuuucag

SEQ ID NO: 131132 - RNA, 19 nt, Artificial Sequence
  Description of Artificial Sequence: Synthetic oligonucleotide
  Sense strand starting at position 64 of SEQ ID NO: 1679
cugguaccugaacaguaau

SEQ ID NO: 131133 - RNA, 19 nt, Artificial Sequence
  Description of Artificial Sequence: Synthetic oligonucleotide
  Antisense strand to SEQ ID NO: 131132
auuacuguucagguaccag

SEQ ID NO: 131134 - RNA, 19 nt, Artificial Sequence
  Description of Artificial Sequence: Synthetic oligonucleotide
  Sense strand starting at position 51 of SEQ ID NO: 1679
ucaagugcaugaucuggua

SEQ ID NO: 131135 - RNA, 19 nt, Artificial Sequence
  Description of Artificial Sequence: Synthetic oligonucleotide
  Antisense strand to SEQ ID NO: 131134
uaccagaucaugcacuuga

SEQ ID NO: 131136 - RNA, 19 nt, Artificial Sequence
  Description of Artificial Sequence: Synthetic oligonucleotide
  Sense strand starting at position 36 of SEQ ID NO: 1679
gcauguuagaguugaucaa

SEQ ID NO: 131137 - RNA, 19 nt, Artificial Sequence
  Description of Artificial Sequence: Synthetic oligonucleotide
  Antisense strand to SEQ ID NO: 131136
uugaucaacucuaacaugc

SEQ ID NO: 131138 - RNA, 19 nt, Artificial Sequence
  Description of Artificial Sequence: Synthetic oligonucleotide
  Sense strand starting at position 27 of SEQ ID NO: 1679
uaaauuagggcauguuaga

SEQ ID NO: 131139 - RNA, 19 nt, Artificial Sequence
  Description of Artificial Sequence: Synthetic oligonucleotide
  Antisense strand to SEQ ID NO: 131138
ucuaacaugcccuaauuua

SEQ ID NO: 131140 - RNA, 19 nt, Artificial Sequence
  Description of Artificial Sequence: Synthetic oligonucleotide
  Sense strand starting at position 25 of SEQ ID NO: 1679
uauaaauuagggcauguua

SEQ ID NO: 131141 - RNA, 19 nt, Artificial Sequence
  Description of Artificial Sequence: Synthetic oligonucleotide
  Antisense strand to SEQ ID NO: 131140
uaacaugcccuaauuuaua

SEQ ID NO: 131142 - RNA, 19 nt, Artificial Sequence
  Description of Artificial Sequence: Synthetic oligonucleotide
  Sense strand starting at position 1 of SEQ ID NO: 1680
gcuuacaugguagaaucua

SEQ ID NO: 131143 - RNA, 19 nt, Artificial Sequence
  Description of Artificial Sequence: Synthetic oligonucleotide
  Antisense strand to SEQ ID NO: 131142
uagauucuaccauguaagc

SEQ ID NO: 131144 - RNA, 19 nt, Artificial Sequence
  Description of Artificial Sequence: Synthetic oligonucleotide
  Sense strand starting at position 40 of SEQ ID NO: 1680
gguucugugccagaaggua

SEQ ID NO: 131145 - RNA, 19 nt, Artificial Sequence
  Description of Artificial Sequence: Synthetic oligonucleotide
  Antisense strand to SEQ ID NO: 131144
uaccuucuggcacagaacc

SEQ ID NO: 131146 - RNA, 19 nt, Artificial Sequence
  Description of Artificial Sequence: Synthetic oligonucleotide
  Sense strand starting at position 56 of SEQ ID NO: 1680
guagauagccagugaguuc

SEQ ID NO: 131147 - RNA, 19 nt, Artificial Sequence
  Description of Artificial Sequence: Synthetic oligonucleotide
  Antisense strand to SEQ ID NO: 131146
gaacucacuggcuaucuac

SEQ ID NO: 131148 - RNA, 19 nt, Artificial Sequence
  Description of Artificial Sequence: Synthetic oligonucleotide
  Sense strand starting at position 83 of SEQ ID NO: 1680
uuccgcauggcucagauuu

SEQ ID NO: 131149 - RNA, 19 nt, Artificial Sequence
  Description of Artificial Sequence: Synthetic oligonucleotide
  Antisense strand to SEQ ID NO: 131148
aaaucugagccaugcggaa

SEQ ID NO: 131150 - RNA, 19 nt, Artificial Sequence
  Description of Artificial Sequence: Synthetic oligonucleotide
  Sense strand starting at position 85 of SEQ ID NO: 1680
ccgcauggcucagauuuaa

SEQ ID NO: 131151 - RNA, 19 nt, Artificial Sequence
  Description of Artificial Sequence: Synthetic oligonucleotide
  Antisense strand to SEQ ID NO: 131150
uuaaaucugagccaugcgg

SEQ ID NO: 131152 - RNA, 19 nt, Artificial Sequence
  Description of Artificial Sequence: Synthetic oligonucleotide
  Sense strand starting at position 134 of SEQ ID NO: 1680
gucacugugucucugggaa

SEQ ID NO: 131153 - RNA, 19 nt, Artificial Sequence
  Description of Artificial Sequence: Synthetic oligonucleotide
  Antisense strand to SEQ ID NO: 131152
uucccagagacacagugac

SEQ ID NO: 131154 - RNA, 19 nt, Artificial Sequence
  Description of Artificial Sequence: Synthetic oligonucleotide
  Sense strand starting at position 200 of SEQ ID NO: 1680
guaacacuccuccgaccuu

SEQ ID NO: 131155 - RNA, 19 nt, Artificial Sequence
  Description of Artificial Sequence: Synthetic oligonucleotide
  Antisense strand to SEQ ID NO: 131154
aaggucggaggaguguuac

SEQ ID NO: 131156 - RNA, 19 nt, Artificial Sequence
  Description of Artificial Sequence: Synthetic oligonucleotide
  Sense strand starting at position 257 of SEQ ID NO: 1680
ugccgacucuugccagcau

SEQ ID NO: 131157 - RNA, 19 nt, Artificial Sequence
  Description of Artificial Sequence: Synthetic oligonucleotide
  Antisense strand to SEQ ID NO: 131156
augcuggcaagagucggca

SEQ ID NO: 131158 - RNA, 19 nt, Artificial Sequence
  Description of Artificial Sequence: Synthetic oligonucleotide
  Sense strand starting at position 261 of SEQ ID NO: 1680
gacucuugccagcauugau

SEQ ID NO: 131159 - RNA, 19 nt, Artificial Sequence
  Description of Artificial Sequence: Synthetic oligonucleotide
  Antisense strand to SEQ ID NO: 131158
aucaaugcuggcaagaguc

SEQ ID NO: 131160 - RNA, 19 nt, Artificial Sequence
  Description of Artificial Sequence: Synthetic oligonucleotide
  Sense strand starting at position 319 of SEQ ID NO: 1680
cagaccagguccuggaaua

SEQ ID NO: 131161 - RNA, 19 nt, Artificial Sequence
  Description of Artificial Sequence: Synthetic oligonucleotide
  Antisense strand to SEQ ID NO: 131160
uauuccaggaccuggucug

SEQ ID NO: 131162 - RNA, 19 nt, Artificial Sequence
  Description of Artificial Sequence: Synthetic oligonucleotide
  Sense strand starting at position 755 of SEQ ID NO: 1680
aguuucugcugccuuaaca

SEQ ID NO: 131163 - RNA, 19 nt, Artificial Sequence
  Description of Artificial Sequence: Synthetic oligonucleotide
  Antisense strand to SEQ ID NO: 131162
uguuaaggcagcagaaacu

SEQ ID NO: 131164 - RNA, 19 nt, Artificial Sequence
  Description of Artificial Sequence: Synthetic oligonucleotide
  Sense strand starting at position 763 of SEQ ID NO: 1680
cugccuuaacaaugaggaa

SEQ ID NO: 131165 - RNA, 19 nt, Artificial Sequence
  Description of Artificial Sequence: Synthetic oligonucleotide
  Antisense strand to SEQ ID NO: 131164
uuccucauuguuaaggcag

SEQ ID NO: 131166 - RNA, 19 nt, Artificial Sequence
  Description of Artificial Sequence: Synthetic oligonucleotide
  Sense strand starting at position 1157 of SEQ ID NO: 1680
ggcuauuucugggugugga

SEQ ID NO: 131167 - RNA, 19 nt, Artificial Sequence
  Description of Artificial Sequence: Synthetic oligonucleotide
  Antisense strand to SEQ ID NO: 131166
uccacacccagaaauagcc

SEQ ID NO: 131168 - RNA, 19 nt, Artificial Sequence
  Description of Artificial Sequence: Synthetic oligonucleotide
  Sense strand starting at position 1158 of SEQ ID NO: 1680
gcuauuucuggguguggag

SEQ ID NO: 131169 - RNA, 19 nt, Artificial Sequence
  Description of Artificial Sequence: Synthetic oligonucleotide
  Antisense strand to SEQ ID NO: 131168
cuccacacccagaaauagc

SEQ ID NO: 131170 - RNA, 19 nt, Artificial Sequence
  Description of Artificial Sequence: Synthetic oligonucleotide
  Sense strand starting at position 1754 of SEQ ID NO: 1680
gcagaaaggucggucugga

SEQ ID NO: 131171 - RNA, 19 nt, Artificial Sequence
  Description of Artificial Sequence: Synthetic oligonucleotide
  Antisense strand to SEQ ID NO: 131170
uccagaccgaccuuucugc

SEQ ID NO: 131172 - RNA, 19 nt, Artificial Sequence
  Description of Artificial Sequence: Synthetic oligonucleotide
  Sense strand starting at position 2253 of SEQ ID NO: 1680
uuauuucagccgugcgcua

SEQ ID NO: 131173 - RNA, 19 nt, Artificial Sequence
  Description of Artificial Sequence: Synthetic oligonucleotide
  Antisense strand to SEQ ID NO: 131172
uagcgcacggcugaaauaa

SEQ ID NO: 131174 - RNA, 19 nt, Artificial Sequence
  Description of Artificial Sequence: Synthetic oligonucleotide
  Sense strand starting at position 2258 of SEQ ID NO: 1680
ucagccgugcgcuagauua

SEQ ID NO: 131175 - RNA, 19 nt, Artificial Sequence
  Description of Artificial Sequence: Synthetic oligonucleotide
  Antisense strand to SEQ ID NO: 131174
uaaucuagcgcacggcuga

SEQ ID NO: 131176 - RNA, 19 nt, Artificial Sequence
  Description of Artificial Sequence: Synthetic oligonucleotide
  Sense strand starting at position 2260 of SEQ ID NO: 1680
agccgugcgcuagauuaga

SEQ ID NO: 131177 - RNA, 19 nt, Artificial Sequence
  Description of Artificial Sequence: Synthetic oligonucleotide
  Antisense strand to SEQ ID NO: 131176
ucuaaucuagcgcacggcu

SEQ ID NO: 131178 - RNA, 19 nt, Artificial Sequence
  Description of Artificial Sequence: Synthetic oligonucleotide
  Sense strand starting at position 2283 of SEQ ID NO: 1680
gcuagaaugucuccauugu

SEQ ID NO: 131179 - RNA, 19 nt, Artificial Sequence
  Description of Artificial Sequence: Synthetic oligonucleotide
  Antisense strand to SEQ ID NO: 131178
acaauggagacauucuagc

SEQ ID NO: 131180 - RNA, 19 nt, Artificial Sequence
  Description of Artificial Sequence: Synthetic oligonucleotide
  Sense strand starting at position 2284 of SEQ ID NO: 1680
cuagaaugucuccauugug

SEQ ID NO: 131181 - RNA, 19 nt, Artificial Sequence
  Description of Artificial Sequence: Synthetic oligonucleotide
  Antisense strand to SEQ ID NO: 131180
cacaauggagacauucuag

SEQ ID NO: 131182 - RNA, 19 nt, Artificial Sequence
  Description of Artificial Sequence: Synthetic oligonucleotide
  Sense strand starting at position 2552 of SEQ ID NO: 1680
gguagauuccugggcuccu

SEQ ID NO: 131183 - RNA, 19 nt, Artificial Sequence
  Description of Artificial Sequence: Synthetic oligonucleotide
  Antisense strand to SEQ ID NO: 131182
aggagcccaggaaucuacc

SEQ ID NO: 131184 - RNA, 19 nt, Artificial Sequence
  Description of Artificial Sequence: Synthetic oligonucleotide
  Sense strand starting at position 2650 of SEQ ID NO: 1680
ccaggucuuucccacaaug

SEQ ID NO: 131185 - RNA, 19 nt, Artificial Sequence
  Description of Artificial Sequence: Synthetic oligonucleotide
  Antisense strand to SEQ ID NO: 131184
cauugugggaaagaccugg

SEQ ID NO: 131186 - RNA, 19 nt, Artificial Sequence
  Description of Artificial Sequence: Synthetic oligonucleotide
  Sense strand starting at position 2652 of SEQ ID NO: 1680
aggucuuucccacaaugca

SEQ ID NO: 131187 - RNA, 19 nt, Artificial Sequence
  Description of Artificial Sequence: Synthetic oligonucleotide
  Antisense strand to SEQ ID NO: 131186
ugcauugugggaaagaccu

SEQ ID NO: 131188 - RNA, 19 nt, Artificial Sequence
  Description of Artificial Sequence: Synthetic oligonucleotide
  Sense strand starting at position 2693 of SEQ ID NO: 1680
acaagcuauuaauaggaua

SEQ ID NO: 131189 - RNA, 19 nt, Artificial Sequence
  Description of Artificial Sequence: Synthetic oligonucleotide
  Antisense strand to SEQ ID NO: 131188
uauccuauuaauagcuugu

SEQ ID NO: 131190 - RNA, 19 nt, Artificial Sequence
  Description of Artificial Sequence: Synthetic oligonucleotide
  Sense strand starting at position 2769 of SEQ ID NO: 1680
aagcacguuccauacagua

SEQ ID NO: 131191 - RNA, 19 nt, Artificial Sequence
  Description of Artificial Sequence: Synthetic oligonucleotide
  Antisense strand to SEQ ID NO: 131190
uacuguauggaacgugcuu

SEQ ID NO: 131192 - RNA, 19 nt, Artificial Sequence
  Description of Artificial Sequence: Synthetic oligonucleotide
  Sense strand starting at position 2836 of SEQ ID NO: 1680
gucaguuucacggaugagg

SEQ ID NO: 131193 - RNA, 19 nt, Artificial Sequence
  Description of Artificial Sequence: Synthetic oligonucleotide
  Antisense strand to SEQ ID NO: 131192
ccucauccgugaaacugac

SEQ ID NO: 131194 - RNA, 19 nt, Artificial Sequence
  Description of Artificial Sequence: Synthetic oligonucleotide
  Sense strand starting at position 2975 of SEQ ID NO: 1680
agcuuacuucuccggauca

SEQ ID NO: 131195 - RNA, 19 nt, Artificial Sequence
  Description of Artificial Sequence: Synthetic oligonucleotide
  Antisense strand to SEQ ID NO: 131194
ugauccggagaaguaagcu

SEQ ID NO: 131196 - RNA, 19 nt, Artificial Sequence
  Description of Artificial Sequence: Synthetic oligonucleotide
  Sense strand starting at position 3076 of SEQ ID NO: 1680
cugagagcaguccgggaau

SEQ ID NO: 131197 - RNA, 19 nt, Artificial Sequence
  Description of Artificial Sequence: Synthetic oligonucleotide
  Antisense strand to SEQ ID NO: 131196
auucccggacugcucucag

SEQ ID NO: 131198 - RNA, 19 nt, Artificial Sequence
  Description of Artificial Sequence: Synthetic oligonucleotide
  Sense strand starting at position 3088 of SEQ ID NO: 1680
cgggaaugcugagcaaguu

SEQ ID NO: 131199 - RNA, 19 nt, Artificial Sequence
  Description of Artificial Sequence: Synthetic oligonucleotide
  Antisense strand to SEQ ID NO: 131198
aacuugcucagcauucccg

SEQ ID NO: 131200 - RNA, 19 nt, Artificial Sequence
  Description of Artificial Sequence: Synthetic oligonucleotide
  Sense strand starting at position 3097 of SEQ ID NO: 1680
ugagcaaguucugugucua

SEQ ID NO: 131201 - RNA, 19 nt, Artificial Sequence
  Description of Artificial Sequence: Synthetic oligonucleotide
  Antisense strand to SEQ ID NO: 131200
uagacacagaacuugcuca

SEQ ID NO: 131202 - RNA, 19 nt, Artificial Sequence
  Description of Artificial Sequence: Synthetic oligonucleotide
  Sense strand starting at position 3098 of SEQ ID NO: 1680
gagcaaguucugugucuac

SEQ ID NO: 131203 - RNA, 19 nt, Artificial Sequence
  Description of Artificial Sequence: Synthetic oligonucleotide
  Antisense strand to SEQ ID NO: 131202
guagacacagaacuugcuc

SEQ ID NO: 131204 - RNA, 19 nt, Artificial Sequence
  Description of Artificial Sequence: Synthetic oligonucleotide
  Sense strand starting at position 3298 of SEQ ID NO: 1680
gaaaguugaucgcuaggua

SEQ ID NO: 131205 - RNA, 19 nt, Artificial Sequence
  Description of Artificial Sequence: Synthetic oligonucleotide
  Antisense strand to SEQ ID NO: 131204
uaccuagcgaucaacuuuc

SEQ ID NO: 131206 - RNA, 19 nt, Artificial Sequence
  Description of Artificial Sequence: Synthetic oligonucleotide
  Sense strand starting at position 3299 of SEQ ID NO: 1680
aaaguugaucgcuagguau

SEQ ID NO: 131207 - RNA, 19 nt, Artificial Sequence
  Description of Artificial Sequence: Synthetic oligonucleotide
  Antisense strand to SEQ ID NO: 131206
auaccuagcgaucaacuuu

SEQ ID NO: 131208 - RNA, 19 nt, Artificial Sequence
  Description of Artificial Sequence: Synthetic oligonucleotide
  Sense strand starting at position 3449 of SEQ ID NO: 1680
ggugcuuccugaccacaua

SEQ ID NO: 131209 - RNA, 19 nt, Artificial Sequence
  Description of Artificial Sequence: Synthetic oligonucleotide
  Antisense strand to SEQ ID NO: 131208
uauguggucaggaagcacc

SEQ ID NO: 131210 - RNA, 19 nt, Artificial Sequence
  Description of Artificial Sequence: Synthetic oligonucleotide
  Sense strand starting at position 3515 of SEQ ID NO: 1680
cuuggcagcuuccaaauaa

SEQ ID NO: 131211 - RNA, 19 nt, Artificial Sequence
  Description of Artificial Sequence: Synthetic oligonucleotide
  Antisense strand to SEQ ID NO: 131210
uuauuuggaagcugccaag

SEQ ID NO: 131212 - RNA, 19 nt, Artificial Sequence
  Description of Artificial Sequence: Synthetic oligonucleotide
  Sense strand starting at position 3546 of SEQ ID NO: 1680
gguccuucagguugguaga

SEQ ID NO: 131213 - RNA, 19 nt, Artificial Sequence
  Description of Artificial Sequence: Synthetic oligonucleotide
  Antisense strand to SEQ ID NO: 131212
ucuaccaaccugaaggacc

SEQ ID NO: 131214 - RNA, 19 nt, Artificial Sequence
  Description of Artificial Sequence: Synthetic oligonucleotide
  Sense strand starting at position 3687 of SEQ ID NO: 1680
agaacaggcugcuucuaua

SEQ ID NO: 131215 - RNA, 19 nt, Artificial Sequence
  Description of Artificial Sequence: Synthetic oligonucleotide
  Antisense strand to SEQ ID NO: 131214
uauagaagcagccuguucu

SEQ ID NO: 131216 - RNA, 19 nt, Artificial Sequence
  Description of Artificial Sequence: Synthetic oligonucleotide
  Sense strand starting at position 3734 of SEQ ID NO: 1680
ggaaccaacucucagauaa

SEQ ID NO: 131217 - RNA, 19 nt, Artificial Sequence
  Description of Artificial Sequence: Synthetic oligonucleotide
  Antisense strand to SEQ ID NO: 131216
uuaucugagaguugguucc

SEQ ID NO: 131218 - RNA, 19 nt, Artificial Sequence
  Description of Artificial Sequence: Synthetic oligonucleotide
  Sense strand starting at position 3902 of SEQ ID NO: 1680
gcugcaagcuguccgcaaa

SEQ ID NO: 131219 - RNA, 19 nt, Artificial Sequence
  Description of Artificial Sequence: Synthetic oligonucleotide
  Antisense strand to SEQ ID NO: 131218
uuugcggacagcuugcagc

SEQ ID NO: 131220 - RNA, 19 nt, Artificial Sequence
  Description of Artificial Sequence: Synthetic oligonucleotide
  Sense strand starting at position 3905 of SEQ ID NO: 1680
gcaagcuguccgcaaagcu

SEQ ID NO: 131221 - RNA, 19 nt, Artificial Sequence
  Description of Artificial Sequence: Synthetic oligonucleotide
  Antisense strand to SEQ ID NO: 131220
agcuuugcggacagcuugc

SEQ ID NO: 131222 - RNA, 19 nt, Artificial Sequence
  Description of Artificial Sequence: Synthetic oligonucleotide
  Sense strand starting at position 3882 of SEQ ID NO: 1681
agguuaauaugcuccuaac

SEQ ID NO: 131223 - RNA, 19 nt, Artificial Sequence
  Description of Artificial Sequence: Synthetic oligonucleotide
  Antisense strand to SEQ ID NO: 131222
guuaggagcauauuaaccu

SEQ ID NO: 131224 - RNA, 19 nt, Artificial Sequence
  Description of Artificial Sequence: Synthetic oligonucleotide
  Sense strand starting at position 3871 of SEQ ID NO: 1681
caaacaguguuagguuaau

SEQ ID NO: 131225 - RNA, 19 nt, Artificial Sequence
  Description of Artificial Sequence: Synthetic oligonucleotide
  Antisense strand to SEQ ID NO: 131224
auuaaccuaacacuguuug

SEQ ID NO: 131226 - RNA, 19 nt, Artificial Sequence
  Description of Artificial Sequence: Synthetic oligonucleotide
  Sense strand starting at position 3869 of SEQ ID NO: 1681
ggcaaacaguguuagguua

SEQ ID NO: 131227 - RNA, 19 nt, Artificial Sequence
  Description of Artificial Sequence: Synthetic oligonucleotide
  Antisense strand to SEQ ID NO: 131226
uaaccuaacacuguuugcc

SEQ ID NO: 131228 - RNA, 19 nt, Artificial Sequence
  Description of Artificial Sequence: Synthetic oligonucleotide
  Sense strand starting at position 3739 of SEQ ID NO: 1681
gagguauccuaagagaagu

SEQ ID NO: 131229 - RNA, 19 nt, Artificial Sequence
  Description of Artificial Sequence: Synthetic oligonucleotide
  Antisense strand to SEQ ID NO: 131228
acuucucuuaggauaccuc

SEQ ID NO: 131230 - RNA, 19 nt, Artificial Sequence
  Description of Artificial Sequence: Synthetic oligonucleotide
  Sense strand starting at position 3731 of SEQ ID NO: 1681
auguaugggagguauccua

SEQ ID NO: 131231 - RNA, 19 nt, Artificial Sequence
  Description of Artificial Sequence: Synthetic oligonucleotide
  Antisense strand to SEQ ID NO: 131230
uaggauaccucccauacau

SEQ ID NO: 131232 - RNA, 19 nt, Artificial Sequence
  Description of Artificial Sequence: Synthetic oligonucleotide
  Sense strand starting at position 3727 of SEQ ID NO: 1681
gagaauguaugggagguau

SEQ ID NO: 131233 - RNA, 19 nt, Artificial Sequence
  Description of Artificial Sequence: Synthetic oligonucleotide
  Antisense strand to SEQ ID NO: 131232
auaccucccauacauucuc

SEQ ID NO: 131234 - RNA, 19 nt, Artificial Sequence
  Description of Artificial Sequence: Synthetic oligonucleotide
  Sense strand starting at position 3651 of SEQ ID NO: 1681
cugggagcaucuuguggaa

SEQ ID NO: 131235 - RNA, 19 nt, Artificial Sequence
  Description of Artificial Sequence: Synthetic oligonucleotide
  Antisense strand to SEQ ID NO: 131234
uuccacaagaugcucccag

SEQ ID NO: 131236 - RNA, 19 nt, Artificial Sequence
  Description of Artificial Sequence: Synthetic oligonucleotide
  Sense strand starting at position 3555 of SEQ ID NO: 1681
gaucuaagcccugguuaag

SEQ ID NO: 131237 - RNA, 19 nt, Artificial Sequence
  Description of Artificial Sequence: Synthetic oligonucleotide
  Antisense strand to SEQ ID NO: 131236
cuuaaccagggcuuagauc

SEQ ID NO: 131238 - RNA, 19 nt, Artificial Sequence
  Description of Artificial Sequence: Synthetic oligonucleotide
  Sense strand starting at position 3554 of SEQ ID NO: 1681
agaucuaagcccugguuaa

SEQ ID NO: 131239 - RNA, 19 nt, Artificial Sequence
  Description of Artificial Sequence: Synthetic oligonucleotide
  Antisense strand to SEQ ID NO: 131238
uuaaccagggcuuagaucu

SEQ ID NO: 131240 - RNA, 19 nt, Artificial Sequence
  Description of Artificial Sequence: Synthetic oligonucleotide
  Sense strand starting at position 3386 of SEQ ID NO: 1681
guucuauaaucagagcugu

SEQ ID NO: 131241 - RNA, 19 nt, Artificial Sequence
  Description of Artificial Sequence: Synthetic oligonucleotide
  Antisense strand to SEQ ID NO: 131240
acagcucugauuauagaac

SEQ ID NO: 131242 - RNA, 19 nt, Artificial Sequence
  Description of Artificial Sequence: Synthetic oligonucleotide
  Sense strand starting at position 3246 of SEQ ID NO: 1681
caccgagagucauuguaga

SEQ ID NO: 131243 - RNA, 19 nt, Artificial Sequence
  Description of Artificial Sequence: Synthetic oligonucleotide
  Antisense strand to SEQ ID NO: 131242
ucuacaaugacucucggug

SEQ ID NO: 131244 - RNA, 19 nt, Artificial Sequence
  Description of Artificial Sequence: Synthetic oligonucleotide
  Sense strand starting at position 3240 of SEQ ID NO: 1681
uauucucaccgagagucau

SEQ ID NO: 131245 - RNA, 19 nt, Artificial Sequence
  Description of Artificial Sequence: Synthetic oligonucleotide
  Antisense strand to SEQ ID NO: 131244
augacucucggugagaaua

SEQ ID NO: 131246 - RNA, 19 nt, Artificial Sequence
  Description of Artificial Sequence: Synthetic oligonucleotide
  Sense strand starting at position 3238 of SEQ ID NO: 1681
gcuauucucaccgagaguc

SEQ ID NO: 131247 - RNA, 19 nt, Artificial Sequence
  Description of Artificial Sequence: Synthetic oligonucleotide
  Antisense strand to SEQ ID NO: 131246
gacucucggugagaauagc

SEQ ID NO: 131248 - RNA, 19 nt, Artificial Sequence
  Description of Artificial Sequence: Synthetic oligonucleotide
  Sense strand starting at position 3237 of SEQ ID NO: 1681
ggcuauucucaccgagagu

SEQ ID NO: 131249 - RNA, 19 nt, Artificial Sequence
  Description of Artificial Sequence: Synthetic oligonucleotide
  Antisense strand to SEQ ID NO: 131248
acucucggugagaauagcc

SEQ ID NO: 131250 - RNA, 19 nt, Artificial Sequence
  Description of Artificial Sequence: Synthetic oligonucleotide
  Sense strand starting at position 3236 of SEQ ID NO: 1681
aggcuauucucaccgagag

SEQ ID NO: 131251 - RNA, 19 nt, Artificial Sequence
  Description of Artificial Sequence: Synthetic oligonucleotide
  Antisense strand to SEQ ID NO: 131250
cucucggugagaauagccu

SEQ ID NO: 131252 - RNA, 19 nt, Artificial Sequence
  Description of Artificial Sequence: Synthetic oligonucleotide
  Sense strand starting at position 3225 of SEQ ID NO: 1681
auguaaauaggaggcuauu

SEQ ID NO: 131253 - RNA, 19 nt, Artificial Sequence
  Description of Artificial Sequence: Synthetic oligonucleotide
  Antisense strand to SEQ ID NO: 131252
aauagccuccuauuuacau

SEQ ID NO: 131254 - RNA, 19 nt, Artificial Sequence
  Description of Artificial Sequence: Synthetic oligonucleotide
  Sense strand starting at position 3119 of SEQ ID NO: 1681
aggaaaugaucaggcaaga

SEQ ID NO: 131255 - RNA, 19 nt, Artificial Sequence
  Description of Artificial Sequence: Synthetic oligonucleotide
  Antisense strand to SEQ ID NO: 131254
ucuugccugaucauuuccu

SEQ ID NO: 131256 - RNA, 19 nt, Artificial Sequence
  Description of Artificial Sequence: Synthetic oligonucleotide
  Sense strand starting at position 3054 of SEQ ID NO: 1681
gggaaaggguuguggucau

SEQ ID NO: 131257 - RNA, 19 nt, Artificial Sequence
  Description of Artificial Sequence: Synthetic oligonucleotide
  Antisense strand to SEQ ID NO: 131256
augaccacaacccuuuccc

SEQ ID NO: 131258 - RNA, 19 nt, Artificial Sequence
  Description of Artificial Sequence: Synthetic oligonucleotide
  Sense strand starting at position 2388 of SEQ ID NO: 1681
cccaguguuugucaacagu

SEQ ID NO: 131259 - RNA, 19 nt, Artificial Sequence
  Description of Artificial Sequence: Synthetic oligonucleotide
  Antisense strand to SEQ ID NO: 131258
acuguugacaaacacuggg

SEQ ID NO: 131260 - RNA, 19 nt, Artificial Sequence
  Description of Artificial Sequence: Synthetic oligonucleotide
  Sense strand starting at position 2381 of SEQ ID NO: 1681
caacguacccaguguuugu

SEQ ID NO: 131261 - RNA, 19 nt, Artificial Sequence
  Description of Artificial Sequence: Synthetic oligonucleotide
  Antisense strand to SEQ ID NO: 131260
acaaacacuggguacguug

SEQ ID NO: 131262 - RNA, 19 nt, Artificial Sequence
  Description of Artificial Sequence: Synthetic oligonucleotide
  Sense strand starting at position 2333 of SEQ ID NO: 1681
ccuugauguuagcaacaga

SEQ ID NO: 131263 - RNA, 19 nt, Artificial Sequence
  Description of Artificial Sequence: Synthetic oligonucleotide
  Antisense strand to SEQ ID NO: 131262
ucuguugcuaacaucaagg

SEQ ID NO: 131264 - RNA, 19 nt, Artificial Sequence
  Description of Artificial Sequence: Synthetic oligonucleotide
  Sense strand starting at position 2264 of SEQ ID NO: 1681
uuuggucguagggagaaua

SEQ ID NO: 131265 - RNA, 19 nt, Artificial Sequence
  Description of Artificial Sequence: Synthetic oligonucleotide
  Antisense strand to SEQ ID NO: 131264
uauucucccuacgaccaaa

SEQ ID NO: 131266 - RNA, 19 nt, Artificial Sequence
  Description of Artificial Sequence: Synthetic oligonucleotide
  Sense strand starting at position 2262 of SEQ ID NO: 1681
gcuuuggucguagggagaa

SEQ ID NO: 131267 - RNA, 19 nt, Artificial Sequence
  Description of Artificial Sequence: Synthetic oligonucleotide
  Antisense strand to SEQ ID NO: 131266
uucucccuacgaccaaagc

SEQ ID NO: 131268 - RNA, 19 nt, Artificial Sequence
  Description of Artificial Sequence: Synthetic oligonucleotide
  Sense strand starting at position 2260 of SEQ ID NO: 1681
gagcuuuggucguagggag

SEQ ID NO: 131269 - RNA, 19 nt, Artificial Sequence
  Description of Artificial Sequence: Synthetic oligonucleotide
  Antisense strand to SEQ ID NO: 131268
cucccuacgaccaaagcuc

SEQ ID NO: 131270 - RNA, 19 nt, Artificial Sequence
  Description of Artificial Sequence: Synthetic oligonucleotide
  Sense strand starting at position 2179 of SEQ ID NO: 1681
cgcuuaaugcuggaguuag

SEQ ID NO: 131271 - RNA, 19 nt, Artificial Sequence
  Description of Artificial Sequence: Synthetic oligonucleotide
  Antisense strand to SEQ ID NO: 131270
cuaacuccagcauuaagcg

SEQ ID NO: 131272 - RNA, 19 nt, Artificial Sequence
  Description of Artificial Sequence: Synthetic oligonucleotide
  Sense strand starting at position 2178 of SEQ ID NO: 1681
gcgcuuaaugcuggaguua

SEQ ID NO: 131273 - RNA, 19 nt, Artificial Sequence
  Description of Artificial Sequence: Synthetic oligonucleotide
  Antisense strand to SEQ ID NO: 131272
uaacuccagcauuaagcgc

SEQ ID NO: 131274 - RNA, 19 nt, Artificial Sequence
  Description of Artificial Sequence: Synthetic oligonucleotide
  Sense strand starting at position 2177 of SEQ ID NO: 1681
agcgcuuaaugcuggaguu

SEQ ID NO: 131275 - RNA, 19 nt, Artificial Sequence
  Description of Artificial Sequence: Synthetic oligonucleotide
  Antisense strand to SEQ ID NO: 131274
aacuccagcauuaagcgcu

SEQ ID NO: 131276 - RNA, 19 nt, Artificial Sequence
  Description of Artificial Sequence: Synthetic oligonucleotide
  Sense strand starting at position 2100 of SEQ ID NO: 1681
ggagguuaaccguguuagc

SEQ ID NO: 131277 - RNA, 19 nt, Artificial Sequence
  Description of Artificial Sequence: Synthetic oligonucleotide
  Antisense strand to SEQ ID NO: 131276
gcuaacacgguuaaccucc

SEQ ID NO: 131278 - RNA, 19 nt, Artificial Sequence
  Description of Artificial Sequence: Synthetic oligonucleotide
  Sense strand starting at position 2089 of SEQ ID NO: 1681
cuguaagagcuggagguua

SEQ ID NO: 131279 - RNA, 19 nt, Artificial Sequence
  Description of Artificial Sequence: Synthetic oligonucleotide
  Antisense strand to SEQ ID NO: 131278
uaaccuccagcucuuacag

SEQ ID NO: 131280 - RNA, 19 nt, Artificial Sequence
  Description of Artificial Sequence: Synthetic oligonucleotide
  Sense strand starting at position 2088 of SEQ ID NO: 1681
gcuguaagagcuggagguu

SEQ ID NO: 131281 - RNA, 19 nt, Artificial Sequence
  Description of Artificial Sequence: Synthetic oligonucleotide
  Antisense strand to SEQ ID NO: 131280
aaccuccagcucuuacagc

SEQ ID NO: 131282 - RNA, 19 nt, Artificial Sequence
  Description of Artificial Sequence: Synthetic oligonucleotide
  Sense strand starting at position 1623 of SEQ ID NO: 1681
gaguucuaucccggccacu

SEQ ID NO: 131283 - RNA, 19 nt, Artificial Sequence
  Description of Artificial Sequence: Synthetic oligonucleotide
  Antisense strand to SEQ ID NO: 131282
aguggccgggauagaacuc

SEQ ID NO: 131284 - RNA, 19 nt, Artificial Sequence
  Description of Artificial Sequence: Synthetic oligonucleotide
  Sense strand starting at position 1028 of SEQ ID NO: 1681
uccacaugcccucagaaga

SEQ ID NO: 131285 - RNA, 19 nt, Artificial Sequence
  Description of Artificial Sequence: Synthetic oligonucleotide
  Antisense strand to SEQ ID NO: 131284
ucuucugagggcaugugga

SEQ ID NO: 131286 - RNA, 19 nt, Artificial Sequence
  Description of Artificial Sequence: Synthetic oligonucleotide
  Sense strand starting at position 76 of SEQ ID NO: 1681
cacugugacggauggaaau

SEQ ID NO: 131287 - RNA, 19 nt, Artificial Sequence
  Description of Artificial Sequence: Synthetic oligonucleotide
  Antisense strand to SEQ ID NO: 131286
auuuccauccgucacagug

SEQ ID NO: 131288 - RNA, 19 nt, Artificial Sequence
  Description of Artificial Sequence: Synthetic oligonucleotide
  Sense strand starting at position 24 of SEQ ID NO: 1681
ccuauuugguagggaauga

SEQ ID NO: 131289 - RNA, 19 nt, Artificial Sequence
  Description of Artificial Sequence: Synthetic oligonucleotide
  Antisense strand to SEQ ID NO: 131288
ucauucccuaccaaauagg

SEQ ID NO: 131290 - RNA, 19 nt, Artificial Sequence
  Description of Artificial Sequence: Synthetic oligonucleotide
  Sense strand starting at position 3941 of SEQ ID NO: 1684
gcuuuaguaggauauucuu

SEQ ID NO: 131291 - RNA, 19 nt, Artificial Sequence
  Description of Artificial Sequence: Synthetic oligonucleotide
  Antisense strand to SEQ ID NO: 131290
aagaauauccuacuaaagc

SEQ ID NO: 131292 - RNA, 19 nt, Artificial Sequence
  Description of Artificial Sequence: Synthetic oligonucleotide
  Sense strand starting at position 3938 of SEQ ID NO: 1684
uaugcuuuaguaggauauu

SEQ ID NO: 131293 - RNA, 19 nt, Artificial Sequence
  Description of Artificial Sequence: Synthetic oligonucleotide
  Antisense strand to SEQ ID NO: 131292
aauauccuacuaaagcaua

SEQ ID NO: 131294 - RNA, 19 nt, Artificial Sequence
  Description of Artificial Sequence: Synthetic oligonucleotide
  Sense strand starting at position 3935 of SEQ ID NO: 1684
ccauaugcuuuaguaggau

SEQ ID NO: 131295 - RNA, 19 nt, Artificial Sequence
  Description of Artificial Sequence: Synthetic oligonucleotide
  Antisense strand to SEQ ID NO: 131294
auccuacuaaagcauaugg

SEQ ID NO: 131296 - RNA, 19 nt, Artificial Sequence
  Description of Artificial Sequence: Synthetic oligonucleotide
  Sense strand starting at position 3916 of SEQ ID NO: 1684
auaauacugugucuaaaca

SEQ ID NO: 131297 - RNA, 19 nt, Artificial Sequence
  Description of Artificial Sequence: Synthetic oligonucleotide
  Antisense strand to SEQ ID NO: 131296
uguuuagacacaguauuau

SEQ ID NO: 131298 - RNA, 19 nt, Artificial Sequence
  Description of Artificial Sequence: Synthetic oligonucleotide
  Sense strand starting at position 3751 of SEQ ID NO: 1684
gguauuguaaagggaaacu

SEQ ID NO: 131299 - RNA, 19 nt, Artificial Sequence
  Description of Artificial Sequence: Synthetic oligonucleotide
  Antisense strand to SEQ ID NO: 131298
aguuucccuuuacaauacc

SEQ ID NO: 131300 - RNA, 19 nt, Artificial Sequence
  Description of Artificial Sequence: Synthetic oligonucleotide
  Sense strand starting at position 3750 of SEQ ID NO: 1684
ggguauuguaaagggaaac

SEQ ID NO: 131301 - RNA, 19 nt, Artificial Sequence
  Description of Artificial Sequence: Synthetic oligonucleotide
  Antisense strand to SEQ ID NO: 131300
guuucccuuuacaauaccc

SEQ ID NO: 131302 - RNA, 19 nt, Artificial Sequence
  Description of Artificial Sequence: Synthetic oligonucleotide
  Sense strand starting at position 3682 of SEQ ID NO: 1684
auguuagauucuuuaaacg

SEQ ID NO: 131303 - RNA, 19 nt, Artificial Sequence
  Description of Artificial Sequence: Synthetic oligonucleotide
  Antisense strand to SEQ ID NO: 131302
cguuuaaagaaucuaacau

SEQ ID NO: 131304 - RNA, 19 nt, Artificial Sequence
  Description of Artificial Sequence: Synthetic oligonucleotide
  Sense strand starting at position 3648 of SEQ ID NO: 1684
auguguuacccauaaugaa

SEQ ID NO: 131305 - RNA, 19 nt, Artificial Sequence
  Description of Artificial Sequence: Synthetic oligonucleotide
  Antisense strand to SEQ ID NO: 131304
uucauuauggguaacacau

SEQ ID NO: 131306 - RNA, 19 nt, Artificial Sequence
  Description of Artificial Sequence: Synthetic oligonucleotide
  Sense strand starting at position 3644 of SEQ ID NO: 1684
uuaaauguguuacccauaa

SEQ ID NO: 131307 - RNA, 19 nt, Artificial Sequence
  Description of Artificial Sequence: Synthetic oligonucleotide
  Antisense strand to SEQ ID NO: 131306
uuauggguaacacauuuaa

SEQ ID NO: 131308 - RNA, 19 nt, Artificial Sequence
  Description of Artificial Sequence: Synthetic oligonucleotide
  Sense strand starting at position 3619 of SEQ ID NO: 1684
ugcucuagcccugaacaaa

SEQ ID NO: 131309 - RNA, 19 nt, Artificial Sequence
  Description of Artificial Sequence: Synthetic oligonucleotide
  Antisense strand to SEQ ID NO: 131308
uuuguucagggcuagagca

SEQ ID NO: 131310 - RNA, 19 nt, Artificial Sequence
  Description of Artificial Sequence: Synthetic oligonucleotide
  Sense strand starting at position 3243 of SEQ ID NO: 1684
caccaagacuggguuauaa

SEQ ID NO: 131311 - RNA, 19 nt, Artificial Sequence
  Description of Artificial Sequence: Synthetic oligonucleotide
  Antisense strand to SEQ ID NO: 131310
uuauaacccagucuuggug

SEQ ID NO: 131312 - RNA, 19 nt, Artificial Sequence
  Description of Artificial Sequence: Synthetic oligonucleotide
  Sense strand starting at position 3242 of SEQ ID NO: 1684
ucaccaagacuggguuaua

SEQ ID NO: 131313 - RNA, 19 nt, Artificial Sequence
  Description of Artificial Sequence: Synthetic oligonucleotide
  Antisense strand to SEQ ID NO: 131312
uauaacccagucuugguga

SEQ ID NO: 131314 - RNA, 19 nt, Artificial Sequence
  Description of Artificial Sequence: Synthetic oligonucleotide
  Sense strand starting at position 3172 of SEQ ID NO: 1684
agagaaagauacuaucaag

SEQ ID NO: 131315 - RNA, 19 nt, Artificial Sequence
  Description of Artificial Sequence: Synthetic oligonucleotide
  Antisense strand to SEQ ID NO: 131314
cuugauaguaucuuucucu

SEQ ID NO: 131316 - RNA, 19 nt, Artificial Sequence
  Description of Artificial Sequence: Synthetic oligonucleotide
  Sense strand starting at position 2684 of SEQ ID NO: 1684
gguagucauguggaucaaa

SEQ ID NO: 131317 - RNA, 19 nt, Artificial Sequence
  Description of Artificial Sequence: Synthetic oligonucleotide
  Antisense strand to SEQ ID NO: 131316
uuugauccacaugacuacc

SEQ ID NO: 131318 - RNA, 19 nt, Artificial Sequence
  Description of Artificial Sequence: Synthetic oligonucleotide
  Sense strand starting at position 2682 of SEQ ID NO: 1684
aggguagucauguggauca

SEQ ID NO: 131319 - RNA, 19 nt, Artificial Sequence
  Description of Artificial Sequence: Synthetic oligonucleotide
  Antisense strand to SEQ ID NO: 131318
ugauccacaugacuacccu

SEQ ID NO: 131320 - RNA, 19 nt, Artificial Sequence
  Description of Artificial Sequence: Synthetic oligonucleotide
  Sense strand starting at position 2439 of SEQ ID NO: 1684
uauuaaucacgguaaaugu

SEQ ID NO: 131321 - RNA, 19 nt, Artificial Sequence
  Description of Artificial Sequence: Synthetic oligonucleotide
  Antisense strand to SEQ ID NO: 131320
acauuuaccgugauuaaua

SEQ ID NO: 131322 - RNA, 19 nt, Artificial Sequence
  Description of Artificial Sequence: Synthetic oligonucleotide
  Sense strand starting at position 2437 of SEQ ID NO: 1684
uguauuaaucacgguaaau

SEQ ID NO: 131323 - RNA, 19 nt, Artificial Sequence
  Description of Artificial Sequence: Synthetic oligonucleotide
  Antisense strand to SEQ ID NO: 131322
auuuaccgugauuaauaca

SEQ ID NO: 131324 - RNA, 19 nt, Artificial Sequence
  Description of Artificial Sequence: Synthetic oligonucleotide
  Sense strand starting at position 2434 of SEQ ID NO: 1684
auguguauuaaucacggua

SEQ ID NO: 131325 - RNA, 19 nt, Artificial Sequence
  Description of Artificial Sequence: Synthetic oligonucleotide
  Antisense strand to SEQ ID NO: 131324
uaccgugauuaauacacau

SEQ ID NO: 131326 - RNA, 19 nt, Artificial Sequence
  Description of Artificial Sequence: Synthetic oligonucleotide
  Sense strand starting at position 2393 of SEQ ID NO: 1684
uggauucuauauccuaguu

SEQ ID NO: 131327 - RNA, 19 nt, Artificial Sequence
  Description of Artificial Sequence: Synthetic oligonucleotide
  Antisense strand to SEQ ID NO: 131326
aacuaggauauagaaucca

SEQ ID NO: 131328 - RNA, 19 nt, Artificial Sequence
  Description of Artificial Sequence: Synthetic oligonucleotide
  Sense strand starting at position 2309 of SEQ ID NO: 1684
acaucaauucuuuggagug

SEQ ID NO: 131329 - RNA, 19 nt, Artificial Sequence
  Description of Artificial Sequence: Synthetic oligonucleotide
  Antisense strand to SEQ ID NO: 131328
cacuccaaagaauugaugu

SEQ ID NO: 131330 - RNA, 19 nt, Artificial Sequence
  Description of Artificial Sequence: Synthetic oligonucleotide
  Sense strand starting at position 2268 of SEQ ID NO: 1684
ucuuguuaugacuaguaac

SEQ ID NO: 131331 - RNA, 19 nt, Artificial Sequence
  Description of Artificial Sequence: Synthetic oligonucleotide
  Antisense strand to SEQ ID NO: 131330
guuacuagucauaacaaga

SEQ ID NO: 131332 - RNA, 19 nt, Artificial Sequence
  Description of Artificial Sequence: Synthetic oligonucleotide
  Sense strand starting at position 2113 of SEQ ID NO: 1684
cuacaaaucccuggaugca

SEQ ID NO: 131333 - RNA, 19 nt, Artificial Sequence
  Description of Artificial Sequence: Synthetic oligonucleotide
  Antisense strand to SEQ ID NO: 131332
ugcauccagggauuuguag

SEQ ID NO: 131334 - RNA, 19 nt, Artificial Sequence
  Description of Artificial Sequence: Synthetic oligonucleotide
  Sense strand starting at position 1550 of SEQ ID NO: 1684
aaaggaguuaccuggugca

SEQ ID NO: 131335 - RNA, 19 nt, Artificial Sequence
  Description of Artificial Sequence: Synthetic oligonucleotide
  Antisense strand to SEQ ID NO: 131334
ugcaccagguaacuccuuu

SEQ ID NO: 131336 - RNA, 19 nt, Artificial Sequence
  Description of Artificial Sequence: Synthetic oligonucleotide
  Sense strand starting at position 1512 of SEQ ID NO: 1684
ggcucaucuguaggagacu

SEQ ID NO: 131337 - RNA, 19 nt, Artificial Sequence
  Description of Artificial Sequence: Synthetic oligonucleotide
  Antisense strand to SEQ ID NO: 131336
agucuccuacagaugagcc

SEQ ID NO: 131338 - RNA, 19 nt, Artificial Sequence
  Description of Artificial Sequence: Synthetic oligonucleotide
  Sense strand starting at position 1199 of SEQ ID NO: 1684
ugacacugugccuaugagu

SEQ ID NO: 131339 - RNA, 19 nt, Artificial Sequence
  Description of Artificial Sequence: Synthetic oligonucleotide
  Antisense strand to SEQ ID NO: 131338
acucauaggcacaguguca

SEQ ID NO: 131340 - RNA, 19 nt, Artificial Sequence
  Description of Artificial Sequence: Synthetic oligonucleotide
  Sense strand starting at position 1118 of SEQ ID NO: 1684
ggcuuuacucuuuaaguga

SEQ ID NO: 131341 - RNA, 19 nt, Artificial Sequence
  Description of Artificial Sequence: Synthetic oligonucleotide
  Antisense strand to SEQ ID NO: 131340
ucacuuaaagaguaaagcc

SEQ ID NO: 131342 - RNA, 19 nt, Artificial Sequence
  Description of Artificial Sequence: Synthetic oligonucleotide
  Sense strand starting at position 945 of SEQ ID NO: 1684
ggaagcucucagggaggua

SEQ ID NO: 131343 - RNA, 19 nt, Artificial Sequence
  Description of Artificial Sequence: Synthetic oligonucleotide
  Antisense strand to SEQ ID NO: 131342
uaccucccugagagcuucc

SEQ ID NO: 131344 - RNA, 19 nt, Artificial Sequence
  Description of Artificial Sequence: Synthetic oligonucleotide
  Sense strand starting at position 927 of SEQ ID NO: 1684
guaacuuaguucuccauag

SEQ ID NO: 131345 - RNA, 19 nt, Artificial Sequence
  Description of Artificial Sequence: Synthetic oligonucleotide
  Antisense strand to SEQ ID NO: 131344
cuauggagaacuaaguuac

SEQ ID NO: 131346 - RNA, 19 nt, Artificial Sequence
  Description of Artificial Sequence: Synthetic oligonucleotide
  Sense strand starting at position 924 of SEQ ID NO: 1684
ucaguaacuuaguucucca

SEQ ID NO: 131347 - RNA, 19 nt, Artificial Sequence
  Description of Artificial Sequence: Synthetic oligonucleotide
  Antisense strand to SEQ ID NO: 131346
uggagaacuaaguuacuga

SEQ ID NO: 131348 - RNA, 19 nt, Artificial Sequence
  Description of Artificial Sequence: Synthetic oligonucleotide
  Sense strand starting at position 790 of SEQ ID NO: 1684
gucguuaccaagcacagau

SEQ ID NO: 131349 - RNA, 19 nt, Artificial Sequence
  Description of Artificial Sequence: Synthetic oligonucleotide
  Antisense strand to SEQ ID NO: 131348
aucugugcuugguaacgac

SEQ ID NO: 131350 - RNA, 19 nt, Artificial Sequence
  Description of Artificial Sequence: Synthetic oligonucleotide
  Sense strand starting at position 763 of SEQ ID NO: 1684
gcugcauuaggugacagaa

SEQ ID NO: 131351 - RNA, 19 nt, Artificial Sequence
  Description of Artificial Sequence: Synthetic oligonucleotide
  Antisense strand to SEQ ID NO: 131350
uucugucaccuaaugcagc

SEQ ID NO: 131352 - RNA, 19 nt, Artificial Sequence
  Description of Artificial Sequence: Synthetic oligonucleotide
  Sense strand starting at position 705 of SEQ ID NO: 1684
aguuccauuugaggagaga

SEQ ID NO: 131353 - RNA, 19 nt, Artificial Sequence
  Description of Artificial Sequence: Synthetic oligonucleotide
  Antisense strand to SEQ ID NO: 131352
ucucuccucaaauggaacu

SEQ ID NO: 131354 - RNA, 19 nt, Artificial Sequence
  Description of Artificial Sequence: Synthetic oligonucleotide
  Sense strand starting at position 703 of SEQ ID NO: 1684
gaaguuccauuugaggaga

SEQ ID NO: 131355 - RNA, 19 nt, Artificial Sequence
  Description of Artificial Sequence: Synthetic oligonucleotide
  Antisense strand to SEQ ID NO: 131354
ucuccucaaauggaacuuc

SEQ ID NO: 131356 - RNA, 19 nt, Artificial Sequence
  Description of Artificial Sequence: Synthetic oligonucleotide
  Sense strand starting at position 563 of SEQ ID NO: 1684
aguggucugauauaaaguu

SEQ ID NO: 131357 - RNA, 19 nt, Artificial Sequence
  Description of Artificial Sequence: Synthetic oligonucleotide
  Antisense strand to SEQ ID NO: 131356
aacuuuauaucagaccacu

SEQ ID NO: 131358 - RNA, 19 nt, Artificial Sequence
  Description of Artificial Sequence: Synthetic oligonucleotide
  Sense strand starting at position 558 of SEQ ID NO: 1684
agggaaguggucugauaua

SEQ ID NO: 131359 - RNA, 19 nt, Artificial Sequence
  Description of Artificial Sequence: Synthetic oligonucleotide
  Antisense strand to SEQ ID NO: 131358
uauaucagaccacuucccu

SEQ ID NO: 131360 - RNA, 19 nt, Artificial Sequence
  Description of Artificial Sequence: Synthetic oligonucleotide
  Sense strand starting at position 534 of SEQ ID NO: 1684
uuaagcuauuggcuaaaua

SEQ ID NO: 131361 - RNA, 19 nt, Artificial Sequence
  Description of Artificial Sequence: Synthetic oligonucleotide
  Antisense strand to SEQ ID NO: 131360
uauuuagccaauagcuuaa

SEQ ID NO: 131362 - RNA, 19 nt, Artificial Sequence
  Description of Artificial Sequence: Synthetic oligonucleotide
  Sense strand starting at position 475 of SEQ ID NO: 1684
gugaaagaguuucuucuac

SEQ ID NO: 131363 - RNA, 19 nt, Artificial Sequence
  Description of Artificial Sequence: Synthetic oligonucleotide
  Antisense strand to SEQ ID NO: 131362
guagaagaaacucuuucac

SEQ ID NO: 131364 - RNA, 19 nt, Artificial Sequence
  Description of Artificial Sequence: Synthetic oligonucleotide
  Sense strand starting at position 200 of SEQ ID NO: 1684
uagagaucucugugacaua

SEQ ID NO: 131365 - RNA, 19 nt, Artificial Sequence
  Description of Artificial Sequence: Synthetic oligonucleotide
  Antisense strand to SEQ ID NO: 131364
uaugucacagagaucucua

SEQ ID NO: 131366 - RNA, 19 nt, Artificial Sequence
  Description of Artificial Sequence: Synthetic oligonucleotide
  Sense strand starting at position 198 of SEQ ID NO: 1684
gauagagaucucugugaca

SEQ ID NO: 131367 - RNA, 19 nt, Artificial Sequence
  Description of Artificial Sequence: Synthetic oligonucleotide
  Antisense strand to SEQ ID NO: 131366
ugucacagagaucucuauc

SEQ ID NO: 131368 - RNA, 19 nt, Artificial Sequence
  Description of Artificial Sequence: Synthetic oligonucleotide
  Sense strand starting at position 182 of SEQ ID NO: 1684
gcuccuuauuaagugagau

SEQ ID NO: 131369 - RNA, 19 nt, Artificial Sequence
  Description of Artificial Sequence: Synthetic oligonucleotide
  Antisense strand to SEQ ID NO: 131368
aucucacuuaauaaggagc

SEQ ID NO: 131370 - RNA, 19 nt, Artificial Sequence
  Description of Artificial Sequence: Synthetic oligonucleotide
  Sense strand starting at position 3791 of SEQ ID NO: 1683
agaauacagugugucucaa

SEQ ID NO: 131371 - RNA, 19 nt, Artificial Sequence
  Description of Artificial Sequence: Synthetic oligonucleotide
  Antisense strand to SEQ ID NO: 131370
uugagacacacuguauucu

SEQ ID NO: 131372 - RNA, 19 nt, Artificial Sequence
  Description of Artificial Sequence: Synthetic oligonucleotide
  Sense strand starting at position 3636 of SEQ ID NO: 1683
gaucaacuacuuggaaguu

SEQ ID NO: 131373 - RNA, 19 nt, Artificial Sequence
  Description of Artificial Sequence: Synthetic oligonucleotide
  Antisense strand to SEQ ID NO: 131372
aacuuccaaguaguugauc

SEQ ID NO: 131374 - RNA, 19 nt, Artificial Sequence
  Description of Artificial Sequence: Synthetic oligonucleotide
  Sense strand starting at position 3328 of SEQ ID NO: 1683
uugcauaguguugaaggau

SEQ ID NO: 131375 - RNA, 19 nt, Artificial Sequence
  Description of Artificial Sequence: Synthetic oligonucleotide
  Antisense strand to SEQ ID NO: 131374
auccuucaacacuaugcaa

SEQ ID NO: 131376 - RNA, 19 nt, Artificial Sequence
  Description of Artificial Sequence: Synthetic oligonucleotide
  Sense strand starting at position 3319 of SEQ ID NO: 1683
ggaauuuauuugcauagug

SEQ ID NO: 131377 - RNA, 19 nt, Artificial Sequence
  Description of Artificial Sequence: Synthetic oligonucleotide
  Antisense strand to SEQ ID NO: 131376
cacuaugcaaauaaauucc

SEQ ID NO: 131378 - RNA, 19 nt, Artificial Sequence
  Description of Artificial Sequence: Synthetic oligonucleotide
  Sense strand starting at position 3193 of SEQ ID NO: 1683
aauggaaagugguauaaag

SEQ ID NO: 131379 - RNA, 19 nt, Artificial Sequence
  Description of Artificial Sequence: Synthetic oligonucleotide
  Antisense strand to SEQ ID NO: 131378
cuuuauaccacuuuccauu

SEQ ID NO: 131380 - RNA, 19 nt, Artificial Sequence
  Description of Artificial Sequence: Synthetic oligonucleotide
  Sense strand starting at position 3155 of SEQ ID NO: 1683
accagaguuuccuaagaug

SEQ ID NO: 131381 - RNA, 19 nt, Artificial Sequence
  Description of Artificial Sequence: Synthetic oligonucleotide
  Antisense strand to SEQ ID NO: 131380
caucuuaggaaacucuggu

SEQ ID NO: 131382 - RNA, 19 nt, Artificial Sequence
  Description of Artificial Sequence: Synthetic oligonucleotide
  Sense strand starting at position 3153 of SEQ ID NO: 1683
uuaccagaguuuccuaaga

SEQ ID NO: 131383 - RNA, 19 nt, Artificial Sequence
  Description of Artificial Sequence: Synthetic oligonucleotide
  Antisense strand to SEQ ID NO: 131382
ucuuaggaaacucugguaa

SEQ ID NO: 131384 - RNA, 19 nt, Artificial Sequence
  Description of Artificial Sequence: Synthetic oligonucleotide
  Sense strand starting at position 3105 of SEQ ID NO: 1683
uuaucuguccauuacagac

SEQ ID NO: 131385 - RNA, 19 nt, Artificial Sequence
  Description of Artificial Sequence: Synthetic oligonucleotide
  Antisense strand to SEQ ID NO: 131384
gucuguaauggacagauaa

SEQ ID NO: 131386 - RNA, 19 nt, Artificial Sequence
  Description of Artificial Sequence: Synthetic oligonucleotide
  Sense strand starting at position 2930 of SEQ ID NO: 1683
cuccgaauacuaugagaag

SEQ ID NO: 131387 - RNA, 19 nt, Artificial Sequence
  Description of Artificial Sequence: Synthetic oligonucleotide
  Antisense strand to SEQ ID NO: 131386
cuucucauaguauucggag

SEQ ID NO: 131388 - RNA, 19 nt, Artificial Sequence
  Description of Artificial Sequence: Synthetic oligonucleotide
  Sense strand starting at position 2921 of SEQ ID NO: 1683
ggcugauugcuccgaauac

SEQ ID NO: 131389 - RNA, 19 nt, Artificial Sequence
  Description of Artificial Sequence: Synthetic oligonucleotide
  Antisense strand to SEQ ID NO: 131388
guauucggagcaaucagcc

SEQ ID NO: 131390 - RNA, 19 nt, Artificial Sequence
  Description of Artificial Sequence: Synthetic oligonucleotide
  Sense strand starting at position 2919 of SEQ ID NO: 1683
aaggcugauugcuccgaau

SEQ ID NO: 131391 - RNA, 19 nt, Artificial Sequence
  Description of Artificial Sequence: Synthetic oligonucleotide
  Antisense strand to SEQ ID NO: 131390
auucggagcaaucagccuu

SEQ ID NO: 131392 - RNA, 19 nt, Artificial Sequence
  Description of Artificial Sequence: Synthetic oligonucleotide
  Sense strand starting at position 2785 of SEQ ID NO: 1683
cggguuaccacuuguagga

SEQ ID NO: 131393 - RNA, 19 nt, Artificial Sequence
  Description of Artificial Sequence: Synthetic oligonucleotide
  Antisense strand to SEQ ID NO: 131392
uccuacaagugguaacccg

SEQ ID NO: 131394 - RNA, 19 nt, Artificial Sequence
  Description of Artificial Sequence: Synthetic oligonucleotide
  Sense strand starting at position 2778 of SEQ ID NO: 1683
cagaauucggguuaccacu

SEQ ID NO: 131395 - RNA, 19 nt, Artificial Sequence
  Description of Artificial Sequence: Synthetic oligonucleotide
  Antisense strand to SEQ ID NO: 131394
agugguaacccgaauucug

SEQ ID NO: 131396 - RNA, 19 nt, Artificial Sequence
  Description of Artificial Sequence: Synthetic oligonucleotide
  Sense strand starting at position 2720 of SEQ ID NO: 1683
cuauucgcucagugaggaa

SEQ ID NO: 131397 - RNA, 19 nt, Artificial Sequence
  Description of Artificial Sequence: Synthetic oligonucleotide
  Antisense strand to SEQ ID NO: 131396
uuccucacugagcgaauag

SEQ ID NO: 131398 - RNA, 19 nt, Artificial Sequence
  Description of Artificial Sequence: Synthetic oligonucleotide
  Sense strand starting at position 2719 of SEQ ID NO: 1683
ccuauucgcucagugagga

SEQ ID NO: 131399 - RNA, 19 nt, Artificial Sequence
  Description of Artificial Sequence: Synthetic oligonucleotide
  Antisense strand to SEQ ID NO: 131398
uccucacugagcgaauagg

SEQ ID NO: 131400 - RNA, 19 nt, Artificial Sequence
  Description of Artificial Sequence: Synthetic oligonucleotide
  Sense strand starting at position 2609 of SEQ ID NO: 1683
agucaaguuucccuaaguc

SEQ ID NO: 131401 - RNA, 19 nt, Artificial Sequence
  Description of Artificial Sequence: Synthetic oligonucleotide
  Antisense strand to SEQ ID NO: 131400
gacuuagggaaacuugacu

SEQ ID NO: 131402 - RNA, 19 nt, Artificial Sequence
  Description of Artificial Sequence: Synthetic oligonucleotide
  Sense strand starting at position 2600 of SEQ ID NO: 1683
gucugaggaagucaaguuu

SEQ ID NO: 131403 - RNA, 19 nt, Artificial Sequence
  Description of Artificial Sequence: Synthetic oligonucleotide
  Antisense strand to SEQ ID NO: 131402
aaacuugacuuccucagac

SEQ ID NO: 131404 - RNA, 19 nt, Artificial Sequence
  Description of Artificial Sequence: Synthetic oligonucleotide
  Sense strand starting at position 2411 of SEQ ID NO: 1683
gggaacuacuaucacuuua

SEQ ID NO: 131405 - RNA, 19 nt, Artificial Sequence
  Description of Artificial Sequence: Synthetic oligonucleotide
  Antisense strand to SEQ ID NO: 131404
uaaagugauaguaguuccc

SEQ ID NO: 131406 - RNA, 19 nt, Artificial Sequence
  Description of Artificial Sequence: Synthetic oligonucleotide
  Sense strand starting at position 2337 of SEQ ID NO: 1683
gagucuagguuccugauga

SEQ ID NO: 131407 - RNA, 19 nt, Artificial Sequence
  Description of Artificial Sequence: Synthetic oligonucleotide
  Antisense strand to SEQ ID NO: 131406
ucaucaggaaccuagacuc

SEQ ID NO: 131408 - RNA, 19 nt, Artificial Sequence
  Description of Artificial Sequence: Synthetic oligonucleotide
  Sense strand starting at position 2282 of SEQ ID NO: 1683
ccuugauucuccucaaagg

SEQ ID NO: 131409 - RNA, 19 nt, Artificial Sequence
  Description of Artificial Sequence: Synthetic oligonucleotide
  Antisense strand to SEQ ID NO: 131408
ccuuugaggagaaucaagg

SEQ ID NO: 131410 - RNA, 19 nt, Artificial Sequence
  Description of Artificial Sequence: Synthetic oligonucleotide
  Sense strand starting at position 2274 of SEQ ID NO: 1683
gauugaguccuugauucuc

SEQ ID NO: 131411 - RNA, 19 nt, Artificial Sequence
  Description of Artificial Sequence: Synthetic oligonucleotide
  Antisense strand to SEQ ID NO: 131410
gagaaucaaggacucaauc

SEQ ID NO: 131412 - RNA, 19 nt, Artificial Sequence
  Description of Artificial Sequence: Synthetic oligonucleotide
  Sense strand starting at position 2272 of SEQ ID NO: 1683
uagauugaguccuugauuc

SEQ ID NO: 131413 - RNA, 19 nt, Artificial Sequence
  Description of Artificial Sequence: Synthetic oligonucleotide
  Antisense strand to SEQ ID NO: 131412
gaaucaaggacucaaucua

SEQ ID NO: 131414 - RNA, 19 nt, Artificial Sequence
  Description of Artificial Sequence: Synthetic oligonucleotide
  Sense strand starting at position 2074 of SEQ ID NO: 1683
guugaugcaagaugacuuu

SEQ ID NO: 131415 - RNA, 19 nt, Artificial Sequence
  Description of Artificial Sequence: Synthetic oligonucleotide
  Antisense strand to SEQ ID NO: 131414
aaagucaucuugcaucaac

SEQ ID NO: 131416 - RNA, 19 nt, Artificial Sequence
  Description of Artificial Sequence: Synthetic oligonucleotide
  Sense strand starting at position 2042 of SEQ ID NO: 1683
guagguuacccucacagaa

SEQ ID NO: 131417 - RNA, 19 nt, Artificial Sequence
  Description of Artificial Sequence: Synthetic oligonucleotide
  Antisense strand to SEQ ID NO: 131416
uucugugaggguaaccuac

SEQ ID NO: 131418 - RNA, 19 nt, Artificial Sequence
  Description of Artificial Sequence: Synthetic oligonucleotide
  Sense strand starting at position 1840 of SEQ ID NO: 1683
cuaugaacauacguaaaua

SEQ ID NO: 131419 - RNA, 19 nt, Artificial Sequence
  Description of Artificial Sequence: Synthetic oligonucleotide
  Antisense strand to SEQ ID NO: 131418
uauuuacguauguucauag

SEQ ID NO: 131420 - RNA, 19 nt, Artificial Sequence
  Description of Artificial Sequence: Synthetic oligonucleotide
  Sense strand starting at position 1604 of SEQ ID NO: 1683
guuuacaaccgauaguuaa

SEQ ID NO: 131421 - RNA, 19 nt, Artificial Sequence
  Description of Artificial Sequence: Synthetic oligonucleotide
  Antisense strand to SEQ ID NO: 131420
uuaacuaucgguuguaaac

SEQ ID NO: 131422 - RNA, 19 nt, Artificial Sequence
  Description of Artificial Sequence: Synthetic oligonucleotide
  Sense strand starting at position 1601 of SEQ ID NO: 1683
gcaguuuacaaccgauagu

SEQ ID NO: 131423 - RNA, 19 nt, Artificial Sequence
  Description of Artificial Sequence: Synthetic oligonucleotide
  Antisense strand to SEQ ID NO: 131422
acuaucgguuguaaacugc

SEQ ID NO: 131424 - RNA, 19 nt, Artificial Sequence
  Description of Artificial Sequence: Synthetic oligonucleotide
  Sense strand starting at position 1536 of SEQ ID NO: 1683
agcuguagaaauugagaaa

SEQ ID NO: 131425 - RNA, 19 nt, Artificial Sequence
  Description of Artificial Sequence: Synthetic oligonucleotide
  Antisense strand to SEQ ID NO: 131424
uuucucaauuucuacagcu

SEQ ID NO: 131426 - RNA, 19 nt, Artificial Sequence
  Description of Artificial Sequence: Synthetic oligonucleotide
  Sense strand starting at position 1462 of SEQ ID NO: 1683
guggccauuucagagguuu

SEQ ID NO: 131427 - RNA, 19 nt, Artificial Sequence
  Description of Artificial Sequence: Synthetic oligonucleotide
  Antisense strand to SEQ ID NO: 131426
aaaccucugaaauggccac

SEQ ID NO: 131428 - RNA, 19 nt, Artificial Sequence
  Description of Artificial Sequence: Synthetic oligonucleotide
  Sense strand starting at position 1316 of SEQ ID NO: 1683
ggccauaacuccuugcuca

SEQ ID NO: 131429 - RNA, 19 nt, Artificial Sequence
  Description of Artificial Sequence: Synthetic oligonucleotide
  Antisense strand to SEQ ID NO: 131428
ugagcaaggaguuauggcc

SEQ ID NO: 131430 - RNA, 19 nt, Artificial Sequence
  Description of Artificial Sequence: Synthetic oligonucleotide
  Sense strand starting at position 1291 of SEQ ID NO: 1683
gugauuaaggaguaagguu

SEQ ID NO: 131431 - RNA, 19 nt, Artificial Sequence
  Description of Artificial Sequence: Synthetic oligonucleotide
  Antisense strand to SEQ ID NO: 131430
aaccuuacuccuuaaucac

SEQ ID NO: 131432 - RNA, 19 nt, Artificial Sequence
  Description of Artificial Sequence: Synthetic oligonucleotide
  Sense strand starting at position 1267 of SEQ ID NO: 1683
caagacauuuccugaaggu

SEQ ID NO: 131433 - RNA, 19 nt, Artificial Sequence
  Description of Artificial Sequence: Synthetic oligonucleotide
  Antisense strand to SEQ ID NO: 131432
accuucaggaaaugucuug

SEQ ID NO: 131434 - RNA, 19 nt, Artificial Sequence
  Description of Artificial Sequence: Synthetic oligonucleotide
  Sense strand starting at position 1122 of SEQ ID NO: 1683
ugcaaaugcccauauguaa

SEQ ID NO: 131435 - RNA, 19 nt, Artificial Sequence
  Description of Artificial Sequence: Synthetic oligonucleotide
  Antisense strand to SEQ ID NO: 131434
uuacauaugggcauuugca

SEQ ID NO: 131436 - RNA, 19 nt, Artificial Sequence
  Description of Artificial Sequence: Synthetic oligonucleotide
  Sense strand starting at position 1012 of SEQ ID NO: 1683
acuguuauauugccugcua

SEQ ID NO: 131437 - RNA, 19 nt, Artificial Sequence
  Description of Artificial Sequence: Synthetic oligonucleotide
  Antisense strand to SEQ ID NO: 131436
uagcaggcaauauaacagu

SEQ ID NO: 131438 - RNA, 19 nt, Artificial Sequence
  Description of Artificial Sequence: Synthetic oligonucleotide
  Sense strand starting at position 986 of SEQ ID NO: 1683
agcgcaaucuaguuccuga

SEQ ID NO: 131439 - RNA, 19 nt, Artificial Sequence
  Description of Artificial Sequence: Synthetic oligonucleotide
  Antisense strand to SEQ ID NO: 131438
ucaggaacuagauugcgcu

SEQ ID NO: 131440 - RNA, 19 nt, Artificial Sequence
  Description of Artificial Sequence: Synthetic oligonucleotide
  Sense strand starting at position 490 of SEQ ID NO: 1683
agguacuacucaguauaag

SEQ ID NO: 131441 - RNA, 19 nt, Artificial Sequence
  Description of Artificial Sequence: Synthetic oligonucleotide
  Antisense strand to SEQ ID NO: 131440
cuuauacugaguaguaccu

SEQ ID NO: 131442 - RNA, 19 nt, Artificial Sequence
  Description of Artificial Sequence: Synthetic oligonucleotide
  Sense strand starting at position 424 of SEQ ID NO: 1683
cacauugcucugggagcua

SEQ ID NO: 131443 - RNA, 19 nt, Artificial Sequence
  Description of Artificial Sequence: Synthetic oligonucleotide
  Antisense strand to SEQ ID NO: 131442
uagcucccagagcaaugug

SEQ ID NO: 131444 - RNA, 19 nt, Artificial Sequence
  Description of Artificial Sequence: Synthetic oligonucleotide
  Sense strand starting at position 215 of SEQ ID NO: 1683
uuuaguuuccuguaacuca

SEQ ID NO: 131445 - RNA, 19 nt, Artificial Sequence
  Description of Artificial Sequence: Synthetic oligonucleotide
  Antisense strand to SEQ ID NO: 131444
ugaguuacaggaaacuaaa

SEQ ID NO: 131446 - RNA, 19 nt, Artificial Sequence
  Description of Artificial Sequence: Synthetic oligonucleotide
  Sense strand starting at position 120 of SEQ ID NO: 1683
cuggaaguugguuagagua

SEQ ID NO: 131447 - RNA, 19 nt, Artificial Sequence
  Description of Artificial Sequence: Synthetic oligonucleotide
  Antisense strand to SEQ ID NO: 131446
uacucuaaccaacuuccag

SEQ ID NO: 131448 - RNA, 19 nt, Artificial Sequence
  Description of Artificial Sequence: Synthetic oligonucleotide
  Sense strand starting at position 119 of SEQ ID NO: 1683
acuggaaguugguuagagu

SEQ ID NO: 131449 - RNA, 19 nt, Artificial Sequence
  Description of Artificial Sequence: Synthetic oligonucleotide
  Antisense strand to SEQ ID NO: 131448
acucuaaccaacuuccagu

SEQ ID NO: 131450 - RNA, 19 nt, Artificial Sequence
  Description of Artificial Sequence: Synthetic oligonucleotide
  Sense strand starting at position 3384 of SEQ ID NO: 1682
aaucuagguuacucguaaa

SEQ ID NO: 131451 - RNA, 19 nt, Artificial Sequence
  Description of Artificial Sequence: Synthetic oligonucleotide
  Antisense strand to SEQ ID NO: 131450
uuuacgaguaaccuagauu

SEQ ID NO: 131452 - RNA, 19 nt, Artificial Sequence
  Description of Artificial Sequence: Synthetic oligonucleotide
  Sense strand starting at position 3383 of SEQ ID NO: 1682
aaaucuagguuacucguaa

SEQ ID NO: 131453 - RNA, 19 nt, Artificial Sequence
  Description of Artificial Sequence: Synthetic oligonucleotide
  Antisense strand to SEQ ID NO: 131452
uuacgaguaaccuagauuu

SEQ ID NO: 131454 - RNA, 19 nt, Artificial Sequence
  Description of Artificial Sequence: Synthetic oligonucleotide
  Sense strand starting at position 3355 of SEQ ID NO: 1682
acaauagcuccaugagaua

SEQ ID NO: 131455 - RNA, 19 nt, Artificial Sequence
  Description of Artificial Sequence: Synthetic oligonucleotide
  Antisense strand to SEQ ID NO: 131454
uaucucauggagcuauugu

SEQ ID NO: 131456 - RNA, 19 nt, Artificial Sequence
  Description of Artificial Sequence: Synthetic oligonucleotide
  Sense strand starting at position 3059 of SEQ ID NO: 1682
caggacaagugagcuuaaa

SEQ ID NO: 131457 - RNA, 19 nt, Artificial Sequence
  Description of Artificial Sequence: Synthetic oligonucleotide
  Antisense strand to SEQ ID NO: 131456
uuuaagcucacuuguccug

SEQ ID NO: 131458 - RNA, 19 nt, Artificial Sequence
  Description of Artificial Sequence: Synthetic oligonucleotide
  Sense strand starting at position 2943 of SEQ ID NO: 1682
auaagaagguaccugugua

SEQ ID NO: 131459 - RNA, 19 nt, Artificial Sequence
  Description of Artificial Sequence: Synthetic oligonucleotide
  Antisense strand to SEQ ID NO: 131458
uacacagguaccuucuuau

SEQ ID NO: 131460 - RNA, 19 nt, Artificial Sequence
  Description of Artificial Sequence: Synthetic oligonucleotide
  Sense strand starting at position 2900 of SEQ ID NO: 1682
augcuuagauuccuggaca

SEQ ID NO: 131461 - RNA, 19 nt, Artificial Sequence
  Description of Artificial Sequence: Synthetic oligonucleotide
  Antisense strand to SEQ ID NO: 131460
uguccaggaaucuaagcau

SEQ ID NO: 131462 - RNA, 19 nt, Artificial Sequence
  Description of Artificial Sequence: Synthetic oligonucleotide
  Sense strand starting at position 2824 of SEQ ID NO: 1682
caaacuuuccugcaagggu

SEQ ID NO: 131463 - RNA, 19 nt, Artificial Sequence
  Description of Artificial Sequence: Synthetic oligonucleotide
  Antisense strand to SEQ ID NO: 131462
acccuugcaggaaaguuug

SEQ ID NO: 131464 - RNA, 19 nt, Artificial Sequence
  Description of Artificial Sequence: Synthetic oligonucleotide
  Sense strand starting at position 2685 of SEQ ID NO: 1682
uccacuacugcauaguauu

SEQ ID NO: 131465 - RNA, 19 nt, Artificial Sequence
  Description of Artificial Sequence: Synthetic oligonucleotide
  Antisense strand to SEQ ID NO: 131464
aauacuaugcaguagugga

SEQ ID NO: 131466 - RNA, 19 nt, Artificial Sequence
  Description of Artificial Sequence: Synthetic oligonucleotide
  Sense strand starting at position 2519 of SEQ ID NO: 1682
cuguuugguggagauuaac

SEQ ID NO: 131467 - RNA, 19 nt, Artificial Sequence
  Description of Artificial Sequence: Synthetic oligonucleotide
  Antisense strand to SEQ ID NO: 131466
guuaaucuccaccaaacag

SEQ ID NO: 131468 - RNA, 19 nt, Artificial Sequence
  Description of Artificial Sequence: Synthetic oligonucleotide
  Sense strand starting at position 2517 of SEQ ID NO: 1682
aacuguuugguggagauua

SEQ ID NO: 131469 - RNA, 19 nt, Artificial Sequence
  Description of Artificial Sequence: Synthetic oligonucleotide
  Antisense strand to SEQ ID NO: 131468
uaaucuccaccaaacaguu

SEQ ID NO: 131470 - RNA, 19 nt, Artificial Sequence
  Description of Artificial Sequence: Synthetic oligonucleotide
  Sense strand starting at position 2514 of SEQ ID NO: 1682
cagaacuguuugguggaga

SEQ ID NO: 131471 - RNA, 19 nt, Artificial Sequence
  Description of Artificial Sequence: Synthetic oligonucleotide
  Antisense strand to SEQ ID NO: 131470
ucuccaccaaacaguucug

SEQ ID NO: 131472 - RNA, 19 nt, Artificial Sequence
  Description of Artificial Sequence: Synthetic oligonucleotide
  Sense strand starting at position 2512 of SEQ ID NO: 1682
cccagaacuguuuggugga

SEQ ID NO: 131473 - RNA, 19 nt, Artificial Sequence
  Description of Artificial Sequence: Synthetic oligonucleotide
  Antisense strand to SEQ ID NO: 131472
uccaccaaacaguucuggg

SEQ ID NO: 131474 - RNA, 19 nt, Artificial Sequence
  Description of Artificial Sequence: Synthetic oligonucleotide
  Sense strand starting at position 2408 of SEQ ID NO: 1682
cguguuuagcaacagaaau

SEQ ID NO: 131475 - RNA, 19 nt, Artificial Sequence
  Description of Artificial Sequence: Synthetic oligonucleotide
  Antisense strand to SEQ ID NO: 131474
auuucuguugcuaaacacg

SEQ ID NO: 131476 - RNA, 19 nt, Artificial Sequence
  Description of Artificial Sequence: Synthetic oligonucleotide
  Sense strand starting at position 2380 of SEQ ID NO: 1682
aaugaagugagaugguguu

SEQ ID NO: 131477 - RNA, 19 nt, Artificial Sequence
  Description of Artificial Sequence: Synthetic oligonucleotide
  Antisense strand to SEQ ID NO: 131476
aacaccaucucacuucauu

SEQ ID NO: 131478 - RNA, 19 nt, Artificial Sequence
  Description of Artificial Sequence: Synthetic oligonucleotide
  Sense strand starting at position 2362 of SEQ ID NO: 1682
augcccuuaucucuggaaa

SEQ ID NO: 131479 - RNA, 19 nt, Artificial Sequence
  Description of Artificial Sequence: Synthetic oligonucleotide
  Antisense strand to SEQ ID NO: 131478
uuuccagagauaagggcau

SEQ ID NO: 131480 - RNA, 19 nt, Artificial Sequence
  Description of Artificial Sequence: Synthetic oligonucleotide
  Sense strand starting at position 2344 of SEQ ID NO: 1682
cugagaaacgcaugacaaa

SEQ ID NO: 131481 - RNA, 19 nt, Artificial Sequence
  Description of Artificial Sequence: Synthetic oligonucleotide
  Antisense strand to SEQ ID NO: 131480
uuugucaugcguuucucag

SEQ ID NO: 131482 - RNA, 19 nt, Artificial Sequence
  Description of Artificial Sequence: Synthetic oligonucleotide
  Sense strand starting at position 2234 of SEQ ID NO: 1682
gguucugcuacauaaggaa

SEQ ID NO: 131483 - RNA, 19 nt, Artificial Sequence
  Description of Artificial Sequence: Synthetic oligonucleotide
  Antisense strand to SEQ ID NO: 131482
uuccuuauguagcagaacc

SEQ ID NO: 131484 - RNA, 19 nt, Artificial Sequence
  Description of Artificial Sequence: Synthetic oligonucleotide
  Sense strand starting at position 2128 of SEQ ID NO: 1682
gaaggagauuaaccgcaaa

SEQ ID NO: 131485 - RNA, 19 nt, Artificial Sequence
  Description of Artificial Sequence: Synthetic oligonucleotide
  Antisense strand to SEQ ID NO: 131484
uuugcgguuaaucuccuuc

SEQ ID NO: 131486 - RNA, 19 nt, Artificial Sequence
  Description of Artificial Sequence: Synthetic oligonucleotide
  Sense strand starting at position 1512 of SEQ ID NO: 1682
gguuauaucuuauucuuac

SEQ ID NO: 131487 - RNA, 19 nt, Artificial Sequence
  Description of Artificial Sequence: Synthetic oligonucleotide
  Antisense strand to SEQ ID NO: 131486
guaagaauaagauauaacc

SEQ ID NO: 131488 - RNA, 19 nt, Artificial Sequence
  Description of Artificial Sequence: Synthetic oligonucleotide
  Sense strand starting at position 1435 of SEQ ID NO: 1682
gggucugauguuuauaagu

SEQ ID NO: 131489 - RNA, 19 nt, Artificial Sequence
  Description of Artificial Sequence: Synthetic oligonucleotide
  Antisense strand to SEQ ID NO: 131488
acuuauaaacaucagaccc

SEQ ID NO: 131490 - RNA, 19 nt, Artificial Sequence
  Description of Artificial Sequence: Synthetic oligonucleotide
  Sense strand starting at position 1376 of SEQ ID NO: 1682
agagaagcauguuucuacu

SEQ ID NO: 131491 - RNA, 19 nt, Artificial Sequence
  Description of Artificial Sequence: Synthetic oligonucleotide
  Antisense strand to SEQ ID NO: 131490
aguagaaacaugcuucucu

SEQ ID NO: 131492 - RNA, 19 nt, Artificial Sequence
  Description of Artificial Sequence: Synthetic oligonucleotide
  Sense strand starting at position 1092 of SEQ ID NO: 1682
guguguaguaaguaaauaa

SEQ ID NO: 131493 - RNA, 19 nt, Artificial Sequence
  Description of Artificial Sequence: Synthetic oligonucleotide
  Antisense strand to SEQ ID NO: 131492
uuauuuacuuacuacacac

SEQ ID NO: 131494 - RNA, 19 nt, Artificial Sequence
  Description of Artificial Sequence: Synthetic oligonucleotide
  Sense strand starting at position 996 of SEQ ID NO: 1682
agaaauugguccucugaac

SEQ ID NO: 131495 - RNA, 19 nt, Artificial Sequence
  Description of Artificial Sequence: Synthetic oligonucleotide
  Antisense strand to SEQ ID NO: 131494
guucagaggaccaauuucu

SEQ ID NO: 131496 - RNA, 19 nt, Artificial Sequence
  Description of Artificial Sequence: Synthetic oligonucleotide
  Sense strand starting at position 985 of SEQ ID NO: 1682
guauucuguccagaaauug

SEQ ID NO: 131497 - RNA, 19 nt, Artificial Sequence
  Description of Artificial Sequence: Synthetic oligonucleotide
  Antisense strand to SEQ ID NO: 131496
caauuucuggacagaauac

SEQ ID NO: 131498 - RNA, 19 nt, Artificial Sequence
  Description of Artificial Sequence: Synthetic oligonucleotide
  Sense strand starting at position 983 of SEQ ID NO: 1682
uuguauucuguccagaaau

SEQ ID NO: 131499 - RNA, 19 nt, Artificial Sequence
  Description of Artificial Sequence: Synthetic oligonucleotide
  Antisense strand to SEQ ID NO: 131498
auuucuggacagaauacaa

SEQ ID NO: 131500 - RNA, 19 nt, Artificial Sequence
  Description of Artificial Sequence: Synthetic oligonucleotide
  Sense strand starting at position 819 of SEQ ID NO: 1682
acgcaauuaccaggaagaa

SEQ ID NO: 131501 - RNA, 19 nt, Artificial Sequence
  Description of Artificial Sequence: Synthetic oligonucleotide
  Antisense strand to SEQ ID NO: 131500
uucuuccugguaauugcgu

SEQ ID NO: 131502 - RNA, 19 nt, Artificial Sequence
  Description of Artificial Sequence: Synthetic oligonucleotide
  Sense strand starting at position 735 of SEQ ID NO: 1682
gaaggucacgcauggacaa

SEQ ID NO: 131503 - RNA, 19 nt, Artificial Sequence
  Description of Artificial Sequence: Synthetic oligonucleotide
  Antisense strand to SEQ ID NO: 131502
uuguccaugcgugaccuuc

SEQ ID NO: 131504 - RNA, 19 nt, Artificial Sequence
  Description of Artificial Sequence: Synthetic oligonucleotide
  Sense strand starting at position 673 of SEQ ID NO: 1682
guucuuacaguaugaauac

SEQ ID NO: 131505 - RNA, 19 nt, Artificial Sequence
  Description of Artificial Sequence: Synthetic oligonucleotide
  Antisense strand to SEQ ID NO: 131504
guauucauacuguaagaac

SEQ ID NO: 131506 - RNA, 19 nt, Artificial Sequence
  Description of Artificial Sequence: Synthetic oligonucleotide
  Sense strand starting at position 671 of SEQ ID NO: 1682
gaguucuuacaguaugaau

SEQ ID NO: 131507 - RNA, 19 nt, Artificial Sequence
  Description of Artificial Sequence: Synthetic oligonucleotide
  Antisense strand to SEQ ID NO: 131506
auucauacuguaagaacuc

SEQ ID NO: 131508 - RNA, 19 nt, Artificial Sequence
  Description of Artificial Sequence: Synthetic oligonucleotide
  Sense strand starting at position 567 of SEQ ID NO: 1682
auccuaagacaguguuaca

SEQ ID NO: 131509 - RNA, 19 nt, Artificial Sequence
  Description of Artificial Sequence: Synthetic oligonucleotide
  Antisense strand to SEQ ID NO: 131508
uguaacacugucuuaggau

SEQ ID NO: 131510 - RNA, 19 nt, Artificial Sequence
  Description of Artificial Sequence: Synthetic oligonucleotide
  Sense strand starting at position 507 of SEQ ID NO: 1682
agaagcucagaauguagua

SEQ ID NO: 131511 - RNA, 19 nt, Artificial Sequence
  Description of Artificial Sequence: Synthetic oligonucleotide
  Antisense strand to SEQ ID NO: 131510
uacuacauucugagcuucu

SEQ ID NO: 131512 - RNA, 19 nt, Artificial Sequence
  Description of Artificial Sequence: Synthetic oligonucleotide
  Sense strand starting at position 344 of SEQ ID NO: 1682
caaguagaucaauagacgu

SEQ ID NO: 131513 - RNA, 19 nt, Artificial Sequence
  Description of Artificial Sequence: Synthetic oligonucleotide
  Antisense strand to SEQ ID NO: 131512
acgucuauugaucuacuug

SEQ ID NO: 131514 - RNA, 19 nt, Artificial Sequence
  Description of Artificial Sequence: Synthetic oligonucleotide
  Sense strand starting at position 194 of SEQ ID NO: 1682
gaagaagugccagggugaa

SEQ ID NO: 131515 - RNA, 19 nt, Artificial Sequence
  Description of Artificial Sequence: Synthetic oligonucleotide
  Antisense strand to SEQ ID NO: 131514
uucacccuggcacuucuuc

SEQ ID NO: 131516 - RNA, 19 nt, Artificial Sequence
  Description of Artificial Sequence: Synthetic oligonucleotide
  Sense strand starting at position 178 of SEQ ID NO: 1682
ccugucgcucuugugugaa

SEQ ID NO: 131517 - RNA, 19 nt, Artificial Sequence
  Description of Artificial Sequence: Synthetic oligonucleotide
  Antisense strand to SEQ ID NO: 131516
uucacacaagagcgacagg

SEQ ID NO: 131518 - RNA, 19 nt, Artificial Sequence
  Description of Artificial Sequence: Synthetic oligonucleotide
  Sense strand starting at position 149 of SEQ ID NO: 1682
uugcaauccagggagcuuu

SEQ ID NO: 131519 - RNA, 19 nt, Artificial Sequence
  Description of Artificial Sequence: Synthetic oligonucleotide
  Antisense strand to SEQ ID NO: 131518
aaagcucccuggauugcaa

SEQ ID NO: 131520 - RNA, 19 nt, Artificial Sequence
  Description of Artificial Sequence: Synthetic oligonucleotide
  Sense strand starting at position 127 of SEQ ID NO: 1682
agaguaaacuagguauccu

SEQ ID NO: 131521 - RNA, 19 nt, Artificial Sequence
  Description of Artificial Sequence: Synthetic oligonucleotide
  Antisense strand to SEQ ID NO: 131520
aggauaccuaguuuacucu

SEQ ID NO: 131522 - RNA, 19 nt, Artificial Sequence
  Description of Artificial Sequence: Synthetic oligonucleotide
  Sense strand starting at position 116 of SEQ ID NO: 1682
ggcuuagcuggagaguaaa

SEQ ID NO: 131523 - RNA, 19 nt, Artificial Sequence
  Description of Artificial Sequence: Synthetic oligonucleotide
  Antisense strand to SEQ ID NO: 131522
uuuacucuccagcuaagcc

SEQ ID NO: 131524 - RNA, 19 nt, Artificial Sequence
  Description of Artificial Sequence: Synthetic oligonucleotide
  Sense strand starting at position 114 of SEQ ID NO: 1682
ugggcuuagcuggagagua

SEQ ID NO: 131525 - RNA, 19 nt, Artificial Sequence
  Description of Artificial Sequence: Synthetic oligonucleotide
  Antisense strand to SEQ ID NO: 131524
uacucuccagcuaagccca

SEQ ID NO: 131526 - RNA, 19 nt, Artificial Sequence
  Description of Artificial Sequence: Synthetic oligonucleotide
  Sense strand starting at position 49 of SEQ ID NO: 1682
ccaauuagcugaguaagaa

SEQ ID NO: 131527 - RNA, 19 nt, Artificial Sequence
  Description of Artificial Sequence: Synthetic oligonucleotide
  Antisense strand to SEQ ID NO: 131526
uucuuacucagcuaauugg

SEQ ID NO: 131528 - RNA, 19 nt, Artificial Sequence
  Description of Artificial Sequence: Synthetic oligonucleotide
  Sense strand starting at position 47 of SEQ ID NO: 1682
caccaauuagcugaguaag

SEQ ID NO: 131529 - RNA, 19 nt, Artificial Sequence
  Description of Artificial Sequence: Synthetic oligonucleotide
  Antisense strand to SEQ ID NO: 131528
cuuacucagcuaauuggug

SEQ ID NO: 131530 - RNA, 19 nt, Artificial Sequence
  Description of Artificial Sequence: Synthetic oligonucleotide
  Sense strand starting at position 36 of SEQ ID NO: 1685
agaucagacuugccagaca

SEQ ID NO: 131531 - RNA, 19 nt, Artificial Sequence
  Description of Artificial Sequence: Synthetic oligonucleotide
  Antisense strand to SEQ ID NO: 131530
ugucuggcaagucugaucu

SEQ ID NO: 131532 - RNA, 19 nt, Artificial Sequence
  Description of Artificial Sequence: Synthetic oligonucleotide
  Sense strand starting at position 103 of SEQ ID NO: 1685
ucugaauuguugcuguaaa

SEQ ID NO: 131533 - RNA, 19 nt, Artificial Sequence
  Description of Artificial Sequence: Synthetic oligonucleotide
  Antisense strand to SEQ ID NO: 131532
uuuacagcaacaauucaga

SEQ ID NO: 131534 - RNA, 19 nt, Artificial Sequence
  Description of Artificial Sequence: Synthetic oligonucleotide
  Sense strand starting at position 181 of SEQ ID NO: 1685
ggucuuguucaaggucuga

SEQ ID NO: 131535 - RNA, 19 nt, Artificial Sequence
  Description of Artificial Sequence: Synthetic oligonucleotide
  Antisense strand to SEQ ID NO: 131534
ucagaccuugaacaagacc

SEQ ID NO: 131536 - RNA, 19 nt, Artificial Sequence
  Description of Artificial Sequence: Synthetic oligonucleotide
  Sense strand starting at position 198 of SEQ ID NO: 1685
gagucugacagugagcuau

SEQ ID NO: 131537 - RNA, 19 nt, Artificial Sequence
  Description of Artificial Sequence: Synthetic oligonucleotide
  Antisense strand to SEQ ID NO: 131536
auagcucacugucagacuc

SEQ ID NO: 131538 - RNA, 19 nt, Artificial Sequence
  Description of Artificial Sequence: Synthetic oligonucleotide
  Sense strand starting at position 208 of SEQ ID NO: 1685
gugagcuaucacuaucaaa

SEQ ID NO: 131539 - RNA, 19 nt, Artificial Sequence
  Description of Artificial Sequence: Synthetic oligonucleotide
  Antisense strand to SEQ ID NO: 131538
uuugauagugauagcucac

SEQ ID NO: 131540 - RNA, 19 nt, Artificial Sequence
  Description of Artificial Sequence: Synthetic oligonucleotide
  Sense strand starting at position 314 of SEQ ID NO: 1685
aucuaucaguuuguuacua

SEQ ID NO: 131541 - RNA, 19 nt, Artificial Sequence
  Description of Artificial Sequence: Synthetic oligonucleotide
  Antisense strand to SEQ ID NO: 131540
uaguaacaaacugauagau

SEQ ID NO: 131542 - RNA, 19 nt, Artificial Sequence
  Description of Artificial Sequence: Synthetic oligonucleotide
  Sense strand starting at position 351 of SEQ ID NO: 1685
augggaaggucaccuucua

SEQ ID NO: 131543 - RNA, 19 nt, Artificial Sequence
  Description of Artificial Sequence: Synthetic oligonucleotide
  Antisense strand to SEQ ID NO: 131542
uagaaggugaccuucccau

SEQ ID NO: 131544 - RNA, 19 nt, Artificial Sequence
  Description of Artificial Sequence: Synthetic oligonucleotide
  Sense strand starting at position 358 of SEQ ID NO: 1685
ggucaccuucuagguauga

SEQ ID NO: 131545 - RNA, 19 nt, Artificial Sequence
  Description of Artificial Sequence: Synthetic oligonucleotide
  Antisense strand to SEQ ID NO: 131544
ucauaccuagaaggugacc

SEQ ID NO: 131546 - RNA, 19 nt, Artificial Sequence
  Description of Artificial Sequence: Synthetic oligonucleotide
  Sense strand starting at position 362 of SEQ ID NO: 1685
accuucuagguaugaguaa

SEQ ID NO: 131547 - RNA, 19 nt, Artificial Sequence
  Description of Artificial Sequence: Synthetic oligonucleotide
  Antisense strand to SEQ ID NO: 131546
uuacucauaccuagaaggu

SEQ ID NO: 131548 - RNA, 19 nt, Artificial Sequence
  Description of Artificial Sequence: Synthetic oligonucleotide
  Sense strand starting at position 369 of SEQ ID NO: 1685
agguaugaguaaucaacua

SEQ ID NO: 131549 - RNA, 19 nt, Artificial Sequence
  Description of Artificial Sequence: Synthetic oligonucleotide
  Antisense strand to SEQ ID NO: 131548
uaguugauuacucauaccu

SEQ ID NO: 131550 - RNA, 19 nt, Artificial Sequence
  Description of Artificial Sequence: Synthetic oligonucleotide
  Sense strand starting at position 416 of SEQ ID NO: 1685
uuccauagguaucucacua

SEQ ID NO: 131551 - RNA, 19 nt, Artificial Sequence
  Description of Artificial Sequence: Synthetic oligonucleotide
  Antisense strand to SEQ ID NO: 131550
uagugagauaccuauggaa

SEQ ID NO: 131552 - RNA, 19 nt, Artificial Sequence
  Description of Artificial Sequence: Synthetic oligonucleotide
  Sense strand starting at position 420 of SEQ ID NO: 1685
auagguaucucacuagaug

SEQ ID NO: 131553 - RNA, 19 nt, Artificial Sequence
  Description of Artificial Sequence: Synthetic oligonucleotide
  Antisense strand to SEQ ID NO: 131552
caucuagugagauaccuau

SEQ ID NO: 131554 - RNA, 19 nt, Artificial Sequence
  Description of Artificial Sequence: Synthetic oligonucleotide
  Sense strand starting at position 452 of SEQ ID NO: 1685
agggcucucuucuuccaaa

SEQ ID NO: 131555 - RNA, 19 nt, Artificial Sequence
  Description of Artificial Sequence: Synthetic oligonucleotide
  Antisense strand to SEQ ID NO: 131554
uuuggaagaagagagcccu

SEQ ID NO: 131556 - RNA, 19 nt, Artificial Sequence
  Description of Artificial Sequence: Synthetic oligonucleotide
  Sense strand starting at position 453 of SEQ ID NO: 1685
gggcucucuucuuccaaag

SEQ ID NO: 131557 - RNA, 19 nt, Artificial Sequence
  Description of Artificial Sequence: Synthetic oligonucleotide
  Antisense strand to SEQ ID NO: 131556
cuuuggaagaagagagccc

SEQ ID NO: 131558 - RNA, 19 nt, Artificial Sequence
  Description of Artificial Sequence: Synthetic oligonucleotide
  Sense strand starting at position 474 of SEQ ID NO: 1685
aguggaaccucuguaguua

SEQ ID NO: 131559 - RNA, 19 nt, Artificial Sequence
  Description of Artificial Sequence: Synthetic oligonucleotide
  Antisense strand to SEQ ID NO: 131558
uaacuacagagguuccacu

SEQ ID NO: 131560 - RNA, 19 nt, Artificial Sequence
  Description of Artificial Sequence: Synthetic oligonucleotide
  Sense strand starting at position 475 of SEQ ID NO: 1685
guggaaccucuguaguuaa

SEQ ID NO: 131561 - RNA, 19 nt, Artificial Sequence
  Description of Artificial Sequence: Synthetic oligonucleotide
  Antisense strand to SEQ ID NO: 131560
uuaacuacagagguuccac

SEQ ID NO: 131562 - RNA, 19 nt, Artificial Sequence
  Description of Artificial Sequence: Synthetic oligonucleotide
  Sense strand starting at position 523 of SEQ ID NO: 1685
ggguguuuccaggaauguc

SEQ ID NO: 131563 - RNA, 19 nt, Artificial Sequence
  Description of Artificial Sequence: Synthetic oligonucleotide
  Antisense strand to SEQ ID NO: 131562
gacauuccuggaaacaccc

SEQ ID NO: 131564 - RNA, 19 nt, Artificial Sequence
  Description of Artificial Sequence: Synthetic oligonucleotide
  Sense strand starting at position 585 of SEQ ID NO: 1685
uuuggauccauccggagaa

SEQ ID NO: 131565 - RNA, 19 nt, Artificial Sequence
  Description of Artificial Sequence: Synthetic oligonucleotide
  Antisense strand to SEQ ID NO: 131564
uucuccggauggauccaaa

SEQ ID NO: 131566 - RNA, 19 nt, Artificial Sequence
  Description of Artificial Sequence: Synthetic oligonucleotide
  Sense strand starting at position 724 of SEQ ID NO: 1685
guaggccuuccguagaaag

SEQ ID NO: 131567 - RNA, 19 nt, Artificial Sequence
  Description of Artificial Sequence: Synthetic oligonucleotide
  Antisense strand to SEQ ID NO: 131566
cuuucuacggaaggccuac

SEQ ID NO: 131568 - RNA, 19 nt, Artificial Sequence
  Description of Artificial Sequence: Synthetic oligonucleotide
  Sense strand starting at position 769 of SEQ ID NO: 1685
gaaugaguucugcacucag

SEQ ID NO: 131569 - RNA, 19 nt, Artificial Sequence
  Description of Artificial Sequence: Synthetic oligonucleotide
  Antisense strand to SEQ ID NO: 131568
cugagugcagaacucauuc

SEQ ID NO: 131570 - RNA, 19 nt, Artificial Sequence
  Description of Artificial Sequence: Synthetic oligonucleotide
  Sense strand starting at position 798 of SEQ ID NO: 1685
ugacaaugguccucucuca

SEQ ID NO: 131571 - RNA, 19 nt, Artificial Sequence
  Description of Artificial Sequence: Synthetic oligonucleotide
  Antisense strand to SEQ ID NO: 131570
ugagagaggaccauuguca

SEQ ID NO: 131572 - RNA, 19 nt, Artificial Sequence
  Description of Artificial Sequence: Synthetic oligonucleotide
  Sense strand starting at position 859 of SEQ ID NO: 1685
cgcuauuuccaucacuguu

SEQ ID NO: 131573 - RNA, 19 nt, Artificial Sequence
  Description of Artificial Sequence: Synthetic oligonucleotide
  Antisense strand to SEQ ID NO: 131572
aacagugauggaaauagcg

SEQ ID NO: 131574 - RNA, 19 nt, Artificial Sequence
  Description of Artificial Sequence: Synthetic oligonucleotide
  Sense strand starting at position 865 of SEQ ID NO: 1685
uuccaucacuguucugaua

SEQ ID NO: 131575 - RNA, 19 nt, Artificial Sequence
  Description of Artificial Sequence: Synthetic oligonucleotide
  Antisense strand to SEQ ID NO: 131574
uaucagaacagugauggaa

SEQ ID NO: 131576 - RNA, 19 nt, Artificial Sequence
  Description of Artificial Sequence: Synthetic oligonucleotide
  Sense strand starting at position 884 of SEQ ID NO: 1685
gcugacuucuagccuagga

SEQ ID NO: 131577 - RNA, 19 nt, Artificial Sequence
  Description of Artificial Sequence: Synthetic oligonucleotide
  Antisense strand to SEQ ID NO: 131576
uccuaggcuagaagucagc

SEQ ID NO: 131578 - RNA, 19 nt, Artificial Sequence
  Description of Artificial Sequence: Synthetic oligonucleotide
  Sense strand starting at position 914 of SEQ ID NO: 1685
guaggaaggguucagcaaa

SEQ ID NO: 131579 - RNA, 19 nt, Artificial Sequence
  Description of Artificial Sequence: Synthetic oligonucleotide
  Antisense strand to SEQ ID NO: 131578
uuugcugaacccuuccuac

SEQ ID NO: 131580 - RNA, 19 nt, Artificial Sequence
  Description of Artificial Sequence: Synthetic oligonucleotide
  Sense strand starting at position 944 of SEQ ID NO: 1685
acugaaauugucuaugcgu

SEQ ID NO: 131581 - RNA, 19 nt, Artificial Sequence
  Description of Artificial Sequence: Synthetic oligonucleotide
  Antisense strand to SEQ ID NO: 131580
acgcauagacaauuucagu

SEQ ID NO: 131582 - RNA, 19 nt, Artificial Sequence
  Description of Artificial Sequence: Synthetic oligonucleotide
  Sense strand starting at position 994 of SEQ ID NO: 1685
caaguucccgguuagagua

SEQ ID NO: 131583 - RNA, 19 nt, Artificial Sequence
  Description of Artificial Sequence: Synthetic oligonucleotide
  Antisense strand to SEQ ID NO: 131582
uacucuaaccgggaacuug

SEQ ID NO: 131584 - RNA, 19 nt, Artificial Sequence
  Description of Artificial Sequence: Synthetic oligonucleotide
  Sense strand starting at position 1138 of SEQ ID NO: 1685
gcgaguauugccaguggau

SEQ ID NO: 131585 - RNA, 19 nt, Artificial Sequence
  Description of Artificial Sequence: Synthetic oligonucleotide
  Antisense strand to SEQ ID NO: 131584
auccacuggcaauacucgc

SEQ ID NO: 131586 - RNA, 19 nt, Artificial Sequence
  Description of Artificial Sequence: Synthetic oligonucleotide
  Sense strand starting at position 1223 of SEQ ID NO: 1685
caaagauuucugcgcugug

SEQ ID NO: 131587 - RNA, 19 nt, Artificial Sequence
  Description of Artificial Sequence: Synthetic oligonucleotide
  Antisense strand to SEQ ID NO: 131586
cacagcgcagaaaucuuug

SEQ ID NO: 131588 - RNA, 19 nt, Artificial Sequence
  Description of Artificial Sequence: Synthetic oligonucleotide
  Sense strand starting at position 1282 of SEQ ID NO: 1685
cgcuguagacuccagcaaa

SEQ ID NO: 131589 - RNA, 19 nt, Artificial Sequence
  Description of Artificial Sequence: Synthetic oligonucleotide
  Antisense strand to SEQ ID NO: 131588
uuugcuggagucuacagcg

SEQ ID NO: 131590 - RNA, 19 nt, Artificial Sequence
  Description of Artificial Sequence: Synthetic oligonucleotide
  Sense strand starting at position 1303 of SEQ ID NO: 1685
cuagccaucuggucggaaa

SEQ ID NO: 131591 - RNA, 19 nt, Artificial Sequence
  Description of Artificial Sequence: Synthetic oligonucleotide
  Antisense strand to SEQ ID NO: 131590
uuuccgaccagauggcuag

SEQ ID NO: 131592 - RNA, 19 nt, Artificial Sequence
  Description of Artificial Sequence: Synthetic oligonucleotide
  Sense strand starting at position 1305 of SEQ ID NO: 1685
agccaucuggucggaaaca

SEQ ID NO: 131593 - RNA, 19 nt, Artificial Sequence
  Description of Artificial Sequence: Synthetic oligonucleotide
  Antisense strand to SEQ ID NO: 131592
uguuuccgaccagauggcu

SEQ ID NO: 131594 - RNA, 19 nt, Artificial Sequence
  Description of Artificial Sequence: Synthetic oligonucleotide
  Sense strand starting at position 1398 of SEQ ID NO: 1685
aguuucguccaguaacuga

SEQ ID NO: 131595 - RNA, 19 nt, Artificial Sequence
  Description of Artificial Sequence: Synthetic oligonucleotide
  Antisense strand to SEQ ID NO: 131594
ucaguuacuggacgaaacu

SEQ ID NO: 131596 - RNA, 19 nt, Artificial Sequence
  Description of Artificial Sequence: Synthetic oligonucleotide
  Sense strand starting at position 1505 of SEQ ID NO: 1685
uugcgaucgccgagggaaa

SEQ ID NO: 131597 - RNA, 19 nt, Artificial Sequence
  Description of Artificial Sequence: Synthetic oligonucleotide
  Antisense strand to SEQ ID NO: 131596
uuucccucggcgaucgcaa

SEQ ID NO: 131598 - RNA, 19 nt, Artificial Sequence
  Description of Artificial Sequence: Synthetic oligonucleotide
  Sense strand starting at position 2311 of SEQ ID NO: 1685
ccaacagcccucuagguua

SEQ ID NO: 131599 - RNA, 19 nt, Artificial Sequence
  Description of Artificial Sequence: Synthetic oligonucleotide
  Antisense strand to SEQ ID NO: 131598
uaaccuagagggcuguugg

SEQ ID NO: 131600 - RNA, 19 nt, Artificial Sequence
  Description of Artificial Sequence: Synthetic oligonucleotide
  Sense strand starting at position 2369 of SEQ ID NO: 1685
gaauuucccggaggcguuu

SEQ ID NO: 131601 - RNA, 19 nt, Artificial Sequence
  Description of Artificial Sequence: Synthetic oligonucleotide
  Antisense strand to SEQ ID NO: 131600
aaacgccuccgggaaauuc

SEQ ID NO: 131602 - RNA, 19 nt, Artificial Sequence
  Description of Artificial Sequence: Synthetic oligonucleotide
  Sense strand starting at position 2482 of SEQ ID NO: 1685
ggucaagucccuuauguaa

SEQ ID NO: 131603 - RNA, 19 nt, Artificial Sequence
  Description of Artificial Sequence: Synthetic oligonucleotide
  Antisense strand to SEQ ID NO: 131602
uuacauaagggacuugacc

SEQ ID NO: 131604 - RNA, 19 nt, Artificial Sequence
  Description of Artificial Sequence: Synthetic oligonucleotide
  Sense strand starting at position 2585 of SEQ ID NO: 1685
augcaagugcuauggaacu

SEQ ID NO: 131605 - RNA, 19 nt, Artificial Sequence
  Description of Artificial Sequence: Synthetic oligonucleotide
  Antisense strand to SEQ ID NO: 131604
aguuccauagcacuugcau

SEQ ID NO: 131606 - RNA, 19 nt, Artificial Sequence
  Description of Artificial Sequence: Synthetic oligonucleotide
  Sense strand starting at position 2591 of SEQ ID NO: 1685
gugcuauggaacuaguugu

SEQ ID NO: 131607 - RNA, 19 nt, Artificial Sequence
  Description of Artificial Sequence: Synthetic oligonucleotide
  Antisense strand to SEQ ID NO: 131606
acaacuaguuccauagcac

SEQ ID NO: 131608 - RNA, 19 nt, Artificial Sequence
  Description of Artificial Sequence: Synthetic oligonucleotide
  Sense strand starting at position 2597 of SEQ ID NO: 1685
uggaacuaguuguuauacu

SEQ ID NO: 131609 - RNA, 19 nt, Artificial Sequence
  Description of Artificial Sequence: Synthetic oligonucleotide
  Antisense strand to SEQ ID NO: 131608
aguauaacaacuaguucca

SEQ ID NO: 131610 - RNA, 19 nt, Artificial Sequence
  Description of Artificial Sequence: Synthetic oligonucleotide
  Sense strand starting at position 3924 of SEQ ID NO: 1686
cacuuugauguugguauaa

SEQ ID NO: 131611 - RNA, 19 nt, Artificial Sequence
  Description of Artificial Sequence: Synthetic oligonucleotide
  Antisense strand to SEQ ID NO: 131610
uuauaccaacaucaaagug

SEQ ID NO: 131612 - RNA, 19 nt, Artificial Sequence
  Description of Artificial Sequence: Synthetic oligonucleotide
  Sense strand starting at position 3899 of SEQ ID NO: 1686
gcucaugagucacuauucu

SEQ ID NO: 131613 - RNA, 19 nt, Artificial Sequence
  Description of Artificial Sequence: Synthetic oligonucleotide
  Antisense strand to SEQ ID NO: 131612
agaauagugacucaugagc

SEQ ID NO: 131614 - RNA, 19 nt, Artificial Sequence
  Description of Artificial Sequence: Synthetic oligonucleotide
  Sense strand starting at position 3806 of SEQ ID NO: 1686
aggagaggcuuagagagau

SEQ ID NO: 131615 - RNA, 19 nt, Artificial Sequence
  Description of Artificial Sequence: Synthetic oligonucleotide
  Antisense strand to SEQ ID NO: 131614
aucucucuaagccucuccu

SEQ ID NO: 131616 - RNA, 19 nt, Artificial Sequence
  Description of Artificial Sequence: Synthetic oligonucleotide
  Sense strand starting at position 3791 of SEQ ID NO: 1686
uuauuauaauuccagagga

SEQ ID NO: 131617 - RNA, 19 nt, Artificial Sequence
  Description of Artificial Sequence: Synthetic oligonucleotide
  Antisense strand to SEQ ID NO: 131616
uccucuggaauuauaauaa

SEQ ID NO: 131618 - RNA, 19 nt, Artificial Sequence
  Description of Artificial Sequence: Synthetic oligonucleotide
  Sense strand starting at position 3771 of SEQ ID NO: 1686
caauacucuugaguuaggu

SEQ ID NO: 131619 - RNA, 19 nt, Artificial Sequence
  Description of Artificial Sequence: Synthetic oligonucleotide
  Antisense strand to SEQ ID NO: 131618
accuaacucaagaguauug

SEQ ID NO: 131620 - RNA, 19 nt, Artificial Sequence
  Description of Artificial Sequence: Synthetic oligonucleotide
  Sense strand starting at position 3719 of SEQ ID NO: 1686
caguuaccugggcaaguau

SEQ ID NO: 131621 - RNA, 19 nt, Artificial Sequence
  Description of Artificial Sequence: Synthetic oligonucleotide
  Antisense strand to SEQ ID NO: 131620
auacuugcccagguaacug

SEQ ID NO: 131622 - RNA, 19 nt, Artificial Sequence
  Description of Artificial Sequence: Synthetic oligonucleotide
  Sense strand starting at position 3715 of SEQ ID NO: 1686
ucagcaguuaccugggcaa

SEQ ID NO: 131623 - RNA, 19 nt, Artificial Sequence
  Description of Artificial Sequence: Synthetic oligonucleotide
  Antisense strand to SEQ ID NO: 131622
uugcccagguaacugcuga

SEQ ID NO: 131624 - RNA, 19 nt, Artificial Sequence
  Description of Artificial Sequence: Synthetic oligonucleotide
  Sense strand starting at position 2795 of SEQ ID NO: 1686
guagauugucagggaaucu

SEQ ID NO: 131625 - RNA, 19 nt, Artificial Sequence
  Description of Artificial Sequence: Synthetic oligonucleotide
  Antisense strand to SEQ ID NO: 131624
agauucccugacaaucuac

SEQ ID NO: 131626 - RNA, 19 nt, Artificial Sequence
  Description of Artificial Sequence: Synthetic oligonucleotide
  Sense strand starting at position 2791 of SEQ ID NO: 1686
gccuguagauugucaggga

SEQ ID NO: 131627 - RNA, 19 nt, Artificial Sequence
  Description of Artificial Sequence: Synthetic oligonucleotide
  Antisense strand to SEQ ID NO: 131626
ucccugacaaucuacaggc

SEQ ID NO: 131628 - RNA, 19 nt, Artificial Sequence
  Description of Artificial Sequence: Synthetic oligonucleotide
  Sense strand starting at position 2784 of SEQ ID NO: 1686
cguuuaggccuguagauug

SEQ ID NO: 131629 - RNA, 19 nt, Artificial Sequence
  Description of Artificial Sequence: Synthetic oligonucleotide
  Antisense strand to SEQ ID NO: 131628
caaucuacaggccuaaacg

SEQ ID NO: 131630 - RNA, 19 nt, Artificial Sequence
  Description of Artificial Sequence: Synthetic oligonucleotide
  Sense strand starting at position 2718 of SEQ ID NO: 1686
agugauuauuguuucucuu

SEQ ID NO: 131631 - RNA, 19 nt, Artificial Sequence
  Description of Artificial Sequence: Synthetic oligonucleotide
  Antisense strand to SEQ ID NO: 131630
aagagaaacaauaaucacu

SEQ ID NO: 131632 - RNA, 19 nt, Artificial Sequence
  Description of Artificial Sequence: Synthetic oligonucleotide
  Sense strand starting at position 2717 of SEQ ID NO: 1686
gagugauuauuguuucucu

SEQ ID NO: 131633 - RNA, 19 nt, Artificial Sequence
  Description of Artificial Sequence: Synthetic oligonucleotide
  Antisense strand to SEQ ID NO: 131632
agagaaacaauaaucacuc

SEQ ID NO: 131634 - RNA, 19 nt, Artificial Sequence
  Description of Artificial Sequence: Synthetic oligonucleotide
  Sense strand starting at position 2708 of SEQ ID NO: 1686
cggagauuggagugauuau

SEQ ID NO: 131635 - RNA, 19 nt, Artificial Sequence
  Description of Artificial Sequence: Synthetic oligonucleotide
  Antisense strand to SEQ ID NO: 131634
auaaucacuccaaucuccg

SEQ ID NO: 131636 - RNA, 19 nt, Artificial Sequence
  Description of Artificial Sequence: Synthetic oligonucleotide
  Sense strand starting at position 2706 of SEQ ID NO: 1686
cucggagauuggagugauu

SEQ ID NO: 131637 - RNA, 19 nt, Artificial Sequence
  Description of Artificial Sequence: Synthetic oligonucleotide
  Antisense strand to SEQ ID NO: 131636
aaucacuccaaucuccgag

SEQ ID NO: 131638 - RNA, 19 nt, Artificial Sequence
  Description of Artificial Sequence: Synthetic oligonucleotide
  Sense strand starting at position 2654 of SEQ ID NO: 1686
gguuaagaccgucagccuu

SEQ ID NO: 131639 - RNA, 19 nt, Artificial Sequence
  Description of Artificial Sequence: Synthetic oligonucleotide
  Antisense strand to SEQ ID NO: 131638
aaggcugacggucuuaacc

SEQ ID NO: 131640 - RNA, 19 nt, Artificial Sequence
  Description of Artificial Sequence: Synthetic oligonucleotide
  Sense strand starting at position 2643 of SEQ ID NO: 1686
uccagaguuuagguuaaga

SEQ ID NO: 131641 - RNA, 19 nt, Artificial Sequence
  Description of Artificial Sequence: Synthetic oligonucleotide
  Antisense strand to SEQ ID NO: 131640
ucuuaaccuaaacucugga

SEQ ID NO: 131642 - RNA, 19 nt, Artificial Sequence
  Description of Artificial Sequence: Synthetic oligonucleotide
  Sense strand starting at position 2245 of SEQ ID NO: 1686
gggagucagucuuucccua

SEQ ID NO: 131643 - RNA, 19 nt, Artificial Sequence
  Description of Artificial Sequence: Synthetic oligonucleotide
  Antisense strand to SEQ ID NO: 131642
uagggaaagacugacuccc

SEQ ID NO: 131644 - RNA, 19 nt, Artificial Sequence
  Description of Artificial Sequence: Synthetic oligonucleotide
  Sense strand starting at position 2177 of SEQ ID NO: 1686
ggaagucuccagugguuag

SEQ ID NO: 131645 - RNA, 19 nt, Artificial Sequence
  Description of Artificial Sequence: Synthetic oligonucleotide
  Antisense strand to SEQ ID NO: 131644
cuaaccacuggagacuucc

SEQ ID NO: 131646 - RNA, 19 nt, Artificial Sequence
  Description of Artificial Sequence: Synthetic oligonucleotide
  Sense strand starting at position 1429 of SEQ ID NO: 1686
cagggauggcgcuaaccua

SEQ ID NO: 131647 - RNA, 19 nt, Artificial Sequence
  Description of Artificial Sequence: Synthetic oligonucleotide
  Antisense strand to SEQ ID NO: 131646
uagguuagcgccaucccug

SEQ ID NO: 131648 - RNA, 19 nt, Artificial Sequence
  Description of Artificial Sequence: Synthetic oligonucleotide
  Sense strand starting at position 1174 of SEQ ID NO: 1686
gcccuugaggauggcaaua

SEQ ID NO: 131649 - RNA, 19 nt, Artificial Sequence
  Description of Artificial Sequence: Synthetic oligonucleotide
  Antisense strand to SEQ ID NO: 131648
uauugccauccucaagggc

SEQ ID NO: 131650 - RNA, 19 nt, Artificial Sequence
  Description of Artificial Sequence: Synthetic oligonucleotide
  Sense strand starting at position 1167 of SEQ ID NO: 1686
agucuuugcccuugaggau

SEQ ID NO: 131651 - RNA, 19 nt, Artificial Sequence
  Description of Artificial Sequence: Synthetic oligonucleotide
  Antisense strand to SEQ ID NO: 131650
auccucaagggcaaagacu

SEQ ID NO: 131652 - RNA, 19 nt, Artificial Sequence
  Description of Artificial Sequence: Synthetic oligonucleotide
  Sense strand starting at position 1120 of SEQ ID NO: 1686
cuacuaugugccugacuca

SEQ ID NO: 131653 - RNA, 19 nt, Artificial Sequence
  Description of Artificial Sequence: Synthetic oligonucleotide
  Antisense strand to SEQ ID NO: 131652
ugagucaggcacauaguag

SEQ ID NO: 131654 - RNA, 19 nt, Artificial Sequence
  Description of Artificial Sequence: Synthetic oligonucleotide
  Sense strand starting at position 974 of SEQ ID NO: 1686
uugucuagcuaacugaaga

SEQ ID NO: 131655 - RNA, 19 nt, Artificial Sequence
  Description of Artificial Sequence: Synthetic oligonucleotide
  Antisense strand to SEQ ID NO: 131654
ucuucaguuagcuagacaa

SEQ ID NO: 131656 - RNA, 19 nt, Artificial Sequence
  Description of Artificial Sequence: Synthetic oligonucleotide
  Sense strand starting at position 943 of SEQ ID NO: 1686
ccuuuagauuugcacauga

SEQ ID NO: 131657 - RNA, 19 nt, Artificial Sequence
  Description of Artificial Sequence: Synthetic oligonucleotide
  Antisense strand to SEQ ID NO: 131656
ucaugugcaaaucuaaagg

SEQ ID NO: 131658 - RNA, 19 nt, Artificial Sequence
  Description of Artificial Sequence: Synthetic oligonucleotide
  Sense strand starting at position 770 of SEQ ID NO: 1686
gcuaucucggcccaaauuu

SEQ ID NO: 131659 - RNA, 19 nt, Artificial Sequence
  Description of Artificial Sequence: Synthetic oligonucleotide
  Antisense strand to SEQ ID NO: 131658
aaauuugggccgagauagc

SEQ ID NO: 131660 - RNA, 19 nt, Artificial Sequence
  Description of Artificial Sequence: Synthetic oligonucleotide
  Sense strand starting at position 728 of SEQ ID NO: 1686
aaggguaggugaucucaaa

SEQ ID NO: 131661 - RNA, 19 nt, Artificial Sequence
  Description of Artificial Sequence: Synthetic oligonucleotide
  Antisense strand to SEQ ID NO: 131660
uuugagaucaccuacccuu

SEQ ID NO: 131662 - RNA, 19 nt, Artificial Sequence
  Description of Artificial Sequence: Synthetic oligonucleotide
  Sense strand starting at position 636 of SEQ ID NO: 1686
acguuuccucuauauccua

SEQ ID NO: 131663 - RNA, 19 nt, Artificial Sequence
  Description of Artificial Sequence: Synthetic oligonucleotide
  Antisense strand to SEQ ID NO: 131662
uaggauauagaggaaacgu

SEQ ID NO: 131664 - RNA, 19 nt, Artificial Sequence
  Description of Artificial Sequence: Synthetic oligonucleotide
  Sense strand starting at position 634 of SEQ ID NO: 1686
ggacguuuccucuauaucc

SEQ ID NO: 131665 - RNA, 19 nt, Artificial Sequence
  Description of Artificial Sequence: Synthetic oligonucleotide
  Antisense strand to SEQ ID NO: 131664
ggauauagaggaaacgucc

SEQ ID NO: 131666 - RNA, 19 nt, Artificial Sequence
  Description of Artificial Sequence: Synthetic oligonucleotide
  Sense strand starting at position 601 of SEQ ID NO: 1686
ugaaacaggucuuucuaca

SEQ ID NO: 131667 - RNA, 19 nt, Artificial Sequence
  Description of Artificial Sequence: Synthetic oligonucleotide
  Antisense strand to SEQ ID NO: 131666
uguagaaagaccuguuuca

SEQ ID NO: 131668 - RNA, 19 nt, Artificial Sequence
  Description of Artificial Sequence: Synthetic oligonucleotide
  Sense strand starting at position 586 of SEQ ID NO: 1686
ugaauauguuacccuugaa

SEQ ID NO: 131669 - RNA, 19 nt, Artificial Sequence
  Description of Artificial Sequence: Synthetic oligonucleotide
  Antisense strand to SEQ ID NO: 131668
uucaaggguaacauauuca

SEQ ID NO: 131670 - RNA, 19 nt, Artificial Sequence
  Description of Artificial Sequence: Synthetic oligonucleotide
  Sense strand starting at position 585 of SEQ ID NO: 1686
augaauauguuacccuuga

SEQ ID NO: 131671 - RNA, 19 nt, Artificial Sequence
  Description of Artificial Sequence: Synthetic oligonucleotide
  Antisense strand to SEQ ID NO: 131670
ucaaggguaacauauucau

SEQ ID NO: 131672 - RNA, 19 nt, Artificial Sequence
  Description of Artificial Sequence: Synthetic oligonucleotide
  Sense strand starting at position 493 of SEQ ID NO: 1686
gaguacuguccugagcucu

SEQ ID NO: 131673 - RNA, 19 nt, Artificial Sequence
  Description of Artificial Sequence: Synthetic oligonucleotide
  Antisense strand to SEQ ID NO: 131672
agagcucaggacaguacuc

SEQ ID NO: 131674 - RNA, 19 nt, Artificial Sequence
  Description of Artificial Sequence: Synthetic oligonucleotide
  Sense strand starting at position 465 of SEQ ID NO: 1686
agauuagucucaucacaga

SEQ ID NO: 131675 - RNA, 19 nt, Artificial Sequence
  Description of Artificial Sequence: Synthetic oligonucleotide
  Antisense strand to SEQ ID NO: 131674
ucugugaugagacuaaucu

SEQ ID NO: 131676 - RNA, 19 nt, Artificial Sequence
  Description of Artificial Sequence: Synthetic oligonucleotide
  Sense strand starting at position 386 of SEQ ID NO: 1686
ggaguuugaaucugaaauc

SEQ ID NO: 131677 - RNA, 19 nt, Artificial Sequence
  Description of Artificial Sequence: Synthetic oligonucleotide
  Antisense strand to SEQ ID NO: 131676
gauuucagauucaaacucc

SEQ ID NO: 131678 - RNA, 19 nt, Artificial Sequence
  Description of Artificial Sequence: Synthetic oligonucleotide
  Sense strand starting at position 373 of SEQ ID NO: 1686
ggucuagucaccuggaguu

SEQ ID NO: 131679 - RNA, 19 nt, Artificial Sequence
  Description of Artificial Sequence: Synthetic oligonucleotide
  Antisense strand to SEQ ID NO: 131678
aacuccaggugacuagacc

SEQ ID NO: 131680 - RNA, 19 nt, Artificial Sequence
  Description of Artificial Sequence: Synthetic oligonucleotide
  Sense strand starting at position 246 of SEQ ID NO: 1686
ucaauugcucugcaacaga

SEQ ID NO: 131681 - RNA, 19 nt, Artificial Sequence
  Description of Artificial Sequence: Synthetic oligonucleotide
  Antisense strand to SEQ ID NO: 131680
ucuguugcagagcaauuga

SEQ ID NO: 131682 - RNA, 19 nt, Artificial Sequence
  Description of Artificial Sequence: Synthetic oligonucleotide
  Sense strand starting at position 226 of SEQ ID NO: 1686
acacuuacuucccuaguga

SEQ ID NO: 131683 - RNA, 19 nt, Artificial Sequence
  Description of Artificial Sequence: Synthetic oligonucleotide
  Antisense strand to SEQ ID NO: 131682
ucacuagggaaguaagugu

SEQ ID NO: 131684 - RNA, 19 nt, Artificial Sequence
  Description of Artificial Sequence: Synthetic oligonucleotide
  Sense strand starting at position 212 of SEQ ID NO: 1686
ccauucuacguuugacacu

SEQ ID NO: 131685 - RNA, 19 nt, Artificial Sequence
  Description of Artificial Sequence: Synthetic oligonucleotide
  Antisense strand to SEQ ID NO: 131684
agugucaaacguagaaugg

SEQ ID NO: 131686 - RNA, 19 nt, Artificial Sequence
  Description of Artificial Sequence: Synthetic oligonucleotide
  Sense strand starting at position 177 of SEQ ID NO: 1686
gcagaaaugucauccacuu

SEQ ID NO: 131687 - RNA, 19 nt, Artificial Sequence
  Description of Artificial Sequence: Synthetic oligonucleotide
  Antisense strand to SEQ ID NO: 131686
aaguggaugacauuucugc

SEQ ID NO: 131688 - RNA, 19 nt, Artificial Sequence
  Description of Artificial Sequence: Synthetic oligonucleotide
  Sense strand starting at position 47 of SEQ ID NO: 1686
gggcuuaccugcccugaaa

SEQ ID NO: 131689 - RNA, 19 nt, Artificial Sequence
  Description of Artificial Sequence: Synthetic oligonucleotide
  Antisense strand to SEQ ID NO: 131688
uuucagggcagguaagccc

SEQ ID NO: 131690 - RNA, 19 nt, Artificial Sequence
  Description of Artificial Sequence: Synthetic oligonucleotide
  Sense strand starting at position 3931 of SEQ ID NO: 1687
aggauuaucugaccaguuu

SEQ ID NO: 131691 - RNA, 19 nt, Artificial Sequence
  Description of Artificial Sequence: Synthetic oligonucleotide
  Antisense strand to SEQ ID NO: 131690
aaacuggucagauaauccu

SEQ ID NO: 131692 - RNA, 19 nt, Artificial Sequence
  Description of Artificial Sequence: Synthetic oligonucleotide
  Sense strand starting at position 3851 of SEQ ID NO: 1687
cacuuugauguugguauaa

SEQ ID NO: 131693 - RNA, 19 nt, Artificial Sequence
  Description of Artificial Sequence: Synthetic oligonucleotide
  Antisense strand to SEQ ID NO: 131692
uuauaccaacaucaaagug

SEQ ID NO: 131694 - RNA, 19 nt, Artificial Sequence
  Description of Artificial Sequence: Synthetic oligonucleotide
  Sense strand starting at position 3826 of SEQ ID NO: 1687
gcucaugagucacuauucu

SEQ ID NO: 131695 - RNA, 19 nt, Artificial Sequence
  Description of Artificial Sequence: Synthetic oligonucleotide
  Antisense strand to SEQ ID NO: 131694
agaauagugacucaugagc

SEQ ID NO: 131696 - RNA, 19 nt, Artificial Sequence
  Description of Artificial Sequence: Synthetic oligonucleotide
  Sense strand starting at position 3733 of SEQ ID NO: 1687
aggagaggcuuagagagau

SEQ ID NO: 131697 - RNA, 19 nt, Artificial Sequence
  Description of Artificial Sequence: Synthetic oligonucleotide
  Antisense strand to SEQ ID NO: 131696
aucucucuaagccucuccu

SEQ ID NO: 131698 - RNA, 19 nt, Artificial Sequence
  Description of Artificial Sequence: Synthetic oligonucleotide
  Sense strand starting at position 3718 of SEQ ID NO: 1687
uuauuauaauuccagagga

SEQ ID NO: 131699 - RNA, 19 nt, Artificial Sequence
  Description of Artificial Sequence: Synthetic oligonucleotide
  Antisense strand to SEQ ID NO: 131698
uccucuggaauuauaauaa

SEQ ID NO: 131700 - RNA, 19 nt, Artificial Sequence
  Description of Artificial Sequence: Synthetic oligonucleotide
  Sense strand starting at position 3698 of SEQ ID NO: 1687
caauacucuugaguuaggu

SEQ ID NO: 131701 - RNA, 19 nt, Artificial Sequence
  Description of Artificial Sequence: Synthetic oligonucleotide
  Antisense strand to SEQ ID NO: 131700
accuaacucaagaguauug

SEQ ID NO: 131702 - RNA, 19 nt, Artificial Sequence
  Description of Artificial Sequence: Synthetic oligonucleotide
  Sense strand starting at position 3646 of SEQ ID NO: 1687
caguuaccugggcaaguau

SEQ ID NO: 131703 - RNA, 19 nt, Artificial Sequence
  Description of Artificial Sequence: Synthetic oligonucleotide
  Antisense strand to SEQ ID NO: 131702
auacuugcccagguaacug

SEQ ID NO: 131704 - RNA, 19 nt, Artificial Sequence
  Description of Artificial Sequence: Synthetic oligonucleotide
  Sense strand starting at position 3642 of SEQ ID NO: 1687
ucagcaguuaccugggcaa

SEQ ID NO: 131705 - RNA, 19 nt, Artificial Sequence
  Description of Artificial Sequence: Synthetic oligonucleotide
  Antisense strand to SEQ ID NO: 131704
uugcccagguaacugcuga

SEQ ID NO: 131706 - RNA, 19 nt, Artificial Sequence
  Description of Artificial Sequence: Synthetic oligonucleotide
  Sense strand starting at position 2722 of SEQ ID NO: 1687
guagauugucagggaaucu

SEQ ID NO: 131707 - RNA, 19 nt, Artificial Sequence
  Description of Artificial Sequence: Synthetic oligonucleotide
  Antisense strand to SEQ ID NO: 131706
agauucccugacaaucuac

SEQ ID NO: 131708 - RNA, 19 nt, Artificial Sequence
  Description of Artificial Sequence: Synthetic oligonucleotide
  Sense strand starting at position 2718 of SEQ ID NO: 1687
gccuguagauugucaggga

SEQ ID NO: 131709 - RNA, 19 nt, Artificial Sequence
  Description of Artificial Sequence: Synthetic oligonucleotide
  Antisense strand to SEQ ID NO: 131708
ucccugacaaucuacaggc

SEQ ID NO: 131710 - RNA, 19 nt, Artificial Sequence
  Description of Artificial Sequence: Synthetic oligonucleotide
  Sense strand starting at position 2711 of SEQ ID NO: 1687
cguuuaggccuguagauug

SEQ ID NO: 131711 - RNA, 19 nt, Artificial Sequence
  Description of Artificial Sequence: Synthetic oligonucleotide
  Antisense strand to SEQ ID NO: 131710
caaucuacaggccuaaacg

SEQ ID NO: 131712 - RNA, 19 nt, Artificial Sequence
  Description of Artificial Sequence: Synthetic oligonucleotide
  Sense strand starting at position 2645 of SEQ ID NO: 1687
agugauuauuguuucucuu

SEQ ID NO: 131713 - RNA, 19 nt, Artificial Sequence
  Description of Artificial Sequence: Synthetic oligonucleotide
  Antisense strand to SEQ ID NO: 131712
aagagaaacaauaaucacu

SEQ ID NO: 131714 - RNA, 19 nt, Artificial Sequence
  Description of Artificial Sequence: Synthetic oligonucleotide
  Sense strand starting at position 2644 of SEQ ID NO: 1687
gagugauuauuguuucucu

SEQ ID NO: 131715 - RNA, 19 nt, Artificial Sequence
  Description of Artificial Sequence: Synthetic oligonucleotide
  Antisense strand to SEQ ID NO: 131714
agagaaacaauaaucacuc

SEQ ID NO: 131716 - RNA, 19 nt, Artificial Sequence
  Description of Artificial Sequence: Synthetic oligonucleotide
  Sense strand starting at position 2635 of SEQ ID NO: 1687
cggagauuggagugauuau

SEQ ID NO: 131717 - RNA, 19 nt, Artificial Sequence
  Description of Artificial Sequence: Synthetic oligonucleotide
  Antisense strand to SEQ ID NO: 131716
auaaucacuccaaucuccg

SEQ ID NO: 131718 - RNA, 19 nt, Artificial Sequence
  Description of Artificial Sequence: Synthetic oligonucleotide
  Sense strand starting at position 2633 of SEQ ID NO: 1687
cucggagauuggagugauu

SEQ ID NO: 131719 - RNA, 19 nt, Artificial Sequence
  Description of Artificial Sequence: Synthetic oligonucleotide
  Antisense strand to SEQ ID NO: 131718
aaucacuccaaucuccgag

SEQ ID NO: 131720 - RNA, 19 nt, Artificial Sequence
  Description of Artificial Sequence: Synthetic oligonucleotide
  Sense strand starting at position 2581 of SEQ ID NO: 1687
gguuaagaccgucagccuu

SEQ ID NO: 131721 - RNA, 19 nt, Artificial Sequence
  Description of Artificial Sequence: Synthetic oligonucleotide
  Antisense strand to SEQ ID NO: 131720
aaggcugacggucuuaacc

SEQ ID NO: 131722 - RNA, 19 nt, Artificial Sequence
  Description of Artificial Sequence: Synthetic oligonucleotide
  Sense strand starting at position 2570 of SEQ ID NO: 1687
uccagaguuuagguuaaga

SEQ ID NO: 131723 - RNA, 19 nt, Artificial Sequence
  Description of Artificial Sequence: Synthetic oligonucleotide
  Antisense strand to SEQ ID NO: 131722
ucuuaaccuaaacucugga

SEQ ID NO: 131724 - RNA, 19 nt, Artificial Sequence
  Description of Artificial Sequence: Synthetic oligonucleotide
  Sense strand starting at position 2172 of SEQ ID NO: 1687
gggagucagucuuucccua

SEQ ID NO: 131725 - RNA, 19 nt, Artificial Sequence
  Description of Artificial Sequence: Synthetic oligonucleotide
  Antisense strand to SEQ ID NO: 131724
uagggaaagacugacuccc

SEQ ID NO: 131726 - RNA, 19 nt, Artificial Sequence
  Description of Artificial Sequence: Synthetic oligonucleotide
  Sense strand starting at position 2104 of SEQ ID NO: 1687
ggaagucuccagugguuag

SEQ ID NO: 131727 - RNA, 19 nt, Artificial Sequence
  Description of Artificial Sequence: Synthetic oligonucleotide
  Antisense strand to SEQ ID NO: 131726
cuaaccacuggagacuucc

SEQ ID NO: 131728 - RNA, 19 nt, Artificial Sequence
  Description of Artificial Sequence: Synthetic oligonucleotide
  Sense strand starting at position 1356 of SEQ ID NO: 1687
cagggauggcgcuaaccua

SEQ ID NO: 131729 - RNA, 19 nt, Artificial Sequence
  Description of Artificial Sequence: Synthetic oligonucleotide
  Antisense strand to SEQ ID NO: 131728
uagguuagcgccaucccug

SEQ ID NO: 131730 - RNA, 19 nt, Artificial Sequence
  Description of Artificial Sequence: Synthetic oligonucleotide
  Sense strand starting at position 1101 of SEQ ID NO: 1687
gcccuugaggauggcaaua

SEQ ID NO: 131731 - RNA, 19 nt, Artificial Sequence
  Description of Artificial Sequence: Synthetic oligonucleotide
  Antisense strand to SEQ ID NO: 131730
uauugccauccucaagggc

SEQ ID NO: 131732 - RNA, 19 nt, Artificial Sequence
  Description of Artificial Sequence: Synthetic oligonucleotide
  Sense strand starting at position 1094 of SEQ ID NO: 1687
agucuuugcccuugaggau

SEQ ID NO: 131733 - RNA, 19 nt, Artificial Sequence
  Description of Artificial Sequence: Synthetic oligonucleotide
  Antisense strand to SEQ ID NO: 131732
auccucaagggcaaagacu

SEQ ID NO: 131734 - RNA, 19 nt, Artificial Sequence
  Description of Artificial Sequence: Synthetic oligonucleotide
  Sense strand starting at position 1047 of SEQ ID NO: 1687
cuacuaugugccugacuca

SEQ ID NO: 131735 - RNA, 19 nt, Artificial Sequence
  Description of Artificial Sequence: Synthetic oligonucleotide
  Antisense strand to SEQ ID NO: 131734
ugagucaggcacauaguag

SEQ ID NO: 131736 - RNA, 19 nt, Artificial Sequence
  Description of Artificial Sequence: Synthetic oligonucleotide
  Sense strand starting at position 901 of SEQ ID NO: 1687
uugucuagcuaacugaaga

SEQ ID NO: 131737 - RNA, 19 nt, Artificial Sequence
  Description of Artificial Sequence: Synthetic oligonucleotide
  Antisense strand to SEQ ID NO: 131736
ucuucaguuagcuagacaa

SEQ ID NO: 131738 - RNA, 19 nt, Artificial Sequence
  Description of Artificial Sequence: Synthetic oligonucleotide
  Sense strand starting at position 870 of SEQ ID NO: 1687
ccuuuagauuugcacauga

SEQ ID NO: 131739 - RNA, 19 nt, Artificial Sequence
  Description of Artificial Sequence: Synthetic oligonucleotide
  Antisense strand to SEQ ID NO: 131738
ucaugugcaaaucuaaagg

SEQ ID NO: 131740 - RNA, 19 nt, Artificial Sequence
  Description of Artificial Sequence: Synthetic oligonucleotide
  Sense strand starting at position 697 of SEQ ID NO: 1687
gcuaucucggcccaaauuu

SEQ ID NO: 131741 - RNA, 19 nt, Artificial Sequence
  Description of Artificial Sequence: Synthetic oligonucleotide
  Antisense strand to SEQ ID NO: 131740
aaauuugggccgagauagc

SEQ ID NO: 131742 - RNA, 19 nt, Artificial Sequence
  Description of Artificial Sequence: Synthetic oligonucleotide
  Sense strand starting at position 655 of SEQ ID NO: 1687
aaggguaggugaucucaaa

SEQ ID NO: 131743 - RNA, 19 nt, Artificial Sequence
  Description of Artificial Sequence: Synthetic oligonucleotide
  Antisense strand to SEQ ID NO: 131742
uuugagaucaccuacccuu

SEQ ID NO: 131744 - RNA, 19 nt, Artificial Sequence
  Description of Artificial Sequence: Synthetic oligonucleotide
  Sense strand starting at position 563 of SEQ ID NO: 1687
acguuuccucuauauccua

SEQ ID NO: 131745 - RNA, 19 nt, Artificial Sequence
  Description of Artificial Sequence: Synthetic oligonucleotide
  Antisense strand to SEQ ID NO: 131744
uaggauauagaggaaacgu

SEQ ID NO: 131746 - RNA, 19 nt, Artificial Sequence
  Description of Artificial Sequence: Synthetic oligonucleotide
  Sense strand starting at position 561 of SEQ ID NO: 1687
ggacguuuccucuauaucc

SEQ ID NO: 131747 - RNA, 19 nt, Artificial Sequence
  Description of Artificial Sequence: Synthetic oligonucleotide
  Antisense strand to SEQ ID NO: 131746
ggauauagaggaaacgucc

SEQ ID NO: 131748 - RNA, 19 nt, Artificial Sequence
  Description of Artificial Sequence: Synthetic oligonucleotide
  Sense strand starting at position 528 of SEQ ID NO: 1687
ugaaacaggucuuucuaca

SEQ ID NO: 131749 - RNA, 19 nt, Artificial Sequence
  Description of Artificial Sequence: Synthetic oligonucleotide
  Antisense strand to SEQ ID NO: 131748
uguagaaagaccuguuuca

SEQ ID NO: 131750 - RNA, 19 nt, Artificial Sequence
  Description of Artificial Sequence: Synthetic oligonucleotide
  Sense strand starting at position 513 of SEQ ID NO: 1687
ugaauauguuacccuugaa

SEQ ID NO: 131751 - RNA, 19 nt, Artificial Sequence
  Description of Artificial Sequence: Synthetic oligonucleotide
  Antisense strand to SEQ ID NO: 131750
uucaaggguaacauauuca

SEQ ID NO: 131752 - RNA, 19 nt, Artificial Sequence
  Description of Artificial Sequence: Synthetic oligonucleotide
  Sense strand starting at position 512 of SEQ ID NO: 1687
augaauauguuacccuuga

SEQ ID NO: 131753 - RNA, 19 nt, Artificial Sequence
  Description of Artificial Sequence: Synthetic oligonucleotide
  Antisense strand to SEQ ID NO: 131752
ucaaggguaacauauucau

SEQ ID NO: 131754 - RNA, 19 nt, Artificial Sequence
  Description of Artificial Sequence: Synthetic oligonucleotide
  Sense strand starting at position 420 of SEQ ID NO: 1687
gaguacuguccugagcucu

SEQ ID NO: 131755 - RNA, 19 nt, Artificial Sequence
  Description of Artificial Sequence: Synthetic oligonucleotide
  Antisense strand to SEQ ID NO: 131754
agagcucaggacaguacuc

SEQ ID NO: 131756 - RNA, 19 nt, Artificial Sequence
  Description of Artificial Sequence: Synthetic oligonucleotide
  Sense strand starting at position 392 of SEQ ID NO: 1687
agauuagucucaucacaga

SEQ ID NO: 131757 - RNA, 19 nt, Artificial Sequence
  Description of Artificial Sequence: Synthetic oligonucleotide
  Antisense strand to SEQ ID NO: 131756
ucugugaugagacuaaucu

SEQ ID NO: 131758 - RNA, 19 nt, Artificial Sequence
  Description of Artificial Sequence: Synthetic oligonucleotide
  Sense strand starting at position 313 of SEQ ID NO: 1687
ggaguuugaaucugaaauc

SEQ ID NO: 131759 - RNA, 19 nt, Artificial Sequence
  Description of Artificial Sequence: Synthetic oligonucleotide
  Antisense strand to SEQ ID NO: 131758
gauuucagauucaaacucc

SEQ ID NO: 131760 - RNA, 19 nt, Artificial Sequence
  Description of Artificial Sequence: Synthetic oligonucleotide
  Sense strand starting at position 300 of SEQ ID NO: 1687
ggucuagucaccuggaguu

SEQ ID NO: 131761 - RNA, 19 nt, Artificial Sequence
  Description of Artificial Sequence: Synthetic oligonucleotide
  Antisense strand to SEQ ID NO: 131760
aacuccaggugacuagacc

SEQ ID NO: 131762 - RNA, 19 nt, Artificial Sequence
  Description of Artificial Sequence: Synthetic oligonucleotide
  Sense strand starting at position 173 of SEQ ID NO: 1687
ucaauugcucugcaacaga

SEQ ID NO: 131763 - RNA, 19 nt, Artificial Sequence
  Description of Artificial Sequence: Synthetic oligonucleotide
  Antisense strand to SEQ ID NO: 131762
ucuguugcagagcaauuga

SEQ ID NO: 131764 - RNA, 19 nt, Artificial Sequence
  Description of Artificial Sequence: Synthetic oligonucleotide
  Sense strand starting at position 153 of SEQ ID NO: 1687
acacuuacuucccuaguga

SEQ ID NO: 131765 - RNA, 19 nt, Artificial Sequence
  Description of Artificial Sequence: Synthetic oligonucleotide
  Antisense strand to SEQ ID NO: 131764
ucacuagggaaguaagugu

SEQ ID NO: 131766 - RNA, 19 nt, Artificial Sequence
  Description of Artificial Sequence: Synthetic oligonucleotide
  Sense strand starting at position 139 of SEQ ID NO: 1687
ccauucuacguuugacacu

SEQ ID NO: 131767 - RNA, 19 nt, Artificial Sequence
  Description of Artificial Sequence: Synthetic oligonucleotide
  Antisense strand to SEQ ID NO: 131766
agugucaaacguagaaugg

SEQ ID NO: 131768 - RNA, 19 nt, Artificial Sequence
  Description of Artificial Sequence: Synthetic oligonucleotide
  Sense strand starting at position 104 of SEQ ID NO: 1687
gcagaaaugucauccacuu

SEQ ID NO: 131769 - RNA, 19 nt, Artificial Sequence
  Description of Artificial Sequence: Synthetic oligonucleotide
  Antisense strand to SEQ ID NO: 131768
aaguggaugacauuucugc

SEQ ID NO: 131770 - RNA, 19 nt, Artificial Sequence
  Description of Artificial Sequence: Synthetic oligonucleotide
  Sense strand starting at position 3635 of SEQ ID NO: 1688
cuaggugaaggcugaguua

SEQ ID NO: 131771 - RNA, 19 nt, Artificial Sequence
  Description of Artificial Sequence: Synthetic oligonucleotide
  Antisense strand to SEQ ID NO: 131770
uaacucagccuucaccuag

SEQ ID NO: 131772 - RNA, 19 nt, Artificial Sequence
  Description of Artificial Sequence: Synthetic oligonucleotide
  Sense strand starting at position 3558 of SEQ ID NO: 1688
guauccaggugauccaaau

SEQ ID NO: 131773 - RNA, 19 nt, Artificial Sequence
  Description of Artificial Sequence: Synthetic oligonucleotide
  Antisense strand to SEQ ID NO: 131772
auuuggaucaccuggauac

SEQ ID NO: 131774 - RNA, 19 nt, Artificial Sequence
  Description of Artificial Sequence: Synthetic oligonucleotide
  Sense strand starting at position 3555 of SEQ ID NO: 1688
agaguauccaggugaucca

SEQ ID NO: 131775 - RNA, 19 nt, Artificial Sequence
  Description of Artificial Sequence: Synthetic oligonucleotide
  Antisense strand to SEQ ID NO: 131774
uggaucaccuggauacucu

SEQ ID NO: 131776 - RNA, 19 nt, Artificial Sequence
  Description of Artificial Sequence: Synthetic oligonucleotide
  Sense strand starting at position 3509 of SEQ ID NO: 1688
guuacuucuccagaucuua

SEQ ID NO: 131777 - RNA, 19 nt, Artificial Sequence
  Description of Artificial Sequence: Synthetic oligonucleotide
  Antisense strand to SEQ ID NO: 131776
uaagaucuggagaaguaac

SEQ ID NO: 131778 - RNA, 19 nt, Artificial Sequence
  Description of Artificial Sequence: Synthetic oligonucleotide
  Sense strand starting at position 3505 of SEQ ID NO: 1688
agaaguuacuucuccagau

SEQ ID NO: 131779 - RNA, 19 nt, Artificial Sequence
  Description of Artificial Sequence: Synthetic oligonucleotide
  Antisense strand to SEQ ID NO: 131778
aucuggagaaguaacuucu

SEQ ID NO: 131780 - RNA, 19 nt, Artificial Sequence
  Description of Artificial Sequence: Synthetic oligonucleotide
  Sense strand starting at position 3492 of SEQ ID NO: 1688
auuccuguucuauagaagu

SEQ ID NO: 131781 - RNA, 19 nt, Artificial Sequence
  Description of Artificial Sequence: Synthetic oligonucleotide
  Antisense strand to SEQ ID NO: 131780
acuucuauagaacaggaau

SEQ ID NO: 131782 - RNA, 19 nt, Artificial Sequence
  Description of Artificial Sequence: Synthetic oligonucleotide
  Sense strand starting at position 3488 of SEQ ID NO: 1688
agucauuccuguucuauag

SEQ ID NO: 131783 - RNA, 19 nt, Artificial Sequence
  Description of Artificial Sequence: Synthetic oligonucleotide
  Antisense strand to SEQ ID NO: 131782
cuauagaacaggaaugacu

SEQ ID NO: 131784 - RNA, 19 nt, Artificial Sequence
  Description of Artificial Sequence: Synthetic oligonucleotide
  Sense strand starting at position 3451 of SEQ ID NO: 1688
gaugacucacagcaaguau

SEQ ID NO: 131785 - RNA, 19 nt, Artificial Sequence
  Description of Artificial Sequence: Synthetic oligonucleotide
  Antisense strand to SEQ ID NO: 131784
auacuugcugugagucauc

SEQ ID NO: 131786 - RNA, 19 nt, Artificial Sequence
  Description of Artificial Sequence: Synthetic oligonucleotide
  Sense strand starting at position 3439 of SEQ ID NO: 1688
cugagauucgcugaugacu

SEQ ID NO: 131787 - RNA, 19 nt, Artificial Sequence
  Description of Artificial Sequence: Synthetic oligonucleotide
  Antisense strand to SEQ ID NO: 131786
agucaucagcgaaucucag

SEQ ID NO: 131788 - RNA, 19 nt, Artificial Sequence
  Description of Artificial Sequence: Synthetic oligonucleotide
  Sense strand starting at position 3437 of SEQ ID NO: 1688
aacugagauucgcugauga

SEQ ID NO: 131789 - RNA, 19 nt, Artificial Sequence
  Description of Artificial Sequence: Synthetic oligonucleotide
  Antisense strand to SEQ ID NO: 131788
ucaucagcgaaucucaguu

SEQ ID NO: 131790 - RNA, 19 nt, Artificial Sequence
  Description of Artificial Sequence: Synthetic oligonucleotide
  Sense strand starting at position 3319 of SEQ ID NO: 1688
aacagugagucuguaaguu

SEQ ID NO: 131791 - RNA, 19 nt, Artificial Sequence
  Description of Artificial Sequence: Synthetic oligonucleotide
  Antisense strand to SEQ ID NO: 131790
aacuuacagacucacuguu

SEQ ID NO: 131792 - RNA, 19 nt, Artificial Sequence
  Description of Artificial Sequence: Synthetic oligonucleotide
  Sense strand starting at position 3296 of SEQ ID NO: 1688
aagauucuccuuugaguug

SEQ ID NO: 131793 - RNA, 19 nt, Artificial Sequence
  Description of Artificial Sequence: Synthetic oligonucleotide
  Antisense strand to SEQ ID NO: 131792
caacucaaaggagaaucuu

SEQ ID NO: 131794 - RNA, 19 nt, Artificial Sequence
  Description of Artificial Sequence: Synthetic oligonucleotide
  Sense strand starting at position 3294 of SEQ ID NO: 1688
uuaagauucuccuuugagu

SEQ ID NO: 131795 - RNA, 19 nt, Artificial Sequence
  Description of Artificial Sequence: Synthetic oligonucleotide
  Antisense strand to SEQ ID NO: 131794
acucaaaggagaaucuuaa

SEQ ID NO: 131796 - RNA, 19 nt, Artificial Sequence
  Description of Artificial Sequence: Synthetic oligonucleotide
  Sense strand starting at position 3292 of SEQ ID NO: 1688
uguuaagauucuccuuuga

SEQ ID NO: 131797 - RNA, 19 nt, Artificial Sequence
  Description of Artificial Sequence: Synthetic oligonucleotide
  Antisense strand to SEQ ID NO: 131796
ucaaaggagaaucuuaaca

SEQ ID NO: 131798 - RNA, 19 nt, Artificial Sequence
  Description of Artificial Sequence: Synthetic oligonucleotide
  Sense strand starting at position 3258 of SEQ ID NO: 1688
uuuccucugggugggaauu

SEQ ID NO: 131799 - RNA, 19 nt, Artificial Sequence
  Description of Artificial Sequence: Synthetic oligonucleotide
  Antisense strand to SEQ ID NO: 131798
aauucccacccagaggaaa

SEQ ID NO: 131800 - RNA, 19 nt, Artificial Sequence
  Description of Artificial Sequence: Synthetic oligonucleotide
  Sense strand starting at position 3139 of SEQ ID NO: 1688
ucagaaauuugcuauuugu

SEQ ID NO: 131801 - RNA, 19 nt, Artificial Sequence
  Description of Artificial Sequence: Synthetic oligonucleotide
  Antisense strand to SEQ ID NO: 131800
acaaauagcaaauuucuga

SEQ ID NO: 131802 - RNA, 19 nt, Artificial Sequence
  Description of Artificial Sequence: Synthetic oligonucleotide
  Sense strand starting at position 2937 of SEQ ID NO: 1688
acggcacauucuuuaaauu

SEQ ID NO: 131803 - RNA, 19 nt, Artificial Sequence
  Description of Artificial Sequence: Synthetic oligonucleotide
  Antisense strand to SEQ ID NO: 131802
aauuuaaagaaugugccgu

SEQ ID NO: 131804 - RNA, 19 nt, Artificial Sequence
  Description of Artificial Sequence: Synthetic oligonucleotide
  Sense strand starting at position 2447 of SEQ ID NO: 1688
guaaguauauccgcaacua

SEQ ID NO: 131805 - RNA, 19 nt, Artificial Sequence
  Description of Artificial Sequence: Synthetic oligonucleotide
  Antisense strand to SEQ ID NO: 131804
uaguugcggauauacuuac

SEQ ID NO: 131806 - RNA, 19 nt, Artificial Sequence
  Description of Artificial Sequence: Synthetic oligonucleotide
  Sense strand starting at position 2213 of SEQ ID NO: 1688
acagcacugugacuaaaua

SEQ ID NO: 131807 - RNA, 19 nt, Artificial Sequence
  Description of Artificial Sequence: Synthetic oligonucleotide
  Antisense strand to SEQ ID NO: 131806
uauuuagucacagugcugu

SEQ ID NO: 131808 - RNA, 19 nt, Artificial Sequence
  Description of Artificial Sequence: Synthetic oligonucleotide
  Sense strand starting at position 2159 of SEQ ID NO: 1688
uagagagcaggcuauuaua

SEQ ID NO: 131809 - RNA, 19 nt, Artificial Sequence
  Description of Artificial Sequence: Synthetic oligonucleotide
  Antisense strand to SEQ ID NO: 131808
uauaauagccugcucucua

SEQ ID NO: 131810 - RNA, 19 nt, Artificial Sequence
  Description of Artificial Sequence: Synthetic oligonucleotide
  Sense strand starting at position 1508 of SEQ ID NO: 1688
uuauuaagauggccacaga

SEQ ID NO: 131811 - RNA, 19 nt, Artificial Sequence
  Description of Artificial Sequence: Synthetic oligonucleotide
  Antisense strand to SEQ ID NO: 131810
ucuguggccaucuuaauaa

SEQ ID NO: 131812 - RNA, 19 nt, Artificial Sequence
  Description of Artificial Sequence: Synthetic oligonucleotide
  Sense strand starting at position 1500 of SEQ ID NO: 1688
acaauagcuuauuaagaug

SEQ ID NO: 131813 - RNA, 19 nt, Artificial Sequence
  Description of Artificial Sequence: Synthetic oligonucleotide
  Antisense strand to SEQ ID NO: 131812
caucuuaauaagcuauugu

SEQ ID NO: 131814 - RNA, 19 nt, Artificial Sequence
  Description of Artificial Sequence: Synthetic oligonucleotide
  Sense strand starting at position 1497 of SEQ ID NO: 1688
guaacaauagcuuauuaag

SEQ ID NO: 131815 - RNA, 19 nt, Artificial Sequence
  Description of Artificial Sequence: Synthetic oligonucleotide
  Antisense strand to SEQ ID NO: 131814
cuuaauaagcuauuguuac

SEQ ID NO: 131816 - RNA, 19 nt, Artificial Sequence
  Description of Artificial Sequence: Synthetic oligonucleotide
  Sense strand starting at position 1391 of SEQ ID NO: 1688
gucuuuauguuuccuauaa

SEQ ID NO: 131817 - RNA, 19 nt, Artificial Sequence
  Description of Artificial Sequence: Synthetic oligonucleotide
  Antisense strand to SEQ ID NO: 131816
uuauaggaaacauaaagac

SEQ ID NO: 131818 - RNA, 19 nt, Artificial Sequence
  Description of Artificial Sequence: Synthetic oligonucleotide
  Sense strand starting at position 1070 of SEQ ID NO: 1688
aguuaaagggcaugggaua

SEQ ID NO: 131819 - RNA, 19 nt, Artificial Sequence
  Description of Artificial Sequence: Synthetic oligonucleotide
  Antisense strand to SEQ ID NO: 131818
uaucccaugcccuuuaacu

SEQ ID NO: 131820 - RNA, 19 nt, Artificial Sequence
  Description of Artificial Sequence: Synthetic oligonucleotide
  Sense strand starting at position 1027 of SEQ ID NO: 1688
auuaaugguuacucaagga

SEQ ID NO: 131821 - RNA, 19 nt, Artificial Sequence
  Description of Artificial Sequence: Synthetic oligonucleotide
  Antisense strand to SEQ ID NO: 131820
uccuugaguaaccauuaau

SEQ ID NO: 131822 - RNA, 19 nt, Artificial Sequence
  Description of Artificial Sequence: Synthetic oligonucleotide
  Sense strand starting at position 1023 of SEQ ID NO: 1688
guaaauuaaugguuacuca

SEQ ID NO: 131823 - RNA, 19 nt, Artificial Sequence
  Description of Artificial Sequence: Synthetic oligonucleotide
  Antisense strand to SEQ ID NO: 131822
ugaguaaccauuaauuuac

SEQ ID NO: 131824 - RNA, 19 nt, Artificial Sequence
  Description of Artificial Sequence: Synthetic oligonucleotide
  Sense strand starting at position 808 of SEQ ID NO: 1688
ucgagugaggaauggauaa

SEQ ID NO: 131825 - RNA, 19 nt, Artificial Sequence
  Description of Artificial Sequence: Synthetic oligonucleotide
  Antisense strand to SEQ ID NO: 131824
uuauccauuccucacucga

SEQ ID NO: 131826 - RNA, 19 nt, Artificial Sequence
  Description of Artificial Sequence: Synthetic oligonucleotide
  Sense strand starting at position 802 of SEQ ID NO: 1688
uguccaucgagugaggaau

SEQ ID NO: 131827 - RNA, 19 nt, Artificial Sequence
  Description of Artificial Sequence: Synthetic oligonucleotide
  Antisense strand to SEQ ID NO: 131826
auuccucacucgauggaca

SEQ ID NO: 131828 - RNA, 19 nt, Artificial Sequence
  Description of Artificial Sequence: Synthetic oligonucleotide
  Sense strand starting at position 801 of SEQ ID NO: 1688
auguccaucgagugaggaa

SEQ ID NO: 131829 - RNA, 19 nt, Artificial Sequence
  Description of Artificial Sequence: Synthetic oligonucleotide
  Antisense strand to SEQ ID NO: 131828
uuccucacucgauggacau

SEQ ID NO: 131830 - RNA, 19 nt, Artificial Sequence
  Description of Artificial Sequence: Synthetic oligonucleotide
  Sense strand starting at position 797 of SEQ ID NO: 1688
ugaaauguccaucgaguga

SEQ ID NO: 131831 - RNA, 19 nt, Artificial Sequence
  Description of Artificial Sequence: Synthetic oligonucleotide
  Antisense strand to SEQ ID NO: 131830
ucacucgauggacauuuca

SEQ ID NO: 131832 - RNA, 19 nt, Artificial Sequence
  Description of Artificial Sequence: Synthetic oligonucleotide
  Sense strand starting at position 655 of SEQ ID NO: 1688
agugacuaagcccagaauu

SEQ ID NO: 131833 - RNA, 19 nt, Artificial Sequence
  Description of Artificial Sequence: Synthetic oligonucleotide
  Antisense strand to SEQ ID NO: 131832
aauucugggcuuagucacu

SEQ ID NO: 131834 - RNA, 19 nt, Artificial Sequence
  Description of Artificial Sequence: Synthetic oligonucleotide
  Sense strand starting at position 641 of SEQ ID NO: 1688
guggcaauuuaucaaguga

SEQ ID NO: 131835 - RNA, 19 nt, Artificial Sequence
  Description of Artificial Sequence: Synthetic oligonucleotide
  Antisense strand to SEQ ID NO: 131834
ucacuugauaaauugccac

SEQ ID NO: 131836 - RNA, 19 nt, Artificial Sequence
  Description of Artificial Sequence: Synthetic oligonucleotide
  Sense strand starting at position 320 of SEQ ID NO: 1688
ggcuuauaucaaggacaua

SEQ ID NO: 131837 - RNA, 19 nt, Artificial Sequence
  Description of Artificial Sequence: Synthetic oligonucleotide
  Antisense strand to SEQ ID NO: 131836
uauguccuugauauaagcc

SEQ ID NO: 131838 - RNA, 19 nt, Artificial Sequence
  Description of Artificial Sequence: Synthetic oligonucleotide
  Sense strand starting at position 184 of SEQ ID NO: 1688
ccucauaucugggaaagga

SEQ ID NO: 131839 - RNA, 19 nt, Artificial Sequence
  Description of Artificial Sequence: Synthetic oligonucleotide
  Antisense strand to SEQ ID NO: 131838
uccuuucccagauaugagg

SEQ ID NO: 131840 - RNA, 19 nt, Artificial Sequence
  Description of Artificial Sequence: Synthetic oligonucleotide
  Sense strand starting at position 183 of SEQ ID NO: 1688
gccucauaucugggaaagg

SEQ ID NO: 131841 - RNA, 19 nt, Artificial Sequence
  Description of Artificial Sequence: Synthetic oligonucleotide
  Antisense strand to SEQ ID NO: 131840
ccuuucccagauaugaggc

SEQ ID NO: 131842 - RNA, 19 nt, Artificial Sequence
  Description of Artificial Sequence: Synthetic oligonucleotide
  Sense strand starting at position 35 of SEQ ID NO: 1688
agauaaaugugauaacuac

SEQ ID NO: 131843 - RNA, 19 nt, Artificial Sequence
  Description of Artificial Sequence: Synthetic oligonucleotide
  Antisense strand to SEQ ID NO: 131842
guaguuaucacauuuaucu

SEQ ID NO: 131844 - RNA, 19 nt, Artificial Sequence
  Description of Artificial Sequence: Synthetic oligonucleotide
  Sense strand starting at position 33 of SEQ ID NO: 1688
ggagauaaaugugauaacu

SEQ ID NO: 131845 - RNA, 19 nt, Artificial Sequence
  Description of Artificial Sequence: Synthetic oligonucleotide
  Antisense strand to SEQ ID NO: 131844
aguuaucacauuuaucucc

SEQ ID NO: 131846 - RNA, 19 nt, Artificial Sequence
  Description of Artificial Sequence: Synthetic oligonucleotide
  Sense strand starting at position 30 of SEQ ID NO: 1688
uguggagauaaaugugaua

SEQ ID NO: 131847 - RNA, 19 nt, Artificial Sequence
  Description of Artificial Sequence: Synthetic oligonucleotide
  Antisense strand to SEQ ID NO: 131846
uaucacauuuaucuccaca

SEQ ID NO: 131848 - RNA, 19 nt, Artificial Sequence
  Description of Artificial Sequence: Synthetic oligonucleotide
  Sense strand starting at position 20 of SEQ ID NO: 1688
caacaagugguguggagau

SEQ ID NO: 131849 - RNA, 19 nt, Artificial Sequence
  Description of Artificial Sequence: Synthetic oligonucleotide
  Antisense strand to SEQ ID NO: 131848
aucuccacaccacuuguug

SEQ ID NO: 131850 - RNA, 19 nt, Artificial Sequence
  Description of Artificial Sequence: Synthetic oligonucleotide
  Sense strand starting at position 3716 of SEQ ID NO: 1689
ucaagacucucugcgaucu

SEQ ID NO: 131851 - RNA, 19 nt, Artificial Sequence
  Description of Artificial Sequence: Synthetic oligonucleotide
  Antisense strand to SEQ ID NO: 131850
agaucgcagagagucuuga

SEQ ID NO: 131852 - RNA, 19 nt, Artificial Sequence
  Description of Artificial Sequence: Synthetic oligonucleotide
  Sense strand starting at position 3464 of SEQ ID NO: 1689
uguacauaauccucccagu

SEQ ID NO: 131853 - RNA, 19 nt, Artificial Sequence
  Description of Artificial Sequence: Synthetic oligonucleotide
  Antisense strand to SEQ ID NO: 131852
acugggaggauuauguaca

SEQ ID NO: 131854 - RNA, 19 nt, Artificial Sequence
  Description of Artificial Sequence: Synthetic oligonucleotide
  Sense strand starting at position 3443 of SEQ ID NO: 1689
agauuugcugggcggugaa

SEQ ID NO: 131855 - RNA, 19 nt, Artificial Sequence
  Description of Artificial Sequence: Synthetic oligonucleotide
  Antisense strand to SEQ ID NO: 131854
uucaccgcccagcaaaucu

SEQ ID NO: 131856 - RNA, 19 nt, Artificial Sequence
  Description of Artificial Sequence: Synthetic oligonucleotide
  Sense strand starting at position 3211 of SEQ ID NO: 1689
ggccguuaauaauuauuaa

SEQ ID NO: 131857 - RNA, 19 nt, Artificial Sequence
  Description of Artificial Sequence: Synthetic oligonucleotide
  Antisense strand to SEQ ID NO: 131856
uuaauaauuauuaacggcc

SEQ ID NO: 131858 - RNA, 19 nt, Artificial Sequence
  Description of Artificial Sequence: Synthetic oligonucleotide
  Sense strand starting at position 3205 of SEQ ID NO: 1689
uacgguggccguuaauaau

SEQ ID NO: 131859 - RNA, 19 nt, Artificial Sequence
  Description of Artificial Sequence: Synthetic oligonucleotide
  Antisense strand to SEQ ID NO: 131858
auuauuaacggccaccgua

SEQ ID NO: 131860 - RNA, 19 nt, Artificial Sequence
  Description of Artificial Sequence: Synthetic oligonucleotide
  Sense strand starting at position 3188 of SEQ ID NO: 1689
ucgugcagugcuuuccaua

SEQ ID NO: 131861 - RNA, 19 nt, Artificial Sequence
  Description of Artificial Sequence: Synthetic oligonucleotide
  Antisense strand to SEQ ID NO: 131860
uauggaaagcacugcacga

SEQ ID NO: 131862 - RNA, 19 nt, Artificial Sequence
  Description of Artificial Sequence: Synthetic oligonucleotide
  Sense strand starting at position 3166 of SEQ ID NO: 1689
gaggacuggucaucuuagu

SEQ ID NO: 131863 - RNA, 19 nt, Artificial Sequence
  Description of Artificial Sequence: Synthetic oligonucleotide
  Antisense strand to SEQ ID NO: 131862
acuaagaugaccaguccuc

SEQ ID NO: 131864 - RNA, 19 nt, Artificial Sequence
  Description of Artificial Sequence: Synthetic oligonucleotide
  Sense strand starting at position 3128 of SEQ ID NO: 1689
cuuggagauuccgucuaga

SEQ ID NO: 131865 - RNA, 19 nt, Artificial Sequence
  Description of Artificial Sequence: Synthetic oligonucleotide
  Antisense strand to SEQ ID NO: 131864
ucuagacggaaucuccaag

SEQ ID NO: 131866 - RNA, 19 nt, Artificial Sequence
  Description of Artificial Sequence: Synthetic oligonucleotide
  Sense strand starting at position 3117 of SEQ ID NO: 1689
ggaaucucuuucuuggaga

SEQ ID NO: 131867 - RNA, 19 nt, Artificial Sequence
  Description of Artificial Sequence: Synthetic oligonucleotide
  Antisense strand to SEQ ID NO: 131866
ucuccaagaaagagauucc

SEQ ID NO: 131868 - RNA, 19 nt, Artificial Sequence
  Description of Artificial Sequence: Synthetic oligonucleotide
  Sense strand starting at position 3103 of SEQ ID NO: 1689
cauguacucuuaccggaau

SEQ ID NO: 131869 - RNA, 19 nt, Artificial Sequence
  Description of Artificial Sequence: Synthetic oligonucleotide
  Antisense strand to SEQ ID NO: 131868
auuccgguaagaguacaug

SEQ ID NO: 131870 - RNA, 19 nt, Artificial Sequence
  Description of Artificial Sequence: Synthetic oligonucleotide
  Sense strand starting at position 3090 of SEQ ID NO: 1689
uauggaggcuugccaugua

SEQ ID NO: 131871 - RNA, 19 nt, Artificial Sequence
  Description of Artificial Sequence: Synthetic oligonucleotide
  Antisense strand to SEQ ID NO: 131870
uacauggcaagccuccaua

SEQ ID NO: 131872 - RNA, 19 nt, Artificial Sequence
  Description of Artificial Sequence: Synthetic oligonucleotide
  Sense strand starting at position 2852 of SEQ ID NO: 1689
ggaauaaauuuguagcucu

SEQ ID NO: 131873 - RNA, 19 nt, Artificial Sequence
  Description of Artificial Sequence: Synthetic oligonucleotide
  Antisense strand to SEQ ID NO: 131872
agagcuacaaauuuauucc

SEQ ID NO: 131874 - RNA, 19 nt, Artificial Sequence
  Description of Artificial Sequence: Synthetic oligonucleotide
  Sense strand starting at position 2850 of SEQ ID NO: 1689
gcggaauaaauuuguagcu

SEQ ID NO: 131875 - RNA, 19 nt, Artificial Sequence
  Description of Artificial Sequence: Synthetic oligonucleotide
  Antisense strand to SEQ ID NO: 131874
agcuacaaauuuauuccgc

SEQ ID NO: 131876 - RNA, 19 nt, Artificial Sequence
  Description of Artificial Sequence: Synthetic oligonucleotide
  Sense strand starting at position 2841 of SEQ ID NO: 1689
uugguaguugcggaauaaa

SEQ ID NO: 131877 - RNA, 19 nt, Artificial Sequence
  Description of Artificial Sequence: Synthetic oligonucleotide
  Antisense strand to SEQ ID NO: 131876
uuuauuccgcaacuaccaa

SEQ ID NO: 131878 - RNA, 19 nt, Artificial Sequence
  Description of Artificial Sequence: Synthetic oligonucleotide
  Sense strand starting at position 2718 of SEQ ID NO: 1689
gagcaagcagugugauuga

SEQ ID NO: 131879 - RNA, 19 nt, Artificial Sequence
  Description of Artificial Sequence: Synthetic oligonucleotide
  Antisense strand to SEQ ID NO: 131878
ucaaucacacugcuugcuc

SEQ ID NO: 131880 - RNA, 19 nt, Artificial Sequence
  Description of Artificial Sequence: Synthetic oligonucleotide
  Sense strand starting at position 2607 of SEQ ID NO: 1689
ucugcuggccaaugaagaa

SEQ ID NO: 131881 - RNA, 19 nt, Artificial Sequence
  Description of Artificial Sequence: Synthetic oligonucleotide
  Antisense strand to SEQ ID NO: 131880
uucuucauuggccagcaga

SEQ ID NO: 131882 - RNA, 19 nt, Artificial Sequence
  Description of Artificial Sequence: Synthetic oligonucleotide
  Sense strand starting at position 2526 of SEQ ID NO: 1689
gaccgucuacgagaagacu

SEQ ID NO: 131883 - RNA, 19 nt, Artificial Sequence
  Description of Artificial Sequence: Synthetic oligonucleotide
  Antisense strand to SEQ ID NO: 131882
agucuucucguagacgguc

SEQ ID NO: 131884 - RNA, 19 nt, Artificial Sequence
  Description of Artificial Sequence: Synthetic oligonucleotide
  Sense strand starting at position 2380 of SEQ ID NO: 1689
agccaaucguaagugaaga

SEQ ID NO: 131885 - RNA, 19 nt, Artificial Sequence
  Description of Artificial Sequence: Synthetic oligonucleotide
  Antisense strand to SEQ ID NO: 131884
ucuucacuuacgauuggcu

SEQ ID NO: 131886 - RNA, 19 nt, Artificial Sequence
  Description of Artificial Sequence: Synthetic oligonucleotide
  Sense strand starting at position 1238 of SEQ ID NO: 1689
ggagguuaccuuugagcug

SEQ ID NO: 131887 - RNA, 19 nt, Artificial Sequence
  Description of Artificial Sequence: Synthetic oligonucleotide
  Antisense strand to SEQ ID NO: 131886
cagcucaaagguaaccucc

SEQ ID NO: 131888 - RNA, 19 nt, Artificial Sequence
  Description of Artificial Sequence: Synthetic oligonucleotide
  Sense strand starting at position 1022 of SEQ ID NO: 1689
agaguucaggugggaauua

SEQ ID NO: 131889 - RNA, 19 nt, Artificial Sequence
  Description of Artificial Sequence: Synthetic oligonucleotide
  Antisense strand to SEQ ID NO: 131888
uaauucccaccugaacucu

SEQ ID NO: 131890 - RNA, 19 nt, Artificial Sequence
  Description of Artificial Sequence: Synthetic oligonucleotide
  Sense strand starting at position 876 of SEQ ID NO: 1689
agguucgugcgguuguuaa

SEQ ID NO: 131891 - RNA, 19 nt, Artificial Sequence
  Description of Artificial Sequence: Synthetic oligonucleotide
  Antisense strand to SEQ ID NO: 131890
uuaacaaccgcacgaaccu

SEQ ID NO: 131892 - RNA, 19 nt, Artificial Sequence
  Description of Artificial Sequence: Synthetic oligonucleotide
  Sense strand starting at position 875 of SEQ ID NO: 1689
aagguucgugcgguuguua

SEQ ID NO: 131893 - RNA, 19 nt, Artificial Sequence
  Description of Artificial Sequence: Synthetic oligonucleotide
  Antisense strand to SEQ ID NO: 131892
uaacaaccgcacgaaccuu

SEQ ID NO: 131894 - RNA, 19 nt, Artificial Sequence
  Description of Artificial Sequence: Synthetic oligonucleotide
  Sense strand starting at position 843 of SEQ ID NO: 1689
ggagcugacacucgggaaa

SEQ ID NO: 131895 - RNA, 19 nt, Artificial Sequence
  Description of Artificial Sequence: Synthetic oligonucleotide
  Antisense strand to SEQ ID NO: 131894
uuucccgagugucagcucc

SEQ ID NO: 131896 - RNA, 19 nt, Artificial Sequence
  Description of Artificial Sequence: Synthetic oligonucleotide
  Sense strand starting at position 792 of SEQ ID NO: 1689
acggcuuuauaacuguaaa

SEQ ID NO: 131897 - RNA, 19 nt, Artificial Sequence
  Description of Artificial Sequence: Synthetic oligonucleotide
  Antisense strand to SEQ ID NO: 131896
uuuacaguuauaaagccgu

SEQ ID NO: 131898 - RNA, 19 nt, Artificial Sequence
  Description of Artificial Sequence: Synthetic oligonucleotide
  Sense strand starting at position 787 of SEQ ID NO: 1689
ugcagacggcuuuauaacu

SEQ ID NO: 131899 - RNA, 19 nt, Artificial Sequence
  Description of Artificial Sequence: Synthetic oligonucleotide
  Antisense strand to SEQ ID NO: 131898
aguuauaaagccgucugca

SEQ ID NO: 131900 - RNA, 19 nt, Artificial Sequence
  Description of Artificial Sequence: Synthetic oligonucleotide
  Sense strand starting at position 722 of SEQ ID NO: 1689
ucggauuccuggucugaug

SEQ ID NO: 131901 - RNA, 19 nt, Artificial Sequence
  Description of Artificial Sequence: Synthetic oligonucleotide
  Antisense strand to SEQ ID NO: 131900
caucagaccaggaauccga

SEQ ID NO: 131902 - RNA, 19 nt, Artificial Sequence
  Description of Artificial Sequence: Synthetic oligonucleotide
  Sense strand starting at position 710 of SEQ ID NO: 1689
cguuguuugcauucggauu

SEQ ID NO: 131903 - RNA, 19 nt, Artificial Sequence
  Description of Artificial Sequence: Synthetic oligonucleotide
  Antisense strand to SEQ ID NO: 131902
aauccgaaugcaaacaacg

SEQ ID NO: 131904 - RNA, 19 nt, Artificial Sequence
  Description of Artificial Sequence: Synthetic oligonucleotide
  Sense strand starting at position 602 of SEQ ID NO: 1689
gcuaaaggauaccauuuaa

SEQ ID NO: 131905 - RNA, 19 nt, Artificial Sequence
  Description of Artificial Sequence: Synthetic oligonucleotide
  Antisense strand to SEQ ID NO: 131904
uuaaaugguauccuuuagc

SEQ ID NO: 131906 - RNA, 19 nt, Artificial Sequence
  Description of Artificial Sequence: Synthetic oligonucleotide
  Sense strand starting at position 590 of SEQ ID NO: 1689
ucuauuccuugagcuaaag

SEQ ID NO: 131907 - RNA, 19 nt, Artificial Sequence
  Description of Artificial Sequence: Synthetic oligonucleotide
  Antisense strand to SEQ ID NO: 131906
cuuuagcucaaggaauaga

SEQ ID NO: 131908 - RNA, 19 nt, Artificial Sequence
  Description of Artificial Sequence: Synthetic oligonucleotide
  Sense strand starting at position 557 of SEQ ID NO: 1689
uguguaucggcucagacaa

SEQ ID NO: 131909 - RNA, 19 nt, Artificial Sequence
  Description of Artificial Sequence: Synthetic oligonucleotide
  Antisense strand to SEQ ID NO: 131908
uugucugagccgauacaca

SEQ ID NO: 131910 - RNA, 19 nt, Artificial Sequence
  Description of Artificial Sequence: Synthetic oligonucleotide
  Sense strand starting at position 545 of SEQ ID NO: 1689
ccaaauagaccauguguau

SEQ ID NO: 131911 - RNA, 19 nt, Artificial Sequence
  Description of Artificial Sequence: Synthetic oligonucleotide
  Antisense strand to SEQ ID NO: 131910
auacacauggucuauuugg

SEQ ID NO: 131912 - RNA, 19 nt, Artificial Sequence
  Description of Artificial Sequence: Synthetic oligonucleotide
  Sense strand starting at position 477 of SEQ ID NO: 1689
ggaaucacugccuggcaaa

SEQ ID NO: 131913 - RNA, 19 nt, Artificial Sequence
  Description of Artificial Sequence: Synthetic oligonucleotide
  Antisense strand to SEQ ID NO: 131912
uuugccaggcagugauucc

SEQ ID NO: 131914 - RNA, 19 nt, Artificial Sequence
  Description of Artificial Sequence: Synthetic oligonucleotide
  Sense strand starting at position 464 of SEQ ID NO: 1689
cuacaaagucccuggaauc

SEQ ID NO: 131915 - RNA, 19 nt, Artificial Sequence
  Description of Artificial Sequence: Synthetic oligonucleotide
  Antisense strand to SEQ ID NO: 131914
gauuccagggacuuuguag

SEQ ID NO: 131916 - RNA, 19 nt, Artificial Sequence
  Description of Artificial Sequence: Synthetic oligonucleotide
  Sense strand starting at position 463 of SEQ ID NO: 1689
ccuacaaagucccuggaau

SEQ ID NO: 131917 - RNA, 19 nt, Artificial Sequence
  Description of Artificial Sequence: Synthetic oligonucleotide
  Antisense strand to SEQ ID NO: 131916
auuccagggacuuuguagg

SEQ ID NO: 131918 - RNA, 19 nt, Artificial Sequence
  Description of Artificial Sequence: Synthetic oligonucleotide
  Sense strand starting at position 409 of SEQ ID NO: 1689
caaguucuccugcaaggca

SEQ ID NO: 131919 - RNA, 19 nt, Artificial Sequence
  Description of Artificial Sequence: Synthetic oligonucleotide
  Antisense strand to SEQ ID NO: 131918
ugccuugcaggagaacuug

SEQ ID NO: 131920 - RNA, 19 nt, Artificial Sequence
  Description of Artificial Sequence: Synthetic oligonucleotide
  Sense strand starting at position 247 of SEQ ID NO: 1689
ggagcauuaucaucuuguu

SEQ ID NO: 131921 - RNA, 19 nt, Artificial Sequence
  Description of Artificial Sequence: Synthetic oligonucleotide
  Antisense strand to SEQ ID NO: 131920
aacaagaugauaaugcucc

SEQ ID NO: 131922 - RNA, 19 nt, Artificial Sequence
  Description of Artificial Sequence: Synthetic oligonucleotide
  Sense strand starting at position 244 of SEQ ID NO: 1689
guaggagcauuaucaucuu

SEQ ID NO: 131923 - RNA, 19 nt, Artificial Sequence
  Description of Artificial Sequence: Synthetic oligonucleotide
  Antisense strand to SEQ ID NO: 131922
aagaugauaaugcuccuac

SEQ ID NO: 131924 - RNA, 19 nt, Artificial Sequence
  Description of Artificial Sequence: Synthetic oligonucleotide
  Sense strand starting at position 235 of SEQ ID NO: 1689
ucuaaauauguaggagcau

SEQ ID NO: 131925 - RNA, 19 nt, Artificial Sequence
  Description of Artificial Sequence: Synthetic oligonucleotide
  Antisense strand to SEQ ID NO: 131924
augcuccuacauauuuaga

SEQ ID NO: 131926 - RNA, 19 nt, Artificial Sequence
  Description of Artificial Sequence: Synthetic oligonucleotide
  Sense strand starting at position 189 of SEQ ID NO: 1689
aucugaacaucagaugaua

SEQ ID NO: 131927 - RNA, 19 nt, Artificial Sequence
  Description of Artificial Sequence: Synthetic oligonucleotide
  Antisense strand to SEQ ID NO: 131926
uaucaucugauguucagau

SEQ ID NO: 131928 - RNA, 19 nt, Artificial Sequence
  Description of Artificial Sequence: Synthetic oligonucleotide
  Sense strand starting at position 53 of SEQ ID NO: 1689
uaggucaacugugauuuga

SEQ ID NO: 131929 - RNA, 19 nt, Artificial Sequence
  Description of Artificial Sequence: Synthetic oligonucleotide
  Antisense strand to SEQ ID NO: 131928
ucaaaucacaguugaccua

SEQ ID NO: 131930 - RNA, 19 nt, Artificial Sequence
  Description of Artificial Sequence: Synthetic oligonucleotide
  Sense strand starting at position 6 of SEQ ID NO: 1690
gugucucaugaggaucuca

SEQ ID NO: 131931 - RNA, 19 nt, Artificial Sequence
  Description of Artificial Sequence: Synthetic oligonucleotide
  Antisense strand to SEQ ID NO: 131930
ugagauccucaugagacac

SEQ ID NO: 131932 - RNA, 19 nt, Artificial Sequence
  Description of Artificial Sequence: Synthetic oligonucleotide
  Sense strand starting at position 150 of SEQ ID NO: 1690
gagucaucuuuggcuccuu

SEQ ID NO: 131933 - RNA, 19 nt, Artificial Sequence
  Description of Artificial Sequence: Synthetic oligonucleotide
  Antisense strand to SEQ ID NO: 131932
aaggagccaaagaugacuc

SEQ ID NO: 131934 - RNA, 19 nt, Artificial Sequence
  Description of Artificial Sequence: Synthetic oligonucleotide
  Sense strand starting at position 182 of SEQ ID NO: 1690
uuccaagucugaucuguua

SEQ ID NO: 131935 - RNA, 19 nt, Artificial Sequence
  Description of Artificial Sequence: Synthetic oligonucleotide
  Antisense strand to SEQ ID NO: 131934
uaacagaucagacuuggaa

SEQ ID NO: 131936 - RNA, 19 nt, Artificial Sequence
  Description of Artificial Sequence: Synthetic oligonucleotide
  Sense strand starting at position 185 of SEQ ID NO: 1690
caagucugaucuguuagca

SEQ ID NO: 131937 - RNA, 19 nt, Artificial Sequence
  Description of Artificial Sequence: Synthetic oligonucleotide
  Antisense strand to SEQ ID NO: 131936
ugcuaacagaucagacuug

SEQ ID NO: 131938 - RNA, 19 nt, Artificial Sequence
  Description of Artificial Sequence: Synthetic oligonucleotide
  Sense strand starting at position 437 of SEQ ID NO: 1690
agccaaagucccugcauua

SEQ ID NO: 131939 - RNA, 19 nt, Artificial Sequence
  Description of Artificial Sequence: Synthetic oligonucleotide
  Antisense strand to SEQ ID NO: 131938
uaaugcagggacuuuggcu

SEQ ID NO: 131940 - RNA, 19 nt, Artificial Sequence
  Description of Artificial Sequence: Synthetic oligonucleotide
  Sense strand starting at position 539 of SEQ ID NO: 1690
cagccacgcugaucugaau

SEQ ID NO: 131941 - RNA, 19 nt, Artificial Sequence
  Description of Artificial Sequence: Synthetic oligonucleotide
  Antisense strand to SEQ ID NO: 131940
auucagaucagcguggcug

SEQ ID NO: 131942 - RNA, 19 nt, Artificial Sequence
  Description of Artificial Sequence: Synthetic oligonucleotide
  Sense strand starting at position 551 of SEQ ID NO: 1690
ucugaaugcugucccuuga

SEQ ID NO: 131943 - RNA, 19 nt, Artificial Sequence
  Description of Artificial Sequence: Synthetic oligonucleotide
  Antisense strand to SEQ ID NO: 131942
ucaagggacagcauucaga

SEQ ID NO: 131944 - RNA, 19 nt, Artificial Sequence
  Description of Artificial Sequence: Synthetic oligonucleotide
  Sense strand starting at position 635 of SEQ ID NO: 1690
uggcaacuguccucaucua

SEQ ID NO: 131945 - RNA, 19 nt, Artificial Sequence
  Description of Artificial Sequence: Synthetic oligonucleotide
  Antisense strand to SEQ ID NO: 131944
uagaugaggacaguugcca

SEQ ID NO: 131946 - RNA, 19 nt, Artificial Sequence
  Description of Artificial Sequence: Synthetic oligonucleotide
  Sense strand starting at position 779 of SEQ ID NO: 1690
aucaccauuugauauguua

SEQ ID NO: 131947 - RNA, 19 nt, Artificial Sequence
  Description of Artificial Sequence: Synthetic oligonucleotide
  Antisense strand to SEQ ID NO: 131946
uaacauaucaaauggugau

SEQ ID NO: 131948 - RNA, 19 nt, Artificial Sequence
  Description of Artificial Sequence: Synthetic oligonucleotide
  Sense strand starting at position 874 of SEQ ID NO: 1690
uguuuaguucccuacugua

SEQ ID NO: 131949 - RNA, 19 nt, Artificial Sequence
  Description of Artificial Sequence: Synthetic oligonucleotide
  Antisense strand to SEQ ID NO: 131948
uacaguagggaacuaaaca

SEQ ID NO: 131950 - RNA, 19 nt, Artificial Sequence
  Description of Artificial Sequence: Synthetic oligonucleotide
  Sense strand starting at position 912 of SEQ ID NO: 1690
gcucaauaacuguguuaaa

SEQ ID NO: 131951 - RNA, 19 nt, Artificial Sequence
  Description of Artificial Sequence: Synthetic oligonucleotide
  Antisense strand to SEQ ID NO: 131950
uuuaacacaguuauugagc

SEQ ID NO: 131952 - RNA, 19 nt, Artificial Sequence
  Description of Artificial Sequence: Synthetic oligonucleotide
  Sense strand starting at position 923 of SEQ ID NO: 1690
guguuaaaugaauauaggu

SEQ ID NO: 131953 - RNA, 19 nt, Artificial Sequence
  Description of Artificial Sequence: Synthetic oligonucleotide
  Antisense strand to SEQ ID NO: 131952
accuauauucauuuaacac

SEQ ID NO: 131954 - RNA, 19 nt, Artificial Sequence
  Description of Artificial Sequence: Synthetic oligonucleotide
  Sense strand starting at position 930 of SEQ ID NO: 1690
augaauauagguugagcau

SEQ ID NO: 131955 - RNA, 19 nt, Artificial Sequence
  Description of Artificial Sequence: Synthetic oligonucleotide
  Antisense strand to SEQ ID NO: 131954
augcucaaccuauauucau

SEQ ID NO: 131956 - RNA, 19 nt, Artificial Sequence
  Description of Artificial Sequence: Synthetic oligonucleotide
  Sense strand starting at position 1222 of SEQ ID NO: 1690
agauaaggguuacucaauu

SEQ ID NO: 131957 - RNA, 19 nt, Artificial Sequence
  Description of Artificial Sequence: Synthetic oligonucleotide
  Antisense strand to SEQ ID NO: 131956
aauugaguaacccuuaucu

SEQ ID NO: 131958 - RNA, 19 nt, Artificial Sequence
  Description of Artificial Sequence: Synthetic oligonucleotide
  Sense strand starting at position 1240 of SEQ ID NO: 1690
uuguaaaugaacuguaggu

SEQ ID NO: 131959 - RNA, 19 nt, Artificial Sequence
  Description of Artificial Sequence: Synthetic oligonucleotide
  Antisense strand to SEQ ID NO: 131958
accuacaguucauuuacaa

SEQ ID NO: 131960 - RNA, 19 nt, Artificial Sequence
  Description of Artificial Sequence: Synthetic oligonucleotide
  Sense strand starting at position 1250 of SEQ ID NO: 1690
acuguaggugccuaacaaa

SEQ ID NO: 131961 - RNA, 19 nt, Artificial Sequence
  Description of Artificial Sequence: Synthetic oligonucleotide
  Antisense strand to SEQ ID NO: 131960
uuuguuaggcaccuacagu

SEQ ID NO: 131962 - RNA, 19 nt, Artificial Sequence
  Description of Artificial Sequence: Synthetic oligonucleotide
  Sense strand starting at position 1272 of SEQ ID NO: 1690
cuguucaaugugugaagga

SEQ ID NO: 131963 - RNA, 19 nt, Artificial Sequence
  Description of Artificial Sequence: Synthetic oligonucleotide
  Antisense strand to SEQ ID NO: 131962
uccuucacacauugaacag

SEQ ID NO: 131964 - RNA, 19 nt, Artificial Sequence
  Description of Artificial Sequence: Synthetic oligonucleotide
  Sense strand starting at position 1372 of SEQ ID NO: 1690
acgccacuacuguaaggau

SEQ ID NO: 131965 - RNA, 19 nt, Artificial Sequence
  Description of Artificial Sequence: Synthetic oligonucleotide
  Antisense strand to SEQ ID NO: 131964
auccuuacaguaguggcgu

SEQ ID NO: 131966 - RNA, 19 nt, Artificial Sequence
  Description of Artificial Sequence: Synthetic oligonucleotide
  Sense strand starting at position 1977 of SEQ ID NO: 1690
gcccucugcggugaaucaa

SEQ ID NO: 131967 - RNA, 19 nt, Artificial Sequence
  Description of Artificial Sequence: Synthetic oligonucleotide
  Antisense strand to SEQ ID NO: 131966
uugauucaccgcagagggc

SEQ ID NO: 131968 - RNA, 19 nt, Artificial Sequence
  Description of Artificial Sequence: Synthetic oligonucleotide
  Sense strand starting at position 2128 of SEQ ID NO: 1690
gcgaauuggcacugaguaa

SEQ ID NO: 131969 - RNA, 19 nt, Artificial Sequence
  Description of Artificial Sequence: Synthetic oligonucleotide
  Antisense strand to SEQ ID NO: 131968
uuacucagugccaauucgc

SEQ ID NO: 131970 - RNA, 19 nt, Artificial Sequence
  Description of Artificial Sequence: Synthetic oligonucleotide
  Sense strand starting at position 2169 of SEQ ID NO: 1690
gcaaauuggugguuccaaa

SEQ ID NO: 131971 - RNA, 19 nt, Artificial Sequence
  Description of Artificial Sequence: Synthetic oligonucleotide
  Antisense strand to SEQ ID NO: 131970
uuuggaaccaccaauuugc

SEQ ID NO: 131972 - RNA, 19 nt, Artificial Sequence
  Description of Artificial Sequence: Synthetic oligonucleotide
  Sense strand starting at position 2210 of SEQ ID NO: 1690
cuguacugccuuugcaaga

SEQ ID NO: 131973 - RNA, 19 nt, Artificial Sequence
  Description of Artificial Sequence: Synthetic oligonucleotide
  Antisense strand to SEQ ID NO: 131972
ucuugcaaaggcaguacag

SEQ ID NO: 131974 - RNA, 19 nt, Artificial Sequence
  Description of Artificial Sequence: Synthetic oligonucleotide
  Sense strand starting at position 2211 of SEQ ID NO: 1690
uguacugccuuugcaagaa

SEQ ID NO: 131975 - RNA, 19 nt, Artificial Sequence
  Description of Artificial Sequence: Synthetic oligonucleotide
  Antisense strand to SEQ ID NO: 131974
uucuugcaaaggcaguaca

SEQ ID NO: 131976 - RNA, 19 nt, Artificial Sequence
  Description of Artificial Sequence: Synthetic oligonucleotide
  Sense strand starting at position 2215 of SEQ ID NO: 1690
cugccuuugcaagaaacau

SEQ ID NO: 131977 - RNA, 19 nt, Artificial Sequence
  Description of Artificial Sequence: Synthetic oligonucleotide
  Antisense strand to SEQ ID NO: 131976
auguuucuugcaaaggcag

SEQ ID NO: 131978 - RNA, 19 nt, Artificial Sequence
  Description of Artificial Sequence: Synthetic oligonucleotide
  Sense strand starting at position 2298 of SEQ ID NO: 1690
ggguuuguucuggauauug

SEQ ID NO: 131979 - RNA, 19 nt, Artificial Sequence
  Description of Artificial Sequence: Synthetic oligonucleotide
  Antisense strand to SEQ ID NO: 131978
caauauccagaacaaaccc

SEQ ID NO: 131980 - RNA, 19 nt, Artificial Sequence
  Description of Artificial Sequence: Synthetic oligonucleotide
  Sense strand starting at position 2404 of SEQ ID NO: 1690
ucuagaaaugucgggacuu

SEQ ID NO: 131981 - RNA, 19 nt, Artificial Sequence
  Description of Artificial Sequence: Synthetic oligonucleotide
  Antisense strand to SEQ ID NO: 131980
aagucccgacauuucuaga

SEQ ID NO: 131982 - RNA, 19 nt, Artificial Sequence
  Description of Artificial Sequence: Synthetic oligonucleotide
  Sense strand starting at position 2430 of SEQ ID NO: 1690
gacgaaagcauauguugga

SEQ ID NO: 131983 - RNA, 19 nt, Artificial Sequence
  Description of Artificial Sequence: Synthetic oligonucleotide
  Antisense strand to SEQ ID NO: 131982
uccaacauaugcuuucguc

SEQ ID NO: 131984 - RNA, 19 nt, Artificial Sequence
  Description of Artificial Sequence: Synthetic oligonucleotide
  Sense strand starting at position 2437 of SEQ ID NO: 1690
gcauauguuggaugcauaa

SEQ ID NO: 131985 - RNA, 19 nt, Artificial Sequence
  Description of Artificial Sequence: Synthetic oligonucleotide
  Antisense strand to SEQ ID NO: 131984
uuaugcauccaacauaugc

SEQ ID NO: 131986 - RNA, 19 nt, Artificial Sequence
  Description of Artificial Sequence: Synthetic oligonucleotide
  Sense strand starting at position 2486 of SEQ ID NO: 1690
ggccuaaucucagcuggau

SEQ ID NO: 131987 - RNA, 19 nt, Artificial Sequence
  Description of Artificial Sequence: Synthetic oligonucleotide
  Antisense strand to SEQ ID NO: 131986
auccagcugagauuaggcc

SEQ ID NO: 131988 - RNA, 19 nt, Artificial Sequence
  Description of Artificial Sequence: Synthetic oligonucleotide
  Sense strand starting at position 2489 of SEQ ID NO: 1690
cuaaucucagcuggauuau

SEQ ID NO: 131989 - RNA, 19 nt, Artificial Sequence
  Description of Artificial Sequence: Synthetic oligonucleotide
  Antisense strand to SEQ ID NO: 131988
auaauccagcugagauuag

SEQ ID NO: 131990 - RNA, 19 nt, Artificial Sequence
  Description of Artificial Sequence: Synthetic oligonucleotide
  Sense strand starting at position 2498 of SEQ ID NO: 1690
gcuggauuauuucaagggu

SEQ ID NO: 131991 - RNA, 19 nt, Artificial Sequence
  Description of Artificial Sequence: Synthetic oligonucleotide
  Antisense strand to SEQ ID NO: 131990
acccuugaaauaauccagc

SEQ ID NO: 131992 - RNA, 19 nt, Artificial Sequence
  Description of Artificial Sequence: Synthetic oligonucleotide
  Sense strand starting at position 2674 of SEQ ID NO: 1690
auuagaguguauccacuau

SEQ ID NO: 131993 - RNA, 19 nt, Artificial Sequence
  Description of Artificial Sequence: Synthetic oligonucleotide
  Antisense strand to SEQ ID NO: 131992
auaguggauacacucuaau

SEQ ID NO: 131994 - RNA, 19 nt, Artificial Sequence
  Description of Artificial Sequence: Synthetic oligonucleotide
  Sense strand starting at position 2680 of SEQ ID NO: 1690
guguauccacuauacaaug

SEQ ID NO: 131995 - RNA, 19 nt, Artificial Sequence
  Description of Artificial Sequence: Synthetic oligonucleotide
  Antisense strand to SEQ ID NO: 131994
cauuguauaguggauacac

SEQ ID NO: 131996 - RNA, 19 nt, Artificial Sequence
  Description of Artificial Sequence: Synthetic oligonucleotide
  Sense strand starting at position 3215 of SEQ ID NO: 1690
cgccauugcacugagcuau

SEQ ID NO: 131997 - RNA, 19 nt, Artificial Sequence
  Description of Artificial Sequence: Synthetic oligonucleotide
  Antisense strand to SEQ ID NO: 131996
auagcucagugcaauggcg

SEQ ID NO: 131998 - RNA, 19 nt, Artificial Sequence
  Description of Artificial Sequence: Synthetic oligonucleotide
  Sense strand starting at position 3291 of SEQ ID NO: 1690
gagguaaauuuacauaaag

SEQ ID NO: 131999 - RNA, 19 nt, Artificial Sequence
  Description of Artificial Sequence: Synthetic oligonucleotide
  Antisense strand to SEQ ID NO: 131998
cuuuauguaaauuuaccuc

SEQ ID NO: 132000 - RNA, 19 nt, Artificial Sequence
  Description of Artificial Sequence: Synthetic oligonucleotide
  Sense strand starting at position 3322 of SEQ ID NO: 1690
ugcccuuaauauguuguaa

SEQ ID NO: 132001 - RNA, 19 nt, Artificial Sequence
  Description of Artificial Sequence: Synthetic oligonucleotide
  Antisense strand to SEQ ID NO: 132000
uuacaacauauuaagggca

SEQ ID NO: 132002 - RNA, 19 nt, Artificial Sequence
  Description of Artificial Sequence: Synthetic oligonucleotide
  Sense strand starting at position 3729 of SEQ ID NO: 1690
agcauuauacaguacagua

SEQ ID NO: 132003 - RNA, 19 nt, Artificial Sequence
  Description of Artificial Sequence: Synthetic oligonucleotide
  Antisense strand to SEQ ID NO: 132002
uacuguacuguauaaugcu

SEQ ID NO: 132004 - RNA, 19 nt, Artificial Sequence
  Description of Artificial Sequence: Synthetic oligonucleotide
  Sense strand starting at position 3839 of SEQ ID NO: 1690
gugaauauagcccgcucaa

SEQ ID NO: 132005 - RNA, 19 nt, Artificial Sequence
  Description of Artificial Sequence: Synthetic oligonucleotide
  Antisense strand to SEQ ID NO: 132004
uugagcgggcuauauucac

SEQ ID NO: 132006 - RNA, 19 nt, Artificial Sequence
  Description of Artificial Sequence: Synthetic oligonucleotide
  Sense strand starting at position 3862 of SEQ ID NO: 1690
guuuccugccuuuaaugaa

SEQ ID NO: 132007 - RNA, 19 nt, Artificial Sequence
  Description of Artificial Sequence: Synthetic oligonucleotide
  Antisense strand to SEQ ID NO: 132006
uucauuaaaggcaggaaac

SEQ ID NO: 132008 - RNA, 19 nt, Artificial Sequence
  Description of Artificial Sequence: Synthetic oligonucleotide
  Sense strand starting at position 3904 of SEQ ID NO: 1690
uucuuuaaacuggagcaau

SEQ ID NO: 132009 - RNA, 19 nt, Artificial Sequence
  Description of Artificial Sequence: Synthetic oligonucleotide
  Antisense strand to SEQ ID NO: 132008
auugcuccaguuuaaagaa

SEQ ID NO: 132010 - RNA, 19 nt, Artificial Sequence
  Description of Artificial Sequence: Synthetic oligonucleotide
  Sense strand starting at position 3451 of SEQ ID NO: 1691
cuggguccuccugagucau

SEQ ID NO: 132011 - RNA, 19 nt, Artificial Sequence
  Description of Artificial Sequence: Synthetic oligonucleotide
  Antisense strand to SEQ ID NO: 132010
augacucaggaggacccag

SEQ ID NO: 132012 - RNA, 19 nt, Artificial Sequence
  Description of Artificial Sequence: Synthetic oligonucleotide
  Sense strand starting at position 3374 of SEQ ID NO: 1691
ggcuguuacccuuaccaug

SEQ ID NO: 132013 - RNA, 19 nt, Artificial Sequence
  Description of Artificial Sequence: Synthetic oligonucleotide
  Antisense strand to SEQ ID NO: 132012
caugguaaggguaacagcc

SEQ ID NO: 132014 - RNA, 19 nt, Artificial Sequence
  Description of Artificial Sequence: Synthetic oligonucleotide
  Sense strand starting at position 3239 of SEQ ID NO: 1691
cgugaugugugaaaggaag

SEQ ID NO: 132015 - RNA, 19 nt, Artificial Sequence
  Description of Artificial Sequence: Synthetic oligonucleotide
  Antisense strand to SEQ ID NO: 132014
cuuccuuucacacaucacg

SEQ ID NO: 132016 - RNA, 19 nt, Artificial Sequence
  Description of Artificial Sequence: Synthetic oligonucleotide
  Sense strand starting at position 3237 of SEQ ID NO: 1691
ugcgugaugugugaaagga

SEQ ID NO: 132017 - RNA, 19 nt, Artificial Sequence
  Description of Artificial Sequence: Synthetic oligonucleotide
  Antisense strand to SEQ ID NO: 132016
uccuuucacacaucacgca

SEQ ID NO: 132018 - RNA, 19 nt, Artificial Sequence
  Description of Artificial Sequence: Synthetic oligonucleotide
  Sense strand starting at position 3234 of SEQ ID NO: 1691
augugcgugaugugugaaa

SEQ ID NO: 132019 - RNA, 19 nt, Artificial Sequence
  Description of Artificial Sequence: Synthetic oligonucleotide
  Antisense strand to SEQ ID NO: 132018
uuucacacaucacgcacau

SEQ ID NO: 132020 - RNA, 19 nt, Artificial Sequence
  Description of Artificial Sequence: Synthetic oligonucleotide
  Sense strand starting at position 3229 of SEQ ID NO: 1691
augcaaugugcgugaugug

SEQ ID NO: 132021 - RNA, 19 nt, Artificial Sequence
  Description of Artificial Sequence: Synthetic oligonucleotide
  Antisense strand to SEQ ID NO: 132020
cacaucacgcacauugcau

SEQ ID NO: 132022 - RNA, 19 nt, Artificial Sequence
  Description of Artificial Sequence: Synthetic oligonucleotide
  Sense strand starting at position 3198 of SEQ ID NO: 1691
auuagagucugugcaaaga

SEQ ID NO: 132023 - RNA, 19 nt, Artificial Sequence
  Description of Artificial Sequence: Synthetic oligonucleotide
  Antisense strand to SEQ ID NO: 132022
ucuuugcacagacucuaau

SEQ ID NO: 132024 - RNA, 19 nt, Artificial Sequence
  Description of Artificial Sequence: Synthetic oligonucleotide
  Sense strand starting at position 3196 of SEQ ID NO: 1691
acauuagagucugugcaaa

SEQ ID NO: 132025 - RNA, 19 nt, Artificial Sequence
  Description of Artificial Sequence: Synthetic oligonucleotide
  Antisense strand to SEQ ID NO: 132024
uuugcacagacucuaaugu

SEQ ID NO: 132026 - RNA, 19 nt, Artificial Sequence
  Description of Artificial Sequence: Synthetic oligonucleotide
  Sense strand starting at position 3195 of SEQ ID NO: 1691
aacauuagagucugugcaa

SEQ ID NO: 132027 - RNA, 19 nt, Artificial Sequence
  Description of Artificial Sequence: Synthetic oligonucleotide
  Antisense strand to SEQ ID NO: 132026
uugcacagacucuaauguu

SEQ ID NO: 132028 - RNA, 19 nt, Artificial Sequence
  Description of Artificial Sequence: Synthetic oligonucleotide
  Sense strand starting at position 3029 of SEQ ID NO: 1691
agagucuaaugaggaagau

SEQ ID NO: 132029 - RNA, 19 nt, Artificial Sequence
  Description of Artificial Sequence: Synthetic oligonucleotide
  Antisense strand to SEQ ID NO: 132028
aucuuccucauuagacucu

SEQ ID NO: 132030 - RNA, 19 nt, Artificial Sequence
  Description of Artificial Sequence: Synthetic oligonucleotide
  Sense strand starting at position 2832 of SEQ ID NO: 1691
gaauuugaccugugcagcu

SEQ ID NO: 132031 - RNA, 19 nt, Artificial Sequence
  Description of Artificial Sequence: Synthetic oligonucleotide
  Antisense strand to SEQ ID NO: 132030
agcugcacaggucaaauuc

SEQ ID NO: 132032 - RNA, 19 nt, Artificial Sequence
  Description of Artificial Sequence: Synthetic oligonucleotide
  Sense strand starting at position 1272 of SEQ ID NO: 1691
guugauuagacaugaccug

SEQ ID NO: 132033 - RNA, 19 nt, Artificial Sequence
  Description of Artificial Sequence: Synthetic oligonucleotide
  Antisense strand to SEQ ID NO: 132032
caggucaugucuaaucaac

SEQ ID NO: 132034 - RNA, 19 nt, Artificial Sequence
  Description of Artificial Sequence: Synthetic oligonucleotide
  Sense strand starting at position 1268 of SEQ ID NO: 1691
aagcguugauuagacauga

SEQ ID NO: 132035 - RNA, 19 nt, Artificial Sequence
  Description of Artificial Sequence: Synthetic oligonucleotide
  Antisense strand to SEQ ID NO: 132034
ucaugucuaaucaacgcuu

SEQ ID NO: 132036 - RNA, 19 nt, Artificial Sequence
  Description of Artificial Sequence: Synthetic oligonucleotide
  Sense strand starting at position 1266 of SEQ ID NO: 1691
guaagcguugauuagacau

SEQ ID NO: 132037 - RNA, 19 nt, Artificial Sequence
  Description of Artificial Sequence: Synthetic oligonucleotide
  Antisense strand to SEQ ID NO: 132036
augucuaaucaacgcuuac

SEQ ID NO: 132038 - RNA, 19 nt, Artificial Sequence
  Description of Artificial Sequence: Synthetic oligonucleotide
  Sense strand starting at position 1263 of SEQ ID NO: 1691
ucaguaagcguugauuaga

SEQ ID NO: 132039 - RNA, 19 nt, Artificial Sequence
  Description of Artificial Sequence: Synthetic oligonucleotide
  Antisense strand to SEQ ID NO: 132038
ucuaaucaacgcuuacuga

SEQ ID NO: 132040 - RNA, 19 nt, Artificial Sequence
  Description of Artificial Sequence: Synthetic oligonucleotide
  Sense strand starting at position 1262 of SEQ ID NO: 1691
uucaguaagcguugauuag

SEQ ID NO: 132041 - RNA, 19 nt, Artificial Sequence
  Description of Artificial Sequence: Synthetic oligonucleotide
  Antisense strand to SEQ ID NO: 132040
cuaaucaacgcuuacugaa

SEQ ID NO: 132042 - RNA, 19 nt, Artificial Sequence
  Description of Artificial Sequence: Synthetic oligonucleotide
  Sense strand starting at position 1132 of SEQ ID NO: 1691
agaguuaaaugagacaauc

SEQ ID NO: 132043 - RNA, 19 nt, Artificial Sequence
  Description of Artificial Sequence: Synthetic oligonucleotide
  Antisense strand to SEQ ID NO: 132042
gauugucucauuuaacucu

SEQ ID NO: 132044 - RNA, 19 nt, Artificial Sequence
  Description of Artificial Sequence: Synthetic oligonucleotide
  Sense strand starting at position 1129 of SEQ ID NO: 1691
ugcagaguuaaaugagaca

SEQ ID NO: 132045 - RNA, 19 nt, Artificial Sequence
  Description of Artificial Sequence: Synthetic oligonucleotide
  Antisense strand to SEQ ID NO: 132044
ugucucauuuaacucugca

SEQ ID NO: 132046 - RNA, 19 nt, Artificial Sequence
  Description of Artificial Sequence: Synthetic oligonucleotide
  Sense strand starting at position 1066 of SEQ ID NO: 1691
ugagcuucguaguucucau

SEQ ID NO: 132047 - RNA, 19 nt, Artificial Sequence
  Description of Artificial Sequence: Synthetic oligonucleotide
  Antisense strand to SEQ ID NO: 132046
augagaacuacgaagcuca

SEQ ID NO: 132048 - RNA, 19 nt, Artificial Sequence
  Description of Artificial Sequence: Synthetic oligonucleotide
  Sense strand starting at position 1061 of SEQ ID NO: 1691
gugauugagcuucguaguu

SEQ ID NO: 132049 - RNA, 19 nt, Artificial Sequence
  Description of Artificial Sequence: Synthetic oligonucleotide
  Antisense strand to SEQ ID NO: 132048
aacuacgaagcucaaucac

SEQ ID NO: 132050 - RNA, 19 nt, Artificial Sequence
  Description of Artificial Sequence: Synthetic oligonucleotide
  Sense strand starting at position 1054 of SEQ ID NO: 1691
aacucaagugauugagcuu

SEQ ID NO: 132051 - RNA, 19 nt, Artificial Sequence
  Description of Artificial Sequence: Synthetic oligonucleotide
  Antisense strand to SEQ ID NO: 132050
aagcucaaucacuugaguu

SEQ ID NO: 132052 - RNA, 19 nt, Artificial Sequence
  Description of Artificial Sequence: Synthetic oligonucleotide
  Sense strand starting at position 1053 of SEQ ID NO: 1691
gaacucaagugauugagcu

SEQ ID NO: 132053 - RNA, 19 nt, Artificial Sequence
  Description of Artificial Sequence: Synthetic oligonucleotide
  Antisense strand to SEQ ID NO: 132052
agcucaaucacuugaguuc

SEQ ID NO: 132054 - RNA, 19 nt, Artificial Sequence
  Description of Artificial Sequence: Synthetic oligonucleotide
  Sense strand starting at position 1050 of SEQ ID NO: 1691
cuggaacucaagugauuga

SEQ ID NO: 132055 - RNA, 19 nt, Artificial Sequence
  Description of Artificial Sequence: Synthetic oligonucleotide
  Antisense strand to SEQ ID NO: 132054
ucaaucacuugaguuccag

SEQ ID NO: 132056 - RNA, 19 nt, Artificial Sequence
  Description of Artificial Sequence: Synthetic oligonucleotide
  Sense strand starting at position 809 of SEQ ID NO: 1691
ucuuauucuccagguguaa

SEQ ID NO: 132057 - RNA, 19 nt, Artificial Sequence
  Description of Artificial Sequence: Synthetic oligonucleotide
  Antisense strand to SEQ ID NO: 132056
uuacaccuggagaauaaga

SEQ ID NO: 132058 - RNA, 19 nt, Artificial Sequence
  Description of Artificial Sequence: Synthetic oligonucleotide
  Sense strand starting at position 807 of SEQ ID NO: 1691
uuucuuauucuccaggugu

SEQ ID NO: 132059 - RNA, 19 nt, Artificial Sequence
  Description of Artificial Sequence: Synthetic oligonucleotide
  Antisense strand to SEQ ID NO: 132058
acaccuggagaauaagaaa

SEQ ID NO: 132060 - RNA, 19 nt, Artificial Sequence
  Description of Artificial Sequence: Synthetic oligonucleotide
  Sense strand starting at position 802 of SEQ ID NO: 1691
gugcauuucuuauucucca

SEQ ID NO: 132061 - RNA, 19 nt, Artificial Sequence
  Description of Artificial Sequence: Synthetic oligonucleotide
  Antisense strand to SEQ ID NO: 132060
uggagaauaagaaaugcac

SEQ ID NO: 132062 - RNA, 19 nt, Artificial Sequence
  Description of Artificial Sequence: Synthetic oligonucleotide
  Sense strand starting at position 764 of SEQ ID NO: 1691
accacugucuuugaaacgu

SEQ ID NO: 132063 - RNA, 19 nt, Artificial Sequence
  Description of Artificial Sequence: Synthetic oligonucleotide
  Antisense strand to SEQ ID NO: 132062
acguuucaaagacaguggu

SEQ ID NO: 132064 - RNA, 19 nt, Artificial Sequence
  Description of Artificial Sequence: Synthetic oligonucleotide
  Sense strand starting at position 762 of SEQ ID NO: 1691
cgaccacugucuuugaaac

SEQ ID NO: 132065 - RNA, 19 nt, Artificial Sequence
  Description of Artificial Sequence: Synthetic oligonucleotide
  Antisense strand to SEQ ID NO: 132064
guuucaaagacaguggucg

SEQ ID NO: 132066 - RNA, 19 nt, Artificial Sequence
  Description of Artificial Sequence: Synthetic oligonucleotide
  Sense strand starting at position 624 of SEQ ID NO: 1691
gggccuggucaugagauaa

SEQ ID NO: 132067 - RNA, 19 nt, Artificial Sequence
  Description of Artificial Sequence: Synthetic oligonucleotide
  Antisense strand to SEQ ID NO: 132066
uuaucucaugaccaggccc

SEQ ID NO: 132068 - RNA, 19 nt, Artificial Sequence
  Description of Artificial Sequence: Synthetic oligonucleotide
  Sense strand starting at position 623 of SEQ ID NO: 1691
agggccuggucaugagaua

SEQ ID NO: 132069 - RNA, 19 nt, Artificial Sequence
  Description of Artificial Sequence: Synthetic oligonucleotide
  Antisense strand to SEQ ID NO: 132068
uaucucaugaccaggcccu

SEQ ID NO: 132070 - RNA, 19 nt, Artificial Sequence
  Description of Artificial Sequence: Synthetic oligonucleotide
  Sense strand starting at position 492 of SEQ ID NO: 1691
gccucaaguuacuccaaga

SEQ ID NO: 132071 - RNA, 19 nt, Artificial Sequence
  Description of Artificial Sequence: Synthetic oligonucleotide
  Antisense strand to SEQ ID NO: 132070
ucuuggaguaacuugaggc

SEQ ID NO: 132072 - RNA, 19 nt, Artificial Sequence
  Description of Artificial Sequence: Synthetic oligonucleotide
  Sense strand starting at position 484 of SEQ ID NO: 1691
gaggcuaggccucaaguua

SEQ ID NO: 132073 - RNA, 19 nt, Artificial Sequence
  Description of Artificial Sequence: Synthetic oligonucleotide
  Antisense strand to SEQ ID NO: 132072
uaacuugaggccuagccuc

SEQ ID NO: 132074 - RNA, 19 nt, Artificial Sequence
  Description of Artificial Sequence: Synthetic oligonucleotide
  Sense strand starting at position 472 of SEQ ID NO: 1691
uccaaauuaccugaggcua

SEQ ID NO: 132075 - RNA, 19 nt, Artificial Sequence
  Description of Artificial Sequence: Synthetic oligonucleotide
  Antisense strand to SEQ ID NO: 132074
uagccucagguaauuugga

SEQ ID NO: 132076 - RNA, 19 nt, Artificial Sequence
  Description of Artificial Sequence: Synthetic oligonucleotide
  Sense strand starting at position 331 of SEQ ID NO: 1691
agugcacuuugagaaaggu

SEQ ID NO: 132077 - RNA, 19 nt, Artificial Sequence
  Description of Artificial Sequence: Synthetic oligonucleotide
  Antisense strand to SEQ ID NO: 132076
accuuucucaaagugcacu

SEQ ID NO: 132078 - RNA, 19 nt, Artificial Sequence
  Description of Artificial Sequence: Synthetic oligonucleotide
  Sense strand starting at position 328 of SEQ ID NO: 1691
ucuagugcacuuugagaaa

SEQ ID NO: 132079 - RNA, 19 nt, Artificial Sequence
  Description of Artificial Sequence: Synthetic oligonucleotide
  Antisense strand to SEQ ID NO: 132078
uuucucaaagugcacuaga

SEQ ID NO: 132080 - RNA, 19 nt, Artificial Sequence
  Description of Artificial Sequence: Synthetic oligonucleotide
  Sense strand starting at position 312 of SEQ ID NO: 1691
cagcgauucugcuccaucu

SEQ ID NO: 132081 - RNA, 19 nt, Artificial Sequence
  Description of Artificial Sequence: Synthetic oligonucleotide
  Antisense strand to SEQ ID NO: 132080
agauggagcagaaucgcug

SEQ ID NO: 132082 - RNA, 19 nt, Artificial Sequence
  Description of Artificial Sequence: Synthetic oligonucleotide
  Sense strand starting at position 285 of SEQ ID NO: 1691
uagagauucuggguuuaag

SEQ ID NO: 132083 - RNA, 19 nt, Artificial Sequence
  Description of Artificial Sequence: Synthetic oligonucleotide
  Antisense strand to SEQ ID NO: 132082
cuuaaacccagaaucucua

SEQ ID NO: 132084 - RNA, 19 nt, Artificial Sequence
  Description of Artificial Sequence: Synthetic oligonucleotide
  Sense strand starting at position 283 of SEQ ID NO: 1691
cuuagagauucuggguuua

SEQ ID NO: 132085 - RNA, 19 nt, Artificial Sequence
  Description of Artificial Sequence: Synthetic oligonucleotide
  Antisense strand to SEQ ID NO: 132084
uaaacccagaaucucuaag

SEQ ID NO: 132086 - RNA, 19 nt, Artificial Sequence
  Description of Artificial Sequence: Synthetic oligonucleotide
  Sense strand starting at position 146 of SEQ ID NO: 1691
ugagcaaauggauguccaa

SEQ ID NO: 132087 - RNA, 19 nt, Artificial Sequence
  Description of Artificial Sequence: Synthetic oligonucleotide
  Antisense strand to SEQ ID NO: 132086
uuggacauccauuugcuca

SEQ ID NO: 132088 - RNA, 19 nt, Artificial Sequence
  Description of Artificial Sequence: Synthetic oligonucleotide
  Sense strand starting at position 135 of SEQ ID NO: 1691
ucaaacagcucugagcaaa

SEQ ID NO: 132089 - RNA, 19 nt, Artificial Sequence
  Description of Artificial Sequence: Synthetic oligonucleotide
  Antisense strand to SEQ ID NO: 132088
uuugcucagagcuguuuga

SEQ ID NO: 132090 - RNA, 19 nt, Artificial Sequence
  Description of Artificial Sequence: Synthetic oligonucleotide
  Sense strand starting at position 3931 of SEQ ID NO: 1692
ucacuugagguccguaauu

SEQ ID NO: 132091 - RNA, 19 nt, Artificial Sequence
  Description of Artificial Sequence: Synthetic oligonucleotide
  Antisense strand to SEQ ID NO: 132090
aauuacggaccucaaguga

SEQ ID NO: 132092 - RNA, 19 nt, Artificial Sequence
  Description of Artificial Sequence: Synthetic oligonucleotide
  Sense strand starting at position 3514 of SEQ ID NO: 1692
gugucacucucagggcaaa

SEQ ID NO: 132093 - RNA, 19 nt, Artificial Sequence
  Description of Artificial Sequence: Synthetic oligonucleotide
  Antisense strand to SEQ ID NO: 132092
uuugcccugagagugacac

SEQ ID NO: 132094 - RNA, 19 nt, Artificial Sequence
  Description of Artificial Sequence: Synthetic oligonucleotide
  Sense strand starting at position 2814 of SEQ ID NO: 1692
aggacucaucccugaccuu

SEQ ID NO: 132095 - RNA, 19 nt, Artificial Sequence
  Description of Artificial Sequence: Synthetic oligonucleotide
  Antisense strand to SEQ ID NO: 132094
aaggucagggaugaguccu

SEQ ID NO: 132096 - RNA, 19 nt, Artificial Sequence
  Description of Artificial Sequence: Synthetic oligonucleotide
  Sense strand starting at position 2179 of SEQ ID NO: 1692
agugcaugauccuuucuca

SEQ ID NO: 132097 - RNA, 19 nt, Artificial Sequence
  Description of Artificial Sequence: Synthetic oligonucleotide
  Antisense strand to SEQ ID NO: 132096
ugagaaaggaucaugcacu

SEQ ID NO: 132098 - RNA, 19 nt, Artificial Sequence
  Description of Artificial Sequence: Synthetic oligonucleotide
  Sense strand starting at position 2133 of SEQ ID NO: 1692
aauguuugcuguuacagaa

SEQ ID NO: 132099 - RNA, 19 nt, Artificial Sequence
  Description of Artificial Sequence: Synthetic oligonucleotide
  Antisense strand to SEQ ID NO: 132098
uucuguaacagcaaacauu

SEQ ID NO: 132100 - RNA, 19 nt, Artificial Sequence
  Description of Artificial Sequence: Synthetic oligonucleotide
  Sense strand starting at position 2130 of SEQ ID NO: 1692
ucuaauguuugcuguuaca

SEQ ID NO: 132101 - RNA, 19 nt, Artificial Sequence
  Description of Artificial Sequence: Synthetic oligonucleotide
  Antisense strand to SEQ ID NO: 132100
uguaacagcaaacauuaga

SEQ ID NO: 132102 - RNA, 19 nt, Artificial Sequence
  Description of Artificial Sequence: Synthetic oligonucleotide
  Sense strand starting at position 2128 of SEQ ID NO: 1692
auucuaauguuugcuguua

SEQ ID NO: 132103 - RNA, 19 nt, Artificial Sequence
  Description of Artificial Sequence: Synthetic oligonucleotide
  Antisense strand to SEQ ID NO: 132102
uaacagcaaacauuagaau

SEQ ID NO: 132104 - RNA, 19 nt, Artificial Sequence
  Description of Artificial Sequence: Synthetic oligonucleotide
  Sense strand starting at position 2120 of SEQ ID NO: 1692
guacaugcauucuaauguu

SEQ ID NO: 132105 - RNA, 19 nt, Artificial Sequence
  Description of Artificial Sequence: Synthetic oligonucleotide
  Antisense strand to SEQ ID NO: 132104
aacauuagaaugcauguac

SEQ ID NO: 132106 - RNA, 19 nt, Artificial Sequence
  Description of Artificial Sequence: Synthetic oligonucleotide
  Sense strand starting at position 3874 of SEQ ID NO: 1693
acggcaugacacugucaaa

SEQ ID NO: 132107 - RNA, 19 nt, Artificial Sequence
  Description of Artificial Sequence: Synthetic oligonucleotide
  Antisense strand to SEQ ID NO: 132106
uuugacagugucaugccgu

SEQ ID NO: 132108 - RNA, 19 nt, Artificial Sequence
  Description of Artificial Sequence: Synthetic oligonucleotide
  Sense strand starting at position 3362 of SEQ ID NO: 1693
ccgucauuguucuaucauu

SEQ ID NO: 132109 - RNA, 19 nt, Artificial Sequence
  Description of Artificial Sequence: Synthetic oligonucleotide
  Antisense strand to SEQ ID NO: 132108
aaugauagaacaaugacgg

SEQ ID NO: 132110 - RNA, 19 nt, Artificial Sequence
  Description of Artificial Sequence: Synthetic oligonucleotide
  Sense strand starting at position 3360 of SEQ ID NO: 1693
guccgucauuguucuauca

SEQ ID NO: 132111 - RNA, 19 nt, Artificial Sequence
  Description of Artificial Sequence: Synthetic oligonucleotide
  Antisense strand to SEQ ID NO: 132110
ugauagaacaaugacggac

SEQ ID NO: 132112 - RNA, 19 nt, Artificial Sequence
  Description of Artificial Sequence: Synthetic oligonucleotide
  Sense strand starting at position 3354 of SEQ ID NO: 1693
ccauauguccgucauuguu

SEQ ID NO: 132113 - RNA, 19 nt, Artificial Sequence
  Description of Artificial Sequence: Synthetic oligonucleotide
  Antisense strand to SEQ ID NO: 132112
aacaaugacggacauaugg

SEQ ID NO: 132114 - RNA, 19 nt, Artificial Sequence
  Description of Artificial Sequence: Synthetic oligonucleotide
  Sense strand starting at position 3352 of SEQ ID NO: 1693
guccauauguccgucauug

SEQ ID NO: 132115 - RNA, 19 nt, Artificial Sequence
  Description of Artificial Sequence: Synthetic oligonucleotide
  Antisense strand to SEQ ID NO: 132114
caaugacggacauauggac

SEQ ID NO: 132116 - RNA, 19 nt, Artificial Sequence
  Description of Artificial Sequence: Synthetic oligonucleotide
  Sense strand starting at position 3351 of SEQ ID NO: 1693
gguccauauguccgucauu

SEQ ID NO: 132117 - RNA, 19 nt, Artificial Sequence
  Description of Artificial Sequence: Synthetic oligonucleotide
  Antisense strand to SEQ ID NO: 132116
aaugacggacauauggacc

SEQ ID NO: 132118 - RNA, 19 nt, Artificial Sequence
  Description of Artificial Sequence: Synthetic oligonucleotide
  Sense strand starting at position 3251 of SEQ ID NO: 1693
gaagauuguggcuagaccu

SEQ ID NO: 132119 - RNA, 19 nt, Artificial Sequence
  Description of Artificial Sequence: Synthetic oligonucleotide
  Antisense strand to SEQ ID NO: 132118
aggucuagccacaaucuuc

SEQ ID NO: 132120 - RNA, 19 nt, Artificial Sequence
  Description of Artificial Sequence: Synthetic oligonucleotide
  Sense strand starting at position 3248 of SEQ ID NO: 1693
agagaagauuguggcuaga

SEQ ID NO: 132121 - RNA, 19 nt, Artificial Sequence
  Description of Artificial Sequence: Synthetic oligonucleotide
  Antisense strand to SEQ ID NO: 132120
ucuagccacaaucuucucu

SEQ ID NO: 132122 - RNA, 19 nt, Artificial Sequence
  Description of Artificial Sequence: Synthetic oligonucleotide
  Sense strand starting at position 2247 of SEQ ID NO: 1693
gaugaaguuucgcuaauac

SEQ ID NO: 132123 - RNA, 19 nt, Artificial Sequence
  Description of Artificial Sequence: Synthetic oligonucleotide
  Antisense strand to SEQ ID NO: 132122
guauuagcgaaacuucauc

SEQ ID NO: 132124 - RNA, 19 nt, Artificial Sequence
  Description of Artificial Sequence: Synthetic oligonucleotide
  Sense strand starting at position 2246 of SEQ ID NO: 1693
ugaugaaguuucgcuaaua

SEQ ID NO: 132125 - RNA, 19 nt, Artificial Sequence
  Description of Artificial Sequence: Synthetic oligonucleotide
  Antisense strand to SEQ ID NO: 132124
uauuagcgaaacuucauca

SEQ ID NO: 132126 - RNA, 19 nt, Artificial Sequence
  Description of Artificial Sequence: Synthetic oligonucleotide
  Sense strand starting at position 2237 of SEQ ID NO: 1693
cucaaauacugaugaaguu

SEQ ID NO: 132127 - RNA, 19 nt, Artificial Sequence
  Description of Artificial Sequence: Synthetic oligonucleotide
  Antisense strand to SEQ ID NO: 132126
aacuucaucaguauuugag

SEQ ID NO: 132128 - RNA, 19 nt, Artificial Sequence
  Description of Artificial Sequence: Synthetic oligonucleotide
  Sense strand starting at position 1531 of SEQ ID NO: 1693
gagauugcugugugggaua

SEQ ID NO: 132129 - RNA, 19 nt, Artificial Sequence
  Description of Artificial Sequence: Synthetic oligonucleotide
  Antisense strand to SEQ ID NO: 132128
uaucccacacagcaaucuc

SEQ ID NO: 132130 - RNA, 19 nt, Artificial Sequence
  Description of Artificial Sequence: Synthetic oligonucleotide
  Sense strand starting at position 1530 of SEQ ID NO: 1693
ugagauugcugugugggau

SEQ ID NO: 132131 - RNA, 19 nt, Artificial Sequence
  Description of Artificial Sequence: Synthetic oligonucleotide
  Antisense strand to SEQ ID NO: 132130
aucccacacagcaaucuca

SEQ ID NO: 132132 - RNA, 19 nt, Artificial Sequence
  Description of Artificial Sequence: Synthetic oligonucleotide
  Sense strand starting at position 1529 of SEQ ID NO: 1693
uugagauugcuguguggga

SEQ ID NO: 132133 - RNA, 19 nt, Artificial Sequence
  Description of Artificial Sequence: Synthetic oligonucleotide
  Antisense strand to SEQ ID NO: 132132
ucccacacagcaaucucaa

SEQ ID NO: 132134 - RNA, 19 nt, Artificial Sequence
  Description of Artificial Sequence: Synthetic oligonucleotide
  Sense strand starting at position 637 of SEQ ID NO: 1693
ucacuugagguccguaauu

SEQ ID NO: 132135 - RNA, 19 nt, Artificial Sequence
  Description of Artificial Sequence: Synthetic oligonucleotide
  Antisense strand to SEQ ID NO: 132134
aauuacggaccucaaguga

SEQ ID NO: 132136 - RNA, 19 nt, Artificial Sequence
  Description of Artificial Sequence: Synthetic oligonucleotide
  Sense strand starting at position 220 of SEQ ID NO: 1693
gugucacucucagggcaaa

SEQ ID NO: 132137 - RNA, 19 nt, Artificial Sequence
  Description of Artificial Sequence: Synthetic oligonucleotide
  Antisense strand to SEQ ID NO: 132136
uuugcccugagagugacac

SEQ ID NO: 132138 - RNA, 19 nt, Artificial Sequence
  Description of Artificial Sequence: Synthetic oligonucleotide
  Sense strand starting at position 116 of SEQ ID NO: 1694
agacacagguguuuccaau

SEQ ID NO: 132139 - RNA, 19 nt, Artificial Sequence
  Description of Artificial Sequence: Synthetic oligonucleotide
  Antisense strand to SEQ ID NO: 132138
auuggaaacaccugugucu

SEQ ID NO: 132140 - RNA, 19 nt, Artificial Sequence
  Description of Artificial Sequence: Synthetic oligonucleotide
  Sense strand starting at position 122 of SEQ ID NO: 1694
agguguuuccaauacacac

SEQ ID NO: 132141 - RNA, 19 nt, Artificial Sequence
  Description of Artificial Sequence: Synthetic oligonucleotide
  Antisense strand to SEQ ID NO: 132140
guguguauuggaaacaccu

SEQ ID NO: 132142 - RNA, 19 nt, Artificial Sequence
  Description of Artificial Sequence: Synthetic oligonucleotide
  Sense strand starting at position 215 of SEQ ID NO: 1694
ggcagaggcauuggauuau

SEQ ID NO: 132143 - RNA, 19 nt, Artificial Sequence
  Description of Artificial Sequence: Synthetic oligonucleotide
  Antisense strand to SEQ ID NO: 132142
auaauccaaugccucugcc

SEQ ID NO: 132144 - RNA, 19 nt, Artificial Sequence
  Description of Artificial Sequence: Synthetic oligonucleotide
  Sense strand starting at position 394 of SEQ ID NO: 1694
guuagcugagauuauacca

SEQ ID NO: 132145 - RNA, 19 nt, Artificial Sequence
  Description of Artificial Sequence: Synthetic oligonucleotide
  Antisense strand to SEQ ID NO: 132144
ugguauaaucucagcuaac

SEQ ID NO: 132146 - RNA, 19 nt, Artificial Sequence
  Description of Artificial Sequence: Synthetic oligonucleotide
  Sense strand starting at position 415 of SEQ ID NO: 1694
acaauccagccugggaaau

SEQ ID NO: 132147 - RNA, 19 nt, Artificial Sequence
  Description of Artificial Sequence: Synthetic oligonucleotide
  Antisense strand to SEQ ID NO: 132146
auuucccaggcuggauugu

SEQ ID NO: 132148 - RNA, 19 nt, Artificial Sequence
  Description of Artificial Sequence: Synthetic oligonucleotide
  Sense strand starting at position 425 of SEQ ID NO: 1694
cugggaaauuggcuagauu

SEQ ID NO: 132149 - RNA, 19 nt, Artificial Sequence
  Description of Artificial Sequence: Synthetic oligonucleotide
  Antisense strand to SEQ ID NO: 132148
aaucuagccaauuucccag

SEQ ID NO: 132150 - RNA, 19 nt, Artificial Sequence
  Description of Artificial Sequence: Synthetic oligonucleotide
  Sense strand starting at position 477 of SEQ ID NO: 1694
ggauuagacuucuuaagcu

SEQ ID NO: 132151 - RNA, 19 nt, Artificial Sequence
  Description of Artificial Sequence: Synthetic oligonucleotide
  Antisense strand to SEQ ID NO: 132150
agcuuaagaagucuaaucc

SEQ ID NO: 132152 - RNA, 19 nt, Artificial Sequence
  Description of Artificial Sequence: Synthetic oligonucleotide
  Sense strand starting at position 502 of SEQ ID NO: 1694
aguuaaucaugauuggauu

SEQ ID NO: 132153 - RNA, 19 nt, Artificial Sequence
  Description of Artificial Sequence: Synthetic oligonucleotide
  Antisense strand to SEQ ID NO: 132152
aauccaaucaugauuaacu

SEQ ID NO: 132154 - RNA, 19 nt, Artificial Sequence
  Description of Artificial Sequence: Synthetic oligonucleotide
  Sense strand starting at position 571 of SEQ ID NO: 1694
ugaaauauuuagggauaug

SEQ ID NO: 132155 - RNA, 19 nt, Artificial Sequence
  Description of Artificial Sequence: Synthetic oligonucleotide
  Antisense strand to SEQ ID NO: 132154
cauaucccuaaauauuuca

SEQ ID NO: 132156 - RNA, 19 nt, Artificial Sequence
  Description of Artificial Sequence: Synthetic oligonucleotide
  Sense strand starting at position 658 of SEQ ID NO: 1694
uaguucugagugugagaua

SEQ ID NO: 132157 - RNA, 19 nt, Artificial Sequence
  Description of Artificial Sequence: Synthetic oligonucleotide
  Antisense strand to SEQ ID NO: 132156
uaucucacacucagaacua

SEQ ID NO: 132158 - RNA, 19 nt, Artificial Sequence
  Description of Artificial Sequence: Synthetic oligonucleotide
  Sense strand starting at position 683 of SEQ ID NO: 1694
aguugaaucucuuccugac

SEQ ID NO: 132159 - RNA, 19 nt, Artificial Sequence
  Description of Artificial Sequence: Synthetic oligonucleotide
  Antisense strand to SEQ ID NO: 132158
gucaggaagagauucaacu

SEQ ID NO: 132160 - RNA, 19 nt, Artificial Sequence
  Description of Artificial Sequence: Synthetic oligonucleotide
  Sense strand starting at position 725 of SEQ ID NO: 1694
gaaaguaucuuuguugaga

SEQ ID NO: 132161 - RNA, 19 nt, Artificial Sequence
  Description of Artificial Sequence: Synthetic oligonucleotide
  Antisense strand to SEQ ID NO: 132160
ucucaacaaagauacuuuc

SEQ ID NO: 132162 - RNA, 19 nt, Artificial Sequence
  Description of Artificial Sequence: Synthetic oligonucleotide
  Sense strand starting at position 726 of SEQ ID NO: 1694
aaaguaucuuuguugagag

SEQ ID NO: 132163 - RNA, 19 nt, Artificial Sequence
  Description of Artificial Sequence: Synthetic oligonucleotide
  Antisense strand to SEQ ID NO: 132162
cucucaacaaagauacuuu

SEQ ID NO: 132164 - RNA, 19 nt, Artificial Sequence
  Description of Artificial Sequence: Synthetic oligonucleotide
  Sense strand starting at position 728 of SEQ ID NO: 1694
aguaucuuuguugagagau

SEQ ID NO: 132165 - RNA, 19 nt, Artificial Sequence
  Description of Artificial Sequence: Synthetic oligonucleotide
  Antisense strand to SEQ ID NO: 132164
aucucucaacaaagauacu

SEQ ID NO: 132166 - RNA, 19 nt, Artificial Sequence
  Description of Artificial Sequence: Synthetic oligonucleotide
  Sense strand starting at position 738 of SEQ ID NO: 1694
uugagagauccuuggccac

SEQ ID NO: 132167 - RNA, 19 nt, Artificial Sequence
  Description of Artificial Sequence: Synthetic oligonucleotide
  Antisense strand to SEQ ID NO: 132166
guggccaaggaucucucaa

SEQ ID NO: 132168 - RNA, 19 nt, Artificial Sequence
  Description of Artificial Sequence: Synthetic oligonucleotide
  Sense strand starting at position 740 of SEQ ID NO: 1694
gagagauccuuggccacau

SEQ ID NO: 132169 - RNA, 19 nt, Artificial Sequence
  Description of Artificial Sequence: Synthetic oligonucleotide
  Antisense strand to SEQ ID NO: 132168
auguggccaaggaucucuc

SEQ ID NO: 132170 - RNA, 19 nt, Artificial Sequence
  Description of Artificial Sequence: Synthetic oligonucleotide
  Sense strand starting at position 1042 of SEQ ID NO: 1694
uccguuuggguggaagagu

SEQ ID NO: 132171 - RNA, 19 nt, Artificial Sequence
  Description of Artificial Sequence: Synthetic oligonucleotide
  Antisense strand to SEQ ID NO: 132170
acucuuccacccaaacgga

SEQ ID NO: 132172 - RNA, 19 nt, Artificial Sequence
  Description of Artificial Sequence: Synthetic oligonucleotide
  Sense strand starting at position 1060 of SEQ ID NO: 1694
uuacaaugaggaugugauu

SEQ ID NO: 132173 - RNA, 19 nt, Artificial Sequence
  Description of Artificial Sequence: Synthetic oligonucleotide
  Antisense strand to SEQ ID NO: 132172
aaucacauccucauuguaa

SEQ ID NO: 132174 - RNA, 19 nt, Artificial Sequence
  Description of Artificial Sequence: Synthetic oligonucleotide
  Sense strand starting at position 1098 of SEQ ID NO: 1694
agauccucuuugguuaaga

SEQ ID NO: 132175 - RNA, 19 nt, Artificial Sequence
  Description of Artificial Sequence: Synthetic oligonucleotide
  Antisense strand to SEQ ID NO: 132174
ucuuaaccaaagaggaucu

SEQ ID NO: 132176 - RNA, 19 nt, Artificial Sequence
  Description of Artificial Sequence: Synthetic oligonucleotide
  Sense strand starting at position 1099 of SEQ ID NO: 1694
gauccucuuugguuaagau

SEQ ID NO: 132177 - RNA, 19 nt, Artificial Sequence
  Description of Artificial Sequence: Synthetic oligonucleotide
  Antisense strand to SEQ ID NO: 132176
aucuuaaccaaagaggauc

SEQ ID NO: 132178 - RNA, 19 nt, Artificial Sequence
  Description of Artificial Sequence: Synthetic oligonucleotide
  Sense strand starting at position 1100 of SEQ ID NO: 1694
auccucuuugguuaagauu

SEQ ID NO: 132179 - RNA, 19 nt, Artificial Sequence
  Description of Artificial Sequence: Synthetic oligonucleotide
  Antisense strand to SEQ ID NO: 132178
aaucuuaaccaaagaggau

SEQ ID NO: 132180 - RNA, 19 nt, Artificial Sequence
  Description of Artificial Sequence: Synthetic oligonucleotide
  Sense strand starting at position 1911 of SEQ ID NO: 1694
uugggaguguccuuacaga

SEQ ID NO: 132181 - RNA, 19 nt, Artificial Sequence
  Description of Artificial Sequence: Synthetic oligonucleotide
  Antisense strand to SEQ ID NO: 132180
ucuguaaggacacucccaa

SEQ ID NO: 132182 - RNA, 19 nt, Artificial Sequence
  Description of Artificial Sequence: Synthetic oligonucleotide
  Sense strand starting at position 1929 of SEQ ID NO: 1694
agagauuagugacuuacca

SEQ ID NO: 132183 - RNA, 19 nt, Artificial Sequence
  Description of Artificial Sequence: Synthetic oligonucleotide
  Antisense strand to SEQ ID NO: 132182
ugguaagucacuaaucucu

SEQ ID NO: 132184 - RNA, 19 nt, Artificial Sequence
  Description of Artificial Sequence: Synthetic oligonucleotide
  Sense strand starting at position 2010 of SEQ ID NO: 1694
ugaagacuuugggucucuu

SEQ ID NO: 132185 - RNA, 19 nt, Artificial Sequence
  Description of Artificial Sequence: Synthetic oligonucleotide
  Antisense strand to SEQ ID NO: 132184
aagagacccaaagucuuca

SEQ ID NO: 132186 - RNA, 19 nt, Artificial Sequence
  Description of Artificial Sequence: Synthetic oligonucleotide
  Sense strand starting at position 2027 of SEQ ID NO: 1694
uucugugggucuuuagaag

SEQ ID NO: 132187 - RNA, 19 nt, Artificial Sequence
  Description of Artificial Sequence: Synthetic oligonucleotide
  Antisense strand to SEQ ID NO: 132186
cuucuaaagacccacagaa

SEQ ID NO: 132188 - RNA, 19 nt, Artificial Sequence
  Description of Artificial Sequence: Synthetic oligonucleotide
  Sense strand starting at position 2355 of SEQ ID NO: 1694
ugggucaccugaguucaga

SEQ ID NO: 132189 - RNA, 19 nt, Artificial Sequence
  Description of Artificial Sequence: Synthetic oligonucleotide
  Antisense strand to SEQ ID NO: 132188
ucugaacucaggugaccca

SEQ ID NO: 132190 - RNA, 19 nt, Artificial Sequence
  Description of Artificial Sequence: Synthetic oligonucleotide
  Sense strand starting at position 2629 of SEQ ID NO: 1694
acuaauaugugaccugcau

SEQ ID NO: 132191 - RNA, 19 nt, Artificial Sequence
  Description of Artificial Sequence: Synthetic oligonucleotide
  Antisense strand to SEQ ID NO: 132190
augcaggucacauauuagu

SEQ ID NO: 132192 - RNA, 19 nt, Artificial Sequence
  Description of Artificial Sequence: Synthetic oligonucleotide
  Sense strand starting at position 2633 of SEQ ID NO: 1694
auaugugaccugcauaguc

SEQ ID NO: 132193 - RNA, 19 nt, Artificial Sequence
  Description of Artificial Sequence: Synthetic oligonucleotide
  Antisense strand to SEQ ID NO: 132192
gacuaugcaggucacauau

SEQ ID NO: 132194 - RNA, 19 nt, Artificial Sequence
  Description of Artificial Sequence: Synthetic oligonucleotide
  Sense strand starting at position 2672 of SEQ ID NO: 1694
ggucuaaucuuucccagau

SEQ ID NO: 132195 - RNA, 19 nt, Artificial Sequence
  Description of Artificial Sequence: Synthetic oligonucleotide
  Antisense strand to SEQ ID NO: 132194
aucugggaaagauuagacc

SEQ ID NO: 132196 - RNA, 19 nt, Artificial Sequence
  Description of Artificial Sequence: Synthetic oligonucleotide
  Sense strand starting at position 2716 of SEQ ID NO: 1694
aguaguauuguugggagau

SEQ ID NO: 132197 - RNA, 19 nt, Artificial Sequence
  Description of Artificial Sequence: Synthetic oligonucleotide
  Antisense strand to SEQ ID NO: 132196
aucucccaacaauacuacu

SEQ ID NO: 132198 - RNA, 19 nt, Artificial Sequence
  Description of Artificial Sequence: Synthetic oligonucleotide
  Sense strand starting at position 2828 of SEQ ID NO: 1694
ccauguauugaauggucuu

SEQ ID NO: 132199 - RNA, 19 nt, Artificial Sequence
  Description of Artificial Sequence: Synthetic oligonucleotide
  Antisense strand to SEQ ID NO: 132198
aagaccauucaauacaugg

SEQ ID NO: 132200 - RNA, 19 nt, Artificial Sequence
  Description of Artificial Sequence: Synthetic oligonucleotide
  Sense strand starting at position 2937 of SEQ ID NO: 1694
gguuaaggcuacucuggaa

SEQ ID NO: 132201 - RNA, 19 nt, Artificial Sequence
  Description of Artificial Sequence: Synthetic oligonucleotide
  Antisense strand to SEQ ID NO: 132200
uuccagaguagccuuaacc

SEQ ID NO: 132202 - RNA, 19 nt, Artificial Sequence
  Description of Artificial Sequence: Synthetic oligonucleotide
  Sense strand starting at position 3132 of SEQ ID NO: 1694
agauuacaguugcccuuaa

SEQ ID NO: 132203 - RNA, 19 nt, Artificial Sequence
  Description of Artificial Sequence: Synthetic oligonucleotide
  Antisense strand to SEQ ID NO: 132202
uuaagggcaacuguaaucu

SEQ ID NO: 132204 - RNA, 19 nt, Artificial Sequence
  Description of Artificial Sequence: Synthetic oligonucleotide
  Sense strand starting at position 3442 of SEQ ID NO: 1694
cccugugaucguuaaacuc

SEQ ID NO: 132205 - RNA, 19 nt, Artificial Sequence
  Description of Artificial Sequence: Synthetic oligonucleotide
  Antisense strand to SEQ ID NO: 132204
gaguuuaacgaucacaggg

SEQ ID NO: 132206 - RNA, 19 nt, Artificial Sequence
  Description of Artificial Sequence: Synthetic oligonucleotide
  Sense strand starting at position 3476 of SEQ ID NO: 1694
gcugucucagaauauuagu

SEQ ID NO: 132207 - RNA, 19 nt, Artificial Sequence
  Description of Artificial Sequence: Synthetic oligonucleotide
  Antisense strand to SEQ ID NO: 132206
acuaauauucugagacagc

SEQ ID NO: 132208 - RNA, 19 nt, Artificial Sequence
  Description of Artificial Sequence: Synthetic oligonucleotide
  Sense strand starting at position 3484 of SEQ ID NO: 1694
agaauauuaguaugcuacu

SEQ ID NO: 132209 - RNA, 19 nt, Artificial Sequence
  Description of Artificial Sequence: Synthetic oligonucleotide
  Antisense strand to SEQ ID NO: 132208
aguagcauacuaauauucu

SEQ ID NO: 132210 - RNA, 19 nt, Artificial Sequence
  Description of Artificial Sequence: Synthetic oligonucleotide
  Sense strand starting at position 3708 of SEQ ID NO: 1694
ugauacuugugaccaagaa

SEQ ID NO: 132211 - RNA, 19 nt, Artificial Sequence
  Description of Artificial Sequence: Synthetic oligonucleotide
  Antisense strand to SEQ ID NO: 132210
uucuuggucacaaguauca

SEQ ID NO: 132212 - RNA, 19 nt, Artificial Sequence
  Description of Artificial Sequence: Synthetic oligonucleotide
  Sense strand starting at position 3866 of SEQ ID NO: 1694
agaaucucuuucucuguga

SEQ ID NO: 132213 - RNA, 19 nt, Artificial Sequence
  Description of Artificial Sequence: Synthetic oligonucleotide
  Antisense strand to SEQ ID NO: 132212
ucacagagaaagagauucu

SEQ ID NO: 132214 - RNA, 19 nt, Artificial Sequence
  Description of Artificial Sequence: Synthetic oligonucleotide
  Sense strand starting at position 3877 of SEQ ID NO: 1694
cucugugaaguagaccaua

SEQ ID NO: 132215 - RNA, 19 nt, Artificial Sequence
  Description of Artificial Sequence: Synthetic oligonucleotide
  Antisense strand to SEQ ID NO: 132214
uauggucuacuucacagag

SEQ ID NO: 132216 - RNA, 19 nt, Artificial Sequence
  Description of Artificial Sequence: Synthetic oligonucleotide
  Sense strand starting at position 3981 of SEQ ID NO: 1694
uauaaagguccugguuauu

SEQ ID NO: 132217 - RNA, 19 nt, Artificial Sequence
  Description of Artificial Sequence: Synthetic oligonucleotide
  Antisense strand to SEQ ID NO: 132216
aauaaccaggaccuuuaua

SEQ ID NO: 132218 - RNA, 19 nt, Artificial Sequence
  Description of Artificial Sequence: Synthetic oligonucleotide
  Sense strand starting at position 258 of SEQ ID NO: 1695
ccaacauagugggauuaua

SEQ ID NO: 132219 - RNA, 19 nt, Artificial Sequence
  Description of Artificial Sequence: Synthetic oligonucleotide
  Antisense strand to SEQ ID NO: 132218
uauaaucccacuauguugg

SEQ ID NO: 132220 - RNA, 19 nt, Artificial Sequence
  Description of Artificial Sequence: Synthetic oligonucleotide
  Sense strand starting at position 664 of SEQ ID NO: 1695
aaguccugagugugagaua

SEQ ID NO: 132221 - RNA, 19 nt, Artificial Sequence
  Description of Artificial Sequence: Synthetic oligonucleotide
  Antisense strand to SEQ ID NO: 132220
uaucucacacucaggacuu

SEQ ID NO: 132222 - RNA, 19 nt, Artificial Sequence
  Description of Artificial Sequence: Synthetic oligonucleotide
  Sense strand starting at position 747 of SEQ ID NO: 1695
gagggauccuuggccaugu

SEQ ID NO: 132223 - RNA, 19 nt, Artificial Sequence
  Description of Artificial Sequence: Synthetic oligonucleotide
  Antisense strand to SEQ ID NO: 132222
acauggccaaggaucccuc

SEQ ID NO: 132224 - RNA, 19 nt, Artificial Sequence
  Description of Artificial Sequence: Synthetic oligonucleotide
  Sense strand starting at position 751 of SEQ ID NO: 1695
gauccuuggccaugucaaa

SEQ ID NO: 132225 - RNA, 19 nt, Artificial Sequence
  Description of Artificial Sequence: Synthetic oligonucleotide
  Antisense strand to SEQ ID NO: 132224
uuugacauggccaaggauc

SEQ ID NO: 132226 - RNA, 19 nt, Artificial Sequence
  Description of Artificial Sequence: Synthetic oligonucleotide
  Sense strand starting at position 862 of SEQ ID NO: 1695
ucaccuagguggcguaauu

SEQ ID NO: 132227 - RNA, 19 nt, Artificial Sequence
  Description of Artificial Sequence: Synthetic oligonucleotide
  Antisense strand to SEQ ID NO: 132226
aauuacgccaccuagguga

SEQ ID NO: 132228 - RNA, 19 nt, Artificial Sequence
  Description of Artificial Sequence: Synthetic oligonucleotide
  Sense strand starting at position 939 of SEQ ID NO: 1695
gucauaucggcucacuguu

SEQ ID NO: 132229 - RNA, 19 nt, Artificial Sequence
  Description of Artificial Sequence: Synthetic oligonucleotide
  Antisense strand to SEQ ID NO: 132228
aacagugagccgauaugac

SEQ ID NO: 132230 - RNA, 19 nt, Artificial Sequence
  Description of Artificial Sequence: Synthetic oligonucleotide
  Sense strand starting at position 2194 of SEQ ID NO: 1695
gauugagucagauauccgu

SEQ ID NO: 132231 - RNA, 19 nt, Artificial Sequence
  Description of Artificial Sequence: Synthetic oligonucleotide
  Antisense strand to SEQ ID NO: 132230
acggauaucugacucaauc

SEQ ID NO: 132232 - RNA, 19 nt, Artificial Sequence
  Description of Artificial Sequence: Synthetic oligonucleotide
  Sense strand starting at position 2683 of SEQ ID NO: 1695
uuugaucuguuacgacauu

SEQ ID NO: 132233 - RNA, 19 nt, Artificial Sequence
  Description of Artificial Sequence: Synthetic oligonucleotide
  Antisense strand to SEQ ID NO: 132232
aaugucguaacagaucaaa

SEQ ID NO: 132234 - RNA, 19 nt, Artificial Sequence
  Description of Artificial Sequence: Synthetic oligonucleotide
  Sense strand starting at position 2684 of SEQ ID NO: 1695
uugaucuguuacgacauua

SEQ ID NO: 132235 - RNA, 19 nt, Artificial Sequence
  Description of Artificial Sequence: Synthetic oligonucleotide
  Antisense strand to SEQ ID NO: 132234
uaaugucguaacagaucaa

SEQ ID NO: 132236 - RNA, 19 nt, Artificial Sequence
  Description of Artificial Sequence: Synthetic oligonucleotide
  Sense strand starting at position 2803 of SEQ ID NO: 1695
gagucaucccuacgaaauc

SEQ ID NO: 132237 - RNA, 19 nt, Artificial Sequence
  Description of Artificial Sequence: Synthetic oligonucleotide
  Antisense strand to SEQ ID NO: 132236
gauuucguagggaugacuc

SEQ ID NO: 132238 - RNA, 19 nt, Artificial Sequence
  Description of Artificial Sequence: Synthetic oligonucleotide
  Sense strand starting at position 2804 of SEQ ID NO: 1695
agucaucccuacgaaauca

SEQ ID NO: 132239 - RNA, 19 nt, Artificial Sequence
  Description of Artificial Sequence: Synthetic oligonucleotide
  Antisense strand to SEQ ID NO: 132238
ugauuucguagggaugacu

SEQ ID NO: 132240 - RNA, 19 nt, Artificial Sequence
  Description of Artificial Sequence: Synthetic oligonucleotide
  Sense strand starting at position 3352 of SEQ ID NO: 1695
gccucuugcuauccaggau

SEQ ID NO: 132241 - RNA, 19 nt, Artificial Sequence
  Description of Artificial Sequence: Synthetic oligonucleotide
  Antisense strand to SEQ ID NO: 132240
auccuggauagcaagaggc

SEQ ID NO: 132242 - RNA, 19 nt, Artificial Sequence
  Description of Artificial Sequence: Synthetic oligonucleotide
  Sense strand starting at position 3903 of SEQ ID NO: 1695
agaugaguaacaugguucu

SEQ ID NO: 132243 - RNA, 19 nt, Artificial Sequence
  Description of Artificial Sequence: Synthetic oligonucleotide
  Antisense strand to SEQ ID NO: 132242
agaaccauguuacucaucu

SEQ ID NO: 132244 - RNA, 19 nt, Artificial Sequence
  Description of Artificial Sequence: Synthetic oligonucleotide
  Sense strand starting at position 3906 of SEQ ID NO: 1695
ugaguaacaugguucuaug

SEQ ID NO: 132245 - RNA, 19 nt, Artificial Sequence
  Description of Artificial Sequence: Synthetic oligonucleotide
  Antisense strand to SEQ ID NO: 132244
cauagaaccauguuacuca

SEQ ID NO: 132246 - RNA, 19 nt, Artificial Sequence
  Description of Artificial Sequence: Synthetic oligonucleotide
  Sense strand starting at position 3909 of SEQ ID NO: 1695
guaacaugguucuauggac

SEQ ID NO: 132247 - RNA, 19 nt, Artificial Sequence
  Description of Artificial Sequence: Synthetic oligonucleotide
  Antisense strand to SEQ ID NO: 132246
guccauagaaccauguuac

SEQ ID NO: 132248 - RNA, 19 nt, Artificial Sequence
  Description of Artificial Sequence: Synthetic oligonucleotide
  Sense strand starting at position 3935 of SEQ ID NO: 1696
uggucaccucuagaaggua

SEQ ID NO: 132249 - RNA, 19 nt, Artificial Sequence
  Description of Artificial Sequence: Synthetic oligonucleotide
  Antisense strand to SEQ ID NO: 132248
uaccuucuagaggugacca

SEQ ID NO: 132250 - RNA, 19 nt, Artificial Sequence
  Description of Artificial Sequence: Synthetic oligonucleotide
  Sense strand starting at position 3825 of SEQ ID NO: 1696
agacuccauuuagauugaa

SEQ ID NO: 132251 - RNA, 19 nt, Artificial Sequence
  Description of Artificial Sequence: Synthetic oligonucleotide
  Antisense strand to SEQ ID NO: 132250
uucaaucuaaauggagucu

SEQ ID NO: 132252 - RNA, 19 nt, Artificial Sequence
  Description of Artificial Sequence: Synthetic oligonucleotide
  Sense strand starting at position 3676 of SEQ ID NO: 1696
gcuucuccggaggaaauua

SEQ ID NO: 132253 - RNA, 19 nt, Artificial Sequence
  Description of Artificial Sequence: Synthetic oligonucleotide
  Antisense strand to SEQ ID NO: 132252
uaauuuccuccggagaagc

SEQ ID NO: 132254 - RNA, 19 nt, Artificial Sequence
  Description of Artificial Sequence: Synthetic oligonucleotide
  Sense strand starting at position 3675 of SEQ ID NO: 1696
ggcuucuccggaggaaauu

SEQ ID NO: 132255 - RNA, 19 nt, Artificial Sequence
  Description of Artificial Sequence: Synthetic oligonucleotide
  Antisense strand to SEQ ID NO: 132254
aauuuccuccggagaagcc

SEQ ID NO: 132256 - RNA, 19 nt, Artificial Sequence
  Description of Artificial Sequence: Synthetic oligonucleotide
  Sense strand starting at position 3673 of SEQ ID NO: 1696
caggcuucuccggaggaaa

SEQ ID NO: 132257 - RNA, 19 nt, Artificial Sequence
  Description of Artificial Sequence: Synthetic oligonucleotide
  Antisense strand to SEQ ID NO: 132256
uuuccuccggagaagccug

SEQ ID NO: 132258 - RNA, 19 nt, Artificial Sequence
  Description of Artificial Sequence: Synthetic oligonucleotide
  Sense strand starting at position 3645 of SEQ ID NO: 1696
gggugugauugaucucaag

SEQ ID NO: 132259 - RNA, 19 nt, Artificial Sequence
  Description of Artificial Sequence: Synthetic oligonucleotide
  Antisense strand to SEQ ID NO: 132258
cuugagaucaaucacaccc

SEQ ID NO: 132260 - RNA, 19 nt, Artificial Sequence
  Description of Artificial Sequence: Synthetic oligonucleotide
  Sense strand starting at position 3643 of SEQ ID NO: 1696
gagggugugauugaucuca

SEQ ID NO: 132261 - RNA, 19 nt, Artificial Sequence
  Description of Artificial Sequence: Synthetic oligonucleotide
  Antisense strand to SEQ ID NO: 132260
ugagaucaaucacacccuc

SEQ ID NO: 132262 - RNA, 19 nt, Artificial Sequence
  Description of Artificial Sequence: Synthetic oligonucleotide
  Sense strand starting at position 3590 of SEQ ID NO: 1696
gcuuucuaacaugguagau

SEQ ID NO: 132263 - RNA, 19 nt, Artificial Sequence
  Description of Artificial Sequence: Synthetic oligonucleotide
  Antisense strand to SEQ ID NO: 132262
aucuaccauguuagaaagc

SEQ ID NO: 132264 - RNA, 19 nt, Artificial Sequence
  Description of Artificial Sequence: Synthetic oligonucleotide
  Sense strand starting at position 3589 of SEQ ID NO: 1696
cgcuuucuaacaugguaga

SEQ ID NO: 132265 - RNA, 19 nt, Artificial Sequence
  Description of Artificial Sequence: Synthetic oligonucleotide
  Antisense strand to SEQ ID NO: 132264
ucuaccauguuagaaagcg

SEQ ID NO: 132266 - RNA, 19 nt, Artificial Sequence
  Description of Artificial Sequence: Synthetic oligonucleotide
  Sense strand starting at position 3550 of SEQ ID NO: 1696
auaaauaucucugcguauc

SEQ ID NO: 132267 - RNA, 19 nt, Artificial Sequence
  Description of Artificial Sequence: Synthetic oligonucleotide
  Antisense strand to SEQ ID NO: 132266
gauacgcagagauauuuau

SEQ ID NO: 132268 - RNA, 19 nt, Artificial Sequence
  Description of Artificial Sequence: Synthetic oligonucleotide
  Sense strand starting at position 3548 of SEQ ID NO: 1696
gaauaaauaucucugcgua

SEQ ID NO: 132269 - RNA, 19 nt, Artificial Sequence
  Description of Artificial Sequence: Synthetic oligonucleotide
  Antisense strand to SEQ ID NO: 132268
uacgcagagauauuuauuc

SEQ ID NO: 132270 - RNA, 19 nt, Artificial Sequence
  Description of Artificial Sequence: Synthetic oligonucleotide
  Sense strand starting at position 3394 of SEQ ID NO: 1696
gcaggaaaggguugaaucu

SEQ ID NO: 132271 - RNA, 19 nt, Artificial Sequence
  Description of Artificial Sequence: Synthetic oligonucleotide
  Antisense strand to SEQ ID NO: 132270
agauucaacccuuuccugc

SEQ ID NO: 132272 - RNA, 19 nt, Artificial Sequence
  Description of Artificial Sequence: Synthetic oligonucleotide
  Sense strand starting at position 3358 of SEQ ID NO: 1696
gauggaguuugacugacau

SEQ ID NO: 132273 - RNA, 19 nt, Artificial Sequence
  Description of Artificial Sequence: Synthetic oligonucleotide
  Antisense strand to SEQ ID NO: 132272
augucagucaaacuccauc

SEQ ID NO: 132274 - RNA, 19 nt, Artificial Sequence
  Description of Artificial Sequence: Synthetic oligonucleotide
  Sense strand starting at position 3283 of SEQ ID NO: 1696
cguuuaugaaagugaaaga

SEQ ID NO: 132275 - RNA, 19 nt, Artificial Sequence
  Description of Artificial Sequence: Synthetic oligonucleotide
  Antisense strand to SEQ ID NO: 132274
ucuuucacuuucauaaacg

SEQ ID NO: 132276 - RNA, 19 nt, Artificial Sequence
  Description of Artificial Sequence: Synthetic oligonucleotide
  Sense strand starting at position 3271 of SEQ ID NO: 1696
ggaucagauauacguuuau

SEQ ID NO: 132277 - RNA, 19 nt, Artificial Sequence
  Description of Artificial Sequence: Synthetic oligonucleotide
  Antisense strand to SEQ ID NO: 132276
auaaacguauaucugaucc

SEQ ID NO: 132278 - RNA, 19 nt, Artificial Sequence
  Description of Artificial Sequence: Synthetic oligonucleotide
  Sense strand starting at position 3269 of SEQ ID NO: 1696
uuggaucagauauacguuu

SEQ ID NO: 132279 - RNA, 19 nt, Artificial Sequence
  Description of Artificial Sequence: Synthetic oligonucleotide
  Antisense strand to SEQ ID NO: 132278
aaacguauaucugauccaa

SEQ ID NO: 132280 - RNA, 19 nt, Artificial Sequence
  Description of Artificial Sequence: Synthetic oligonucleotide
  Sense strand starting at position 3260 of SEQ ID NO: 1696
auuaauugauuggaucaga

SEQ ID NO: 132281 - RNA, 19 nt, Artificial Sequence
  Description of Artificial Sequence: Synthetic oligonucleotide
  Antisense strand to SEQ ID NO: 132280
ucugauccaaucaauuaau

SEQ ID NO: 132282 - RNA, 19 nt, Artificial Sequence
  Description of Artificial Sequence: Synthetic oligonucleotide
  Sense strand starting at position 3257 of SEQ ID NO: 1696
cugauuaauugauuggauc

SEQ ID NO: 132283 - RNA, 19 nt, Artificial Sequence
  Description of Artificial Sequence: Synthetic oligonucleotide
  Antisense strand to SEQ ID NO: 132282
gauccaaucaauuaaucag

SEQ ID NO: 132284 - RNA, 19 nt, Artificial Sequence
  Description of Artificial Sequence: Synthetic oligonucleotide
  Sense strand starting at position 3193 of SEQ ID NO: 1696
aaugaugucugauuagauu

SEQ ID NO: 132285 - RNA, 19 nt, Artificial Sequence
  Description of Artificial Sequence: Synthetic oligonucleotide
  Antisense strand to SEQ ID NO: 132284
aaucuaaucagacaucauu

SEQ ID NO: 132286 - RNA, 19 nt, Artificial Sequence
  Description of Artificial Sequence: Synthetic oligonucleotide
  Sense strand starting at position 3093 of SEQ ID NO: 1696
ggugucagcgccuuggauu

SEQ ID NO: 132287 - RNA, 19 nt, Artificial Sequence
  Description of Artificial Sequence: Synthetic oligonucleotide
  Antisense strand to SEQ ID NO: 132286
aauccaaggcgcugacacc

SEQ ID NO: 132288 - RNA, 19 nt, Artificial Sequence
  Description of Artificial Sequence: Synthetic oligonucleotide
  Sense strand starting at position 2642 of SEQ ID NO: 1696
uauggaauaucuuuaaggu

SEQ ID NO: 132289 - RNA, 19 nt, Artificial Sequence
  Description of Artificial Sequence: Synthetic oligonucleotide
  Antisense strand to SEQ ID NO: 132288
accuuaaagauauuccaua

SEQ ID NO: 132290 - RNA, 19 nt, Artificial Sequence
  Description of Artificial Sequence: Synthetic oligonucleotide
  Sense strand starting at position 2487 of SEQ ID NO: 1696
gccugugaaaguuagggau

SEQ ID NO: 132291 - RNA, 19 nt, Artificial Sequence
  Description of Artificial Sequence: Synthetic oligonucleotide
  Antisense strand to SEQ ID NO: 132290
aucccuaacuuucacaggc

SEQ ID NO: 132292 - RNA, 19 nt, Artificial Sequence
  Description of Artificial Sequence: Synthetic oligonucleotide
  Sense strand starting at position 2469 of SEQ ID NO: 1696
gcaugacaguguucuagag

SEQ ID NO: 132293 - RNA, 19 nt, Artificial Sequence
  Description of Artificial Sequence: Synthetic oligonucleotide
  Antisense strand to SEQ ID NO: 132292
cucuagaacacugucaugc

SEQ ID NO: 132294 - RNA, 19 nt, Artificial Sequence
  Description of Artificial Sequence: Synthetic oligonucleotide
  Sense strand starting at position 2466 of SEQ ID NO: 1696
acagcaugacaguguucua

SEQ ID NO: 132295 - RNA, 19 nt, Artificial Sequence
  Description of Artificial Sequence: Synthetic oligonucleotide
  Antisense strand to SEQ ID NO: 132294
uagaacacugucaugcugu

SEQ ID NO: 132296 - RNA, 19 nt, Artificial Sequence
  Description of Artificial Sequence: Synthetic oligonucleotide
  Sense strand starting at position 2411 of SEQ ID NO: 1696
uggaaucagcgccauuauu

SEQ ID NO: 132297 - RNA, 19 nt, Artificial Sequence
  Description of Artificial Sequence: Synthetic oligonucleotide
  Antisense strand to SEQ ID NO: 132296
aauaauggcgcugauucca

SEQ ID NO: 132298 - RNA, 19 nt, Artificial Sequence
  Description of Artificial Sequence: Synthetic oligonucleotide
  Sense strand starting at position 2383 of SEQ ID NO: 1696
augcuugcagaagacuaaa

SEQ ID NO: 132299 - RNA, 19 nt, Artificial Sequence
  Description of Artificial Sequence: Synthetic oligonucleotide
  Antisense strand to SEQ ID NO: 132298
uuuagucuucugcaagcau

SEQ ID NO: 132300 - RNA, 19 nt, Artificial Sequence
  Description of Artificial Sequence: Synthetic oligonucleotide
  Sense strand starting at position 2107 of SEQ ID NO: 1696
gcacuuucuggacacaaau

SEQ ID NO: 132301 - RNA, 19 nt, Artificial Sequence
  Description of Artificial Sequence: Synthetic oligonucleotide
  Antisense strand to SEQ ID NO: 132300
auuuguguccagaaagugc

SEQ ID NO: 132302 - RNA, 19 nt, Artificial Sequence
  Description of Artificial Sequence: Synthetic oligonucleotide
  Sense strand starting at position 2007 of SEQ ID NO: 1696
ucauucuuacggcaaauca

SEQ ID NO: 132303 - RNA, 19 nt, Artificial Sequence
  Description of Artificial Sequence: Synthetic oligonucleotide
  Antisense strand to SEQ ID NO: 132302
ugauuugccguaagaauga

SEQ ID NO: 132304 - RNA, 19 nt, Artificial Sequence
  Description of Artificial Sequence: Synthetic oligonucleotide
  Sense strand starting at position 1590 of SEQ ID NO: 1696
aucagaagucucugggcca

SEQ ID NO: 132305 - RNA, 19 nt, Artificial Sequence
  Description of Artificial Sequence: Synthetic oligonucleotide
  Antisense strand to SEQ ID NO: 132304
uggcccagagacuucugau

SEQ ID NO: 132306 - RNA, 19 nt, Artificial Sequence
  Description of Artificial Sequence: Synthetic oligonucleotide
  Sense strand starting at position 1330 of SEQ ID NO: 1696
cuccaaauuuaggaaggau

SEQ ID NO: 132307 - RNA, 19 nt, Artificial Sequence
  Description of Artificial Sequence: Synthetic oligonucleotide
  Antisense strand to SEQ ID NO: 132306
auccuuccuaaauuuggag

SEQ ID NO: 132308 - RNA, 19 nt, Artificial Sequence
  Description of Artificial Sequence: Synthetic oligonucleotide
  Sense strand starting at position 705 of SEQ ID NO: 1696
agagaaagcucaccauacu

SEQ ID NO: 132309 - RNA, 19 nt, Artificial Sequence
  Description of Artificial Sequence: Synthetic oligonucleotide
  Antisense strand to SEQ ID NO: 132308
aguauggugagcuuucucu

SEQ ID NO: 132310 - RNA, 19 nt, Artificial Sequence
  Description of Artificial Sequence: Synthetic oligonucleotide
  Sense strand starting at position 664 of SEQ ID NO: 1696
ugguguuuacaguaauaaa

SEQ ID NO: 132311 - RNA, 19 nt, Artificial Sequence
  Description of Artificial Sequence: Synthetic oligonucleotide
  Antisense strand to SEQ ID NO: 132310
uuuauuacuguaaacacca

SEQ ID NO: 132312 - RNA, 19 nt, Artificial Sequence
  Description of Artificial Sequence: Synthetic oligonucleotide
  Sense strand starting at position 623 of SEQ ID NO: 1696
gcuguuaccuccucacaag

SEQ ID NO: 132313 - RNA, 19 nt, Artificial Sequence
  Description of Artificial Sequence: Synthetic oligonucleotide
  Antisense strand to SEQ ID NO: 132312
cuugugaggagguaacagc

SEQ ID NO: 132314 - RNA, 19 nt, Artificial Sequence
  Description of Artificial Sequence: Synthetic oligonucleotide
  Sense strand starting at position 546 of SEQ ID NO: 1696
uugggauggaugugugaca

SEQ ID NO: 132315 - RNA, 19 nt, Artificial Sequence
  Description of Artificial Sequence: Synthetic oligonucleotide
  Antisense strand to SEQ ID NO: 132314
ugucacacauccaucccaa

SEQ ID NO: 132316 - RNA, 19 nt, Artificial Sequence
  Description of Artificial Sequence: Synthetic oligonucleotide
  Sense strand starting at position 540 of SEQ ID NO: 1696
ggcuuauugggauggaugu

SEQ ID NO: 132317 - RNA, 19 nt, Artificial Sequence
  Description of Artificial Sequence: Synthetic oligonucleotide
  Antisense strand to SEQ ID NO: 132316
acauccaucccaauaagcc

SEQ ID NO: 132318 - RNA, 19 nt, Artificial Sequence
  Description of Artificial Sequence: Synthetic oligonucleotide
  Sense strand starting at position 405 of SEQ ID NO: 1696
cccauuucccaucgucuua

SEQ ID NO: 132319 - RNA, 19 nt, Artificial Sequence
  Description of Artificial Sequence: Synthetic oligonucleotide
  Antisense strand to SEQ ID NO: 132318
uaagacgaugggaaauggg

SEQ ID NO: 132320 - RNA, 19 nt, Artificial Sequence
  Description of Artificial Sequence: Synthetic oligonucleotide
  Sense strand starting at position 371 of SEQ ID NO: 1696
uggacauucucuucuuuag

SEQ ID NO: 132321 - RNA, 19 nt, Artificial Sequence
  Description of Artificial Sequence: Synthetic oligonucleotide
  Antisense strand to SEQ ID NO: 132320
cuaaagaagagaaugucca

SEQ ID NO: 132322 - RNA, 19 nt, Artificial Sequence
  Description of Artificial Sequence: Synthetic oligonucleotide
  Sense strand starting at position 186 of SEQ ID NO: 1696
cugacaugcccguaucauc

SEQ ID NO: 132323 - RNA, 19 nt, Artificial Sequence
  Description of Artificial Sequence: Synthetic oligonucleotide
  Antisense strand to SEQ ID NO: 132322
gaugauacgggcaugucag

SEQ ID NO: 132324 - RNA, 19 nt, Artificial Sequence
  Description of Artificial Sequence: Synthetic oligonucleotide
  Sense strand starting at position 31 of SEQ ID NO: 1696
ggucaaguccaugaacucu

SEQ ID NO: 132325 - RNA, 19 nt, Artificial Sequence
  Description of Artificial Sequence: Synthetic oligonucleotide
  Antisense strand to SEQ ID NO: 132324
agaguucauggacuugacc

SEQ ID NO: 132326 - RNA, 19 nt, Artificial Sequence
  Description of Artificial Sequence: Synthetic oligonucleotide
  Sense strand starting at position 30 of SEQ ID NO: 1696
gggucaaguccaugaacuc

SEQ ID NO: 132327 - RNA, 19 nt, Artificial Sequence
  Description of Artificial Sequence: Synthetic oligonucleotide
  Antisense strand to SEQ ID NO: 132326
gaguucauggacuugaccc

SEQ ID NO: 132328 - RNA, 19 nt, Artificial Sequence
  Description of Artificial Sequence: Synthetic oligonucleotide
  Sense strand starting at position 181 of SEQ ID NO: 1697
ccugauagaucugcaagaa

SEQ ID NO: 132329 - RNA, 19 nt, Artificial Sequence
  Description of Artificial Sequence: Synthetic oligonucleotide
  Antisense strand to SEQ ID NO: 132328
uucuugcagaucuaucagg

SEQ ID NO: 132330 - RNA, 19 nt, Artificial Sequence
  Description of Artificial Sequence: Synthetic oligonucleotide
  Sense strand starting at position 1528 of SEQ ID NO: 1697
uugagauugguguguggga

SEQ ID NO: 132331 - RNA, 19 nt, Artificial Sequence
  Description of Artificial Sequence: Synthetic oligonucleotide
  Antisense strand to SEQ ID NO: 132330
ucccacacaccaaucucaa

SEQ ID NO: 132332 - RNA, 19 nt, Artificial Sequence
  Description of Artificial Sequence: Synthetic oligonucleotide
  Sense strand starting at position 1529 of SEQ ID NO: 1697
ugagauuggugugugggau

SEQ ID NO: 132333 - RNA, 19 nt, Artificial Sequence
  Description of Artificial Sequence: Synthetic oligonucleotide
  Antisense strand to SEQ ID NO: 132332
aucccacacaccaaucuca

SEQ ID NO: 132334 - RNA, 19 nt, Artificial Sequence
  Description of Artificial Sequence: Synthetic oligonucleotide
  Sense strand starting at position 1530 of SEQ ID NO: 1697
gagauuggugugugggaua

SEQ ID NO: 132335 - RNA, 19 nt, Artificial Sequence
  Description of Artificial Sequence: Synthetic oligonucleotide
  Antisense strand to SEQ ID NO: 132334
uaucccacacaccaaucuc

SEQ ID NO: 132336 - RNA, 19 nt, Artificial Sequence
  Description of Artificial Sequence: Synthetic oligonucleotide
  Sense strand starting at position 2138 of SEQ ID NO: 1697
gcuuucuucugacuaauug

SEQ ID NO: 132337 - RNA, 19 nt, Artificial Sequence
  Description of Artificial Sequence: Synthetic oligonucleotide
  Antisense strand to SEQ ID NO: 132336
caauuagucagaagaaagc

SEQ ID NO: 132338 - RNA, 19 nt, Artificial Sequence
  Description of Artificial Sequence: Synthetic oligonucleotide
  Sense strand starting at position 2146 of SEQ ID NO: 1697
cugacuaauugaucgaauu

SEQ ID NO: 132339 - RNA, 19 nt, Artificial Sequence
  Description of Artificial Sequence: Synthetic oligonucleotide
  Antisense strand to SEQ ID NO: 132338
aauucgaucaauuagucag

SEQ ID NO: 132340 - RNA, 19 nt, Artificial Sequence
  Description of Artificial Sequence: Synthetic oligonucleotide
  Sense strand starting at position 2147 of SEQ ID NO: 1697
ugacuaauugaucgaauua

SEQ ID NO: 132341 - RNA, 19 nt, Artificial Sequence
  Description of Artificial Sequence: Synthetic oligonucleotide
  Antisense strand to SEQ ID NO: 132340
uaauucgaucaauuaguca

SEQ ID NO: 132342 - RNA, 19 nt, Artificial Sequence
  Description of Artificial Sequence: Synthetic oligonucleotide
  Sense strand starting at position 2236 of SEQ ID NO: 1697
ccgaaauacugaugaaguu

SEQ ID NO: 132343 - RNA, 19 nt, Artificial Sequence
  Description of Artificial Sequence: Synthetic oligonucleotide
  Antisense strand to SEQ ID NO: 132342
aacuucaucaguauuucgg

SEQ ID NO: 132344 - RNA, 19 nt, Artificial Sequence
  Description of Artificial Sequence: Synthetic oligonucleotide
  Sense strand starting at position 3240 of SEQ ID NO: 1697
gaaugugagcuggagcaga

SEQ ID NO: 132345 - RNA, 19 nt, Artificial Sequence
  Description of Artificial Sequence: Synthetic oligonucleotide
  Antisense strand to SEQ ID NO: 132344
ucugcuccagcucacauuc

SEQ ID NO: 132346 - RNA, 19 nt, Artificial Sequence
  Description of Artificial Sequence: Synthetic oligonucleotide
  Sense strand starting at position 3368 of SEQ ID NO: 1697
gguccauauguccgucauu

SEQ ID NO: 132347 - RNA, 19 nt, Artificial Sequence
  Description of Artificial Sequence: Synthetic oligonucleotide
  Antisense strand to SEQ ID NO: 132346
aaugacggacauauggacc

SEQ ID NO: 132348 - RNA, 19 nt, Artificial Sequence
  Description of Artificial Sequence: Synthetic oligonucleotide
  Sense strand starting at position 3369 of SEQ ID NO: 1697
guccauauguccgucauug

SEQ ID NO: 132349 - RNA, 19 nt, Artificial Sequence
  Description of Artificial Sequence: Synthetic oligonucleotide
  Antisense strand to SEQ ID NO: 132348
caaugacggacauauggac

SEQ ID NO: 132350 - RNA, 19 nt, Artificial Sequence
  Description of Artificial Sequence: Synthetic oligonucleotide
  Sense strand starting at position 3371 of SEQ ID NO: 1697
ccauauguccgucauuguu

SEQ ID NO: 132351 - RNA, 19 nt, Artificial Sequence
  Description of Artificial Sequence: Synthetic oligonucleotide
  Antisense strand to SEQ ID NO: 132350
aacaaugacggacauaugg

SEQ ID NO: 132352 - RNA, 19 nt, Artificial Sequence
  Description of Artificial Sequence: Synthetic oligonucleotide
  Sense strand starting at position 3377 of SEQ ID NO: 1697
guccgucauuguucuauca

SEQ ID NO: 132353 - RNA, 19 nt, Artificial Sequence
  Description of Artificial Sequence: Synthetic oligonucleotide
  Antisense strand to SEQ ID NO: 132352
ugauagaacaaugacggac

SEQ ID NO: 132354 - RNA, 19 nt, Artificial Sequence
  Description of Artificial Sequence: Synthetic oligonucleotide
  Sense strand starting at position 3379 of SEQ ID NO: 1697
ccgucauuguucuaucauc

SEQ ID NO: 132355 - RNA, 19 nt, Artificial Sequence
  Description of Artificial Sequence: Synthetic oligonucleotide
  Antisense strand to SEQ ID NO: 132354
gaugauagaacaaugacgg

SEQ ID NO: 132356 - RNA, 19 nt, Artificial Sequence
  Description of Artificial Sequence: Synthetic oligonucleotide
  Sense strand starting at position 3384 of SEQ ID NO: 1697
auuguucuaucaucuggaa

SEQ ID NO: 132357 - RNA, 19 nt, Artificial Sequence
  Description of Artificial Sequence: Synthetic oligonucleotide
  Antisense strand to SEQ ID NO: 132356
uuccagaugauagaacaau

SEQ ID NO: 132358 - RNA, 19 nt, Artificial Sequence
  Description of Artificial Sequence: Synthetic oligonucleotide
  Sense strand starting at position 3387 of SEQ ID NO: 1697
guucuaucaucuggaaacc

SEQ ID NO: 132359 - RNA, 19 nt, Artificial Sequence
  Description of Artificial Sequence: Synthetic oligonucleotide
  Antisense strand to SEQ ID NO: 132358
gguuuccagaugauagaac

SEQ ID NO: 132360 - RNA, 19 nt, Artificial Sequence
  Description of Artificial Sequence: Synthetic oligonucleotide
  Sense strand starting at position 3398 of SEQ ID NO: 1697
uggaaaccuuuccuuuaga

SEQ ID NO: 132361 - RNA, 19 nt, Artificial Sequence
  Description of Artificial Sequence: Synthetic oligonucleotide
  Antisense strand to SEQ ID NO: 132360
ucuaaaggaaagguuucca

SEQ ID NO: 132362 - RNA, 19 nt, Artificial Sequence
  Description of Artificial Sequence: Synthetic oligonucleotide
  Sense strand starting at position 3399 of SEQ ID NO: 1697
ggaaaccuuuccuuuagac

SEQ ID NO: 132363 - RNA, 19 nt, Artificial Sequence
  Description of Artificial Sequence: Synthetic oligonucleotide
  Antisense strand to SEQ ID NO: 132362
gucuaaaggaaagguuucc

SEQ ID NO: 132364 - RNA, 19 nt, Artificial Sequence
  Description of Artificial Sequence: Synthetic oligonucleotide
  Sense strand starting at position 3552 of SEQ ID NO: 1697
agaguccuuuccugucacu

SEQ ID NO: 132365 - RNA, 19 nt, Artificial Sequence
  Description of Artificial Sequence: Synthetic oligonucleotide
  Antisense strand to SEQ ID NO: 132364
agugacaggaaaggacucu

SEQ ID NO: 132366 - RNA, 19 nt, Artificial Sequence
  Description of Artificial Sequence: Synthetic oligonucleotide
  Sense strand starting at position 3555 of SEQ ID NO: 1697
guccuuuccugucacuaau

SEQ ID NO: 132367 - RNA, 19 nt, Artificial Sequence
  Description of Artificial Sequence: Synthetic oligonucleotide
  Antisense strand to SEQ ID NO: 132366
auuagugacaggaaaggac

SEQ ID NO: 132368 - RNA, 19 nt, Artificial Sequence
  Description of Artificial Sequence: Synthetic oligonucleotide
  Sense strand starting at position 3891 of SEQ ID NO: 1697
acagcaugacacugucaaa

SEQ ID NO: 132369 - RNA, 19 nt, Artificial Sequence
  Description of Artificial Sequence: Synthetic oligonucleotide
  Antisense strand to SEQ ID NO: 132368
uuugacagugucaugcugu

SEQ ID NO: 132370 - RNA, 19 nt, Artificial Sequence
  Description of Artificial Sequence: Synthetic oligonucleotide
  Sense strand starting at position 3936 of SEQ ID NO: 1698
gagugauguaaaggucaug

SEQ ID NO: 132371 - RNA, 19 nt, Artificial Sequence
  Description of Artificial Sequence: Synthetic oligonucleotide
  Antisense strand to SEQ ID NO: 132370
caugaccuuuacaucacuc

SEQ ID NO: 132372 - RNA, 19 nt, Artificial Sequence
  Description of Artificial Sequence: Synthetic oligonucleotide
  Sense strand starting at position 3932 of SEQ ID NO: 1698
cugggagugauguaaaggu

SEQ ID NO: 132373 - RNA, 19 nt, Artificial Sequence
  Description of Artificial Sequence: Synthetic oligonucleotide
  Antisense strand to SEQ ID NO: 132372
accuuuacaucacucccag

SEQ ID NO: 132374 - RNA, 19 nt, Artificial Sequence
  Description of Artificial Sequence: Synthetic oligonucleotide
  Sense strand starting at position 3928 of SEQ ID NO: 1698
acagcugggagugauguaa

SEQ ID NO: 132375 - RNA, 19 nt, Artificial Sequence
  Description of Artificial Sequence: Synthetic oligonucleotide
  Antisense strand to SEQ ID NO: 132374
uuacaucacucccagcugu

SEQ ID NO: 132376 - RNA, 19 nt, Artificial Sequence
  Description of Artificial Sequence: Synthetic oligonucleotide
  Sense strand starting at position 3616 of SEQ ID NO: 1698
gguuauugaguggguguaa

SEQ ID NO: 132377 - RNA, 19 nt, Artificial Sequence
  Description of Artificial Sequence: Synthetic oligonucleotide
  Antisense strand to SEQ ID NO: 132376
uuacacccacucaauaacc

SEQ ID NO: 132378 - RNA, 19 nt, Artificial Sequence
  Description of Artificial Sequence: Synthetic oligonucleotide
  Sense strand starting at position 3615 of SEQ ID NO: 1698
ggguuauugagugggugua

SEQ ID NO: 132379 - RNA, 19 nt, Artificial Sequence
  Description of Artificial Sequence: Synthetic oligonucleotide
  Antisense strand to SEQ ID NO: 132378
uacacccacucaauaaccc

SEQ ID NO: 132380 - RNA, 19 nt, Artificial Sequence
  Description of Artificial Sequence: Synthetic oligonucleotide
  Sense strand starting at position 2901 of SEQ ID NO: 1698
ggucucagugcuuagguua

SEQ ID NO: 132381 - RNA, 19 nt, Artificial Sequence
  Description of Artificial Sequence: Synthetic oligonucleotide
  Antisense strand to SEQ ID NO: 132380
uaaccuaagcacugagacc

SEQ ID NO: 132382 - RNA, 19 nt, Artificial Sequence
  Description of Artificial Sequence: Synthetic oligonucleotide
  Sense strand starting at position 2895 of SEQ ID NO: 1698
gugaguggucucagugcuu

SEQ ID NO: 132383 - RNA, 19 nt, Artificial Sequence
  Description of Artificial Sequence: Synthetic oligonucleotide
  Antisense strand to SEQ ID NO: 132382
aagcacugagaccacucac

SEQ ID NO: 132384 - RNA, 19 nt, Artificial Sequence
  Description of Artificial Sequence: Synthetic oligonucleotide
  Sense strand starting at position 2891 of SEQ ID NO: 1698
gggcgugaguggucucagu

SEQ ID NO: 132385 - RNA, 19 nt, Artificial Sequence
  Description of Artificial Sequence: Synthetic oligonucleotide
  Antisense strand to SEQ ID NO: 132384
acugagaccacucacgccc

SEQ ID NO: 132386 - RNA, 19 nt, Artificial Sequence
  Description of Artificial Sequence: Synthetic oligonucleotide
  Sense strand starting at position 2780 of SEQ ID NO: 1698
ucacuacgauaucagaaua

SEQ ID NO: 132387 - RNA, 19 nt, Artificial Sequence
  Description of Artificial Sequence: Synthetic oligonucleotide
  Antisense strand to SEQ ID NO: 132386
uauucugauaucguaguga

SEQ ID NO: 132388 - RNA, 19 nt, Artificial Sequence
  Description of Artificial Sequence: Synthetic oligonucleotide
  Sense strand starting at position 2775 of SEQ ID NO: 1698
agucaucacuacgauauca

SEQ ID NO: 132389 - RNA, 19 nt, Artificial Sequence
  Description of Artificial Sequence: Synthetic oligonucleotide
  Antisense strand to SEQ ID NO: 132388
ugauaucguagugaugacu

SEQ ID NO: 132390 - RNA, 19 nt, Artificial Sequence
  Description of Artificial Sequence: Synthetic oligonucleotide
  Sense strand starting at position 2774 of SEQ ID NO: 1698
gagucaucacuacgauauc

SEQ ID NO: 132391 - RNA, 19 nt, Artificial Sequence
  Description of Artificial Sequence: Synthetic oligonucleotide
  Antisense strand to SEQ ID NO: 132390
gauaucguagugaugacuc

SEQ ID NO: 132392 - RNA, 19 nt, Artificial Sequence
  Description of Artificial Sequence: Synthetic oligonucleotide
  Sense strand starting at position 2709 of SEQ ID NO: 1698
gggaucuuuggccacauca

SEQ ID NO: 132393 - RNA, 19 nt, Artificial Sequence
  Description of Artificial Sequence: Synthetic oligonucleotide
  Antisense strand to SEQ ID NO: 132392
ugauguggccaaagauccc

SEQ ID NO: 132394 - RNA, 19 nt, Artificial Sequence
  Description of Artificial Sequence: Synthetic oligonucleotide
  Sense strand starting at position 2504 of SEQ ID NO: 1698
ccagaauugugccacucca

SEQ ID NO: 132395 - RNA, 19 nt, Artificial Sequence
  Description of Artificial Sequence: Synthetic oligonucleotide
  Antisense strand to SEQ ID NO: 132394
uggaguggcacaauucugg

SEQ ID NO: 132396 - RNA, 19 nt, Artificial Sequence
  Description of Artificial Sequence: Synthetic oligonucleotide
  Sense strand starting at position 2342 of SEQ ID NO: 1698
ugaugucagugguucaaga

SEQ ID NO: 132397 - RNA, 19 nt, Artificial Sequence
  Description of Artificial Sequence: Synthetic oligonucleotide
  Antisense strand to SEQ ID NO: 132396
ucuugaaccacugacauca

SEQ ID NO: 132398 - RNA, 19 nt, Artificial Sequence
  Description of Artificial Sequence: Synthetic oligonucleotide
  Sense strand starting at position 2333 of SEQ ID NO: 1698
uagaucaccugaugucagu

SEQ ID NO: 132399 - RNA, 19 nt, Artificial Sequence
  Description of Artificial Sequence: Synthetic oligonucleotide
  Antisense strand to SEQ ID NO: 132398
acugacaucaggugaucua

SEQ ID NO: 132400 - RNA, 19 nt, Artificial Sequence
  Description of Artificial Sequence: Synthetic oligonucleotide
  Sense strand starting at position 2206 of SEQ ID NO: 1698
guauucaguucgugaagca

SEQ ID NO: 132401 - RNA, 19 nt, Artificial Sequence
  Description of Artificial Sequence: Synthetic oligonucleotide
  Antisense strand to SEQ ID NO: 132400
ugcuucacgaacugaauac

SEQ ID NO: 132402 - RNA, 19 nt, Artificial Sequence
  Description of Artificial Sequence: Synthetic oligonucleotide
  Sense strand starting at position 2204 of SEQ ID NO: 1698
cuguauucaguucgugaag

SEQ ID NO: 132403 - RNA, 19 nt, Artificial Sequence
  Description of Artificial Sequence: Synthetic oligonucleotide
  Antisense strand to SEQ ID NO: 132402
cuucacgaacugaauacag

SEQ ID NO: 132404 - RNA, 19 nt, Artificial Sequence
  Description of Artificial Sequence: Synthetic oligonucleotide
  Sense strand starting at position 2098 of SEQ ID NO: 1698
gcaauaucugauugcauuu

SEQ ID NO: 132405 - RNA, 19 nt, Artificial Sequence
  Description of Artificial Sequence: Synthetic oligonucleotide
  Antisense strand to SEQ ID NO: 132404
aaaugcaaucagauauugc

SEQ ID NO: 132406 - RNA, 19 nt, Artificial Sequence
  Description of Artificial Sequence: Synthetic oligonucleotide
  Sense strand starting at position 2097 of SEQ ID NO: 1698
agcaauaucugauugcauu

SEQ ID NO: 132407 - RNA, 19 nt, Artificial Sequence
  Description of Artificial Sequence: Synthetic oligonucleotide
  Antisense strand to SEQ ID NO: 132406
aaugcaaucagauauugcu

SEQ ID NO: 132408 - RNA, 19 nt, Artificial Sequence
  Description of Artificial Sequence: Synthetic oligonucleotide
  Sense strand starting at position 1623 of SEQ ID NO: 1698
ucaaaucccugggcugaaa

SEQ ID NO: 132409 - RNA, 19 nt, Artificial Sequence
  Description of Artificial Sequence: Synthetic oligonucleotide
  Antisense strand to SEQ ID NO: 132408
uuucagcccagggauuuga

SEQ ID NO: 132410 - RNA, 19 nt, Artificial Sequence
  Description of Artificial Sequence: Synthetic oligonucleotide
  Sense strand starting at position 889 of SEQ ID NO: 1698
caugaucaccugggucaua

SEQ ID NO: 132411 - RNA, 19 nt, Artificial Sequence
  Description of Artificial Sequence: Synthetic oligonucleotide
  Antisense strand to SEQ ID NO: 132410
uaugacccaggugaucaug

SEQ ID NO: 132412 - RNA, 19 nt, Artificial Sequence
  Description of Artificial Sequence: Synthetic oligonucleotide
  Sense strand starting at position 766 of SEQ ID NO: 1698
aauuauccuuguugaggga

SEQ ID NO: 132413 - RNA, 19 nt, Artificial Sequence
  Description of Artificial Sequence: Synthetic oligonucleotide
  Antisense strand to SEQ ID NO: 132412
ucccucaacaaggauaauu

SEQ ID NO: 132414 - RNA, 19 nt, Artificial Sequence
  Description of Artificial Sequence: Synthetic oligonucleotide
  Sense strand starting at position 763 of SEQ ID NO: 1698
ugaaauuauccuuguugag

SEQ ID NO: 132415 - RNA, 19 nt, Artificial Sequence
  Description of Artificial Sequence: Synthetic oligonucleotide
  Antisense strand to SEQ ID NO: 132414
cucaacaaggauaauuuca

SEQ ID NO: 132416 - RNA, 19 nt, Artificial Sequence
  Description of Artificial Sequence: Synthetic oligonucleotide
  Sense strand starting at position 762 of SEQ ID NO: 1698
uugaaauuauccuuguuga

SEQ ID NO: 132417 - RNA, 19 nt, Artificial Sequence
  Description of Artificial Sequence: Synthetic oligonucleotide
  Antisense strand to SEQ ID NO: 132416
ucaacaaggauaauuucaa

SEQ ID NO: 132418 - RNA, 19 nt, Artificial Sequence
  Description of Artificial Sequence: Synthetic oligonucleotide
  Sense strand starting at position 608 of SEQ ID NO: 1698
augaaagauuucgggauag

SEQ ID NO: 132419 - RNA, 19 nt, Artificial Sequence
  Description of Artificial Sequence: Synthetic oligonucleotide
  Antisense strand to SEQ ID NO: 132418
cuaucccgaaaucuuucau

SEQ ID NO: 132420 - RNA, 19 nt, Artificial Sequence
  Description of Artificial Sequence: Synthetic oligonucleotide
  Sense strand starting at position 607 of SEQ ID NO: 1698
aaugaaagauuucgggaua

SEQ ID NO: 132421 - RNA, 19 nt, Artificial Sequence
  Description of Artificial Sequence: Synthetic oligonucleotide
  Antisense strand to SEQ ID NO: 132420
uaucccgaaaucuuucauu

SEQ ID NO: 132422 - RNA, 19 nt, Artificial Sequence
  Description of Artificial Sequence: Synthetic oligonucleotide
  Sense strand starting at position 175 of SEQ ID NO: 1698
augcacuccuguuacacau

SEQ ID NO: 132423 - RNA, 19 nt, Artificial Sequence
  Description of Artificial Sequence: Synthetic oligonucleotide
  Antisense strand to SEQ ID NO: 132422
auguguaacaggagugcau

SEQ ID NO: 132424 - RNA, 19 nt, Artificial Sequence
  Description of Artificial Sequence: Synthetic oligonucleotide
  Sense strand starting at position 164 of SEQ ID NO: 1698
agauguuuccaaugcacuc

SEQ ID NO: 132425 - RNA, 19 nt, Artificial Sequence
  Description of Artificial Sequence: Synthetic oligonucleotide
  Antisense strand to SEQ ID NO: 132424
gagugcauuggaaacaucu

SEQ ID NO: 132426 - RNA, 19 nt, Artificial Sequence
  Description of Artificial Sequence: Synthetic oligonucleotide
  Sense strand starting at position 3922 of SEQ ID NO: 1699
cuuaauucuuugguuaaga

SEQ ID NO: 132427 - RNA, 19 nt, Artificial Sequence
  Description of Artificial Sequence: Synthetic oligonucleotide
  Antisense strand to SEQ ID NO: 132426
ucuuaaccaaagaauuaag

SEQ ID NO: 132428 - RNA, 19 nt, Artificial Sequence
  Description of Artificial Sequence: Synthetic oligonucleotide
  Sense strand starting at position 3921 of SEQ ID NO: 1699
ucuuaauucuuugguuaag

SEQ ID NO: 132429 - RNA, 19 nt, Artificial Sequence
  Description of Artificial Sequence: Synthetic oligonucleotide
  Antisense strand to SEQ ID NO: 132428
cuuaaccaaagaauuaaga

SEQ ID NO: 132430 - RNA, 19 nt, Artificial Sequence
  Description of Artificial Sequence: Synthetic oligonucleotide
  Sense strand starting at position 3910 of SEQ ID NO: 1699
guuggauucuuucuuaauu

SEQ ID NO: 132431 - RNA, 19 nt, Artificial Sequence
  Description of Artificial Sequence: Synthetic oligonucleotide
  Antisense strand to SEQ ID NO: 132430
aauuaagaaagaauccaac

SEQ ID NO: 132432 - RNA, 19 nt, Artificial Sequence
  Description of Artificial Sequence: Synthetic oligonucleotide
  Sense strand starting at position 3528 of SEQ ID NO: 1699
acaauaacguagucuauaa

SEQ ID NO: 132433 - RNA, 19 nt, Artificial Sequence
  Description of Artificial Sequence: Synthetic oligonucleotide
  Antisense strand to SEQ ID NO: 132432
uuauagacuacguuauugu

SEQ ID NO: 132434 - RNA, 19 nt, Artificial Sequence
  Description of Artificial Sequence: Synthetic oligonucleotide
  Sense strand starting at position 3155 of SEQ ID NO: 1699
uuaauagagcaugguagaa

SEQ ID NO: 132435 - RNA, 19 nt, Artificial Sequence
  Description of Artificial Sequence: Synthetic oligonucleotide
  Antisense strand to SEQ ID NO: 132434
uucuaccaugcucuauuaa

SEQ ID NO: 132436 - RNA, 19 nt, Artificial Sequence
  Description of Artificial Sequence: Synthetic oligonucleotide
  Sense strand starting at position 3154 of SEQ ID NO: 1699
uuuaauagagcaugguaga

SEQ ID NO: 132437 - RNA, 19 nt, Artificial Sequence
  Description of Artificial Sequence: Synthetic oligonucleotide
  Antisense strand to SEQ ID NO: 132436
ucuaccaugcucuauuaaa

SEQ ID NO: 132438 - RNA, 19 nt, Artificial Sequence
  Description of Artificial Sequence: Synthetic oligonucleotide
  Sense strand starting at position 2760 of SEQ ID NO: 1699
cuacuagaauguuaaguaa

SEQ ID NO: 132439 - RNA, 19 nt, Artificial Sequence
  Description of Artificial Sequence: Synthetic oligonucleotide
  Antisense strand to SEQ ID NO: 132438
uuacuuaacauucuaguag

SEQ ID NO: 132440 - RNA, 19 nt, Artificial Sequence
  Description of Artificial Sequence: Synthetic oligonucleotide
  Sense strand starting at position 2757 of SEQ ID NO: 1699
acucuacuagaauguuaag

SEQ ID NO: 132441 - RNA, 19 nt, Artificial Sequence
  Description of Artificial Sequence: Synthetic oligonucleotide
  Antisense strand to SEQ ID NO: 132440
cuuaacauucuaguagagu

SEQ ID NO: 132442 - RNA, 19 nt, Artificial Sequence
  Description of Artificial Sequence: Synthetic oligonucleotide
  Sense strand starting at position 2752 of SEQ ID NO: 1699
acuagacucuacuagaaug

SEQ ID NO: 132443 - RNA, 19 nt, Artificial Sequence
  Description of Artificial Sequence: Synthetic oligonucleotide
  Antisense strand to SEQ ID NO: 132442
cauucuaguagagucuagu

SEQ ID NO: 132444 - RNA, 19 nt, Artificial Sequence
  Description of Artificial Sequence: Synthetic oligonucleotide
  Sense strand starting at position 2454 of SEQ ID NO: 1699
auauuagccagguaugguu

SEQ ID NO: 132445 - RNA, 19 nt, Artificial Sequence
  Description of Artificial Sequence: Synthetic oligonucleotide
  Antisense strand to SEQ ID NO: 132444
aaccauaccuggcuaauau

SEQ ID NO: 132446 - RNA, 19 nt, Artificial Sequence
  Description of Artificial Sequence: Synthetic oligonucleotide
  Sense strand starting at position 2318 of SEQ ID NO: 1699
augucuucuuggccaagca

SEQ ID NO: 132447 - RNA, 19 nt, Artificial Sequence
  Description of Artificial Sequence: Synthetic oligonucleotide
  Antisense strand to SEQ ID NO: 132446
ugcuuggccaagaagacau

SEQ ID NO: 132448 - RNA, 19 nt, Artificial Sequence
  Description of Artificial Sequence: Synthetic oligonucleotide
  Sense strand starting at position 2264 of SEQ ID NO: 1699
aaguguuaccaaggaucuu

SEQ ID NO: 132449 - RNA, 19 nt, Artificial Sequence
  Description of Artificial Sequence: Synthetic oligonucleotide
  Antisense strand to SEQ ID NO: 132448
aagauccuugguaacacuu

SEQ ID NO: 132450 - RNA, 19 nt, Artificial Sequence
  Description of Artificial Sequence: Synthetic oligonucleotide
  Sense strand starting at position 2260 of SEQ ID NO: 1699
ugggaaguguuaccaagga

SEQ ID NO: 132451 - RNA, 19 nt, Artificial Sequence
  Description of Artificial Sequence: Synthetic oligonucleotide
  Antisense strand to SEQ ID NO: 132450
uccuugguaacacuuccca

SEQ ID NO: 132452 - RNA, 19 nt, Artificial Sequence
  Description of Artificial Sequence: Synthetic oligonucleotide
  Sense strand starting at position 2074 of SEQ ID NO: 1699
aguucucuagcauguguga

SEQ ID NO: 132453 - RNA, 19 nt, Artificial Sequence
  Description of Artificial Sequence: Synthetic oligonucleotide
  Antisense strand to SEQ ID NO: 132452
ucacacaugcuagagaacu

SEQ ID NO: 132454 - RNA, 19 nt, Artificial Sequence
  Description of Artificial Sequence: Synthetic oligonucleotide
  Sense strand starting at position 2069 of SEQ ID NO: 1699
aagucaguucucuagcaug

SEQ ID NO: 132455 - RNA, 19 nt, Artificial Sequence
  Description of Artificial Sequence: Synthetic oligonucleotide
  Antisense strand to SEQ ID NO: 132454
caugcuagagaacugacuu

SEQ ID NO: 132456 - RNA, 19 nt, Artificial Sequence
  Description of Artificial Sequence: Synthetic oligonucleotide
  Sense strand starting at position 1284 of SEQ ID NO: 1699
accuccugugaguaacaua

SEQ ID NO: 132457 - RNA, 19 nt, Artificial Sequence
  Description of Artificial Sequence: Synthetic oligonucleotide
  Antisense strand to SEQ ID NO: 132456
uauguuacucacaggaggu

SEQ ID NO: 132458 - RNA, 19 nt, Artificial Sequence
  Description of Artificial Sequence: Synthetic oligonucleotide
  Sense strand starting at position 316 of SEQ ID NO: 1699
cugugaaacacgcagguuu

SEQ ID NO: 132459 - RNA, 19 nt, Artificial Sequence
  Description of Artificial Sequence: Synthetic oligonucleotide
  Antisense strand to SEQ ID NO: 132458
aaaccugcguguuucacag

SEQ ID NO: 132460 - RNA, 19 nt, Artificial Sequence
  Description of Artificial Sequence: Synthetic oligonucleotide
  Sense strand starting at position 307 of SEQ ID NO: 1699
gagcuucugcugugaaaca

SEQ ID NO: 132461 - RNA, 19 nt, Artificial Sequence
  Description of Artificial Sequence: Synthetic oligonucleotide
  Antisense strand to SEQ ID NO: 132460
uguuucacagcagaagcuc

SEQ ID NO: 132462 - RNA, 19 nt, Artificial Sequence
  Description of Artificial Sequence: Synthetic oligonucleotide
  Sense strand starting at position 305 of SEQ ID NO: 1699
cggagcuucugcugugaaa

SEQ ID NO: 132463 - RNA, 19 nt, Artificial Sequence
  Description of Artificial Sequence: Synthetic oligonucleotide
  Antisense strand to SEQ ID NO: 132462
uuucacagcagaagcuccg

SEQ ID NO: 132464 - RNA, 19 nt, Artificial Sequence
  Description of Artificial Sequence: Synthetic oligonucleotide
  Sense strand starting at position 269 of SEQ ID NO: 1699
gagacagguucauuggugu

SEQ ID NO: 132465 - RNA, 19 nt, Artificial Sequence
  Description of Artificial Sequence: Synthetic oligonucleotide
  Antisense strand to SEQ ID NO: 132464
acaccaaugaaccugucuc

SEQ ID NO: 132466 - RNA, 19 nt, Artificial Sequence
  Description of Artificial Sequence: Synthetic oligonucleotide
  Sense strand starting at position 114 of SEQ ID NO: 1699
cugcaaagauucccugaca

SEQ ID NO: 132467 - RNA, 19 nt, Artificial Sequence
  Description of Artificial Sequence: Synthetic oligonucleotide
  Antisense strand to SEQ ID NO: 132466
ugucagggaaucuuugcag

SEQ ID NO: 132468 - RNA, 19 nt, Artificial Sequence
  Description of Artificial Sequence: Synthetic oligonucleotide
  Sense strand starting at position 3926 of SEQ ID NO: 1700
cuuaauucuuugguuaaga

SEQ ID NO: 132469 - RNA, 19 nt, Artificial Sequence
  Description of Artificial Sequence: Synthetic oligonucleotide
  Antisense strand to SEQ ID NO: 132468
ucuuaaccaaagaauuaag

SEQ ID NO: 132470 - RNA, 19 nt, Artificial Sequence
  Description of Artificial Sequence: Synthetic oligonucleotide
  Sense strand starting at position 3925 of SEQ ID NO: 1700
ucuuaauucuuugguuaag

SEQ ID NO: 132471 - RNA, 19 nt, Artificial Sequence
  Description of Artificial Sequence: Synthetic oligonucleotide
  Antisense strand to SEQ ID NO: 132470
cuuaaccaaagaauuaaga

SEQ ID NO: 132472 - RNA, 19 nt, Artificial Sequence
  Description of Artificial Sequence: Synthetic oligonucleotide
  Sense strand starting at position 3914 of SEQ ID NO: 1700
guuggauucuuucuuaauu

SEQ ID NO: 132473 - RNA, 19 nt, Artificial Sequence
  Description of Artificial Sequence: Synthetic oligonucleotide
  Antisense strand to SEQ ID NO: 132472
aauuaagaaagaauccaac

SEQ ID NO: 132474 - RNA, 19 nt, Artificial Sequence
  Description of Artificial Sequence: Synthetic oligonucleotide
  Sense strand starting at position 3532 of SEQ ID NO: 1700
acaauaacguagucuauaa

SEQ ID NO: 132475 - RNA, 19 nt, Artificial Sequence
  Description of Artificial Sequence: Synthetic oligonucleotide
  Antisense strand to SEQ ID NO: 132474
uuauagacuacguuauugu

SEQ ID NO: 132476 - RNA, 19 nt, Artificial Sequence
  Description of Artificial Sequence: Synthetic oligonucleotide
  Sense strand starting at position 3159 of SEQ ID NO: 1700
uuaauagagcaugguagaa

SEQ ID NO: 132477 - RNA, 19 nt, Artificial Sequence
  Description of Artificial Sequence: Synthetic oligonucleotide
  Antisense strand to SEQ ID NO: 132476
uucuaccaugcucuauuaa

SEQ ID NO: 132478 - RNA, 19 nt, Artificial Sequence
  Description of Artificial Sequence: Synthetic oligonucleotide
  Sense strand starting at position 3158 of SEQ ID NO: 1700
uuuaauagagcaugguaga

SEQ ID NO: 132479 - RNA, 19 nt, Artificial Sequence
  Description of Artificial Sequence: Synthetic oligonucleotide
  Antisense strand to SEQ ID NO: 132478
ucuaccaugcucuauuaaa

SEQ ID NO: 132480 - RNA, 19 nt, Artificial Sequence
  Description of Artificial Sequence: Synthetic oligonucleotide
  Sense strand starting at position 2764 of SEQ ID NO: 1700
cuacuagaauguuaaguaa

SEQ ID NO: 132481 - RNA, 19 nt, Artificial Sequence
  Description of Artificial Sequence: Synthetic oligonucleotide
  Antisense strand to SEQ ID NO: 132480
uuacuuaacauucuaguag

SEQ ID NO: 132482 - RNA, 19 nt, Artificial Sequence
  Description of Artificial Sequence: Synthetic oligonucleotide
  Sense strand starting at position 2761 of SEQ ID NO: 1700
acucuacuagaauguuaag

SEQ ID NO: 132483 - RNA, 19 nt, Artificial Sequence
  Description of Artificial Sequence: Synthetic oligonucleotide
  Antisense strand to SEQ ID NO: 132482
cuuaacauucuaguagagu

SEQ ID NO: 132484 - RNA, 19 nt, Artificial Sequence
  Description of Artificial Sequence: Synthetic oligonucleotide
  Sense strand starting at position 2756 of SEQ ID NO: 1700
acuagacucuacuagaaug

SEQ ID NO: 132485 - RNA, 19 nt, Artificial Sequence
  Description of Artificial Sequence: Synthetic oligonucleotide
  Antisense strand to SEQ ID NO: 132484
cauucuaguagagucuagu

SEQ ID NO: 132486 - RNA, 19 nt, Artificial Sequence
  Description of Artificial Sequence: Synthetic oligonucleotide
  Sense strand starting at position 2458 of SEQ ID NO: 1700
auauuagccagguaugguu

SEQ ID NO: 132487 - RNA, 19 nt, Artificial Sequence
  Description of Artificial Sequence: Synthetic oligonucleotide
  Antisense strand to SEQ ID NO: 132486
aaccauaccuggcuaauau

SEQ ID NO: 132488 - RNA, 19 nt, Artificial Sequence
  Description of Artificial Sequence: Synthetic oligonucleotide
  Sense strand starting at position 2322 of SEQ ID NO: 1700
augucuucuuggccaagca

SEQ ID NO: 132489 - RNA, 19 nt, Artificial Sequence
  Description of Artificial Sequence: Synthetic oligonucleotide
  Antisense strand to SEQ ID NO: 132488
ugcuuggccaagaagacau

SEQ ID NO: 132490 - RNA, 19 nt, Artificial Sequence
  Description of Artificial Sequence: Synthetic oligonucleotide
  Sense strand starting at position 2268 of SEQ ID NO: 1700
aaguguuaccaaggaucuu

SEQ ID NO: 132491 - RNA, 19 nt, Artificial Sequence
  Description of Artificial Sequence: Synthetic oligonucleotide
  Antisense strand to SEQ ID NO: 132490
aagauccuugguaacacuu

SEQ ID NO: 132492 - RNA, 19 nt, Artificial Sequence
  Description of Artificial Sequence: Synthetic oligonucleotide
  Sense strand starting at position 2264 of SEQ ID NO: 1700
ugggaaguguuaccaagga

SEQ ID NO: 132493 - RNA, 19 nt, Artificial Sequence
  Description of Artificial Sequence: Synthetic oligonucleotide
  Antisense strand to SEQ ID NO: 132492
uccuugguaacacuuccca

SEQ ID NO: 132494 - RNA, 19 nt, Artificial Sequence
  Description of Artificial Sequence: Synthetic oligonucleotide
  Sense strand starting at position 2078 of SEQ ID NO: 1700
aguucucuagcauguguga

SEQ ID NO: 132495 - RNA, 19 nt, Artificial Sequence
  Description of Artificial Sequence: Synthetic oligonucleotide
  Antisense strand to SEQ ID NO: 132494
ucacacaugcuagagaacu

SEQ ID NO: 132496 - RNA, 19 nt, Artificial Sequence
  Description of Artificial Sequence: Synthetic oligonucleotide
  Sense strand starting at position 2073 of SEQ ID NO: 1700
aagucaguucucuagcaug

SEQ ID NO: 132497 - RNA, 19 nt, Artificial Sequence
  Description of Artificial Sequence: Synthetic oligonucleotide
  Antisense strand to SEQ ID NO: 132496
caugcuagagaacugacuu

SEQ ID NO: 132498 - RNA, 19 nt, Artificial Sequence
  Description of Artificial Sequence: Synthetic oligonucleotide
  Sense strand starting at position 1288 of SEQ ID NO: 1700
accuccugugaguaacaua

SEQ ID NO: 132499 - RNA, 19 nt, Artificial Sequence
  Description of Artificial Sequence: Synthetic oligonucleotide
  Antisense strand to SEQ ID NO: 132498
uauguuacucacaggaggu

SEQ ID NO: 132500 - RNA, 19 nt, Artificial Sequence
  Description of Artificial Sequence: Synthetic oligonucleotide
  Sense strand starting at position 320 of SEQ ID NO: 1700
cugugaaacacgcagguuu

SEQ ID NO: 132501 - RNA, 19 nt, Artificial Sequence
  Description of Artificial Sequence: Synthetic oligonucleotide
  Antisense strand to SEQ ID NO: 132500
aaaccugcguguuucacag

SEQ ID NO: 132502 - RNA, 19 nt, Artificial Sequence
  Description of Artificial Sequence: Synthetic oligonucleotide
  Sense strand starting at position 311 of SEQ ID NO: 1700
gagcuucugcugugaaaca

SEQ ID NO: 132503 - RNA, 19 nt, Artificial Sequence
  Description of Artificial Sequence: Synthetic oligonucleotide
  Antisense strand to SEQ ID NO: 132502
uguuucacagcagaagcuc

SEQ ID NO: 132504 - RNA, 19 nt, Artificial Sequence
  Description of Artificial Sequence: Synthetic oligonucleotide
  Sense strand starting at position 309 of SEQ ID NO: 1700
cggagcuucugcugugaaa

SEQ ID NO: 132505 - RNA, 19 nt, Artificial Sequence
  Description of Artificial Sequence: Synthetic oligonucleotide
  Antisense strand to SEQ ID NO: 132504
uuucacagcagaagcuccg

SEQ ID NO: 132506 - RNA, 19 nt, Artificial Sequence
  Description of Artificial Sequence: Synthetic oligonucleotide
  Sense strand starting at position 273 of SEQ ID NO: 1700
gagacagguucauuggugu

SEQ ID NO: 132507 - RNA, 19 nt, Artificial Sequence
  Description of Artificial Sequence: Synthetic oligonucleotide
  Antisense strand to SEQ ID NO: 132506
acaccaaugaaccugucuc

SEQ ID NO: 132508 - RNA, 19 nt, Artificial Sequence
  Description of Artificial Sequence: Synthetic oligonucleotide
  Sense strand starting at position 118 of SEQ ID NO: 1700
cugcaaagauucccugaca

SEQ ID NO: 132509 - RNA, 19 nt, Artificial Sequence
  Description of Artificial Sequence: Synthetic oligonucleotide
  Antisense strand to SEQ ID NO: 132508
ugucagggaaucuuugcag

SEQ ID NO: 132510 - RNA, 19 nt, Artificial Sequence
  Description of Artificial Sequence: Synthetic oligonucleotide
  Sense strand starting at position 144 of SEQ ID NO: 1701
acgcauuucccaugucaau

SEQ ID NO: 132511 - RNA, 19 nt, Artificial Sequence
  Description of Artificial Sequence: Synthetic oligonucleotide
  Antisense strand to SEQ ID NO: 132510
auugacaugggaaaugcgu

SEQ ID NO: 132512 - RNA, 19 nt, Artificial Sequence
  Description of Artificial Sequence: Synthetic oligonucleotide
  Sense strand starting at position 246 of SEQ ID NO: 1701
gagcuuccucugugaaacg

SEQ ID NO: 132513 - RNA, 19 nt, Artificial Sequence
  Description of Artificial Sequence: Synthetic oligonucleotide
  Antisense strand to SEQ ID NO: 132512
cguuucacagaggaagcuc

SEQ ID NO: 132514 - RNA, 19 nt, Artificial Sequence
  Description of Artificial Sequence: Synthetic oligonucleotide
  Sense strand starting at position 622 of SEQ ID NO: 1701
aguagaugcugacuagugu

SEQ ID NO: 132515 - RNA, 19 nt, Artificial Sequence
  Description of Artificial Sequence: Synthetic oligonucleotide
  Antisense strand to SEQ ID NO: 132514
acacuagucagcaucuacu

SEQ ID NO: 132516 - RNA, 19 nt, Artificial Sequence
  Description of Artificial Sequence: Synthetic oligonucleotide
  Sense strand starting at position 623 of SEQ ID NO: 1701
guagaugcugacuaguguu

SEQ ID NO: 132517 - RNA, 19 nt, Artificial Sequence
  Description of Artificial Sequence: Synthetic oligonucleotide
  Antisense strand to SEQ ID NO: 132516
aacacuagucagcaucuac

SEQ ID NO: 132518 - RNA, 19 nt, Artificial Sequence
  Description of Artificial Sequence: Synthetic oligonucleotide
  Sense strand starting at position 629 of SEQ ID NO: 1701
gcugacuaguguuuacugu

SEQ ID NO: 132519 - RNA, 19 nt, Artificial Sequence
  Description of Artificial Sequence: Synthetic oligonucleotide
  Antisense strand to SEQ ID NO: 132518
acaguaaacacuagucagc

SEQ ID NO: 132520 - RNA, 19 nt, Artificial Sequence
  Description of Artificial Sequence: Synthetic oligonucleotide
  Sense strand starting at position 630 of SEQ ID NO: 1701
cugacuaguguuuacugua

SEQ ID NO: 132521 - RNA, 19 nt, Artificial Sequence
  Description of Artificial Sequence: Synthetic oligonucleotide
  Antisense strand to SEQ ID NO: 132520
uacaguaaacacuagucag

SEQ ID NO: 132522 - RNA, 19 nt, Artificial Sequence
  Description of Artificial Sequence: Synthetic oligonucleotide
  Sense strand starting at position 676 of SEQ ID NO: 1701
agagaaagcucaccaucuu

SEQ ID NO: 132523 - RNA, 19 nt, Artificial Sequence
  Description of Artificial Sequence: Synthetic oligonucleotide
  Antisense strand to SEQ ID NO: 132522
aagauggugagcuuucucu

SEQ ID NO: 132524 - RNA, 19 nt, Artificial Sequence
  Description of Artificial Sequence: Synthetic oligonucleotide
  Sense strand starting at position 715 of SEQ ID NO: 1701
ccagguagccuucgaagaa

SEQ ID NO: 132525 - RNA, 19 nt, Artificial Sequence
  Description of Artificial Sequence: Synthetic oligonucleotide
  Antisense strand to SEQ ID NO: 132524
uucuucgaaggcuaccugg

SEQ ID NO: 132526 - RNA, 19 nt, Artificial Sequence
  Description of Artificial Sequence: Synthetic oligonucleotide
  Sense strand starting at position 716 of SEQ ID NO: 1701
cagguagccuucgaagaag

SEQ ID NO: 132527 - RNA, 19 nt, Artificial Sequence
  Description of Artificial Sequence: Synthetic oligonucleotide
  Antisense strand to SEQ ID NO: 132526
cuucuucgaaggcuaccug

SEQ ID NO: 132528 - RNA, 19 nt, Artificial Sequence
  Description of Artificial Sequence: Synthetic oligonucleotide
  Sense strand starting at position 733 of SEQ ID NO: 1701
agcggauccuucucauaua

SEQ ID NO: 132529 - RNA, 19 nt, Artificial Sequence
  Description of Artificial Sequence: Synthetic oligonucleotide
  Antisense strand to SEQ ID NO: 132528
uauaugagaaggauccgcu

SEQ ID NO: 132530 - RNA, 19 nt, Artificial Sequence
  Description of Artificial Sequence: Synthetic oligonucleotide
  Sense strand starting at position 734 of SEQ ID NO: 1701
gcggauccuucucauauaa

SEQ ID NO: 132531 - RNA, 19 nt, Artificial Sequence
  Description of Artificial Sequence: Synthetic oligonucleotide
  Antisense strand to SEQ ID NO: 132530
uuauaugagaaggauccgc

SEQ ID NO: 132532 - RNA, 19 nt, Artificial Sequence
  Description of Artificial Sequence: Synthetic oligonucleotide
  Sense strand starting at position 736 of SEQ ID NO: 1701
ggauccuucucauauaaag

SEQ ID NO: 132533 - RNA, 19 nt, Artificial Sequence
  Description of Artificial Sequence: Synthetic oligonucleotide
  Antisense strand to SEQ ID NO: 132532
cuuuauaugagaaggaucc

SEQ ID NO: 132534 - RNA, 19 nt, Artificial Sequence
  Description of Artificial Sequence: Synthetic oligonucleotide
  Sense strand starting at position 763 of SEQ ID NO: 1701
gguacuccagccugaggaa

SEQ ID NO: 132535 - RNA, 19 nt, Artificial Sequence
  Description of Artificial Sequence: Synthetic oligonucleotide
  Antisense strand to SEQ ID NO: 132534
uuccucaggcuggaguacc

SEQ ID NO: 132536 - RNA, 19 nt, Artificial Sequence
  Description of Artificial Sequence: Synthetic oligonucleotide
  Sense strand starting at position 956 of SEQ ID NO: 1701
uggguauacuguuucuaau

SEQ ID NO: 132537 - RNA, 19 nt, Artificial Sequence
  Description of Artificial Sequence: Synthetic oligonucleotide
  Antisense strand to SEQ ID NO: 132536
auuagaaacaguauaccca

SEQ ID NO: 132538 - RNA, 19 nt, Artificial Sequence
  Description of Artificial Sequence: Synthetic oligonucleotide
  Sense strand starting at position 958 of SEQ ID NO: 1701
gguauacuguuucuaauau

SEQ ID NO: 132539 - RNA, 19 nt, Artificial Sequence
  Description of Artificial Sequence: Synthetic oligonucleotide
  Antisense strand to SEQ ID NO: 132538
auauuagaaacaguauacc

SEQ ID NO: 132540 - RNA, 19 nt, Artificial Sequence
  Description of Artificial Sequence: Synthetic oligonucleotide
  Sense strand starting at position 959 of SEQ ID NO: 1701
guauacuguuucuaauaug

SEQ ID NO: 132541 - RNA, 19 nt, Artificial Sequence
  Description of Artificial Sequence: Synthetic oligonucleotide
  Antisense strand to SEQ ID NO: 132540
cauauuagaaacaguauac

SEQ ID NO: 132542 - RNA, 19 nt, Artificial Sequence
  Description of Artificial Sequence: Synthetic oligonucleotide
  Sense strand starting at position 1618 of SEQ ID NO: 1701
gcugcuuagucccuggaca

SEQ ID NO: 132543 - RNA, 19 nt, Artificial Sequence
  Description of Artificial Sequence: Synthetic oligonucleotide
  Antisense strand to SEQ ID NO: 132542
uguccagggacuaagcagc

SEQ ID NO: 132544 - RNA, 19 nt, Artificial Sequence
  Description of Artificial Sequence: Synthetic oligonucleotide
  Sense strand starting at position 1806 of SEQ ID NO: 1701
cgcagcaucugcuagugaa

SEQ ID NO: 132545 - RNA, 19 nt, Artificial Sequence
  Description of Artificial Sequence: Synthetic oligonucleotide
  Antisense strand to SEQ ID NO: 132544
uucacuagcagaugcugcg

SEQ ID NO: 132546 - RNA, 19 nt, Artificial Sequence
  Description of Artificial Sequence: Synthetic oligonucleotide
  Sense strand starting at position 2019 of SEQ ID NO: 1701
ugacuucuccucggccaaa

SEQ ID NO: 132547 - RNA, 19 nt, Artificial Sequence
  Description of Artificial Sequence: Synthetic oligonucleotide
  Antisense strand to SEQ ID NO: 132546
uuuggccgaggagaaguca

SEQ ID NO: 132548 - RNA, 19 nt, Artificial Sequence
  Description of Artificial Sequence: Synthetic oligonucleotide
  Sense strand starting at position 2046 of SEQ ID NO: 1701
cucugucaggugugaaaga

SEQ ID NO: 132549 - RNA, 19 nt, Artificial Sequence
  Description of Artificial Sequence: Synthetic oligonucleotide
  Antisense strand to SEQ ID NO: 132548
ucuuucacaccugacagag

SEQ ID NO: 132550 - RNA, 19 nt, Artificial Sequence
  Description of Artificial Sequence: Synthetic oligonucleotide
  Sense strand starting at position 2057 of SEQ ID NO: 1701
gugaaagaguccuuaguuu

SEQ ID NO: 132551 - RNA, 19 nt, Artificial Sequence
  Description of Artificial Sequence: Synthetic oligonucleotide
  Antisense strand to SEQ ID NO: 132550
aaacuaaggacucuuucac

SEQ ID NO: 132552 - RNA, 19 nt, Artificial Sequence
  Description of Artificial Sequence: Synthetic oligonucleotide
  Sense strand starting at position 2533 of SEQ ID NO: 1701
ugggaaguguuaccaagga

SEQ ID NO: 132553 - RNA, 19 nt, Artificial Sequence
  Description of Artificial Sequence: Synthetic oligonucleotide
  Antisense strand to SEQ ID NO: 132552
uccuugguaacacuuccca

SEQ ID NO: 132554 - RNA, 19 nt, Artificial Sequence
  Description of Artificial Sequence: Synthetic oligonucleotide
  Sense strand starting at position 2537 of SEQ ID NO: 1701
aaguguuaccaaggaucuu

SEQ ID NO: 132555 - RNA, 19 nt, Artificial Sequence
  Description of Artificial Sequence: Synthetic oligonucleotide
  Antisense strand to SEQ ID NO: 132554
aagauccuugguaacacuu

SEQ ID NO: 132556 - RNA, 19 nt, Artificial Sequence
  Description of Artificial Sequence: Synthetic oligonucleotide
  Sense strand starting at position 2561 of SEQ ID NO: 1701
cucagcuccuuucuugaga

SEQ ID NO: 132557 - RNA, 19 nt, Artificial Sequence
  Description of Artificial Sequence: Synthetic oligonucleotide
  Antisense strand to SEQ ID NO: 132556
ucucaagaaaggagcugag

SEQ ID NO: 132558 - RNA, 19 nt, Artificial Sequence
  Description of Artificial Sequence: Synthetic oligonucleotide
  Sense strand starting at position 2562 of SEQ ID NO: 1701
ucagcuccuuucuugagaa

SEQ ID NO: 132559 - RNA, 19 nt, Artificial Sequence
  Description of Artificial Sequence: Synthetic oligonucleotide
  Antisense strand to SEQ ID NO: 132558
uucucaagaaaggagcuga

SEQ ID NO: 132560 - RNA, 19 nt, Artificial Sequence
  Description of Artificial Sequence: Synthetic oligonucleotide
  Sense strand starting at position 2930 of SEQ ID NO: 1701
agacaaugguaaugggagu

SEQ ID NO: 132561 - RNA, 19 nt, Artificial Sequence
  Description of Artificial Sequence: Synthetic oligonucleotide
  Antisense strand to SEQ ID NO: 132560
acucccauuaccauugucu

SEQ ID NO: 132562 - RNA, 19 nt, Artificial Sequence
  Description of Artificial Sequence: Synthetic oligonucleotide
  Sense strand starting at position 3126 of SEQ ID NO: 1701
ucacuuaagccauagaguu

SEQ ID NO: 132563 - RNA, 19 nt, Artificial Sequence
  Description of Artificial Sequence: Synthetic oligonucleotide
  Antisense strand to SEQ ID NO: 132562
aacucuauggcuuaaguga

SEQ ID NO: 132564 - RNA, 19 nt, Artificial Sequence
  Description of Artificial Sequence: Synthetic oligonucleotide
  Sense strand starting at position 3260 of SEQ ID NO: 1701
gauggcuugugucugggaa

SEQ ID NO: 132565 - RNA, 19 nt, Artificial Sequence
  Description of Artificial Sequence: Synthetic oligonucleotide
  Antisense strand to SEQ ID NO: 132564
uucccagacacaagccauc

SEQ ID NO: 132566 - RNA, 19 nt, Artificial Sequence
  Description of Artificial Sequence: Synthetic oligonucleotide
  Sense strand starting at position 3648 of SEQ ID NO: 1701
ggaagaucacccgaguuug

SEQ ID NO: 132567 - RNA, 19 nt, Artificial Sequence
  Description of Artificial Sequence: Synthetic oligonucleotide
  Antisense strand to SEQ ID NO: 132566
caaacucgggugaucuucc

SEQ ID NO: 132568 - RNA, 19 nt, Artificial Sequence
  Description of Artificial Sequence: Synthetic oligonucleotide
  Sense strand starting at position 3656 of SEQ ID NO: 1701
acccgaguuugggaguuua

SEQ ID NO: 132569 - RNA, 19 nt, Artificial Sequence
  Description of Artificial Sequence: Synthetic oligonucleotide
  Antisense strand to SEQ ID NO: 132568
uaaacucccaaacucgggu

SEQ ID NO: 132570 - RNA, 19 nt, Artificial Sequence
  Description of Artificial Sequence: Synthetic oligonucleotide
  Sense strand starting at position 3832 of SEQ ID NO: 1702
ugcaucagaaagugauaga

SEQ ID NO: 132571 - RNA, 19 nt, Artificial Sequence
  Description of Artificial Sequence: Synthetic oligonucleotide
  Antisense strand to SEQ ID NO: 132570
ucuaucacuuucugaugca

SEQ ID NO: 132572 - RNA, 19 nt, Artificial Sequence
  Description of Artificial Sequence: Synthetic oligonucleotide
  Sense strand starting at position 3746 of SEQ ID NO: 1702
agcaaaugauuggcaaaca

SEQ ID NO: 132573 - RNA, 19 nt, Artificial Sequence
  Description of Artificial Sequence: Synthetic oligonucleotide
  Antisense strand to SEQ ID NO: 132572
uguuugccaaucauuugcu

SEQ ID NO: 132574 - RNA, 19 nt, Artificial Sequence
  Description of Artificial Sequence: Synthetic oligonucleotide
  Sense strand starting at position 3646 of SEQ ID NO: 1702
gcucuuccucauggagaau

SEQ ID NO: 132575 - RNA, 19 nt, Artificial Sequence
  Description of Artificial Sequence: Synthetic oligonucleotide
  Antisense strand to SEQ ID NO: 132574
auucuccaugaggaagagc

SEQ ID NO: 132576 - RNA, 19 nt, Artificial Sequence
  Description of Artificial Sequence: Synthetic oligonucleotide
  Sense strand starting at position 3645 of SEQ ID NO: 1702
agcucuuccucauggagaa

SEQ ID NO: 132577 - RNA, 19 nt, Artificial Sequence
  Description of Artificial Sequence: Synthetic oligonucleotide
  Antisense strand to SEQ ID NO: 132576
uucuccaugaggaagagcu

SEQ ID NO: 132578 - RNA, 19 nt, Artificial Sequence
  Description of Artificial Sequence: Synthetic oligonucleotide
  Sense strand starting at position 3379 of SEQ ID NO: 1702
gaguaugggcaaugugaug

SEQ ID NO: 132579 - RNA, 19 nt, Artificial Sequence
  Description of Artificial Sequence: Synthetic oligonucleotide
  Antisense strand to SEQ ID NO: 132578
caucacauugcccauacuc

SEQ ID NO: 132580 - RNA, 19 nt, Artificial Sequence
  Description of Artificial Sequence: Synthetic oligonucleotide
  Sense strand starting at position 3366 of SEQ ID NO: 1702
aggaauuugugaggaguau

SEQ ID NO: 132581 - RNA, 19 nt, Artificial Sequence
  Description of Artificial Sequence: Synthetic oligonucleotide
  Antisense strand to SEQ ID NO: 132580
auacuccucacaaauuccu

SEQ ID NO: 132582 - RNA, 19 nt, Artificial Sequence
  Description of Artificial Sequence: Synthetic oligonucleotide
  Sense strand starting at position 3364 of SEQ ID NO: 1702
ucaggaauuugugaggagu

SEQ ID NO: 132583 - RNA, 19 nt, Artificial Sequence
  Description of Artificial Sequence: Synthetic oligonucleotide
  Antisense strand to SEQ ID NO: 132582
acuccucacaaauuccuga

SEQ ID NO: 132584 - RNA, 19 nt, Artificial Sequence
  Description of Artificial Sequence: Synthetic oligonucleotide
  Sense strand starting at position 3353 of SEQ ID NO: 1702
agugcuagagcucaggaau

SEQ ID NO: 132585 - RNA, 19 nt, Artificial Sequence
  Description of Artificial Sequence: Synthetic oligonucleotide
  Antisense strand to SEQ ID NO: 132584
auuccugagcucuagcacu

SEQ ID NO: 132586 - RNA, 19 nt, Artificial Sequence
  Description of Artificial Sequence: Synthetic oligonucleotide
  Sense strand starting at position 3095 of SEQ ID NO: 1702
agagauaggucagacucuu

SEQ ID NO: 132587 - RNA, 19 nt, Artificial Sequence
  Description of Artificial Sequence: Synthetic oligonucleotide
  Antisense strand to SEQ ID NO: 132586
aagagucugaccuaucucu

SEQ ID NO: 132588 - RNA, 19 nt, Artificial Sequence
  Description of Artificial Sequence: Synthetic oligonucleotide
  Sense strand starting at position 2880 of SEQ ID NO: 1702
ccgaguagcugggaauuau

SEQ ID NO: 132589 - RNA, 19 nt, Artificial Sequence
  Description of Artificial Sequence: Synthetic oligonucleotide
  Antisense strand to SEQ ID NO: 132588
auaauucccagcuacucgg

SEQ ID NO: 132590 - RNA, 19 nt, Artificial Sequence
  Description of Artificial Sequence: Synthetic oligonucleotide
  Sense strand starting at position 2729 of SEQ ID NO: 1702
gaaaguccuuugucaagau

SEQ ID NO: 132591 - RNA, 19 nt, Artificial Sequence
  Description of Artificial Sequence: Synthetic oligonucleotide
  Antisense strand to SEQ ID NO: 132590
aucuugacaaaggacuuuc

SEQ ID NO: 132592 - RNA, 19 nt, Artificial Sequence
  Description of Artificial Sequence: Synthetic oligonucleotide
  Sense strand starting at position 2727 of SEQ ID NO: 1702
cugaaaguccuuugucaag

SEQ ID NO: 132593 - RNA, 19 nt, Artificial Sequence
  Description of Artificial Sequence: Synthetic oligonucleotide
  Antisense strand to SEQ ID NO: 132592
cuugacaaaggacuuucag

SEQ ID NO: 132594 - RNA, 19 nt, Artificial Sequence
  Description of Artificial Sequence: Synthetic oligonucleotide
  Sense strand starting at position 2725 of SEQ ID NO: 1702
gacugaaaguccuuuguca

SEQ ID NO: 132595 - RNA, 19 nt, Artificial Sequence
  Description of Artificial Sequence: Synthetic oligonucleotide
  Antisense strand to SEQ ID NO: 132594
ugacaaaggacuuucaguc

SEQ ID NO: 132596 - RNA, 19 nt, Artificial Sequence
  Description of Artificial Sequence: Synthetic oligonucleotide
  Sense strand starting at position 2716 of SEQ ID NO: 1702
agaugucaggacugaaagu

SEQ ID NO: 132597 - RNA, 19 nt, Artificial Sequence
  Description of Artificial Sequence: Synthetic oligonucleotide
  Antisense strand to SEQ ID NO: 132596
acuuucaguccugacaucu

SEQ ID NO: 132598 - RNA, 19 nt, Artificial Sequence
  Description of Artificial Sequence: Synthetic oligonucleotide
  Sense strand starting at position 2696 of SEQ ID NO: 1702
ugguuaucuugugggcauc

SEQ ID NO: 132599 - RNA, 19 nt, Artificial Sequence
  Description of Artificial Sequence: Synthetic oligonucleotide
  Antisense strand to SEQ ID NO: 132598
gaugcccacaagauaacca

SEQ ID NO: 132600 - RNA, 19 nt, Artificial Sequence
  Description of Artificial Sequence: Synthetic oligonucleotide
  Sense strand starting at position 2695 of SEQ ID NO: 1702
gugguuaucuugugggcau

SEQ ID NO: 132601 - RNA, 19 nt, Artificial Sequence
  Description of Artificial Sequence: Synthetic oligonucleotide
  Antisense strand to SEQ ID NO: 132600
augcccacaagauaaccac

SEQ ID NO: 132602 - RNA, 19 nt, Artificial Sequence
  Description of Artificial Sequence: Synthetic oligonucleotide
  Sense strand starting at position 2625 of SEQ ID NO: 1702
cggacugaguggaaugaga

SEQ ID NO: 132603 - RNA, 19 nt, Artificial Sequence
  Description of Artificial Sequence: Synthetic oligonucleotide
  Antisense strand to SEQ ID NO: 132602
ucucauuccacucaguccg

SEQ ID NO: 132604 - RNA, 19 nt, Artificial Sequence
  Description of Artificial Sequence: Synthetic oligonucleotide
  Sense strand starting at position 2468 of SEQ ID NO: 1702
guguauaucgaaugguuac

SEQ ID NO: 132605 - RNA, 19 nt, Artificial Sequence
  Description of Artificial Sequence: Synthetic oligonucleotide
  Antisense strand to SEQ ID NO: 132604
guaaccauucgauauacac

SEQ ID NO: 132606 - RNA, 19 nt, Artificial Sequence
  Description of Artificial Sequence: Synthetic oligonucleotide
  Sense strand starting at position 2317 of SEQ ID NO: 1702
uguuccugauaucagacaa

SEQ ID NO: 132607 - RNA, 19 nt, Artificial Sequence
  Description of Artificial Sequence: Synthetic oligonucleotide
  Antisense strand to SEQ ID NO: 132606
uugucugauaucaggaaca

SEQ ID NO: 132608 - RNA, 19 nt, Artificial Sequence
  Description of Artificial Sequence: Synthetic oligonucleotide
  Sense strand starting at position 2314 of SEQ ID NO: 1702
aucuguuccugauaucaga

SEQ ID NO: 132609 - RNA, 19 nt, Artificial Sequence
  Description of Artificial Sequence: Synthetic oligonucleotide
  Antisense strand to SEQ ID NO: 132608
ucugauaucaggaacagau

SEQ ID NO: 132610 - RNA, 19 nt, Artificial Sequence
  Description of Artificial Sequence: Synthetic oligonucleotide
  Sense strand starting at position 2267 of SEQ ID NO: 1702
aaguuuggcuaauagauga

SEQ ID NO: 132611 - RNA, 19 nt, Artificial Sequence
  Description of Artificial Sequence: Synthetic oligonucleotide
  Antisense strand to SEQ ID NO: 132610
ucaucuauuagccaaacuu

SEQ ID NO: 132612 - RNA, 19 nt, Artificial Sequence
  Description of Artificial Sequence: Synthetic oligonucleotide
  Sense strand starting at position 2263 of SEQ ID NO: 1702
gaugaaguuuggcuaauag

SEQ ID NO: 132613 - RNA, 19 nt, Artificial Sequence
  Description of Artificial Sequence: Synthetic oligonucleotide
  Antisense strand to SEQ ID NO: 132612
cuauuagccaaacuucauc

SEQ ID NO: 132614 - RNA, 19 nt, Artificial Sequence
  Description of Artificial Sequence: Synthetic oligonucleotide
  Sense strand starting at position 1763 of SEQ ID NO: 1702
aucacaaucugauggauga

SEQ ID NO: 132615 - RNA, 19 nt, Artificial Sequence
  Description of Artificial Sequence: Synthetic oligonucleotide
  Antisense strand to SEQ ID NO: 132614
ucauccaucagauugugau

SEQ ID NO: 132616 - RNA, 19 nt, Artificial Sequence
  Description of Artificial Sequence: Synthetic oligonucleotide
  Sense strand starting at position 1493 of SEQ ID NO: 1702
gaucgauccuagggucaaa

SEQ ID NO: 132617 - RNA, 19 nt, Artificial Sequence
  Description of Artificial Sequence: Synthetic oligonucleotide
  Antisense strand to SEQ ID NO: 132616
uuugacccuaggaucgauc

SEQ ID NO: 132618 - RNA, 19 nt, Artificial Sequence
  Description of Artificial Sequence: Synthetic oligonucleotide
  Sense strand starting at position 1275 of SEQ ID NO: 1702
gcaggagaaucacauguaa

SEQ ID NO: 132619 - RNA, 19 nt, Artificial Sequence
  Description of Artificial Sequence: Synthetic oligonucleotide
  Antisense strand to SEQ ID NO: 132618
uuacaugugauucuccugc

SEQ ID NO: 132620 - RNA, 19 nt, Artificial Sequence
  Description of Artificial Sequence: Synthetic oligonucleotide
  Sense strand starting at position 974 of SEQ ID NO: 1702
gggugacgcacucagagua

SEQ ID NO: 132621 - RNA, 19 nt, Artificial Sequence
  Description of Artificial Sequence: Synthetic oligonucleotide
  Antisense strand to SEQ ID NO: 132620
uacucugagugcgucaccc

SEQ ID NO: 132622 - RNA, 19 nt, Artificial Sequence
  Description of Artificial Sequence: Synthetic oligonucleotide
  Sense strand starting at position 443 of SEQ ID NO: 1702
aagcauugagaaugagagu

SEQ ID NO: 132623 - RNA, 19 nt, Artificial Sequence
  Description of Artificial Sequence: Synthetic oligonucleotide
  Antisense strand to SEQ ID NO: 132622
acucucauucucaaugcuu

SEQ ID NO: 132624 - RNA, 19 nt, Artificial Sequence
  Description of Artificial Sequence: Synthetic oligonucleotide
  Sense strand starting at position 437 of SEQ ID NO: 1702
acccuaaagcauugagaau

SEQ ID NO: 132625 - RNA, 19 nt, Artificial Sequence
  Description of Artificial Sequence: Synthetic oligonucleotide
  Antisense strand to SEQ ID NO: 132624
auucucaaugcuuuagggu

SEQ ID NO: 132626 - RNA, 19 nt, Artificial Sequence
  Description of Artificial Sequence: Synthetic oligonucleotide
  Sense strand starting at position 230 of SEQ ID NO: 1702
gcuuguuggccucaaaucu

SEQ ID NO: 132627 - RNA, 19 nt, Artificial Sequence
  Description of Artificial Sequence: Synthetic oligonucleotide
  Antisense strand to SEQ ID NO: 132626
agauuugaggccaacaagc

SEQ ID NO: 132628 - RNA, 19 nt, Artificial Sequence
  Description of Artificial Sequence: Synthetic oligonucleotide
  Sense strand starting at position 227 of SEQ ID NO: 1702
ugugcuuguuggccucaaa

SEQ ID NO: 132629 - RNA, 19 nt, Artificial Sequence
  Description of Artificial Sequence: Synthetic oligonucleotide
  Antisense strand to SEQ ID NO: 132628
uuugaggccaacaagcaca

SEQ ID NO: 132630 - RNA, 19 nt, Artificial Sequence
  Description of Artificial Sequence: Synthetic oligonucleotide
  Sense strand starting at position 176 of SEQ ID NO: 1702
uaucauugcucugguagag

SEQ ID NO: 132631 - RNA, 19 nt, Artificial Sequence
  Description of Artificial Sequence: Synthetic oligonucleotide
  Antisense strand to SEQ ID NO: 132630
cucuaccagagcaaugaua

SEQ ID NO: 132632 - RNA, 19 nt, Artificial Sequence
  Description of Artificial Sequence: Synthetic oligonucleotide
  Sense strand starting at position 175 of SEQ ID NO: 1702
auaucauugcucugguaga

SEQ ID NO: 132633 - RNA, 19 nt, Artificial Sequence
  Description of Artificial Sequence: Synthetic oligonucleotide
  Antisense strand to SEQ ID NO: 132632
ucuaccagagcaaugauau

SEQ ID NO: 132634 - RNA, 19 nt, Artificial Sequence
  Description of Artificial Sequence: Synthetic oligonucleotide
  Sense strand starting at position 169 of SEQ ID NO: 1702
ggaccaauaucauugcucu

SEQ ID NO: 132635 - RNA, 19 nt, Artificial Sequence
  Description of Artificial Sequence: Synthetic oligonucleotide
  Antisense strand to SEQ ID NO: 132634
agagcaaugauauuggucc

SEQ ID NO: 132636 - RNA, 19 nt, Artificial Sequence
  Description of Artificial Sequence: Synthetic oligonucleotide
  Sense strand starting at position 127 of SEQ ID NO: 1702
guaucacucucagggcaaa

SEQ ID NO: 132637 - RNA, 19 nt, Artificial Sequence
  Description of Artificial Sequence: Synthetic oligonucleotide
  Antisense strand to SEQ ID NO: 132636
uuugcccugagagugauac

SEQ ID NO: 132638 - RNA, 19 nt, Artificial Sequence
  Description of Artificial Sequence: Synthetic oligonucleotide
  Sense strand starting at position 3978 of SEQ ID NO: 1703
auuggauccugggagugaa

SEQ ID NO: 132639 - RNA, 19 nt, Artificial Sequence
  Description of Artificial Sequence: Synthetic oligonucleotide
  Antisense strand to SEQ ID NO: 132638
uucacucccaggauccaau

SEQ ID NO: 132640 - RNA, 19 nt, Artificial Sequence
  Description of Artificial Sequence: Synthetic oligonucleotide
  Sense strand starting at position 3808 of SEQ ID NO: 1703
ucagccacucugugaucau

SEQ ID NO: 132641 - RNA, 19 nt, Artificial Sequence
  Description of Artificial Sequence: Synthetic oligonucleotide
  Antisense strand to SEQ ID NO: 132640
augaucacagaguggcuga

SEQ ID NO: 132642 - RNA, 19 nt, Artificial Sequence
  Description of Artificial Sequence: Synthetic oligonucleotide
  Sense strand starting at position 3726 of SEQ ID NO: 1703
gccgcuugcuauccaugau

SEQ ID NO: 132643 - RNA, 19 nt, Artificial Sequence
  Description of Artificial Sequence: Synthetic oligonucleotide
  Antisense strand to SEQ ID NO: 132642
aucauggauagcaagcggc

SEQ ID NO: 132644 - RNA, 19 nt, Artificial Sequence
  Description of Artificial Sequence: Synthetic oligonucleotide
  Sense strand starting at position 3317 of SEQ ID NO: 1703
gcuugucuggaagaaauug

SEQ ID NO: 132645 - RNA, 19 nt, Artificial Sequence
  Description of Artificial Sequence: Synthetic oligonucleotide
  Antisense strand to SEQ ID NO: 132644
caauuucuuccagacaagc

SEQ ID NO: 132646 - RNA, 19 nt, Artificial Sequence
  Description of Artificial Sequence: Synthetic oligonucleotide
  Sense strand starting at position 3310 of SEQ ID NO: 1703
gguuaaggcuugucuggaa

SEQ ID NO: 132647 - RNA, 19 nt, Artificial Sequence
  Description of Artificial Sequence: Synthetic oligonucleotide
  Antisense strand to SEQ ID NO: 132646
uuccagacaagccuuaacc

SEQ ID NO: 132648 - RNA, 19 nt, Artificial Sequence
  Description of Artificial Sequence: Synthetic oligonucleotide
  Sense strand starting at position 3256 of SEQ ID NO: 1703
cuuguucugguggaagaga

SEQ ID NO: 132649 - RNA, 19 nt, Artificial Sequence
  Description of Artificial Sequence: Synthetic oligonucleotide
  Antisense strand to SEQ ID NO: 132648
ucucuuccaccagaacaag

SEQ ID NO: 132650 - RNA, 19 nt, Artificial Sequence
  Description of Artificial Sequence: Synthetic oligonucleotide
  Sense strand starting at position 3255 of SEQ ID NO: 1703
gcuuguucugguggaagag

SEQ ID NO: 132651 - RNA, 19 nt, Artificial Sequence
  Description of Artificial Sequence: Synthetic oligonucleotide
  Antisense strand to SEQ ID NO: 132650
cucuuccaccagaacaagc

SEQ ID NO: 132652 - RNA, 19 nt, Artificial Sequence
  Description of Artificial Sequence: Synthetic oligonucleotide
  Sense strand starting at position 3246 of SEQ ID NO: 1703
agauuauacgcuuguucug

SEQ ID NO: 132653 - RNA, 19 nt, Artificial Sequence
  Description of Artificial Sequence: Synthetic oligonucleotide
  Antisense strand to SEQ ID NO: 132652
cagaacaagcguauaaucu

SEQ ID NO: 132654 - RNA, 19 nt, Artificial Sequence
  Description of Artificial Sequence: Synthetic oligonucleotide
  Sense strand starting at position 3243 of SEQ ID NO: 1703
agcagauuauacgcuuguu

SEQ ID NO: 132655 - RNA, 19 nt, Artificial Sequence
  Description of Artificial Sequence: Synthetic oligonucleotide
  Antisense strand to SEQ ID NO: 132654
aacaagcguauaaucugcu

SEQ ID NO: 132656 - RNA, 19 nt, Artificial Sequence
  Description of Artificial Sequence: Synthetic oligonucleotide
  Sense strand starting at position 3235 of SEQ ID NO: 1703
ccuaauguagcagauuaua

SEQ ID NO: 132657 - RNA, 19 nt, Artificial Sequence
  Description of Artificial Sequence: Synthetic oligonucleotide
  Antisense strand to SEQ ID NO: 132656
uauaaucugcuacauuagg

SEQ ID NO: 132658 - RNA, 19 nt, Artificial Sequence
  Description of Artificial Sequence: Synthetic oligonucleotide
  Sense strand starting at position 3201 of SEQ ID NO: 1703
ccuuguaucgaauggucuu

SEQ ID NO: 132659 - RNA, 19 nt, Artificial Sequence
  Description of Artificial Sequence: Synthetic oligonucleotide
  Antisense strand to SEQ ID NO: 132658
aagaccauucgauacaagg

SEQ ID NO: 132660 - RNA, 19 nt, Artificial Sequence
  Description of Artificial Sequence: Synthetic oligonucleotide
  Sense strand starting at position 2847 of SEQ ID NO: 1703
gaguauuguuaggagaucu

SEQ ID NO: 132661 - RNA, 19 nt, Artificial Sequence
  Description of Artificial Sequence: Synthetic oligonucleotide
  Antisense strand to SEQ ID NO: 132660
agaucuccuaacaauacuc

SEQ ID NO: 132662 - RNA, 19 nt, Artificial Sequence
  Description of Artificial Sequence: Synthetic oligonucleotide
  Sense strand starting at position 2805 of SEQ ID NO: 1703
ugaucuguucuagacauua

SEQ ID NO: 132663 - RNA, 19 nt, Artificial Sequence
  Description of Artificial Sequence: Synthetic oligonucleotide
  Antisense strand to SEQ ID NO: 132662
uaaugucuagaacagauca

SEQ ID NO: 132664 - RNA, 19 nt, Artificial Sequence
  Description of Artificial Sequence: Synthetic oligonucleotide
  Sense strand starting at position 2242 of SEQ ID NO: 1703
gggauagaguggaagucaa

SEQ ID NO: 132665 - RNA, 19 nt, Artificial Sequence
  Description of Artificial Sequence: Synthetic oligonucleotide
  Antisense strand to SEQ ID NO: 132664
uugacuuccacucuauccc

SEQ ID NO: 132666 - RNA, 19 nt, Artificial Sequence
  Description of Artificial Sequence: Synthetic oligonucleotide
  Sense strand starting at position 2222 of SEQ ID NO: 1703
ucaagaaagugacaguauu

SEQ ID NO: 132667 - RNA, 19 nt, Artificial Sequence
  Description of Artificial Sequence: Synthetic oligonucleotide
  Antisense strand to SEQ ID NO: 132666
aauacugucacuuucuuga

SEQ ID NO: 132668 - RNA, 19 nt, Artificial Sequence
  Description of Artificial Sequence: Synthetic oligonucleotide
  Sense strand starting at position 2098 of SEQ ID NO: 1703
gugguaucugauugcauuu

SEQ ID NO: 132669 - RNA, 19 nt, Artificial Sequence
  Description of Artificial Sequence: Synthetic oligonucleotide
  Antisense strand to SEQ ID NO: 132668
aaaugcaaucagauaccac

SEQ ID NO: 132670 - RNA, 19 nt, Artificial Sequence
  Description of Artificial Sequence: Synthetic oligonucleotide
  Sense strand starting at position 2097 of SEQ ID NO: 1703
agugguaucugauugcauu

SEQ ID NO: 132671 - RNA, 19 nt, Artificial Sequence
  Description of Artificial Sequence: Synthetic oligonucleotide
  Antisense strand to SEQ ID NO: 132670
aaugcaaucagauaccacu

SEQ ID NO: 132672 - RNA, 19 nt, Artificial Sequence
  Description of Artificial Sequence: Synthetic oligonucleotide
  Sense strand starting at position 1874 of SEQ ID NO: 1703
ggcugacuguaggucagau

SEQ ID NO: 132673 - RNA, 19 nt, Artificial Sequence
  Description of Artificial Sequence: Synthetic oligonucleotide
  Antisense strand to SEQ ID NO: 132672
aucugaccuacagucagcc

SEQ ID NO: 132674 - RNA, 19 nt, Artificial Sequence
  Description of Artificial Sequence: Synthetic oligonucleotide
  Sense strand starting at position 1834 of SEQ ID NO: 1703
aggauauaacucugugccu

SEQ ID NO: 132675 - RNA, 19 nt, Artificial Sequence
  Description of Artificial Sequence: Synthetic oligonucleotide
  Antisense strand to SEQ ID NO: 132674
aggcacagaguuauauccu

SEQ ID NO: 132676 - RNA, 19 nt, Artificial Sequence
  Description of Artificial Sequence: Synthetic oligonucleotide
  Sense strand starting at position 1661 of SEQ ID NO: 1703
cacauugaccuccgagagu

SEQ ID NO: 132677 - RNA, 19 nt, Artificial Sequence
  Description of Artificial Sequence: Synthetic oligonucleotide
  Antisense strand to SEQ ID NO: 132676
acucucggaggucaaugug

SEQ ID NO: 132678 - RNA, 19 nt, Artificial Sequence
  Description of Artificial Sequence: Synthetic oligonucleotide
  Sense strand starting at position 1304 of SEQ ID NO: 1703
ggugguugauggcuguaau

SEQ ID NO: 132679 - RNA, 19 nt, Artificial Sequence
  Description of Artificial Sequence: Synthetic oligonucleotide
  Antisense strand to SEQ ID NO: 132678
auuacagccaucaaccacc

SEQ ID NO: 132680 - RNA, 19 nt, Artificial Sequence
  Description of Artificial Sequence: Synthetic oligonucleotide
  Sense strand starting at position 1075 of SEQ ID NO: 1703
guuuaaacuguuugcauaa

SEQ ID NO: 132681 - RNA, 19 nt, Artificial Sequence
  Description of Artificial Sequence: Synthetic oligonucleotide
  Antisense strand to SEQ ID NO: 132680
uuaugcaaacaguuuaaac

SEQ ID NO: 132682 - RNA, 19 nt, Artificial Sequence
  Description of Artificial Sequence: Synthetic oligonucleotide
  Sense strand starting at position 1074 of SEQ ID NO: 1703
uguuuaaacuguuugcaua

SEQ ID NO: 132683 - RNA, 19 nt, Artificial Sequence
  Description of Artificial Sequence: Synthetic oligonucleotide
  Antisense strand to SEQ ID NO: 132682
uaugcaaacaguuuaaaca

SEQ ID NO: 132684 - RNA, 19 nt, Artificial Sequence
  Description of Artificial Sequence: Synthetic oligonucleotide
  Sense strand starting at position 991 of SEQ ID NO: 1703
uguagagacuucuaaacuc

SEQ ID NO: 132685 - RNA, 19 nt, Artificial Sequence
  Description of Artificial Sequence: Synthetic oligonucleotide
  Antisense strand to SEQ ID NO: 132684
gaguuuagaagucucuaca

SEQ ID NO: 132686 - RNA, 19 nt, Artificial Sequence
  Description of Artificial Sequence: Synthetic oligonucleotide
  Sense strand starting at position 949 of SEQ ID NO: 1703
accgcaauuguaggauuaa

SEQ ID NO: 132687 - RNA, 19 nt, Artificial Sequence
  Description of Artificial Sequence: Synthetic oligonucleotide
  Antisense strand to SEQ ID NO: 132686
uuaauccuacaauugcggu

SEQ ID NO: 132688 - RNA, 19 nt, Artificial Sequence
  Description of Artificial Sequence: Synthetic oligonucleotide
  Sense strand starting at position 898 of SEQ ID NO: 1703
aaggccauugugggaauua

SEQ ID NO: 132689 - RNA, 19 nt, Artificial Sequence
  Description of Artificial Sequence: Synthetic oligonucleotide
  Antisense strand to SEQ ID NO: 132688
uaauucccacaauggccuu

SEQ ID NO: 132690 - RNA, 19 nt, Artificial Sequence
  Description of Artificial Sequence: Synthetic oligonucleotide
  Sense strand starting at position 758 of SEQ ID NO: 1703
aauggaaugugguucucaa

SEQ ID NO: 132691 - RNA, 19 nt, Artificial Sequence
  Description of Artificial Sequence: Synthetic oligonucleotide
  Antisense strand to SEQ ID NO: 132690
uugagaaccacauuccauu

SEQ ID NO: 132692 - RNA, 19 nt, Artificial Sequence
  Description of Artificial Sequence: Synthetic oligonucleotide
  Sense strand starting at position 753 of SEQ ID NO: 1703
uaagaaauggaaugugguu

SEQ ID NO: 132693 - RNA, 19 nt, Artificial Sequence
  Description of Artificial Sequence: Synthetic oligonucleotide
  Antisense strand to SEQ ID NO: 132692
aaccacauuccauuucuua

SEQ ID NO: 132694 - RNA, 19 nt, Artificial Sequence
  Description of Artificial Sequence: Synthetic oligonucleotide
  Sense strand starting at position 731 of SEQ ID NO: 1703
uccuuugcucuagagauau

SEQ ID NO: 132695 - RNA, 19 nt, Artificial Sequence
  Description of Artificial Sequence: Synthetic oligonucleotide
  Antisense strand to SEQ ID NO: 132694
auaucucuagagcaaagga

SEQ ID NO: 132696 - RNA, 19 nt, Artificial Sequence
  Description of Artificial Sequence: Synthetic oligonucleotide
  Sense strand starting at position 729 of SEQ ID NO: 1703
uuuccuuugcucuagagau

SEQ ID NO: 132697 - RNA, 19 nt, Artificial Sequence
  Description of Artificial Sequence: Synthetic oligonucleotide
  Antisense strand to SEQ ID NO: 132696
aucucuagagcaaaggaaa

SEQ ID NO: 132698 - RNA, 19 nt, Artificial Sequence
  Description of Artificial Sequence: Synthetic oligonucleotide
  Sense strand starting at position 630 of SEQ ID NO: 1703
ggccaucaccaaggauaaa

SEQ ID NO: 132699 - RNA, 19 nt, Artificial Sequence
  Description of Artificial Sequence: Synthetic oligonucleotide
  Antisense strand to SEQ ID NO: 132698
uuuauccuuggugauggcc

SEQ ID NO: 132700 - RNA, 19 nt, Artificial Sequence
  Description of Artificial Sequence: Synthetic oligonucleotide
  Sense strand starting at position 602 of SEQ ID NO: 1703
uggucacugguggaacaau

SEQ ID NO: 132701 - RNA, 19 nt, Artificial Sequence
  Description of Artificial Sequence: Synthetic oligonucleotide
  Antisense strand to SEQ ID NO: 132700
auuguuccaccagugacca

SEQ ID NO: 132702 - RNA, 19 nt, Artificial Sequence
  Description of Artificial Sequence: Synthetic oligonucleotide
  Sense strand starting at position 592 of SEQ ID NO: 1703
cggaaagucuuggucacug

SEQ ID NO: 132703 - RNA, 19 nt, Artificial Sequence
  Description of Artificial Sequence: Synthetic oligonucleotide
  Antisense strand to SEQ ID NO: 132702
cagugaccaagacuuuccg

SEQ ID NO: 132704 - RNA, 19 nt, Artificial Sequence
  Description of Artificial Sequence: Synthetic oligonucleotide
  Sense strand starting at position 591 of SEQ ID NO: 1703
ucggaaagucuuggucacu

SEQ ID NO: 132705 - RNA, 19 nt, Artificial Sequence
  Description of Artificial Sequence: Synthetic oligonucleotide
  Antisense strand to SEQ ID NO: 132704
agugaccaagacuuuccga

SEQ ID NO: 132706 - RNA, 19 nt, Artificial Sequence
  Description of Artificial Sequence: Synthetic oligonucleotide
  Sense strand starting at position 525 of SEQ ID NO: 1703
cuugucaugggugggcaaa

SEQ ID NO: 132707 - RNA, 19 nt, Artificial Sequence
  Description of Artificial Sequence: Synthetic oligonucleotide
  Antisense strand to SEQ ID NO: 132706
uuugcccacccaugacaag

SEQ ID NO: 132708 - RNA, 19 nt, Artificial Sequence
  Description of Artificial Sequence: Synthetic oligonucleotide
  Sense strand starting at position 524 of SEQ ID NO: 1703
ucuugucaugggugggcaa

SEQ ID NO: 132709 - RNA, 19 nt, Artificial Sequence
  Description of Artificial Sequence: Synthetic oligonucleotide
  Antisense strand to SEQ ID NO: 132708
uugcccacccaugacaaga

SEQ ID NO: 132710 - RNA, 19 nt, Artificial Sequence
  Description of Artificial Sequence: Synthetic oligonucleotide
  Sense strand starting at position 471 of SEQ ID NO: 1703
gucacagccagguauaaag

SEQ ID NO: 132711 - RNA, 19 nt, Artificial Sequence
  Description of Artificial Sequence: Synthetic oligonucleotide
  Antisense strand to SEQ ID NO: 132710
cuuuauaccuggcugugac

SEQ ID NO: 132712 - RNA, 19 nt, Artificial Sequence
  Description of Artificial Sequence: Synthetic oligonucleotide
  Sense strand starting at position 469 of SEQ ID NO: 1703
uggucacagccagguauaa

SEQ ID NO: 132713 - RNA, 19 nt, Artificial Sequence
  Description of Artificial Sequence: Synthetic oligonucleotide
  Antisense strand to SEQ ID NO: 132712
uuauaccuggcugugacca

SEQ ID NO: 132714 - RNA, 19 nt, Artificial Sequence
  Description of Artificial Sequence: Synthetic oligonucleotide
  Sense strand starting at position 101 of SEQ ID NO: 1703
agcaaagcaguuugagaaa

SEQ ID NO: 132715 - RNA, 19 nt, Artificial Sequence
  Description of Artificial Sequence: Synthetic oligonucleotide
  Antisense strand to SEQ ID NO: 132714
uuucucaaacugcuuugcu

SEQ ID NO: 132716 - RNA, 19 nt, Artificial Sequence
  Description of Artificial Sequence: Synthetic oligonucleotide
  Sense strand starting at position 66 of SEQ ID NO: 1703
aaggguguuuccucccaaa

SEQ ID NO: 132717 - RNA, 19 nt, Artificial Sequence
  Description of Artificial Sequence: Synthetic oligonucleotide
  Antisense strand to SEQ ID NO: 132716
uuugggaggaaacacccuu

SEQ ID NO: 132718 - RNA, 19 nt, Artificial Sequence
  Description of Artificial Sequence: Synthetic oligonucleotide
  Sense strand starting at position 246 of SEQ ID NO: 1704
acgcauuucccaugucacu

SEQ ID NO: 132719 - RNA, 19 nt, Artificial Sequence
  Description of Artificial Sequence: Synthetic oligonucleotide
  Antisense strand to SEQ ID NO: 132718
agugacaugggaaaugcgu

SEQ ID NO: 132720 - RNA, 19 nt, Artificial Sequence
  Description of Artificial Sequence: Synthetic oligonucleotide
  Sense strand starting at position 262 of SEQ ID NO: 1704
acuuaccuuuccuggaguu

SEQ ID NO: 132721 - RNA, 19 nt, Artificial Sequence
  Description of Artificial Sequence: Synthetic oligonucleotide
  Antisense strand to SEQ ID NO: 132720
aacuccaggaaagguaagu

SEQ ID NO: 132722 - RNA, 19 nt, Artificial Sequence
  Description of Artificial Sequence: Synthetic oligonucleotide
  Sense strand starting at position 348 of SEQ ID NO: 1704
gagcuuccucugugaaaca

SEQ ID NO: 132723 - RNA, 19 nt, Artificial Sequence
  Description of Artificial Sequence: Synthetic oligonucleotide
  Antisense strand to SEQ ID NO: 132722
uguuucacagaggaagcuc

SEQ ID NO: 132724 - RNA, 19 nt, Artificial Sequence
  Description of Artificial Sequence: Synthetic oligonucleotide
  Sense strand starting at position 670 of SEQ ID NO: 1704
gaugcugauugguguuuau

SEQ ID NO: 132725 - RNA, 19 nt, Artificial Sequence
  Description of Artificial Sequence: Synthetic oligonucleotide
  Antisense strand to SEQ ID NO: 132724
auaaacaccaaucagcauc

SEQ ID NO: 132726 - RNA, 19 nt, Artificial Sequence
  Description of Artificial Sequence: Synthetic oligonucleotide
  Sense strand starting at position 673 of SEQ ID NO: 1704
gcugauugguguuuauugu

SEQ ID NO: 132727 - RNA, 19 nt, Artificial Sequence
  Description of Artificial Sequence: Synthetic oligonucleotide
  Antisense strand to SEQ ID NO: 132726
acaauaaacaccaaucagc

SEQ ID NO: 132728 - RNA, 19 nt, Artificial Sequence
  Description of Artificial Sequence: Synthetic oligonucleotide
  Sense strand starting at position 674 of SEQ ID NO: 1704
cugauugguguuuauugua

SEQ ID NO: 132729 - RNA, 19 nt, Artificial Sequence
  Description of Artificial Sequence: Synthetic oligonucleotide
  Antisense strand to SEQ ID NO: 132728
uacaauaaacaccaaucag

SEQ ID NO: 132730 - RNA, 19 nt, Artificial Sequence
  Description of Artificial Sequence: Synthetic oligonucleotide
  Sense strand starting at position 677 of SEQ ID NO: 1704
auugguguuuauuguaaca

SEQ ID NO: 132731 - RNA, 19 nt, Artificial Sequence
  Description of Artificial Sequence: Synthetic oligonucleotide
  Antisense strand to SEQ ID NO: 132730
uguuacaauaaacaccaau

SEQ ID NO: 132732 - RNA, 19 nt, Artificial Sequence
  Description of Artificial Sequence: Synthetic oligonucleotide
  Sense strand starting at position 679 of SEQ ID NO: 1704
ugguguuuauuguaacaaa

SEQ ID NO: 132733 - RNA, 19 nt, Artificial Sequence
  Description of Artificial Sequence: Synthetic oligonucleotide
  Antisense strand to SEQ ID NO: 132732
uuuguuacaauaaacacca

SEQ ID NO: 132734 - RNA, 19 nt, Artificial Sequence
  Description of Artificial Sequence: Synthetic oligonucleotide
  Sense strand starting at position 759 of SEQ ID NO: 1704
ccagguggccucugaagaa

SEQ ID NO: 132735 - RNA, 19 nt, Artificial Sequence
  Description of Artificial Sequence: Synthetic oligonucleotide
  Antisense strand to SEQ ID NO: 132734
uucuucagaggccaccugg

SEQ ID NO: 132736 - RNA, 19 nt, Artificial Sequence
  Description of Artificial Sequence: Synthetic oligonucleotide
  Sense strand starting at position 849 of SEQ ID NO: 1704
acuguucuuggcugucaga

SEQ ID NO: 132737 - RNA, 19 nt, Artificial Sequence
  Description of Artificial Sequence: Synthetic oligonucleotide
  Antisense strand to SEQ ID NO: 132736
ucugacagccaagaacagu

SEQ ID NO: 132738 - RNA, 19 nt, Artificial Sequence
  Description of Artificial Sequence: Synthetic oligonucleotide
  Sense strand starting at position 862 of SEQ ID NO: 1704
gucagagcuuagcagguaa

SEQ ID NO: 132739 - RNA, 19 nt, Artificial Sequence
  Description of Artificial Sequence: Synthetic oligonucleotide
  Antisense strand to SEQ ID NO: 132738
uuaccugcuaagcucugac

SEQ ID NO: 132740 - RNA, 19 nt, Artificial Sequence
  Description of Artificial Sequence: Synthetic oligonucleotide
  Sense strand starting at position 895 of SEQ ID NO: 1704
gaugaagaguuugcgaaga

SEQ ID NO: 132741 - RNA, 19 nt, Artificial Sequence
  Description of Artificial Sequence: Synthetic oligonucleotide
  Antisense strand to SEQ ID NO: 132740
ucuucgcaaacucuucauc

SEQ ID NO: 132742 - RNA, 19 nt, Artificial Sequence
  Description of Artificial Sequence: Synthetic oligonucleotide
  Sense strand starting at position 897 of SEQ ID NO: 1704
ugaagaguuugcgaagauu

SEQ ID NO: 132743 - RNA, 19 nt, Artificial Sequence
  Description of Artificial Sequence: Synthetic oligonucleotide
  Antisense strand to SEQ ID NO: 132742
aaucuucgcaaacucuuca

SEQ ID NO: 132744 - RNA, 19 nt, Artificial Sequence
  Description of Artificial Sequence: Synthetic oligonucleotide
  Sense strand starting at position 900 of SEQ ID NO: 1704
agaguuugcgaagauuccu

SEQ ID NO: 132745 - RNA, 19 nt, Artificial Sequence
  Description of Artificial Sequence: Synthetic oligonucleotide
  Antisense strand to SEQ ID NO: 132744
aggaaucuucgcaaacucu

SEQ ID NO: 132746 - RNA, 19 nt, Artificial Sequence
  Description of Artificial Sequence: Synthetic oligonucleotide
  Sense strand starting at position 905 of SEQ ID NO: 1704
uugcgaagauuccucaucu

SEQ ID NO: 132747 - RNA, 19 nt, Artificial Sequence
  Description of Artificial Sequence: Synthetic oligonucleotide
  Antisense strand to SEQ ID NO: 132746
agaugaggaaucuucgcaa

SEQ ID NO: 132748 - RNA, 19 nt, Artificial Sequence
  Description of Artificial Sequence: Synthetic oligonucleotide
  Sense strand starting at position 906 of SEQ ID NO: 1704
ugcgaagauuccucaucug

SEQ ID NO: 132749 - RNA, 19 nt, Artificial Sequence
  Description of Artificial Sequence: Synthetic oligonucleotide
  Antisense strand to SEQ ID NO: 132748
cagaugaggaaucuucgca

SEQ ID NO: 132750 - RNA, 19 nt, Artificial Sequence
  Description of Artificial Sequence: Synthetic oligonucleotide
  Sense strand starting at position 1000 of SEQ ID NO: 1704
uggguauacuguuuccaau

SEQ ID NO: 132751 - RNA, 19 nt, Artificial Sequence
  Description of Artificial Sequence: Synthetic oligonucleotide
  Antisense strand to SEQ ID NO: 132750
auuggaaacaguauaccca

SEQ ID NO: 132752 - RNA, 19 nt, Artificial Sequence
  Description of Artificial Sequence: Synthetic oligonucleotide
  Sense strand starting at position 1002 of SEQ ID NO: 1704
gguauacuguuuccaauau

SEQ ID NO: 132753 - RNA, 19 nt, Artificial Sequence
  Description of Artificial Sequence: Synthetic oligonucleotide
  Antisense strand to SEQ ID NO: 132752
auauuggaaacaguauacc

SEQ ID NO: 132754 - RNA, 19 nt, Artificial Sequence
  Description of Artificial Sequence: Synthetic oligonucleotide
  Sense strand starting at position 1003 of SEQ ID NO: 1704
guauacuguuuccaauaug

SEQ ID NO: 132755 - RNA, 19 nt, Artificial Sequence
  Description of Artificial Sequence: Synthetic oligonucleotide
  Antisense strand to SEQ ID NO: 132754
cauauuggaaacaguauac

SEQ ID NO: 132756 - RNA, 19 nt, Artificial Sequence
  Description of Artificial Sequence: Synthetic oligonucleotide
  Sense strand starting at position 1023 of SEQ ID NO: 1704
uucugaaauuuagaaugcu

SEQ ID NO: 132757 - RNA, 19 nt, Artificial Sequence
  Description of Artificial Sequence: Synthetic oligonucleotide
  Antisense strand to SEQ ID NO: 132756
agcauucuaaauuucagaa

SEQ ID NO: 132758 - RNA, 19 nt, Artificial Sequence
  Description of Artificial Sequence: Synthetic oligonucleotide
  Sense strand starting at position 1032 of SEQ ID NO: 1704
uuagaaugcucauugaaua

SEQ ID NO: 132759 - RNA, 19 nt, Artificial Sequence
  Description of Artificial Sequence: Synthetic oligonucleotide
  Antisense strand to SEQ ID NO: 132758
uauucaaugagcauucuaa

SEQ ID NO: 132760 - RNA, 19 nt, Artificial Sequence
  Description of Artificial Sequence: Synthetic oligonucleotide
  Sense strand starting at position 1662 of SEQ ID NO: 1704
gcuguuuagucccuggaca

SEQ ID NO: 132761 - RNA, 19 nt, Artificial Sequence
  Description of Artificial Sequence: Synthetic oligonucleotide
  Antisense strand to SEQ ID NO: 132760
uguccagggacuaaacagc

SEQ ID NO: 132762 - RNA, 19 nt, Artificial Sequence
  Description of Artificial Sequence: Synthetic oligonucleotide
  Sense strand starting at position 1850 of SEQ ID NO: 1704
cgcagcgucugcuagugaa

SEQ ID NO: 132763 - RNA, 19 nt, Artificial Sequence
  Description of Artificial Sequence: Synthetic oligonucleotide
  Antisense strand to SEQ ID NO: 132762
uucacuagcagacgcugcg

SEQ ID NO: 132764 - RNA, 19 nt, Artificial Sequence
  Description of Artificial Sequence: Synthetic oligonucleotide
  Sense strand starting at position 2089 of SEQ ID NO: 1704
uacucuggcaggugugaaa

SEQ ID NO: 132765 - RNA, 19 nt, Artificial Sequence
  Description of Artificial Sequence: Synthetic oligonucleotide
  Antisense strand to SEQ ID NO: 132764
uuucacaccugccagagua

SEQ ID NO: 132766 - RNA, 19 nt, Artificial Sequence
  Description of Artificial Sequence: Synthetic oligonucleotide
  Sense strand starting at position 2100 of SEQ ID NO: 1704
gugugaaaguccuuaguuu

SEQ ID NO: 132767 - RNA, 19 nt, Artificial Sequence
  Description of Artificial Sequence: Synthetic oligonucleotide
  Antisense strand to SEQ ID NO: 132766
aaacuaaggacuuucacac

SEQ ID NO: 132768 - RNA, 19 nt, Artificial Sequence
  Description of Artificial Sequence: Synthetic oligonucleotide
  Sense strand starting at position 2101 of SEQ ID NO: 1704
ugugaaaguccuuaguuua

SEQ ID NO: 132769 - RNA, 19 nt, Artificial Sequence
  Description of Artificial Sequence: Synthetic oligonucleotide
  Antisense strand to SEQ ID NO: 132768
uaaacuaaggacuuucaca

SEQ ID NO: 132770 - RNA, 19 nt, Artificial Sequence
  Description of Artificial Sequence: Synthetic oligonucleotide
  Sense strand starting at position 2269 of SEQ ID NO: 1704
ugggaaguguuaccaagaa

SEQ ID NO: 132771 - RNA, 19 nt, Artificial Sequence
  Description of Artificial Sequence: Synthetic oligonucleotide
  Antisense strand to SEQ ID NO: 132770
uucuugguaacacuuccca

SEQ ID NO: 132772 - RNA, 19 nt, Artificial Sequence
  Description of Artificial Sequence: Synthetic oligonucleotide
  Sense strand starting at position 2339 of SEQ ID NO: 1704
gaucuaaagcaauggucau

SEQ ID NO: 132773 - RNA, 19 nt, Artificial Sequence
  Description of Artificial Sequence: Synthetic oligonucleotide
  Antisense strand to SEQ ID NO: 132772
augaccauugcuuuagauc

SEQ ID NO: 132774 - RNA, 19 nt, Artificial Sequence
  Description of Artificial Sequence: Synthetic oligonucleotide
  Sense strand starting at position 2671 of SEQ ID NO: 1704
aaacaaugguaaugggagu

SEQ ID NO: 132775 - RNA, 19 nt, Artificial Sequence
  Description of Artificial Sequence: Synthetic oligonucleotide
  Antisense strand to SEQ ID NO: 132774
acucccauuaccauuguuu

SEQ ID NO: 132776 - RNA, 19 nt, Artificial Sequence
  Description of Artificial Sequence: Synthetic oligonucleotide
  Sense strand starting at position 2731 of SEQ ID NO: 1704
ugaacuuggcugggagaga

SEQ ID NO: 132777 - RNA, 19 nt, Artificial Sequence
  Description of Artificial Sequence: Synthetic oligonucleotide
  Antisense strand to SEQ ID NO: 132776
ucucucccagccaaguuca

SEQ ID NO: 132778 - RNA, 19 nt, Artificial Sequence
  Description of Artificial Sequence: Synthetic oligonucleotide
  Sense strand starting at position 3001 of SEQ ID NO: 1704
gauggcuugugucugugaa

SEQ ID NO: 132779 - RNA, 19 nt, Artificial Sequence
  Description of Artificial Sequence: Synthetic oligonucleotide
  Antisense strand to SEQ ID NO: 132778
uucacagacacaagccauc

SEQ ID NO: 132780 - RNA, 19 nt, Artificial Sequence
  Description of Artificial Sequence: Synthetic oligonucleotide
  Sense strand starting at position 3002 of SEQ ID NO: 1704
auggcuugugucugugaag

SEQ ID NO: 132781 - RNA, 19 nt, Artificial Sequence
  Description of Artificial Sequence: Synthetic oligonucleotide
  Antisense strand to SEQ ID NO: 132780
cuucacagacacaagccau

SEQ ID NO: 132782 - RNA, 19 nt, Artificial Sequence
  Description of Artificial Sequence: Synthetic oligonucleotide
  Sense strand starting at position 3005 of SEQ ID NO: 1704
gcuugugucugugaagcag

SEQ ID NO: 132783 - RNA, 19 nt, Artificial Sequence
  Description of Artificial Sequence: Synthetic oligonucleotide
  Antisense strand to SEQ ID NO: 132782
cugcuucacagacacaagc

SEQ ID NO: 132784 - RNA, 19 nt, Artificial Sequence
  Description of Artificial Sequence: Synthetic oligonucleotide
  Sense strand starting at position 3009 of SEQ ID NO: 1704
gugucugugaagcagaagu

SEQ ID NO: 132785 - RNA, 19 nt, Artificial Sequence
  Description of Artificial Sequence: Synthetic oligonucleotide
  Antisense strand to SEQ ID NO: 132784
acuucugcuucacagacac

SEQ ID NO: 132786 - RNA, 19 nt, Artificial Sequence
  Description of Artificial Sequence: Synthetic oligonucleotide
  Sense strand starting at position 3011 of SEQ ID NO: 1704
gucugugaagcagaaguua

SEQ ID NO: 132787 - RNA, 19 nt, Artificial Sequence
  Description of Artificial Sequence: Synthetic oligonucleotide
  Antisense strand to SEQ ID NO: 132786
uaacuucugcuucacagac

SEQ ID NO: 132788 - RNA, 19 nt, Artificial Sequence
  Description of Artificial Sequence: Synthetic oligonucleotide
  Sense strand starting at position 3037 of SEQ ID NO: 1704
cugagacucugccacugua

SEQ ID NO: 132789 - RNA, 19 nt, Artificial Sequence
  Description of Artificial Sequence: Synthetic oligonucleotide
  Antisense strand to SEQ ID NO: 132788
uacaguggcagagucucag

SEQ ID NO: 132790 - RNA, 19 nt, Artificial Sequence
  Description of Artificial Sequence: Synthetic oligonucleotide
  Sense strand starting at position 3191 of SEQ ID NO: 1704
gguguaugagaccagucau

SEQ ID NO: 132791 - RNA, 19 nt, Artificial Sequence
  Description of Artificial Sequence: Synthetic oligonucleotide
  Antisense strand to SEQ ID NO: 132790
augacuggucucauacacc

SEQ ID NO: 132792 - RNA, 19 nt, Artificial Sequence
  Description of Artificial Sequence: Synthetic oligonucleotide
  Sense strand starting at position 3397 of SEQ ID NO: 1704
gccugaguuugggaguuua

SEQ ID NO: 132793 - RNA, 19 nt, Artificial Sequence
  Description of Artificial Sequence: Synthetic oligonucleotide
  Antisense strand to SEQ ID NO: 132792
uaaacucccaaacucaggc

SEQ ID NO: 132794 - RNA, 19 nt, Artificial Sequence
  Description of Artificial Sequence: Synthetic oligonucleotide
  Sense strand starting at position 3667 of SEQ ID NO: 1704
acuagugcaugccugaauu

SEQ ID NO: 132795 - RNA, 19 nt, Artificial Sequence
  Description of Artificial Sequence: Synthetic oligonucleotide
  Antisense strand to SEQ ID NO: 132794
aauucaggcaugcacuagu

SEQ ID NO: 132796 - RNA, 19 nt, Artificial Sequence
  Description of Artificial Sequence: Synthetic oligonucleotide
  Sense strand starting at position 603 of SEQ ID NO: 1705
cgaauuagauauugaucca

SEQ ID NO: 132797 - RNA, 19 nt, Artificial Sequence
  Description of Artificial Sequence: Synthetic oligonucleotide
  Antisense strand to SEQ ID NO: 132796
uggaucaauaucuaauucg

SEQ ID NO: 132798 - RNA, 19 nt, Artificial Sequence
  Description of Artificial Sequence: Synthetic oligonucleotide
  Sense strand starting at position 1209 of SEQ ID NO: 1705
acaguaguggugugagcau

SEQ ID NO: 132799 - RNA, 19 nt, Artificial Sequence
  Description of Artificial Sequence: Synthetic oligonucleotide
  Antisense strand to SEQ ID NO: 132798
augcucacaccacuacugu

SEQ ID NO: 132800 - RNA, 19 nt, Artificial Sequence
  Description of Artificial Sequence: Synthetic oligonucleotide
  Sense strand starting at position 1644 of SEQ ID NO: 1705
ucaaaucccugggcugaaa

SEQ ID NO: 132801 - RNA, 19 nt, Artificial Sequence
  Description of Artificial Sequence: Synthetic oligonucleotide
  Antisense strand to SEQ ID NO: 132800
uuucagcccagggauuuga

SEQ ID NO: 132802 - RNA, 19 nt, Artificial Sequence
  Description of Artificial Sequence: Synthetic oligonucleotide
  Sense strand starting at position 1953 of SEQ ID NO: 1705
ggauguagucuagaagguu

SEQ ID NO: 132803 - RNA, 19 nt, Artificial Sequence
  Description of Artificial Sequence: Synthetic oligonucleotide
  Antisense strand to SEQ ID NO: 132802
aaccuucuagacuacaucc

SEQ ID NO: 132804 - RNA, 19 nt, Artificial Sequence
  Description of Artificial Sequence: Synthetic oligonucleotide
  Sense strand starting at position 1961 of SEQ ID NO: 1705
ucuagaagguucucagauc

SEQ ID NO: 132805 - RNA, 19 nt, Artificial Sequence
  Description of Artificial Sequence: Synthetic oligonucleotide
  Antisense strand to SEQ ID NO: 132804
gaucugagaaccuucuaga

SEQ ID NO: 132806 - RNA, 19 nt, Artificial Sequence
  Description of Artificial Sequence: Synthetic oligonucleotide
  Sense strand starting at position 1962 of SEQ ID NO: 1705
cuagaagguucucagaucu

SEQ ID NO: 132807 - RNA, 19 nt, Artificial Sequence
  Description of Artificial Sequence: Synthetic oligonucleotide
  Antisense strand to SEQ ID NO: 132806
agaucugagaaccuucuag

SEQ ID NO: 132808 - RNA, 19 nt, Artificial Sequence
  Description of Artificial Sequence: Synthetic oligonucleotide
  Sense strand starting at position 2027 of SEQ ID NO: 1705
uccuguggguccuuagaag

SEQ ID NO: 132809 - RNA, 19 nt, Artificial Sequence
  Description of Artificial Sequence: Synthetic oligonucleotide
  Antisense strand to SEQ ID NO: 132808
cuucuaaggacccacagga

SEQ ID NO: 132810 - RNA, 19 nt, Artificial Sequence
  Description of Artificial Sequence: Synthetic oligonucleotide
  Sense strand starting at position 2226 of SEQ ID NO: 1705
cuguauucaguucgugaag

SEQ ID NO: 132811 - RNA, 19 nt, Artificial Sequence
  Description of Artificial Sequence: Synthetic oligonucleotide
  Antisense strand to SEQ ID NO: 132810
cuucacgaacugaauacag

SEQ ID NO: 132812 - RNA, 19 nt, Artificial Sequence
  Description of Artificial Sequence: Synthetic oligonucleotide
  Sense strand starting at position 2228 of SEQ ID NO: 1705
guauucaguucgugaagca

SEQ ID NO: 132813 - RNA, 19 nt, Artificial Sequence
  Description of Artificial Sequence: Synthetic oligonucleotide
  Antisense strand to SEQ ID NO: 132812
ugcuucacgaacugaauac

SEQ ID NO: 132814 - RNA, 19 nt, Artificial Sequence
  Description of Artificial Sequence: Synthetic oligonucleotide
  Sense strand starting at position 2517 of SEQ ID NO: 1705
ugcagugagccagauuugu

SEQ ID NO: 132815 - RNA, 19 nt, Artificial Sequence
  Description of Artificial Sequence: Synthetic oligonucleotide
  Antisense strand to SEQ ID NO: 132814
acaaaucuggcucacugca

SEQ ID NO: 132816 - RNA, 19 nt, Artificial Sequence
  Description of Artificial Sequence: Synthetic oligonucleotide
  Sense strand starting at position 2523 of SEQ ID NO: 1705
gagccagauuugugccacu

SEQ ID NO: 132817 - RNA, 19 nt, Artificial Sequence
  Description of Artificial Sequence: Synthetic oligonucleotide
  Antisense strand to SEQ ID NO: 132816
aguggcacaaaucuggcuc

SEQ ID NO: 132818 - RNA, 19 nt, Artificial Sequence
  Description of Artificial Sequence: Synthetic oligonucleotide
  Sense strand starting at position 2526 of SEQ ID NO: 1705
ccagauuugugccacugca

SEQ ID NO: 132819 - RNA, 19 nt, Artificial Sequence
  Description of Artificial Sequence: Synthetic oligonucleotide
  Antisense strand to SEQ ID NO: 132818
ugcaguggcacaaaucugg

SEQ ID NO: 132820 - RNA, 19 nt, Artificial Sequence
  Description of Artificial Sequence: Synthetic oligonucleotide
  Sense strand starting at position 2645 of SEQ ID NO: 1705
ucauaaucuugagugugag

SEQ ID NO: 132821 - RNA, 19 nt, Artificial Sequence
  Description of Artificial Sequence: Synthetic oligonucleotide
  Antisense strand to SEQ ID NO: 132820
cucacacucaagauuauga

SEQ ID NO: 132822 - RNA, 19 nt, Artificial Sequence
  Description of Artificial Sequence: Synthetic oligonucleotide
  Sense strand starting at position 2648 of SEQ ID NO: 1705
uaaucuugagugugaggca

SEQ ID NO: 132823 - RNA, 19 nt, Artificial Sequence
  Description of Artificial Sequence: Synthetic oligonucleotide
  Antisense strand to SEQ ID NO: 132822
ugccucacacucaagauua

SEQ ID NO: 132824 - RNA, 19 nt, Artificial Sequence
  Description of Artificial Sequence: Synthetic oligonucleotide
  Sense strand starting at position 2794 of SEQ ID NO: 1705
aggagucaucccuacgaua

SEQ ID NO: 132825 - RNA, 19 nt, Artificial Sequence
  Description of Artificial Sequence: Synthetic oligonucleotide
  Antisense strand to SEQ ID NO: 132824
uaucguagggaugacuccu

SEQ ID NO: 132826 - RNA, 19 nt, Artificial Sequence
  Description of Artificial Sequence: Synthetic oligonucleotide
  Sense strand starting at position 2796 of SEQ ID NO: 1705
gagucaucccuacgauauc

SEQ ID NO: 132827 - RNA, 19 nt, Artificial Sequence
  Description of Artificial Sequence: Synthetic oligonucleotide
  Antisense strand to SEQ ID NO: 132826
gauaucguagggaugacuc

SEQ ID NO: 132828 - RNA, 19 nt, Artificial Sequence
  Description of Artificial Sequence: Synthetic oligonucleotide
  Sense strand starting at position 2797 of SEQ ID NO: 1705
agucaucccuacgauauca

SEQ ID NO: 132829 - RNA, 19 nt, Artificial Sequence
  Description of Artificial Sequence: Synthetic oligonucleotide
  Antisense strand to SEQ ID NO: 132828
ugauaucguagggaugacu

SEQ ID NO: 132830 - RNA, 19 nt, Artificial Sequence
  Description of Artificial Sequence: Synthetic oligonucleotide
  Sense strand starting at position 2802 of SEQ ID NO: 1705
ucccuacgauaucagaaua

SEQ ID NO: 132831 - RNA, 19 nt, Artificial Sequence
  Description of Artificial Sequence: Synthetic oligonucleotide
  Antisense strand to SEQ ID NO: 132830
uauucugauaucguaggga

SEQ ID NO: 132832 - RNA, 19 nt, Artificial Sequence
  Description of Artificial Sequence: Synthetic oligonucleotide
  Sense strand starting at position 2828 of SEQ ID NO: 1705
caauguauugaauggucuu

SEQ ID NO: 132833 - RNA, 19 nt, Artificial Sequence
  Description of Artificial Sequence: Synthetic oligonucleotide
  Antisense strand to SEQ ID NO: 132832
aagaccauucaauacauug

SEQ ID NO: 132834 - RNA, 19 nt, Artificial Sequence
  Description of Artificial Sequence: Synthetic oligonucleotide
  Sense strand starting at position 2834 of SEQ ID NO: 1705
auugaauggucuuugggau

SEQ ID NO: 132835 - RNA, 19 nt, Artificial Sequence
  Description of Artificial Sequence: Synthetic oligonucleotide
  Antisense strand to SEQ ID NO: 132834
aucccaaagaccauucaau

SEQ ID NO: 132836 - RNA, 19 nt, Artificial Sequence
  Description of Artificial Sequence: Synthetic oligonucleotide
  Sense strand starting at position 2835 of SEQ ID NO: 1705
uugaauggucuuugggauu

SEQ ID NO: 132837 - RNA, 19 nt, Artificial Sequence
  Description of Artificial Sequence: Synthetic oligonucleotide
  Antisense strand to SEQ ID NO: 132836
aaucccaaagaccauucaa

SEQ ID NO: 132838 - RNA, 19 nt, Artificial Sequence
  Description of Artificial Sequence: Synthetic oligonucleotide
  Sense strand starting at position 3860 of SEQ ID NO: 1705
uucuguuaaguacaccaua

SEQ ID NO: 132839 - RNA, 19 nt, Artificial Sequence
  Description of Artificial Sequence: Synthetic oligonucleotide
  Antisense strand to SEQ ID NO: 132838
uaugguguacuuaacagaa

SEQ ID NO: 132840 - RNA, 19 nt, Artificial Sequence
  Description of Artificial Sequence: Synthetic oligonucleotide
  Sense strand starting at position 3863 of SEQ ID NO: 1705
uguuaaguacaccauauau

SEQ ID NO: 132841 - RNA, 19 nt, Artificial Sequence
  Description of Artificial Sequence: Synthetic oligonucleotide
  Antisense strand to SEQ ID NO: 132840
auauaugguguacuuaaca

SEQ ID NO: 132842 - RNA, 19 nt, Artificial Sequence
  Description of Artificial Sequence: Synthetic oligonucleotide
  Sense strand starting at position 3865 of SEQ ID NO: 1705
uuaaguacaccauauaugu

SEQ ID NO: 132843 - RNA, 19 nt, Artificial Sequence
  Description of Artificial Sequence: Synthetic oligonucleotide
  Antisense strand to SEQ ID NO: 132842
acauauaugguguacuuaa

SEQ ID NO: 132844 - RNA, 19 nt, Artificial Sequence
  Description of Artificial Sequence: Synthetic oligonucleotide
  Sense strand starting at position 3897 of SEQ ID NO: 1705
gaugaauaaccugguucua

SEQ ID NO: 132845 - RNA, 19 nt, Artificial Sequence
  Description of Artificial Sequence: Synthetic oligonucleotide
  Antisense strand to SEQ ID NO: 132844
uagaaccagguuauucauc

SEQ ID NO: 132846 - RNA, 19 nt, Artificial Sequence
  Description of Artificial Sequence: Synthetic oligonucleotide
  Sense strand starting at position 3899 of SEQ ID NO: 1705
ugaauaaccugguucuaug

SEQ ID NO: 132847 - RNA, 19 nt, Artificial Sequence
  Description of Artificial Sequence: Synthetic oligonucleotide
  Antisense strand to SEQ ID NO: 132846
cauagaaccagguuauuca

SEQ ID NO: 132848 - RNA, 19 nt, Artificial Sequence
  Description of Artificial Sequence: Synthetic oligonucleotide
  Sense strand starting at position 3943 of SEQ ID NO: 1706
gggugauguaaaggucaug

SEQ ID NO: 132849 - RNA, 19 nt, Artificial Sequence
  Description of Artificial Sequence: Synthetic oligonucleotide
  Antisense strand to SEQ ID NO: 132848
caugaccuuuacaucaccc

SEQ ID NO: 132850 - RNA, 19 nt, Artificial Sequence
  Description of Artificial Sequence: Synthetic oligonucleotide
  Sense strand starting at position 3848 of SEQ ID NO: 1706
uguuaaguagaccacauau

SEQ ID NO: 132851 - RNA, 19 nt, Artificial Sequence
  Description of Artificial Sequence: Synthetic oligonucleotide
  Antisense strand to SEQ ID NO: 132850
auauguggucuacuuaaca

SEQ ID NO: 132852 - RNA, 19 nt, Artificial Sequence
  Description of Artificial Sequence: Synthetic oligonucleotide
  Sense strand starting at position 3624 of SEQ ID NO: 1706
gguuaucgaguggguguaa

SEQ ID NO: 132853 - RNA, 19 nt, Artificial Sequence
  Description of Artificial Sequence: Synthetic oligonucleotide
  Antisense strand to SEQ ID NO: 132852
uuacacccacucgauaacc

SEQ ID NO: 132854 - RNA, 19 nt, Artificial Sequence
  Description of Artificial Sequence: Synthetic oligonucleotide
  Sense strand starting at position 3623 of SEQ ID NO: 1706
ggguuaucgagugggugua

SEQ ID NO: 132855 - RNA, 19 nt, Artificial Sequence
  Description of Artificial Sequence: Synthetic oligonucleotide
  Antisense strand to SEQ ID NO: 132854
uacacccacucgauaaccc

SEQ ID NO: 132856 - RNA, 19 nt, Artificial Sequence
  Description of Artificial Sequence: Synthetic oligonucleotide
  Sense strand starting at position 3205 of SEQ ID NO: 1706
ucugcaugucagugaaucu

SEQ ID NO: 132857 - RNA, 19 nt, Artificial Sequence
  Description of Artificial Sequence: Synthetic oligonucleotide
  Antisense strand to SEQ ID NO: 132856
agauucacugacaugcaga

SEQ ID NO: 132858 - RNA, 19 nt, Artificial Sequence
  Description of Artificial Sequence: Synthetic oligonucleotide
  Sense strand starting at position 2925 of SEQ ID NO: 1706
uuaagucuucuuuggaaga

SEQ ID NO: 132859 - RNA, 19 nt, Artificial Sequence
  Description of Artificial Sequence: Synthetic oligonucleotide
  Antisense strand to SEQ ID NO: 132858
ucuuccaaagaagacuuaa

SEQ ID NO: 132860 - RNA, 19 nt, Artificial Sequence
  Description of Artificial Sequence: Synthetic oligonucleotide
  Sense strand starting at position 2923 of SEQ ID NO: 1706
gguuaagucuucuuuggaa

SEQ ID NO: 132861 - RNA, 19 nt, Artificial Sequence
  Description of Artificial Sequence: Synthetic oligonucleotide
  Antisense strand to SEQ ID NO: 132860
uuccaaagaagacuuaacc

SEQ ID NO: 132862 - RNA, 19 nt, Artificial Sequence
  Description of Artificial Sequence: Synthetic oligonucleotide
  Sense strand starting at position 2867 of SEQ ID NO: 1706
ugcucauucugguggagga

SEQ ID NO: 132863 - RNA, 19 nt, Artificial Sequence
  Description of Artificial Sequence: Synthetic oligonucleotide
  Antisense strand to SEQ ID NO: 132862
uccuccaccagaaugagca

SEQ ID NO: 132864 - RNA, 19 nt, Artificial Sequence
  Description of Artificial Sequence: Synthetic oligonucleotide
  Sense strand starting at position 2821 of SEQ ID NO: 1706
uugaauggucuucgggauu

SEQ ID NO: 132865 - RNA, 19 nt, Artificial Sequence
  Description of Artificial Sequence: Synthetic oligonucleotide
  Antisense strand to SEQ ID NO: 132864
aaucccgaagaccauucaa

SEQ ID NO: 132866 - RNA, 19 nt, Artificial Sequence
  Description of Artificial Sequence: Synthetic oligonucleotide
  Sense strand starting at position 2820 of SEQ ID NO: 1706
auugaauggucuucgggau

SEQ ID NO: 132867 - RNA, 19 nt, Artificial Sequence
  Description of Artificial Sequence: Synthetic oligonucleotide
  Antisense strand to SEQ ID NO: 132866
aucccgaagaccauucaau

SEQ ID NO: 132868 - RNA, 19 nt, Artificial Sequence
  Description of Artificial Sequence: Synthetic oligonucleotide
  Sense strand starting at position 2814 of SEQ ID NO: 1706
caauguauugaauggucuu

SEQ ID NO: 132869 - RNA, 19 nt, Artificial Sequence
  Description of Artificial Sequence: Synthetic oligonucleotide
  Antisense strand to SEQ ID NO: 132868
aagaccauucaauacauug

SEQ ID NO: 132870 - RNA, 19 nt, Artificial Sequence
  Description of Artificial Sequence: Synthetic oligonucleotide
  Sense strand starting at position 2783 of SEQ ID NO: 1706
agucgucccuaggaaauca

SEQ ID NO: 132871 - RNA, 19 nt, Artificial Sequence
  Description of Artificial Sequence: Synthetic oligonucleotide
  Antisense strand to SEQ ID NO: 132870
ugauuuccuagggacgacu

SEQ ID NO: 132872 - RNA, 19 nt, Artificial Sequence
  Description of Artificial Sequence: Synthetic oligonucleotide
  Sense strand starting at position 2780 of SEQ ID NO: 1706
aggagucgucccuaggaaa

SEQ ID NO: 132873 - RNA, 19 nt, Artificial Sequence
  Description of Artificial Sequence: Synthetic oligonucleotide
  Antisense strand to SEQ ID NO: 132872
uuuccuagggacgacuccu

SEQ ID NO: 132874 - RNA, 19 nt, Artificial Sequence
  Description of Artificial Sequence: Synthetic oligonucleotide
  Sense strand starting at position 2287 of SEQ ID NO: 1706
ggugguucauagcuguaau

SEQ ID NO: 132875 - RNA, 19 nt, Artificial Sequence
  Description of Artificial Sequence: Synthetic oligonucleotide
  Antisense strand to SEQ ID NO: 132874
auuacagcuaugaaccacc

SEQ ID NO: 132876 - RNA, 19 nt, Artificial Sequence
  Description of Artificial Sequence: Synthetic oligonucleotide
  Sense strand starting at position 2222 of SEQ ID NO: 1706
gcaagaaaucgacaguggu

SEQ ID NO: 132877 - RNA, 19 nt, Artificial Sequence
  Description of Artificial Sequence: Synthetic oligonucleotide
  Antisense strand to SEQ ID NO: 132876
accacugucgauuucuugc

SEQ ID NO: 132878 - RNA, 19 nt, Artificial Sequence
  Description of Artificial Sequence: Synthetic oligonucleotide
  Sense strand starting at position 2163 of SEQ ID NO: 1706
agauuaccggauugaauca

SEQ ID NO: 132879 - RNA, 19 nt, Artificial Sequence
  Description of Artificial Sequence: Synthetic oligonucleotide
  Antisense strand to SEQ ID NO: 132878
ugauucaauccgguaaucu

SEQ ID NO: 132880 - RNA, 19 nt, Artificial Sequence
  Description of Artificial Sequence: Synthetic oligonucleotide
  Sense strand starting at position 2005 of SEQ ID NO: 1706
uccugugcgucuuuagaag

SEQ ID NO: 132881 - RNA, 19 nt, Artificial Sequence
  Description of Artificial Sequence: Synthetic oligonucleotide
  Antisense strand to SEQ ID NO: 132880
cuucuaaagacgcacagga

SEQ ID NO: 132882 - RNA, 19 nt, Artificial Sequence
  Description of Artificial Sequence: Synthetic oligonucleotide
  Sense strand starting at position 2003 of SEQ ID NO: 1706
ucuccugugcgucuuuaga

SEQ ID NO: 132883 - RNA, 19 nt, Artificial Sequence
  Description of Artificial Sequence: Synthetic oligonucleotide
  Antisense strand to SEQ ID NO: 132882
ucuaaagacgcacaggaga

SEQ ID NO: 132884 - RNA, 19 nt, Artificial Sequence
  Description of Artificial Sequence: Synthetic oligonucleotide
  Sense strand starting at position 1909 of SEQ ID NO: 1706
aaauuaguggcuuaccaga

SEQ ID NO: 132885 - RNA, 19 nt, Artificial Sequence
  Description of Artificial Sequence: Synthetic oligonucleotide
  Antisense strand to SEQ ID NO: 132884
ucugguaagccacuaauuu

SEQ ID NO: 132886 - RNA, 19 nt, Artificial Sequence
  Description of Artificial Sequence: Synthetic oligonucleotide
  Sense strand starting at position 1907 of SEQ ID NO: 1706
agaaauuaguggcuuacca

SEQ ID NO: 132887 - RNA, 19 nt, Artificial Sequence
  Description of Artificial Sequence: Synthetic oligonucleotide
  Antisense strand to SEQ ID NO: 132886
ugguaagccacuaauuucu

SEQ ID NO: 132888 - RNA, 19 nt, Artificial Sequence
  Description of Artificial Sequence: Synthetic oligonucleotide
  Sense strand starting at position 1904 of SEQ ID NO: 1706
uacagaaauuaguggcuua

SEQ ID NO: 132889 - RNA, 19 nt, Artificial Sequence
  Description of Artificial Sequence: Synthetic oligonucleotide
  Antisense strand to SEQ ID NO: 132888
uaagccacuaauuucugua

SEQ ID NO: 132890 - RNA, 19 nt, Artificial Sequence
  Description of Artificial Sequence: Synthetic oligonucleotide
  Sense strand starting at position 1679 of SEQ ID NO: 1706
ggguuaaagacaugaguca

SEQ ID NO: 132891 - RNA, 19 nt, Artificial Sequence
  Description of Artificial Sequence: Synthetic oligonucleotide
  Antisense strand to SEQ ID NO: 132890
ugacucaugucuuuaaccc

SEQ ID NO: 132892 - RNA, 19 nt, Artificial Sequence
  Description of Artificial Sequence: Synthetic oligonucleotide
  Sense strand starting at position 1493 of SEQ ID NO: 1706
agguaaagguugcagugau

SEQ ID NO: 132893 - RNA, 19 nt, Artificial Sequence
  Description of Artificial Sequence: Synthetic oligonucleotide
  Antisense strand to SEQ ID NO: 132892
aucacugcaaccuuuaccu

SEQ ID NO: 132894 - RNA, 19 nt, Artificial Sequence
  Description of Artificial Sequence: Synthetic oligonucleotide
  Sense strand starting at position 1014 of SEQ ID NO: 1706
cuccauucgaguggaagaa

SEQ ID NO: 132895 - RNA, 19 nt, Artificial Sequence
  Description of Artificial Sequence: Synthetic oligonucleotide
  Antisense strand to SEQ ID NO: 132894
uucuuccacucgaauggag

SEQ ID NO: 132896 - RNA, 19 nt, Artificial Sequence
  Description of Artificial Sequence: Synthetic oligonucleotide
  Sense strand starting at position 1013 of SEQ ID NO: 1706
ucuccauucgaguggaaga

SEQ ID NO: 132897 - RNA, 19 nt, Artificial Sequence
  Description of Artificial Sequence: Synthetic oligonucleotide
  Antisense strand to SEQ ID NO: 132896
ucuuccacucgaauggaga

SEQ ID NO: 132898 - RNA, 19 nt, Artificial Sequence
  Description of Artificial Sequence: Synthetic oligonucleotide
  Sense strand starting at position 445 of SEQ ID NO: 1706
agagcuagauuugauucga

SEQ ID NO: 132899 - RNA, 19 nt, Artificial Sequence
  Description of Artificial Sequence: Synthetic oligonucleotide
  Antisense strand to SEQ ID NO: 132898
ucgaaucaaaucuagcucu

SEQ ID NO: 132900 - RNA, 19 nt, Artificial Sequence
  Description of Artificial Sequence: Synthetic oligonucleotide
  Sense strand starting at position 162 of SEQ ID NO: 1706
cgcagagguagguggauua

SEQ ID NO: 132901 - RNA, 19 nt, Artificial Sequence
  Description of Artificial Sequence: Synthetic oligonucleotide
  Antisense strand to SEQ ID NO: 132900
uaauccaccuaccucugcg

SEQ ID NO: 132902 - RNA, 19 nt, Artificial Sequence
  Description of Artificial Sequence: Synthetic oligonucleotide
  Sense strand starting at position 69 of SEQ ID NO: 1706
aaucgacaguguuagggau

SEQ ID NO: 132903 - RNA, 19 nt, Artificial Sequence
  Description of Artificial Sequence: Synthetic oligonucleotide
  Antisense strand to SEQ ID NO: 132902
aucccuaacacugucgauu

SEQ ID NO: 132904 - RNA, 19 nt, Artificial Sequence
  Description of Artificial Sequence: Synthetic oligonucleotide
  Sense strand starting at position 63 of SEQ ID NO: 1706
gcaagaaaucgacaguguu

SEQ ID NO: 132905 - RNA, 19 nt, Artificial Sequence
  Description of Artificial Sequence: Synthetic oligonucleotide
  Antisense strand to SEQ ID NO: 132904
aacacugucgauuucuugc

SEQ ID NO: 132906 - RNA, 19 nt, Artificial Sequence
  Description of Artificial Sequence: Synthetic oligonucleotide
  Sense strand starting at position 170 of SEQ ID NO: 1707
cgcagagguagguggauua

SEQ ID NO: 132907 - RNA, 19 nt, Artificial Sequence
  Description of Artificial Sequence: Synthetic oligonucleotide
  Antisense strand to SEQ ID NO: 132906
uaauccaccuaccucugcg

SEQ ID NO: 132908 - RNA, 19 nt, Artificial Sequence
  Description of Artificial Sequence: Synthetic oligonucleotide
  Sense strand starting at position 458 of SEQ ID NO: 1707
agagcuagauuugauucga

SEQ ID NO: 132909 - RNA, 19 nt, Artificial Sequence
  Description of Artificial Sequence: Synthetic oligonucleotide
  Antisense strand to SEQ ID NO: 132908
ucgaaucaaaucuagcucu

SEQ ID NO: 132910 - RNA, 19 nt, Artificial Sequence
  Description of Artificial Sequence: Synthetic oligonucleotide
  Sense strand starting at position 505 of SEQ ID NO: 1707
uuggcuuucuuccagauuu

SEQ ID NO: 132911 - RNA, 19 nt, Artificial Sequence
  Description of Artificial Sequence: Synthetic oligonucleotide
  Antisense strand to SEQ ID NO: 132910
aaaucuggaagaaagccaa

SEQ ID NO: 132912 - RNA, 19 nt, Artificial Sequence
  Description of Artificial Sequence: Synthetic oligonucleotide
  Sense strand starting at position 645 of SEQ ID NO: 1707
caguccugagugugagaua

SEQ ID NO: 132913 - RNA, 19 nt, Artificial Sequence
  Description of Artificial Sequence: Synthetic oligonucleotide
  Antisense strand to SEQ ID NO: 132912
uaucucacacucaggacug

SEQ ID NO: 132914 - RNA, 19 nt, Artificial Sequence
  Description of Artificial Sequence: Synthetic oligonucleotide
  Sense strand starting at position 726 of SEQ ID NO: 1707
gagggauccucggccacau

SEQ ID NO: 132915 - RNA, 19 nt, Artificial Sequence
  Description of Artificial Sequence: Synthetic oligonucleotide
  Antisense strand to SEQ ID NO: 132914
auguggccgaggaucccuc

SEQ ID NO: 132916 - RNA, 19 nt, Artificial Sequence
  Description of Artificial Sequence: Synthetic oligonucleotide
  Sense strand starting at position 1026 of SEQ ID NO: 1707
ucuccauucgaguggaaga

SEQ ID NO: 132917 - RNA, 19 nt, Artificial Sequence
  Description of Artificial Sequence: Synthetic oligonucleotide
  Antisense strand to SEQ ID NO: 132916
ucuuccacucgaauggaga

SEQ ID NO: 132918 - RNA, 19 nt, Artificial Sequence
  Description of Artificial Sequence: Synthetic oligonucleotide
  Sense strand starting at position 1027 of SEQ ID NO: 1707
cuccauucgaguggaagaa

SEQ ID NO: 132919 - RNA, 19 nt, Artificial Sequence
  Description of Artificial Sequence: Synthetic oligonucleotide
  Antisense strand to SEQ ID NO: 132918
uucuuccacucgaauggag

SEQ ID NO: 132920 - RNA, 19 nt, Artificial Sequence
  Description of Artificial Sequence: Synthetic oligonucleotide
  Sense strand starting at position 1051 of SEQ ID NO: 1707
gugaggacgugauugguuu

SEQ ID NO: 132921 - RNA, 19 nt, Artificial Sequence
  Description of Artificial Sequence: Synthetic oligonucleotide
  Antisense strand to SEQ ID NO: 132920
aaaccaaucacguccucac

SEQ ID NO: 132922 - RNA, 19 nt, Artificial Sequence
  Description of Artificial Sequence: Synthetic oligonucleotide
  Sense strand starting at position 1052 of SEQ ID NO: 1707
ugaggacgugauugguuua

SEQ ID NO: 132923 - RNA, 19 nt, Artificial Sequence
  Description of Artificial Sequence: Synthetic oligonucleotide
  Antisense strand to SEQ ID NO: 132922
uaaaccaaucacguccuca

SEQ ID NO: 132924 - RNA, 19 nt, Artificial Sequence
  Description of Artificial Sequence: Synthetic oligonucleotide
  Sense strand starting at position 1053 of SEQ ID NO: 1707
gaggacgugauugguuuaa

SEQ ID NO: 132925 - RNA, 19 nt, Artificial Sequence
  Description of Artificial Sequence: Synthetic oligonucleotide
  Antisense strand to SEQ ID NO: 132924
uuaaaccaaucacguccuc

SEQ ID NO: 132926 - RNA, 19 nt, Artificial Sequence
  Description of Artificial Sequence: Synthetic oligonucleotide
  Sense strand starting at position 1506 of SEQ ID NO: 1707
agguaaagguugcagugau

SEQ ID NO: 132927 - RNA, 19 nt, Artificial Sequence
  Description of Artificial Sequence: Synthetic oligonucleotide
  Antisense strand to SEQ ID NO: 132926
aucacugcaaccuuuaccu

SEQ ID NO: 132928 - RNA, 19 nt, Artificial Sequence
  Description of Artificial Sequence: Synthetic oligonucleotide
  Sense strand starting at position 1692 of SEQ ID NO: 1707
ggguuaaagacaugaguca
